United States Patent Application Publication US 2005/0255487 A1 - sequence listing, part 15

SEQ ID NO: 390840 - RNA, 19 nt, Homo sapiens
  misc_RNA (1)...(19): siRNA sense strand
caagggcuucuggaauuug

SEQ ID NO: 390841 - RNA, 19 nt, Homo sapiens
  misc_RNA (1)...(19): siRNA sense strand
ccacggaccuccucacuaa

SEQ ID NO: 390842 - RNA, 19 nt, Homo sapiens
  misc_RNA (1)...(19): siRNA sense strand
ggacacuucugccaugaua

SEQ ID NO: 390843 - RNA, 19 nt, Homo sapiens
  misc_RNA (1)...(19): siRNA sense strand
gaggugagcugcccagaug

SEQ ID NO: 390844 - RNA, 19 nt, Homo sapiens
  misc_RNA (1)...(19): siRNA sense strand
guaagugccucuccaagga

SEQ ID NO: 390845 - RNA, 19 nt, Homo sapiens
  misc_RNA (1)...(19): siRNA sense strand
gcagaaggguaccugugaa

SEQ ID NO: 390846 - RNA, 19 nt, Homo sapiens
  misc_RNA (1)...(19): siRNA sense strand
ggccacuccugcaucuuua

SEQ ID NO: 390847 - RNA, 19 nt, Homo sapiens
  misc_RNA (1)...(19): siRNA sense strand
ccagagacaucggcuguga

SEQ ID NO: 390848 - RNA, 19 nt, Homo sapiens
  misc_RNA (1)...(19): siRNA sense strand
ggacaaauggcccacaaca

SEQ ID NO: 390849 - RNA, 19 nt, Homo sapiens
  misc_RNA (1)...(19): siRNA sense strand
gggcgauccugcuuccaaa

SEQ ID NO: 390850 - RNA, 19 nt, Homo sapiens
  misc_RNA (1)...(19): siRNA sense strand
gauaccugcugccaacuca

SEQ ID NO: 390851 - RNA, 19 nt, Homo sapiens
  misc_RNA (1)...(19): siRNA sense strand
ccaaagaucagguaacaac

SEQ ID NO: 390852 - RNA, 19 nt, Homo sapiens
  misc_RNA (1)...(19): siRNA sense strand
gaccugauccagaguaagu

SEQ ID NO: 390853 - RNA, 19 nt, Homo sapiens
  misc_RNA (1)...(19): siRNA sense strand
guucacacccgcugcauca

SEQ ID NO: 390854 - RNA, 19 nt, Homo sapiens
  misc_RNA (1)...(19): siRNA sense strand
uggcuggacuggagaagau

SEQ ID NO: 390855 - RNA, 19 nt, Homo sapiens
  misc_RNA (1)...(19): siRNA sense strand
gugcccagauggucaguuc

SEQ ID NO: 390856 - RNA, 19 nt, Homo sapiens
  misc_RNA (1)...(19): siRNA sense strand
gagcugcccagauggcuau

SEQ ID NO: 390857 - RNA, 19 nt, Homo sapiens
  misc_RNA (1)...(19): siRNA sense strand
ucucagggacuuccaguug

SEQ ID NO: 390858 - RNA, 19 nt, Homo sapiens
  misc_RNA (1)...(19): siRNA sense strand
gugaccugauccagaguaa

SEQ ID NO: 390859 - RNA, 19 nt, Homo sapiens
  misc_RNA (1)...(19): siRNA sense strand
acaaauggcccacaacacu

SEQ ID NO: 390860 - RNA, 19 nt, Homo sapiens
  misc_RNA (1)...(19): siRNA sense strand
gggcgucuguugugcugau

SEQ ID NO: 390861 - RNA, 19 nt, Homo sapiens
  misc_RNA (1)...(19): siRNA sense strand
gcgauccugcuuccaaaga

SEQ ID NO: 390862 - RNA, 19 nt, Homo sapiens
  misc_RNA (1)...(19): siRNA sense strand
gagggacccagccuugaga

SEQ ID NO: 390863 - RNA, 19 nt, Homo sapiens
  misc_RNA (1)...(19): siRNA sense strand
agagagauguccccuguga

SEQ ID NO: 390864 - RNA, 19 nt, Homo sapiens
  misc_RNA (1)...(19): siRNA sense strand
uuccaaagaucagguaaca

SEQ ID NO: 390865 - RNA, 19 nt, Homo sapiens
  misc_RNA (1)...(19): siRNA sense strand
cggccacuccugcaucuuu

SEQ ID NO: 390866 - RNA, 19 nt, Homo sapiens
  misc_RNA (1)...(19): siRNA sense strand
gagcuggguggccuuaaca

SEQ ID NO: 390867 - RNA, 19 nt, Homo sapiens
  misc_RNA (1)...(19): siRNA sense strand
ggaggugagcugcccagau

SEQ ID NO: 390868 - RNA, 19 nt, Homo sapiens
  misc_RNA (1)...(19): siRNA sense strand
aaauggcccacaacacuga

SEQ ID NO: 390869 - RNA, 19 nt, Homo sapiens
  misc_RNA (1)...(19): siRNA sense strand
cgauccugcuuccaaagau

SEQ ID NO: 390870 - RNA, 19 nt, Homo sapiens
  misc_RNA (1)...(19): siRNA sense strand
agagauguccccugugaua

SEQ ID NO: 390871 - RNA, 19 nt, Homo sapiens
  misc_RNA (1)...(19): siRNA sense strand
cgcagaaggguaccuguga

SEQ ID NO: 390872 - RNA, 19 nt, Homo sapiens
  misc_RNA (1)...(19): siRNA sense strand
uaagcugccugcgcacaca

SEQ ID NO: 390873 - RNA, 19 nt, Homo sapiens
  misc_RNA (1)...(19): siRNA sense strand
ggugagcuggguggccuua

SEQ ID NO: 390874 - RNA, 19 nt, Homo sapiens
  misc_RNA (1)...(19): siRNA sense strand
ggacggaacuucugaaaca

SEQ ID NO: 390875 - RNA, 19 nt, Homo sapiens
  misc_RNA (1)...(19): siRNA sense strand
gaaccucuauucaagugua

SEQ ID NO: 390876 - RNA, 19 nt, Homo sapiens
  misc_RNA (1)...(19): siRNA sense strand
gaaacaagggcaaggcuua

SEQ ID NO: 390877 - RNA, 19 nt, Homo sapiens
  misc_RNA (1)...(19): siRNA sense strand
ggaagaaccuauacaacug

SEQ ID NO: 390878 - RNA, 19 nt, Homo sapiens
  misc_RNA (1)...(19): siRNA sense strand
gggcaaggcuuaucuuugu

SEQ ID NO: 390879 - RNA, 19 nt, Homo sapiens
  misc_RNA (1)...(19): siRNA sense strand
guaagaagaccuuuaagaa

SEQ ID NO: 390880 - RNA, 19 nt, Homo sapiens
  misc_RNA (1)...(19): siRNA sense strand
ggagagaccauuuguuugu

SEQ ID NO: 390881 - RNA, 19 nt, Homo sapiens
  misc_RNA (1)...(19): siRNA sense strand
gaauaccaaugaaccucua

SEQ ID NO: 390882 - RNA, 19 nt, Homo sapiens
  misc_RNA (1)...(19): siRNA sense strand
aaaugaagcucaaagucaa

SEQ ID NO: 390883 - RNA, 19 nt, Homo sapiens
  misc_RNA (1)...(19): siRNA sense strand
ccauaaagaggaaauacua

SEQ ID NO: 390884 - RNA, 19 nt, Homo sapiens
  misc_RNA (1)...(19): siRNA sense strand
gcaaugaaacaaagucuca

SEQ ID NO: 390885 - RNA, 19 nt, Homo sapiens
  misc_RNA (1)...(19): siRNA sense strand
gagagaaacccauaaagag

SEQ ID NO: 390886 - RNA, 19 nt, Homo sapiens
  misc_RNA (1)...(19): siRNA sense strand
agagaaggcuguggaagaa

SEQ ID NO: 390887 - RNA, 19 nt, Homo sapiens
  misc_RNA (1)...(19): siRNA sense strand
gaacuucugaaacauguga

SEQ ID NO: 390888 - RNA, 19 nt, Homo sapiens
  misc_RNA (1)...(19): siRNA sense strand
aagauuaccuuaagcaaca

SEQ ID NO: 390889 - RNA, 19 nt, Homo sapiens
  misc_RNA (1)...(19): siRNA sense strand
aagaagaccuuuaagaaac

SEQ ID NO: 390890 - RNA, 19 nt, Homo sapiens
  misc_RNA (1)...(19): siRNA sense strand
gagaaaagccguuuguuug

SEQ ID NO: 390891 - RNA, 19 nt, Homo sapiens
  misc_RNA (1)...(19): siRNA sense strand
ugagagaaacccauaaaga

SEQ ID NO: 390892 - RNA, 19 nt, Homo sapiens
  misc_RNA (1)...(19): siRNA sense strand
caucugagccgccacauuc

SEQ ID NO: 390893 - RNA, 19 nt, Homo sapiens
  misc_RNA (1)...(19): siRNA sense strand
aagaugcucucgacaguug

SEQ ID NO: 390894 - RNA, 19 nt, Homo sapiens
  misc_RNA (1)...(19): siRNA sense strand
aagaggaaauacuauguga

SEQ ID NO: 390895 - RNA, 19 nt, Homo sapiens
  misc_RNA (1)...(19): siRNA sense strand
gcaaagauuaccuuaagca

SEQ ID NO: 390896 - RNA, 19 nt, Homo sapiens
  misc_RNA (1)...(19): siRNA sense strand
guaugucgcuguccaagag

SEQ ID NO: 390897 - RNA, 19 nt, Homo sapiens
  misc_RNA (1)...(19): siRNA sense strand
gaaccuauacaacuguguu

SEQ ID NO: 390898 - RNA, 19 nt, Homo sapiens
  misc_RNA (1)...(19): siRNA sense strand
ggagaaaagccguuuguuu

SEQ ID NO: 390899 - RNA, 19 nt, Homo sapiens
  misc_RNA (1)...(19): siRNA sense strand
gaggaaauacuaugugaag

SEQ ID NO: 390900 - RNA, 19 nt, Homo sapiens
  misc_RNA (1)...(19): siRNA sense strand
acgcaaagauuaccuuaag

SEQ ID NO: 390901 - RNA, 19 nt, Homo sapiens
  misc_RNA (1)...(19): siRNA sense strand
gagagucacccaacugugu

SEQ ID NO: 390902 - RNA, 19 nt, Homo sapiens
  misc_RNA (1)...(19): siRNA sense strand
ccacgagggcuauguaugu

SEQ ID NO: 390903 - RNA, 19 nt, Homo sapiens
  misc_RNA (1)...(19): siRNA sense strand
ccucucaucucaguggaua

SEQ ID NO: 390904 - RNA, 19 nt, Homo sapiens
  misc_RNA (1)...(19): siRNA sense strand
gaagaaccuauacaacugu

SEQ ID NO: 390905 - RNA, 19 nt, Homo sapiens
  misc_RNA (1)...(19): siRNA sense strand
uacaugauccugacaagaa

SEQ ID NO: 390906 - RNA, 19 nt, Homo sapiens
  misc_RNA (1)...(19): siRNA sense strand
gaccauuuguuugugacua

SEQ ID NO: 390907 - RNA, 19 nt, Homo sapiens
  misc_RNA (1)...(19): siRNA sense strand
gagagaccauuuguuugug

SEQ ID NO: 390908 - RNA, 19 nt, Homo sapiens
  misc_RNA (1)...(19): siRNA sense strand
uuugaagacuguaagaaga

SEQ ID NO: 390909 - RNA, 19 nt, Homo sapiens
  misc_RNA (1)...(19): siRNA sense strand
acaagaugcucucgacagu

SEQ ID NO: 390910 - RNA, 19 nt, Homo sapiens
  misc_RNA (1)...(19): siRNA sense strand
ccuauacaacuguguuuaa

SEQ ID NO: 390911 - RNA, 19 nt, Homo sapiens
  misc_RNA (1)...(19): siRNA sense strand
aaacgcaaagauuaccuua

SEQ ID NO: 390912 - RNA, 19 nt, Homo sapiens
  misc_RNA (1)...(19): siRNA sense strand
agaagaccuuuaagaaaca

SEQ ID NO: 390913 - RNA, 19 nt, Homo sapiens
  misc_RNA (1)...(19): siRNA sense strand
ggaaggaugugggaaacac

SEQ ID NO: 390914 - RNA, 19 nt, Homo sapiens
  misc_RNA (1)...(19): siRNA sense strand
ccaacuguguggaagacaa

SEQ ID NO: 390915 - RNA, 19 nt, Homo sapiens
  misc_RNA (1)...(19): siRNA sense strand
gaaaagccguuuguuugug

SEQ ID NO: 390916 - RNA, 19 nt, Homo sapiens
  misc_RNA (1)...(19): siRNA sense strand
agaaacccauaaagaggaa

SEQ ID NO: 390917 - RNA, 19 nt, Homo sapiens
  misc_RNA (1)...(19): siRNA sense strand
agagaccauuuguuuguga

SEQ ID NO: 390918 - RNA, 19 nt, Homo sapiens
  misc_RNA (1)...(19): siRNA sense strand
uguaagaagaccuuuaaga

SEQ ID NO: 390919 - RNA, 19 nt, Homo sapiens
  misc_RNA (1)...(19): siRNA sense strand
cagcgccaauuacagcaaa

SEQ ID NO: 390920 - RNA, 19 nt, Homo sapiens
  misc_RNA (1)...(19): siRNA sense strand
ccaggaaggaugugggaaa

SEQ ID NO: 390921 - RNA, 19 nt, Homo sapiens
  misc_RNA (1)...(19): siRNA sense strand
ggggagagaccauuuguuu

SEQ ID NO: 390922 - RNA, 19 nt, Homo sapiens
  misc_RNA (1)...(19): siRNA sense strand
cacuaggcaugcuguugua

SEQ ID NO: 390923 - RNA, 19 nt, Homo sapiens
  misc_RNA (1)...(19): siRNA sense strand
gaaaacucaugccccagaa

SEQ ID NO: 390924 - RNA, 19 nt, Homo sapiens
  misc_RNA (1)...(19): siRNA sense strand
caaagauuaccuuaagcaa

SEQ ID NO: 390925 - RNA, 19 nt, Homo sapiens
  misc_RNA (1)...(19): siRNA sense strand
cgagggcuauguaugucaa

SEQ ID NO: 390926 - RNA, 19 nt, Homo sapiens
  misc_RNA (1)...(19): siRNA sense strand
gggagagaccauuuguuug

SEQ ID NO: 390927 - RNA, 19 nt, Homo sapiens
  misc_RNA (1)...(19): siRNA sense strand
cggaacuucugaaacaugu

SEQ ID NO: 390928 - RNA, 19 nt, Homo sapiens
  misc_RNA (1)...(19): siRNA sense strand
ucugaaacaugugagagaa

SEQ ID NO: 390929 - RNA, 19 nt, Homo sapiens
  misc_RNA (1)...(19): siRNA sense strand
gcucucgacaguugcagua

SEQ ID NO: 390930 - RNA, 19 nt, Homo sapiens
  misc_RNA (1)...(19): siRNA sense strand
gcaaggcuuaucuuugugu

SEQ ID NO: 390931 - RNA, 19 nt, Homo sapiens
  misc_RNA (1)...(19): siRNA sense strand
aagagaaggcuguggaaga

SEQ ID NO: 390932 - RNA, 19 nt, Homo sapiens
  misc_RNA (1)...(19): siRNA sense strand
caugugagagaaacccaua

SEQ ID NO: 390933 - RNA, 19 nt, Homo sapiens
  misc_RNA (1)...(19): siRNA sense strand
aaacauggacggaacuucu

SEQ ID NO: 390934 - RNA, 19 nt, Homo sapiens
  misc_RNA (1)...(19): siRNA sense strand
ugaaacaaagucucacuag

SEQ ID NO: 390935 - RNA, 19 nt, Homo sapiens
  misc_RNA (1)...(19): siRNA sense strand
auccaucagugccagaaua

SEQ ID NO: 390936 - RNA, 19 nt, Homo sapiens
  misc_RNA (1)...(19): siRNA sense strand
ugaaacaugugagagaaac

SEQ ID NO: 390937 - RNA, 19 nt, Homo sapiens
  misc_RNA (1)...(19): siRNA sense strand
ucacuaggcaugcuguugu

SEQ ID NO: 390938 - RNA, 19 nt, Homo sapiens
  misc_RNA (1)...(19): siRNA sense strand
caacacaaaaucaaacuug

SEQ ID NO: 390939 - RNA, 19 nt, Homo sapiens
  misc_RNA (1)...(19): siRNA sense strand
ucucaucucaguggauaua

SEQ ID NO: 390940 - RNA, 19 nt, Homo sapiens
  misc_RNA (1)...(19): siRNA sense strand
guacaugauccugacaaga

SEQ ID NO: 390941 - RNA, 19 nt, Homo sapiens
  misc_RNA (1)...(19): siRNA sense strand
uuuaaucuccaaagccaua

SEQ ID NO: 390942 - RNA, 19 nt, Homo sapiens
  misc_RNA (1)...(19): siRNA sense strand
acuguaagaagaccuuuaa

SEQ ID NO: 390943 - RNA, 19 nt, Homo sapiens
  misc_RNA (1)...(19): siRNA sense strand
aaagccauauccucuccuu

SEQ ID NO: 390944 - RNA, 19 nt, Homo sapiens
  misc_RNA (1)...(19): siRNA sense strand
gaaaaugaagcucaaaguc

SEQ ID NO: 390945 - RNA, 19 nt, Homo sapiens
  misc_RNA (1)...(19): siRNA sense strand
gacuguaagaagaccuuua

SEQ ID NO: 390946 - RNA, 19 nt, Homo sapiens
  misc_RNA (1)...(19): siRNA sense strand
uggaagaaccuauacaacu

SEQ ID NO: 390947 - RNA, 19 nt, Homo sapiens
  misc_RNA (1)...(19): siRNA sense strand
gagucggugucguccuuga

SEQ ID NO: 390948 - RNA, 19 nt, Homo sapiens
  misc_RNA (1)...(19): siRNA sense strand
gggaaacacuuugcaucac

SEQ ID NO: 390949 - RNA, 19 nt, Homo sapiens
  misc_RNA (1)...(19): siRNA sense strand
ccaagagaaggcuguggaa

SEQ ID NO: 390950 - RNA, 19 nt, Homo sapiens
  misc_RNA (1)...(19): siRNA sense strand
caucagggacuaccaucug

SEQ ID NO: 390951 - RNA, 19 nt, Homo sapiens
  misc_RNA (1)...(19): siRNA sense strand
ggaguuuggccucucaucu

SEQ ID NO: 390952 - RNA, 19 nt, Homo sapiens
  misc_RNA (1)...(19): siRNA sense strand
gugccagaauaccaaugaa

SEQ ID NO: 390953 - RNA, 19 nt, Homo sapiens
  misc_RNA (1)...(19): siRNA sense strand
aggcuuaucuuugugucaa

SEQ ID NO: 390954 - RNA, 19 nt, Homo sapiens
  misc_RNA (1)...(19): siRNA sense strand
ggcaaggcuuaucuuugug

SEQ ID NO: 390955 - RNA, 19 nt, Homo sapiens
  misc_RNA (1)...(19): siRNA sense strand
aaagaggaaauacuaugug

SEQ ID NO: 390956 - RNA, 19 nt, Homo sapiens
  misc_RNA (1)...(19): siRNA sense strand
ggaugugggaaacacuuug

SEQ ID NO: 390957 - RNA, 19 nt, Homo sapiens
  misc_RNA (1)...(19): siRNA sense strand
aaacaagggcaaggcuuau

SEQ ID NO: 390958 - RNA, 19 nt, Homo sapiens
  misc_RNA (1)...(19): siRNA sense strand
uaccuuaagcaacacauga

SEQ ID NO: 390959 - RNA, 19 nt, Homo sapiens
  misc_RNA (1)...(19): siRNA sense strand
ugugagagaaacccauaaa

SEQ ID NO: 390960 - RNA, 19 nt, Homo sapiens
  misc_RNA (1)...(19): siRNA sense strand
ugggaaacacuuugcauca

SEQ ID NO: 390961 - RNA, 19 nt, Homo sapiens
  misc_RNA (1)...(19): siRNA sense strand
gauauauccucccaaaagg

SEQ ID NO: 390962 - RNA, 19 nt, Homo sapiens
  misc_RNA (1)...(19): siRNA sense strand
gacggaacuucugaaacau

SEQ ID NO: 390963 - RNA, 19 nt, Homo sapiens
  misc_RNA (1)...(19): siRNA sense strand
caagaugcucucgacaguu

SEQ ID NO: 390964 - RNA, 19 nt, Homo sapiens
  misc_RNA (1)...(19): siRNA sense strand
gaaguaugccggaaaacau

SEQ ID NO: 390965 - RNA, 19 nt, Homo sapiens
  misc_RNA (1)...(19): siRNA sense strand
caggaaggaugugggaaac

SEQ ID NO: 390966 - RNA, 19 nt, Homo sapiens
  misc_RNA (1)...(19): siRNA sense strand
caagggcaaggcuuaucuu

SEQ ID NO: 390967 - RNA, 19 nt, Homo sapiens
  misc_RNA (1)...(19): siRNA sense strand
uaggcaugcuguuguacau

SEQ ID NO: 390968 - RNA, 19 nt, Homo sapiens
  misc_RNA (1)...(19): siRNA sense strand
uaaacgcaaagauuaccuu

SEQ ID NO: 390969 - RNA, 19 nt, Homo sapiens
  misc_RNA (1)...(19): siRNA sense strand
caaguguacccaggaagga

SEQ ID NO: 390970 - RNA, 19 nt, Homo sapiens
  misc_RNA (1)...(19): siRNA sense strand
gaguuuggccucucaucuc

SEQ ID NO: 390971 - RNA, 19 nt, Homo sapiens
  misc_RNA (1)...(19): siRNA sense strand
aaaaugaagcucaaaguca

SEQ ID NO: 390972 - RNA, 19 nt, Homo sapiens
  misc_RNA (1)...(19): siRNA sense strand
uguggaagaaccuauacaa

SEQ ID NO: 390973 - RNA, 19 nt, Homo sapiens
  misc_RNA (1)...(19): siRNA sense strand
gaagugauguguuuaaaug

SEQ ID NO: 390974 - RNA, 19 nt, Homo sapiens
  misc_RNA (1)...(19): siRNA sense strand
cgaauaacauguagaaaug

SEQ ID NO: 390975 - RNA, 19 nt, Homo sapiens
  misc_RNA (1)...(19): siRNA sense strand
cgagacagaugaguaaaua

SEQ ID NO: 390976 - RNA, 19 nt, Homo sapiens
  misc_RNA (1)...(19): siRNA sense strand
gagaguacguuaucaaugu

SEQ ID NO: 390977 - RNA, 19 nt, Homo sapiens
  misc_RNA (1)...(19): siRNA sense strand
gaagaagugauguguuuaa

SEQ ID NO: 390978 - RNA, 19 nt, Homo sapiens
  misc_RNA (1)...(19): siRNA sense strand
ccaaacagaagcuuuauuu

SEQ ID NO: 390979 - RNA, 19 nt, Homo sapiens
  misc_RNA (1)...(19): siRNA sense strand
ugaaucagcugaauuugug

SEQ ID NO: 390980 - RNA, 19 nt, Homo sapiens
  misc_RNA (1)...(19): siRNA sense strand
cagcugaauuuguguguaa

SEQ ID NO: 390981 - RNA, 19 nt, Homo sapiens
  misc_RNA (1)...(19): siRNA sense strand
ucacggauauccucuguug

SEQ ID NO: 390982 - RNA, 19 nt, Homo sapiens
  misc_RNA (1)...(19): siRNA sense strand
ggugauacugugcaaauua

SEQ ID NO: 390983 - RNA, 19 nt, Homo sapiens
  misc_RNA (1)...(19): siRNA sense strand
uguaauaucccgagaaauu

SEQ ID NO: 390984 - RNA, 19 nt, Homo sapiens
  misc_RNA (1)...(19): siRNA sense strand
uaggagcccuuaugaaaug

SEQ ID NO: 390985 - RNA, 19 nt, Homo sapiens
  misc_RNA (1)...(19): siRNA sense strand
gcgaauaacauguagaaau

SEQ ID NO: 390986 - RNA, 19 nt, Homo sapiens
  misc_RNA (1)...(19): siRNA sense strand
gaggguaacaagcgaauaa

SEQ ID NO: 390987 - RNA, 19 nt, Homo sapiens
  misc_RNA (1)...(19): siRNA sense strand
gaagcaacauuuugugauu

SEQ ID NO: 390988 - RNA, 19 nt, Homo sapiens
  misc_RNA (1)...(19): siRNA sense strand
ccaccucaaugcaaagauu

SEQ ID NO: 390989 - RNA, 19 nt, Homo sapiens
  misc_RNA (1)...(19): siRNA sense strand
caggggaaguuuucuauua

SEQ ID NO: 390990 - RNA, 19 nt, Homo sapiens
  misc_RNA (1)...(19): siRNA sense strand
augaagaagugauguguuu

SEQ ID NO: 390991 - RNA, 19 nt, Homo sapiens
  misc_RNA (1)...(19): siRNA sense strand
gugauacugugcaaauuau

SEQ ID NO: 390992 - RNA, 19 nt, Homo sapiens
  misc_RNA (1)...(19): siRNA sense strand
ggaaggugauacugugcaa

SEQ ID NO: 390993 - RNA, 19 nt, Homo sapiens
  misc_RNA (1)...(19): siRNA sense strand
uguaggagcccuuaugaaa

SEQ ID NO: 390994 - RNA, 19 nt, Homo sapiens
  misc_RNA (1)...(19): siRNA sense strand
caacacaggauacagacuu

SEQ ID NO: 390995 - RNA, 19 nt, Homo sapiens
  misc_RNA (1)...(19): siRNA sense strand
cagccaaacagaagcuuua

SEQ ID NO: 390996 - RNA, 19 nt, Homo sapiens
  misc_RNA (1)...(19): siRNA sense strand
guaacaagcgaauaacaug

SEQ ID NO: 390997 - RNA, 19 nt, Homo sapiens
  misc_RNA (1)...(19): siRNA sense strand
gagcccuuaugaaauguuu

SEQ ID NO: 390998 - RNA, 19 nt, Homo sapiens
  misc_RNA (1)...(19): siRNA sense strand
auucuaaucucacggauau

SEQ ID NO: 390999 - RNA, 19 nt, Homo sapiens
  misc_RNA (1)...(19): siRNA sense strand
ggaauucuauaugaugaag

SEQ ID NO: 391000 - RNA, 19 nt, Homo sapiens
  misc_RNA (1)...(19): siRNA sense strand
uguguaauaucccgagaaa

SEQ ID NO: 391001 - RNA, 19 nt, Homo sapiens
  misc_RNA (1)...(19): siRNA sense strand
aacagaagcuuuauuugag

SEQ ID NO: 391002 - RNA, 19 nt, Homo sapiens
  misc_RNA (1)...(19): siRNA sense strand
cagaagcuuuauuugagaa

SEQ ID NO: 391003 - RNA, 19 nt, Homo sapiens
  misc_RNA (1)...(19): siRNA sense strand
gagagaguacguuaucaau

SEQ ID NO: 391004 - RNA, 19 nt, Homo sapiens
  misc_RNA (1)...(19): siRNA sense strand
acagaagcuuuauuugaga

SEQ ID NO: 391005 - RNA, 19 nt, Homo sapiens
  misc_RNA (1)...(19): siRNA sense strand
agaguacguuaucaaugua

SEQ ID NO: 391006 - RNA, 19 nt, Homo sapiens
  misc_RNA (1)...(19): siRNA sense strand
guaggagcccuuaugaaau

SEQ ID NO: 391007 - RNA, 19 nt, Homo sapiens
  misc_RNA (1)...(19): siRNA sense strand
ccaaaugcagguccacuga

SEQ ID NO: 391008 - RNA, 19 nt, Homo sapiens
  misc_RNA (1)...(19): siRNA sense strand
ucucacacauugcgaacaa

SEQ ID NO: 391009 - RNA, 19 nt, Homo sapiens
  misc_RNA (1)...(19): siRNA sense strand
gaaauggacaauggucaga

SEQ ID NO: 391010 - RNA, 19 nt, Homo sapiens
  misc_RNA (1)...(19): siRNA sense strand
gauacagacuucaaaacaa

SEQ ID NO: 391011 - RNA, 19 nt, Homo sapiens
  misc_RNA (1)...(19): siRNA sense strand
gugauguguuuaaauggaa

SEQ ID NO: 391012 - RNA, 19 nt, Homo sapiens
  misc_RNA (1)...(19): siRNA sense strand
cauaacaugcacagaagaa

SEQ ID NO: 391013 - RNA, 19 nt, Homo sapiens
  misc_RNA (1)...(19): siRNA sense strand
accauggaauucuauauga

SEQ ID NO: 391014 - RNA, 19 nt, Homo sapiens
  misc_RNA (1)...(19): siRNA sense strand
gcuccagcuucaucaguug

SEQ ID NO: 391015 - RNA, 19 nt, Homo sapiens
  misc_RNA (1)...(19): siRNA sense strand
gacuguguuucuuuccuuu

SEQ ID NO: 391016 - RNA, 19 nt, Homo sapiens
  misc_RNA (1)...(19): siRNA sense strand
gguaacaagcgaauaacau

SEQ ID NO: 391017 - RNA, 19 nt, Homo sapiens
  misc_RNA (1)...(19): siRNA sense strand
caguguaauucuaaucuca

SEQ ID NO: 391018 - RNA, 19 nt, Homo sapiens
  misc_RNA (1)...(19): siRNA sense strand
ccauggaauucuauaugau

SEQ ID NO: 391019 - RNA, 19 nt, Homo sapiens
  misc_RNA (1)...(19): siRNA sense strand
ggugagagaguacguuauc

SEQ ID NO: 391020 - RNA, 19 nt, Homo sapiens
  misc_RNA (1)...(19): siRNA sense strand
caauguaggagcccuuaug

SEQ ID NO: 391021 - RNA, 19 nt, Homo sapiens
  misc_RNA (1)...(19): siRNA sense strand
uaucgucuuucaucacguu

SEQ ID NO: 391022 - RNA, 19 nt, Homo sapiens
  misc_RNA (1)...(19): siRNA sense strand
ccuggucaguguaauucua

SEQ ID NO: 391023 - RNA, 19 nt, Homo sapiens
  misc_RNA (1)...(19): siRNA sense strand
gaagcuuuauuugagaaca

SEQ ID NO: 391024 - RNA, 19 nt, Homo sapiens
  misc_RNA (1)...(19): siRNA sense strand
ugccagaacuuguaucaac

SEQ ID NO: 391025 - RNA, 19 nt, Homo sapiens
  misc_RNA (1)...(19): siRNA sense strand
cagaacuuguaucaacuug

SEQ ID NO: 391026 - RNA, 19 nt, Homo sapiens
  misc_RNA (1)...(19): siRNA sense strand
aaaugcagguccacugaca

SEQ ID NO: 391027 - RNA, 19 nt, Homo sapiens
  misc_RNA (1)...(19): siRNA sense strand
guaccaaugccagaacuug

SEQ ID NO: 391028 - RNA, 19 nt, Homo sapiens
  misc_RNA (1)...(19): siRNA sense strand
ugaagaagugauguguuua

SEQ ID NO: 391029 - RNA, 19 nt, Homo sapiens
  misc_RNA (1)...(19): siRNA sense strand
aaauauccaucuggugaga

SEQ ID NO: 391030 - RNA, 19 nt, Homo sapiens
  misc_RNA (1)...(19): siRNA sense strand
agacagaugaguaaauauc

SEQ ID NO: 391031 - RNA, 19 nt, Homo sapiens
  misc_RNA (1)...(19): siRNA sense strand
gaugaagaagugauguguu

SEQ ID NO: 391032 - RNA, 19 nt, Homo sapiens
  misc_RNA (1)...(19): siRNA sense strand
gugaaucagcugaauuugu

SEQ ID NO: 391033 - RNA, 19 nt, Homo sapiens
  misc_RNA (1)...(19): siRNA sense strand
uaacaagcgaauaacaugu

SEQ ID NO: 391034 - RNA, 19 nt, Homo sapiens
  misc_RNA (1)...(19): siRNA sense strand
ucucagacuguguuucuuu

SEQ ID NO: 391035 - RNA, 19 nt, Homo sapiens
  misc_RNA (1)...(19): siRNA sense strand
gggaugggaaacuggagua

SEQ ID NO: 391036 - RNA, 19 nt, Homo sapiens
  misc_RNA (1)...(19): siRNA sense strand
aacaagcgaauaacaugua

SEQ ID NO: 391037 - RNA, 19 nt, Homo sapiens
  misc_RNA (1)...(19): siRNA sense strand
aagcgaauaacauguagaa

SEQ ID NO: 391038 - RNA, 19 nt, Homo sapiens
  misc_RNA (1)...(19): siRNA sense strand
agacuguguuucuuuccuu

SEQ ID NO: 391039 - RNA, 19 nt, Homo sapiens
  misc_RNA (1)...(19): siRNA sense strand
ggaugaagaagugaugugu

SEQ ID NO: 391040 - RNA, 19 nt, Homo sapiens
  misc_RNA (1)...(19): siRNA sense strand
ugagagaguacguuaucaa

SEQ ID NO: 391041 - RNA, 19 nt, Homo sapiens
  misc_RNA (1)...(19): siRNA sense strand
acaaacacaucuggaaggu

SEQ ID NO: 391042 - RNA, 19 nt, Homo sapiens
  misc_RNA (1)...(19): siRNA sense strand
cauggaauucuauaugaug

SEQ ID NO: 391043 - RNA, 19 nt, Homo sapiens
  misc_RNA (1)...(19): siRNA sense strand
ggucagaaccaccaaaaug

SEQ ID NO: 391044 - RNA, 19 nt, Homo sapiens
  misc_RNA (1)...(19): siRNA sense strand
agugauguguuuaaaugga

SEQ ID NO: 391045 - RNA, 19 nt, Homo sapiens
  misc_RNA (1)...(19): siRNA sense strand
gccagaacuuguaucaacu

SEQ ID NO: 391046 - RNA, 19 nt, Homo sapiens
  misc_RNA (1)...(19): siRNA sense strand
aguauaugcuccagcuuca

SEQ ID NO: 391047 - RNA, 19 nt, Homo sapiens
  misc_RNA (1)...(19): siRNA sense strand
ucauucccguugucaguau

SEQ ID NO: 391048 - RNA, 19 nt, Homo sapiens
  misc_RNA (1)...(19): siRNA sense strand
ucagcugaauuugugugua

SEQ ID NO: 391049 - RNA, 19 nt, Homo sapiens
  misc_RNA (1)...(19): siRNA sense strand
uaagguggacagccaaaca

SEQ ID NO: 391050 - RNA, 19 nt, Homo sapiens
  misc_RNA (1)...(19): siRNA sense strand
gcuccuggucaguguaauu

SEQ ID NO: 391051 - RNA, 19 nt, Homo sapiens
  misc_RNA (1)...(19): siRNA sense strand
guauccaacuugugcaaaa

SEQ ID NO: 391052 - RNA, 19 nt, Homo sapiens
  misc_RNA (1)...(19): siRNA sense strand
acaagcgaauaacauguag

SEQ ID NO: 391053 - RNA, 19 nt, Homo sapiens
  misc_RNA (1)...(19): siRNA sense strand
gugagagaguacguuauca

SEQ ID NO: 391054 - RNA, 19 nt, Homo sapiens
  misc_RNA (1)...(19): siRNA sense strand
ucucacggauauccucugu

SEQ ID NO: 391055 - RNA, 19 nt, Homo sapiens
  misc_RNA (1)...(19): siRNA sense strand
acacauugcgaacaacaug

SEQ ID NO: 391056 - RNA, 19 nt, Homo sapiens
  misc_RNA (1)...(19): siRNA sense strand
caucacguucucacacauu

SEQ ID NO: 391057 - RNA, 19 nt, Homo sapiens
  misc_RNA (1)...(19): siRNA sense strand
aggugaaucagcugaauuu

SEQ ID NO: 391058 - RNA, 19 nt, Homo sapiens
  misc_RNA (1)...(19): siRNA sense strand
gaauaacauguagaaaugg

SEQ ID NO: 391059 - RNA, 19 nt, Homo sapiens
  misc_RNA (1)...(19): siRNA sense strand
ccagaacuuguaucaacuu

SEQ ID NO: 391060 - RNA, 19 nt, Homo sapiens
  misc_RNA (1)...(19): siRNA sense strand
ccaaugccagaacuuguau

SEQ ID NO: 391061 - RNA, 19 nt, Homo sapiens
  misc_RNA (1)...(19): siRNA sense strand
ggauacagacuucaaaaca

SEQ ID NO: 391062 - RNA, 19 nt, Homo sapiens
  misc_RNA (1)...(19): siRNA sense strand
gaaggugauacugugcaaa

SEQ ID NO: 391063 - RNA, 19 nt, Homo sapiens
  misc_RNA (1)...(19): siRNA sense strand
uuugagaacaggugaauca

SEQ ID NO: 391064 - RNA, 19 nt, Homo sapiens
  misc_RNA (1)...(19): siRNA sense strand
gccaaacagaagcuuuauu

SEQ ID NO: 391065 - RNA, 19 nt, Homo sapiens
  misc_RNA (1)...(19): siRNA sense strand
gguggacagccaaacagaa

SEQ ID NO: 391066 - RNA, 19 nt, Homo sapiens
  misc_RNA (1)...(19): siRNA sense strand
gagaagcaacauuuuguga

SEQ ID NO: 391067 - RNA, 19 nt, Homo sapiens
  misc_RNA (1)...(19): siRNA sense strand
aauguaggagcccuuauga

SEQ ID NO: 391068 - RNA, 19 nt, Homo sapiens
  misc_RNA (1)...(19): siRNA sense strand
gagacagaugaguaaauau

SEQ ID NO: 391069 - RNA, 19 nt, Homo sapiens
  misc_RNA (1)...(19): siRNA sense strand
cuucaucaguugaguacca

SEQ ID NO: 391070 - RNA, 19 nt, Homo sapiens
  misc_RNA (1)...(19): siRNA sense strand
cagcuucaucaguugagua

SEQ ID NO: 391071 - RNA, 19 nt, Homo sapiens
  misc_RNA (1)...(19): siRNA sense strand
ccaccaaaaugcuuacauc

SEQ ID NO: 391072 - RNA, 19 nt, Homo sapiens
  misc_RNA (1)...(19): siRNA sense strand
gaguaccaaugccagaacu

SEQ ID NO: 391073 - RNA, 19 nt, Homo sapiens
  misc_RNA (1)...(19): siRNA sense strand
cgacagcgguggucccuuu

SEQ ID NO: 391074 - RNA, 19 nt, Homo sapiens
  misc_RNA (1)...(19): siRNA sense strand
caauggcgcugacuucuau

SEQ ID NO: 391075 - RNA, 19 nt, Homo sapiens
  misc_RNA (1)...(19): siRNA sense strand
gaggagaacagcaacgaua

SEQ ID NO: 391076 - RNA, 19 nt, Homo sapiens
  misc_RNA (1)...(19): siRNA sense strand
gcaaugaugucugcaaugg

SEQ ID NO: 391077 - RNA, 19 nt, Homo sapiens
  misc_RNA (1)...(19): siRNA sense strand
gcgcugacuucuauggaaa

SEQ ID NO: 391078 - RNA, 19 nt, Homo sapiens
  misc_RNA (1)...(19): siRNA sense strand
gagaacagcaacgauauug

SEQ ID NO: 391079 - RNA, 19 nt, Homo sapiens
  misc_RNA (1)...(19): siRNA sense strand
gcaauggcgcugacuucua

SEQ ID NO: 391080 - RNA, 19 nt, Homo sapiens
  misc_RNA (1)...(19): siRNA sense strand
ggagaacagcaacgauauu

SEQ ID NO: 391081 - RNA, 19 nt, Homo sapiens
  misc_RNA (1)...(19): siRNA sense strand
gaauacauccagccugugu

SEQ ID NO: 391082 - RNA, 19 nt, Homo sapiens
  misc_RNA (1)...(19): siRNA sense strand
caagucagccuucgcuaug

SEQ ID NO: 391083 - RNA, 19 nt, Homo sapiens
  misc_RNA (1)...(19): siRNA sense strand
gcaacacgcaguacuaugg

SEQ ID NO: 391084 - RNA, 19 nt, Homo sapiens
  misc_RNA (1)...(19): siRNA sense strand
gcaagucagccuucgcuau

SEQ ID NO: 391085 - RNA, 19 nt, Homo sapiens
  misc_RNA (1)...(19): siRNA sense strand
cagcaaugaugucugcaau

SEQ ID NO: 391086 - RNA, 19 nt, Homo sapiens
  misc_RNA (1)...(19): siRNA sense strand
gcaguacuauggccaacag

SEQ ID NO: 391087 - RNA, 19 nt, Homo sapiens
  misc_RNA (1)...(19): siRNA sense strand
gaucaagcccaagauguuc

SEQ ID NO: 391088 - RNA, 19 nt, Homo sapiens
  misc_RNA (1)...(19): siRNA sense strand
ggcgcugacuucuauggaa

SEQ ID NO: 391089 - RNA, 19 nt, Homo sapiens
  misc_RNA (1)...(19): siRNA sense strand
gcucauggucuuugacaag

SEQ ID NO: 391090 - RNA, 19 nt, Homo sapiens
  misc_RNA (1)...(19): siRNA sense strand
gggcaacacgcaguacuau

SEQ ID NO: 391091 - RNA, 19 nt, Homo sapiens
  misc_RNA (1)...(19): siRNA sense strand
gcacgucgggcuucuucug

SEQ ID NO: 391092 - RNA, 19 nt, Homo sapiens
  misc_RNA (1)...(19): siRNA sense strand
gaucuuccaggccauaaag

SEQ ID NO: 391093 - RNA, 19 nt, Homo sapiens
  misc_RNA (1)...(19): siRNA sense strand
uguguggcauugugaguug

SEQ ID NO: 391094 - RNA, 19 nt, Homo sapiens
  misc_RNA (1)...(19): siRNA sense strand
guggauggcaagaucugua

SEQ ID NO: 391095 - RNA, 19 nt, Homo sapiens
  misc_RNA (1)...(19): siRNA sense strand
agaucaagcccaagauguu

SEQ ID NO: 391096 - RNA, 19 nt, Homo sapiens
  misc_RNA (1)...(19): siRNA sense strand
ugauggagcacaccucugu

SEQ ID NO: 391097 - RNA, 19 nt, Homo sapiens
  misc_RNA (1)...(19): siRNA sense strand
cagcgguggucccuuugug

SEQ ID NO: 391098 - RNA, 19 nt, Homo sapiens
  misc_RNA (1)...(19): siRNA sense strand
ccugguggauggcaagauc

SEQ ID NO: 391099 - RNA, 19 nt, Homo sapiens
  misc_RNA (1)...(19): siRNA sense strand
ccagaucaagcccaagaug

SEQ ID NO: 391100 - RNA, 19 nt, Homo sapiens
  misc_RNA (1)...(19): siRNA sense strand
cagaucaagcccaagaugu

SEQ ID NO: 391101 - RNA, 19 nt, Homo sapiens
  misc_RNA (1)...(19): siRNA sense strand
caagguggcagcucucacu

SEQ ID NO: 391102 - RNA, 19 nt, Homo sapiens
  misc_RNA (1)...(19): siRNA sense strand
ccaggcgucuacaccaaag

SEQ ID NO: 391103 - RNA, 19 nt, Homo sapiens
  misc_RNA (1)...(19): siRNA sense strand
ggugcaggcuguggucuac

SEQ ID NO: 391104 - RNA, 19 nt, Homo sapiens
  misc_RNA (1)...(19): siRNA sense strand
cgucgggcuucuucugugu

SEQ ID NO: 391105 - RNA, 19 nt, Homo sapiens
  misc_RNA (1)...(19): siRNA sense strand
ggaucuuccaggccauaaa

SEQ ID NO: 391106 - RNA, 19 nt, Homo sapiens
  misc_RNA (1)...(19): siRNA sense strand
ccagaagccaggcgucuac

SEQ ID NO: 391107 - RNA, 19 nt, Homo sapiens
  misc_RNA (1)...(19): siRNA sense strand
guggucccuuuguguguga

SEQ ID NO: 391108 - RNA, 19 nt, Homo sapiens
  misc_RNA (1)...(19): siRNA sense strand
cgacagcgguggucccuuu

SEQ ID NO: 391109 - RNA, 19 nt, Homo sapiens
  misc_RNA (1)...(19): siRNA sense strand
caauggcgcugacuucuau

SEQ ID NO: 391110 - RNA, 19 nt, Homo sapiens
  misc_RNA (1)...(19): siRNA sense strand
gaggagaacagcaacgaua

SEQ ID NO: 391111 - RNA, 19 nt, Homo sapiens
  misc_RNA (1)...(19): siRNA sense strand
gcaaugaugucugcaaugg

SEQ ID NO: 391112 - RNA, 19 nt, Homo sapiens
  misc_RNA (1)...(19): siRNA sense strand
gcgcugacuucuauggaaa

SEQ ID NO: 391113 - RNA, 19 nt, Homo sapiens
  misc_RNA (1)...(19): siRNA sense strand
gagaacagcaacgauauug

SEQ ID NO: 391114 - RNA, 19 nt, Homo sapiens
  misc_RNA (1)...(19): siRNA sense strand
gcaauggcgcugacuucua

SEQ ID NO: 391115 - RNA, 19 nt, Homo sapiens
  misc_RNA (1)...(19): siRNA sense strand
ggagaacagcaacgauauu

SEQ ID NO: 391116 - RNA, 19 nt, Homo sapiens
  misc_RNA (1)...(19): siRNA sense strand
gaauacauccagccugugu

SEQ ID NO: 391117 - RNA, 19 nt, Homo sapiens
  misc_RNA (1)...(19): siRNA sense strand
caagucagccuucgcuaug

SEQ ID NO: 391118 - RNA, 19 nt, Homo sapiens
  misc_RNA (1)...(19): siRNA sense strand
gcaacacgcaguacuaugg

SEQ ID NO: 391119 - RNA, 19 nt, Homo sapiens
  misc_RNA (1)...(19): siRNA sense strand
gcaagucagccuucgcuau

SEQ ID NO: 391120 - RNA, 19 nt, Homo sapiens
  misc_RNA (1)...(19): siRNA sense strand
cagcaaugaugucugcaau

SEQ ID NO: 391121 - RNA, 19 nt, Homo sapiens
  misc_RNA (1)...(19): siRNA sense strand
gcaguacuauggccaacag

SEQ ID NO: 391122 - RNA, 19 nt, Homo sapiens
  misc_RNA (1)...(19): siRNA sense strand
gaucaagcccaagauguuc

SEQ ID NO: 391123 - RNA, 19 nt, Homo sapiens
  misc_RNA (1)...(19): siRNA sense strand
ggcgcugacuucuauggaa

SEQ ID NO: 391124 - RNA, 19 nt, Homo sapiens
  misc_RNA (1)...(19): siRNA sense strand
gcucauggucuuugacaag

SEQ ID NO: 391125 - RNA, 19 nt, Homo sapiens
  misc_RNA (1)...(19): siRNA sense strand
gggcaacacgcaguacuau

SEQ ID NO: 391126 - RNA, 19 nt, Homo sapiens
  misc_RNA (1)...(19): siRNA sense strand
gcacgucgggcuucuucug

SEQ ID NO: 391127 - RNA, 19 nt, Homo sapiens
  misc_RNA (1)...(19): siRNA sense strand
gaucuuccaggccauaaag

SEQ ID NO: 391128 - RNA, 19 nt, Homo sapiens
  misc_RNA (1)...(19): siRNA sense strand
uguguggcauugugaguug

SEQ ID NO: 391129 - RNA, 19 nt, Homo sapiens
  misc_RNA (1)...(19): siRNA sense strand
guggauggcaagaucugua

SEQ ID NO: 391130 - RNA, 19 nt, Homo sapiens
  misc_RNA (1)...(19): siRNA sense strand
agaucaagcccaagauguu

SEQ ID NO: 391131 - RNA, 19 nt, Homo sapiens
  misc_RNA (1)...(19): siRNA sense strand
ugauggagcacaccucugu

SEQ ID NO: 391132 - RNA, 19 nt, Homo sapiens
  misc_RNA (1)...(19): siRNA sense strand
cagcgguggucccuuugug

SEQ ID NO: 391133 - RNA, 19 nt, Homo sapiens
  misc_RNA (1)...(19): siRNA sense strand
ccugguggauggcaagauc

SEQ ID NO: 391134 - RNA, 19 nt, Homo sapiens
  misc_RNA (1)...(19): siRNA sense strand
ccagaucaagcccaagaug

SEQ ID NO: 391135 - RNA, 19 nt, Homo sapiens
  misc_RNA (1)...(19): siRNA sense strand
cagaucaagcccaagaugu

SEQ ID NO: 391136 - RNA, 19 nt, Homo sapiens
  misc_RNA (1)...(19): siRNA sense strand
caagguggcagcucucacu

SEQ ID NO: 391137 - RNA, 19 nt, Homo sapiens
  misc_RNA (1)...(19): siRNA sense strand
ccaggcgucuacaccaaag

SEQ ID NO: 391138 - RNA, 19 nt, Homo sapiens
  misc_RNA (1)...(19): siRNA sense strand
ggugcaggcuguggucuac

SEQ ID NO: 391139 - RNA, 19 nt, Homo sapiens
  misc_RNA (1)...(19): siRNA sense strand
cgucgggcuucuucugugu

SEQ ID NO: 391140 - RNA, 19 nt, Homo sapiens
  misc_RNA (1)...(19): siRNA sense strand
ggaucuuccaggccauaaa

SEQ ID NO: 391141 - RNA, 19 nt, Homo sapiens
  misc_RNA (1)...(19): siRNA sense strand
ccagaagccaggcgucuac

SEQ ID NO: 391142 - RNA, 19 nt, Homo sapiens
  misc_RNA (1)...(19): siRNA sense strand
guggucccuuuguguguga

SEQ ID NO: 391143 - RNA, 19 nt, Homo sapiens
  misc_RNA (1)...(19): siRNA sense strand
uggaaaggcuggcaucuua

SEQ ID NO: 391144 - RNA, 19 nt, Homo sapiens
  misc_RNA (1)...(19): siRNA sense strand
gcccagagcucuaagaaug

SEQ ID NO: 391145 - RNA, 19 nt, Homo sapiens
  misc_RNA (1)...(19): siRNA sense strand
uuacuuaucuggccaagaa

SEQ ID NO: 391146 - RNA, 19 nt, Homo sapiens
  misc_RNA (1)...(19): siRNA sense strand
gagcugggcuucacgguau

SEQ ID NO: 391147 - RNA, 19 nt, Homo sapiens
  misc_RNA (1)...(19): siRNA sense strand
ccucauguauacuuacuua

SEQ ID NO: 391148 - RNA, 19 nt, Homo sapiens
  misc_RNA (1)...(19): siRNA sense strand
uaaaguugcuuccauccaa

SEQ ID NO: 391149 - RNA, 19 nt, Homo sapiens
  misc_RNA (1)...(19): siRNA sense strand
gaauuaaaguugcuuccau

SEQ ID NO: 391150 - RNA, 19 nt, Homo sapiens
  misc_RNA (1)...(19): siRNA sense strand
gcugaggaauugcgaagaa

SEQ ID NO: 391151 - RNA, 19 nt, Homo sapiens
  misc_RNA (1)...(19): siRNA sense strand
ggaggcuuccuaacaaaua

SEQ ID NO: 391152 - RNA, 19 nt, Homo sapiens
  misc_RNA (1)...(19): siRNA sense strand
gggaaaagcuggagaagga

SEQ ID NO: 391153 - RNA, 19 nt, Homo sapiens
  misc_RNA (1)...(19): siRNA sense strand
gccgugaacuucuuuggaa

SEQ ID NO: 391154 - RNA, 19 nt, Homo sapiens
  misc_RNA (1)...(19): siRNA sense strand
gaagagcccuuuugccuau

SEQ ID NO: 391155 - RNA, 19 nt, Homo sapiens
  misc_RNA (1)...(19): siRNA sense strand
ggaucugccuugcucacua

SEQ ID NO: 391156 - RNA, 19 nt, Homo sapiens
  misc_RNA (1)...(19): siRNA sense strand
uaagaaugccuaacuacaa

SEQ ID NO: 391157 - RNA, 19 nt, Homo sapiens
  misc_RNA (1)...(19): siRNA sense strand
gaucugccuugcucacuau

SEQ ID NO: 391158 - RNA, 19 nt, Homo sapiens
  misc_RNA (1)...(19): siRNA sense strand
cgaagccagugcagauaaa

SEQ ID NO: 391159 - RNA, 19 nt, Homo sapiens
  misc_RNA (1)...(19): siRNA sense strand
cccaggagcugaggaauug

SEQ ID NO: 391160 - RNA, 19 nt, Homo sapiens
  misc_RNA (1)...(19): siRNA sense strand
gaaaggcuggcaucuuaug

SEQ ID NO: 391161 - RNA, 19 nt, Homo sapiens
  misc_RNA (1)...(19): siRNA sense strand
ggaaaggcgcuuacuugug

SEQ ID NO: 391162 - RNA, 19 nt, Homo sapiens
  misc_RNA (1)...(19): siRNA sense strand
ucuuaugacugacuacaaa

SEQ ID NO: 391163 - RNA, 19 nt, Homo sapiens
  misc_RNA (1)...(19): siRNA sense strand
ccuggaggcuuccuaacaa

SEQ ID NO: 391164 - RNA, 19 nt, Homo sapiens
  misc_RNA (1)...(19): siRNA sense strand
gaggcuuccuaacaaauau

SEQ ID NO: 391165 - RNA, 19 nt, Homo sapiens
  misc_RNA (1)...(19): siRNA sense strand
gcucacuauuugccuauug

SEQ ID NO: 391166 - RNA, 19 nt, Homo sapiens
  misc_RNA (1)...(19): siRNA sense strand
aagggaggcuggugaaugu

SEQ ID NO: 391167 - RNA, 19 nt, Homo sapiens
  misc_RNA (1)...(19): siRNA sense strand
ccuauuggcauauaugauu

SEQ ID NO: 391168 - RNA, 19 nt, Homo sapiens
  misc_RNA (1)...(19): siRNA sense strand
accauguucucaucaguua

SEQ ID NO: 391169 - RNA, 19 nt, Homo sapiens
  misc_RNA (1)...(19): siRNA sense strand
cauccagcaugcuaucuug

SEQ ID NO: 391170 - RNA, 19 nt, Homo sapiens
  misc_RNA (1)...(19): siRNA sense strand
gcauggccgugaacuucuu

SEQ ID NO: 391171 - RNA, 19 nt, Homo sapiens
  misc_RNA (1)...(19): siRNA sense strand
ccgcugagguacaggaaga

SEQ ID NO: 391172 - RNA, 19 nt, Homo sapiens
  misc_RNA (1)...(19): siRNA sense strand
caucuuauggcucaucaaa

SEQ ID NO: 391173 - RNA, 19 nt, Homo sapiens
  misc_RNA (1)...(19): siRNA sense strand
caaccuggaggcuuccuaa

SEQ ID NO: 391174 - RNA, 19 nt, Homo sapiens
  misc_RNA (1)...(19): siRNA sense strand
gggaaaggcgcuuacuugu

SEQ ID NO: 391175 - RNA, 19 nt, Homo sapiens
  misc_RNA (1)...(19): siRNA sense strand
ggugacagguggugauugc

SEQ ID NO: 391176 - RNA, 19 nt, Homo sapiens
  misc_RNA (1)...(19): siRNA sense strand
ggccaggacuacaucuuag

SEQ ID NO: 391177 - RNA, 19 nt, Homo sapiens
  misc_RNA (1)...(19): siRNA sense strand
cggccaggacuacaucuua

SEQ ID NO: 391178 - RNA, 19 nt, Homo sapiens
  misc_RNA (1)...(19): siRNA sense strand
ggaaaggcuggcaucuuau

SEQ ID NO: 391179 - RNA, 19 nt, Homo sapiens
  misc_RNA (1)...(19): siRNA sense strand
guuaugagacuggagcuuu

SEQ ID NO: 391180 - RNA, 19 nt, Homo sapiens
  misc_RNA (1)...(19): siRNA sense strand
aagaaugccuaacuacaag

SEQ ID NO: 391181 - RNA, 19 nt, Homo sapiens
  misc_RNA (1)...(19): siRNA sense strand
gccaugcuuugugcaagua

SEQ ID NO: 391182 - RNA, 19 nt, Homo sapiens
  misc_RNA (1)...(19): siRNA sense strand
gggcugugaucaacaaugc

SEQ ID NO: 391183 - RNA, 19 nt, Homo sapiens
  misc_RNA (1)...(19): siRNA sense strand
ucacgaagccagugcagau

SEQ ID NO: 391184 - RNA, 19 nt, Homo sapiens
  misc_RNA (1)...(19): siRNA sense strand
gaaugccuaacuacaagaa

SEQ ID NO: 391185 - RNA, 19 nt, Homo sapiens
  misc_RNA (1)...(19): siRNA sense strand
ggacauccagcaugcuauc

SEQ ID NO: 391186 - RNA, 19 nt, Homo sapiens
  misc_RNA (1)...(19): siRNA sense strand
gcauauaugauuacuuugc

SEQ ID NO: 391187 - RNA, 19 nt, Homo sapiens
  misc_RNA (1)...(19): siRNA sense strand
ccaaagggaggcuggugaa

SEQ ID NO: 391188 - RNA, 19 nt, Homo sapiens
  misc_RNA (1)...(19): siRNA sense strand
gcucuaagaaugccuaacu

SEQ ID NO: 391189 - RNA, 19 nt, Homo sapiens
  misc_RNA (1)...(19): siRNA sense strand
gaccauguucucaucaguu

SEQ ID NO: 391190 - RNA, 19 nt, Homo sapiens
  misc_RNA (1)...(19): siRNA sense strand
ucuuauggcucaucaaagg

SEQ ID NO: 391191 - RNA, 19 nt, Homo sapiens
  misc_RNA (1)...(19): siRNA sense strand
gcuuccucauguauacuua

SEQ ID NO: 391192 - RNA, 19 nt, Homo sapiens
  misc_RNA (1)...(19): siRNA sense strand
gcccaggagcugaggaauu

SEQ ID NO: 391193 - RNA, 19 nt, Homo sapiens
  misc_RNA (1)...(19): siRNA sense strand
gaauuuccuccuauugauc

SEQ ID NO: 391194 - RNA, 19 nt, Homo sapiens
  misc_RNA (1)...(19): siRNA sense strand
caaaggcggcugugaccau

SEQ ID NO: 391195 - RNA, 19 nt, Homo sapiens
  misc_RNA (1)...(19): siRNA sense strand
cugccuugcucacuauuug

SEQ ID NO: 391196 - RNA, 19 nt, Homo sapiens
  misc_RNA (1)...(19): siRNA sense strand
ggccaugcuuugugcaagu

SEQ ID NO: 391197 - RNA, 19 nt, Homo sapiens
  misc_RNA (1)...(19): siRNA sense strand
agggaaaggcgcuuacuug

SEQ ID NO: 391198 - RNA, 19 nt, Homo sapiens
  misc_RNA (1)...(19): siRNA sense strand
gcaggccucugugcagucu

SEQ ID NO: 391199 - RNA, 19 nt, Homo sapiens
  misc_RNA (1)...(19): siRNA sense strand
ggaggucacaaagacguuu

SEQ ID NO: 391200 - RNA, 19 nt, Homo sapiens
  misc_RNA (1)...(19): siRNA sense strand
gauggggagcuucuucuua

SEQ ID NO: 391201 - RNA, 19 nt, Homo sapiens
  misc_RNA (1)...(19): siRNA sense strand
ugacugacuacaaacaaug

SEQ ID NO: 391202 - RNA, 19 nt, Homo sapiens
  misc_RNA (1)...(19): siRNA sense strand
uuaugagacuggagcuuuc

SEQ ID NO: 391203 - RNA, 19 nt, Homo sapiens
  misc_RNA (1)...(19): siRNA sense strand
cuaagaaugccuaacuaca

SEQ ID NO: 391204 - RNA, 19 nt, Homo sapiens
  misc_RNA (1)...(19): siRNA sense strand
cacgguauuugccggaguu

SEQ ID NO: 391205 - RNA, 19 nt, Homo sapiens
  misc_RNA (1)...(19): siRNA sense strand
cauguucucaucaguuaug

SEQ ID NO: 391206 - RNA, 19 nt, Homo sapiens
  misc_RNA (1)...(19): siRNA sense strand
aaagggaggcuggugaaug

SEQ ID NO: 391207 - RNA, 19 nt, Homo sapiens
  misc_RNA (1)...(19): siRNA sense strand
caacaaugcuggggugcuu

SEQ ID NO: 391208 - RNA, 19 nt, Homo sapiens
  misc_RNA (1)...(19): siRNA sense strand
aacaaugcauggccgugaa

SEQ ID NO: 391209 - RNA, 19 nt, Homo sapiens
  misc_RNA (1)...(19): siRNA sense strand
cuggaggcuuccuaacaaa

SEQ ID NO: 391210 - RNA, 19 nt, Homo sapiens
  misc_RNA (1)...(19): siRNA sense strand
caucuuagcacagcggaau

SEQ ID NO: 391211 - RNA, 19 nt, Homo sapiens
  misc_RNA (1)...(19): siRNA sense strand
gaaggcaguccuggugaca

SEQ ID NO: 391212 - RNA, 19 nt, Homo sapiens
  misc_RNA (1)...(19): siRNA sense strand
agaggacugugggcuguga

SEQ ID NO: 391213 - RNA, 19 nt, Homo sapiens
  misc_RNA (1)...(19): siRNA sense strand
cucuaagaaugccuaacua

SEQ ID NO: 391214 - RNA, 19 nt, Homo sapiens
  misc_RNA (1)...(19): siRNA sense strand
gcgcuuacuuguggaucug

SEQ ID NO: 391215 - RNA, 19 nt, Homo sapiens
  misc_RNA (1)...(19): siRNA sense strand
ugugggcugugaucaacaa

SEQ ID NO: 391216 - RNA, 19 nt, Homo sapiens
  misc_RNA (1)...(19): siRNA sense strand
gugaacuucuuuggaacug

SEQ ID NO: 391217 - RNA, 19 nt, Homo sapiens
  misc_RNA (1)...(19): siRNA sense strand
gcccaugcccagagcucua

SEQ ID NO: 391218 - RNA, 19 nt, Homo sapiens
  misc_RNA (1)...(19): siRNA sense strand
acgaagccagugcagauaa

SEQ ID NO: 391219 - RNA, 19 nt, Homo sapiens
  misc_RNA (1)...(19): siRNA sense strand
ugaccauguucucaucagu

SEQ ID NO: 391220 - RNA, 19 nt, Homo sapiens
  misc_RNA (1)...(19): siRNA sense strand
ggcaucuuauggcucauca

SEQ ID NO: 391221 - RNA, 19 nt, Homo sapiens
  misc_RNA (1)...(19): siRNA sense strand
gggcuuggccaugcuuugu

SEQ ID NO: 391222 - RNA, 19 nt, Homo sapiens
  misc_RNA (1)...(19): siRNA sense strand
ggacugugggcugugauca

SEQ ID NO: 391223 - RNA, 19 nt, Homo sapiens
  misc_RNA (1)...(19): siRNA sense strand
gcaguugccuacaggauua

SEQ ID NO: 391224 - RNA, 19 nt, Homo sapiens
  misc_RNA (1)...(19): siRNA sense strand
gaacacaguccaaggauuu

SEQ ID NO: 391225 - RNA, 19 nt, Homo sapiens
  misc_RNA (1)...(19): siRNA sense strand
aaucuaaccuugcauauga

SEQ ID NO: 391226 - RNA, 19 nt, Homo sapiens
  misc_RNA (1)...(19): siRNA sense strand
acaagaagcuuccugaaau

SEQ ID NO: 391227 - RNA, 19 nt, Homo sapiens
  misc_RNA (1)...(19): siRNA sense strand
ugacauauauggaggaaga

SEQ ID NO: 391228 - RNA, 19 nt, Homo sapiens
  misc_RNA (1)...(19): siRNA sense strand
caagaagcuuccugaaaug

SEQ ID NO: 391229 - RNA, 19 nt, Homo sapiens
  misc_RNA (1)...(19): siRNA sense strand
gacuaucgcuaaugaguau

SEQ ID NO: 391230 - RNA, 19 nt, Homo sapiens
  misc_RNA (1)...(19): siRNA sense strand
gacaagaagcuuccugaaa

SEQ ID NO: 391231 - RNA, 19 nt, Homo sapiens
  misc_RNA (1)...(19): siRNA sense strand
aaagccagguaauuucuaa

SEQ ID NO: 391232 - RNA, 19 nt, Homo sapiens
  misc_RNA (1)...(19): siRNA sense strand
ccuacaggauuaacaggua

SEQ ID NO: 391233 - RNA, 19 nt, Homo sapiens
  misc_RNA (1)...(19): siRNA sense strand
gcaucgagacuaucgcuaa

SEQ ID NO: 391234 - RNA, 19 nt, Homo sapiens
  misc_RNA (1)...(19): siRNA sense strand
gguaauuucuaaugcaaag

SEQ ID NO: 391235 - RNA, 19 nt, Homo sapiens
  misc_RNA (1)...(19): siRNA sense strand
uaagaaucguucaauugga

SEQ ID NO: 391236 - RNA, 19 nt, Homo sapiens
  misc_RNA (1)...(19): siRNA sense strand
ucgagacuaucgcuaauga

SEQ ID NO: 391237 - RNA, 19 nt, Homo sapiens
  misc_RNA (1)...(19): siRNA sense strand
ccuaagaaucguucaauug

SEQ ID NO: 391238 - RNA, 19 nt, Homo sapiens
  misc_RNA (1)...(19): siRNA sense strand
agcauucucugauccauuu

SEQ ID NO: 391239 - RNA, 19 nt, Homo sapiens
  misc_RNA (1)...(19): siRNA sense strand
gcuaaaagccagguaauuu

SEQ ID NO: 391240 - RNA, 19 nt, Homo sapiens
  misc_RNA (1)...(19): siRNA sense strand
cagguaauuucuaaugcaa

SEQ ID NO: 391241 - RNA, 19 nt, Homo sapiens
  misc_RNA (1)...(19): siRNA sense strand
ccagguaauuucuaaugca

SEQ ID NO: 391242 - RNA, 19 nt, Homo sapiens
  misc_RNA (1)...(19): siRNA sense strand
gcauagaccugggcuucca

SEQ ID NO: 391243 - RNA, 19 nt, Homo sapiens
  misc_RNA (1)...(19): siRNA sense strand
caucgagacuaucgcuaau

SEQ ID NO: 391244 - RNA, 19 nt, Homo sapiens
  misc_RNA (1)...(19): siRNA sense strand
aaagaacacaguccaagga

SEQ ID NO: 391245 - RNA, 19 nt, Homo sapiens
  misc_RNA (1)...(19): siRNA sense strand
gagacuaucgcuaaugagu

SEQ ID NO: 391246 - RNA, 19 nt, Homo sapiens
  misc_RNA (1)...(19): siRNA sense strand
cuacaggauuaacagguau

SEQ ID NO: 391247 - RNA, 19 nt, Homo sapiens
  misc_RNA (1)...(19): siRNA sense strand
agaacacaguccaaggauu

SEQ ID NO: 391248 - RNA, 19 nt, Homo sapiens
  misc_RNA (1)...(19): siRNA sense strand
cuaagaaucguucaauugg

SEQ ID NO: 391249 - RNA, 19 nt, Homo sapiens
  misc_RNA (1)...(19): siRNA sense strand
ggugacauauauggaggaa

SEQ ID NO: 391250 - RNA, 19 nt, Homo sapiens
  misc_RNA (1)...(19): siRNA sense strand
gagcauucucugauccauu

SEQ ID NO: 391251 - RNA, 19 nt, Homo sapiens
  misc_RNA (1)...(19): siRNA sense strand
ggauuaacagguauaaagg

SEQ ID NO: 391252 - RNA, 19 nt, Homo sapiens
  misc_RNA (1)...(19): siRNA sense strand
gaauggaccaguggaugga

SEQ ID NO: 391253 - RNA, 19 nt, Homo sapiens
  misc_RNA (1)...(19): siRNA sense strand
ggccgagcauucucugauc

SEQ ID NO: 391254 - RNA, 19 nt, Homo sapiens
  misc_RNA (1)...(19): siRNA sense strand
agacuaucgcuaaugagua

SEQ ID NO: 391255 - RNA, 19 nt, Homo sapiens
  misc_RNA (1)...(19): siRNA sense strand
cagcugugccuucggauuc

SEQ ID NO: 391256 - RNA, 19 nt, Homo sapiens
  misc_RNA (1)...(19): siRNA sense strand
uaaaggugacauauaugga

SEQ ID NO: 391257 - RNA, 19 nt, Homo sapiens
  misc_RNA (1)...(19): siRNA sense strand
gcagaauggaccaguggau

SEQ ID NO: 391258 - RNA, 19 nt, Homo sapiens
  misc_RNA (1)...(19): siRNA sense strand
ccaaggauuuaaaagauuc

SEQ ID NO: 391259 - RNA, 19 nt, Homo sapiens
  misc_RNA (1)...(19): siRNA sense strand
uccuaagaaucguucaauu

SEQ ID NO: 391260 - RNA, 19 nt, Homo sapiens
  misc_RNA (1)...(19): siRNA sense strand
caauuggagcagcagcuaa

SEQ ID NO: 391261 - RNA, 19 nt, Homo sapiens
  misc_RNA (1)...(19): siRNA sense strand
gccagguaauuucuaaugc

SEQ ID NO: 391262 - RNA, 19 nt, Homo sapiens
  misc_RNA (1)...(19): siRNA sense strand
guccaaggauuuaaaagau

SEQ ID NO: 391263 - RNA, 19 nt, Homo sapiens
  misc_RNA (1)...(19): siRNA sense strand
aggauuaacagguauaaag

SEQ ID NO: 391264 - RNA, 19 nt, Homo sapiens
  misc_RNA (1)...(19): siRNA sense strand
gauuaacagguauaaaggu

SEQ ID NO: 391265 - RNA, 19 nt, Homo sapiens
  misc_RNA (1)...(19): siRNA sense strand
accaguggauggacaagga

SEQ ID NO: 391266 - RNA, 19 nt, Homo sapiens
  misc_RNA (1)...(19): siRNA sense strand
cagguauaaaggugacaua

SEQ ID NO: 391267 - RNA, 19 nt, Homo sapiens
  misc_RNA (1)...(19): siRNA sense strand
agacaagaagcuuccugaa

SEQ ID NO: 391268 - RNA, 19 nt, Homo sapiens
  misc_RNA (1)...(19): siRNA sense strand
ucaauuggagcagcagcua

SEQ ID NO: 391269 - RNA, 19 nt, Homo sapiens
  misc_RNA (1)...(19): siRNA sense strand
cacaguccaaggauuuaaa

SEQ ID NO: 391270 - RNA, 19 nt, Homo sapiens
  misc_RNA (1)...(19): siRNA sense strand
aauuggagcagcagcuaaa

SEQ ID NO: 391271 - RNA, 19 nt, Homo sapiens
  misc_RNA (1)...(19): siRNA sense strand
gcaguugccuacaggauua

SEQ ID NO: 391272 - RNA, 19 nt, Homo sapiens
  misc_RNA (1)...(19): siRNA sense strand
gaacacaguccaaggauuu

SEQ ID NO: 391273 - RNA, 19 nt, Homo sapiens
  misc_RNA (1)...(19): siRNA sense strand
aaucuaaccuugcauauga

SEQ ID NO: 391274 - RNA, 19 nt, Homo sapiens
  misc_RNA (1)...(19): siRNA sense strand
acaagaagcuuccugaaau

SEQ ID NO: 391275 - RNA, 19 nt, Homo sapiens
  misc_RNA (1)...(19): siRNA sense strand
ugacauauauggaggaaga

SEQ ID NO: 391276 - RNA, 19 nt, Homo sapiens
  misc_RNA (1)...(19): siRNA sense strand
caagaagcuuccugaaaug

SEQ ID NO: 391277 - RNA, 19 nt, Homo sapiens
  misc_RNA (1)...(19): siRNA sense strand
gacuaucgcuaaugaguau

SEQ ID NO: 391278 - RNA, 19 nt, Homo sapiens
  misc_RNA (1)...(19): siRNA sense strand
gacaagaagcuuccugaaa

SEQ ID NO: 391279 - RNA, 19 nt, Homo sapiens
  misc_RNA (1)...(19): siRNA sense strand
aaagccagguaauuucuaa

SEQ ID NO: 391280 - RNA, 19 nt, Homo sapiens
  misc_RNA (1)...(19): siRNA sense strand
ccuacaggauuaacaggua

SEQ ID NO: 391281 - RNA, 19 nt, Homo sapiens
  misc_RNA (1)...(19): siRNA sense strand
gcaucgagacuaucgcuaa

SEQ ID NO: 391282 - RNA, 19 nt, Homo sapiens
  misc_RNA (1)...(19): siRNA sense strand
gguaauuucuaaugcaaag

SEQ ID NO: 391283 - RNA, 19 nt, Homo sapiens
  misc_RNA (1)...(19): siRNA sense strand
uaagaaucguucaauugga

SEQ ID NO: 391284 - RNA, 19 nt, Homo sapiens
  misc_RNA (1)...(19): siRNA sense strand
ucgagacuaucgcuaauga

SEQ ID NO: 391285 - RNA, 19 nt, Homo sapiens
  misc_RNA (1)...(19): siRNA sense strand
ccuaagaaucguucaauug

SEQ ID NO: 391286 - RNA, 19 nt, Homo sapiens
  misc_RNA (1)...(19): siRNA sense strand
agcauucucugauccauuu

SEQ ID NO: 391287 - RNA, 19 nt, Homo sapiens
  misc_RNA (1)...(19): siRNA sense strand
gcuaaaagccagguaauuu

SEQ ID NO: 391288 - RNA, 19 nt, Homo sapiens
  misc_RNA (1)...(19): siRNA sense strand
cagguaauuucuaaugcaa

SEQ ID NO: 391289 - RNA, 19 nt, Homo sapiens
  misc_RNA (1)...(19): siRNA sense strand
ccagguaauuucuaaugca

SEQ ID NO: 391290 - RNA, 19 nt, Homo sapiens
  misc_RNA (1)...(19): siRNA sense strand
gcauagaccugggcuucca

SEQ ID NO: 391291 - RNA, 19 nt, Homo sapiens
  misc_RNA (1)...(19): siRNA sense strand
caucgagacuaucgcuaau

SEQ ID NO: 391292 - RNA, 19 nt, Homo sapiens
  misc_RNA (1)...(19): siRNA sense strand
aaagaacacaguccaagga

SEQ ID NO: 391293 - RNA, 19 nt, Homo sapiens
  misc_RNA (1)...(19): siRNA sense strand
gagacuaucgcuaaugagu

SEQ ID NO: 391294 - RNA, 19 nt, Homo sapiens
  misc_RNA (1)...(19): siRNA sense strand
cuacaggauuaacagguau

SEQ ID NO: 391295 - RNA, 19 nt, Homo sapiens
  misc_RNA (1)...(19): siRNA sense strand
agaacacaguccaaggauu

SEQ ID NO: 391296 - RNA, 19 nt, Homo sapiens
  misc_RNA (1)...(19): siRNA sense strand
cuaagaaucguucaauugg

SEQ ID NO: 391297 - RNA, 19 nt, Homo sapiens
  misc_RNA (1)...(19): siRNA sense strand
ggugacauauauggaggaa

SEQ ID NO: 391298 - RNA, 19 nt, Homo sapiens
  misc_RNA (1)...(19): siRNA sense strand
gagcauucucugauccauu

SEQ ID NO: 391299 - RNA, 19 nt, Homo sapiens
  misc_RNA (1)...(19): siRNA sense strand
ggauuaacagguauaaagg

SEQ ID NO: 391300 - RNA, 19 nt, Homo sapiens
  misc_RNA (1)...(19): siRNA sense strand
gaauggaccaguggaugga

SEQ ID NO: 391301 - RNA, 19 nt, Homo sapiens
  misc_RNA (1)...(19): siRNA sense strand
ggccgagcauucucugauc

SEQ ID NO: 391302 - RNA, 19 nt, Homo sapiens
  misc_RNA (1)...(19): siRNA sense strand
agacuaucgcuaaugagua

SEQ ID NO: 391303 - RNA, 19 nt, Homo sapiens
  misc_RNA (1)...(19): siRNA sense strand
cagcugugccuucggauuc

SEQ ID NO: 391304 - RNA, 19 nt, Homo sapiens
  misc_RNA (1)...(19): siRNA sense strand
uaaaggugacauauaugga

SEQ ID NO: 391305 - RNA, 19 nt, Homo sapiens
  misc_RNA (1)...(19): siRNA sense strand
gcagaauggaccaguggau

SEQ ID NO: 391306 - RNA, 19 nt, Homo sapiens
  misc_RNA (1)...(19): siRNA sense strand
ccaaggauuuaaaagauuc

SEQ ID NO: 391307 - RNA, 19 nt, Homo sapiens
  misc_RNA (1)...(19): siRNA sense strand
uccuaagaaucguucaauu

SEQ ID NO: 391308 - RNA, 19 nt, Homo sapiens
  misc_RNA (1)...(19): siRNA sense strand
caauuggagcagcagcuaa

SEQ ID NO: 391309 - RNA, 19 nt, Homo sapiens
  misc_RNA (1)...(19): siRNA sense strand
gccagguaauuucuaaugc

SEQ ID NO: 391310 - RNA, 19 nt, Homo sapiens
  misc_RNA (1)...(19): siRNA sense strand
guccaaggauuuaaaagau

SEQ ID NO: 391311 - RNA, 19 nt, Homo sapiens
  misc_RNA (1)...(19): siRNA sense strand
aggauuaacagguauaaag

SEQ ID NO: 391312 - RNA, 19 nt, Homo sapiens
  misc_RNA (1)...(19): siRNA sense strand
gauuaacagguauaaaggu

SEQ ID NO: 391313 - RNA, 19 nt, Homo sapiens
  misc_RNA (1)...(19): siRNA sense strand
accaguggauggacaagga

SEQ ID NO: 391314 - RNA, 19 nt, Homo sapiens
  misc_RNA (1)...(19): siRNA sense strand
cagguauaaaggugacaua

SEQ ID NO: 391315 - RNA, 19 nt, Homo sapiens
  misc_RNA (1)...(19): siRNA sense strand
agacaagaagcuuccugaa

SEQ ID NO: 391316 - RNA, 19 nt, Homo sapiens
  misc_RNA (1)...(19): siRNA sense strand
ucaauuggagcagcagcua

SEQ ID NO: 391317 - RNA, 19 nt, Homo sapiens
  misc_RNA (1)...(19): siRNA sense strand
cacaguccaaggauuuaaa

SEQ ID NO: 391318 - RNA, 19 nt, Homo sapiens
  misc_RNA (1)...(19): siRNA sense strand
aauuggagcagcagcuaaa

SEQ ID NO: 391319 - RNA, 19 nt, Homo sapiens
  misc_RNA (1)...(19): siRNA sense strand
ggacagacaugacuuugga

SEQ ID NO: 391320 - RNA, 19 nt, Homo sapiens
  misc_RNA (1)...(19): siRNA sense strand
ggaagacacuccucugaug

SEQ ID NO: 391321 - RNA, 19 nt, Homo sapiens
  misc_RNA (1)...(19): siRNA sense strand
gagcagaaaucaugagauc

SEQ ID NO: 391322 - RNA, 19 nt, Homo sapiens
  misc_RNA (1)...(19): siRNA sense strand
acaaaggacucaucugcua

SEQ ID NO: 391323 - RNA, 19 nt, Homo sapiens
  misc_RNA (1)...(19): siRNA sense strand
caggaggacuuugaugaua

SEQ ID NO: 391324 - RNA, 19 nt, Homo sapiens
  misc_RNA (1)...(19): siRNA sense strand
cagcagaccuucaaucucu

SEQ ID NO: 391325 - RNA, 19 nt, Homo sapiens
  misc_RNA (1)...(19): siRNA sense strand
gcacaaaugggaagaaucu

SEQ ID NO: 391326 - RNA, 19 nt, Homo sapiens
  misc_RNA (1)...(19): siRNA sense strand
gaagacacuccucugauga

SEQ ID NO: 391327 - RNA, 19 nt, Homo sapiens
  misc_RNA (1)...(19): siRNA sense strand
gaaggacagacaugacuuu

SEQ ID NO: 391328 - RNA, 19 nt, Homo sapiens
  misc_RNA (1)...(19): siRNA sense strand
gcaggagguuggaguggaa

SEQ ID NO: 391329 - RNA, 19 nt, Homo sapiens
  misc_RNA (1)...(19): siRNA sense strand
ggaggacuuugaugauaau

SEQ ID NO: 391330 - RNA, 19 nt, Homo sapiens
  misc_RNA (1)...(19): siRNA sense strand
agacaugacuuuggauuuc

SEQ ID NO: 391331 - RNA, 19 nt, Homo sapiens
  misc_RNA (1)...(19): siRNA sense strand
gaagaaauacagcccuugu

SEQ ID NO: 391332 - RNA, 19 nt, Homo sapiens
  misc_RNA (1)...(19): siRNA sense strand
ugagacacuucuagacaaa

SEQ ID NO: 391333 - RNA, 19 nt, Homo sapiens
  misc_RNA (1)...(19): siRNA sense strand
agacacuucuagacaaauu

SEQ ID NO: 391334 - RNA, 19 nt, Homo sapiens
  misc_RNA (1)...(19): siRNA sense strand
gcagcugaaugaccuggaa

SEQ ID NO: 391335 - RNA, 19 nt, Homo sapiens
  misc_RNA (1)...(19): siRNA sense strand
acacuccucugaugaaugu

SEQ ID NO: 391336 - RNA, 19 nt, Homo sapiens
  misc_RNA (1)...(19): siRNA sense strand
ugaugaauguggacucuau

SEQ ID NO: 391337 - RNA, 19 nt, Homo sapiens
  misc_RNA (1)...(19): siRNA sense strand
gcaagucaaucuguucucu

SEQ ID NO: 391338 - RNA, 19 nt, Homo sapiens
  misc_RNA (1)...(19): siRNA sense strand
gaugauaauggcacaaaug

SEQ ID NO: 391339 - RNA, 19 nt, Homo sapiens
  misc_RNA (1)...(19): siRNA sense strand
gaugagacacuucuagaca

SEQ ID NO: 391340 - RNA, 19 nt, Homo sapiens
  misc_RNA (1)...(19): siRNA sense strand
aggaggacuuugaugauaa

SEQ ID NO: 391341 - RNA, 19 nt, Homo sapiens
  misc_RNA (1)...(19): siRNA sense strand
agaaucacccucuaucuga

SEQ ID NO: 391342 - RNA, 19 nt, Homo sapiens
  misc_RNA (1)...(19): siRNA sense strand
caaagaaucacccucuauc

SEQ ID NO: 391343 - RNA, 19 nt, Homo sapiens
  misc_RNA (1)...(19): siRNA sense strand
ugucagagcagaaaucaug

SEQ ID NO: 391344 - RNA, 19 nt, Homo sapiens
  misc_RNA (1)...(19): siRNA sense strand
caaauucuacacugaacuu

SEQ ID NO: 391345 - RNA, 19 nt, Homo sapiens
  misc_RNA (1)...(19): siRNA sense strand
ugggaagaaucucuccuuu

SEQ ID NO: 391346 - RNA, 19 nt, Homo sapiens
  misc_RNA (1)...(19): siRNA sense strand
gugcucaacugcaagucaa

SEQ ID NO: 391347 - RNA, 19 nt, Homo sapiens
  misc_RNA (1)...(19): siRNA sense strand
caaacuugcaagaaagauu

SEQ ID NO: 391348 - RNA, 19 nt, Homo sapiens
  misc_RNA (1)...(19): siRNA sense strand
ccuggaagccuguaugaug

SEQ ID NO: 391349 - RNA, 19 nt, Homo sapiens
  misc_RNA (1)...(19): siRNA sense strand
gaaaucaugagauccuucu

SEQ ID NO: 391350 - RNA, 19 nt, Homo sapiens
  misc_RNA (1)...(19): siRNA sense strand
ucaaagaaucacccucuau

SEQ ID NO: 391351 - RNA, 19 nt, Homo sapiens
  misc_RNA (1)...(19): siRNA sense strand
gggaugagacacuucuaga

SEQ ID NO: 391352 - RNA, 19 nt, Homo sapiens
  misc_RNA (1)...(19): siRNA sense strand
ugacagagaagaaauacag

SEQ ID NO: 391353 - RNA, 19 nt, Homo sapiens
  misc_RNA (1)...(19): siRNA sense strand
gacaaauucuacacugaac

SEQ ID NO: 391354 - RNA, 19 nt, Homo sapiens
  misc_RNA (1)...(19): siRNA sense strand
caacugcaagucaaucugu

SEQ ID NO: 391355 - RNA, 19 nt, Homo sapiens
  misc_RNA (1)...(19): siRNA sense strand
gggaagaaucucuccuuuc

SEQ ID NO: 391356 - RNA, 19 nt, Homo sapiens
  misc_RNA (1)...(19): siRNA sense strand
gauuaaggaggaaggaaug

SEQ ID NO: 391357 - RNA, 19 nt, Homo sapiens
  misc_RNA (1)...(19): siRNA sense strand
agacaaauucuacacugaa

SEQ ID NO: 391358 - RNA, 19 nt, Homo sapiens
  misc_RNA (1)...(19): siRNA sense strand
gaccuggaagccuguauga

SEQ ID NO: 391359 - RNA, 19 nt, Homo sapiens
  misc_RNA (1)...(19): siRNA sense strand
gcagaaaucaugagauccu

SEQ ID NO: 391360 - RNA, 19 nt, Homo sapiens
  misc_RNA (1)...(19): siRNA sense strand
cagacaugacuuuggauuu

SEQ ID NO: 391361 - RNA, 19 nt, Homo sapiens
  misc_RNA (1)...(19): siRNA sense strand
gacucuauccugacuguga

SEQ ID NO: 391362 - RNA, 19 nt, Homo sapiens
  misc_RNA (1)...(19): siRNA sense strand
ccaucucuguccuccauga

SEQ ID NO: 391363 - RNA, 19 nt, Homo sapiens
  misc_RNA (1)...(19): siRNA sense strand
uaacaggaggacuuugaug

SEQ ID NO: 391364 - RNA, 19 nt, Homo sapiens
  misc_RNA (1)...(19): siRNA sense strand
guggaagacacuccucuga

SEQ ID NO: 391365 - RNA, 19 nt, Homo sapiens
  misc_RNA (1)...(19): siRNA sense strand
uucaaucucuucagcacaa

SEQ ID NO: 391366 - RNA, 19 nt, Homo sapiens
  misc_RNA (1)...(19): siRNA sense strand
gagguugucagagcagaaa

SEQ ID NO: 391367 - RNA, 19 nt, Homo sapiens
  misc_RNA (1)...(19): siRNA sense strand
ggccuugcccuuuguuuua

SEQ ID NO: 391368 - RNA, 19 nt, Homo sapiens
  misc_RNA (1)...(19): siRNA sense strand
aaauacagcccuugugcau

SEQ ID NO: 391369 - RNA, 19 nt, Homo sapiens
  misc_RNA (1)...(19): siRNA sense strand
cagaaaucaugagauccuu

SEQ ID NO: 391370 - RNA, 19 nt, Homo sapiens
  misc_RNA (1)...(19): siRNA sense strand
ugaguaacaggaggacuuu

SEQ ID NO: 391371 - RNA, 19 nt, Homo sapiens
  misc_RNA (1)...(19): siRNA sense strand
augagacacuucuagacaa

SEQ ID NO: 391372 - RNA, 19 nt, Homo sapiens
  misc_RNA (1)...(19): siRNA sense strand
aacaggaggacuuugauga

SEQ ID NO: 391373 - RNA, 19 nt, Homo sapiens
  misc_RNA (1)...(19): siRNA sense strand
agacacuccucugaugaau

SEQ ID NO: 391374 - RNA, 19 nt, Homo sapiens
  misc_RNA (1)...(19): siRNA sense strand
ucuguucucugggcuguga

SEQ ID NO: 391375 - RNA, 19 nt, Homo sapiens
  misc_RNA (1)...(19): siRNA sense strand
aguaacaggaggacuuuga

SEQ ID NO: 391376 - RNA, 19 nt, Homo sapiens
  misc_RNA (1)...(19): siRNA sense strand
ugaugauaauggcacaaau

SEQ ID NO: 391377 - RNA, 19 nt, Homo sapiens
  misc_RNA (1)...(19): siRNA sense strand
guaacaggaggacuuugau

SEQ ID NO: 391378 - RNA, 19 nt, Homo sapiens
  misc_RNA (1)...(19): siRNA sense strand
uggcacaaaugggaagaau

SEQ ID NO: 391379 - RNA, 19 nt, Homo sapiens
  misc_RNA (1)...(19): siRNA sense strand
gcagaccuucaaucucuuc

SEQ ID NO: 391380 - RNA, 19 nt, Homo sapiens
  misc_RNA (1)...(19): siRNA sense strand
auucuacacugaacuuuac

SEQ ID NO: 391381 - RNA, 19 nt, Homo sapiens
  misc_RNA (1)...(19): siRNA sense strand
aagaaucacccucuaucug

SEQ ID NO: 391382 - RNA, 19 nt, Homo sapiens
  misc_RNA (1)...(19): siRNA sense strand
acagacaugacuuuggauu

SEQ ID NO: 391383 - RNA, 19 nt, Homo sapiens
  misc_RNA (1)...(19): siRNA sense strand
cagagcagaaaucaugaga

SEQ ID NO: 391384 - RNA, 19 nt, Homo sapiens
  misc_RNA (1)...(19): siRNA sense strand
uucaaagaaucacccucua

SEQ ID NO: 391385 - RNA, 19 nt, Homo sapiens
  misc_RNA (1)...(19): siRNA sense strand
aaagaaucacccucuaucu

SEQ ID NO: 391386 - RNA, 19 nt, Homo sapiens
  misc_RNA (1)...(19): siRNA sense strand
ggagguugucagagcagaa

SEQ ID NO: 391387 - RNA, 19 nt, Homo sapiens
  misc_RNA (1)...(19): siRNA sense strand
caagaaagacugagaagua

SEQ ID NO: 391388 - RNA, 19 nt, Homo sapiens
  misc_RNA (1)...(19): siRNA sense strand
gaauggaaaucaugaaauc

SEQ ID NO: 391389 - RNA, 19 nt, Homo sapiens
  misc_RNA (1)...(19): siRNA sense strand
caacaaacaugcaagaaag

SEQ ID NO: 391390 - RNA, 19 nt, Homo sapiens
  misc_RNA (1)...(19): siRNA sense strand
caugaaauccuuguucuua

SEQ ID NO: 391391 - RNA, 19 nt, Homo sapiens
  misc_RNA (1)...(19): siRNA sense strand
gaaguugucagaauggaaa

SEQ ID NO: 391392 - RNA, 19 nt, Homo sapiens
  misc_RNA (1)...(19): siRNA sense strand
aagaaagacugagaaguaa

SEQ ID NO: 391393 - RNA, 19 nt, Homo sapiens
  misc_RNA (1)...(19): siRNA sense strand
agacugagaaguaaagaua

SEQ ID NO: 391394 - RNA, 19 nt, Homo sapiens
  misc_RNA (1)...(19): siRNA sense strand
gaacaugacccuccuagac

SEQ ID NO: 391395 - RNA, 19 nt, Homo sapiens
  misc_RNA (1)...(19): siRNA sense strand
gaaagacugagaaguaaag

SEQ ID NO: 391396 - RNA, 19 nt, Homo sapiens
  misc_RNA (1)...(19): siRNA sense strand
ugaaauccuuguucuuauc

SEQ ID NO: 391397 - RNA, 19 nt, Homo sapiens
  misc_RNA (1)...(19): siRNA sense strand
ucagaaccauggccuacuu

SEQ ID NO: 391398 - RNA, 19 nt, Homo sapiens
  misc_RNA (1)...(19): siRNA sense strand
ucaacaaacaugcaagaaa

SEQ ID NO: 391399 - RNA, 19 nt, Homo sapiens
  misc_RNA (1)...(19): siRNA sense strand
gaaauccuuguucuuauca

SEQ ID NO: 391400 - RNA, 19 nt, Homo sapiens
  misc_RNA (1)...(19): siRNA sense strand
gcagguagugggagaagga

SEQ ID NO: 391401 - RNA, 19 nt, Homo sapiens
  misc_RNA (1)...(19): siRNA sense strand
cagaauggaaaucaugaaa

SEQ ID NO: 391402 - RNA, 19 nt, Homo sapiens
  misc_RNA (1)...(19): siRNA sense strand
ugaaagagaagaaauacag

SEQ ID NO: 391403 - RNA, 19 nt, Homo sapiens
  misc_RNA (1)...(19): siRNA sense strand
gaaaucaugaaauccuugu

SEQ ID NO: 391404 - RNA, 19 nt, Homo sapiens
  misc_RNA (1)...(19): siRNA sense strand
gugucuaccugaaagagaa

SEQ ID NO: 391405 - RNA, 19 nt, Homo sapiens
  misc_RNA (1)...(19): siRNA sense strand
gaccagcuauagcccuguu

SEQ ID NO: 391406 - RNA, 19 nt, Homo sapiens
  misc_RNA (1)...(19): siRNA sense strand
ccugggaaguugucagaau

SEQ ID NO: 391407 - RNA, 19 nt, Homo sapiens
  misc_RNA (1)...(19): siRNA sense strand
gaauccgugucuaccugaa

SEQ ID NO: 391408 - RNA, 19 nt, Homo sapiens
  misc_RNA (1)...(19): siRNA sense strand
cuauagcccuguuggaucu

SEQ ID NO: 391409 - RNA, 19 nt, Homo sapiens
  misc_RNA (1)...(19): siRNA sense strand
acugagaaguaaagauaga

SEQ ID NO: 391410 - RNA, 19 nt, Homo sapiens
  misc_RNA (1)...(19): siRNA sense strand
guucuuaucaacaaacaug

SEQ ID NO: 391411 - RNA, 19 nt, Homo sapiens
  misc_RNA (1)...(19): siRNA sense strand
ggaaguugucagaauggaa

SEQ ID NO: 391412 - RNA, 19 nt, Homo sapiens
  misc_RNA (1)...(19): siRNA sense strand
ugucaugucuguccuccau

SEQ ID NO: 391413 - RNA, 19 nt, Homo sapiens
  misc_RNA (1)...(19): siRNA sense strand
cagaaccauggccuacuua

SEQ ID NO: 391414 - RNA, 19 nt, Homo sapiens
  misc_RNA (1)...(19): siRNA sense strand
gcaagaaagacugagaagu

SEQ ID NO: 391415 - RNA, 19 nt, Homo sapiens
  misc_RNA (1)...(19): siRNA sense strand
cuagugaugaccagcuaua

SEQ ID NO: 391416 - RNA, 19 nt, Homo sapiens
  misc_RNA (1)...(19): siRNA sense strand
gguagugggagaaggagaa

SEQ ID NO: 391417 - RNA, 19 nt, Homo sapiens
  misc_RNA (1)...(19): siRNA sense strand
cgacugugccugggaaguu

SEQ ID NO: 391418 - RNA, 19 nt, Homo sapiens
  misc_RNA (1)...(19): siRNA sense strand
gacugugccugggaaguug

SEQ ID NO: 391419 - RNA, 19 nt, Homo sapiens
  misc_RNA (1)...(19): siRNA sense strand
gcagaucuucagccucuuc

SEQ ID NO: 391420 - RNA, 19 nt, Homo sapiens
  misc_RNA (1)...(19): siRNA sense strand
ggaacaugacccuccuaga

SEQ ID NO: 391421 - RNA, 19 nt, Homo sapiens
  misc_RNA (1)...(19): siRNA sense strand
ucugcugccuggaacauga

SEQ ID NO: 391422 - RNA, 19 nt, Homo sapiens
  misc_RNA (1)...(19): siRNA sense strand
auagagaccugggcucauc

SEQ ID NO: 391423 - RNA, 19 nt, Homo sapiens
  misc_RNA (1)...(19): siRNA sense strand
uaucaacaaacaugcaaga

SEQ ID NO: 391424 - RNA, 19 nt, Homo sapiens
  misc_RNA (1)...(19): siRNA sense strand
uggaaaucaugaaauccuu

SEQ ID NO: 391425 - RNA, 19 nt, Homo sapiens
  misc_RNA (1)...(19): siRNA sense strand
gggaaguugucagaaugga

SEQ ID NO: 391426 - RNA, 19 nt, Homo sapiens
  misc_RNA (1)...(19): siRNA sense strand
cugggaaguugucagaaug

SEQ ID NO: 391427 - RNA, 19 nt, Homo sapiens
  misc_RNA (1)...(19): siRNA sense strand
gcccugcacugaccuugag

SEQ ID NO: 391428 - RNA, 19 nt, Homo sapiens
  misc_RNA (1)...(19): siRNA sense strand
aaccauggccuacuuagca

SEQ ID NO: 391429 - RNA, 19 nt, Homo sapiens
  misc_RNA (1)...(19): siRNA sense strand
agaaagacugagaaguaaa

SEQ ID NO: 391430 - RNA, 19 nt, Homo sapiens
  misc_RNA (1)...(19): siRNA sense strand
caccaaaugaggagaaucu

SEQ ID NO: 391431 - RNA, 19 nt, Homo sapiens
  misc_RNA (1)...(19): siRNA sense strand
uuggaucucugggcuguga

SEQ ID NO: 391432 - RNA, 19 nt, Homo sapiens
  misc_RNA (1)...(19): siRNA sense strand
aaucaugaaauccuuguuc

SEQ ID NO: 391433 - RNA, 19 nt, Homo sapiens
  misc_RNA (1)...(19): siRNA sense strand
ugagaaguaaagauagaga

SEQ ID NO: 391434 - RNA, 19 nt, Homo sapiens
  misc_RNA (1)...(19): siRNA sense strand
agaccugggcucaucuuga

SEQ ID NO: 391435 - RNA, 19 nt, Homo sapiens
  misc_RNA (1)...(19): siRNA sense strand
ugucuguccuccaugagau

SEQ ID NO: 391436 - RNA, 19 nt, Homo sapiens
  misc_RNA (1)...(19): siRNA sense strand
cuacuggcagcccuaguga

SEQ ID NO: 391437 - RNA, 19 nt, Homo sapiens
  misc_RNA (1)...(19): siRNA sense strand
gaaccauggccuacuuagc

SEQ ID NO: 391438 - RNA, 19 nt, Homo sapiens
  misc_RNA (1)...(19): siRNA sense strand
ggaagaacaucuacuauga

SEQ ID NO: 391439 - RNA, 19 nt, Homo sapiens
  misc_RNA (1)...(19): siRNA sense strand
guucucagcuucauuguua

SEQ ID NO: 391440 - RNA, 19 nt, Homo sapiens
  misc_RNA (1)...(19): siRNA sense strand
ggaaauggcuauccugaug

SEQ ID NO: 391441 - RNA, 19 nt, Homo sapiens
  misc_RNA (1)...(19): siRNA sense strand
gaaaauaucuuccacacaa

SEQ ID NO: 391442 - RNA, 19 nt, Homo sapiens
  misc_RNA (1)...(19): siRNA sense strand
gcaaacacguuccagaaga

SEQ ID NO: 391443 - RNA, 19 nt, Homo sapiens
  misc_RNA (1)...(19): siRNA sense strand
gaagaaagucguacuauag

SEQ ID NO: 391444 - RNA, 19 nt, Homo sapiens
  misc_RNA (1)...(19): siRNA sense strand
gaacaucucccuaaacauc

SEQ ID NO: 391445 - RNA, 19 nt, Homo sapiens
  misc_RNA (1)...(19): siRNA sense strand
gaaagagaaugaagacagu

SEQ ID NO: 391446 - RNA, 19 nt, Homo sapiens
  misc_RNA (1)...(19): siRNA sense strand
gaacacagaaauacugaaa

SEQ ID NO: 391447 - RNA, 19 nt, Homo sapiens
  misc_RNA (1)...(19): siRNA sense strand
agaagaaagucguacuaua

SEQ ID NO: 391448 - RNA, 19 nt, Homo sapiens
  misc_RNA (1)...(19): siRNA sense strand
gagaagaaccggaaagaga

SEQ ID NO: 391449 - RNA, 19 nt, Homo sapiens
  misc_RNA (1)...(19): siRNA sense strand
gcucaucgcuggaagaaca

SEQ ID NO: 391450 - RNA, 19 nt, Homo sapiens
  misc_RNA (1)...(19): siRNA sense strand
gcauugauauggauggaaa

SEQ ID NO: 391451 - RNA, 19 nt, Homo sapiens
  misc_RNA (1)...(19): siRNA sense strand
gaucaggcaccuuaauuaa

SEQ ID NO: 391452 - RNA, 19 nt, Homo sapiens
  misc_RNA (1)...(19): siRNA sense strand
gugcagagauguuucaugu

SEQ ID NO: 391453 - RNA, 19 nt, Homo sapiens
  misc_RNA (1)...(19): siRNA sense strand
caucaucccucaagaacaa

SEQ ID NO: 391454 - RNA, 19 nt, Homo sapiens
  misc_RNA (1)...(19): siRNA sense strand
ggacacugaucccuugcua

SEQ ID NO: 391455 - RNA, 19 nt, Homo sapiens
  misc_RNA (1)...(19): siRNA sense strand
caaaggcagauuccaaaua

SEQ ID NO: 391456 - RNA, 19 nt, Homo sapiens
  misc_RNA (1)...(19): siRNA sense strand
ggacgcagccaacuucauu

SEQ ID NO: 391457 - RNA, 19 nt, Homo sapiens
  misc_RNA (1)...(19): siRNA sense strand
ugaagaacaucucccuaaa

SEQ ID NO: 391458 - RNA, 19 nt, Homo sapiens
  misc_RNA (1)...(19): siRNA sense strand
gagauuggccugaauuaug

SEQ ID NO: 391459 - RNA, 19 nt, Homo sapiens
  misc_RNA (1)...(19): siRNA sense strand
ggacaacaccuauuuaaaa

SEQ ID NO: 391460 - RNA, 19 nt, Homo sapiens
  misc_RNA (1)...(19): siRNA sense strand
gaagagauuggccugaauu

SEQ ID NO: 391461 - RNA, 19 nt, Homo sapiens
  misc_RNA (1)...(19): siRNA sense strand
ggucaaagucaaaguauga

SEQ ID NO: 391462 - RNA, 19 nt, Homo sapiens
  misc_RNA (1)...(19): siRNA sense strand
gaagaaguacggagaggaa

SEQ ID NO: 391463 - RNA, 19 nt, Homo sapiens
  misc_RNA (1)...(19): siRNA sense strand
gaaucggacuuccucaaau

SEQ ID NO: 391464 - RNA, 19 nt, Homo sapiens
  misc_RNA (1)...(19): siRNA sense strand
gacaaaagauugcccaaaa

SEQ ID NO: 391465 - RNA, 19 nt, Homo sapiens
  misc_RNA (1)...(19): siRNA sense strand
gaagaacaucuacuaugaa

SEQ ID NO: 391466 - RNA, 19 nt, Homo sapiens
  misc_RNA (1)...(19): siRNA sense strand
gaucaucgccaucaguuug

SEQ ID NO: 391467 - RNA, 19 nt, Homo sapiens
  misc_RNA (1)...(19): siRNA sense strand
ccaggaauuucuugccuaa

SEQ ID NO: 391468 - RNA, 19 nt, Homo sapiens
  misc_RNA (1)...(19): siRNA sense strand
caacguguccuucaauguu

SEQ ID NO: 391469 - RNA, 19 nt, Homo sapiens
  misc_RNA (1)...(19): siRNA sense strand
gggaagaccgcgaugauga

SEQ ID NO: 391470 - RNA, 19 nt, Homo sapiens
  misc_RNA (1)...(19): siRNA sense strand
cagcaucucuuucccuaau

SEQ ID NO: 391471 - RNA, 19 nt, Homo sapiens
  misc_RNA (1)...(19): siRNA sense strand
gaauucagcgugaucuuug

SEQ ID NO: 391472 - RNA, 19 nt, Homo sapiens
  misc_RNA (1)...(19): siRNA sense strand
gauagucccucaguacuca

SEQ ID NO: 391473 - RNA, 19 nt, Homo sapiens
  misc_RNA (1)...(19): siRNA sense strand
uaagaucuuucaagcauca

SEQ ID NO: 391474 - RNA, 19 nt, Homo sapiens
  misc_RNA (1)...(19): siRNA sense strand
gaaauuaucgaagcugaga

SEQ ID NO: 391475 - RNA, 19 nt, Homo sapiens
  misc_RNA (1)...(19): siRNA sense strand
aagaacaucucccuaaaca

SEQ ID NO: 391476 - RNA, 19 nt, Homo sapiens
  misc_RNA (1)...(19): siRNA sense strand
gaaaggaauugccguucag

SEQ ID NO: 391477 - RNA, 19 nt, Homo sapiens
  misc_RNA (1)...(19): siRNA sense strand
gagcaaggccugucauuac

SEQ ID NO: 391478 - RNA, 19 nt, Homo sapiens
  misc_RNA (1)...(19): siRNA sense strand
uggacgaucuggacaauga

SEQ ID NO: 391479 - RNA, 19 nt, Homo sapiens
  misc_RNA (1)...(19): siRNA sense strand
ccgaagaucaggcaccuua

SEQ ID NO: 391480 - RNA, 19 nt, Homo sapiens
  misc_RNA (1)...(19): siRNA sense strand
aaaggcagauuccaaauac

SEQ ID NO: 391481 - RNA, 19 nt, Homo sapiens
  misc_RNA (1)...(19): siRNA sense strand
gugaagaacaucucccuaa

SEQ ID NO: 391482 - RNA, 19 nt, Homo sapiens
  misc_RNA (1)...(19): siRNA sense strand
aaauacagcccuucaguga

SEQ ID NO: 391483 - RNA, 19 nt, Homo sapiens
  misc_RNA (1)...(19): siRNA sense strand
cagaagagauuggccugaa

SEQ ID NO: 391484 - RNA, 19 nt, Homo sapiens
  misc_RNA (1)...(19): siRNA sense strand
gcuaugaagaguauaagaa

SEQ ID NO: 391485 - RNA, 19 nt, Homo sapiens
  misc_RNA (1)...(19): siRNA sense strand
ccucggagaugaugccuau

SEQ ID NO: 391486 - RNA, 19 nt, Homo sapiens
  misc_RNA (1)...(19): siRNA sense strand
ucacagcgccucaguguca

SEQ ID NO: 391487 - RNA, 19 nt, Homo sapiens
  misc_RNA (1)...(19): siRNA sense strand
ucaaagugcugaaccuuac

SEQ ID NO: 391488 - RNA, 19 nt, Homo sapiens
  misc_RNA (1)...(19): siRNA sense strand
gaagaucaggcaccuuaau

SEQ ID NO: 391489 - RNA, 19 nt, Homo sapiens
  misc_RNA (1)...(19): siRNA sense strand
gauguuuggucaguccaua

SEQ ID NO: 391490 - RNA, 19 nt, Homo sapiens
  misc_RNA (1)...(19): siRNA sense strand
gcuggaagaacaucuacua

SEQ ID NO: 391491 - RNA, 19 nt, Homo sapiens
  misc_RNA (1)...(19): siRNA sense strand
gaaagucguacuauagaca

SEQ ID NO: 391492 - RNA, 19 nt, Homo sapiens
  misc_RNA (1)...(19): siRNA sense strand
ucuccaaccuccuuuguau

SEQ ID NO: 391493 - RNA, 19 nt, Homo sapiens
  misc_RNA (1)...(19): siRNA sense strand
ccugugagcugcuggaauc

SEQ ID NO: 391494 - RNA, 19 nt, Homo sapiens
  misc_RNA (1)...(19): siRNA sense strand
ucacaaagucuggaagaaa

SEQ ID NO: 391495 - RNA, 19 nt, Homo sapiens
  misc_RNA (1)...(19): siRNA sense strand
gaacgacgaagugaucaug

SEQ ID NO: 391496 - RNA, 19 nt, Homo sapiens
  misc_RNA (1)...(19): siRNA sense strand
gucguacuauagacauuua

SEQ ID NO: 391497 - RNA, 19 nt, Homo sapiens
  misc_RNA (1)...(19): siRNA sense strand
gccaaaggcaggacacuga

SEQ ID NO: 391498 - RNA, 19 nt, Homo sapiens
  misc_RNA (1)...(19): siRNA sense strand
caaagaaauuaucgaagcu

SEQ ID NO: 391499 - RNA, 19 nt, Homo sapiens
  misc_RNA (1)...(19): siRNA sense strand
gauguuucauguccaggaa

SEQ ID NO: 391500 - RNA, 19 nt, Homo sapiens
  misc_RNA (1)...(19): siRNA sense strand
caaccuccuuuguauaugg

SEQ ID NO: 391501 - RNA, 19 nt, Homo sapiens
  misc_RNA (1)...(19): siRNA sense strand
ggaaucaugucuccaaccu

SEQ ID NO: 391502 - RNA, 19 nt, Homo sapiens
  misc_RNA (1)...(19): siRNA sense strand
gagcucuucuucaucaaca

SEQ ID NO: 391503 - RNA, 19 nt, Homo sapiens
  misc_RNA (1)...(19): siRNA sense strand
cgggagcucuucuucauca

SEQ ID NO: 391504 - RNA, 19 nt, Homo sapiens
  misc_RNA (1)...(19): siRNA sense strand
acgcaguucuggagcauuu

SEQ ID NO: 391505 - RNA, 19 nt, Homo sapiens
  misc_RNA (1)...(19): siRNA sense strand
agauuggccugaauuaugu

SEQ ID NO: 391506 - RNA, 19 nt, Homo sapiens
  misc_RNA (1)...(19): siRNA sense strand
uuacggacaacaccuauuu

SEQ ID NO: 391507 - RNA, 19 nt, Homo sapiens
  misc_RNA (1)...(19): siRNA sense strand
cagcgugguucuucucaga

SEQ ID NO: 391508 - RNA, 19 nt, Homo sapiens
  misc_RNA (1)...(19): siRNA sense strand
cgccgaagguacaaagaaa

SEQ ID NO: 391509 - RNA, 19 nt, Homo sapiens
  misc_RNA (1)...(19): siRNA sense strand
caaacacguuccagaagag

SEQ ID NO: 391510 - RNA, 19 nt, Homo sapiens
  misc_RNA (1)...(19): siRNA sense strand
agaucaggcaccuuaauua

SEQ ID NO: 391511 - RNA, 19 nt, Homo sapiens
  misc_RNA (1)...(19): siRNA sense strand
aaucggacuuccucaaaug

SEQ ID NO: 391512 - RNA, 19 nt, Homo sapiens
  misc_RNA (1)...(19): siRNA sense strand
gaagaacaucucccuaaac

SEQ ID NO: 391513 - RNA, 19 nt, Homo sapiens
  misc_RNA (1)...(19): siRNA sense strand
gaaauggcuauccugaugu

SEQ ID NO: 391514 - RNA, 19 nt, Homo sapiens
  misc_RNA (1)...(19): siRNA sense strand
cgaagguacaaagaaauua

SEQ ID NO: 391515 - RNA, 19 nt, Homo sapiens
  misc_RNA (1)...(19): siRNA sense strand
guucgucugucauccaguu

SEQ ID NO: 391516 - RNA, 19 nt, Homo sapiens
  misc_RNA (1)...(19): siRNA sense strand
aaagaagaaagucguacua

SEQ ID NO: 391517 - RNA, 19 nt, Homo sapiens
  misc_RNA (1)...(19): siRNA sense strand
aagaacaucuacuaugaag

SEQ ID NO: 391518 - RNA, 19 nt, Homo sapiens
  misc_RNA (1)...(19): siRNA sense strand
gaagaaccggaaagagaau

SEQ ID NO: 391519 - RNA, 19 nt, Homo sapiens
  misc_RNA (1)...(19): siRNA sense strand
agaagaaccggaaagagaa

SEQ ID NO: 391520 - RNA, 19 nt, Homo sapiens
  misc_RNA (1)...(19): siRNA sense strand
uaucgaagcugagaagaac

SEQ ID NO: 391521 - RNA, 19 nt, Homo sapiens
  misc_RNA (1)...(19): siRNA sense strand
gcuaaagaagaaagucgua

SEQ ID NO: 391522 - RNA, 19 nt, Homo sapiens
  misc_RNA (1)...(19): siRNA sense strand
gagaaaacccuguaucuag

SEQ ID NO: 391523 - RNA, 19 nt, Homo sapiens
  misc_RNA (1)...(19): siRNA sense strand
gcucugaaucccugcauga

SEQ ID NO: 391524 - RNA, 19 nt, Homo sapiens
  misc_RNA (1)...(19): siRNA sense strand
cugaaucccugcaugacaa

SEQ ID NO: 391525 - RNA, 19 nt, Homo sapiens
  misc_RNA (1)...(19): siRNA sense strand
acugaucccuugcuaugaa

SEQ ID NO: 391526 - RNA, 19 nt, Homo sapiens
  misc_RNA (1)...(19): siRNA sense strand
aagaggaaguucucagcuu

SEQ ID NO: 391527 - RNA, 19 nt, Homo sapiens
  misc_RNA (1)...(19): siRNA sense strand
acacugaucccuugcuaug

SEQ ID NO: 391528 - RNA, 19 nt, Homo sapiens
  misc_RNA (1)...(19): siRNA sense strand
cacaaagucuggaagaaaa

SEQ ID NO: 391529 - RNA, 19 nt, Homo sapiens
  misc_RNA (1)...(19): siRNA sense strand
gccaacguguccuucaaug

SEQ ID NO: 391530 - RNA, 19 nt, Homo sapiens
  misc_RNA (1)...(19): siRNA sense strand
caucagcccgaucguguuu

SEQ ID NO: 391531 - RNA, 19 nt, Homo sapiens
  misc_RNA (1)...(19): siRNA sense strand
caucacagcgccucagugu

SEQ ID NO: 391532 - RNA, 19 nt, Homo sapiens
  misc_RNA (1)...(19): siRNA sense strand
ccaaauacagcccuucagu

SEQ ID NO: 391533 - RNA, 19 nt, Homo sapiens
  misc_RNA (1)...(19): siRNA sense strand
caaaagaaucagacuguuu

SEQ ID NO: 391534 - RNA, 19 nt, Homo sapiens
  misc_RNA (1)...(19): siRNA sense strand
ggaauuucuugccuaacag

SEQ ID NO: 391535 - RNA, 19 nt, Homo sapiens
  misc_RNA (1)...(19): siRNA sense strand
aggaauuucuugccuaaca

SEQ ID NO: 391536 - RNA, 19 nt, Homo sapiens
  misc_RNA (1)...(19): siRNA sense strand
ugaggucaaagucaaagua

SEQ ID NO: 391537 - RNA, 19 nt, Homo sapiens
  misc_RNA (1)...(19): siRNA sense strand
ccgaagguacaaagaaauu

SEQ ID NO: 391538 - RNA, 19 nt, Homo sapiens
  misc_RNA (1)...(19): siRNA sense strand
ucaaagcccuggacgaucu

SEQ ID NO: 391539 - RNA, 19 nt, Homo sapiens
  misc_RNA (1)...(19): siRNA sense strand
gcagguggcccagcucaaa

SEQ ID NO: 391540 - RNA, 19 nt, Homo sapiens
  misc_RNA (1)...(19): siRNA sense strand
gagcuggaacgccugauug

SEQ ID NO: 391541 - RNA, 19 nt, Homo sapiens
  misc_RNA (1)...(19): siRNA sense strand
caacauggaagaccaagag

SEQ ID NO: 391542 - RNA, 19 nt, Homo sapiens
  misc_RNA (1)...(19): siRNA sense strand
acaccaaccucagcagcua

SEQ ID NO: 391543 - RNA, 19 nt, Homo sapiens
  misc_RNA (1)...(19): siRNA sense strand
caacagcaacggcgugauc

SEQ ID NO: 391544 - RNA, 19 nt, Homo sapiens
  misc_RNA (1)...(19): siRNA sense strand
uggcccagcucaaacagaa

SEQ ID NO: 391545 - RNA, 19 nt, Homo sapiens
  misc_RNA (1)...(19): siRNA sense strand
cgacuacaaacuccugaaa

SEQ ID NO: 391546 - RNA, 19 nt, Homo sapiens
  misc_RNA (1)...(19): siRNA sense strand
caagaugaaccacgugaca

SEQ ID NO: 391547 - RNA, 19 nt, Homo sapiens
  misc_RNA (1)...(19): siRNA sense strand
ccacgacgacucauacaca

SEQ ID NO: 391548 - RNA, 19 nt, Homo sapiens
  misc_RNA (1)...(19): siRNA sense strand
cgacgaccaccaucagcua

SEQ ID NO: 391549 - RNA, 19 nt, Homo sapiens
  misc_RNA (1)...(19): siRNA sense strand
ggagcuggaacgccugauu

SEQ ID NO: 391550 - RNA, 19 nt, Homo sapiens
  misc_RNA (1)...(19): siRNA sense strand
aaauggaacagcccuucua

SEQ ID NO: 391551 - RNA, 19 nt, Homo sapiens
  misc_RNA (1)...(19): siRNA sense strand
agaccaagagcgcaucaaa

SEQ ID NO: 391552 - RNA, 19 nt, Homo sapiens
  misc_RNA (1)...(19): siRNA sense strand
cauacacagcuacgggaua

SEQ ID NO: 391553 - RNA, 19 nt, Homo sapiens
  misc_RNA (1)...(19): siRNA sense strand
gaagaccaagagcgcauca

SEQ ID NO: 391554 - RNA, 19 nt, Homo sapiens
  misc_RNA (1)...(19): siRNA sense strand
gaccaagagcgcaucaaag

SEQ ID NO: 391555 - RNA, 19 nt, Homo sapiens
  misc_RNA (1)...(19): siRNA sense strand
auacacagcuacgggauac

SEQ ID NO: 391556 - RNA, 19 nt, Homo sapiens
  misc_RNA (1)...(19): siRNA sense strand
ccaagagcgcaucaaagug

SEQ ID NO: 391557 - RNA, 19 nt, Homo sapiens
  misc_RNA (1)...(19): siRNA sense strand
ugucaaagcccuggacgau

SEQ ID NO: 391558 - RNA, 19 nt, Homo sapiens
  misc_RNA (1)...(19): siRNA sense strand
gacgacucauacacagcua

SEQ ID NO: 391559 - RNA, 19 nt, Homo sapiens
  misc_RNA (1)...(19): siRNA sense strand
uggaacagcccuucuacca

SEQ ID NO: 391560 - RNA, 19 nt, Homo sapiens
  misc_RNA (1)...(19): siRNA sense strand
accaagagcgcaucaaagu

SEQ ID NO: 391561 - RNA, 19 nt, Homo sapiens
  misc_RNA (1)...(19): siRNA sense strand
gcucaaacagaaggucaug

SEQ ID NO: 391562 - RNA, 19 nt, Homo sapiens
  misc_RNA (1)...(19): siRNA sense strand
ggagugagaugaagaaauu

SEQ ID NO: 391563 - RNA, 19 nt, Homo sapiens
  misc_RNA (1)...(19): siRNA sense strand
ggaaaucucuugcaagcua

SEQ ID NO: 391564 - RNA, 19 nt, Homo sapiens
  misc_RNA (1)...(19): siRNA sense strand
gauuacagaucuccauuua

SEQ ID NO: 391565 - RNA, 19 nt, Homo sapiens
  misc_RNA (1)...(19): siRNA sense strand
gaaaguuaccagucuauua

SEQ ID NO: 391566 - RNA, 19 nt, Homo sapiens
  misc_RNA (1)...(19): siRNA sense strand
gagaaaagcuugucuuaaa

SEQ ID NO: 391567 - RNA, 19 nt, Homo sapiens
  misc_RNA (1)...(19): siRNA sense strand
gcagaugccuuuggaauug

SEQ ID NO: 391568 - RNA, 19 nt, Homo sapiens
  misc_RNA (1)...(19): siRNA sense strand
gcagacagaucuacguuug

SEQ ID NO: 391569 - RNA, 19 nt, Homo sapiens
  misc_RNA (1)...(19): siRNA sense strand
gcgauggccucuucuguaa

SEQ ID NO: 391570 - RNA, 19 nt, Homo sapiens
  misc_RNA (1)...(19): siRNA sense strand
gaagauaucccguuagaag

SEQ ID NO: 391571 - RNA, 19 nt, Homo sapiens
  misc_RNA (1)...(19): siRNA sense strand
aagaagggcuuuacuauuc

SEQ ID NO: 391572 - RNA, 19 nt, Homo sapiens
  misc_RNA (1)...(19): siRNA sense strand
cagaagagcugaaaacuuu

SEQ ID NO: 391573 - RNA, 19 nt, Homo sapiens
  misc_RNA (1)...(19): siRNA sense strand
gaacuuggauacucuuugg

SEQ ID NO: 391574 - RNA, 19 nt, Homo sapiens
  misc_RNA (1)...(19): siRNA sense strand
gaagacagaaccaaauuau

SEQ ID NO: 391575 - RNA, 19 nt, Homo sapiens
  misc_RNA (1)...(19): siRNA sense strand
guacauuacugagaacaaa

SEQ ID NO: 391576 - RNA, 19 nt, Homo sapiens
  misc_RNA (1)...(19): siRNA sense strand
ggaagacagaaccaaauua

SEQ ID NO: 391577 - RNA, 19 nt, Homo sapiens
  misc_RNA (1)...(19): siRNA sense strand
ggguaaagauugaugaaga

SEQ ID NO: 391578 - RNA, 19 nt, Homo sapiens
  misc_RNA (1)...(19): siRNA sense strand
uggagcaucucaucuguua

SEQ ID NO: 391579 - RNA, 19 nt, Homo sapiens
  misc_RNA (1)...(19): siRNA sense strand
gcaagaagggcuuuacuau

SEQ ID NO: 391580 - RNA, 19 nt, Homo sapiens
  misc_RNA (1)...(19): siRNA sense strand
gguauaggauuuaugaugu

SEQ ID NO: 391581 - RNA, 19 nt, Homo sapiens
  misc_RNA (1)...(19): siRNA sense strand
gguaaagauugaugaagaa

SEQ ID NO: 391582 - RNA, 19 nt, Homo sapiens
  misc_RNA (1)...(19): siRNA sense strand
ugaacuaucuguuggagaa

SEQ ID NO: 391583 - RNA, 19 nt, Homo sapiens
  misc_RNA (1)...(19): siRNA sense strand
gggcauguacugacgauua

SEQ ID NO: 391584 - RNA, 19 nt, Homo sapiens
  misc_RNA (1)...(19): siRNA sense strand
gaaagaaggaacuagaaug

SEQ ID NO: 391585 - RNA, 19 nt, Homo sapiens
  misc_RNA (1)...(19): siRNA sense strand
gaaagagacacaggaaauu

SEQ ID NO: 391586 - RNA, 19 nt, Homo sapiens
  misc_RNA (1)...(19): siRNA sense strand
ggaauugaacuaucuguug

SEQ ID NO: 391587 - RNA, 19 nt, Homo sapiens
  misc_RNA (1)...(19): siRNA sense strand
gugaacgacugccuuauga

SEQ ID NO: 391588 - RNA, 19 nt, Homo sapiens
  misc_RNA (1)...(19): siRNA sense strand
gaugaaaguuaccagucua

SEQ ID NO: 391589 - RNA, 19 nt, Homo sapiens
  misc_RNA (1)...(19): siRNA sense strand
guagaagacucaggcauug

SEQ ID NO: 391590 - RNA, 19 nt, Homo sapiens
  misc_RNA (1)...(19): siRNA sense strand
gggaauacccuucuucgaa

SEQ ID NO: 391591 - RNA, 19 nt, Homo sapiens
  misc_RNA (1)...(19): siRNA sense strand
cggcaaaugugucagcuuu

SEQ ID NO: 391592 - RNA, 19 nt, Homo sapiens
  misc_RNA (1)...(19): siRNA sense strand
gagcucuccuccuguuuaa

SEQ ID NO: 391593 - RNA, 19 nt, Homo sapiens
  misc_RNA (1)...(19): siRNA sense strand
cugaagaucuguauaagga

SEQ ID NO: 391594 - RNA, 19 nt, Homo sapiens
  misc_RNA (1)...(19): siRNA sense strand
gaaaucucuugcaagcuaa

SEQ ID NO: 391595 - RNA, 19 nt, Homo sapiens
  misc_RNA (1)...(19): siRNA sense strand
gagaaucagacgacaagua

SEQ ID NO: 391596 - RNA, 19 nt, Homo sapiens
  misc_RNA (1)...(19): siRNA sense strand
cagaugaacucccauugga

SEQ ID NO: 391597 - RNA, 19 nt, Homo sapiens
  misc_RNA (1)...(19): siRNA sense strand
ggaugaacauugugaacga

SEQ ID NO: 391598 - RNA, 19 nt, Homo sapiens
  misc_RNA (1)...(19): siRNA sense strand
ggcacgaaauauccucuua

SEQ ID NO: 391599 - RNA, 19 nt, Homo sapiens
  misc_RNA (1)...(19): siRNA sense strand
ucaagauccucauucauau

SEQ ID NO: 391600 - RNA, 19 nt, Homo sapiens
  misc_RNA (1)...(19): siRNA sense strand
gaacgacugccuuaugaug

SEQ ID NO: 391601 - RNA, 19 nt, Homo sapiens
  misc_RNA (1)...(19): siRNA sense strand
caagaagggcuuuacuauu

SEQ ID NO: 391602 - RNA, 19 nt, Homo sapiens
  misc_RNA (1)...(19): siRNA sense strand
cagaguugguggaacauuu

SEQ ID NO: 391603 - RNA, 19 nt, Homo sapiens
  misc_RNA (1)...(19): siRNA sense strand
gccaccauguucucuaaua

SEQ ID NO: 391604 - RNA, 19 nt, Homo sapiens
  misc_RNA (1)...(19): siRNA sense strand
gaaguggcauggaaucucu

SEQ ID NO: 391605 - RNA, 19 nt, Homo sapiens
  misc_RNA (1)...(19): siRNA sense strand
gcuaauacaacucuucaaa

SEQ ID NO: 391606 - RNA, 19 nt, Homo sapiens
  misc_RNA (1)...(19): siRNA sense strand
gauacucuuuggaaauuga

SEQ ID NO: 391607 - RNA, 19 nt, Homo sapiens
  misc_RNA (1)...(19): siRNA sense strand
cuacauuguucuuccgaua

SEQ ID NO: 391608 - RNA, 19 nt, Homo sapiens
  misc_RNA (1)...(19): siRNA sense strand
gcaucgagcucucaugucu

SEQ ID NO: 391609 - RNA, 19 nt, Homo sapiens
  misc_RNA (1)...(19): siRNA sense strand
ggucauuuaugucuauguu

SEQ ID NO: 391610 - RNA, 19 nt, Homo sapiens
  misc_RNA (1)...(19): siRNA sense strand
aaagagacacaggaaauua

SEQ ID NO: 391611 - RNA, 19 nt, Homo sapiens
  misc_RNA (1)...(19): siRNA sense strand
ccagugggcugaugaccaa

SEQ ID NO: 391612 - RNA, 19 nt, Homo sapiens
  misc_RNA (1)...(19): siRNA sense strand
guuagaagaaccagaagua

SEQ ID NO: 391613 - RNA, 19 nt, Homo sapiens
  misc_RNA (1)...(19): siRNA sense strand
caaauuccauuaugacaac

SEQ ID NO: 391614 - RNA, 19 nt, Homo sapiens
  misc_RNA (1)...(19): siRNA sense strand
agcaagaacugaacuaaau

SEQ ID NO: 391615 - RNA, 19 nt, Homo sapiens
  misc_RNA (1)...(19): siRNA sense strand
gggagucuguggcaucuga

SEQ ID NO: 391616 - RNA, 19 nt, Homo sapiens
  misc_RNA (1)...(19): siRNA sense strand
ggcaaagacuacauuguuc

SEQ ID NO: 391617 - RNA, 19 nt, Homo sapiens
  misc_RNA (1)...(19): siRNA sense strand
aaagaaggaacuagaauga

SEQ ID NO: 391618 - RNA, 19 nt, Homo sapiens
  misc_RNA (1)...(19): siRNA sense strand
gauugaagcagaugccuuu

SEQ ID NO: 391619 - RNA, 19 nt, Homo sapiens
  misc_RNA (1)...(19): siRNA sense strand
gugaagcggucaacaaagu

SEQ ID NO: 391620 - RNA, 19 nt, Homo sapiens
  misc_RNA (1)...(19): siRNA sense strand
caagaagaacagcacauuu

SEQ ID NO: 391621 - RNA, 19 nt, Homo sapiens
  misc_RNA (1)...(19): siRNA sense strand
caacacagcaggaaucagu

SEQ ID NO: 391622 - RNA, 19 nt, Homo sapiens
  misc_RNA (1)...(19): siRNA sense strand
ccacuuaccugaggagcaa

SEQ ID NO: 391623 - RNA, 19 nt, Homo sapiens
  misc_RNA (1)...(19): siRNA sense strand
gaacucaagauccucauuc

SEQ ID NO: 391624 - RNA, 19 nt, Homo sapiens
  misc_RNA (1)...(19): siRNA sense strand
ucauggagcuuaagaaugc

SEQ ID NO: 391625 - RNA, 19 nt, Homo sapiens
  misc_RNA (1)...(19): siRNA sense strand
gaucauggagcuuaagaau

SEQ ID NO: 391626 - RNA, 19 nt, Homo sapiens
  misc_RNA (1)...(19): siRNA sense strand
ccucagugauguagaagaa

SEQ ID NO: 391627 - RNA, 19 nt, Homo sapiens
  misc_RNA (1)...(19): siRNA sense strand
aauagaaggugcccaggaa

SEQ ID NO: 391628 - RNA, 19 nt, Homo sapiens
  misc_RNA (1)...(19): siRNA sense strand
guuguaggguauaggauuu

SEQ ID NO: 391629 - RNA, 19 nt, Homo sapiens
  misc_RNA (1)...(19): siRNA sense strand
ggaaguaugugaccccaaa

SEQ ID NO: 391630 - RNA, 19 nt, Homo sapiens
  misc_RNA (1)...(19): siRNA sense strand
ugaagcagaugccuuugga

SEQ ID NO: 391631 - RNA, 19 nt, Homo sapiens
  misc_RNA (1)...(19): siRNA sense strand
aaacaaaacuguggugauu

SEQ ID NO: 391632 - RNA, 19 nt, Homo sapiens
  misc_RNA (1)...(19): siRNA sense strand
cagcaggaaucagucagua

SEQ ID NO: 391633 - RNA, 19 nt, Homo sapiens
  misc_RNA (1)...(19): siRNA sense strand
gugcagcgauggccucuuc

SEQ ID NO: 391634 - RNA, 19 nt, Homo sapiens
  misc_RNA (1)...(19): siRNA sense strand
ggauaucacuccgaugaca

SEQ ID NO: 391635 - RNA, 19 nt, Homo sapiens
  misc_RNA (1)...(19): siRNA sense strand
cucaagauccucauucaua

SEQ ID NO: 391636 - RNA, 19 nt, Homo sapiens
  misc_RNA (1)...(19): siRNA sense strand
ggaaagcaucgaagucuca

SEQ ID NO: 391637 - RNA, 19 nt, Homo sapiens
  misc_RNA (1)...(19): siRNA sense strand
ccaaucccauuucaaagga

SEQ ID NO: 391638 - RNA, 19 nt, Homo sapiens
  misc_RNA (1)...(19): siRNA sense strand
cauggagucguguacauua

SEQ ID NO: 391639 - RNA, 19 nt, Homo sapiens
  misc_RNA (1)...(19): siRNA sense strand
gauagagauuggagugcaa

SEQ ID NO: 391640 - RNA, 19 nt, Homo sapiens
  misc_RNA (1)...(19): siRNA sense strand
uggauacucuuuggaaauu

SEQ ID NO: 391641 - RNA, 19 nt, Homo sapiens
  misc_RNA (1)...(19): siRNA sense strand
ugaaagagacacaggaaau

SEQ ID NO: 391642 - RNA, 19 nt, Homo sapiens
  misc_RNA (1)...(19): siRNA sense strand
cagcauaagaaacuuguaa

SEQ ID NO: 391643 - RNA, 19 nt, Homo sapiens
  misc_RNA (1)...(19): siRNA sense strand
cgaagcaucagcauaagaa

SEQ ID NO: 391644 - RNA, 19 nt, Homo sapiens
  misc_RNA (1)...(19): siRNA sense strand
cagaucaugugguuuaaag

SEQ ID NO: 391645 - RNA, 19 nt, Homo sapiens
  misc_RNA (1)...(19): siRNA sense strand
uagaagaaccagaaguaaa

SEQ ID NO: 391646 - RNA, 19 nt, Homo sapiens
  misc_RNA (1)...(19): siRNA sense strand
cugccuaccucaccuguuu

SEQ ID NO: 391647 - RNA, 19 nt, Homo sapiens
  misc_RNA (1)...(19): siRNA sense strand
ucagugauguagaagaaga

SEQ ID NO: 391648 - RNA, 19 nt, Homo sapiens
  misc_RNA (1)...(19): siRNA sense strand
guaagacacucacaauucc

SEQ ID NO: 391649 - RNA, 19 nt, Homo sapiens
  misc_RNA (1)...(19): siRNA sense strand
gcaagaacugaacuaaaug

SEQ ID NO: 391650 - RNA, 19 nt, Homo sapiens
  misc_RNA (1)...(19): siRNA sense strand
ggagaagaacgugguuaaa

SEQ ID NO: 391651 - RNA, 19 nt, Homo sapiens
  misc_RNA (1)...(19): siRNA sense strand
ggagcaagagaaaugaauu

SEQ ID NO: 391652 - RNA, 19 nt, Homo sapiens
  misc_RNA (1)...(19): siRNA sense strand
gaucaugugguuuaaagau

SEQ ID NO: 391653 - RNA, 19 nt, Homo sapiens
  misc_RNA (1)...(19): siRNA sense strand
ccacaccuguuugcaagaa

SEQ ID NO: 391654 - RNA, 19 nt, Homo sapiens
  misc_RNA (1)...(19): siRNA sense strand
ggcauguacugacgauuau

SEQ ID NO: 391655 - RNA, 19 nt, Homo sapiens
  misc_RNA (1)...(19): siRNA sense strand
cccauacccuugugaagaa

SEQ ID NO: 391656 - RNA, 19 nt, Homo sapiens
  misc_RNA (1)...(19): siRNA sense strand
ccaaauuaucuccaucuuu

SEQ ID NO: 391657 - RNA, 19 nt, Homo sapiens
  misc_RNA (1)...(19): siRNA sense strand
agacagaaccaaauuaucu

SEQ ID NO: 391658 - RNA, 19 nt, Homo sapiens
  misc_RNA (1)...(19): siRNA sense strand
gagaugcucgccucccuuu

SEQ ID NO: 391659 - RNA, 19 nt, Homo sapiens
  misc_RNA (1)...(19): siRNA sense strand
gcacgaaauauccucuuau

SEQ ID NO: 391660 - RNA, 19 nt, Homo sapiens
  misc_RNA (1)...(19): siRNA sense strand
gagcaucucaucuguuaca

SEQ ID NO: 391661 - RNA, 19 nt, Homo sapiens
  misc_RNA (1)...(19): siRNA sense strand
gagaagucccucagugaug

SEQ ID NO: 391662 - RNA, 19 nt, Homo sapiens
  misc_RNA (1)...(19): siRNA sense strand
gaauugaucuguaccaugu

SEQ ID NO: 391663 - RNA, 19 nt, Homo sapiens
  misc_RNA (1)...(19): siRNA sense strand
ugaaagacauagaugguua

SEQ ID NO: 391664 - RNA, 19 nt, Homo sapiens
  misc_RNA (1)...(19): siRNA sense strand
ugacauuacugaugacaua

SEQ ID NO: 391665 - RNA, 19 nt, Homo sapiens
  misc_RNA (1)...(19): siRNA sense strand
guaauaagcuuuggugcaa

SEQ ID NO: 391666 - RNA, 19 nt, Homo sapiens
  misc_RNA (1)...(19): siRNA sense strand
gaacaguggcuuugugaga

SEQ ID NO: 391667 - RNA, 19 nt, Homo sapiens
  misc_RNA (1)...(19): siRNA sense strand
acaaguuccuggaugauga

SEQ ID NO: 391668 - RNA, 19 nt, Homo sapiens
  misc_RNA (1)...(19): siRNA sense strand
gcacugagaagcuggaaca

SEQ ID NO: 391669 - RNA, 19 nt, Homo sapiens
  misc_RNA (1)...(19): siRNA sense strand
gugacaaguuccuggauga

SEQ ID NO: 391670 - RNA, 19 nt, Homo sapiens
  misc_RNA (1)...(19): siRNA sense strand
gaugaugacauuacugaug

SEQ ID NO: 391671 - RNA, 19 nt, Homo sapiens
  misc_RNA (1)...(19): siRNA sense strand
guuccuggaugaugacauu

SEQ ID NO: 391672 - RNA, 19 nt, Homo sapiens
  misc_RNA (1)...(19): siRNA sense strand
acaaugaaagcacggaaua

SEQ ID NO: 391673 - RNA, 19 nt, Homo sapiens
  misc_RNA (1)...(19): siRNA sense strand
uuaaaggaauugacuacug

SEQ ID NO: 391674 - RNA, 19 nt, Homo sapiens
  misc_RNA (1)...(19): siRNA sense strand
gaaagacauagaugguuau

SEQ ID NO: 391675 - RNA, 19 nt, Homo sapiens
  misc_RNA (1)...(19): siRNA sense strand
cauaaugugugccaagaag

SEQ ID NO: 391676 - RNA, 19 nt, Homo sapiens
  misc_RNA (1)...(19): siRNA sense strand
ccagaucaguaauaagcuu

SEQ ID NO: 391677 - RNA, 19 nt, Homo sapiens
  misc_RNA (1)...(19): siRNA sense strand
auaaagcccucugcacuga

SEQ ID NO: 391678 - RNA, 19 nt, Homo sapiens
  misc_RNA (1)...(19): siRNA sense strand
ggacucuuccagaucagua

SEQ ID NO: 391679 - RNA, 19 nt, Homo sapiens
  misc_RNA (1)...(19): siRNA sense strand
ucugugacaucuccuguga

SEQ ID NO: 391680 - RNA, 19 nt, Homo sapiens
  misc_RNA (1)...(19): siRNA sense strand
augaugacauuacugauga

SEQ ID NO: 391681 - RNA, 19 nt, Homo sapiens
  misc_RNA (1)...(19): siRNA sense strand
gcaucgcuuugccugaauu

SEQ ID NO: 391682 - RNA, 19 nt, Homo sapiens
  misc_RNA (1)...(19): siRNA sense strand
aauaagcuuuggugcaaga

SEQ ID NO: 391683 - RNA, 19 nt, Homo sapiens
  misc_RNA (1)...(19): siRNA sense strand
ugacaucuccugugacaag

SEQ ID NO: 391684 - RNA, 19 nt, Homo sapiens
  misc_RNA (1)...(19): siRNA sense strand
ugacacacaagccauaguu

SEQ ID NO: 391685 - RNA, 19 nt, Homo sapiens
  misc_RNA (1)...(19): siRNA sense strand
caaggaacaucugugacau

SEQ ID NO: 391686 - RNA, 19 nt, Homo sapiens
  misc_RNA (1)...(19): siRNA sense strand
cacggaauauggacucuuc

SEQ ID NO: 391687 - RNA, 19 nt, Homo sapiens
  misc_RNA (1)...(19): siRNA sense strand
ugaaagcacggaauaugga

SEQ ID NO: 391688 - RNA, 19 nt, Homo sapiens
  misc_RNA (1)...(19): siRNA sense strand
ucaaggaacaucugugaca

SEQ ID NO: 391689 - RNA, 19 nt, Homo sapiens
  misc_RNA (1)...(19): siRNA sense strand
acacacaagccauaguuga

SEQ ID NO: 391690 - RNA, 19 nt, Homo sapiens
  misc_RNA (1)...(19): siRNA sense strand
caucuccugugacaaguuc

SEQ ID NO: 391691 - RNA, 19 nt, Homo sapiens
  misc_RNA (1)...(19): siRNA sense strand
ugugacaucuccugugaca

SEQ ID NO: 391692 - RNA, 19 nt, Homo sapiens
  misc_RNA (1)...(19): siRNA sense strand
acacaagccauaguugaaa

SEQ ID NO: 391693 - RNA, 19 nt, Homo sapiens
  misc_RNA (1)...(19): siRNA sense strand
aacaguggcuuugugagaa

SEQ ID NO: 391694 - RNA, 19 nt, Homo sapiens
  misc_RNA (1)...(19): siRNA sense strand
aaagcccucugcacugaga

SEQ ID NO: 391695 - RNA, 19 nt, Homo sapiens
  misc_RNA (1)...(19): siRNA sense strand
cacacaagccauaguugaa

SEQ ID NO: 391696 - RNA, 19 nt, Homo sapiens
  misc_RNA (1)...(19): siRNA sense strand
gccaagcaauucacaaaau

SEQ ID NO: 391697 - RNA, 19 nt, Homo sapiens
  misc_RNA (1)...(19): siRNA sense strand
acuacugguuggcccauaa

SEQ ID NO: 391698 - RNA, 19 nt, Homo sapiens
  misc_RNA (1)...(19): siRNA sense strand
ccaagcaauucacaaaaug

SEQ ID NO: 391699 - RNA, 19 nt, Homo sapiens
  misc_RNA (1)...(19): siRNA sense strand
gcugaaagacauagauggu

SEQ ID NO: 391700 - RNA, 19 nt, Homo sapiens
  misc_RNA (1)...(19): siRNA sense strand
gaucaguaauaagcuuugg

SEQ ID NO: 391701 - RNA, 19 nt, Homo sapiens
  misc_RNA (1)...(19): siRNA sense strand
caaugaaagcacggaauau

SEQ ID NO: 391702 - RNA, 19 nt, Homo sapiens
  misc_RNA (1)...(19): siRNA sense strand
ucuuccagaucaguaauaa

SEQ ID NO: 391703 - RNA, 19 nt, Homo sapiens
  misc_RNA (1)...(19): siRNA sense strand
uggaugaugacauuacuga

SEQ ID NO: 391704 - RNA, 19 nt, Homo sapiens
  misc_RNA (1)...(19): siRNA sense strand
auugaucuguaccauguuu

SEQ ID NO: 391705 - RNA, 19 nt, Homo sapiens
  misc_RNA (1)...(19): siRNA sense strand
aaugaaagcacggaauaug

SEQ ID NO: 391706 - RNA, 19 nt, Homo sapiens
  misc_RNA (1)...(19): siRNA sense strand
agucaaggaacaucuguga

SEQ ID NO: 391707 - RNA, 19 nt, Homo sapiens
  misc_RNA (1)...(19): siRNA sense strand
gacaaguuccuggaugaug

SEQ ID NO: 391708 - RNA, 19 nt, Homo sapiens
  misc_RNA (1)...(19): siRNA sense strand
cagaucaguaauaagcuuu

SEQ ID NO: 391709 - RNA, 19 nt, Homo sapiens
  misc_RNA (1)...(19): siRNA sense strand
gacauuacugaugacauaa

SEQ ID NO: 391710 - RNA, 19 nt, Homo sapiens
  misc_RNA (1)...(19): siRNA sense strand
uggccaagcaauucacaaa

SEQ ID NO: 391711 - RNA, 19 nt, Homo sapiens
  misc_RNA (1)...(19): siRNA sense strand
guuauggaggcaucgcuuu

SEQ ID NO: 391712 - RNA, 19 nt, Homo sapiens
  misc_RNA (1)...(19): siRNA sense strand
gacuacugguuggcccaua

SEQ ID NO: 391713 - RNA, 19 nt, Homo sapiens
  misc_RNA (1)...(19): siRNA sense strand
uaaugugugccaagaagau

SEQ ID NO: 391714 - RNA, 19 nt, Homo sapiens
  misc_RNA (1)...(19): siRNA sense strand
gacacacaagccauaguug

SEQ ID NO: 391715 - RNA, 19 nt, Homo sapiens
  misc_RNA (1)...(19): siRNA sense strand
aggaacaucugugacaucu

SEQ ID NO: 391716 - RNA, 19 nt, Homo sapiens
  misc_RNA (1)...(19): siRNA sense strand
uugccugaauugaucugua

SEQ ID NO: 391717 - RNA, 19 nt, Homo sapiens
  misc_RNA (1)...(19): siRNA sense strand
uggaacaguggcuuuguga

SEQ ID NO: 391718 - RNA, 19 nt, Homo sapiens
  misc_RNA (1)...(19): siRNA sense strand
gggaagagguauaaguuug

SEQ ID NO: 391719 - RNA, 19 nt, Homo sapiens
  misc_RNA (1)...(19): siRNA sense strand
cuaaaccgcuccauagaga

SEQ ID NO: 391720 - RNA, 19 nt, Homo sapiens
  misc_RNA (1)...(19): siRNA sense strand
guaacagugugaagaaauc

SEQ ID NO: 391721 - RNA, 19 nt, Homo sapiens
  misc_RNA (1)...(19): siRNA sense strand
gaagagguauaaguuugug

SEQ ID NO: 391722 - RNA, 19 nt, Homo sapiens
  misc_RNA (1)...(19): siRNA sense strand
ggaggacagugaugaaguc

SEQ ID NO: 391723 - RNA, 19 nt, Homo sapiens
  misc_RNA (1)...(19): siRNA sense strand
uccaagaccucaucaacaa

SEQ ID NO: 391724 - RNA, 19 nt, Homo sapiens
  misc_RNA (1)...(19): siRNA sense strand
gagaagaguaacaguguga

SEQ ID NO: 391725 - RNA, 19 nt, Homo sapiens
  misc_RNA (1)...(19): siRNA sense strand
gaguaacagugugaagaaa

SEQ ID NO: 391726 - RNA, 19 nt, Homo sapiens
  misc_RNA (1)...(19): siRNA sense strand
caagaccucaucaacaauu

SEQ ID NO: 391727 - RNA, 19 nt, Homo sapiens
  misc_RNA (1)...(19): siRNA sense strand
gaaaucccagccagacuug

SEQ ID NO: 391728 - RNA, 19 nt, Homo sapiens
  misc_RNA (1)...(19): siRNA sense strand
ggaagagguauaaguuugu

SEQ ID NO: 391729 - RNA, 19 nt, Homo sapiens
  misc_RNA (1)...(19): siRNA sense strand
uauuguggcuggagacaug

SEQ ID NO: 391730 - RNA, 19 nt, Homo sapiens
  misc_RNA (1)...(19): siRNA sense strand
aagaccucaucaacaauua

SEQ ID NO: 391731 - RNA, 19 nt, Homo sapiens
  misc_RNA (1)...(19): siRNA sense strand
ccaagacuccguccugcaa

SEQ ID NO: 391732 - RNA, 19 nt, Homo sapiens
  misc_RNA (1)...(19): siRNA sense strand
caucugggaagagguauaa

SEQ ID NO: 391733 - RNA, 19 nt, Homo sapiens
  misc_RNA (1)...(19): siRNA sense strand
ccugagcccuaccaccaaa

SEQ ID NO: 391734 - RNA, 19 nt, Homo sapiens
  misc_RNA (1)...(19): siRNA sense strand
uagagaagaguaacagugu

SEQ ID NO: 391735 - RNA, 19 nt, Homo sapiens
  misc_RNA (1)...(19): siRNA sense strand
cuggaggaguugagucuga

SEQ ID NO: 391736 - RNA, 19 nt, Homo sapiens
  misc_RNA (1)...(19): siRNA sense strand
ccaccgggcaugggaagua

SEQ ID NO: 391737 - RNA, 19 nt, Homo sapiens
  misc_RNA (1)...(19): siRNA sense strand
gaagaguaacagugugaag

SEQ ID NO: 391738 - RNA, 19 nt, Homo sapiens
  misc_RNA (1)...(19): siRNA sense strand
agaguaacagugugaagaa

SEQ ID NO: 391739 - RNA, 19 nt, Homo sapiens
  misc_RNA (1)...(19): siRNA sense strand
aggaggagcaccagaaaug

SEQ ID NO: 391740 - RNA, 19 nt, Homo sapiens
  misc_RNA (1)...(19): siRNA sense strand
gggcaugggaaguaugaga

SEQ ID NO: 391741 - RNA, 19 nt, Homo sapiens
  misc_RNA (1)...(19): siRNA sense strand
cuggagacaugagcaagaa

SEQ ID NO: 391742 - RNA, 19 nt, Homo sapiens
  misc_RNA (1)...(19): siRNA sense strand
ggaugaggacgagggcuuu

SEQ ID NO: 391743 - RNA, 19 nt, Homo sapiens
  misc_RNA (1)...(19): siRNA sense strand
ggaggagcaccagaaaugu

SEQ ID NO: 391744 - RNA, 19 nt, Homo sapiens
  misc_RNA (1)...(19): siRNA sense strand
cagccagacuugcccaucu

SEQ ID NO: 391745 - RNA, 19 nt, Homo sapiens
  misc_RNA (1)...(19): siRNA sense strand
agaaaucccagccagacuu

SEQ ID NO: 391746 - RNA, 19 nt, Homo sapiens
  misc_RNA (1)...(19): siRNA sense strand
aaaggaggacagugaugaa

SEQ ID NO: 391747 - RNA, 19 nt, Homo sapiens
  misc_RNA (1)...(19): siRNA sense strand
gcuggagacaugagcaaga

SEQ ID NO: 391748 - RNA, 19 nt, Homo sapiens
  misc_RNA (1)...(19): siRNA sense strand
gaggagcaccagaaauguc

SEQ ID NO: 391749 - RNA, 19 nt, Homo sapiens
  misc_RNA (1)...(19): siRNA sense strand
ggcaugggaaguaugagaa

SEQ ID NO: 391750 - RNA, 19 nt, Homo sapiens
  misc_RNA (1)...(19): siRNA sense strand
cugaggagcgggaagaguu

SEQ ID NO: 391751 - RNA, 19 nt, Homo sapiens
  misc_RNA (1)...(19): siRNA sense strand
ggagacaugagcaagaaaa

SEQ ID NO: 391752 - RNA, 19 nt, Homo sapiens
  misc_RNA (1)...(19): siRNA sense strand
ugagaaggugcuuguggaa

SEQ ID NO: 391753 - RNA, 19 nt, Homo sapiens
  misc_RNA (1)...(19): siRNA sense strand
ugggaagagguauaaguuu

SEQ ID NO: 391754 - RNA, 19 nt, Homo sapiens
  misc_RNA (1)...(19): siRNA sense strand
gcuccaagaccucaucaac

SEQ ID NO: 391755 - RNA, 19 nt, Homo sapiens
  misc_RNA (1)...(19): siRNA sense strand
acaggaggagcaccagaaa

SEQ ID NO: 391756 - RNA, 19 nt, Homo sapiens
  misc_RNA (1)...(19): siRNA sense strand
gucccuaaaccgcuccaua

SEQ ID NO: 391757 - RNA, 19 nt, Homo sapiens
  misc_RNA (1)...(19): siRNA sense strand
gcuccauagagaagaguaa

SEQ ID NO: 391758 - RNA, 19 nt, Homo sapiens
  misc_RNA (1)...(19): siRNA sense strand
cugggaagagguauaaguu

SEQ ID NO: 391759 - RNA, 19 nt, Homo sapiens
  misc_RNA (1)...(19): siRNA sense strand
cggccugcaugccuacgaa

SEQ ID NO: 391760 - RNA, 19 nt, Homo sapiens
  misc_RNA (1)...(19): siRNA sense strand
gugggagacgggugaggua

SEQ ID NO: 391761 - RNA, 19 nt, Homo sapiens
  misc_RNA (1)...(19): siRNA sense strand
gaaaaggaggacagugaug

SEQ ID NO: 391762 - RNA, 19 nt, Homo sapiens
  misc_RNA (1)...(19): siRNA sense strand
gaagaaggaugcuguuaaa

SEQ ID NO: 391763 - RNA, 19 nt, Homo sapiens
  misc_RNA (1)...(19): siRNA sense strand
ggaaugggauuuacaguuu

SEQ ID NO: 391764 - RNA, 19 nt, Homo sapiens
  misc_RNA (1)...(19): siRNA sense strand
gcaaaugucuaucccauga

SEQ ID NO: 391765 - RNA, 19 nt, Homo sapiens
  misc_RNA (1)...(19): siRNA sense strand
cuagagaacuccuuuguuu

SEQ ID NO: 391766 - RNA, 19 nt, Homo sapiens
  misc_RNA (1)...(19): siRNA sense strand
ggaaagauauugguacaga

SEQ ID NO: 391767 - RNA, 19 nt, Homo sapiens
  misc_RNA (1)...(19): siRNA sense strand
gagacaagcucacaaauac

SEQ ID NO: 391768 - RNA, 19 nt, Homo sapiens
  misc_RNA (1)...(19): siRNA sense strand
gaaugggauuuacaguuua

SEQ ID NO: 391769 - RNA, 19 nt, Homo sapiens
  misc_RNA (1)...(19): siRNA sense strand
ggacaucaguggcuggaaa

SEQ ID NO: 391770 - RNA, 19 nt, Homo sapiens
  misc_RNA (1)...(19): siRNA sense strand
ucaaaguggugggauauua

SEQ ID NO: 391771 - RNA, 19 nt, Homo sapiens
  misc_RNA (1)...(19): siRNA sense strand
gaaugacacugagcaaauu

SEQ ID NO: 391772 - RNA, 19 nt, Homo sapiens
  misc_RNA (1)...(19): siRNA sense strand
gcucacaaauacaagauaa

SEQ ID NO: 391773 - RNA, 19 nt, Homo sapiens
  misc_RNA (1)...(19): siRNA sense strand
gcaaugggcacuccaauga

SEQ ID NO: 391774 - RNA, 19 nt, Homo sapiens
  misc_RNA (1)...(19): siRNA sense strand
ggagauggauuugaaacaa

SEQ ID NO: 391775 - RNA, 19 nt, Homo sapiens
  misc_RNA (1)...(19): siRNA sense strand
ugaagcaaaugaugacuaa

SEQ ID NO: 391776 - RNA, 19 nt, Homo sapiens
  misc_RNA (1)...(19): siRNA sense strand
ugaagaagguauaacacua

SEQ ID NO: 391777 - RNA, 19 nt, Homo sapiens
  misc_RNA (1)...(19): siRNA sense strand
caaauugccucuucaagca

SEQ ID NO: 391778 - RNA, 19 nt, Homo sapiens
  misc_RNA (1)...(19): siRNA sense strand
aagcaaggauuugacauua

SEQ ID NO: 391779 - RNA, 19 nt, Homo sapiens
  misc_RNA (1)...(19): siRNA sense strand
gaaagauauugguacagaa

SEQ ID NO: 391780 - RNA, 19 nt, Homo sapiens
  misc_RNA (1)...(19): siRNA sense strand
ggacugaaaguguauaaga

SEQ ID NO: 391781 - RNA, 19 nt, Homo sapiens
  misc_RNA (1)...(19): siRNA sense strand
gauaaauacugaagaaggu

SEQ ID NO: 391782 - RNA, 19 nt, Homo sapiens
  misc_RNA (1)...(19): siRNA sense strand
gagacaagacucaguauau

SEQ ID NO: 391783 - RNA, 19 nt, Homo sapiens
  misc_RNA (1)...(19): siRNA sense strand
gcagugcgaucuucugugu

SEQ ID NO: 391784 - RNA, 19 nt, Homo sapiens
  misc_RNA (1)...(19): siRNA sense strand
uuuaagggcugcugaaauu

SEQ ID NO: 391785 - RNA, 19 nt, Homo sapiens
  misc_RNA (1)...(19): siRNA sense strand
ucugagaucucuuaccuuu

SEQ ID NO: 391786 - RNA, 19 nt, Homo sapiens
  misc_RNA (1)...(19): siRNA sense strand
gaagcaaggauuugacauu

SEQ ID NO: 391787 - RNA, 19 nt, Homo sapiens
  misc_RNA (1)...(19): siRNA sense strand
ugagaucucuuaccuuuca

SEQ ID NO: 391788 - RNA, 19 nt, Homo sapiens
  misc_RNA (1)...(19): siRNA sense strand
aacaauggcuuaucuucua

SEQ ID NO: 391789 - RNA, 19 nt, Homo sapiens
  misc_RNA (1)...(19): siRNA sense strand
ggacuuaugaagcaaauga

SEQ ID NO: 391790 - RNA, 19 nt, Homo sapiens
  misc_RNA (1)...(19): siRNA sense strand
gaucaaacuggacuuauga

SEQ ID NO: 391791 - RNA, 19 nt, Homo sapiens
  misc_RNA (1)...(19): siRNA sense strand
gugcagauguuggauguuu

SEQ ID NO: 391792 - RNA, 19 nt, Homo sapiens
  misc_RNA (1)...(19): siRNA sense strand
agacaagacucaguauauu

SEQ ID NO: 391793 - RNA, 19 nt, Homo sapiens
  misc_RNA (1)...(19): siRNA sense strand
uaaagaagaugguaaacac

SEQ ID NO: 391794 - RNA, 19 nt, Homo sapiens
  misc_RNA (1)...(19): siRNA sense strand
gaagguauaacacuagaga

SEQ ID NO: 391795 - RNA, 19 nt, Homo sapiens
  misc_RNA (1)...(19): siRNA sense strand
guaaacaccaugaaguaaa

SEQ ID NO: 391796 - RNA, 19 nt, Homo sapiens
  misc_RNA (1)...(19): siRNA sense strand
aaacuggacuuaugaagca

SEQ ID NO: 391797 - RNA, 19 nt, Homo sapiens
  misc_RNA (1)...(19): siRNA sense strand
gacaagacucaguauauuu

SEQ ID NO: 391798 - RNA, 19 nt, Homo sapiens
  misc_RNA (1)...(19): siRNA sense strand
gagcacauauaccgccauu

SEQ ID NO: 391799 - RNA, 19 nt, Homo sapiens
  misc_RNA (1)...(19): siRNA sense strand
gaaguuaagccgccaguuc

SEQ ID NO: 391800 - RNA, 19 nt, Homo sapiens
  misc_RNA (1)...(19): siRNA sense strand
ggaaguuuauuuggucuga

SEQ ID NO: 391801 - RNA, 19 nt, Homo sapiens
  misc_RNA (1)...(19): siRNA sense strand
gauguuggauguuuacagu

SEQ ID NO: 391802 - RNA, 19 nt, Homo sapiens
  misc_RNA (1)...(19): siRNA sense strand
gaauaguggucagauugaa

SEQ ID NO: 391803 - RNA, 19 nt, Homo sapiens
  misc_RNA (1)...(19): siRNA sense strand
ugacaucccucacacuugu

SEQ ID NO: 391804 - RNA, 19 nt, Homo sapiens
  misc_RNA (1)...(19): siRNA sense strand
gcaaggauuugacauuacu

SEQ ID NO: 391805 - RNA, 19 nt, Homo sapiens
  misc_RNA (1)...(19): siRNA sense strand
caaaguggaagucacaauu

SEQ ID NO: 391806 - RNA, 19 nt, Homo sapiens
  misc_RNA (1)...(19): siRNA sense strand
gaauauaagugagaucaac

SEQ ID NO: 391807 - RNA, 19 nt, Homo sapiens
  misc_RNA (1)...(19): siRNA sense strand
ucucacaccuucaucacua

SEQ ID NO: 391808 - RNA, 19 nt, Homo sapiens
  misc_RNA (1)...(19): siRNA sense strand
gaaguuaucauggaucgaa

SEQ ID NO: 391809 - RNA, 19 nt, Homo sapiens
  misc_RNA (1)...(19): siRNA sense strand
ccacauacagggaauagaa

SEQ ID NO: 391810 - RNA, 19 nt, Homo sapiens
  misc_RNA (1)...(19): siRNA sense strand
gcacauauaccgccauugg

SEQ ID NO: 391811 - RNA, 19 nt, Homo sapiens
  misc_RNA (1)...(19): siRNA sense strand
gaaacaauacauccuggaa

SEQ ID NO: 391812 - RNA, 19 nt, Homo sapiens
  misc_RNA (1)...(19): siRNA sense strand
ggauaaagcagaugaaacu

SEQ ID NO: 391813 - RNA, 19 nt, Homo sapiens
  misc_RNA (1)...(19): siRNA sense strand
gaaaagaagucggucaguu

SEQ ID NO: 391814 - RNA, 19 nt, Homo sapiens
  misc_RNA (1)...(19): siRNA sense strand
cagcuaaucuauuucgaau

SEQ ID NO: 391815 - RNA, 19 nt, Homo sapiens
  misc_RNA (1)...(19): siRNA sense strand
caaccuagaaugacacuga

SEQ ID NO: 391816 - RNA, 19 nt, Homo sapiens
  misc_RNA (1)...(19): siRNA sense strand
gaagauagcggaauuuuca

SEQ ID NO: 391817 - RNA, 19 nt, Homo sapiens
  misc_RNA (1)...(19): siRNA sense strand
gaucuucuguguggugauu

SEQ ID NO: 391818 - RNA, 19 nt, Homo sapiens
  misc_RNA (1)...(19): siRNA sense strand
cugcugaaauucuuuacua

SEQ ID NO: 391819 - RNA, 19 nt, Homo sapiens
  misc_RNA (1)...(19): siRNA sense strand
gacuuucaaugacuacuuu

SEQ ID NO: 391820 - RNA, 19 nt, Homo sapiens
  misc_RNA (1)...(19): siRNA sense strand
ugagaacaauacagucaaa

SEQ ID NO: 391821 - RNA, 19 nt, Homo sapiens
  misc_RNA (1)...(19): siRNA sense strand
cuaaauggguaccagauuc

SEQ ID NO: 391822 - RNA, 19 nt, Homo sapiens
  misc_RNA (1)...(19): siRNA sense strand
ggaaucagcaaguucaaau

SEQ ID NO: 391823 - RNA, 19 nt, Homo sapiens
  misc_RNA (1)...(19): siRNA sense strand
cauggaaucucauuuaagg

SEQ ID NO: 391824 - RNA, 19 nt, Homo sapiens
  misc_RNA (1)...(19): siRNA sense strand
gagaguucauuaugcaguu

SEQ ID NO: 391825 - RNA, 19 nt, Homo sapiens
  misc_RNA (1)...(19): siRNA sense strand
ucacggaggaaguuuauuu

SEQ ID NO: 391826 - RNA, 19 nt, Homo sapiens
  misc_RNA (1)...(19): siRNA sense strand
cagguugguugaagacuuu

SEQ ID NO: 391827 - RNA, 19 nt, Homo sapiens
  misc_RNA (1)...(19): siRNA sense strand
ucacuauccuugaugcauu

SEQ ID NO: 391828 - RNA, 19 nt, Homo sapiens
  misc_RNA (1)...(19): siRNA sense strand
gaacaauacagucaaaggu

SEQ ID NO: 391829 - RNA, 19 nt, Homo sapiens
  misc_RNA (1)...(19): siRNA sense strand
gauaacaagauuacagcua

SEQ ID NO: 391830 - RNA, 19 nt, Homo sapiens
  misc_RNA (1)...(19): siRNA sense strand
gcucucugcucagucuuua

SEQ ID NO: 391831 - RNA, 19 nt, Homo sapiens
  misc_RNA (1)...(19): siRNA sense strand
gaagaagguauaacacuag

SEQ ID NO: 391832 - RNA, 19 nt, Homo sapiens
  misc_RNA (1)...(19): siRNA sense strand
gaaggaauuugggacuguu

SEQ ID NO: 391833 - RNA, 19 nt, Homo sapiens
  misc_RNA (1)...(19): siRNA sense strand
ccagagaguucauuaugca

SEQ ID NO: 391834 - RNA, 19 nt, Homo sapiens
  misc_RNA (1)...(19): siRNA sense strand
gaagcuacuccacauuauu

SEQ ID NO: 391835 - RNA, 19 nt, Homo sapiens
  misc_RNA (1)...(19): siRNA sense strand
gguauggaaccacaauuaa

SEQ ID NO: 391836 - RNA, 19 nt, Homo sapiens
  misc_RNA (1)...(19): siRNA sense strand
acaauuaucccucucaguu

SEQ ID NO: 391837 - RNA, 19 nt, Homo sapiens
  misc_RNA (1)...(19): siRNA sense strand
ugaccacaauggccuauau

SEQ ID NO: 391838 - RNA, 19 nt, Homo sapiens
  misc_RNA (1)...(19): siRNA sense strand
guauauaaccgugagauug

SEQ ID NO: 391839 - RNA, 19 nt, Homo sapiens
  misc_RNA (1)...(19): siRNA sense strand
caguccaaguuuaaaguua

SEQ ID NO: 391840 - RNA, 19 nt, Homo sapiens
  misc_RNA (1)...(19): siRNA sense strand
gaaggaugcuguuaaaagu

SEQ ID NO: 391841 - RNA, 19 nt, Homo sapiens
  misc_RNA (1)...(19): siRNA sense strand
uggagaagauaauuggaaa

SEQ ID NO: 391842 - RNA, 19 nt, Homo sapiens
  misc_RNA (1)...(19): siRNA sense strand
ggugcuggcucacaucuuc

SEQ ID NO: 391843 - RNA, 19 nt, Homo sapiens
  misc_RNA (1)...(19): siRNA sense strand
ugaauucucuccauuacag

SEQ ID NO: 391844 - RNA, 19 nt, Homo sapiens
  misc_RNA (1)...(19): siRNA sense strand
cuucuucucucaugaauca

SEQ ID NO: 391845 - RNA, 19 nt, Homo sapiens
  misc_RNA (1)...(19): siRNA sense strand
cauaacuucuucucucaug

SEQ ID NO: 391846 - RNA, 19 nt, Homo sapiens
  misc_RNA (1)...(19): siRNA sense strand
gaaccacaauuaaaagaga

SEQ ID NO: 391847 - RNA, 19 nt, Homo sapiens
  misc_RNA (1)...(19): siRNA sense strand
guauggaaccacaauuaaa

SEQ ID NO: 391848 - RNA, 19 nt, Homo sapiens
  misc_RNA (1)...(19): siRNA sense strand
gguaaacaccaugaaguaa

SEQ ID NO: 391849 - RNA, 19 nt, Homo sapiens
  misc_RNA (1)...(19): siRNA sense strand
gcaaaugaugacuaaagaa

SEQ ID NO: 391850 - RNA, 19 nt, Homo sapiens
  misc_RNA (1)...(19): siRNA sense strand
uccuaaagcugaaagaaga

SEQ ID NO: 391851 - RNA, 19 nt, Homo sapiens
  misc_RNA (1)...(19): siRNA sense strand
gacugaaaguguauaagau

SEQ ID NO: 391852 - RNA, 19 nt, Homo sapiens
  misc_RNA (1)...(19): siRNA sense strand
agaaacagccuaugagauc

SEQ ID NO: 391853 - RNA, 19 nt, Homo sapiens
  misc_RNA (1)...(19): siRNA sense strand
gacaagcucacaaauacaa

SEQ ID NO: 391854 - RNA, 19 nt, Homo sapiens
  misc_RNA (1)...(19): siRNA sense strand
uaaaauaugcugccaguuu

SEQ ID NO: 391855 - RNA, 19 nt, Homo sapiens
  misc_RNA (1)...(19): siRNA sense strand
ggaagucacaauucagaug

SEQ ID NO: 391856 - RNA, 19 nt, Homo sapiens
  misc_RNA (1)...(19): siRNA sense strand
gaaagucucacaccuucau

SEQ ID NO: 391857 - RNA, 19 nt, Homo sapiens
  misc_RNA (1)...(19): siRNA sense strand
ugaucaaacuggacuuaug

SEQ ID NO: 391858 - RNA, 19 nt, Homo sapiens
  misc_RNA (1)...(19): siRNA sense strand
gaaacagccuaugagaucu

SEQ ID NO: 391859 - RNA, 19 nt, Homo sapiens
  misc_RNA (1)...(19): siRNA sense strand
acaauggcuuaucuucuaa

SEQ ID NO: 391860 - RNA, 19 nt, Homo sapiens
  misc_RNA (1)...(19): siRNA sense strand
agaagaaggaugcuguuaa

SEQ ID NO: 391861 - RNA, 19 nt, Homo sapiens
  misc_RNA (1)...(19): siRNA sense strand
acacauggaaggauuuauu

SEQ ID NO: 391862 - RNA, 19 nt, Homo sapiens
  misc_RNA (1)...(19): siRNA sense strand
gcaaguacaaguuugagaa

SEQ ID NO: 391863 - RNA, 19 nt, Homo sapiens
  misc_RNA (1)...(19): siRNA sense strand
agaaagauaaggugaagaa

SEQ ID NO: 391864 - RNA, 19 nt, Homo sapiens
  misc_RNA (1)...(19): siRNA sense strand
aaagaaagauaaggugaag

SEQ ID NO: 391865 - RNA, 19 nt, Homo sapiens
  misc_RNA (1)...(19): siRNA sense strand
cgacugcaaguacaaguuu

SEQ ID NO: 391866 - RNA, 19 nt, Homo sapiens
  misc_RNA (1)...(19): siRNA sense strand
ccaagaaagggaagggaaa

SEQ ID NO: 391867 - RNA, 19 nt, Homo sapiens
  misc_RNA (1)...(19): siRNA sense strand
gaccaaagcaaaggccaaa

SEQ ID NO: 391868 - RNA, 19 nt, Homo sapiens
  misc_RNA (1)...(19): siRNA sense strand
gcaaaggccaaagccaaga

SEQ ID NO: 391869 - RNA, 19 nt, Homo sapiens
  misc_RNA (1)...(19): siRNA sense strand
ggagccgacugcaaguaca

SEQ ID NO: 391870 - RNA, 19 nt, Homo sapiens
  misc_RNA (1)...(19): siRNA sense strand
caaaggccaaagccaagaa

SEQ ID NO: 391871 - RNA, 19 nt, Homo sapiens
  misc_RNA (1)...(19): siRNA sense strand
gccaaggcacccugaagaa

SEQ ID NO: 391872 - RNA, 19 nt, Homo sapiens
  misc_RNA (1)...(19): siRNA sense strand
gacugcaaguacaaguuug

SEQ ID NO: 391873 - RNA, 19 nt, Homo sapiens
  misc_RNA (1)...(19): siRNA sense strand
gggcacaggcaccaaaguc

SEQ ID NO: 391874 - RNA, 19 nt, Homo sapiens
  misc_RNA (1)...(19): siRNA sense strand
gagccgacugcaaguacaa

SEQ ID NO: 391875 - RNA, 19 nt, Homo sapiens
  misc_RNA (1)...(19): siRNA sense strand
caagaaagggaagggaaag

SEQ ID NO: 391876 - RNA, 19 nt, Homo sapiens
  misc_RNA (1)...(19): siRNA sense strand
gaaagauaaggugaagaag

SEQ ID NO: 391877 - RNA, 19 nt, Homo sapiens
  misc_RNA (1)...(19): siRNA sense strand
gaacuggggugcgugugau

SEQ ID NO: 391878 - RNA, 19 nt, Homo sapiens
  misc_RNA (1)...(19): siRNA sense strand
cgccaaggcacccugaaga

SEQ ID NO: 391879 - RNA, 19 nt, Homo sapiens
  misc_RNA (1)...(19): siRNA sense strand
gaaauuggaaugaggauga

SEQ ID NO: 391880 - RNA, 19 nt, Homo sapiens
  misc_RNA (1)...(19): siRNA sense strand
uggaagggcugcugaguga

SEQ ID NO: 391881 - RNA, 19 nt, Homo sapiens
  misc_RNA (1)...(19): siRNA sense strand
aaagaaaucccugagugua

SEQ ID NO: 391882 - RNA, 19 nt, Homo sapiens
  misc_RNA (1)...(19): siRNA sense strand
gaauaaagggcaaaagaaa

SEQ ID NO: 391883 - RNA, 19 nt, Homo sapiens
  misc_RNA (1)...(19): siRNA sense strand
gaagggcugcugagugaga

SEQ ID NO: 391884 - RNA, 19 nt, Homo sapiens
  misc_RNA (1)...(19): siRNA sense strand
gcugacugcuccucuggaa

SEQ ID NO: 391885 - RNA, 19 nt, Homo sapiens
  misc_RNA (1)...(19): siRNA sense strand
agaaaucccugaguguaug

SEQ ID NO: 391886 - RNA, 19 nt, Homo sapiens
  misc_RNA (1)...(19): siRNA sense strand
gaagaaaacgaaaugauca

SEQ ID NO: 391887 - RNA, 19 nt, Homo sapiens
  misc_RNA (1)...(19): siRNA sense strand
gaaaaggaacggaauaaag

SEQ ID NO: 391888 - RNA, 19 nt, Homo sapiens
  misc_RNA (1)...(19): siRNA sense strand
ggaauaaagggcaaaagaa

SEQ ID NO: 391889 - RNA, 19 nt, Homo sapiens
  misc_RNA (1)...(19): siRNA sense strand
ugacugcuccucuggaaau

SEQ ID NO: 391890 - RNA, 19 nt, Homo sapiens
  misc_RNA (1)...(19): siRNA sense strand
ggaagaagaaaacgaaaug

SEQ ID NO: 391891 - RNA, 19 nt, Homo sapiens
  misc_RNA (1)...(19): siRNA sense strand
gaacggaauaaagggcaaa

SEQ ID NO: 391892 - RNA, 19 nt, Homo sapiens
  misc_RNA (1)...(19): siRNA sense strand
aagaaaucccugaguguau

SEQ ID NO: 391893 - RNA, 19 nt, Homo sapiens
  misc_RNA (1)...(19): siRNA sense strand
ggaaaaggaacggaauaaa

SEQ ID NO: 391894 - RNA, 19 nt, Homo sapiens
  misc_RNA (1)...(19): siRNA sense strand
aaauuggaaugaggaugaa

SEQ ID NO: 391895 - RNA, 19 nt, Homo sapiens
  misc_RNA (1)...(19): siRNA sense strand
gcccaucagggaagaagaa

SEQ ID NO: 391896 - RNA, 19 nt, Homo sapiens
  misc_RNA (1)...(19): siRNA sense strand
gaaaucccugaguguaugg

SEQ ID NO: 391897 - RNA, 19 nt, Homo sapiens
  misc_RNA (1)...(19): siRNA sense strand
ccagcaugcagccaaguga

SEQ ID NO: 391898 - RNA, 19 nt, Homo sapiens
  misc_RNA (1)...(19): siRNA sense strand
gacugcuccucuggaaauu

SEQ ID NO: 391899 - RNA, 19 nt, Homo sapiens
  misc_RNA (1)...(19): siRNA sense strand
gaagaagaaaacgaaauga

SEQ ID NO: 391900 - RNA, 19 nt, Homo sapiens
  misc_RNA (1)...(19): siRNA sense strand
ggacagagcugcugaaaga

SEQ ID NO: 391901 - RNA, 19 nt, Homo sapiens
  misc_RNA (1)...(19): siRNA sense strand
gaagauaacccuguuugua

SEQ ID NO: 391902 - RNA, 19 nt, Homo sapiens
  misc_RNA (1)...(19): siRNA sense strand
gcaauuccuugaagagcua

SEQ ID NO: 391903 - RNA, 19 nt, Homo sapiens
  misc_RNA (1)...(19): siRNA sense strand
gaauugccaugucgcauau

SEQ ID NO: 391904 - RNA, 19 nt, Homo sapiens
  misc_RNA (1)...(19): siRNA sense strand
gcagggcaguucagaguga

SEQ ID NO: 391905 - RNA, 19 nt, Homo sapiens
  misc_RNA (1)...(19): siRNA sense strand
ggaauugccaugucgcaua

SEQ ID NO: 391906 - RNA, 19 nt, Homo sapiens
  misc_RNA (1)...(19): siRNA sense strand
ccaagugucuuccagcuau

SEQ ID NO: 391907 - RNA, 19 nt, Homo sapiens
  misc_RNA (1)...(19): siRNA sense strand
guucaucucuacagaaaug

SEQ ID NO: 391908 - RNA, 19 nt, Homo sapiens
  misc_RNA (1)...(19): siRNA sense strand
gcuacgaaaucccuucuga

SEQ ID NO: 391909 - RNA, 19 nt, Homo sapiens
  misc_RNA (1)...(19): siRNA sense strand
gcugaaagaugcuauuggu

SEQ ID NO: 391910 - RNA, 19 nt, Homo sapiens
  misc_RNA (1)...(19): siRNA sense strand
aagauaacccuguuuguaa

SEQ ID NO: 391911 - RNA, 19 nt, Homo sapiens
  misc_RNA (1)...(19): siRNA sense strand
gaaguggaauugccauguc

SEQ ID NO: 391912 - RNA, 19 nt, Homo sapiens
  misc_RNA (1)...(19): siRNA sense strand
gaaauggcaaggaccaaga

SEQ ID NO: 391913 - RNA, 19 nt, Homo sapiens
  misc_RNA (1)...(19): siRNA sense strand
aauguaagguucucagaug

SEQ ID NO: 391914 - RNA, 19 nt, Homo sapiens
  misc_RNA (1)...(19): siRNA sense strand
gcagggcaauuccuugaag

SEQ ID NO: 391915 - RNA, 19 nt, Homo sapiens
  misc_RNA (1)...(19): siRNA sense strand
ggaauugaaaguagaagau

SEQ ID NO: 391916 - RNA, 19 nt, Homo sapiens
  misc_RNA (1)...(19): siRNA sense strand
gaaaggugacucucaggau

SEQ ID NO: 391917 - RNA, 19 nt, Homo sapiens
  misc_RNA (1)...(19): siRNA sense strand
gcuggaagauaacccuguu

SEQ ID NO: 391918 - RNA, 19 nt, Homo sapiens
  misc_RNA (1)...(19): siRNA sense strand
gauaacccuguuuguaauu

SEQ ID NO: 391919 - RNA, 19 nt, Homo sapiens
  misc_RNA (1)...(19): siRNA sense strand
agauaacccuguuuguaau

SEQ ID NO: 391920 - RNA, 19 nt, Homo sapiens
  misc_RNA (1)...(19): siRNA sense strand
gugcccugcuggaagauaa

SEQ ID NO: 391921 - RNA, 19 nt, Homo sapiens
  misc_RNA (1)...(19): siRNA sense strand
gaauguaagguucucagau

SEQ ID NO: 391922 - RNA, 19 nt, Homo sapiens
  misc_RNA (1)...(19): siRNA sense strand
ggaagauaacccuguuugu

SEQ ID NO: 391923 - RNA, 19 nt, Homo sapiens
  misc_RNA (1)...(19): siRNA sense strand
guaagguucucagaugaag

SEQ ID NO: 391924 - RNA, 19 nt, Homo sapiens
  misc_RNA (1)...(19): siRNA sense strand
ugguucaucucuacagaaa

SEQ ID NO: 391925 - RNA, 19 nt, Homo sapiens
  misc_RNA (1)...(19): siRNA sense strand
ggaauguaagguucucaga

SEQ ID NO: 391926 - RNA, 19 nt, Homo sapiens
  misc_RNA (1)...(19): siRNA sense strand
ggugguucaucucuacaga

SEQ ID NO: 391927 - RNA, 19 nt, Homo sapiens
  misc_RNA (1)...(19): siRNA sense strand
guaauugugccgguucuug

SEQ ID NO: 391928 - RNA, 19 nt, Homo sapiens
  misc_RNA (1)...(19): siRNA sense strand
cucaggauccggaauguaa

SEQ ID NO: 391929 - RNA, 19 nt, Homo sapiens
  misc_RNA (1)...(19): siRNA sense strand
gagggaaaggugacucuca

SEQ ID NO: 391930 - RNA, 19 nt, Homo sapiens
  misc_RNA (1)...(19): siRNA sense strand
gaauugaaaguagaagauc

SEQ ID NO: 391931 - RNA, 19 nt, Homo sapiens
  misc_RNA (1)...(19): siRNA sense strand
ccaagaggaggcagcaaug

SEQ ID NO: 391932 - RNA, 19 nt, Homo sapiens
  misc_RNA (1)...(19): siRNA sense strand
cuagggugguucaucucua

SEQ ID NO: 391933 - RNA, 19 nt, Homo sapiens
  misc_RNA (1)...(19): siRNA sense strand
gcauggaggugggguggua

SEQ ID NO: 391934 - RNA, 19 nt, Homo sapiens
  misc_RNA (1)...(19): siRNA sense strand
cagggcaauuccuugaaga

SEQ ID NO: 391935 - RNA, 19 nt, Homo sapiens
  misc_RNA (1)...(19): siRNA sense strand
uagcagggcaauuccuuga

SEQ ID NO: 391936 - RNA, 19 nt, Homo sapiens
  misc_RNA (1)...(19): siRNA sense strand
uaacccuguuuguaauugu

SEQ ID NO: 391937 - RNA, 19 nt, Homo sapiens
  misc_RNA (1)...(19): siRNA sense strand
ucucuagggugguucaucu

SEQ ID NO: 391938 - RNA, 19 nt, Homo sapiens
  misc_RNA (1)...(19): siRNA sense strand
caacuggcuacaucgaaga

SEQ ID NO: 391939 - RNA, 19 nt, Homo sapiens
  misc_RNA (1)...(19): siRNA sense strand
caagugucuuccagcuaug

SEQ ID NO: 391940 - RNA, 19 nt, Homo sapiens
  misc_RNA (1)...(19): siRNA sense strand
ggucggggaugaaguggaa

SEQ ID NO: 391941 - RNA, 19 nt, Homo sapiens
  misc_RNA (1)...(19): siRNA sense strand
ggaccaagacacccuaucc

SEQ ID NO: 391942 - RNA, 19 nt, Homo sapiens
  misc_RNA (1)...(19): siRNA sense strand
agaggaggcagcaauggaa

SEQ ID NO: 391943 - RNA, 19 nt, Homo sapiens
  misc_RNA (1)...(19): siRNA sense strand
acagagcugcugaaagaug

SEQ ID NO: 391944 - RNA, 19 nt, Homo sapiens
  misc_RNA (1)...(19): siRNA sense strand
gacccuugguugccuugau

SEQ ID NO: 391945 - RNA, 19 nt, Homo sapiens
  misc_RNA (1)...(19): siRNA sense strand
uggaagauaacccuguuug

SEQ ID NO: 391946 - RNA, 19 nt, Homo sapiens
  misc_RNA (1)...(19): siRNA sense strand
ccgagaucauucuuaccaa

SEQ ID NO: 391947 - RNA, 19 nt, Homo sapiens
  misc_RNA (1)...(19): siRNA sense strand
cuggcuacaucgaagacua

SEQ ID NO: 391948 - RNA, 19 nt, Homo sapiens
  misc_RNA (1)...(19): siRNA sense strand
cuuccgagaucauucuuac

SEQ ID NO: 391949 - RNA, 19 nt, Homo sapiens
  misc_RNA (1)...(19): siRNA sense strand
gcaguucagagugauagga

SEQ ID NO: 391950 - RNA, 19 nt, Homo sapiens
  misc_RNA (1)...(19): siRNA sense strand
uagggugguucaucucuac

SEQ ID NO: 391951 - RNA, 19 nt, Homo sapiens
  misc_RNA (1)...(19): siRNA sense strand
gaggaggcagcaauggaau

SEQ ID NO: 391952 - RNA, 19 nt, Homo sapiens
  misc_RNA (1)...(19): siRNA sense strand
uggcaaggaccaagaugga

SEQ ID NO: 391953 - RNA, 19 nt, Homo sapiens
  misc_RNA (1)...(19): siRNA sense strand
gaagacuagcagggcaauu

SEQ ID NO: 391954 - RNA, 19 nt, Homo sapiens
  misc_RNA (1)...(19): siRNA sense strand
auaacccuguuuguaauug

SEQ ID NO: 391955 - RNA, 19 nt, Homo sapiens
  misc_RNA (1)...(19): siRNA sense strand
gaacuacgcuccuggcuuu

SEQ ID NO: 391956 - RNA, 19 nt, Homo sapiens
  misc_RNA (1)...(19): siRNA sense strand
ggacggagcugaaguugga

SEQ ID NO: 391957 - RNA, 19 nt, Homo sapiens
  misc_RNA (1)...(19): siRNA sense strand
gcaaauaugacacguguaa

SEQ ID NO: 391958 - RNA, 19 nt, Homo sapiens
  misc_RNA (1)...(19): siRNA sense strand
caagauacgugucaauugu

SEQ ID NO: 391959 - RNA, 19 nt, Homo sapiens
  misc_RNA (1)...(19): siRNA sense strand
gccaggagaucaccaauga

SEQ ID NO: 391960 - RNA, 19 nt, Homo sapiens
  misc_RNA (1)...(19): siRNA sense strand
gaaggcggcucccacauca

SEQ ID NO: 391961 - RNA, 19 nt, Homo sapiens
  misc_RNA (1)...(19): siRNA sense strand
gacaaacagugguguguga

SEQ ID NO: 391962 - RNA, 19 nt, Homo sapiens
  misc_RNA (1)...(19): siRNA sense strand
gccagaaggugcaguguga

SEQ ID NO: 391963 - RNA, 19 nt, Homo sapiens
  misc_RNA (1)...(19): siRNA sense strand
gaagaccaguuuggaaaug

SEQ ID NO: 391964 - RNA, 19 nt, Homo sapiens
  misc_RNA (1)...(19): siRNA sense strand
ggagacaccuguuauuucg

SEQ ID NO: 391965 - RNA, 19 nt, Homo sapiens
  misc_RNA (1)...(19): siRNA sense strand
gaagaacaacugcacauuc

SEQ ID NO: 391966 - RNA, 19 nt, Homo sapiens
  misc_RNA (1)...(19): siRNA sense strand
gacaccugcugcaacauua

SEQ ID NO: 391967 - RNA, 19 nt, Homo sapiens
  misc_RNA (1)...(19): siRNA sense strand
uacaagaggugcaaauaug

SEQ ID NO: 391968 - RNA, 19 nt, Homo sapiens
  misc_RNA (1)...(19): siRNA sense strand
gaacaacugcacauucuuc

SEQ ID NO: 391969 - RNA, 19 nt, Homo sapiens
  misc_RNA (1)...(19): siRNA sense strand
ggaaugcccuugcguccau

SEQ ID NO: 391970 - RNA, 19 nt, Homo sapiens
  misc_RNA (1)...(19): siRNA sense strand
gcacugcccuacaagaagu

SEQ ID NO: 391971 - RNA, 19 nt, Homo sapiens
  misc_RNA (1)...(19): siRNA sense strand
gaacuucaacggccuggaa

SEQ ID NO: 391972 - RNA, 19 nt, Homo sapiens
  misc_RNA (1)...(19): siRNA sense strand
caauaacuccuccuacauu

SEQ ID NO: 391973 - RNA, 19 nt, Homo sapiens
  misc_RNA (1)...(19): siRNA sense strand
acaacgaccuguauucuuc

SEQ ID NO: 391974 - RNA, 19 nt, Homo sapiens
  misc_RNA (1)...(19): siRNA sense strand
caaguccgauggcagugua

SEQ ID NO: 391975 - RNA, 19 nt, Homo sapiens
  misc_RNA (1)...(19): siRNA sense strand
acucccagcucuccaauaa

SEQ ID NO: 391976 - RNA, 19 nt, Homo sapiens
  misc_RNA (1)...(19): siRNA sense strand
gaagagcccacgugcaaau

SEQ ID NO: 391977 - RNA, 19 nt, Homo sapiens
  misc_RNA (1)...(19): siRNA sense strand
guacguuggaguucuauaa

SEQ ID NO: 391978 - RNA, 19 nt, Homo sapiens
  misc_RNA (1)...(19): siRNA sense strand
guaacugucagaacaauga

SEQ ID NO: 391979 - RNA, 19 nt, Homo sapiens
  misc_RNA (1)...(19): siRNA sense strand
ccaagaccguccucaugaa

SEQ ID NO: 391980 - RNA, 19 nt, Homo sapiens
  misc_RNA (1)...(19): siRNA sense strand
cagaagagcccacgugcaa

SEQ ID NO: 391981 - RNA, 19 nt, Homo sapiens
  misc_RNA (1)...(19): siRNA sense strand
gcagugugaugucucuguu

SEQ ID NO: 391982 - RNA, 19 nt, Homo sapiens
  misc_RNA (1)...(19): siRNA sense strand
caagaaugaagaccaguuu

SEQ ID NO: 391983 - RNA, 19 nt, Homo sapiens
  misc_RNA (1)...(19): siRNA sense strand
caaccacccuucugaguac

SEQ ID NO: 391984 - RNA, 19 nt, Homo sapiens
  misc_RNA (1)...(19): siRNA sense strand
caaaccagguggagacaca

SEQ ID NO: 391985 - RNA, 19 nt, Homo sapiens
  misc_RNA (1)...(19): siRNA sense strand
aauaacuccuccuacauuu

SEQ ID NO: 391986 - RNA, 19 nt, Homo sapiens
  misc_RNA (1)...(19): siRNA sense strand
ggaccaccguguucaucaa

SEQ ID NO: 391987 - RNA, 19 nt, Homo sapiens
  misc_RNA (1)...(19): siRNA sense strand
ucaaccagcugcaggugaa

SEQ ID NO: 391988 - RNA, 19 nt, Homo sapiens
  misc_RNA (1)...(19): siRNA sense strand
gccacuacaucaccuuuga

SEQ ID NO: 391989 - RNA, 19 nt, Homo sapiens
  misc_RNA (1)...(19): siRNA sense strand
cagaaggcaccguauauga

SEQ ID NO: 391990 - RNA, 19 nt, Homo sapiens
  misc_RNA (1)...(19): siRNA sense strand
gagcugaaguuggaagaca

SEQ ID NO: 391991 - RNA, 19 nt, Homo sapiens
  misc_RNA (1)...(19): siRNA sense strand
gagcgaugccuacaccaaa

SEQ ID NO: 391992 - RNA, 19 nt, Homo sapiens
  misc_RNA (1)...(19): siRNA sense strand
gcuguacguuggaguucua

SEQ ID NO: 391993 - RNA, 19 nt, Homo sapiens
  misc_RNA (1)...(19): siRNA sense strand
agacaaguguggcugcuau

SEQ ID NO: 391994 - RNA, 19 nt, Homo sapiens
  misc_RNA (1)...(19): siRNA sense strand
ccaaggccaucaagaucuu

SEQ ID NO: 391995 - RNA, 19 nt, Homo sapiens
  misc_RNA (1)...(19): siRNA sense strand
ggugcucccuccugaagaa

SEQ ID NO: 391996 - RNA, 19 nt, Homo sapiens
  misc_RNA (1)...(19): siRNA sense strand
ccgacgggcugauggauga

SEQ ID NO: 391997 - RNA, 19 nt, Homo sapiens
  misc_RNA (1)...(19): siRNA sense strand
aggaggaucugaagaagug

SEQ ID NO: 391998 - RNA, 19 nt, Homo sapiens
  misc_RNA (1)...(19): siRNA sense strand
cagacgcacuguaucauca

SEQ ID NO: 391999 - RNA, 19 nt, Homo sapiens
  misc_RNA (1)...(19): siRNA sense strand
gaucaagaccgugcauaug

SEQ ID NO: 392000 - RNA, 19 nt, Homo sapiens
  misc_RNA (1)...(19): siRNA sense strand
gacaggagaacgagacuug

SEQ ID NO: 392001 - RNA, 19 nt, Homo sapiens
  misc_RNA (1)...(19): siRNA sense strand
caccauguauccugauguu

SEQ ID NO: 392002 - RNA, 19 nt, Homo sapiens
  misc_RNA (1)...(19): siRNA sense strand
ccaccaaccagcacuacua

SEQ ID NO: 392003 - RNA, 19 nt, Homo sapiens
  misc_RNA (1)...(19): siRNA sense strand
gcaagaaugaagaccaguu

SEQ ID NO: 392004 - RNA, 19 nt, Homo sapiens
  misc_RNA (1)...(19): siRNA sense strand
agaaugcgguggucuucaa

SEQ ID NO: 392005 - RNA, 19 nt, Homo sapiens
  misc_RNA (1)...(19): siRNA sense strand
ugcuggagcuggacacuaa

SEQ ID NO: 392006 - RNA, 19 nt, Homo sapiens
  misc_RNA (1)...(19): siRNA sense strand
cggacaagguggacaacaa

SEQ ID NO: 392007 - RNA, 19 nt, Homo sapiens
  misc_RNA (1)...(19): siRNA sense strand
gaaugaagaccaguuugga

SEQ ID NO: 392008 - RNA, 19 nt, Homo sapiens
  misc_RNA (1)...(19): siRNA sense strand
gagcuggacuucgggaaca

SEQ ID NO: 392009 - RNA, 19 nt, Homo sapiens
  misc_RNA (1)...(19): siRNA sense strand
ggaggacggagcugaaguu

SEQ ID NO: 392010 - RNA, 19 nt, Homo sapiens
  misc_RNA (1)...(19): siRNA sense strand
ccaauaagcaccacaacca

SEQ ID NO: 392011 - RNA, 19 nt, Homo sapiens
  misc_RNA (1)...(19): siRNA sense strand
cccaauggaugcugcaaga

SEQ ID NO: 392012 - RNA, 19 nt, Homo sapiens
  misc_RNA (1)...(19): siRNA sense strand
ucuaacaacuacuccucua

SEQ ID NO: 392013 - RNA, 19 nt, Homo sapiens
  misc_RNA (1)...(19): siRNA sense strand
acaacggccugcagagcua

SEQ ID NO: 392014 - RNA, 19 nt, Homo sapiens
  misc_RNA (1)...(19): siRNA sense strand
uguaagaagugugaacaga

SEQ ID NO: 392015 - RNA, 19 nt, Homo sapiens
  misc_RNA (1)...(19): siRNA sense strand
ucaaccacccuucugagua

SEQ ID NO: 392016 - RNA, 19 nt, Homo sapiens
  misc_RNA (1)...(19): siRNA sense strand
aaacaguggugugugaugu

SEQ ID NO: 392017 - RNA, 19 nt, Homo sapiens
  misc_RNA (1)...(19): siRNA sense strand
gcacgggcaucaucgucau

SEQ ID NO: 392018 - RNA, 19 nt, Homo sapiens
  misc_RNA (1)...(19): siRNA sense strand
gcacggacaagguggacaa

SEQ ID NO: 392019 - RNA, 19 nt, Homo sapiens
  misc_RNA (1)...(19): siRNA sense strand
gcccgguucuccaguuuau

SEQ ID NO: 392020 - RNA, 19 nt, Homo sapiens
  misc_RNA (1)...(19): siRNA sense strand
caaugugcccagagaguuu

SEQ ID NO: 392021 - RNA, 19 nt, Homo sapiens
  misc_RNA (1)...(19): siRNA sense strand
ucaagaccgugcauaugau

SEQ ID NO: 392022 - RNA, 19 nt, Homo sapiens
  misc_RNA (1)...(19): siRNA sense strand
aaacccaacuuucacaaac

SEQ ID NO: 392023 - RNA, 19 nt, Homo sapiens
  misc_RNA (1)...(19): siRNA sense strand
ggucugacuggaucaauga

SEQ ID NO: 392024 - RNA, 19 nt, Homo sapiens
  misc_RNA (1)...(19): siRNA sense strand
gcccuugcguccauaacaa

SEQ ID NO: 392025 - RNA, 19 nt, Homo sapiens
  misc_RNA (1)...(19): siRNA sense strand
gauucgaagugaagagcaa

SEQ ID NO: 392026 - RNA, 19 nt, Homo sapiens
  misc_RNA (1)...(19): siRNA sense strand
caagaggaccaccguguuc

SEQ ID NO: 392027 - RNA, 19 nt, Homo sapiens
  misc_RNA (1)...(19): siRNA sense strand
caccguauaugacgacauc

SEQ ID NO: 392028 - RNA, 19 nt, Homo sapiens
  misc_RNA (1)...(19): siRNA sense strand
caacuacgagaucaacguu

SEQ ID NO: 392029 - RNA, 19 nt, Homo sapiens
  misc_RNA (1)...(19): siRNA sense strand
gcuccuacguggcuguuca

SEQ ID NO: 392030 - RNA, 19 nt, Homo sapiens
  misc_RNA (1)...(19): siRNA sense strand
gcugcuggcugacaagaag

SEQ ID NO: 392031 - RNA, 19 nt, Homo sapiens
  misc_RNA (1)...(19): siRNA sense strand
gcccagaaggcaccguaua

SEQ ID NO: 392032 - RNA, 19 nt, Homo sapiens
  misc_RNA (1)...(19): siRNA sense strand
cgacaccugcugcaacauu

SEQ ID NO: 392033 - RNA, 19 nt, Homo sapiens
  misc_RNA (1)...(19): siRNA sense strand
ggacaggcccaucuaugag

SEQ ID NO: 392034 - RNA, 19 nt, Homo sapiens
  misc_RNA (1)...(19): siRNA sense strand
gcagugcagcauccucaaa

SEQ ID NO: 392035 - RNA, 19 nt, Homo sapiens
  misc_RNA (1)...(19): siRNA sense strand
ggaacaugcagaagaucaa

SEQ ID NO: 392036 - RNA, 19 nt, Homo sapiens
  misc_RNA (1)...(19): siRNA sense strand
agaccguccucaugaauca

SEQ ID NO: 392037 - RNA, 19 nt, Homo sapiens
  misc_RNA (1)...(19): siRNA sense strand
gccgacaccugcugcaaca

SEQ ID NO: 392038 - RNA, 19 nt, Homo sapiens
  misc_RNA (1)...(19): siRNA sense strand
caacacaguccugguggaa

SEQ ID NO: 392039 - RNA, 19 nt, Homo sapiens
  misc_RNA (1)...(19): siRNA sense strand
ucgugaagguggaguguga

SEQ ID NO: 392040 - RNA, 19 nt, Homo sapiens
  misc_RNA (1)...(19): siRNA sense strand
gggcagcuaacaucucuug

SEQ ID NO: 392041 - RNA, 19 nt, Homo sapiens
  misc_RNA (1)...(19): siRNA sense strand
guguuacgacuacaagaua

SEQ ID NO: 392042 - RNA, 19 nt, Homo sapiens
  misc_RNA (1)...(19): siRNA sense strand
gaccauuuggacuguguua

SEQ ID NO: 392043 - RNA, 19 nt, Homo sapiens
  misc_RNA (1)...(19): siRNA sense strand
uuacaagaggugcaaauau

SEQ ID NO: 392044 - RNA, 19 nt, Homo sapiens
  misc_RNA (1)...(19): siRNA sense strand
gcgagcagugugucuguaa

SEQ ID NO: 392045 - RNA, 19 nt, Homo sapiens
  misc_RNA (1)...(19): siRNA sense strand
gggagcaugucugcaacaa

SEQ ID NO: 392046 - RNA, 19 nt, Homo sapiens
  misc_RNA (1)...(19): siRNA sense strand
gcgugaagauccacaacca

SEQ ID NO: 392047 - RNA, 19 nt, Homo sapiens
  misc_RNA (1)...(19): siRNA sense strand
ggagugcuguaagaagugu

SEQ ID NO: 392048 - RNA, 19 nt, Homo sapiens
  misc_RNA (1)...(19): siRNA sense strand
ucacgggaaugcugaguac

SEQ ID NO: 392049 - RNA, 19 nt, Homo sapiens
  misc_RNA (1)...(19): siRNA sense strand
ugacaaccaccaccacaga

SEQ ID NO: 392050 - RNA, 19 nt, Homo sapiens
  misc_RNA (1)...(19): siRNA sense strand
guugcuggcccauggauaa

SEQ ID NO: 392051 - RNA, 19 nt, Homo sapiens
  misc_RNA (1)...(19): siRNA sense strand
agauacgugucaauuguug

SEQ ID NO: 392052 - RNA, 19 nt, Homo sapiens
  misc_RNA (1)...(19): siRNA sense strand
ccaaggacaggcccaucua

SEQ ID NO: 392053 - RNA, 19 nt, Homo sapiens
  misc_RNA (1)...(19): siRNA sense strand
gcuccaaggccaucaagau

SEQ ID NO: 392054 - RNA, 19 nt, Homo sapiens
  misc_RNA (1)...(19): siRNA sense strand
gaaugcccuugcguccaua

SEQ ID NO: 392055 - RNA, 19 nt, Homo sapiens
  misc_RNA (1)...(19): siRNA sense strand
gaaagaagcuaccacaucu

SEQ ID NO: 392056 - RNA, 19 nt, Homo sapiens
  misc_RNA (1)...(19): siRNA sense strand
ggaagaaugugcugagauu

SEQ ID NO: 392057 - RNA, 19 nt, Homo sapiens
  misc_RNA (1)...(19): siRNA sense strand
gcacugagcucuucaaacu

SEQ ID NO: 392058 - RNA, 19 nt, Homo sapiens
  misc_RNA (1)...(19): siRNA sense strand
gaagaaaguugccaagaag

SEQ ID NO: 392059 - RNA, 19 nt, Homo sapiens
  misc_RNA (1)...(19): siRNA sense strand
ugaacaagcugaugucaaa

SEQ ID NO: 392060 - RNA, 19 nt, Homo sapiens
  misc_RNA (1)...(19): siRNA sense strand
gcacagaaguggcugacaa

SEQ ID NO: 392061 - RNA, 19 nt, Homo sapiens
  misc_RNA (1)...(19): siRNA sense strand
ggaggaggcugaugaacaa

SEQ ID NO: 392062 - RNA, 19 nt, Homo sapiens
  misc_RNA (1)...(19): siRNA sense strand
cugcagauauugaaacuua

SEQ ID NO: 392063 - RNA, 19 nt, Homo sapiens
  misc_RNA (1)...(19): siRNA sense strand
gaacuacucacccucauuu

SEQ ID NO: 392064 - RNA, 19 nt, Homo sapiens
  misc_RNA (1)...(19): siRNA sense strand
caagaagccugagcucaua

SEQ ID NO: 392065 - RNA, 19 nt, Homo sapiens
  misc_RNA (1)...(19): siRNA sense strand
gaacuuagagcaggagaua

SEQ ID NO: 392066 - RNA, 19 nt, Homo sapiens
  misc_RNA (1)...(19): siRNA sense strand
gaaagacugugaacaccaa

SEQ ID NO: 392067 - RNA, 19 nt, Homo sapiens
  misc_RNA (1)...(19): siRNA sense strand
agauagagcucaacaagaa

SEQ ID NO: 392068 - RNA, 19 nt, Homo sapiens
  misc_RNA (1)...(19): siRNA sense strand
gauagcagaucucacagaa

SEQ ID NO: 392069 - RNA, 19 nt, Homo sapiens
  misc_RNA (1)...(19): siRNA sense strand
ggaagaagcagauccagaa

SEQ ID NO: 392070 - RNA, 19 nt, Homo sapiens
  misc_RNA (1)...(19): siRNA sense strand
agaagaagcuggagacaga

SEQ ID NO: 392071 - RNA, 19 nt, Homo sapiens
  misc_RNA (1)...(19): siRNA sense strand
caagugaaaucagaaauug

SEQ ID NO: 392072 - RNA, 19 nt, Homo sapiens
  misc_RNA (1)...(19): siRNA sense strand
uauuagaucuggagaauga

SEQ ID NO: 392073 - RNA, 19 nt, Homo sapiens
  misc_RNA (1)...(19): siRNA sense strand
ccaaacgggucauccagua

SEQ ID NO: 392074 - RNA, 19 nt, Homo sapiens
  misc_RNA (1)...(19): siRNA sense strand
ggaaagcucccuagaacaa

SEQ ID NO: 392075 - RNA, 19 nt, Homo sapiens
  misc_RNA (1)...(19): siRNA sense strand
gaaauuggaaggagacuug

SEQ ID NO: 392076 - RNA, 19 nt, Homo sapiens
  misc_RNA (1)...(19): siRNA sense strand
gaaagacauugaugaccuu

SEQ ID NO: 392077 - RNA, 19 nt, Homo sapiens
  misc_RNA (1)...(19): siRNA sense strand
ucauagagcugcugcuuau

SEQ ID NO: 392078 - RNA, 19 nt, Homo sapiens
  misc_RNA (1)...(19): siRNA sense strand
ggaaggagcuagaggaaaa

SEQ ID NO: 392079 - RNA, 19 nt, Homo sapiens
  misc_RNA (1)...(19): siRNA sense strand
ggaagaagcaugcggauag

SEQ ID NO: 392080 - RNA, 19 nt, Homo sapiens
  misc_RNA (1)...(19): siRNA sense strand
gagagugugucgaaaucua

SEQ ID NO: 392081 - RNA, 19 nt, Homo sapiens
  misc_RNA (1)...(19): siRNA sense strand
agaagaaaguugccaagaa

SEQ ID NO: 392082 - RNA, 19 nt, Homo sapiens
  misc_RNA (1)...(19): siRNA sense strand
gcuuugaaaucuuugagua

SEQ ID NO: 392083 - RNA, 19 nt, Homo sapiens
  misc_RNA (1)...(19): siRNA sense strand
gcucagcgccuucaagauu

SEQ ID NO: 392084 - RNA, 19 nt, Homo sapiens
  misc_RNA (1)...(19): siRNA sense strand
agaggaaacuggaggauga

SEQ ID NO: 392085 - RNA, 19 nt, Homo sapiens
  misc_RNA (1)...(19): siRNA sense strand
ugacacaagugaaaucaga

SEQ ID NO: 392086 - RNA, 19 nt, Homo sapiens
  misc_RNA (1)...(19): siRNA sense strand
gaagaaggcccuccaagag

SEQ ID NO: 392087 - RNA, 19 nt, Homo sapiens
  misc_RNA (1)...(19): siRNA sense strand
cggcauagcugcuccuuuc

SEQ ID NO: 392088 - RNA, 19 nt, Homo sapiens
  misc_RNA (1)...(19): siRNA sense strand
cggaggagcugaagaagga

SEQ ID NO: 392089 - RNA, 19 nt, Homo sapiens
  misc_RNA (1)...(19): siRNA sense strand
uagcagaucucacagaaca

SEQ ID NO: 392090 - RNA, 19 nt, Homo sapiens
  misc_RNA (1)...(19): siRNA sense strand
gaugguugauguugaaaga

SEQ ID NO: 392091 - RNA, 19 nt, Homo sapiens
  misc_RNA (1)...(19): siRNA sense strand
acgaaaggcucaagaagaa

SEQ ID NO: 392092 - RNA, 19 nt, Homo sapiens
  misc_RNA (1)...(19): siRNA sense strand
caaacaggauucucuaugg

SEQ ID NO: 392093 - RNA, 19 nt, Homo sapiens
  misc_RNA (1)...(19): siRNA sense strand
cagguuggcuggagaagaa

SEQ ID NO: 392094 - RNA, 19 nt, Homo sapiens
  misc_RNA (1)...(19): siRNA sense strand
gaagaggacaggaagaaug

SEQ ID NO: 392095 - RNA, 19 nt, Homo sapiens
  misc_RNA (1)...(19): siRNA sense strand
gggcaagaaugaggaaauu

SEQ ID NO: 392096 - RNA, 19 nt, Homo sapiens
  misc_RNA (1)...(19): siRNA sense strand
gcguagaccuggaaaggaa

SEQ ID NO: 392097 - RNA, 19 nt, Homo sapiens
  misc_RNA (1)...(19): siRNA sense strand
guacaacauucgcucauuc

SEQ ID NO: 392098 - RNA, 19 nt, Homo sapiens
  misc_RNA (1)...(19): siRNA sense strand
acaaguggcugccggugua

SEQ ID NO: 392099 - RNA, 19 nt, Homo sapiens
  misc_RNA (1)...(19): siRNA sense strand
ccacgagagugaagaguga

SEQ ID NO: 392100 - RNA, 19 nt, Homo sapiens
  misc_RNA (1)...(19): siRNA sense strand
ucaaggagcugacguacca

SEQ ID NO: 392101 - RNA, 19 nt, Homo sapiens
  misc_RNA (1)...(19): siRNA sense strand
gaagaggaacuaccagaga

SEQ ID NO: 392102 - RNA, 19 nt, Homo sapiens
  misc_RNA (1)...(19): siRNA sense strand
cggguuagaugaaacaauu

SEQ ID NO: 392103 - RNA, 19 nt, Homo sapiens
  misc_RNA (1)...(19): siRNA sense strand
gcaucaacuucaccaauga

SEQ ID NO: 392104 - RNA, 19 nt, Homo sapiens
  misc_RNA (1)...(19): siRNA sense strand
gcucaagaguccauauuag

SEQ ID NO: 392105 - RNA, 19 nt, Homo sapiens
  misc_RNA (1)...(19): siRNA sense strand
ucaacaagcuccgcgcuaa

SEQ ID NO: 392106 - RNA, 19 nt, Homo sapiens
  misc_RNA (1)...(19): siRNA sense strand
gaaggaccguuacacaucu

SEQ ID NO: 392107 - RNA, 19 nt, Homo sapiens
  misc_RNA (1)...(19): siRNA sense strand
ggacucaaaggaagaauau

SEQ ID NO: 392108 - RNA, 19 nt, Homo sapiens
  misc_RNA (1)...(19): siRNA sense strand
gaggcucacuucucacuga

SEQ ID NO: 392109 - RNA, 19 nt, Homo sapiens
  misc_RNA (1)...(19): siRNA sense strand
caacuucaccaaugagaaa

SEQ ID NO: 392110 - RNA, 19 nt, Homo sapiens
  misc_RNA (1)...(19): siRNA sense strand
ggacauugcaggcuuugaa

SEQ ID NO: 392111 - RNA, 19 nt, Homo sapiens
  misc_RNA (1)...(19): siRNA sense strand
ugacaacgccuaucaguuc

SEQ ID NO: 392112 - RNA, 19 nt, Homo sapiens
  misc_RNA (1)...(19): siRNA sense strand
cgagaaggaugaagagauc

SEQ ID NO: 392113 - RNA, 19 nt, Homo sapiens
  misc_RNA (1)...(19): siRNA sense strand
auagaaagauugccgagaa

SEQ ID NO: 392114 - RNA, 19 nt, Homo sapiens
  misc_RNA (1)...(19): siRNA sense strand
acaagcugaugucaaauuu

SEQ ID NO: 392115 - RNA, 19 nt, Homo sapiens
  misc_RNA (1)...(19): siRNA sense strand
caaacugucucugcccuuu

SEQ ID NO: 392116 - RNA, 19 nt, Homo sapiens
  misc_RNA (1)...(19): siRNA sense strand
gaaaaccaguccauucuga

SEQ ID NO: 392117 - RNA, 19 nt, Homo sapiens
  misc_RNA (1)...(19): siRNA sense strand
gaccaacccuuacgacuac

SEQ ID NO: 392118 - RNA, 19 nt, Homo sapiens
  misc_RNA (1)...(19): siRNA sense strand
aaagcaaaguggaagauga

SEQ ID NO: 392119 - RNA, 19 nt, Homo sapiens
  misc_RNA (1)...(19): siRNA sense strand
gaacaaggacccucugaac

SEQ ID NO: 392120 - RNA, 19 nt, Homo sapiens
  misc_RNA (1)...(19): siRNA sense strand
auacgaagcuuccaagaca

SEQ ID NO: 392121 - RNA, 19 nt, Homo sapiens
  misc_RNA (1)...(19): siRNA sense strand
gaugaucuauaccuacuca

SEQ ID NO: 392122 - RNA, 19 nt, Homo sapiens
  misc_RNA (1)...(19): siRNA sense strand
ugcaggaucugguggauaa

SEQ ID NO: 392123 - RNA, 19 nt, Homo sapiens
  misc_RNA (1)...(19): siRNA sense strand
ucaugcagcuccagaguga

SEQ ID NO: 392124 - RNA, 19 nt, Homo sapiens
  misc_RNA (1)...(19): siRNA sense strand
cauauuagaucuggagaau

SEQ ID NO: 392125 - RNA, 19 nt, Homo sapiens
  misc_RNA (1)...(19): siRNA sense strand
agagagagcugaagaugag

SEQ ID NO: 392126 - RNA, 19 nt, Homo sapiens
  misc_RNA (1)...(19): siRNA sense strand
ggcagaggcucacuucuca

SEQ ID NO: 392127 - RNA, 19 nt, Homo sapiens
  misc_RNA (1)...(19): siRNA sense strand
caacagacaccuccuucaa

SEQ ID NO: 392128 - RNA, 19 nt, Homo sapiens
  misc_RNA (1)...(19): siRNA sense strand
gagugaaaguugggaauga

SEQ ID NO: 392129 - RNA, 19 nt, Homo sapiens
  misc_RNA (1)...(19): siRNA sense strand
ccaagacugugaggaauga

SEQ ID NO: 392130 - RNA, 19 nt, Homo sapiens
  misc_RNA (1)...(19): siRNA sense strand
acagacaccuccuucaaga

SEQ ID NO: 392131 - RNA, 19 nt, Homo sapiens
  misc_RNA (1)...(19): siRNA sense strand
uccgagagcuggaguuuga

SEQ ID NO: 392132 - RNA, 19 nt, Homo sapiens
  misc_RNA (1)...(19): siRNA sense strand
gaaggucacuguggaaacu

SEQ ID NO: 392133 - RNA, 19 nt, Homo sapiens
  misc_RNA (1)...(19): siRNA sense strand
ccacggagaacaagguuaa

SEQ ID NO: 392134 - RNA, 19 nt, Homo sapiens
  misc_RNA (1)...(19): siRNA sense strand
gaacuggagaaaucaagaa

SEQ ID NO: 392135 - RNA, 19 nt, Homo sapiens
  misc_RNA (1)...(19): siRNA sense strand
gaagaagcaugcggauagu

SEQ ID NO: 392136 - RNA, 19 nt, Homo sapiens
  misc_RNA (1)...(19): siRNA sense strand
ucuaccagauucuuucuaa

SEQ ID NO: 392137 - RNA, 19 nt, Homo sapiens
  misc_RNA (1)...(19): siRNA sense strand
uggaggaucugaugguuga

SEQ ID NO: 392138 - RNA, 19 nt, Homo sapiens
  misc_RNA (1)...(19): siRNA sense strand
gcagauagagcucaacaag

SEQ ID NO: 392139 - RNA, 19 nt, Homo sapiens
  misc_RNA (1)...(19): siRNA sense strand
gaagaagacaaagucaauu

SEQ ID NO: 392140 - RNA, 19 nt, Homo sapiens
  misc_RNA (1)...(19): siRNA sense strand
uggcauccauugauauuga

SEQ ID NO: 392141 - RNA, 19 nt, Homo sapiens
  misc_RNA (1)...(19): siRNA sense strand
uggauaaacugcaagugaa

SEQ ID NO: 392142 - RNA, 19 nt, Homo sapiens
  misc_RNA (1)...(19): siRNA sense strand
uuaagggccugaggaagua

SEQ ID NO: 392143 - RNA, 19 nt, Homo sapiens
  misc_RNA (1)...(19): siRNA sense strand
gaagaagcagauccagaaa

SEQ ID NO: 392144 - RNA, 19 nt, Homo sapiens
  misc_RNA (1)...(19): siRNA sense strand
cgaggaagccuuagaucaa

SEQ ID NO: 392145 - RNA, 19 nt, Homo sapiens
  misc_RNA (1)...(19): siRNA sense strand
ccacacagaagucucguuu

SEQ ID NO: 392146 - RNA, 19 nt, Homo sapiens
  misc_RNA (1)...(19): siRNA sense strand
gacgaaaggcucaagaaga

SEQ ID NO: 392147 - RNA, 19 nt, Homo sapiens
  misc_RNA (1)...(19): siRNA sense strand
ccaguacuuugcaacaauu

SEQ ID NO: 392148 - RNA, 19 nt, Homo sapiens
  misc_RNA (1)...(19): siRNA sense strand
ucaagaacaagcuguauga

SEQ ID NO: 392149 - RNA, 19 nt, Homo sapiens
  misc_RNA (1)...(19): siRNA sense strand
ggaaggagacuugaagcuu

SEQ ID NO: 392150 - RNA, 19 nt, Homo sapiens
  misc_RNA (1)...(19): siRNA sense strand
aaagucaaguccuacaaga

SEQ ID NO: 392151 - RNA, 19 nt, Homo sapiens
  misc_RNA (1)...(19): siRNA sense strand
gaauccagcuugaauugac

SEQ ID NO: 392152 - RNA, 19 nt, Homo sapiens
  misc_RNA (1)...(19): siRNA sense strand
ccagcuggcucucgaggaa

SEQ ID NO: 392153 - RNA, 19 nt, Homo sapiens
  misc_RNA (1)...(19): siRNA sense strand
gcagaucucacagaacaaa

SEQ ID NO: 392154 - RNA, 19 nt, Homo sapiens
  misc_RNA (1)...(19): siRNA sense strand
agaggcagcuggaggaaga

SEQ ID NO: 392155 - RNA, 19 nt, Homo sapiens
  misc_RNA (1)...(19): siRNA sense strand
gcaaggagcuggaggagaa

SEQ ID NO: 392156 - RNA, 19 nt, Homo sapiens
  misc_RNA (1)...(19): siRNA sense strand
gaggaaaucucggaccuua

SEQ ID NO: 392157 - RNA, 19 nt, Homo sapiens
  misc_RNA (1)...(19): siRNA sense strand
ggagaaagcuggcgucuac

SEQ ID NO: 392158 - RNA, 19 nt, Homo sapiens
  misc_RNA (1)...(19): siRNA sense strand
gcauugaccucaucgagaa

SEQ ID NO: 392159 - RNA, 19 nt, Homo sapiens
  misc_RNA (1)...(19): siRNA sense strand
agaaggaguuugacauuaa

SEQ ID NO: 392160 - RNA, 19 nt, Homo sapiens
  misc_RNA (1)...(19): siRNA sense strand
cagaggagcugaagaagga

SEQ ID NO: 392161 - RNA, 19 nt, Homo sapiens
  misc_RNA (1)...(19): siRNA sense strand
gagggacaguucauugaua

SEQ ID NO: 392162 - RNA, 19 nt, Homo sapiens
  misc_RNA (1)...(19): siRNA sense strand
gaagaaggaguuugacauu

SEQ ID NO: 392163 - RNA, 19 nt, Homo sapiens
  misc_RNA (1)...(19): siRNA sense strand
ggaagacggugacugugaa

SEQ ID NO: 392164 - RNA, 19 nt, Homo sapiens
  misc_RNA (1)...(19): siRNA sense strand
gcaagaagcagcugcagaa

SEQ ID NO: 392165 - RNA, 19 nt, Homo sapiens
  misc_RNA (1)...(19): siRNA sense strand
gaaacuaccacaucuucua

SEQ ID NO: 392166 - RNA, 19 nt, Homo sapiens
  misc_RNA (1)...(19): siRNA sense strand
acaguaagauugaggauga

SEQ ID NO: 392167 - RNA, 19 nt, Homo sapiens
  misc_RNA (1)...(19): siRNA sense strand
gaaggaguuugacauuaau

SEQ ID NO: 392168 - RNA, 19 nt, Homo sapiens
  misc_RNA (1)...(19): siRNA sense strand
ggaagacugugaacaccaa

SEQ ID NO: 392169 - RNA, 19 nt, Homo sapiens
  misc_RNA (1)...(19): siRNA sense strand
gagagaaacuaccacaucu

SEQ ID NO: 392170 - RNA, 19 nt, Homo sapiens
  misc_RNA (1)...(19): siRNA sense strand
gaggaaagaaugugcauga

SEQ ID NO: 392171 - RNA, 19 nt, Homo sapiens
  misc_RNA (1)...(19): siRNA sense strand
gaacaagacaaccucaaug

SEQ ID NO: 392172 - RNA, 19 nt, Homo sapiens
  misc_RNA (1)...(19): siRNA sense strand
gaaagugggcaacgaguau

SEQ ID NO: 392173 - RNA, 19 nt, Homo sapiens
  misc_RNA (1)...(19): siRNA sense strand
gcccaacgcucccucaaug

SEQ ID NO: 392174 - RNA, 19 nt, Homo sapiens
  misc_RNA (1)...(19): siRNA sense strand
acaaguggcugccggugua

SEQ ID NO: 392175 - RNA, 19 nt, Homo sapiens
  misc_RNA (1)...(19): siRNA sense strand
ucaaggagcucaccuacca

SEQ ID NO: 392176 - RNA, 19 nt, Homo sapiens
  misc_RNA (1)...(19): siRNA sense strand
gcucagcucucuggacauu

SEQ ID NO: 392177 - RNA, 19 nt, Homo sapiens
  misc_RNA (1)...(19): siRNA sense strand
ggacauucauugacuuugg

SEQ ID NO: 392178 - RNA, 19 nt, Homo sapiens
  misc_RNA (1)...(19): siRNA sense strand
acaccaaccuguccaaguu

SEQ ID NO: 392179 - RNA, 19 nt, Homo sapiens
  misc_RNA (1)...(19): siRNA sense strand
cagagaaacuuugacaaga

SEQ ID NO: 392180 - RNA, 19 nt, Homo sapiens
  misc_RNA (1)...(19): siRNA sense strand
aagaaggaguuugacauua

SEQ ID NO: 392181 - RNA, 19 nt, Homo sapiens
  misc_RNA (1)...(19): siRNA sense strand
caacagagaacaaggugaa

SEQ ID NO: 392182 - RNA, 19 nt, Homo sapiens
  misc_RNA (1)...(19): siRNA sense strand
ccacugacaugaccuucaa

SEQ ID NO: 392183 - RNA, 19 nt, Homo sapiens
  misc_RNA (1)...(19): siRNA sense strand
gagaaacuuugacaagauc

SEQ ID NO: 392184 - RNA, 19 nt, Homo sapiens
  misc_RNA (1)...(19): siRNA sense strand
ucgcuaagcugaccaagga

SEQ ID NO: 392185 - RNA, 19 nt, Homo sapiens
  misc_RNA (1)...(19): siRNA sense strand
caagacaaccucaaugaug

SEQ ID NO: 392186 - RNA, 19 nt, Homo sapiens
  misc_RNA (1)...(19): siRNA sense strand
gaccacccauccucacuuu

SEQ ID NO: 392187 - RNA, 19 nt, Homo sapiens
  misc_RNA (1)...(19): siRNA sense strand
ucaacaagcuaaugaccaa

SEQ ID NO: 392188 - RNA, 19 nt, Homo sapiens
  misc_RNA (1)...(19): siRNA sense strand
ucaaagagacgcuggagaa

SEQ ID NO: 392189 - RNA, 19 nt, Homo sapiens
  misc_RNA (1)...(19): siRNA sense strand
ggagauggcugggcuggau

SEQ ID NO: 392190 - RNA, 19 nt, Homo sapiens
  misc_RNA (1)...(19): siRNA sense strand
cgacaacuccucccgcuuu

SEQ ID NO: 392191 - RNA, 19 nt, Homo sapiens
  misc_RNA (1)...(19): siRNA sense strand
gcagaaacgccgaggagaa

SEQ ID NO: 392192 - RNA, 19 nt, Homo sapiens
  misc_RNA (1)...(19): siRNA sense strand
ggacugaggagcucgaaga

SEQ ID NO: 392193 - RNA, 19 nt, Homo sapiens
  misc_RNA (1)...(19): siRNA sense strand
cagcagaacaguaagauug

SEQ ID NO: 392194 - RNA, 19 nt, Homo sapiens
  misc_RNA (1)...(19): siRNA sense strand
ccaaggcaguguaugagaa

SEQ ID NO: 392195 - RNA, 19 nt, Homo sapiens
  misc_RNA (1)...(19): siRNA sense strand
gagcuggaguccucacaga

SEQ ID NO: 392196 - RNA, 19 nt, Homo sapiens
  misc_RNA (1)...(19): siRNA sense strand
gaccgagaauggagaguug

SEQ ID NO: 392197 - RNA, 19 nt, Homo sapiens
  misc_RNA (1)...(19): siRNA sense strand
gcagagaaacuuugacaag

SEQ ID NO: 392198 - RNA, 19 nt, Homo sapiens
  misc_RNA (1)...(19): siRNA sense strand
ccaagcgugucauccagua

SEQ ID NO: 392199 - RNA, 19 nt, Homo sapiens
  misc_RNA (1)...(19): siRNA sense strand
aaacaaggauccucucaac

SEQ ID NO: 392200 - RNA, 19 nt, Homo sapiens
  misc_RNA (1)...(19): siRNA sense strand
gagaaacuaccacaucuuc

SEQ ID NO: 392201 - RNA, 19 nt, Homo sapiens
  misc_RNA (1)...(19): siRNA sense strand
ggagaaggaggaaagaaug

SEQ ID NO: 392202 - RNA, 19 nt, Homo sapiens
  misc_RNA (1)...(19): siRNA sense strand
uuaaucagcagaacaguaa

SEQ ID NO: 392203 - RNA, 19 nt, Homo sapiens
  misc_RNA (1)...(19): siRNA sense strand
gcgcagagacggagaagga

SEQ ID NO: 392204 - RNA, 19 nt, Homo sapiens
  misc_RNA (1)...(19): siRNA sense strand
cgacaacgccuaucaguac

SEQ ID NO: 392205 - RNA, 19 nt, Homo sapiens
  misc_RNA (1)...(19): siRNA sense strand
cagaagaaacugaaggaaa

SEQ ID NO: 392206 - RNA, 19 nt, Homo sapiens
  misc_RNA (1)...(19): siRNA sense strand
ccaacaaucccuacgacua

SEQ ID NO: 392207 - RNA, 19 nt, Homo sapiens
  misc_RNA (1)...(19): siRNA sense strand
gcugaaagcugagagaaac

SEQ ID NO: 392208 - RNA, 19 nt, Homo sapiens
  misc_RNA (1)...(19): siRNA sense strand
agaccuaccugcuggagaa

SEQ ID NO: 392209 - RNA, 19 nt, Homo sapiens
  misc_RNA (1)...(19): siRNA sense strand
agaaugagauagaggacuu

SEQ ID NO: 392210 - RNA, 19 nt, Homo sapiens
  misc_RNA (1)...(19): siRNA sense strand
ggaacaagacaaccucaau

SEQ ID NO: 392211 - RNA, 19 nt, Homo sapiens
  misc_RNA (1)...(19): siRNA sense strand
ucaagagccuccagagcuu

SEQ ID NO: 392212 - RNA, 19 nt, Homo sapiens
  misc_RNA (1)...(19): siRNA sense strand
aggcaaaccuggagaaagu

SEQ ID NO: 392213 - RNA, 19 nt, Homo sapiens
  misc_RNA (1)...(19): siRNA sense strand
agaagaaacugaaggaaaa

SEQ ID NO: 392214 - RNA, 19 nt, Homo sapiens
  misc_RNA (1)...(19): siRNA sense strand
gaagaaaagcuuaagaaga

SEQ ID NO: 392215 - RNA, 19 nt, Homo sapiens
  misc_RNA (1)...(19): siRNA sense strand
ucagcucucuggacauuga

SEQ ID NO: 392216 - RNA, 19 nt, Homo sapiens
  misc_RNA (1)...(19): siRNA sense strand
gccaagagccgugacauug

SEQ ID NO: 392217 - RNA, 19 nt, Homo sapiens
  misc_RNA (1)...(19): siRNA sense strand
agagaaacuuugacaagau

SEQ ID NO: 392218 - RNA, 19 nt, Homo sapiens
  misc_RNA (1)...(19): siRNA sense strand
ucacaaccaguacaaguuu

SEQ ID NO: 392219 - RNA, 19 nt, Homo sapiens
  misc_RNA (1)...(19): siRNA sense strand
gcuggcuucugcagacaua

SEQ ID NO: 392220 - RNA, 19 nt, Homo sapiens
  misc_RNA (1)...(19): siRNA sense strand
gagcaggagcugauugaga

SEQ ID NO: 392221 - RNA, 19 nt, Homo sapiens
  misc_RNA (1)...(19): siRNA sense strand
gaaccuaacagaggagaug

SEQ ID NO: 392222 - RNA, 19 nt, Homo sapiens
  misc_RNA (1)...(19): siRNA sense strand
ggagcucacugccaagaag

SEQ ID NO: 392223 - RNA, 19 nt, Homo sapiens
  misc_RNA (1)...(19): siRNA sense strand
gaaggaggaccagguguug

SEQ ID NO: 392224 - RNA, 19 nt, Homo sapiens
  misc_RNA (1)...(19): siRNA sense strand
gaaaaucucaacaagcuaa

SEQ ID NO: 392225 - RNA, 19 nt, Homo sapiens
  misc_RNA (1)...(19): siRNA sense strand
ggaccuuacugagcagcua

SEQ ID NO: 392226 - RNA, 19 nt, Homo sapiens
  misc_RNA (1)...(19): siRNA sense strand
cugcagcccuggacaagaa

SEQ ID NO: 392227 - RNA, 19 nt, Homo sapiens
  misc_RNA (1)...(19): siRNA sense strand
agaucgagaugaacaagaa

SEQ ID NO: 392228 - RNA, 19 nt, Homo sapiens
  misc_RNA (1)...(19): siRNA sense strand
gggcuaagguggagaagcu

SEQ ID NO: 392229 - RNA, 19 nt, Homo sapiens
  misc_RNA (1)...(19): siRNA sense strand
guaaaggagaugaaugaga

SEQ ID NO: 392230 - RNA, 19 nt, Homo sapiens
  misc_RNA (1)...(19): siRNA sense strand
gggaugcccugcugguaau

SEQ ID NO: 392231 - RNA, 19 nt, Homo sapiens
  misc_RNA (1)...(19): siRNA sense strand
gcucauggccacucucuuc

SEQ ID NO: 392232 - RNA, 19 nt, Homo sapiens
  misc_RNA (1)...(19): siRNA sense strand
gggaagacggugacuguga

SEQ ID NO: 392233 - RNA, 19 nt, Homo sapiens
  misc_RNA (1)...(19): siRNA sense strand
caagaagcagagaaacuuu

SEQ ID NO: 392234 - RNA, 19 nt, Homo sapiens
  misc_RNA (1)...(19): siRNA sense strand
ggagaagaaagcucuacaa

SEQ ID NO: 392235 - RNA, 19 nt, Homo sapiens
  misc_RNA (1)...(19): siRNA sense strand
gaacauucgggccuucaug

SEQ ID NO: 392236 - RNA, 19 nt, Homo sapiens
  misc_RNA (1)...(19): siRNA sense strand
uggacaagcugcaacugaa

SEQ ID NO: 392237 - RNA, 19 nt, Homo sapiens
  misc_RNA (1)...(19): siRNA sense strand
ccagacagaggaagacaaa

SEQ ID NO: 392238 - RNA, 19 nt, Homo sapiens
  misc_RNA (1)...(19): siRNA sense strand
uuaagaagaaggaguuuga

SEQ ID NO: 392239 - RNA, 19 nt, Homo sapiens
  misc_RNA (1)...(19): siRNA sense strand
gagaagaaagcucuacaag

SEQ ID NO: 392240 - RNA, 19 nt, Homo sapiens
  misc_RNA (1)...(19): siRNA sense strand
gaucacaaccaguacaagu

SEQ ID NO: 392241 - RNA, 19 nt, Homo sapiens
  misc_RNA (1)...(19): siRNA sense strand
caagagccgugacauuggu

SEQ ID NO: 392242 - RNA, 19 nt, Homo sapiens
  misc_RNA (1)...(19): siRNA sense strand
ugagauagaggacuugaug

SEQ ID NO: 392243 - RNA, 19 nt, Homo sapiens
  misc_RNA (1)...(19): siRNA sense strand
uggcugggcuggaugaaau

SEQ ID NO: 392244 - RNA, 19 nt, Homo sapiens
  misc_RNA (1)...(19): siRNA sense strand
ucaagccgcugcugaagag

SEQ ID NO: 392245 - RNA, 19 nt, Homo sapiens
  misc_RNA (1)...(19): siRNA sense strand
ggaaaucucggaccuuacu

SEQ ID NO: 392246 - RNA, 19 nt, Homo sapiens
  misc_RNA (1)...(19): siRNA sense strand
agcagaagcuggagaagga

SEQ ID NO: 392247 - RNA, 19 nt, Homo sapiens
  misc_RNA (1)...(19): siRNA sense strand
aagagacgcuggagaaguc

SEQ ID NO: 392248 - RNA, 19 nt, Homo sapiens
  misc_RNA (1)...(19): siRNA sense strand
gacaacuccucccgcuuug

SEQ ID NO: 392249 - RNA, 19 nt, Homo sapiens
  misc_RNA (1)...(19): siRNA sense strand
caagaaccuucaggaggaa

SEQ ID NO: 392250 - RNA, 19 nt, Homo sapiens
  misc_RNA (1)...(19): siRNA sense strand
uggagaagcugcgcucaga

SEQ ID NO: 392251 - RNA, 19 nt, Homo sapiens
  misc_RNA (1)...(19): siRNA sense strand
aagcaaaggaggcaagaaa

SEQ ID NO: 392252 - RNA, 19 nt, Homo sapiens
  misc_RNA (1)...(19): siRNA sense strand
gggcaaguccaacaauuuc

SEQ ID NO: 392253 - RNA, 19 nt, Homo sapiens
  misc_RNA (1)...(19): siRNA sense strand
caccgaagaugcugacaag

SEQ ID NO: 392254 - RNA, 19 nt, Homo sapiens
  misc_RNA (1)...(19): siRNA sense strand
caacaaucccuacgacuac

SEQ ID NO: 392255 - RNA, 19 nt, Homo sapiens
  misc_RNA (1)...(19): siRNA sense strand
gaaagaagcuaccauauuu

SEQ ID NO: 392256 - RNA, 19 nt, Homo sapiens
  misc_RNA (1)...(19): siRNA sense strand
gaagaaaggugcuaagaaa

SEQ ID NO: 392257 - RNA, 19 nt, Homo sapiens
  misc_RNA (1)...(19): siRNA sense strand
gcacugagcuguucaaggu

SEQ ID NO: 392258 - RNA, 19 nt, Homo sapiens
  misc_RNA (1)...(19): siRNA sense strand
ggacauugcuggcuuugaa

SEQ ID NO: 392259 - RNA, 19 nt, Homo sapiens
  misc_RNA (1)...(19): siRNA sense strand
gagaaaguguccaucuaua

SEQ ID NO: 392260 - RNA, 19 nt, Homo sapiens
  misc_RNA (1)...(19): siRNA sense strand
gaccaagucuucccuauga

SEQ ID NO: 392261 - RNA, 19 nt, Homo sapiens
  misc_RNA (1)...(19): siRNA sense strand
gcagauagcuuggcugaug

SEQ ID NO: 392262 - RNA, 19 nt, Homo sapiens
  misc_RNA (1)...(19): siRNA sense strand
ggacuugguagauaaauua

SEQ ID NO: 392263 - RNA, 19 nt, Homo sapiens
  misc_RNA (1)...(19): siRNA sense strand
ggaaagaagcuaccauauu

SEQ ID NO: 392264 - RNA, 19 nt, Homo sapiens
  misc_RNA (1)...(19): siRNA sense strand
gcacagaagucgcugacaa

SEQ ID NO: 392265 - RNA, 19 nt, Homo sapiens
  misc_RNA (1)...(19): siRNA sense strand
ugagcaagcuguagaaauu

SEQ ID NO: 392266 - RNA, 19 nt, Homo sapiens
  misc_RNA (1)...(19): siRNA sense strand
ggaaggagaucugaaugaa

SEQ ID NO: 392267 - RNA, 19 nt, Homo sapiens
  misc_RNA (1)...(19): siRNA sense strand
cagaauaccagucucauua

SEQ ID NO: 392268 - RNA, 19 nt, Homo sapiens
  misc_RNA (1)...(19): siRNA sense strand
gaaagacugugaacaccaa

SEQ ID NO: 392269 - RNA, 19 nt, Homo sapiens
  misc_RNA (1)...(19): siRNA sense strand
gcaagaagcugaggaacau

SEQ ID NO: 392270 - RNA, 19 nt, Homo sapiens
  misc_RNA (1)...(19): siRNA sense strand
gaaaguguccaucuauaaa

SEQ ID NO: 392271 - RNA, 19 nt, Homo sapiens
  misc_RNA (1)...(19): siRNA sense strand
gaagccagaucuaauugaa

SEQ ID NO: 392272 - RNA, 19 nt, Homo sapiens
  misc_RNA (1)...(19): siRNA sense strand
gcaaguagaacaagagaaa

SEQ ID NO: 392273 - RNA, 19 nt, Homo sapiens
  misc_RNA (1)...(19): siRNA sense strand
caagagaaaugugaaauuc

SEQ ID NO: 392274 - RNA, 19 nt, Homo sapiens
  misc_RNA (1)...(19): siRNA sense strand
ggaagaagcagauccagaa

SEQ ID NO: 392275 - RNA, 19 nt, Homo sapiens
  misc_RNA (1)...(19): siRNA sense strand
gcuggcaucugcugauaua

SEQ ID NO: 392276 - RNA, 19 nt, Homo sapiens
  misc_RNA (1)...(19): siRNA sense strand
ggaccuggcugccugcauu

SEQ ID NO: 392277 - RNA, 19 nt, Homo sapiens
  misc_RNA (1)...(19): siRNA sense strand
gaucacaguucccaguauu

SEQ ID NO: 392278 - RNA, 19 nt, Homo sapiens
  misc_RNA (1)...(19): siRNA sense strand
agaagaagaucaaagaguu

SEQ ID NO: 392279 - RNA, 19 nt, Homo sapiens
  misc_RNA (1)...(19): siRNA sense strand
gaaauucaacuacagaaga

SEQ ID NO: 392280 - RNA, 19 nt, Homo sapiens
  misc_RNA (1)...(19): siRNA sense strand
ugaagaagaucgcaagaau

SEQ ID NO: 392281 - RNA, 19 nt, Homo sapiens
  misc_RNA (1)...(19): siRNA sense strand
ucaaagaggugacugaaag

SEQ ID NO: 392282 - RNA, 19 nt, Homo sapiens
  misc_RNA (1)...(19): siRNA sense strand
gaaagacauugaugaccuu

SEQ ID NO: 392283 - RNA, 19 nt, Homo sapiens
  misc_RNA (1)...(19): siRNA sense strand
gaaaguaaccguaaagacu

SEQ ID NO: 392284 - RNA, 19 nt, Homo sapiens
  misc_RNA (1)...(19): siRNA sense strand
gaggaacaauccaaugcua

SEQ ID NO: 392285 - RNA, 19 nt, Homo sapiens
  misc_RNA (1)...(19): siRNA sense strand
gugcagcccuugauaagaa

SEQ ID NO: 392286 - RNA, 19 nt, Homo sapiens
  misc_RNA (1)...(19): siRNA sense strand
ggaaggagcuagaggaaaa

SEQ ID NO: 392287 - RNA, 19 nt, Homo sapiens
  misc_RNA (1)...(19): siRNA sense strand
cagaagauguugcaaagga

SEQ ID NO: 392288 - RNA, 19 nt, Homo sapiens
  misc_RNA (1)...(19): siRNA sense strand
gaagguggagcaacucuaa

SEQ ID NO: 392289 - RNA, 19 nt, Homo sapiens
  misc_RNA (1)...(19): siRNA sense strand
gaagagaaaccacacuaga

SEQ ID NO: 392290 - RNA, 19 nt, Homo sapiens
  misc_RNA (1)...(19): siRNA sense strand
gaggaaagcaaauucauga

SEQ ID NO: 392291 - RNA, 19 nt, Homo sapiens
  misc_RNA (1)...(19): siRNA sense strand
gaagagcacuauacaaagc

SEQ ID NO: 392292 - RNA, 19 nt, Homo sapiens
  misc_RNA (1)...(19): siRNA sense strand
gccgagagguucacacaaa

SEQ ID NO: 392293 - RNA, 19 nt, Homo sapiens
  misc_RNA (1)...(19): siRNA sense strand
gaaccaugccaaucgcuua

SEQ ID NO: 392294 - RNA, 19 nt, Homo sapiens
  misc_RNA (1)...(19): siRNA sense strand
uaucagaucacuuccaaua

SEQ ID NO: 392295 - RNA, 19 nt, Homo sapiens
  misc_RNA (1)...(19): siRNA sense strand
gugaagagcacuauacaaa

SEQ ID NO: 392296 - RNA, 19 nt, Homo sapiens
  misc_RNA (1)...(19): siRNA sense strand
gaaauugaccagcugaaga

SEQ ID NO: 392297 - RNA, 19 nt, Homo sapiens
  misc_RNA (1)...(19): siRNA sense strand
gaacaagagaaaugugaaa

SEQ ID NO: 392298 - RNA, 19 nt, Homo sapiens
  misc_RNA (1)...(19): siRNA sense strand
gaacacaagcugucuguag

SEQ ID NO: 392299 - RNA, 19 nt, Homo sapiens
  misc_RNA (1)...(19): siRNA sense strand
gaaggcauccgcaucugua

SEQ ID NO: 392300 - RNA, 19 nt, Homo sapiens
  misc_RNA (1)...(19): siRNA sense strand
aggcgaaggugaaaucaua

SEQ ID NO: 392301 - RNA, 19 nt, Homo sapiens
  misc_RNA (1)...(19): siRNA sense strand
gaagaucgcaagaauguuc

SEQ ID NO: 392302 - RNA, 19 nt, Homo sapiens
  misc_RNA (1)...(19): siRNA sense strand
gagauuagaagcagaaaug

SEQ ID NO: 392303 - RNA, 19 nt, Homo sapiens
  misc_RNA (1)...(19): siRNA sense strand
guauccagcuugaguuaaa

SEQ ID NO: 392304 - RNA, 19 nt, Homo sapiens
  misc_RNA (1)...(19): siRNA sense strand
ccaagcgugucauccaaua

SEQ ID NO: 392305 - RNA, 19 nt, Homo sapiens
  misc_RNA (1)...(19): siRNA sense strand
uugaagagcugaaacauca

SEQ ID NO: 392306 - RNA, 19 nt, Homo sapiens
  misc_RNA (1)...(19): siRNA sense strand
gacagaagcgggugaauau

SEQ ID NO: 392307 - RNA, 19 nt, Homo sapiens
  misc_RNA (1)...(19): siRNA sense strand
gaagaaaugagagaugaaa

SEQ ID NO: 392308 - RNA, 19 nt, Homo sapiens
  misc_RNA (1)...(19): siRNA sense strand
gagagaagaagaaggauga

SEQ ID NO: 392309 - RNA, 19 nt, Homo sapiens
  misc_RNA (1)...(19): siRNA sense strand
ccaauacuuugcaacaauu

SEQ ID NO: 392310 - RNA, 19 nt, Homo sapiens
  misc_RNA (1)...(19): siRNA sense strand
ccaaagccgucuacgagaa

SEQ ID NO: 392311 - RNA, 19 nt, Homo sapiens
  misc_RNA (1)...(19): siRNA sense strand
caaagaaggagggaaagua

SEQ ID NO: 392312 - RNA, 19 nt, Homo sapiens
  misc_RNA (1)...(19): siRNA sense strand
ccaagaaggccaucacuga

SEQ ID NO: 392313 - RNA, 19 nt, Homo sapiens
  misc_RNA (1)...(19): siRNA sense strand
uaaaccaagucaagucuga

SEQ ID NO: 392314 - RNA, 19 nt, Homo sapiens
  misc_RNA (1)...(19): siRNA sense strand
gggagcagauugacaacuu

SEQ ID NO: 392315 - RNA, 19 nt, Homo sapiens
  misc_RNA (1)...(19): siRNA sense strand
ucgaauggaucuagaaaga

SEQ ID NO: 392316 - RNA, 19 nt, Homo sapiens
  misc_RNA (1)...(19): siRNA sense strand
uaagaagccagaucuaauu

SEQ ID NO: 392317 - RNA, 19 nt, Homo sapiens
  misc_RNA (1)...(19): siRNA sense strand
acaaguggcugccggugua

SEQ ID NO: 392318 - RNA, 19 nt, Homo sapiens
  misc_RNA (1)...(19): siRNA sense strand
agagugagcugaagaugga

SEQ ID NO: 392319 - RNA, 19 nt, Homo sapiens
  misc_RNA (1)...(19): siRNA sense strand
aaggagaucugaaugaaau

SEQ ID NO: 392320 - RNA, 19 nt, Homo sapiens
  misc_RNA (1)...(19): siRNA sense strand
ggugguggcugccuacaga

SEQ ID NO: 392321 - RNA, 19 nt, Homo sapiens
  misc_RNA (1)...(19): siRNA sense strand
ugacaacuccucucgcuuu

SEQ ID NO: 392322 - RNA, 19 nt, Homo sapiens
  misc_RNA (1)...(19): siRNA sense strand
cagaggcuguuaaagguuu

SEQ ID NO: 392323 - RNA, 19 nt, Homo sapiens
  misc_RNA (1)...(19): siRNA sense strand
gaagaaguaauccaagaau

SEQ ID NO: 392324 - RNA, 19 nt, Homo sapiens
  misc_RNA (1)...(19): siRNA sense strand
ggaagaaguaauccaagaa

SEQ ID NO: 392325 - RNA, 19 nt, Homo sapiens
  misc_RNA (1)...(19): siRNA sense strand
gagggaaaguaaccguaaa

SEQ ID NO: 392326 - RNA, 19 nt, Homo sapiens
  misc_RNA (1)...(19): siRNA sense strand
gaaggagaucugaaugaaa

SEQ ID NO: 392327 - RNA, 19 nt, Homo sapiens
  misc_RNA (1)...(19): siRNA sense strand
gcugaaacaucaacuagag

SEQ ID NO: 392328 - RNA, 19 nt, Homo sapiens
  misc_RNA (1)...(19): siRNA sense strand
gcuuuagucucucagcuuu

SEQ ID NO: 392329 - RNA, 19 nt, Homo sapiens
  misc_RNA (1)...(19): siRNA sense strand
gaaacuucuugcaucuauu

SEQ ID NO: 392330 - RNA, 19 nt, Homo sapiens
  misc_RNA (1)...(19): siRNA sense strand
caacuucaccaacgagaaa

SEQ ID NO: 392331 - RNA, 19 nt, Homo sapiens
  misc_RNA (1)...(19): siRNA sense strand
cuaugaacccuccgaaaua

SEQ ID NO: 392332 - RNA, 19 nt, Homo sapiens
  misc_RNA (1)...(19): siRNA sense strand
cugaggagcugaagaagga

SEQ ID NO: 392333 - RNA, 19 nt, Homo sapiens
  misc_RNA (1)...(19): siRNA sense strand
aaggaaagauucugcguau

SEQ ID NO: 392334 - RNA, 19 nt, Homo sapiens
  misc_RNA (1)...(19): siRNA sense strand
aggcaucucuugaacauga

SEQ ID NO: 392335 - RNA, 19 nt, Homo sapiens
  misc_RNA (1)...(19): siRNA sense strand
gaagaaugucuaugaggaa

SEQ ID NO: 392336 - RNA, 19 nt, Homo sapiens
  misc_RNA (1)...(19): siRNA sense strand
cagaauggaagcagaagua

SEQ ID NO: 392337 - RNA, 19 nt, Homo sapiens
  misc_RNA (1)...(19): siRNA sense strand
caaaugugcuucccuugag

SEQ ID NO: 392338 - RNA, 19 nt, Homo sapiens
  misc_RNA (1)...(19): siRNA sense strand
gaucaaugcugagcugaca

SEQ ID NO: 392339 - RNA, 19 nt, Homo sapiens
  misc_RNA (1)...(19): siRNA sense strand
ggaaaggugugagcaacug

SEQ ID NO: 392340 - RNA, 19 nt, Homo sapiens
  misc_RNA (1)...(19): siRNA sense strand
gguagaauaucagaagaug

SEQ ID NO: 392341 - RNA, 19 nt, Homo sapiens
  misc_RNA (1)...(19): siRNA sense strand
ucagaucacuuccaauaag

SEQ ID NO: 392342 - RNA, 19 nt, Homo sapiens
  misc_RNA (1)...(19): siRNA sense strand
gcggaaagaagcuaccaua

SEQ ID NO: 392343 - RNA, 19 nt, Homo sapiens
  misc_RNA (1)...(19): siRNA sense strand
gacaaugccuaucaguuca

SEQ ID NO: 392344 - RNA, 19 nt, Homo sapiens
  misc_RNA (1)...(19): siRNA sense strand
gcagauagcagcgcgaaga

SEQ ID NO: 392345 - RNA, 19 nt, Homo sapiens
  misc_RNA (1)...(19): siRNA sense strand
gaagaagaucgcaagaaug

SEQ ID NO: 392346 - RNA, 19 nt, Homo sapiens
  misc_RNA (1)...(19): siRNA sense strand
ggagggaaaguaaccguaa

SEQ ID NO: 392347 - RNA, 19 nt, Homo sapiens
  misc_RNA (1)...(19): siRNA sense strand
gaucaacucgaaacgcuaa

SEQ ID NO: 392348 - RNA, 19 nt, Homo sapiens
  misc_RNA (1)...(19): siRNA sense strand
aacagaagcuggagaagga

SEQ ID NO: 392349 - RNA, 19 nt, Homo sapiens
  misc_RNA (1)...(19): siRNA sense strand
gaagaagaucaaagaguug

SEQ ID NO: 392350 - RNA, 19 nt, Homo sapiens
  misc_RNA (1)...(19): siRNA sense strand
cuucuugcaucuauugaua

SEQ ID NO: 392351 - RNA, 19 nt, Homo sapiens
  misc_RNA (1)...(19): siRNA sense strand
ggugaaaucauacaagaga

SEQ ID NO: 392352 - RNA, 19 nt, Homo sapiens
  misc_RNA (1)...(19): siRNA sense strand
uugaagaccucaugcuuga

SEQ ID NO: 392353 - RNA, 19 nt, Homo sapiens
  misc_RNA (1)...(19): siRNA sense strand
aaagaaggagggaaaguaa

SEQ ID NO: 392354 - RNA, 19 nt, Homo sapiens
  misc_RNA (1)...(19): siRNA sense strand
ggugugagcaacugauuaa

SEQ ID NO: 392355 - RNA, 19 nt, Homo sapiens
  misc_RNA (1)...(19): siRNA sense strand
gagcaaacguguccaaugc

SEQ ID NO: 392356 - RNA, 19 nt, Homo sapiens
  misc_RNA (1)...(19): siRNA sense strand
caauagcgccuuuaaguca

SEQ ID NO: 392357 - RNA, 19 nt, Homo sapiens
  misc_RNA (1)...(19): siRNA sense strand
acaauaacgucgauguguu

SEQ ID NO: 392358 - RNA, 19 nt, Homo sapiens
  misc_RNA (1)...(19): siRNA sense strand
gcucagccaguucaacaua

SEQ ID NO: 392359 - RNA, 19 nt, Homo sapiens
  misc_RNA (1)...(19): siRNA sense strand
ggcaauagcgccuuuaagu

SEQ ID NO: 392360 - RNA, 19 nt, Homo sapiens
  misc_RNA (1)...(19): siRNA sense strand
ucccguggguggacaauaa

SEQ ID NO: 392361 - RNA, 19 nt, Homo sapiens
  misc_RNA (1)...(19): siRNA sense strand
caacugcuccacaaacaug

SEQ ID NO: 392362 - RNA, 19 nt, Homo sapiens
  misc_RNA (1)...(19): siRNA sense strand
agaagucccugcugcacaa

SEQ ID NO: 392363 - RNA, 19 nt, Homo sapiens
  misc_RNA (1)...(19): siRNA sense strand
gcaauagcgccuuuaaguc

SEQ ID NO: 392364 - RNA, 19 nt, Homo sapiens
  misc_RNA (1)...(19): siRNA sense strand
gccaacugcuccacaaaca

SEQ ID NO: 392365 - RNA, 19 nt, Homo sapiens
  misc_RNA (1)...(19): siRNA sense strand
gcucaucaacgacaagguu

SEQ ID NO: 392366 - RNA, 19 nt, Homo sapiens
  misc_RNA (1)...(19): siRNA sense strand
gagcucagccaguucaaca

SEQ ID NO: 392367 - RNA, 19 nt, Homo sapiens
  misc_RNA (1)...(19): siRNA sense strand
ggacaauaacgucgaugug

SEQ ID NO: 392368 - RNA, 19 nt, Homo sapiens
  misc_RNA (1)...(19): siRNA sense strand
gagcuggagcgaggcaaua

SEQ ID NO: 392369 - RNA, 19 nt, Homo sapiens
  misc_RNA (1)...(19): siRNA sense strand
gacaauaacgucgaugugu

SEQ ID NO: 392370 - RNA, 19 nt, Homo sapiens
  misc_RNA (1)...(19): siRNA sense strand
caauaacgucgauguguuc

SEQ ID NO: 392371 - RNA, 19 nt, Homo sapiens
  misc_RNA (1)...(19): siRNA sense strand
gccuuuaagucaccagaug

SEQ ID NO: 392372 - RNA, 19 nt, Homo sapiens
  misc_RNA (1)...(19): siRNA sense strand
ucagccaguucaacauaug

SEQ ID NO: 392373 - RNA, 19 nt, Homo sapiens
  misc_RNA (1)...(19): siRNA sense strand
guccuucgcgcacaagaaa

SEQ ID NO: 392374 - RNA, 19 nt, Homo sapiens
  misc_RNA (1)...(19): siRNA sense strand
gagcgucuccuugacuugu

SEQ ID NO: 392375 - RNA, 19 nt, Homo sapiens
  misc_RNA (1)...(19): siRNA sense strand
ccacgggcaaggacacuau

SEQ ID NO: 392376 - RNA, 19 nt, Homo sapiens
  misc_RNA (1)...(19): siRNA sense strand
gguggacaauaacgucgau

SEQ ID NO: 392377 - RNA, 19 nt, Homo sapiens
  misc_RNA (1)...(19): siRNA sense strand
agucccugcugcacaauga

SEQ ID NO: 392378 - RNA, 19 nt, Homo sapiens
  misc_RNA (1)...(19): siRNA sense strand
ccgcacaaacuaccuauac

SEQ ID NO: 392379 - RNA, 19 nt, Homo sapiens
  misc_RNA (1)...(19): siRNA sense strand
caccagaugcguucaaggu

SEQ ID NO: 392380 - RNA, 19 nt, Homo sapiens
  misc_RNA (1)...(19): siRNA sense strand
agacgcugccugagcugua

SEQ ID NO: 392381 - RNA, 19 nt, Homo sapiens
  misc_RNA (1)...(19): siRNA sense strand
gaaaggcguucaaggguuu

SEQ ID NO: 392382 - RNA, 19 nt, Homo sapiens
  misc_RNA (1)...(19): siRNA sense strand
gaacagacaucacagucau

SEQ ID NO: 392383 - RNA, 19 nt, Homo sapiens
  misc_RNA (1)...(19): siRNA sense strand
cgacaucccuggaauggaa

SEQ ID NO: 392384 - RNA, 19 nt, Homo sapiens
  misc_RNA (1)...(19): siRNA sense strand
ugcacgagcuggcccaaua

SEQ ID NO: 392385 - RNA, 19 nt, Homo sapiens
  misc_RNA (1)...(19): siRNA sense strand
cgacagaccaggcaguuca

SEQ ID NO: 392386 - RNA, 19 nt, Homo sapiens
  misc_RNA (1)...(19): siRNA sense strand
ggaacagacaucacaguca

SEQ ID NO: 392387 - RNA, 19 nt, Homo sapiens
  misc_RNA (1)...(19): siRNA sense strand
ccaggcaguucaagagcaa

SEQ ID NO: 392388 - RNA, 19 nt, Homo sapiens
  misc_RNA (1)...(19): siRNA sense strand
gcacgagcuggcccaauau

SEQ ID NO: 392389 - RNA, 19 nt, Homo sapiens
  misc_RNA (1)...(19): siRNA sense strand
ggacgacaucccuggaaug

SEQ ID NO: 392390 - RNA, 19 nt, Homo sapiens
  misc_RNA (1)...(19): siRNA sense strand
ggcccaauauggcaucauc

SEQ ID NO: 392391 - RNA, 19 nt, Homo sapiens
  misc_RNA (1)...(19): siRNA sense strand
uggaaggccugggaacaga

SEQ ID NO: 392392 - RNA, 19 nt, Homo sapiens
  misc_RNA (1)...(19): siRNA sense strand
cccaauauggcaucaucua

SEQ ID NO: 392393 - RNA, 19 nt, Homo sapiens
  misc_RNA (1)...(19): siRNA sense strand
ccaauauggcaucaucuag

SEQ ID NO: 392394 - RNA, 19 nt, Homo sapiens
  misc_RNA (1)...(19): siRNA sense strand
ccaaagaaaggcguucaag

SEQ ID NO: 392395 - RNA, 19 nt, Homo sapiens
  misc_RNA (1)...(19): siRNA sense strand
aaauuuaagcagcgacaga

SEQ ID NO: 392396 - RNA, 19 nt, Homo sapiens
  misc_RNA (1)...(19): siRNA sense strand
gacgacaucccuggaaugg

SEQ ID NO: 392397 - RNA, 19 nt, Homo sapiens
  misc_RNA (1)...(19): siRNA sense strand
gaaggccugggaacagaca

SEQ ID NO: 392398 - RNA, 19 nt, Homo sapiens
  misc_RNA (1)...(19): siRNA sense strand
gcaaagacccugaggaaga

SEQ ID NO: 392399 - RNA, 19 nt, Homo sapiens
  misc_RNA (1)...(19): siRNA sense strand
gaacaacggacgugcaauc

SEQ ID NO: 392400 - RNA, 19 nt, Homo sapiens
  misc_RNA (1)...(19): siRNA sense strand
gcagugcuguccugagaug

SEQ ID NO: 392401 - RNA, 19 nt, Homo sapiens
  misc_RNA (1)...(19): siRNA sense strand
caucagcugucaagaaauc

SEQ ID NO: 392402 - RNA, 19 nt, Homo sapiens
  misc_RNA (1)...(19): siRNA sense strand
acacgugccugcuugcaaa

SEQ ID NO: 392403 - RNA, 19 nt, Homo sapiens
  misc_RNA (1)...(19): siRNA sense strand
gaagaauccuccggcaagu

SEQ ID NO: 392404 - RNA, 19 nt, Homo sapiens
  misc_RNA (1)...(19): siRNA sense strand
uccaucagcugucaagaaa

SEQ ID NO: 392405 - RNA, 19 nt, Homo sapiens
  misc_RNA (1)...(19): siRNA sense strand
ggagaaacgaccaugucua

SEQ ID NO: 392406 - RNA, 19 nt, Homo sapiens
  misc_RNA (1)...(19): siRNA sense strand
gagaaacgaccaugucuac

SEQ ID NO: 392407 - RNA, 19 nt, Homo sapiens
  misc_RNA (1)...(19): siRNA sense strand
caaagacccugaggaagag

SEQ ID NO: 392408 - RNA, 19 nt, Homo sapiens
  misc_RNA (1)...(19): siRNA sense strand
gaaccuaaggagacacgaa

SEQ ID NO: 392409 - RNA, 19 nt, Homo sapiens
  misc_RNA (1)...(19): siRNA sense strand
ccacgaaccuaaggagaca

SEQ ID NO: 392410 - RNA, 19 nt, Homo sapiens
  misc_RNA (1)...(19): siRNA sense strand
caccugagcccucccagaa

SEQ ID NO: 392411 - RNA, 19 nt, Homo sapiens
  misc_RNA (1)...(19): siRNA sense strand
gaaacgaccaugucuacac

SEQ ID NO: 392412 - RNA, 19 nt, Homo sapiens
  misc_RNA (1)...(19): siRNA sense strand
gggcagugcucuggaaagg

SEQ ID NO: 392413 - RNA, 19 nt, Homo sapiens
  misc_RNA (1)...(19): siRNA sense strand
gacggaacaugaaguccau

SEQ ID NO: 392414 - RNA, 19 nt, Homo sapiens
  misc_RNA (1)...(19): siRNA sense strand
gaggagaaacgaccauguc

SEQ ID NO: 392415 - RNA, 19 nt, Homo sapiens
  misc_RNA (1)...(19): siRNA sense strand
ugaaguccaucagcuguca

SEQ ID NO: 392416 - RNA, 19 nt, Homo sapiens
  misc_RNA (1)...(19): siRNA sense strand
gacaggcacaggaaucaga

SEQ ID NO: 392417 - RNA, 19 nt, Homo sapiens
  misc_RNA (1)...(19): siRNA sense strand
gcaggccccucgauuguug

SEQ ID NO: 392418 - RNA, 19 nt, Homo sapiens
  misc_RNA (1)...(19): siRNA sense strand
ggaggagaaacgaccaugu

SEQ ID NO: 392419 - RNA, 19 nt, Homo sapiens
  misc_RNA (1)...(19): siRNA sense strand
uugcaaagacccugaggaa

SEQ ID NO: 392420 - RNA, 19 nt, Homo sapiens
  misc_RNA (1)...(19): siRNA sense strand
ucacccugcucccaagugu

SEQ ID NO: 392421 - RNA, 19 nt, Homo sapiens
  misc_RNA (1)...(19): siRNA sense strand
guccaucagcugucaagaa

SEQ ID NO: 392422 - RNA, 19 nt, Homo sapiens
  misc_RNA (1)...(19): siRNA sense strand
gaaggucagggcgagaaga

SEQ ID NO: 392423 - RNA, 19 nt, Homo sapiens
  misc_RNA (1)...(19): siRNA sense strand
aaaggaucauggucagagu

SEQ ID NO: 392424 - RNA, 19 nt, Homo sapiens
  misc_RNA (1)...(19): siRNA sense strand
aaugggcagugcucuggaa

SEQ ID NO: 392425 - RNA, 19 nt, Homo sapiens
  misc_RNA (1)...(19): siRNA sense strand
ccugagcccucccagaaac

SEQ ID NO: 392426 - RNA, 19 nt, Homo sapiens
  misc_RNA (1)...(19): siRNA sense strand
ucugucaccugcuccaaag

SEQ ID NO: 392427 - RNA, 19 nt, Homo sapiens
  misc_RNA (1)...(19): siRNA sense strand
caaguuugacggacaucga

SEQ ID NO: 392428 - RNA, 19 nt, Homo sapiens
  misc_RNA (1)...(19): siRNA sense strand
caaggugcauuuaacuaua

SEQ ID NO: 392429 - RNA, 19 nt, Homo sapiens
  misc_RNA (1)...(19): siRNA sense strand
caacaaagcucaggacaac

SEQ ID NO: 392430 - RNA, 19 nt, Homo sapiens
  misc_RNA (1)...(19): siRNA sense strand
ggacaacacucggaagauc

SEQ ID NO: 392431 - RNA, 19 nt, Homo sapiens
  misc_RNA (1)...(19): siRNA sense strand
cggaagaucauaauaaaga

SEQ ID NO: 392432 - RNA, 19 nt, Homo sapiens
  misc_RNA (1)...(19): siRNA sense strand
aagaaugcauggugguuaa

SEQ ID NO: 392433 - RNA, 19 nt, Homo sapiens
  misc_RNA (1)...(19): siRNA sense strand
cagcaucccucuacaaggu

SEQ ID NO: 392434 - RNA, 19 nt, Homo sapiens
  misc_RNA (1)...(19): siRNA sense strand
gcauggugguuaaaacuua

SEQ ID NO: 392435 - RNA, 19 nt, Homo sapiens
  misc_RNA (1)...(19): siRNA sense strand
gaaagaaugcauggugguu

SEQ ID NO: 392436 - RNA, 19 nt, Homo sapiens
  misc_RNA (1)...(19): siRNA sense strand
gguuaaaacuuaccucauu

SEQ ID NO: 392437 - RNA, 19 nt, Homo sapiens
  misc_RNA (1)...(19): siRNA sense strand
cucggaagaucauaauaaa

SEQ ID NO: 392438 - RNA, 19 nt, Homo sapiens
  misc_RNA (1)...(19): siRNA sense strand
aaagaaugcauggugguua

SEQ ID NO: 392439 - RNA, 19 nt, Homo sapiens
  misc_RNA (1)...(19): siRNA sense strand
ugaugaugcugcuguaauc

SEQ ID NO: 392440 - RNA, 19 nt, Homo sapiens
  misc_RNA (1)...(19): siRNA sense strand
gcuugcaguucaaacagaa

SEQ ID NO: 392441 - RNA, 19 nt, Homo sapiens
  misc_RNA (1)...(19): siRNA sense strand
acucggaagaucauaauaa

SEQ ID NO: 392442 - RNA, 19 nt, Homo sapiens
  misc_RNA (1)...(19): siRNA sense strand
cuauugaaauccuaaaggu

SEQ ID NO: 392443 - RNA, 19 nt, Homo sapiens
  misc_RNA (1)...(19): siRNA sense strand
acaaggugcauuuaacuau

SEQ ID NO: 392444 - RNA, 19 nt, Homo sapiens
  misc_RNA (1)...(19): siRNA sense strand
gcagccgucguugauguua

SEQ ID NO: 392445 - RNA, 19 nt, Homo sapiens
  misc_RNA (1)...(19): siRNA sense strand
ccaagucaguacguccaaa

SEQ ID NO: 392446 - RNA, 19 nt, Homo sapiens
  misc_RNA (1)...(19): siRNA sense strand
uauacugccugccuaugug

SEQ ID NO: 392447 - RNA, 19 nt, Homo sapiens
  misc_RNA (1)...(19): siRNA sense strand
guauacugccugccuaugu

SEQ ID NO: 392448 - RNA, 19 nt, Homo sapiens
  misc_RNA (1)...(19): siRNA sense strand
ccaacaaagcucaggacaa

SEQ ID NO: 392449 - RNA, 19 nt, Homo sapiens
  misc_RNA (1)...(19): siRNA sense strand
gacaacacucggaagauca

SEQ ID NO: 392450 - RNA, 19 nt, Homo sapiens
  misc_RNA (1)...(19): siRNA sense strand
ucuacaaggugcauuuaac

SEQ ID NO: 392451 - RNA, 19 nt, Homo sapiens
  misc_RNA (1)...(19): siRNA sense strand
caagucaguacguccaaau

SEQ ID NO: 392452 - RNA, 19 nt, Homo sapiens
  misc_RNA (1)...(19): siRNA sense strand
caggacaacacucggaaga

SEQ ID NO: 392453 - RNA, 19 nt, Homo sapiens
  misc_RNA (1)...(19): siRNA sense strand
gcuguaauccccaucaaaa

SEQ ID NO: 392454 - RNA, 19 nt, Homo sapiens
  misc_RNA (1)...(19): siRNA sense strand
uacaaggugcauuuaacua

SEQ ID NO: 392455 - RNA, 19 nt, Homo sapiens
  misc_RNA (1)...(19): siRNA sense strand
ccucuacaaggugcauuua

SEQ ID NO: 392456 - RNA, 19 nt, Homo sapiens
  misc_RNA (1)...(19): siRNA sense strand
caaccgguuuuauacuauu

SEQ ID NO: 392457 - RNA, 19 nt, Homo sapiens
  misc_RNA (1)...(19): siRNA sense strand
agccgucguugauguuauu

SEQ ID NO: 392458 - RNA, 19 nt, Homo sapiens
  misc_RNA (1)...(19): siRNA sense strand
cugccuaugugacgacaau

SEQ ID NO: 392459 - RNA, 19 nt, Homo sapiens
  misc_RNA (1)...(19): siRNA sense strand
agucaguacguccaaauga

SEQ ID NO: 392460 - RNA, 19 nt, Homo sapiens
  misc_RNA (1)...(19): siRNA sense strand
gaaauccuaaagguagaau

SEQ ID NO: 392461 - RNA, 19 nt, Homo sapiens
  misc_RNA (1)...(19): siRNA sense strand
uugcagccgucguugaugu

SEQ ID NO: 392462 - RNA, 19 nt, Homo sapiens
  misc_RNA (1)...(19): siRNA sense strand
uaugugacgacaauccaaa

SEQ ID NO: 392463 - RNA, 19 nt, Homo sapiens
  misc_RNA (1)...(19): siRNA sense strand
uugaaauccuaaagguaga

SEQ ID NO: 392464 - RNA, 19 nt, Homo sapiens
  misc_RNA (1)...(19): siRNA sense strand
cagccgucguugauguuau

SEQ ID NO: 392465 - RNA, 19 nt, Homo sapiens
  misc_RNA (1)...(19): siRNA sense strand
gcagugcuugcaguucaaa

SEQ ID NO: 392466 - RNA, 19 nt, Homo sapiens
  misc_RNA (1)...(19): siRNA sense strand
gaagagacuuuccucauug

SEQ ID NO: 392467 - RNA, 19 nt, Homo sapiens
  misc_RNA (1)...(19): siRNA sense strand
ugaagagacuuuccucauu

SEQ ID NO: 392468 - RNA, 19 nt, Homo sapiens
  misc_RNA (1)...(19): siRNA sense strand
caucagacaugagcuguga

SEQ ID NO: 392469 - RNA, 19 nt, Homo sapiens
  misc_RNA (1)...(19): siRNA sense strand
ggugacgccuucagcauga

SEQ ID NO: 392470 - RNA, 19 nt, Homo sapiens
  misc_RNA (1)...(19): siRNA sense strand
gaagaagggcguccaaagg

SEQ ID NO: 392471 - RNA, 19 nt, Homo sapiens
  misc_RNA (1)...(19): siRNA sense strand
ccaaagcuauaugguaaga

SEQ ID NO: 392472 - RNA, 19 nt, Homo sapiens
  misc_RNA (1)...(19): siRNA sense strand
caacgacaccuuccacuuc

SEQ ID NO: 392473 - RNA, 19 nt, Homo sapiens
  misc_RNA (1)...(19): siRNA sense strand
gaugucuccugcuguacua

SEQ ID NO: 392474 - RNA, 19 nt, Homo sapiens
  misc_RNA (1)...(19): siRNA sense strand
ccaaugguuuccacaacaa

SEQ ID NO: 392475 - RNA, 19 nt, Homo sapiens
  misc_RNA (1)...(19): siRNA sense strand
gaaaagcuguacccacuca

SEQ ID NO: 392476 - RNA, 19 nt, Homo sapiens
  misc_RNA (1)...(19): siRNA sense strand
gcccaauccuggagcuuga

SEQ ID NO: 392477 - RNA, 19 nt, Homo sapiens
  misc_RNA (1)...(19): siRNA sense strand
ccgaagccguuaccucgaa

SEQ ID NO: 392478 - RNA, 19 nt, Homo sapiens
  misc_RNA (1)...(19): siRNA sense strand
gauccaggaaggugaagaa

SEQ ID NO: 392479 - RNA, 19 nt, Homo sapiens
  misc_RNA (1)...(19): siRNA sense strand
gggaacagcacccauggau

SEQ ID NO: 392480 - RNA, 19 nt, Homo sapiens
  misc_RNA (1)...(19): siRNA sense strand
aagagacuuuccucauuga

SEQ ID NO: 392481 - RNA, 19 nt, Homo sapiens
  misc_RNA (1)...(19): siRNA sense strand
gccguuaccucgaaugcau

SEQ ID NO: 392482 - RNA, 19 nt, Homo sapiens
  misc_RNA (1)...(19): siRNA sense strand
gcaacaccaccaaaugcaa

SEQ ID NO: 392483 - RNA, 19 nt, Homo sapiens
  misc_RNA (1)...(19): siRNA sense strand
cauggaugcuccucugaag

SEQ ID NO: 392484 - RNA, 19 nt, Homo sapiens
  misc_RNA (1)...(19): siRNA sense strand
aagaagggcguccaaagga

SEQ ID NO: 392485 - RNA, 19 nt, Homo sapiens
  misc_RNA (1)...(19): siRNA sense strand
auugaugucuccugcugua

SEQ ID NO: 392486 - RNA, 19 nt, Homo sapiens
  misc_RNA (1)...(19): siRNA sense strand
gggauugccguguggaaga

SEQ ID NO: 392487 - RNA, 19 nt, Homo sapiens
  misc_RNA (1)...(19): siRNA sense strand
ccgcagcccugaagaacag

SEQ ID NO: 392488 - RNA, 19 nt, Homo sapiens
  misc_RNA (1)...(19): siRNA sense strand
agaagggcguccaaaggau

SEQ ID NO: 392489 - RNA, 19 nt, Homo sapiens
  misc_RNA (1)...(19): siRNA sense strand
gcugcaacaccaccaaaug

SEQ ID NO: 392490 - RNA, 19 nt, Homo sapiens
  misc_RNA (1)...(19): siRNA sense strand
ugaagaagggcguccaaag

SEQ ID NO: 392491 - RNA, 19 nt, Homo sapiens
  misc_RNA (1)...(19): siRNA sense strand
cagcaugaaccacauugau

SEQ ID NO: 392492 - RNA, 19 nt, Homo sapiens
  misc_RNA (1)...(19): siRNA sense strand
gcuguacccacucagagaa

SEQ ID NO: 392493 - RNA, 19 nt, Homo sapiens
  misc_RNA (1)...(19): siRNA sense strand
gagguuguguguggguuag

SEQ ID NO: 392494 - RNA, 19 nt, Homo sapiens
  misc_RNA (1)...(19): siRNA sense strand
caccaucacccugcuaaug

SEQ ID NO: 392495 - RNA, 19 nt, Homo sapiens
  misc_RNA (1)...(19): siRNA sense strand
cgagguuguguguggguua

SEQ ID NO: 392496 - RNA, 19 nt, Homo sapiens
  misc_RNA (1)...(19): siRNA sense strand
ugcggugcaugcaguguaa

SEQ ID NO: 392497 - RNA, 19 nt, Homo sapiens
  misc_RNA (1)...(19): siRNA sense strand
caccuuccacuuccugaaa

SEQ ID NO: 392498 - RNA, 19 nt, Homo sapiens
  misc_RNA (1)...(19): siRNA sense strand
uccaaugguuuccacaaca

SEQ ID NO: 392499 - RNA, 19 nt, Homo sapiens
  misc_RNA (1)...(19): siRNA sense strand
ggauugccguguggaagag

SEQ ID NO: 392500 - RNA, 19 nt, Homo sapiens
  misc_RNA (1)...(19): siRNA sense strand
caugaaucaaugucuggua

SEQ ID NO: 392501 - RNA, 19 nt, Homo sapiens
  misc_RNA (1)...(19): siRNA sense strand
cgaagccguuaccucgaau

SEQ ID NO: 392502 - RNA, 19 nt, Homo sapiens
  misc_RNA (1)...(19): siRNA sense strand
ucagacaugagcugugaga

SEQ ID NO: 392503 - RNA, 19 nt, Homo sapiens
  misc_RNA (1)...(19): siRNA sense strand
ugaagaacagugccuggau

SEQ ID NO: 392504 - RNA, 19 nt, Homo sapiens
  misc_RNA (1)...(19): siRNA sense strand
gcgcuugugggaagaagga

SEQ ID NO: 392505 - RNA, 19 nt, Homo sapiens
  misc_RNA (1)...(19): siRNA sense strand
accaucacccugcuaauga

SEQ ID NO: 392506 - RNA, 19 nt, Homo sapiens
  misc_RNA (1)...(19): siRNA sense strand
gcuccaaugguuuccacaa

SEQ ID NO: 392507 - RNA, 19 nt, Homo sapiens
  misc_RNA (1)...(19): siRNA sense strand
ccauggaugcuccucugaa

SEQ ID NO: 392508 - RNA, 19 nt, Homo sapiens
  misc_RNA (1)...(19): siRNA sense strand
gcaugcaguguaagaccaa

SEQ ID NO: 392509 - RNA, 19 nt, Homo sapiens
  misc_RNA (1)...(19): siRNA sense strand
gugaagcgcuggauauuua

SEQ ID NO: 392510 - RNA, 19 nt, Homo sapiens
  misc_RNA (1)...(19): siRNA sense strand
uagaagaacuggauuacuu

SEQ ID NO: 392511 - RNA, 19 nt, Homo sapiens
  misc_RNA (1)...(19): siRNA sense strand
gaaaggagauacgggauuc

SEQ ID NO: 392512 - RNA, 19 nt, Homo sapiens
  misc_RNA (1)...(19): siRNA sense strand
ugaaguggcuguuugaaga

SEQ ID NO: 392513 - RNA, 19 nt, Homo sapiens
  misc_RNA (1)...(19): siRNA sense strand
ggaaggaagugaccaugga

SEQ ID NO: 392514 - RNA, 19 nt, Homo sapiens
  misc_RNA (1)...(19): siRNA sense strand
ggagagagguacaaagaag

SEQ ID NO: 392515 - RNA, 19 nt, Homo sapiens
  misc_RNA (1)...(19): siRNA sense strand
gaaggagccucgagaacug

SEQ ID NO: 392516 - RNA, 19 nt, Homo sapiens
  misc_RNA (1)...(19): siRNA sense strand
cuaagaaggugaagaagga

SEQ ID NO: 392517 - RNA, 19 nt, Homo sapiens
  misc_RNA (1)...(19): siRNA sense strand
ugauggaucuggccaauga

SEQ ID NO: 392518 - RNA, 19 nt, Homo sapiens
  misc_RNA (1)...(19): siRNA sense strand
gguaucggcugucggauga

SEQ ID NO: 392519 - RNA, 19 nt, Homo sapiens
  misc_RNA (1)...(19): siRNA sense strand
gaagugaccauggauugua

SEQ ID NO: 392520 - RNA, 19 nt, Homo sapiens
  misc_RNA (1)...(19): siRNA sense strand
ggucacaccuaaacucaug

SEQ ID NO: 392521 - RNA, 19 nt, Homo sapiens
  misc_RNA (1)...(19): siRNA sense strand
gcacagagucagaaauguu

SEQ ID NO: 392522 - RNA, 19 nt, Homo sapiens
  misc_RNA (1)...(19): siRNA sense strand
gcugagcgcuuacuaaugc

SEQ ID NO: 392523 - RNA, 19 nt, Homo sapiens
  misc_RNA (1)...(19): siRNA sense strand
agaacuggauuacuuagaa

SEQ ID NO: 392524 - RNA, 19 nt, Homo sapiens
  misc_RNA (1)...(19): siRNA sense strand
gcaauggaccuuacaacga

SEQ ID NO: 392525 - RNA, 19 nt, Homo sapiens
  misc_RNA (1)...(19): siRNA sense strand
gcagaucaccaaccucuug

SEQ ID NO: 392526 - RNA, 19 nt, Homo sapiens
  misc_RNA (1)...(19): siRNA sense strand
gaacuggauuacuuagaag

SEQ ID NO: 392527 - RNA, 19 nt, Homo sapiens
  misc_RNA (1)...(19): siRNA sense strand
uaauugaacucaccaaagg

SEQ ID NO: 392528 - RNA, 19 nt, Homo sapiens
  misc_RNA (1)...(19): siRNA sense strand
ggcacaauguuuccuuuga

SEQ ID NO: 392529 - RNA, 19 nt, Homo sapiens
  misc_RNA (1)...(19): siRNA sense strand
ggaggaguuucaacaagau

SEQ ID NO: 392530 - RNA, 19 nt, Homo sapiens
  misc_RNA (1)...(19): siRNA sense strand
ggacauucgugagaacuuc

SEQ ID NO: 392531 - RNA, 19 nt, Homo sapiens
  misc_RNA (1)...(19): siRNA sense strand
gcagaggugcacagacuuu

SEQ ID NO: 392532 - RNA, 19 nt, Homo sapiens
  misc_RNA (1)...(19): siRNA sense strand
gcucugcuguugacuacuu

SEQ ID NO: 392533 - RNA, 19 nt, Homo sapiens
  misc_RNA (1)...(19): siRNA sense strand
gugcugggcugcugcauca

SEQ ID NO: 392534 - RNA, 19 nt, Homo sapiens
  misc_RNA (1)...(19): siRNA sense strand
gaggaggaguuucaacaag

SEQ ID NO: 392535 - RNA, 19 nt, Homo sapiens
  misc_RNA (1)...(19): siRNA sense strand
ggaaaggagauacgggauu

SEQ ID NO: 392536 - RNA, 19 nt, Homo sapiens
  misc_RNA (1)...(19): siRNA sense strand
ucagugcagucgauauuga

SEQ ID NO: 392537 - RNA, 19 nt, Homo sapiens
  misc_RNA (1)...(19): siRNA sense strand
ucagaaauguucaauaagc

SEQ ID NO: 392538 - RNA, 19 nt, Homo sapiens
  misc_RNA (1)...(19): siRNA sense strand
agaagaacuggauuacuua

SEQ ID NO: 392539 - RNA, 19 nt, Homo sapiens
  misc_RNA (1)...(19): siRNA sense strand
ugaaggacauucgugagaa

SEQ ID NO: 392540 - RNA, 19 nt, Homo sapiens
  misc_RNA (1)...(19): siRNA sense strand
ggauuucccugcaggaucu

SEQ ID NO: 392541 - RNA, 19 nt, Homo sapiens
  misc_RNA (1)...(19): siRNA sense strand
gcccuuugcugagcgcuua

SEQ ID NO: 392542 - RNA, 19 nt, Homo sapiens
  misc_RNA (1)...(19): siRNA sense strand
gcagcuaccgcucuucuug

SEQ ID NO: 392543 - RNA, 19 nt, Homo sapiens
  misc_RNA (1)...(19): siRNA sense strand
gauaauugaacucaccaaa

SEQ ID NO: 392544 - RNA, 19 nt, Homo sapiens
  misc_RNA (1)...(19): siRNA sense strand
gcagugaggaggaggaguu

SEQ ID NO: 392545 - RNA, 19 nt, Homo sapiens
  misc_RNA (1)...(19): siRNA sense strand
ggaagucacaguggaagaa

SEQ ID NO: 392546 - RNA, 19 nt, Homo sapiens
  misc_RNA (1)...(19): siRNA sense strand
gcacaauguuuccuuugac

SEQ ID NO: 392547 - RNA, 19 nt, Homo sapiens
  misc_RNA (1)...(19): siRNA sense strand
gagcucugcuguugacuac

SEQ ID NO: 392548 - RNA, 19 nt, Homo sapiens
  misc_RNA (1)...(19): siRNA sense strand
gggcacagagucagaaaug

SEQ ID NO: 392549 - RNA, 19 nt, Homo sapiens
  misc_RNA (1)...(19): siRNA sense strand
gaaggacauucgugagaac

SEQ ID NO: 392550 - RNA, 19 nt, Homo sapiens
  misc_RNA (1)...(19): siRNA sense strand
gaacgcccauaaacguauc

SEQ ID NO: 392551 - RNA, 19 nt, Homo sapiens
  misc_RNA (1)...(19): siRNA sense strand
ucacaaggaugguaauagc

SEQ ID NO: 392552 - RNA, 19 nt, Homo sapiens
  misc_RNA (1)...(19): siRNA sense strand
ugacaauagugccauaugg

SEQ ID NO: 392553 - RNA, 19 nt, Homo sapiens
  misc_RNA (1)...(19): siRNA sense strand
ggaggaggaguuucaacaa

SEQ ID NO: 392554 - RNA, 19 nt, Homo sapiens
  misc_RNA (1)...(19): siRNA sense strand
caggagagagguacaaaga

SEQ ID NO: 392555 - RNA, 19 nt, Homo sapiens
  misc_RNA (1)...(19): siRNA sense strand
caucagcagugucaacagu

SEQ ID NO: 392556 - RNA, 19 nt, Homo sapiens
  misc_RNA (1)...(19): siRNA sense strand
gcccuggccuugcagauca

SEQ ID NO: 392557 - RNA, 19 nt, Homo sapiens
  misc_RNA (1)...(19): siRNA sense strand
uugaagaguuugccauaga

SEQ ID NO: 392558 - RNA, 19 nt, Homo sapiens
  misc_RNA (1)...(19): siRNA sense strand
caagcugccucacaaggau

SEQ ID NO: 392559 - RNA, 19 nt, Homo sapiens
  misc_RNA (1)...(19): siRNA sense strand
gcaagaauuuaagcagaag

SEQ ID NO: 392560 - RNA, 19 nt, Homo sapiens
  misc_RNA (1)...(19): siRNA sense strand
agugggaccugcaagaauu

SEQ ID NO: 392561 - RNA, 19 nt, Homo sapiens
  misc_RNA (1)...(19): siRNA sense strand
gcuuacuaaugcaguuuaa

SEQ ID NO: 392562 - RNA, 19 nt, Homo sapiens
  misc_RNA (1)...(19): siRNA sense strand
gaagaagucguugauggau

SEQ ID NO: 392563 - RNA, 19 nt, Homo sapiens
  misc_RNA (1)...(19): siRNA sense strand
ugaagaguuugccauagau

SEQ ID NO: 392564 - RNA, 19 nt, Homo sapiens
  misc_RNA (1)...(19): siRNA sense strand
gagaaggcccagcagaugu

SEQ ID NO: 392565 - RNA, 19 nt, Homo sapiens
  misc_RNA (1)...(19): siRNA sense strand
gcuuggagacgcccacuuu

SEQ ID NO: 392566 - RNA, 19 nt, Homo sapiens
  misc_RNA (1)...(19): siRNA sense strand
gaggaacgcccauaaacgu

SEQ ID NO: 392567 - RNA, 19 nt, Homo sapiens
  misc_RNA (1)...(19): siRNA sense strand
ccuaaacucauggcacuua

SEQ ID NO: 392568 - RNA, 19 nt, Homo sapiens
  misc_RNA (1)...(19): siRNA sense strand
gaauuuaagcagaagaaag

SEQ ID NO: 392569 - RNA, 19 nt, Homo sapiens
  misc_RNA (1)...(19): siRNA sense strand
ggaacgcccauaaacguau

SEQ ID NO: 392570 - RNA, 19 nt, Homo sapiens
  misc_RNA (1)...(19): siRNA sense strand
ccacaaagcaaggccagaa

SEQ ID NO: 392571 - RNA, 19 nt, Homo sapiens
  misc_RNA (1)...(19): siRNA sense strand
gcacagccuuuggguggau

SEQ ID NO: 392572 - RNA, 19 nt, Homo sapiens
  misc_RNA (1)...(19): siRNA sense strand
gauugcagcugugcuugga

SEQ ID NO: 392573 - RNA, 19 nt, Homo sapiens
  misc_RNA (1)...(19): siRNA sense strand
ugcaagaauuuaagcagaa

SEQ ID NO: 392574 - RNA, 19 nt, Homo sapiens
  misc_RNA (1)...(19): siRNA sense strand
ggagugggaccugcaagaa

SEQ ID NO: 392575 - RNA, 19 nt, Homo sapiens
  misc_RNA (1)...(19): siRNA sense strand
gugcacagacuuuauguag

SEQ ID NO: 392576 - RNA, 19 nt, Homo sapiens
  misc_RNA (1)...(19): siRNA sense strand
aggaggaguuucaacaaga

SEQ ID NO: 392577 - RNA, 19 nt, Homo sapiens
  misc_RNA (1)...(19): siRNA sense strand
ggugaagcgcuggauauuu

SEQ ID NO: 392578 - RNA, 19 nt, Homo sapiens
  misc_RNA (1)...(19): siRNA sense strand
gcacaacccauuggacauc

SEQ ID NO: 392579 - RNA, 19 nt, Homo sapiens
  misc_RNA (1)...(19): siRNA sense strand
caaggaagucacaguggaa

SEQ ID NO: 392580 - RNA, 19 nt, Homo sapiens
  misc_RNA (1)...(19): siRNA sense strand
agagagaaacugcaaggaa

SEQ ID NO: 392581 - RNA, 19 nt, Homo sapiens
  misc_RNA (1)...(19): siRNA sense strand
gaugguaauagcuguaaug

SEQ ID NO: 392582 - RNA, 19 nt, Homo sapiens
  misc_RNA (1)...(19): siRNA sense strand
gaagaacuggauuacuuag

SEQ ID NO: 392583 - RNA, 19 nt, Homo sapiens
  misc_RNA (1)...(19): siRNA sense strand
gagaugaagaagucguuga

SEQ ID NO: 392584 - RNA, 19 nt, Homo sapiens
  misc_RNA (1)...(19): siRNA sense strand
caauaagcuugagagcauu

SEQ ID NO: 392585 - RNA, 19 nt, Homo sapiens
  misc_RNA (1)...(19): siRNA sense strand
aagcuaagaaggugaagaa

SEQ ID NO: 392586 - RNA, 19 nt, Homo sapiens
  misc_RNA (1)...(19): siRNA sense strand
gagagagguacaaagaaga

SEQ ID NO: 392587 - RNA, 19 nt, Homo sapiens
  misc_RNA (1)...(19): siRNA sense strand
ugaagaagucguugaugga

SEQ ID NO: 392588 - RNA, 19 nt, Homo sapiens
  misc_RNA (1)...(19): siRNA sense strand
uuaagcagaagaaagcuaa

SEQ ID NO: 392589 - RNA, 19 nt, Homo sapiens
  misc_RNA (1)...(19): siRNA sense strand
gacugaggguggcuggauu

SEQ ID NO: 392590 - RNA, 19 nt, Homo sapiens
  misc_RNA (1)...(19): siRNA sense strand
gcaggaggcagcugagaag

SEQ ID NO: 392591 - RNA, 19 nt, Homo sapiens
  misc_RNA (1)...(19): siRNA sense strand
gggacaaccuggccaagcu

SEQ ID NO: 392592 - RNA, 19 nt, Homo sapiens
  misc_RNA (1)...(19): siRNA sense strand
gcagaagaaagcuaagaag

SEQ ID NO: 392593 - RNA, 19 nt, Homo sapiens
  misc_RNA (1)...(19): siRNA sense strand
gaggugcacagacuuuaug

SEQ ID NO: 392594 - RNA, 19 nt, Homo sapiens
  misc_RNA (1)...(19): siRNA sense strand
aagugaccauggauuguaa

SEQ ID NO: 392595 - RNA, 19 nt, Homo sapiens
  misc_RNA (1)...(19): siRNA sense strand
ggaagugaccauggauugu

SEQ ID NO: 392596 - RNA, 19 nt, Homo sapiens
  misc_RNA (1)...(19): siRNA sense strand
ccuacaagcugggucugaa

SEQ ID NO: 392597 - RNA, 19 nt, Homo sapiens
  misc_RNA (1)...(19): siRNA sense strand
gaagaagugggaggugguu

SEQ ID NO: 392598 - RNA, 19 nt, Homo sapiens
  misc_RNA (1)...(19): siRNA sense strand
gcaaaucuucgggcaagga

SEQ ID NO: 392599 - RNA, 19 nt, Homo sapiens
  misc_RNA (1)...(19): siRNA sense strand
cucgagaacuguuugugaa

SEQ ID NO: 392600 - RNA, 19 nt, Homo sapiens
  misc_RNA (1)...(19): siRNA sense strand
agaagucguugauggaucu

SEQ ID NO: 392601 - RNA, 19 nt, Homo sapiens
  misc_RNA (1)...(19): siRNA sense strand
gaaggaagugaccauggau

SEQ ID NO: 392602 - RNA, 19 nt, Homo sapiens
  misc_RNA (1)...(19): siRNA sense strand
gaagaguuugccauagaug

SEQ ID NO: 392603 - RNA, 19 nt, Homo sapiens
  misc_RNA (1)...(19): siRNA sense strand
gcaaacgguagaagaacug

SEQ ID NO: 392604 - RNA, 19 nt, Homo sapiens
  misc_RNA (1)...(19): siRNA sense strand
gccaagcugccgacaggua

SEQ ID NO: 392605 - RNA, 19 nt, Homo sapiens
  misc_RNA (1)...(19): siRNA sense strand
aggccaagauggagaacuu

SEQ ID NO: 392606 - RNA, 19 nt, Homo sapiens
  misc_RNA (1)...(19): siRNA sense strand
guuugaagaguuugccaua

SEQ ID NO: 392607 - RNA, 19 nt, Homo sapiens
  misc_RNA (1)...(19): siRNA sense strand
ugaccagccgugugaauug

SEQ ID NO: 392608 - RNA, 19 nt, Homo sapiens
  misc_RNA (1)...(19): siRNA sense strand
agaaggcccagcagaugua

SEQ ID NO: 392609 - RNA, 19 nt, Homo sapiens
  misc_RNA (1)...(19): siRNA sense strand
gagguucgauguccaguua

SEQ ID NO: 392610 - RNA, 19 nt, Homo sapiens
  misc_RNA (1)...(19): siRNA sense strand
uaaccaagcugcaaucaug

SEQ ID NO: 392611 - RNA, 19 nt, Homo sapiens
  misc_RNA (1)...(19): siRNA sense strand
cuaaagaaauccugacaaa

SEQ ID NO: 392612 - RNA, 19 nt, Homo sapiens
  misc_RNA (1)...(19): siRNA sense strand
gcaaaucaccagauacaaa

SEQ ID NO: 392613 - RNA, 19 nt, Homo sapiens
  misc_RNA (1)...(19): siRNA sense strand
ucacacaaguuuaugguuu

SEQ ID NO: 392614 - RNA, 19 nt, Homo sapiens
  misc_RNA (1)...(19): siRNA sense strand
gaacuugacgauacucuaa

SEQ ID NO: 392615 - RNA, 19 nt, Homo sapiens
  misc_RNA (1)...(19): siRNA sense strand
gcagacagaucacacaagu

SEQ ID NO: 392616 - RNA, 19 nt, Homo sapiens
  misc_RNA (1)...(19): siRNA sense strand
cgagaaggcuaaagaaauc

SEQ ID NO: 392617 - RNA, 19 nt, Homo sapiens
  misc_RNA (1)...(19): siRNA sense strand
gcuuguagcucuuaagguu

SEQ ID NO: 392618 - RNA, 19 nt, Homo sapiens
  misc_RNA (1)...(19): siRNA sense strand
cagaggauauuauucaguu

SEQ ID NO: 392619 - RNA, 19 nt, Homo sapiens
  misc_RNA (1)...(19): siRNA sense strand
agacagaucacacaaguuu

SEQ ID NO: 392620 - RNA, 19 nt, Homo sapiens
  misc_RNA (1)...(19): siRNA sense strand
gaacgcaucaccauucuuc

SEQ ID NO: 392621 - RNA, 19 nt, Homo sapiens
  misc_RNA (1)...(19): siRNA sense strand
uagauacacuggaucauau

SEQ ID NO: 392622 - RNA, 19 nt, Homo sapiens
  misc_RNA (1)...(19): siRNA sense strand
gaucauaucagagcacuug

SEQ ID NO: 392623 - RNA, 19 nt, Homo sapiens
  misc_RNA (1)...(19): siRNA sense strand
ucauggaacuguuuagaau

SEQ ID NO: 392624 - RNA, 19 nt, Homo sapiens
  misc_RNA (1)...(19): siRNA sense strand
uagaauugguggcaaauca

SEQ ID NO: 392625 - RNA, 19 nt, Homo sapiens
  misc_RNA (1)...(19): siRNA sense strand
ugacagaggauauuauuca

SEQ ID NO: 392626 - RNA, 19 nt, Homo sapiens
  misc_RNA (1)...(19): siRNA sense strand
gguggucucucgccaucua

SEQ ID NO: 392627 - RNA, 19 nt, Homo sapiens
  misc_RNA (1)...(19): siRNA sense strand
gcgagaaggcuaaagaaau

SEQ ID NO: 392628 - RNA, 19 nt, Homo sapiens
  misc_RNA (1)...(19): siRNA sense strand
caaaucaccagauacaaau

SEQ ID NO: 392629 - RNA, 19 nt, Homo sapiens
  misc_RNA (1)...(19): siRNA sense strand
ucugagacauuuaaucaug

SEQ ID NO: 392630 - RNA, 19 nt, Homo sapiens
  misc_RNA (1)...(19): siRNA sense strand
gcaagauauuucugagaca

SEQ ID NO: 392631 - RNA, 19 nt, Homo sapiens
  misc_RNA (1)...(19): siRNA sense strand
gaucucauggaacuguuua

SEQ ID NO: 392632 - RNA, 19 nt, Homo sapiens
  misc_RNA (1)...(19): siRNA sense strand
gaucuucugucuacauggu

SEQ ID NO: 392633 - RNA, 19 nt, Homo sapiens
  misc_RNA (1)...(19): siRNA sense strand
caugagagcagacagauca

SEQ ID NO: 392634 - RNA, 19 nt, Homo sapiens
  misc_RNA (1)...(19): siRNA sense strand
gggagauuauguugacaga

SEQ ID NO: 392635 - RNA, 19 nt, Homo sapiens
  misc_RNA (1)...(19): siRNA sense strand
ucauggaacuugacgauac

SEQ ID NO: 392636 - RNA, 19 nt, Homo sapiens
  misc_RNA (1)...(19): siRNA sense strand
gaggauauuauucaguuga

SEQ ID NO: 392637 - RNA, 19 nt, Homo sapiens
  misc_RNA (1)...(19): siRNA sense strand
caagauauuucugagacau

SEQ ID NO: 392638 - RNA, 19 nt, Homo sapiens
  misc_RNA (1)...(19): siRNA sense strand
ccaaacuauuguuaucguu

SEQ ID NO: 392639 - RNA, 19 nt, Homo sapiens
  misc_RNA (1)...(19): siRNA sense strand
guuuaugguuucuaugaug

SEQ ID NO: 392640 - RNA, 19 nt, Homo sapiens
  misc_RNA (1)...(19): siRNA sense strand
ccaugaggguccaaugugu

SEQ ID NO: 392641 - RNA, 19 nt, Homo sapiens
  misc_RNA (1)...(19): siRNA sense strand
guuuagaauugguggcaaa

SEQ ID NO: 392642 - RNA, 19 nt, Homo sapiens
  misc_RNA (1)...(19): siRNA sense strand
ggaauguaguaacgauuuu

SEQ ID NO: 392643 - RNA, 19 nt, Homo sapiens
  misc_RNA (1)...(19): siRNA sense strand
ggagcugguuacaccuuug

SEQ ID NO: 392644 - RNA, 19 nt, Homo sapiens
  misc_RNA (1)...(19): siRNA sense strand
ggaacuugacgauacucua

SEQ ID NO: 392645 - RNA, 19 nt, Homo sapiens
  misc_RNA (1)...(19): siRNA sense strand
guugacagaggauauuauu

SEQ ID NO: 392646 - RNA, 19 nt, Homo sapiens
  misc_RNA (1)...(19): siRNA sense strand
ccacauguuacucgucgua

SEQ ID NO: 392647 - RNA, 19 nt, Homo sapiens
  misc_RNA (1)...(19): siRNA sense strand
cggaauguaguaacgauuu

SEQ ID NO: 392648 - RNA, 19 nt, Homo sapiens
  misc_RNA (1)...(19): siRNA sense strand
gacauuuaaucaugccaau

SEQ ID NO: 392649 - RNA, 19 nt, Homo sapiens
  misc_RNA (1)...(19): siRNA sense strand
acagaucacacaaguuuau

SEQ ID NO: 392650 - RNA, 19 nt, Homo sapiens
  misc_RNA (1)...(19): siRNA sense strand
auggaacuguuuagaauug

SEQ ID NO: 392651 - RNA, 19 nt, Homo sapiens
  misc_RNA (1)...(19): siRNA sense strand
gagcagacagaucacacaa

SEQ ID NO: 392652 - RNA, 19 nt, Homo sapiens
  misc_RNA (1)...(19): siRNA sense strand
cacacaaguuuaugguuuc

SEQ ID NO: 392653 - RNA, 19 nt, Homo sapiens
  misc_RNA (1)...(19): siRNA sense strand
uacacuggaucauaucaga

SEQ ID NO: 392654 - RNA, 19 nt, Homo sapiens
  misc_RNA (1)...(19): siRNA sense strand
auagauacacuggaucaua

SEQ ID NO: 392655 - RNA, 19 nt, Homo sapiens
  misc_RNA (1)...(19): siRNA sense strand
uaagguucguuaccgugaa

SEQ ID NO: 392656 - RNA, 19 nt, Homo sapiens
  misc_RNA (1)...(19): siRNA sense strand
gcuaaagaaauccugacaa

SEQ ID NO: 392657 - RNA, 19 nt, Homo sapiens
  misc_RNA (1)...(19): siRNA sense strand
ggaucgagcagcugaacga

SEQ ID NO: 392658 - RNA, 19 nt, Homo sapiens
  misc_RNA (1)...(19): siRNA sense strand
gacagaucacacaaguuua

SEQ ID NO: 392659 - RNA, 19 nt, Homo sapiens
  misc_RNA (1)...(19): siRNA sense strand
gagaugugcaugggcaauu

SEQ ID NO: 392660 - RNA, 19 nt, Homo sapiens
  misc_RNA (1)...(19): siRNA sense strand
agaugugcaugggcaauuu

SEQ ID NO: 392661 - RNA, 19 nt, Homo sapiens
  misc_RNA (1)...(19): siRNA sense strand
caccagauacaaauuacuu

SEQ ID NO: 392662 - RNA, 19 nt, Homo sapiens
  misc_RNA (1)...(19): siRNA sense strand
uaugggagauuauguugac

SEQ ID NO: 392663 - RNA, 19 nt, Homo sapiens
  misc_RNA (1)...(19): siRNA sense strand
gauauaacuggugccauga

SEQ ID NO: 392664 - RNA, 19 nt, Homo sapiens
  misc_RNA (1)...(19): siRNA sense strand
gacagaggauauuauucag

SEQ ID NO: 392665 - RNA, 19 nt, Homo sapiens
  misc_RNA (1)...(19): siRNA sense strand
ggaacuguuuagaauuggu

SEQ ID NO: 392666 - RNA, 19 nt, Homo sapiens
  misc_RNA (1)...(19): siRNA sense strand
gaucacacaaguuuauggu

SEQ ID NO: 392667 - RNA, 19 nt, Homo sapiens
  misc_RNA (1)...(19): siRNA sense strand
guuacugucuguggagaug

SEQ ID NO: 392668 - RNA, 19 nt, Homo sapiens
  misc_RNA (1)...(19): siRNA sense strand
uacaagaaguuccccauga

SEQ ID NO: 392669 - RNA, 19 nt, Homo sapiens
  misc_RNA (1)...(19): siRNA sense strand
aaagaaauccugacaaaag

SEQ ID NO: 392670 - RNA, 19 nt, Homo sapiens
  misc_RNA (1)...(19): siRNA sense strand
gggcaagauauuucugaga

SEQ ID NO: 392671 - RNA, 19 nt, Homo sapiens
  misc_RNA (1)...(19): siRNA sense strand
ccagaugaccguggugguu

SEQ ID NO: 392672 - RNA, 19 nt, Homo sapiens
  misc_RNA (1)...(19): siRNA sense strand
cauggaacuguuuagaauu

SEQ ID NO: 392673 - RNA, 19 nt, Homo sapiens
  misc_RNA (1)...(19): siRNA sense strand
agaggcgagccacauguua

SEQ ID NO: 392674 - RNA, 19 nt, Homo sapiens
  misc_RNA (1)...(19): siRNA sense strand
cugcaaucauggaacuuga

SEQ ID NO: 392675 - RNA, 19 nt, Homo sapiens
  misc_RNA (1)...(19): siRNA sense strand
uggcaaaucaccagauaca

SEQ ID NO: 392676 - RNA, 19 nt, Homo sapiens
  misc_RNA (1)...(19): siRNA sense strand
aagaaauccugacaaaaga

SEQ ID NO: 392677 - RNA, 19 nt, Homo sapiens
  misc_RNA (1)...(19): siRNA sense strand
ugguuucuaugaugaaugu

SEQ ID NO: 392678 - RNA, 19 nt, Homo sapiens
  misc_RNA (1)...(19): siRNA sense strand
gaggagcugguuacaccuu

SEQ ID NO: 392679 - RNA, 19 nt, Homo sapiens
  misc_RNA (1)...(19): siRNA sense strand
gacuugcuguggucagauc

SEQ ID NO: 392680 - RNA, 19 nt, Homo sapiens
  misc_RNA (1)...(19): siRNA sense strand
cccagacuacuuccuguaa

SEQ ID NO: 392681 - RNA, 19 nt, Homo sapiens
  misc_RNA (1)...(19): siRNA sense strand
guagaggcgagccacaugu

SEQ ID NO: 392682 - RNA, 19 nt, Homo sapiens
  misc_RNA (1)...(19): siRNA sense strand
aauacucuuucuugcaguu

SEQ ID NO: 392683 - RNA, 19 nt, Homo sapiens
  misc_RNA (1)...(19): siRNA sense strand
ugacgauacucuaaaauac

SEQ ID NO: 392684 - RNA, 19 nt, Homo sapiens
  misc_RNA (1)...(19): siRNA sense strand
cauggaacuugacgauacu

SEQ ID NO: 392685 - RNA, 19 nt, Homo sapiens
  misc_RNA (1)...(19): siRNA sense strand
guuuaugggagauuauguu

SEQ ID NO: 392686 - RNA, 19 nt, Homo sapiens
  misc_RNA (1)...(19): siRNA sense strand
gaggcgagccacauguuac

SEQ ID NO: 392687 - RNA, 19 nt, Homo sapiens
  misc_RNA (1)...(19): siRNA sense strand
gcugcaaucauggaacuug

SEQ ID NO: 392688 - RNA, 19 nt, Homo sapiens
  misc_RNA (1)...(19): siRNA sense strand
cuauagauacacuggauca

SEQ ID NO: 392689 - RNA, 19 nt, Homo sapiens
  misc_RNA (1)...(19): siRNA sense strand
ggaaucaugagagcagaca

SEQ ID NO: 392690 - RNA, 19 nt, Homo sapiens
  misc_RNA (1)...(19): siRNA sense strand
agaggauauuauucaguug

SEQ ID NO: 392691 - RNA, 19 nt, Homo sapiens
  misc_RNA (1)...(19): siRNA sense strand
ugaccggaauguaguaacg

SEQ ID NO: 392692 - RNA, 19 nt, Homo sapiens
  misc_RNA (1)...(19): siRNA sense strand
ggccucacguuggugucua

SEQ ID NO: 392693 - RNA, 19 nt, Homo sapiens
  misc_RNA (1)...(19): siRNA sense strand
acacugcuuguagcucuua

SEQ ID NO: 392694 - RNA, 19 nt, Homo sapiens
  misc_RNA (1)...(19): siRNA sense strand
gcacugagaucuuugacua

SEQ ID NO: 392695 - RNA, 19 nt, Homo sapiens
  misc_RNA (1)...(19): siRNA sense strand
ucaaagagcuguucagagu

SEQ ID NO: 392696 - RNA, 19 nt, Homo sapiens
  misc_RNA (1)...(19): siRNA sense strand
ggacgagcaucuccagaaa

SEQ ID NO: 392697 - RNA, 19 nt, Homo sapiens
  misc_RNA (1)...(19): siRNA sense strand
cgacauccauggacaauuc

SEQ ID NO: 392698 - RNA, 19 nt, Homo sapiens
  misc_RNA (1)...(19): siRNA sense strand
ccagagagaucuugguaga

SEQ ID NO: 392699 - RNA, 19 nt, Homo sapiens
  misc_RNA (1)...(19): siRNA sense strand
gcugcgagcucaucaagga

SEQ ID NO: 392700 - RNA, 19 nt, Homo sapiens
  misc_RNA (1)...(19): siRNA sense strand
acaauucuaugaccucaaa

SEQ ID NO: 392701 - RNA, 19 nt, Homo sapiens
  misc_RNA (1)...(19): siRNA sense strand
cuacugcacugagaucuuu

SEQ ID NO: 392702 - RNA, 19 nt, Homo sapiens
  misc_RNA (1)...(19): siRNA sense strand
ggagccggcuaccuauuug

SEQ ID NO: 392703 - RNA, 19 nt, Homo sapiens
  misc_RNA (1)...(19): siRNA sense strand
aaagagcuguucagaguag

SEQ ID NO: 392704 - RNA, 19 nt, Homo sapiens
  misc_RNA (1)...(19): siRNA sense strand
gcaggucuauggcuucuac

SEQ ID NO: 392705 - RNA, 19 nt, Homo sapiens
  misc_RNA (1)...(19): siRNA sense strand
ucaaggcccugugcgcuaa

SEQ ID NO: 392706 - RNA, 19 nt, Homo sapiens
  misc_RNA (1)...(19): siRNA sense strand
gaucugccgugcccaccaa

SEQ ID NO: 392707 - RNA, 19 nt, Homo sapiens
  misc_RNA (1)...(19): siRNA sense strand
gagaccaacuaccucuuca

SEQ ID NO: 392708 - RNA, 19 nt, Homo sapiens
  misc_RNA (1)...(19): siRNA sense strand
gacaaucgaccgaaagcaa

SEQ ID NO: 392709 - RNA, 19 nt, Homo sapiens
  misc_RNA (1)...(19): siRNA sense strand
acgagcaucuccagaaaga

SEQ ID NO: 392710 - RNA, 19 nt, Homo sapiens
  misc_RNA (1)...(19): siRNA sense strand
caaagagcuguucagagua

SEQ ID NO: 392711 - RNA, 19 nt, Homo sapiens
  misc_RNA (1)...(19): siRNA sense strand
ggccagagagaucuuggua

SEQ ID NO: 392712 - RNA, 19 nt, Homo sapiens
  misc_RNA (1)...(19): siRNA sense strand
gaccaacuaccucuucaug

SEQ ID NO: 392713 - RNA, 19 nt, Homo sapiens
  misc_RNA (1)...(19): siRNA sense strand
gcacuuaagguucgcuauc

SEQ ID NO: 392714 - RNA, 19 nt, Homo sapiens
  misc_RNA (1)...(19): siRNA sense strand
ucuauagcgucgaaacguu

SEQ ID NO: 392715 - RNA, 19 nt, Homo sapiens
  misc_RNA (1)...(19): siRNA sense strand
gaugagugccugcgcaagu

SEQ ID NO: 392716 - RNA, 19 nt, Homo sapiens
  misc_RNA (1)...(19): siRNA sense strand
caugagagucgccagauca

SEQ ID NO: 392717 - RNA, 19 nt, Homo sapiens
  misc_RNA (1)...(19): siRNA sense strand
ucuauggcuucuacgauga

SEQ ID NO: 392718 - RNA, 19 nt, Homo sapiens
  misc_RNA (1)...(19): siRNA sense strand
ggucggcacccaacuacug

SEQ ID NO: 392719 - RNA, 19 nt, Homo sapiens
  misc_RNA (1)...(19): siRNA sense strand
ucaaggagagcgaagucaa

SEQ ID NO: 392720 - RNA, 19 nt, Homo sapiens
  misc_RNA (1)...(19): siRNA sense strand
agaagcccguggccgacua

SEQ ID NO: 392721 - RNA, 19 nt, Homo sapiens
  misc_RNA (1)...(19): siRNA sense strand
aagguucgcuauccugauc

SEQ ID NO: 392722 - RNA, 19 nt, Homo sapiens
  misc_RNA (1)...(19): siRNA sense strand
gaggagccggcuaccuauu

SEQ ID NO: 392723 - RNA, 19 nt, Homo sapiens
  misc_RNA (1)...(19): siRNA sense strand
ccagaucacgcaggucuau

SEQ ID NO: 392724 - RNA, 19 nt, Homo sapiens
  misc_RNA (1)...(19): siRNA sense strand
ggccgacuacuuccuguga

SEQ ID NO: 392725 - RNA, 19 nt, Homo sapiens
  misc_RNA (1)...(19): siRNA sense strand
ccucaaagagcuguucaga

SEQ ID NO: 392726 - RNA, 19 nt, Homo sapiens
  misc_RNA (1)...(19): siRNA sense strand
uggaucagauucggacaau

SEQ ID NO: 392727 - RNA, 19 nt, Homo sapiens
  misc_RNA (1)...(19): siRNA sense strand
augagugccugcgcaagua

SEQ ID NO: 392728 - RNA, 19 nt, Homo sapiens
  misc_RNA (1)...(19): siRNA sense strand
ccaugagagucgccagauc

SEQ ID NO: 392729 - RNA, 19 nt, Homo sapiens
  misc_RNA (1)...(19): siRNA sense strand
caaggagagcgaagucaag

SEQ ID NO: 392730 - RNA, 19 nt, Homo sapiens
  misc_RNA (1)...(19): siRNA sense strand
gcugcuggcacuuaagguu

SEQ ID NO: 392731 - RNA, 19 nt, Homo sapiens
  misc_RNA (1)...(19): siRNA sense strand
uguggaccguggcuucuau

SEQ ID NO: 392732 - RNA, 19 nt, Homo sapiens
  misc_RNA (1)...(19): siRNA sense strand
gagacggugcucacugugu

SEQ ID NO: 392733 - RNA, 19 nt, Homo sapiens
  misc_RNA (1)...(19): siRNA sense strand
gcgcuaaggccagagagau

SEQ ID NO: 392734 - RNA, 19 nt, Homo sapiens
  misc_RNA (1)...(19): siRNA sense strand
uggcuucuauagcgucgaa

SEQ ID NO: 392735 - RNA, 19 nt, Homo sapiens
  misc_RNA (1)...(19): siRNA sense strand
ggucuauggcuucuacgau

SEQ ID NO: 392736 - RNA, 19 nt, Homo sapiens
  misc_RNA (1)...(19): siRNA sense strand
aggagccggcuaccuauuu

SEQ ID NO: 392737 - RNA, 19 nt, Homo sapiens
  misc_RNA (1)...(19): siRNA sense strand
caaucgaccgaaagcaaga

SEQ ID NO: 392738 - RNA, 19 nt, Homo sapiens
  misc_RNA (1)...(19): siRNA sense strand
ugagaccaacuaccucuuc

SEQ ID NO: 392739 - RNA, 19 nt, Homo sapiens
  misc_RNA (1)...(19): siRNA sense strand
gugacgugguggcccaguu

SEQ ID NO: 392740 - RNA, 19 nt, Homo sapiens
  misc_RNA (1)...(19): siRNA sense strand
cgaggagccggcuaccuau

SEQ ID NO: 392741 - RNA, 19 nt, Homo sapiens
  misc_RNA (1)...(19): siRNA sense strand
caaauuagcuguugagaua

SEQ ID NO: 392742 - RNA, 19 nt, Homo sapiens
  misc_RNA (1)...(19): siRNA sense strand
ggaaagacuuacguuauua

SEQ ID NO: 392743 - RNA, 19 nt, Homo sapiens
  misc_RNA (1)...(19): siRNA sense strand
ccagaaggauuucauuaua

SEQ ID NO: 392744 - RNA, 19 nt, Homo sapiens
  misc_RNA (1)...(19): siRNA sense strand
caaauggaauucugugaua

SEQ ID NO: 392745 - RNA, 19 nt, Homo sapiens
  misc_RNA (1)...(19): siRNA sense strand
gaagaaaccucagugaaau

SEQ ID NO: 392746 - RNA, 19 nt, Homo sapiens
  misc_RNA (1)...(19): siRNA sense strand
gcagauacaucagagauaa

SEQ ID NO: 392747 - RNA, 19 nt, Homo sapiens
  misc_RNA (1)...(19): siRNA sense strand
gaaaggaaguggaccucua

SEQ ID NO: 392748 - RNA, 19 nt, Homo sapiens
  misc_RNA (1)...(19): siRNA sense strand
gauaggagguuuacauuuc

SEQ ID NO: 392749 - RNA, 19 nt, Homo sapiens
  misc_RNA (1)...(19): siRNA sense strand
gaucuuaagccaaguaaua

SEQ ID NO: 392750 - RNA, 19 nt, Homo sapiens
  misc_RNA (1)...(19): siRNA sense strand
uggaggaacuuaauacaua

SEQ ID NO: 392751 - RNA, 19 nt, Homo sapiens
  misc_RNA (1)...(19): siRNA sense strand
ggacagaaagaauauagua

SEQ ID NO: 392752 - RNA, 19 nt, Homo sapiens
  misc_RNA (1)...(19): siRNA sense strand
ugaauggucucagaaauaa

SEQ ID NO: 392753 - RNA, 19 nt, Homo sapiens
  misc_RNA (1)...(19): siRNA sense strand
gcaagacuauggaaaggaa

SEQ ID NO: 392754 - RNA, 19 nt, Homo sapiens
  misc_RNA (1)...(19): siRNA sense strand
ggaaagcgaacaaggagua

SEQ ID NO: 392755 - RNA, 19 nt, Homo sapiens
  misc_RNA (1)...(19): siRNA sense strand
gaucaaagaaggaagcaaa

SEQ ID NO: 392756 - RNA, 19 nt, Homo sapiens
  misc_RNA (1)...(19): siRNA sense strand
ggcaguuaguccuuuauua

SEQ ID NO: 392757 - RNA, 19 nt, Homo sapiens
  misc_RNA (1)...(19): siRNA sense strand
caaaagggguggauuauau

SEQ ID NO: 392758 - RNA, 19 nt, Homo sapiens
  misc_RNA (1)...(19): siRNA sense strand
gcaguuaguccuuuauuau

SEQ ID NO: 392759 - RNA, 19 nt, Homo sapiens
  misc_RNA (1)...(19): siRNA sense strand
gggauggauuugauuauga

SEQ ID NO: 392760 - RNA, 19 nt, Homo sapiens
  misc_RNA (1)...(19): siRNA sense strand
gcgagaaacuagacaaagu

SEQ ID NO: 392761 - RNA, 19 nt, Homo sapiens
  misc_RNA (1)...(19): siRNA sense strand
caacaacgaauucuucaga

SEQ ID NO: 392762 - RNA, 19 nt, Homo sapiens
  misc_RNA (1)...(19): siRNA sense strand
ggaauuacauaggccuuau

SEQ ID NO: 392763 - RNA, 19 nt, Homo sapiens
  misc_RNA (1)...(19): siRNA sense strand
cuacagaaauuacucucaa

SEQ ID NO: 392764 - RNA, 19 nt, Homo sapiens
  misc_RNA (1)...(19): siRNA sense strand
agaagaaaccucagugaaa

SEQ ID NO: 392765 - RNA, 19 nt, Homo sapiens
  misc_RNA (1)...(19): siRNA sense strand
uacauaggccuuaucaaua

SEQ ID NO: 392766 - RNA, 19 nt, Homo sapiens
  misc_RNA (1)...(19): siRNA sense strand
ccgcuaaacuugcauaucu

SEQ ID NO: 392767 - RNA, 19 nt, Homo sapiens
  misc_RNA (1)...(19): siRNA sense strand
caaaguauacuguggacaa

SEQ ID NO: 392768 - RNA, 19 nt, Homo sapiens
  misc_RNA (1)...(19): siRNA sense strand
guaagggaacuuugcgaua

SEQ ID NO: 392769 - RNA, 19 nt, Homo sapiens
  misc_RNA (1)...(19): siRNA sense strand
gaaggcggagcgugaagua

SEQ ID NO: 392770 - RNA, 19 nt, Homo sapiens
  misc_RNA (1)...(19): siRNA sense strand
ggacuuguaacaucucuga

SEQ ID NO: 392771 - RNA, 19 nt, Homo sapiens
  misc_RNA (1)...(19): siRNA sense strand
acauaggccuuaucaauag

SEQ ID NO: 392772 - RNA, 19 nt, Homo sapiens
  misc_RNA (1)...(19): siRNA sense strand
ggauggauuugauuaugau

SEQ ID NO: 392773 - RNA, 19 nt, Homo sapiens
  misc_RNA (1)...(19): siRNA sense strand
uuacauaggccuuaucaau

SEQ ID NO: 392774 - RNA, 19 nt, Homo sapiens
  misc_RNA (1)...(19): siRNA sense strand
cacacucgcuucugaauca

SEQ ID NO: 392775 - RNA, 19 nt, Homo sapiens
  misc_RNA (1)...(19): siRNA sense strand
ccagcacacucgcuucuga

SEQ ID NO: 392776 - RNA, 19 nt, Homo sapiens
  misc_RNA (1)...(19): siRNA sense strand
aaacuugcauaucuucaga

SEQ ID NO: 392777 - RNA, 19 nt, Homo sapiens
  misc_RNA (1)...(19): siRNA sense strand
ggccagaaggauuucauua

SEQ ID NO: 392778 - RNA, 19 nt, Homo sapiens
  misc_RNA (1)...(19): siRNA sense strand
gauuugaccuuccugacau

SEQ ID NO: 392779 - RNA, 19 nt, Homo sapiens
  misc_RNA (1)...(19): siRNA sense strand
gaagaaaagcccagagaaa

SEQ ID NO: 392780 - RNA, 19 nt, Homo sapiens
  misc_RNA (1)...(19): siRNA sense strand
ggaggaacuuaauacauac

SEQ ID NO: 392781 - RNA, 19 nt, Homo sapiens
  misc_RNA (1)...(19): siRNA sense strand
gcuguugagauacuuaaua

SEQ ID NO: 392782 - RNA, 19 nt, Homo sapiens
  misc_RNA (1)...(19): siRNA sense strand
cgaccuaacacaucugaaa

SEQ ID NO: 392783 - RNA, 19 nt, Homo sapiens
  misc_RNA (1)...(19): siRNA sense strand
uaagggaacuuugcgauac

SEQ ID NO: 392784 - RNA, 19 nt, Homo sapiens
  misc_RNA (1)...(19): siRNA sense strand
uaucaagaacugccuaauu

SEQ ID NO: 392785 - RNA, 19 nt, Homo sapiens
  misc_RNA (1)...(19): siRNA sense strand
aaaugccgcagccaaauua

SEQ ID NO: 392786 - RNA, 19 nt, Homo sapiens
  misc_RNA (1)...(19): siRNA sense strand
aaagaaaccugaggaucga

SEQ ID NO: 392787 - RNA, 19 nt, Homo sapiens
  misc_RNA (1)...(19): siRNA sense strand
uaacaaaagggguggauua

SEQ ID NO: 392788 - RNA, 19 nt, Homo sapiens
  misc_RNA (1)...(19): siRNA sense strand
ugaccuuccugacaugaaa

SEQ ID NO: 392789 - RNA, 19 nt, Homo sapiens
  misc_RNA (1)...(19): siRNA sense strand
guucuucguugcuuaugaa

SEQ ID NO: 392790 - RNA, 19 nt, Homo sapiens
  misc_RNA (1)...(19): siRNA sense strand
ccacaugauaggagguuua

SEQ ID NO: 392791 - RNA, 19 nt, Homo sapiens
  misc_RNA (1)...(19): siRNA sense strand
gcuuaugaauggucucaga

SEQ ID NO: 392792 - RNA, 19 nt, Homo sapiens
  misc_RNA (1)...(19): siRNA sense strand
gcaugggccagaaggauuu

SEQ ID NO: 392793 - RNA, 19 nt, Homo sapiens
  misc_RNA (1)...(19): siRNA sense strand
acaauuggccgcuaaacuu

SEQ ID NO: 392794 - RNA, 19 nt, Homo sapiens
  misc_RNA (1)...(19): siRNA sense strand
aucaagaacugccuaauuc

SEQ ID NO: 392795 - RNA, 19 nt, Homo sapiens
  misc_RNA (1)...(19): siRNA sense strand
gcuaauucuugcugaacuu

SEQ ID NO: 392796 - RNA, 19 nt, Homo sapiens
  misc_RNA (1)...(19): siRNA sense strand
gauggaaagcgaacaagga

SEQ ID NO: 392797 - RNA, 19 nt, Homo sapiens
  misc_RNA (1)...(19): siRNA sense strand
gaagaggcgagaaacuaga

SEQ ID NO: 392798 - RNA, 19 nt, Homo sapiens
  misc_RNA (1)...(19): siRNA sense strand
gaccagugaugauucucuu

SEQ ID NO: 392799 - RNA, 19 nt, Homo sapiens
  misc_RNA (1)...(19): siRNA sense strand
caagagguuuggcauggau

SEQ ID NO: 392800 - RNA, 19 nt, Homo sapiens
  misc_RNA (1)...(19): siRNA sense strand
ggugacuucucagcagaua

SEQ ID NO: 392801 - RNA, 19 nt, Homo sapiens
  misc_RNA (1)...(19): siRNA sense strand
cuacuaaacaggaagcaaa

SEQ ID NO: 392802 - RNA, 19 nt, Homo sapiens
  misc_RNA (1)...(19): siRNA sense strand
ugacaacaacgaauucuuc

SEQ ID NO: 392803 - RNA, 19 nt, Homo sapiens
  misc_RNA (1)...(19): siRNA sense strand
ugagagcagugauuaugau

SEQ ID NO: 392804 - RNA, 19 nt, Homo sapiens
  misc_RNA (1)...(19): siRNA sense strand
caaaacaauuggccgcuaa

SEQ ID NO: 392805 - RNA, 19 nt, Homo sapiens
  misc_RNA (1)...(19): siRNA sense strand
guacagguucuacuaaaca

SEQ ID NO: 392806 - RNA, 19 nt, Homo sapiens
  misc_RNA (1)...(19): siRNA sense strand
gaagaaaagacuaacugua

SEQ ID NO: 392807 - RNA, 19 nt, Homo sapiens
  misc_RNA (1)...(19): siRNA sense strand
gauuauccauggggaauua

SEQ ID NO: 392808 - RNA, 19 nt, Homo sapiens
  misc_RNA (1)...(19): siRNA sense strand
aaguggaccucuacgcuuu

SEQ ID NO: 392809 - RNA, 19 nt, Homo sapiens
  misc_RNA (1)...(19): siRNA sense strand
gaaagcgaacaaggaguaa

SEQ ID NO: 392810 - RNA, 19 nt, Homo sapiens
  misc_RNA (1)...(19): siRNA sense strand
aaacaguucuucguugcuu

SEQ ID NO: 392811 - RNA, 19 nt, Homo sapiens
  misc_RNA (1)...(19): siRNA sense strand
gccagaaggauuucauuau

SEQ ID NO: 392812 - RNA, 19 nt, Homo sapiens
  misc_RNA (1)...(19): siRNA sense strand
ggaucgaccuaacacaucu

SEQ ID NO: 392813 - RNA, 19 nt, Homo sapiens
  misc_RNA (1)...(19): siRNA sense strand
cuuaauacauaccgucaga

SEQ ID NO: 392814 - RNA, 19 nt, Homo sapiens
  misc_RNA (1)...(19): siRNA sense strand
cagaagaaaccucagugaa

SEQ ID NO: 392815 - RNA, 19 nt, Homo sapiens
  misc_RNA (1)...(19): siRNA sense strand
aaaugggacagaaagaaua

SEQ ID NO: 392816 - RNA, 19 nt, Homo sapiens
  misc_RNA (1)...(19): siRNA sense strand
uaugaauggucucagaaau

SEQ ID NO: 392817 - RNA, 19 nt, Homo sapiens
  misc_RNA (1)...(19): siRNA sense strand
ggaacuuugcgauacauga

SEQ ID NO: 392818 - RNA, 19 nt, Homo sapiens
  misc_RNA (1)...(19): siRNA sense strand
guucaaggucaaagacuaa

SEQ ID NO: 392819 - RNA, 19 nt, Homo sapiens
  misc_RNA (1)...(19): siRNA sense strand
ggucucagaaauaaucaaa

SEQ ID NO: 392820 - RNA, 19 nt, Homo sapiens
  misc_RNA (1)...(19): siRNA sense strand
gaaggugaagguagaucaa

SEQ ID NO: 392821 - RNA, 19 nt, Homo sapiens
  misc_RNA (1)...(19): siRNA sense strand
aagaagaggcgagaaacua

SEQ ID NO: 392822 - RNA, 19 nt, Homo sapiens
  misc_RNA (1)...(19): siRNA sense strand
gggaauuacauaggccuua

SEQ ID NO: 392823 - RNA, 19 nt, Homo sapiens
  misc_RNA (1)...(19): siRNA sense strand
cagaaauuacucucaaaga

SEQ ID NO: 392824 - RNA, 19 nt, Homo sapiens
  misc_RNA (1)...(19): siRNA sense strand
gauuggagacuuuggacuu

SEQ ID NO: 392825 - RNA, 19 nt, Homo sapiens
  misc_RNA (1)...(19): siRNA sense strand
gagguuuacauuucaaguu

SEQ ID NO: 392826 - RNA, 19 nt, Homo sapiens
  misc_RNA (1)...(19): siRNA sense strand
cagcagguuucuucaugga

SEQ ID NO: 392827 - RNA, 19 nt, Homo sapiens
  misc_RNA (1)...(19): siRNA sense strand
ucagaagcagggaguagua

SEQ ID NO: 392828 - RNA, 19 nt, Homo sapiens
  misc_RNA (1)...(19): siRNA sense strand
ucucagaaauaaucaaagg

SEQ ID NO: 392829 - RNA, 19 nt, Homo sapiens
  misc_RNA (1)...(19): siRNA sense strand
ggcaaaacuugaucaugua

SEQ ID NO: 392830 - RNA, 19 nt, Homo sapiens
  misc_RNA (1)...(19): siRNA sense strand
caauuggccgcuaaacuug

SEQ ID NO: 392831 - RNA, 19 nt, Homo sapiens
  misc_RNA (1)...(19): siRNA sense strand
ggaccuugacuguguggaa

SEQ ID NO: 392832 - RNA, 19 nt, Homo sapiens
  misc_RNA (1)...(19): siRNA sense strand
guugggauggauuugauua

SEQ ID NO: 392833 - RNA, 19 nt, Homo sapiens
  misc_RNA (1)...(19): siRNA sense strand
uuaauuggcucagguggau

SEQ ID NO: 392834 - RNA, 19 nt, Homo sapiens
  misc_RNA (1)...(19): siRNA sense strand
ugguacagguucuacuaaa

SEQ ID NO: 392835 - RNA, 19 nt, Homo sapiens
  misc_RNA (1)...(19): siRNA sense strand
gaacuuugcgauacaugag

SEQ ID NO: 392836 - RNA, 19 nt, Homo sapiens
  misc_RNA (1)...(19): siRNA sense strand
gagcagugauuaugauccu

SEQ ID NO: 392837 - RNA, 19 nt, Homo sapiens
  misc_RNA (1)...(19): siRNA sense strand
augaauggucucagaaaua

SEQ ID NO: 392838 - RNA, 19 nt, Homo sapiens
  misc_RNA (1)...(19): siRNA sense strand
caugagcccagaacagauu

SEQ ID NO: 392839 - RNA, 19 nt, Homo sapiens
  misc_RNA (1)...(19): siRNA sense strand
uggagacuuuggacuugua

SEQ ID NO: 392840 - RNA, 19 nt, Homo sapiens
  misc_RNA (1)...(19): siRNA sense strand
gaccuuggaacaauggauu

SEQ ID NO: 392841 - RNA, 19 nt, Homo sapiens
  misc_RNA (1)...(19): siRNA sense strand
gaaagacccuaagaaguua

SEQ ID NO: 392842 - RNA, 19 nt, Homo sapiens
  misc_RNA (1)...(19): siRNA sense strand
gcuagaaccugacaaguuu

SEQ ID NO: 392843 - RNA, 19 nt, Homo sapiens
  misc_RNA (1)...(19): siRNA sense strand
ggaaggagcuaagauugaa

SEQ ID NO: 392844 - RNA, 19 nt, Homo sapiens
  misc_RNA (1)...(19): siRNA sense strand
ucauaaagcugaucacuuc

SEQ ID NO: 392845 - RNA, 19 nt, Homo sapiens
  misc_RNA (1)...(19): siRNA sense strand
ggaagcaaguugaaaguca

SEQ ID NO: 392846 - RNA, 19 nt, Homo sapiens
  misc_RNA (1)...(19): siRNA sense strand
ggaugucucugauagaaga

SEQ ID NO: 392847 - RNA, 19 nt, Homo sapiens
  misc_RNA (1)...(19): siRNA sense strand
gaacaaugacccuaugguu

SEQ ID NO: 392848 - RNA, 19 nt, Homo sapiens
  misc_RNA (1)...(19): siRNA sense strand
gcacgcagcagcacuacua

SEQ ID NO: 392849 - RNA, 19 nt, Homo sapiens
  misc_RNA (1)...(19): siRNA sense strand
ccaaaggccuggaacacaa

SEQ ID NO: 392850 - RNA, 19 nt, Homo sapiens
  misc_RNA (1)...(19): siRNA sense strand
ugaagaggauacaugagua

SEQ ID NO: 392851 - RNA, 19 nt, Homo sapiens
  misc_RNA (1)...(19): siRNA sense strand
agaaagacccuaagaaguu

SEQ ID NO: 392852 - RNA, 19 nt, Homo sapiens
  misc_RNA (1)...(19): siRNA sense strand
ugaagaagaugcuggacuu

SEQ ID NO: 392853 - RNA, 19 nt, Homo sapiens
  misc_RNA (1)...(19): siRNA sense strand
gaacacaaugguacucaaa

SEQ ID NO: 392854 - RNA, 19 nt, Homo sapiens
  misc_RNA (1)...(19): siRNA sense strand
ugagucagcuguacaugaa

SEQ ID NO: 392855 - RNA, 19 nt, Homo sapiens
  misc_RNA (1)...(19): siRNA sense strand
ggacuucagugagcuagaa

SEQ ID NO: 392856 - RNA, 19 nt, Homo sapiens
  misc_RNA (1)...(19): siRNA sense strand
gcauuuagauagaauugug

SEQ ID NO: 392857 - RNA, 19 nt, Homo sapiens
  misc_RNA (1)...(19): siRNA sense strand
uuacaugggccgaacauua

SEQ ID NO: 392858 - RNA, 19 nt, Homo sapiens
  misc_RNA (1)...(19): siRNA sense strand
cagauguggugaacaauga

SEQ ID NO: 392859 - RNA, 19 nt, Homo sapiens
  misc_RNA (1)...(19): siRNA sense strand
ggacaggcaauaugaaguu

SEQ ID NO: 392860 - RNA, 19 nt, Homo sapiens
  misc_RNA (1)...(19): siRNA sense strand
caacccauccuccauguuu

SEQ ID NO: 392861 - RNA, 19 nt, Homo sapiens
  misc_RNA (1)...(19): siRNA sense strand
caaugaaucuaacaaaguc

SEQ ID NO: 392862 - RNA, 19 nt, Homo sapiens
  misc_RNA (1)...(19): siRNA sense strand
uagaugauguggcugcuuu

SEQ ID NO: 392863 - RNA, 19 nt, Homo sapiens
  misc_RNA (1)...(19): siRNA sense strand
uuucaaagccuccaaguuu

SEQ ID NO: 392864 - RNA, 19 nt, Homo sapiens
  misc_RNA (1)...(19): siRNA sense strand
ucagaagcauuuagauaga

SEQ ID NO: 392865 - RNA, 19 nt, Homo sapiens
  misc_RNA (1)...(19): siRNA sense strand
uaugucaagugucaagaua

SEQ ID NO: 392866 - RNA, 19 nt, Homo sapiens
  misc_RNA (1)...(19): siRNA sense strand
uggcagagcugaagaagag

SEQ ID NO: 392867 - RNA, 19 nt, Homo sapiens
  misc_RNA (1)...(19): siRNA sense strand
gagaagacuaugugaaaga

SEQ ID NO: 392868 - RNA, 19 nt, Homo sapiens
  misc_RNA (1)...(19): siRNA sense strand
cuaacaaagucaauggaaa

SEQ ID NO: 392869 - RNA, 19 nt, Homo sapiens
  misc_RNA (1)...(19): siRNA sense strand
ggauauagaagaguuagaa

SEQ ID NO: 392870 - RNA, 19 nt, Homo sapiens
  misc_RNA (1)...(19): siRNA sense strand
cguggaaccuucagaucua

SEQ ID NO: 392871 - RNA, 19 nt, Homo sapiens
  misc_RNA (1)...(19): siRNA sense strand
ugucaagugucaagauaaa

SEQ ID NO: 392872 - RNA, 19 nt, Homo sapiens
  misc_RNA (1)...(19): siRNA sense strand
gcuggucauugaucaaauu

SEQ ID NO: 392873 - RNA, 19 nt, Homo sapiens
  misc_RNA (1)...(19): siRNA sense strand
agaaggaugucucugauag

SEQ ID NO: 392874 - RNA, 19 nt, Homo sapiens
  misc_RNA (1)...(19): siRNA sense strand
gaagcaaguugaaagucau

SEQ ID NO: 392875 - RNA, 19 nt, Homo sapiens
  misc_RNA (1)...(19): siRNA sense strand
uaagaaagacccuaagaag

SEQ ID NO: 392876 - RNA, 19 nt, Homo sapiens
  misc_RNA (1)...(19): siRNA sense strand
agacuaaaguauucaagga

SEQ ID NO: 392877 - RNA, 19 nt, Homo sapiens
  misc_RNA (1)...(19): siRNA sense strand
gauuggauauagaagaguu

SEQ ID NO: 392878 - RNA, 19 nt, Homo sapiens
  misc_RNA (1)...(19): siRNA sense strand
ggaaauggcagaagaagcu

SEQ ID NO: 392879 - RNA, 19 nt, Homo sapiens
  misc_RNA (1)...(19): siRNA sense strand
guacaaccgcauuaagaaa

SEQ ID NO: 392880 - RNA, 19 nt, Homo sapiens
  misc_RNA (1)...(19): siRNA sense strand
uaagauugaagcaggaaua

SEQ ID NO: 392881 - RNA, 19 nt, Homo sapiens
  misc_RNA (1)...(19): siRNA sense strand
gcagaugauuggcucagau

SEQ ID NO: 392882 - RNA, 19 nt, Homo sapiens
  misc_RNA (1)...(19): siRNA sense strand
ccucagagacuuuaauguu

SEQ ID NO: 392883 - RNA, 19 nt, Homo sapiens
  misc_RNA (1)...(19): siRNA sense strand
ggaacacaaugguacucaa

SEQ ID NO: 392884 - RNA, 19 nt, Homo sapiens
  misc_RNA (1)...(19): siRNA sense strand
caagcagccugaccucuuc

SEQ ID NO: 392885 - RNA, 19 nt, Homo sapiens
  misc_RNA (1)...(19): siRNA sense strand
agaauaagcugaaguuuuc

SEQ ID NO: 392886 - RNA, 19 nt, Homo sapiens
  misc_RNA (1)...(19): siRNA sense strand
ggagaagacuaugugaaag

SEQ ID NO: 392887 - RNA, 19 nt, Homo sapiens
  misc_RNA (1)...(19): siRNA sense strand
cgugaagacuaaaguauuc

SEQ ID NO: 392888 - RNA, 19 nt, Homo sapiens
  misc_RNA (1)...(19): siRNA sense strand
gauaucauccgccguuuca

SEQ ID NO: 392889 - RNA, 19 nt, Homo sapiens
  misc_RNA (1)...(19): siRNA sense strand
gauugaagcaggaauacuu

SEQ ID NO: 392890 - RNA, 19 nt, Homo sapiens
  misc_RNA (1)...(19): siRNA sense strand
gaacguggaaccuucagau

SEQ ID NO: 392891 - RNA, 19 nt, Homo sapiens
  misc_RNA (1)...(19): siRNA sense strand
gaggauacaugaguacaag

SEQ ID NO: 392892 - RNA, 19 nt, Homo sapiens
  misc_RNA (1)...(19): siRNA sense strand
uuaccucucucuggaauuu

SEQ ID NO: 392893 - RNA, 19 nt, Homo sapiens
  misc_RNA (1)...(19): siRNA sense strand
gggaaggagcuaagauuga

SEQ ID NO: 392894 - RNA, 19 nt, Homo sapiens
  misc_RNA (1)...(19): siRNA sense strand
agauuucucuauccaauga

SEQ ID NO: 392895 - RNA, 19 nt, Homo sapiens
  misc_RNA (1)...(19): siRNA sense strand
caugacagguuuaaagucu

SEQ ID NO: 392896 - RNA, 19 nt, Homo sapiens
  misc_RNA (1)...(19): siRNA sense strand
uggcagauguggugaacaa

SEQ ID NO: 392897 - RNA, 19 nt, Homo sapiens
  misc_RNA (1)...(19): siRNA sense strand
caaggacaguuaucauugg

SEQ ID NO: 392898 - RNA, 19 nt, Homo sapiens
  misc_RNA (1)...(19): siRNA sense strand
ccaaggacaguuaucauug

SEQ ID NO: 392899 - RNA, 19 nt, Homo sapiens
  misc_RNA (1)...(19): siRNA sense strand
gagacggaguacaaaguga

SEQ ID NO: 392900 - RNA, 19 nt, Homo sapiens
  misc_RNA (1)...(19): siRNA sense strand
gcauuaagaaagacccuaa

SEQ ID NO: 392901 - RNA, 19 nt, Homo sapiens
  misc_RNA (1)...(19): siRNA sense strand
ccagugaccgaacaauuaa

SEQ ID NO: 392902 - RNA, 19 nt, Homo sapiens
  misc_RNA (1)...(19): siRNA sense strand
gaacauuacagaacaccau

SEQ ID NO: 392903 - RNA, 19 nt, Homo sapiens
  misc_RNA (1)...(19): siRNA sense strand
cagaagcauuuagauagaa

SEQ ID NO: 392904 - RNA, 19 nt, Homo sapiens
  misc_RNA (1)...(19): siRNA sense strand
cagcuuggauuggauauag

SEQ ID NO: 392905 - RNA, 19 nt, Homo sapiens
  misc_RNA (1)...(19): siRNA sense strand
gcugcucccucgacauuug

SEQ ID NO: 392906 - RNA, 19 nt, Homo sapiens
  misc_RNA (1)...(19): siRNA sense strand
uccagugaccgaacaauua

SEQ ID NO: 392907 - RNA, 19 nt, Homo sapiens
  misc_RNA (1)...(19): siRNA sense strand
cuacgaagccuaugucaag

SEQ ID NO: 392908 - RNA, 19 nt, Homo sapiens
  misc_RNA (1)...(19): siRNA sense strand
ggugaacaaugacccuaug

SEQ ID NO: 392909 - RNA, 19 nt, Homo sapiens
  misc_RNA (1)...(19): siRNA sense strand
ggccgaacauuacagaaca

SEQ ID NO: 392910 - RNA, 19 nt, Homo sapiens
  misc_RNA (1)...(19): siRNA sense strand
gaguaucucuugcugaaaa

SEQ ID NO: 392911 - RNA, 19 nt, Homo sapiens
  misc_RNA (1)...(19): siRNA sense strand
ugaaagucaucuucuugga

SEQ ID NO: 392912 - RNA, 19 nt, Homo sapiens
  misc_RNA (1)...(19): siRNA sense strand
gagaauaagcugaaguuuu

SEQ ID NO: 392913 - RNA, 19 nt, Homo sapiens
  misc_RNA (1)...(19): siRNA sense strand
gcagguagaagaagcagau

SEQ ID NO: 392914 - RNA, 19 nt, Homo sapiens
  misc_RNA (1)...(19): siRNA sense strand
uuacagaacaccaugauca

SEQ ID NO: 392915 - RNA, 19 nt, Homo sapiens
  misc_RNA (1)...(19): siRNA sense strand
gcagauguggugaacaaug

SEQ ID NO: 392916 - RNA, 19 nt, Homo sapiens
  misc_RNA (1)...(19): siRNA sense strand
uggagaagacuaugugaaa

SEQ ID NO: 392917 - RNA, 19 nt, Homo sapiens
  misc_RNA (1)...(19): siRNA sense strand
gaaggaugucucugauaga

SEQ ID NO: 392918 - RNA, 19 nt, Homo sapiens
  misc_RNA (1)...(19): siRNA sense strand
ccaaugaaucuaacaaagu

SEQ ID NO: 392919 - RNA, 19 nt, Homo sapiens
  misc_RNA (1)...(19): siRNA sense strand
cgaagccuaugucaagugu

SEQ ID NO: 392920 - RNA, 19 nt, Homo sapiens
  misc_RNA (1)...(19): siRNA sense strand
gccaaggacaguuaucauu

SEQ ID NO: 392921 - RNA, 19 nt, Homo sapiens
  misc_RNA (1)...(19): siRNA sense strand
aaggaugucucugauagaa

SEQ ID NO: 392922 - RNA, 19 nt, Homo sapiens
  misc_RNA (1)...(19): siRNA sense strand
ccugugcacuucuauggaa

SEQ ID NO: 392923 - RNA, 19 nt, Homo sapiens
  misc_RNA (1)...(19): siRNA sense strand
gagauaaaucagaagcauu

SEQ ID NO: 392924 - RNA, 19 nt, Homo sapiens
  misc_RNA (1)...(19): siRNA sense strand
uagaagaagcagaugauug

SEQ ID NO: 392925 - RNA, 19 nt, Homo sapiens
  misc_RNA (1)...(19): siRNA sense strand
cuaaagauuucucuaucca

SEQ ID NO: 392926 - RNA, 19 nt, Homo sapiens
  misc_RNA (1)...(19): siRNA sense strand
gaacguggcagagcugaag

SEQ ID NO: 392927 - RNA, 19 nt, Homo sapiens
  misc_RNA (1)...(19): siRNA sense strand
cagacaucgugaagacuaa

SEQ ID NO: 392928 - RNA, 19 nt, Homo sapiens
  misc_RNA (1)...(19): siRNA sense strand
cucagagacuuuaauguug

SEQ ID NO: 392929 - RNA, 19 nt, Homo sapiens
  misc_RNA (1)...(19): siRNA sense strand
gaugauuggcucagauaug

SEQ ID NO: 392930 - RNA, 19 nt, Homo sapiens
  misc_RNA (1)...(19): siRNA sense strand
cagaugauuggcucagaua

SEQ ID NO: 392931 - RNA, 19 nt, Homo sapiens
  misc_RNA (1)...(19): siRNA sense strand
gauaucaucaacaugcuau

SEQ ID NO: 392932 - RNA, 19 nt, Homo sapiens
  misc_RNA (1)...(19): siRNA sense strand
uuggagaacuacagaguau

SEQ ID NO: 392933 - RNA, 19 nt, Homo sapiens
  misc_RNA (1)...(19): siRNA sense strand
ggagacggaguacaaagug

SEQ ID NO: 392934 - RNA, 19 nt, Homo sapiens
  misc_RNA (1)...(19): siRNA sense strand
ucagacaucgugaagacua

SEQ ID NO: 392935 - RNA, 19 nt, Homo sapiens
  misc_RNA (1)...(19): siRNA sense strand
gaagggaaggagcuaagau

SEQ ID NO: 392936 - RNA, 19 nt, Homo sapiens
  misc_RNA (1)...(19): siRNA sense strand
gggcaccaaaugacuuuaa

SEQ ID NO: 392937 - RNA, 19 nt, Homo sapiens
  misc_RNA (1)...(19): siRNA sense strand
ggagaacuacagaguaucu

SEQ ID NO: 392938 - RNA, 19 nt, Homo sapiens
  misc_RNA (1)...(19): siRNA sense strand
gauaucacauggccaaaau

SEQ ID NO: 392939 - RNA, 19 nt, Homo sapiens
  misc_RNA (1)...(19): siRNA sense strand
ugaccgaacaauuaaagaa

SEQ ID NO: 392940 - RNA, 19 nt, Homo sapiens
  misc_RNA (1)...(19): siRNA sense strand
gaccgaacaauuaaagaau

SEQ ID NO: 392941 - RNA, 19 nt, Homo sapiens
  misc_RNA (1)...(19): siRNA sense strand
gaugauaaacuuacagaga

SEQ ID NO: 392942 - RNA, 19 nt, Homo sapiens
  misc_RNA (1)...(19): siRNA sense strand
ggaaagaaugaugaugaua

SEQ ID NO: 392943 - RNA, 19 nt, Homo sapiens
  misc_RNA (1)...(19): siRNA sense strand
gagcaucuacgccaaguuc

SEQ ID NO: 392944 - RNA, 19 nt, Homo sapiens
  misc_RNA (1)...(19): siRNA sense strand
agaaugaagugcuggagau

SEQ ID NO: 392945 - RNA, 19 nt, Homo sapiens
  misc_RNA (1)...(19): siRNA sense strand
ggacacuggccaauaagga

SEQ ID NO: 392946 - RNA, 19 nt, Homo sapiens
  misc_RNA (1)...(19): siRNA sense strand
gagaucgucauggcuauuu

SEQ ID NO: 392947 - RNA, 19 nt, Homo sapiens
  misc_RNA (1)...(19): siRNA sense strand
cgucauggcuauuuucaaa

SEQ ID NO: 392948 - RNA, 19 nt, Homo sapiens
  misc_RNA (1)...(19): siRNA sense strand
uggaaagaaugaugaugau

SEQ ID NO: 392949 - RNA, 19 nt, Homo sapiens
  misc_RNA (1)...(19): siRNA sense strand
ucuacgacguggacgguaa

SEQ ID NO: 392950 - RNA, 19 nt, Homo sapiens
  misc_RNA (1)...(19): siRNA sense strand
ggaccaucagcaagaauga

SEQ ID NO: 392951 - RNA, 19 nt, Homo sapiens
  misc_RNA (1)...(19): siRNA sense strand
cagagaaagaauucauuga

SEQ ID NO: 392952 - RNA, 19 nt, Homo sapiens
  misc_RNA (1)...(19): siRNA sense strand
gacacuggccaauaaggaa

SEQ ID NO: 392953 - RNA, 19 nt, Homo sapiens
  misc_RNA (1)...(19): siRNA sense strand
acagagaaagaauucauug

SEQ ID NO: 392954 - RNA, 19 nt, Homo sapiens
  misc_RNA (1)...(19): siRNA sense strand
guaacgggaccaucagcaa

SEQ ID NO: 392955 - RNA, 19 nt, Homo sapiens
  misc_RNA (1)...(19): siRNA sense strand
gacgguaacgggaccauca

SEQ ID NO: 392956 - RNA, 19 nt, Homo sapiens
  misc_RNA (1)...(19): siRNA sense strand
uuggaaagaaugaugauga

SEQ ID NO: 392957 - RNA, 19 nt, Homo sapiens
  misc_RNA (1)...(19): siRNA sense strand
gggcaagaccaaccagaag

SEQ ID NO: 392958 - RNA, 19 nt, Homo sapiens
  misc_RNA (1)...(19): siRNA sense strand
ggagaucgucauggcuauu

SEQ ID NO: 392959 - RNA, 19 nt, Homo sapiens
  misc_RNA (1)...(19): siRNA sense strand
gcaucuacgccaaguucuu

SEQ ID NO: 392960 - RNA, 19 nt, Homo sapiens
  misc_RNA (1)...(19): siRNA sense strand
aaggaaauucugcgacuga

SEQ ID NO: 392961 - RNA, 19 nt, Homo sapiens
  misc_RNA (1)...(19): siRNA sense strand
agagaaagaauucauugag

SEQ ID NO: 392962 - RNA, 19 nt, Homo sapiens
  misc_RNA (1)...(19): siRNA sense strand
gaugaaaacacgccggaaa

SEQ ID NO: 392963 - RNA, 19 nt, Homo sapiens
  misc_RNA (1)...(19): siRNA sense strand
cgucaucgcccugcacaug

SEQ ID NO: 392964 - RNA, 19 nt, Homo sapiens
  misc_RNA (1)...(19): siRNA sense strand
ggaaauucugcgacugauc

SEQ ID NO: 392965 - RNA, 19 nt, Homo sapiens
  misc_RNA (1)...(19): siRNA sense strand
caucuacgccaaguucuuc

SEQ ID NO: 392966 - RNA, 19 nt, Homo sapiens
  misc_RNA (1)...(19): siRNA sense strand
gaaaagcgagccgagaaga

SEQ ID NO: 392967 - RNA, 19 nt, Homo sapiens
  misc_RNA (1)...(19): siRNA sense strand
gaaugaagugcuggagauc

SEQ ID NO: 392968 - RNA, 19 nt, Homo sapiens
  misc_RNA (1)...(19): siRNA sense strand
gggaccaucagcaagaaug

SEQ ID NO: 392969 - RNA, 19 nt, Homo sapiens
  misc_RNA (1)...(19): siRNA sense strand
gcaagaccaaccagaagcu

SEQ ID NO: 392970 - RNA, 19 nt, Homo sapiens
  misc_RNA (1)...(19): siRNA sense strand
caucagcaagaaugaagug

SEQ ID NO: 392971 - RNA, 19 nt, Homo sapiens
  misc_RNA (1)...(19): siRNA sense strand
acacuggccaauaaggaaa

SEQ ID NO: 392972 - RNA, 19 nt, Homo sapiens
  misc_RNA (1)...(19): siRNA sense strand
cagagcaucuacgccaagu

SEQ ID NO: 392973 - RNA, 19 nt, Homo sapiens
  misc_RNA (1)...(19): siRNA sense strand
aaagcgagccgagaagauc

SEQ ID NO: 392974 - RNA, 19 nt, Homo sapiens
  misc_RNA (1)...(19): siRNA sense strand
gcaucacccagcagcaguu

SEQ ID NO: 392975 - RNA, 19 nt, Homo sapiens
  misc_RNA (1)...(19): siRNA sense strand
gcaaacauguucuauauag

SEQ ID NO: 392976 - RNA, 19 nt, Homo sapiens
  misc_RNA (1)...(19): siRNA sense strand
cagcaaacauguucuauau

SEQ ID NO: 392977 - RNA, 19 nt, Homo sapiens
  misc_RNA (1)...(19): siRNA sense strand
aauaugaccuguccuagua

SEQ ID NO: 392978 - RNA, 19 nt, Homo sapiens
  misc_RNA (1)...(19): siRNA sense strand
gaagccaggugccuuuaau

SEQ ID NO: 392979 - RNA, 19 nt, Homo sapiens
  misc_RNA (1)...(19): siRNA sense strand
uaccugggcucaaugguuu

SEQ ID NO: 392980 - RNA, 19 nt, Homo sapiens
  misc_RNA (1)...(19): siRNA sense strand
gcaggucauuaacaauuau

SEQ ID NO: 392981 - RNA, 19 nt, Homo sapiens
  misc_RNA (1)...(19): siRNA sense strand
ccaaauaugaccuguccua

SEQ ID NO: 392982 - RNA, 19 nt, Homo sapiens
  misc_RNA (1)...(19): siRNA sense strand
ccaaguccacagaauauuu

SEQ ID NO: 392983 - RNA, 19 nt, Homo sapiens
  misc_RNA (1)...(19): siRNA sense strand
gcagacaccagcaaacaug

SEQ ID NO: 392984 - RNA, 19 nt, Homo sapiens
  misc_RNA (1)...(19): siRNA sense strand
gaaacccagcacaucaaua

SEQ ID NO: 392985 - RNA, 19 nt, Homo sapiens
  misc_RNA (1)...(19): siRNA sense strand
gaccuguccuaguaacaaa

SEQ ID NO: 392986 - RNA, 19 nt, Homo sapiens
  misc_RNA (1)...(19): siRNA sense strand
aaacccagcacaucaauau

SEQ ID NO: 392987 - RNA, 19 nt, Homo sapiens
  misc_RNA (1)...(19): siRNA sense strand
cacagaauauuucaaacug

SEQ ID NO: 392988 - RNA, 19 nt, Homo sapiens
  misc_RNA (1)...(19): siRNA sense strand
ugcaggucauuaacaauua

SEQ ID NO: 392989 - RNA, 19 nt, Homo sapiens
  misc_RNA (1)...(19): siRNA sense strand
aauaugaccucccagcaau

SEQ ID NO: 392990 - RNA, 19 nt, Homo sapiens
  misc_RNA (1)...(19): siRNA sense strand
ccagcaaacauguucuaua

SEQ ID NO: 392991 - RNA, 19 nt, Homo sapiens
  misc_RNA (1)...(19): siRNA sense strand
acuguucacuucccaaauu

SEQ ID NO: 392992 - RNA, 19 nt, Homo sapiens
  misc_RNA (1)...(19): siRNA sense strand
guaguuaauguuuguggua

SEQ ID NO: 392993 - RNA, 19 nt, Homo sapiens
  misc_RNA (1)...(19): siRNA sense strand
ugugguaacccaaauauga

SEQ ID NO: 392994 - RNA, 19 nt, Homo sapiens
  misc_RNA (1)...(19): siRNA sense strand
ggaagccaggugccuuuaa

SEQ ID NO: 392995 - RNA, 19 nt, Homo sapiens
  misc_RNA (1)...(19): siRNA sense strand
caauaugaccucccagcaa

SEQ ID NO: 392996 - RNA, 19 nt, Homo sapiens
  misc_RNA (1)...(19): siRNA sense strand
caaauuugucugcuucuuc

SEQ ID NO: 392997 - RNA, 19 nt, Homo sapiens
  misc_RNA (1)...(19): siRNA sense strand
guccacagaauauuucaaa

SEQ ID NO: 392998 - RNA, 19 nt, Homo sapiens
  misc_RNA (1)...(19): siRNA sense strand
ccaaauuugucugcuucuu

SEQ ID NO: 392999 - RNA, 19 nt, Homo sapiens
  misc_RNA (1)...(19): siRNA sense strand
ucuauauaguugcauguga

SEQ ID NO: 393000 - RNA, 19 nt, Homo sapiens
  misc_RNA (1)...(19): siRNA sense strand
aaauuugucugcuucuucu

SEQ ID NO: 393001 - RNA, 19 nt, Homo sapiens
  misc_RNA (1)...(19): siRNA sense strand
caaguccacagaauauuuc

SEQ ID NO: 393002 - RNA, 19 nt, Homo sapiens
  misc_RNA (1)...(19): siRNA sense strand
ccaaaauacuuuccuucuu

SEQ ID NO: 393003 - RNA, 19 nt, Homo sapiens
  misc_RNA (1)...(19): siRNA sense strand
ccacagaauauuucaaacu

SEQ ID NO: 393004 - RNA, 19 nt, Homo sapiens
  misc_RNA (1)...(19): siRNA sense strand
caguuuaccugggcucaau

SEQ ID NO: 393005 - RNA, 19 nt, Homo sapiens
  misc_RNA (1)...(19): siRNA sense strand
gcgcagacaccagcaaaca

SEQ ID NO: 393006 - RNA, 19 nt, Homo sapiens
  misc_RNA (1)...(19): siRNA sense strand
aaacuguucacuucccaaa

SEQ ID NO: 393007 - RNA, 19 nt, Homo sapiens
  misc_RNA (1)...(19): siRNA sense strand
gggcucacuccaugucaaa

SEQ ID NO: 393008 - RNA, 19 nt, Homo sapiens
  misc_RNA (1)...(19): siRNA sense strand
ugccuuuaauccacuguaa

SEQ ID NO: 393009 - RNA, 19 nt, Homo sapiens
  misc_RNA (1)...(19): siRNA sense strand
caacuccaaguccacagaa

SEQ ID NO: 393010 - RNA, 19 nt, Homo sapiens
  misc_RNA (1)...(19): siRNA sense strand
ucccagcaaugcaccaaug

SEQ ID NO: 393011 - RNA, 19 nt, Homo sapiens
  misc_RNA (1)...(19): siRNA sense strand
ugacaacagagaucaacga

SEQ ID NO: 393012 - RNA, 19 nt, Homo sapiens
  misc_RNA (1)...(19): siRNA sense strand
acuccaaguccacagaaua

SEQ ID NO: 393013 - RNA, 19 nt, Homo sapiens
  misc_RNA (1)...(19): siRNA sense strand
guggaagccaggugccuuu

SEQ ID NO: 393014 - RNA, 19 nt, Homo sapiens
  misc_RNA (1)...(19): siRNA sense strand
cuguucacuucccaaauuu

SEQ ID NO: 393015 - RNA, 19 nt, Homo sapiens
  misc_RNA (1)...(19): siRNA sense strand
acccagcacaucaauauga

SEQ ID NO: 393016 - RNA, 19 nt, Homo sapiens
  misc_RNA (1)...(19): siRNA sense strand
gacaccagcaaacauguuc

SEQ ID NO: 393017 - RNA, 19 nt, Homo sapiens
  misc_RNA (1)...(19): siRNA sense strand
auacuuuccuucuuacaac

SEQ ID NO: 393018 - RNA, 19 nt, Homo sapiens
  misc_RNA (1)...(19): siRNA sense strand
aaauaugaccuguccuagu

SEQ ID NO: 393019 - RNA, 19 nt, Homo sapiens
  misc_RNA (1)...(19): siRNA sense strand
cauguucuauauaguugca

SEQ ID NO: 393020 - RNA, 19 nt, Homo sapiens
  misc_RNA (1)...(19): siRNA sense strand
caccagcaaacauguucua

SEQ ID NO: 393021 - RNA, 19 nt, Homo sapiens
  misc_RNA (1)...(19): siRNA sense strand
guucacuucccaaauuugu

SEQ ID NO: 393022 - RNA, 19 nt, Homo sapiens
  misc_RNA (1)...(19): siRNA sense strand
augcaggucauuaacaauu

SEQ ID NO: 393023 - RNA, 19 nt, Homo sapiens
  misc_RNA (1)...(19): siRNA sense strand
ugaccuguccuaguaacaa

SEQ ID NO: 393024 - RNA, 19 nt, Homo sapiens
  misc_RNA (1)...(19): siRNA sense strand
uaacagaacucucaacaau

SEQ ID NO: 393025 - RNA, 19 nt, Homo sapiens
  misc_RNA (1)...(19): siRNA sense strand
ggaaggagguucuauguag

SEQ ID NO: 393026 - RNA, 19 nt, Homo sapiens
  misc_RNA (1)...(19): siRNA sense strand
acagaacucucaacaauug

SEQ ID NO: 393027 - RNA, 19 nt, Homo sapiens
  misc_RNA (1)...(19): siRNA sense strand
aguauacgcugcccucaua

SEQ ID NO: 393028 - RNA, 19 nt, Homo sapiens
  misc_RNA (1)...(19): siRNA sense strand
gaaggagguucuauguagu

SEQ ID NO: 393029 - RNA, 19 nt, Homo sapiens
  misc_RNA (1)...(19): siRNA sense strand
gcaaugcgggcaauuaaca

SEQ ID NO: 393030 - RNA, 19 nt, Homo sapiens
  misc_RNA (1)...(19): siRNA sense strand
gcacagaauauuucaaacu

SEQ ID NO: 393031 - RNA, 19 nt, Homo sapiens
  misc_RNA (1)...(19): siRNA sense strand
cacagaauauuucaaacug

SEQ ID NO: 393032 - RNA, 19 nt, Homo sapiens
  misc_RNA (1)...(19): siRNA sense strand
gugcacagaauauuucaaa

SEQ ID NO: 393033 - RNA, 19 nt, Homo sapiens
  misc_RNA (1)...(19): siRNA sense strand
acuguucacuucccaaauu

SEQ ID NO: 393034 - RNA, 19 nt, Homo sapiens
  misc_RNA (1)...(19): siRNA sense strand
guaguuaauguuuguggua

SEQ ID NO: 393035 - RNA, 19 nt, Homo sapiens
  misc_RNA (1)...(19): siRNA sense strand
gcagacagaccaggaagga

SEQ ID NO: 393036 - RNA, 19 nt, Homo sapiens
  misc_RNA (1)...(19): siRNA sense strand
guacaacuuuugcuaaugu

SEQ ID NO: 393037 - RNA, 19 nt, Homo sapiens
  misc_RNA (1)...(19): siRNA sense strand
gagguucuauguaguugca

SEQ ID NO: 393038 - RNA, 19 nt, Homo sapiens
  misc_RNA (1)...(19): siRNA sense strand
ccaggugcacagaauauuu

SEQ ID NO: 393039 - RNA, 19 nt, Homo sapiens
  misc_RNA (1)...(19): siRNA sense strand
ccucauaacagaacucuca

SEQ ID NO: 393040 - RNA, 19 nt, Homo sapiens
  misc_RNA (1)...(19): siRNA sense strand
uacgagggcucagugguuu

SEQ ID NO: 393041 - RNA, 19 nt, Homo sapiens
  misc_RNA (1)...(19): siRNA sense strand
ccacugugaccucauaaau

SEQ ID NO: 393042 - RNA, 19 nt, Homo sapiens
  misc_RNA (1)...(19): siRNA sense strand
caaauuugucugcuucuuc

SEQ ID NO: 393043 - RNA, 19 nt, Homo sapiens
  misc_RNA (1)...(19): siRNA sense strand
guagauuccgggugccuuu

SEQ ID NO: 393044 - RNA, 19 nt, Homo sapiens
  misc_RNA (1)...(19): siRNA sense strand
ccaaauuugucugcuucuu

SEQ ID NO: 393045 - RNA, 19 nt, Homo sapiens
  misc_RNA (1)...(19): siRNA sense strand
aaauuugucugcuucuucu

SEQ ID NO: 393046 - RNA, 19 nt, Homo sapiens
  misc_RNA (1)...(19): siRNA sense strand
gaacucucaacaauuguca

SEQ ID NO: 393047 - RNA, 19 nt, Homo sapiens
  misc_RNA (1)...(19): siRNA sense strand
acgcugcccucauaacaga

SEQ ID NO: 393048 - RNA, 19 nt, Homo sapiens
  misc_RNA (1)...(19): siRNA sense strand
cauaacagaacucucaaca

SEQ ID NO: 393049 - RNA, 19 nt, Homo sapiens
  misc_RNA (1)...(19): siRNA sense strand
ucuauguaguugcauguga

SEQ ID NO: 393050 - RNA, 19 nt, Homo sapiens
  misc_RNA (1)...(19): siRNA sense strand
acuccacugugaccucaua

SEQ ID NO: 393051 - RNA, 19 nt, Homo sapiens
  misc_RNA (1)...(19): siRNA sense strand
aaauccaggugcacagaau

SEQ ID NO: 393052 - RNA, 19 nt, Homo sapiens
  misc_RNA (1)...(19): siRNA sense strand
caggaaggagguucuaugu

SEQ ID NO: 393053 - RNA, 19 nt, Homo sapiens
  misc_RNA (1)...(19): siRNA sense strand
aaacuguucacuucccaaa

SEQ ID NO: 393054 - RNA, 19 nt, Homo sapiens
  misc_RNA (1)...(19): siRNA sense strand
ccaggaaggagguucuaug

SEQ ID NO: 393055 - RNA, 19 nt, Homo sapiens
  misc_RNA (1)...(19): siRNA sense strand
ugccuuuacuccacuguga

SEQ ID NO: 393056 - RNA, 19 nt, Homo sapiens
  misc_RNA (1)...(19): siRNA sense strand
uuacgagggcucagugguu

SEQ ID NO: 393057 - RNA, 19 nt, Homo sapiens
  misc_RNA (1)...(19): siRNA sense strand
cuguucacuucccaaauuu

SEQ ID NO: 393058 - RNA, 19 nt, Homo sapiens
  misc_RNA (1)...(19): siRNA sense strand
uaaauccaggugcacagaa

SEQ ID NO: 393059 - RNA, 19 nt, Homo sapiens
  misc_RNA (1)...(19): siRNA sense strand
caggugcacagaauauuuc

SEQ ID NO: 393060 - RNA, 19 nt, Homo sapiens
  misc_RNA (1)...(19): siRNA sense strand
acugugaccucauaaaucc

SEQ ID NO: 393061 - RNA, 19 nt, Homo sapiens
  misc_RNA (1)...(19): siRNA sense strand
guucacuucccaaauuugu

SEQ ID NO: 393062 - RNA, 19 nt, Homo sapiens
  misc_RNA (1)...(19): siRNA sense strand
aauuaucgauggcguugca

SEQ ID NO: 393063 - RNA, 19 nt, Homo sapiens
  misc_RNA (1)...(19): siRNA sense strand
aacagaacucucaacaauu

SEQ ID NO: 393064 - RNA, 19 nt, Homo sapiens
  misc_RNA (1)...(19): siRNA sense strand
gcaacuuugugguagauua

SEQ ID NO: 393065 - RNA, 19 nt, Homo sapiens
  misc_RNA (1)...(19): siRNA sense strand
gaagcuuccucgcaacuuu

SEQ ID NO: 393066 - RNA, 19 nt, Homo sapiens
  misc_RNA (1)...(19): siRNA sense strand
guacguguaugaccuggaa

SEQ ID NO: 393067 - RNA, 19 nt, Homo sapiens
  misc_RNA (1)...(19): siRNA sense strand
uguaugaccuggaacugaa

SEQ ID NO: 393068 - RNA, 19 nt, Homo sapiens
  misc_RNA (1)...(19): siRNA sense strand
ugugguagauuacuaugag

SEQ ID NO: 393069 - RNA, 19 nt, Homo sapiens
  misc_RNA (1)...(19): siRNA sense strand
uguccugucucuccucaug

SEQ ID NO: 393070 - RNA, 19 nt, Homo sapiens
  misc_RNA (1)...(19): siRNA sense strand
cagcaccaaugggcucaga

SEQ ID NO: 393071 - RNA, 19 nt, Homo sapiens
  misc_RNA (1)...(19): siRNA sense strand
gguccaggaguacguguau

SEQ ID NO: 393072 - RNA, 19 nt, Homo sapiens
  misc_RNA (1)...(19): siRNA sense strand
gugguagauuacuaugaga

SEQ ID NO: 393073 - RNA, 19 nt, Homo sapiens
  misc_RNA (1)...(19): siRNA sense strand
cugcgugacuguccugucu

SEQ ID NO: 393074 - RNA, 19 nt, Homo sapiens
  misc_RNA (1)...(19): siRNA sense strand
caacuuugugguagauuac

SEQ ID NO: 393075 - RNA, 19 nt, Homo sapiens
  misc_RNA (1)...(19): siRNA sense strand
caagauaccugcucagaca

SEQ ID NO: 393076 - RNA, 19 nt, Homo sapiens
  misc_RNA (1)...(19): siRNA sense strand
gacaacagcuccauugaag

SEQ ID NO: 393077 - RNA, 19 nt, Homo sapiens
  misc_RNA (1)...(19): siRNA sense strand
ugaagaaacugauaaagag

SEQ ID NO: 393078 - RNA, 19 nt, Homo sapiens
  misc_RNA (1)...(19): siRNA sense strand
guuauuggcuuucucuuug

SEQ ID NO: 393079 - RNA, 19 nt, Homo sapiens
  misc_RNA (1)...(19): siRNA sense strand
ccacgacgcugaauauaca

SEQ ID NO: 393080 - RNA, 19 nt, Homo sapiens
  misc_RNA (1)...(19): siRNA sense strand
caaagauacuguugacuag

SEQ ID NO: 393081 - RNA, 19 nt, Homo sapiens
  misc_RNA (1)...(19): siRNA sense strand
ccaaagauacuguugacua

SEQ ID NO: 393082 - RNA, 19 nt, Homo sapiens
  misc_RNA (1)...(19): siRNA sense strand
caacagcuccauugaagaa

SEQ ID NO: 393083 - RNA, 19 nt, Homo sapiens
  misc_RNA (1)...(19): siRNA sense strand
auaaagacauguaccuuga

SEQ ID NO: 393084 - RNA, 19 nt, Homo sapiens
  misc_RNA (1)...(19): siRNA sense strand
guccagagcugacuacauc

SEQ ID NO: 393085 - RNA, 19 nt, Homo sapiens
  misc_RNA (1)...(19): siRNA sense strand
gaguguauccuauugauga

SEQ ID NO: 393086 - RNA, 19 nt, Homo sapiens
  misc_RNA (1)...(19): siRNA sense strand
gaaaccacgacgcugaaua

SEQ ID NO: 393087 - RNA, 19 nt, Homo sapiens
  misc_RNA (1)...(19): siRNA sense strand
gagcugacaucugauaaag

SEQ ID NO: 393088 - RNA, 19 nt, Homo sapiens
  misc_RNA (1)...(19): siRNA sense strand
gaagaaacugauaaagaga

SEQ ID NO: 393089 - RNA, 19 nt, Homo sapiens
  misc_RNA (1)...(19): siRNA sense strand
gacaaagucaccugaagaa

SEQ ID NO: 393090 - RNA, 19 nt, Homo sapiens
  misc_RNA (1)...(19): siRNA sense strand
cgaagaggauacaaaugug

SEQ ID NO: 393091 - RNA, 19 nt, Homo sapiens
  misc_RNA (1)...(19): siRNA sense strand
acaaauguguauacugaga

SEQ ID NO: 393092 - RNA, 19 nt, Homo sapiens
  misc_RNA (1)...(19): siRNA sense strand
gcugacaucugauaaagac

SEQ ID NO: 393093 - RNA, 19 nt, Homo sapiens
  misc_RNA (1)...(19): siRNA sense strand
aaagucaccugaagaaacu

SEQ ID NO: 393094 - RNA, 19 nt, Homo sapiens
  misc_RNA (1)...(19): siRNA sense strand
ggcuuucucuuugcaauuu

SEQ ID NO: 393095 - RNA, 19 nt, Homo sapiens
  misc_RNA (1)...(19): siRNA sense strand
gagaaagaaggaugaagga

SEQ ID NO: 393096 - RNA, 19 nt, Homo sapiens
  misc_RNA (1)...(19): siRNA sense strand
gacuacaucucgaccacuu

SEQ ID NO: 393097 - RNA, 19 nt, Homo sapiens
  misc_RNA (1)...(19): siRNA sense strand
gaagaggauacaaaugugu

SEQ ID NO: 393098 - RNA, 19 nt, Homo sapiens
  misc_RNA (1)...(19): siRNA sense strand
aaaccacgacgcugaauau

SEQ ID NO: 393099 - RNA, 19 nt, Homo sapiens
  misc_RNA (1)...(19): siRNA sense strand
uaucagaaggcaccuacua

SEQ ID NO: 393100 - RNA, 19 nt, Homo sapiens
  misc_RNA (1)...(19): siRNA sense strand
ccgaagaggauacaaaugu

SEQ ID NO: 393101 - RNA, 19 nt, Homo sapiens
  misc_RNA (1)...(19): siRNA sense strand
ggacccagccgaagaggau

SEQ ID NO: 393102 - RNA, 19 nt, Homo sapiens
  misc_RNA (1)...(19): siRNA sense strand
caaagucaccugaagaaac

SEQ ID NO: 393103 - RNA, 19 nt, Homo sapiens
  misc_RNA (1)...(19): siRNA sense strand
cugaagaaacugauaaaga

SEQ ID NO: 393104 - RNA, 19 nt, Homo sapiens
  misc_RNA (1)...(19): siRNA sense strand
ugacaacagcuccauugaa

SEQ ID NO: 393105 - RNA, 19 nt, Homo sapiens
  misc_RNA (1)...(19): siRNA sense strand
gaaggaugaaggaagcuau

SEQ ID NO: 393106 - RNA, 19 nt, Homo sapiens
  misc_RNA (1)...(19): siRNA sense strand
aagauacuguugacuagug

SEQ ID NO: 393107 - RNA, 19 nt, Homo sapiens
  misc_RNA (1)...(19): siRNA sense strand
aaagacauguaccuugaca

SEQ ID NO: 393108 - RNA, 19 nt, Homo sapiens
  misc_RNA (1)...(19): siRNA sense strand
gagcugaugaggauguaga

SEQ ID NO: 393109 - RNA, 19 nt, Homo sapiens
  misc_RNA (1)...(19): siRNA sense strand
caucugauaaagacaugua

SEQ ID NO: 393110 - RNA, 19 nt, Homo sapiens
  misc_RNA (1)...(19): siRNA sense strand
cagacaaagucaccugaag

SEQ ID NO: 393111 - RNA, 19 nt, Homo sapiens
  misc_RNA (1)...(19): siRNA sense strand
agaaggcaccuacuaagga

SEQ ID NO: 393112 - RNA, 19 nt, Homo sapiens
  misc_RNA (1)...(19): siRNA sense strand
gcaugagaaagaaggauga

SEQ ID NO: 393113 - RNA, 19 nt, Homo sapiens
  misc_RNA (1)...(19): siRNA sense strand
agacaaagucaccugaaga

SEQ ID NO: 393114 - RNA, 19 nt, Homo sapiens
  misc_RNA (1)...(19): siRNA sense strand
guugguguaucgcaugaga

SEQ ID NO: 393115 - RNA, 19 nt, Homo sapiens
  misc_RNA (1)...(19): siRNA sense strand
gacaucugauaaagacaug

SEQ ID NO: 393116 - RNA, 19 nt, Homo sapiens
  misc_RNA (1)...(19): siRNA sense strand
guguaucgcaugagaaaga

SEQ ID NO: 393117 - RNA, 19 nt, Homo sapiens
  misc_RNA (1)...(19): siRNA sense strand
ugucacugcugguggaguu

SEQ ID NO: 393118 - RNA, 19 nt, Homo sapiens
  misc_RNA (1)...(19): siRNA sense strand
caaauguguauacugagaa

SEQ ID NO: 393119 - RNA, 19 nt, Homo sapiens
  misc_RNA (1)...(19): siRNA sense strand
gggagcugaugaggaugua

SEQ ID NO: 393120 - RNA, 19 nt, Homo sapiens
  misc_RNA (1)...(19): siRNA sense strand
agaaaguucaccucucuga

SEQ ID NO: 393121 - RNA, 19 nt, Homo sapiens
  misc_RNA (1)...(19): siRNA sense strand
ugaugaggauguagagagu

SEQ ID NO: 393122 - RNA, 19 nt, Homo sapiens
  misc_RNA (1)...(19): siRNA sense strand
ucgaccacuuccaaagaua

SEQ ID NO: 393123 - RNA, 19 nt, Homo sapiens
  misc_RNA (1)...(19): siRNA sense strand
acauguaccuugacaacag

SEQ ID NO: 393124 - RNA, 19 nt, Homo sapiens
  misc_RNA (1)...(19): siRNA sense strand
ugacuagugcugcuccaaa

SEQ ID NO: 393125 - RNA, 19 nt, Homo sapiens
  misc_RNA (1)...(19): siRNA sense strand
ccagugcugcuuaucagaa

SEQ ID NO: 393126 - RNA, 19 nt, Homo sapiens
  misc_RNA (1)...(19): siRNA sense strand
caccugaagaaacugauaa

SEQ ID NO: 393127 - RNA, 19 nt, Homo sapiens
  misc_RNA (1)...(19): siRNA sense strand
ggagaacgcaaaccaucca

SEQ ID NO: 393128 - RNA, 19 nt, Homo sapiens
  misc_RNA (1)...(19): siRNA sense strand
ggaguuauuggcuuucucu

SEQ ID NO: 393129 - RNA, 19 nt, Homo sapiens
  misc_RNA (1)...(19): siRNA sense strand
aggaagcuaugaccuugga

SEQ ID NO: 393130 - RNA, 19 nt, Homo sapiens
  misc_RNA (1)...(19): siRNA sense strand
uaaggaguuuuaugcguaa

SEQ ID NO: 393131 - RNA, 19 nt, Homo sapiens
  misc_RNA (1)...(19): siRNA sense strand
gacuagugcugcuccaaaa

SEQ ID NO: 393132 - RNA, 19 nt, Homo sapiens
  misc_RNA (1)...(19): siRNA sense strand
ggaguguauccuauugaug

SEQ ID NO: 393133 - RNA, 19 nt, Homo sapiens
  misc_RNA (1)...(19): siRNA sense strand
cugaauauacagaacaaga

SEQ ID NO: 393134 - RNA, 19 nt, Homo sapiens
  misc_RNA (1)...(19): siRNA sense strand
gauaccugcucagacaaag

SEQ ID NO: 393135 - RNA, 19 nt, Homo sapiens
  misc_RNA (1)...(19): siRNA sense strand
cagccgaagaggauacaaa

SEQ ID NO: 393136 - RNA, 19 nt, Homo sapiens
  misc_RNA (1)...(19): siRNA sense strand
ucaccugaagaaacugaua

SEQ ID NO: 393137 - RNA, 19 nt, Homo sapiens
  misc_RNA (1)...(19): siRNA sense strand
ucagaaggcaccuacuaag

SEQ ID NO: 393138 - RNA, 19 nt, Homo sapiens
  misc_RNA (1)...(19): siRNA sense strand
cucgggagcugaugaggau

SEQ ID NO: 393139 - RNA, 19 nt, Homo sapiens
  misc_RNA (1)...(19): siRNA sense strand
ugguggaguuauuggcuuu

SEQ ID NO: 393140 - RNA, 19 nt, Homo sapiens
  misc_RNA (1)...(19): siRNA sense strand
aaauggacccagccgaaga

SEQ ID NO: 393141 - RNA, 19 nt, Homo sapiens
  misc_RNA (1)...(19): siRNA sense strand
ggaaaccacgacgcugaau

SEQ ID NO: 393142 - RNA, 19 nt, Homo sapiens
  misc_RNA (1)...(19): siRNA sense strand
cagaaggcaccuacuaagg

SEQ ID NO: 393143 - RNA, 19 nt, Homo sapiens
  misc_RNA (1)...(19): siRNA sense strand
cauccagugcugcuuauca

SEQ ID NO: 393144 - RNA, 19 nt, Homo sapiens
  misc_RNA (1)...(19): siRNA sense strand
aaccauccagugcugcuua

SEQ ID NO: 393145 - RNA, 19 nt, Homo sapiens
  misc_RNA (1)...(19): siRNA sense strand
ugacaucugauaaagacau

SEQ ID NO: 393146 - RNA, 19 nt, Homo sapiens
  misc_RNA (1)...(19): siRNA sense strand
gacgaugacuacgcuucug

SEQ ID NO: 393147 - RNA, 19 nt, Homo sapiens
  misc_RNA (1)...(19): siRNA sense strand
agagcugacaucugauaaa

SEQ ID NO: 393148 - RNA, 19 nt, Homo sapiens
  misc_RNA (1)...(19): siRNA sense strand
uguaucgcaugagaaagaa

SEQ ID NO: 393149 - RNA, 19 nt, Homo sapiens
  misc_RNA (1)...(19): siRNA sense strand
gaagauagguuuccaugug

SEQ ID NO: 393150 - RNA, 19 nt, Homo sapiens
  misc_RNA (1)...(19): siRNA sense strand
agaaauaugugaagaagug

SEQ ID NO: 393151 - RNA, 19 nt, Homo sapiens
  misc_RNA (1)...(19): siRNA sense strand
caucaucacugucaucuuc

SEQ ID NO: 393152 - RNA, 19 nt, Homo sapiens
  misc_RNA (1)...(19): siRNA sense strand
ucaaugagcugcugcacau

SEQ ID NO: 393153 - RNA, 19 nt, Homo sapiens
  misc_RNA (1)...(19): siRNA sense strand
gaacuggaccuucgucauc

SEQ ID NO: 393154 - RNA, 19 nt, Homo sapiens
  misc_RNA (1)...(19): siRNA sense strand
gaagagauccacacacagu

SEQ ID NO: 393155 - RNA, 19 nt, Homo sapiens
  misc_RNA (1)...(19): siRNA sense strand
gugaagaagugucugauag

SEQ ID NO: 393156 - RNA, 19 nt, Homo sapiens
  misc_RNA (1)...(19): siRNA sense strand
gaucuucccuuccuuacuc

SEQ ID NO: 393157 - RNA, 19 nt, Homo sapiens
  misc_RNA (1)...(19): siRNA sense strand
ggccugaccugguucauca

SEQ ID NO: 393158 - RNA, 19 nt, Homo sapiens
  misc_RNA (1)...(19): siRNA sense strand
gcugaagggcaaagucuua

SEQ ID NO: 393159 - RNA, 19 nt, Homo sapiens
  misc_RNA (1)...(19): siRNA sense strand
gguccuguaucaccucuuu

SEQ ID NO: 393160 - RNA, 19 nt, Homo sapiens
  misc_RNA (1)...(19): siRNA sense strand
gccuucaccucccgauuua

SEQ ID NO: 393161 - RNA, 19 nt, Homo sapiens
  misc_RNA (1)...(19): siRNA sense strand
gggaguccuugcucaauga

SEQ ID NO: 393162 - RNA, 19 nt, Homo sapiens
  misc_RNA (1)...(19): siRNA sense strand
aagcucaaccgguuuaaua

SEQ ID NO: 393163 - RNA, 19 nt, Homo sapiens
  misc_RNA (1)...(19): siRNA sense strand
cuacauggccuacuuguca

SEQ ID NO: 393164 - RNA, 19 nt, Homo sapiens
  misc_RNA (1)...(19): siRNA sense strand
ucacugugguccuguauca

SEQ ID NO: 393165 - RNA, 19 nt, Homo sapiens
  misc_RNA (1)...(19): siRNA sense strand
caaccgguuuaauaagaaa

SEQ ID NO: 393166 - RNA, 19 nt, Homo sapiens
  misc_RNA (1)...(19): siRNA sense strand
agcagaagaucaacaacua

SEQ ID NO: 393167 - RNA, 19 nt, Homo sapiens
  misc_RNA (1)...(19): siRNA sense strand
gccaacaucucccacaagu

SEQ ID NO: 393168 - RNA, 19 nt, Homo sapiens
  misc_RNA (1)...(19): siRNA sense strand
ggcaaagucuuaggguuga

SEQ ID NO: 393169 - RNA, 19 nt, Homo sapiens
  misc_RNA (1)...(19): siRNA sense strand
gaagaagugucugauagcu

SEQ ID NO: 393170 - RNA, 19 nt, Homo sapiens
  misc_RNA (1)...(19): siRNA sense strand
gacaagcucaaccgguuua

SEQ ID NO: 393171 - RNA, 19 nt, Homo sapiens
  misc_RNA (1)...(19): siRNA sense strand
aggaacaacuugcagaaga

SEQ ID NO: 393172 - RNA, 19 nt, Homo sapiens
  misc_RNA (1)...(19): siRNA sense strand
aagauagguuuccauguga

SEQ ID NO: 393173 - RNA, 19 nt, Homo sapiens
  misc_RNA (1)...(19): siRNA sense strand
ugaggaaauucacaucaau

SEQ ID NO: 393174 - RNA, 19 nt, Homo sapiens
  misc_RNA (1)...(19): siRNA sense strand
ucacugccaucaucacugu

SEQ ID NO: 393175 - RNA, 19 nt, Homo sapiens
  misc_RNA (1)...(19): siRNA sense strand
ggacaagcucaaccgguuu

SEQ ID NO: 393176 - RNA, 19 nt, Homo sapiens
  misc_RNA (1)...(19): siRNA sense strand
cagacccacuggccuauga

SEQ ID NO: 393177 - RNA, 19 nt, Homo sapiens
  misc_RNA (1)...(19): siRNA sense strand
ggaacaacuugcagaagac

SEQ ID NO: 393178 - RNA, 19 nt, Homo sapiens
  misc_RNA (1)...(19): siRNA sense strand
ucaaccgguuuaauaagaa

SEQ ID NO: 393179 - RNA, 19 nt, Homo sapiens
  misc_RNA (1)...(19): siRNA sense strand
gcggugagcagaucaacaa

SEQ ID NO: 393180 - RNA, 19 nt, Homo sapiens
  misc_RNA (1)...(19): siRNA sense strand
acgaagagauccacacaca

SEQ ID NO: 393181 - RNA, 19 nt, Homo sapiens
  misc_RNA (1)...(19): siRNA sense strand
gugagcagaucaacaacau

SEQ ID NO: 393182 - RNA, 19 nt, Homo sapiens
  misc_RNA (1)...(19): siRNA sense strand
ccuguuggcugugaagaaa

SEQ ID NO: 393183 - RNA, 19 nt, Homo sapiens
  misc_RNA (1)...(19): siRNA sense strand
gcgagacccucaucuucau

SEQ ID NO: 393184 - RNA, 19 nt, Homo sapiens
  misc_RNA (1)...(19): siRNA sense strand
ugaccugguucaucaacaa

SEQ ID NO: 393185 - RNA, 19 nt, Homo sapiens
  misc_RNA (1)...(19): siRNA sense strand
guagaccuguuggcuguga

SEQ ID NO: 393186 - RNA, 19 nt, Homo sapiens
  misc_RNA (1)...(19): siRNA sense strand
gagccgggauccugcaaag

SEQ ID NO: 393187 - RNA, 19 nt, Homo sapiens
  misc_RNA (1)...(19): siRNA sense strand
cuguggaccuggugaauga

SEQ ID NO: 393188 - RNA, 19 nt, Homo sapiens
  misc_RNA (1)...(19): siRNA sense strand
gaagcgcuccaucaacgaa

SEQ ID NO: 393189 - RNA, 19 nt, Homo sapiens
  misc_RNA (1)...(19): siRNA sense strand
cuucuggccugccucauga

SEQ ID NO: 393190 - RNA, 19 nt, Homo sapiens
  misc_RNA (1)...(19): siRNA sense strand
ugacaggcaucgaagacau

SEQ ID NO: 393191 - RNA, 19 nt, Homo sapiens
  misc_RNA (1)...(19): siRNA sense strand
gcaccauccugaucuuugc

SEQ ID NO: 393192 - RNA, 19 nt, Homo sapiens
  misc_RNA (1)...(19): siRNA sense strand
gaggaaauucacaucaaug

SEQ ID NO: 393193 - RNA, 19 nt, Homo sapiens
  misc_RNA (1)...(19): siRNA sense strand
acaccaccaucaaauacuu

SEQ ID NO: 393194 - RNA, 19 nt, Homo sapiens
  misc_RNA (1)...(19): siRNA sense strand
agacaucuguggccacuac

SEQ ID NO: 393195 - RNA, 19 nt, Homo sapiens
  misc_RNA (1)...(19): siRNA sense strand
caacgaagagauccacaca

SEQ ID NO: 393196 - RNA, 19 nt, Homo sapiens
  misc_RNA (1)...(19): siRNA sense strand
gcaguccgacgucuucuuc

SEQ ID NO: 393197 - RNA, 19 nt, Homo sapiens
  misc_RNA (1)...(19): siRNA sense strand
cucaaccgguuuaauaaga

SEQ ID NO: 393198 - RNA, 19 nt, Homo sapiens
  misc_RNA (1)...(19): siRNA sense strand
caaguuccguaucgugaag

SEQ ID NO: 393199 - RNA, 19 nt, Homo sapiens
  misc_RNA (1)...(19): siRNA sense strand
agacgaagcgcuccaucaa

SEQ ID NO: 393200 - RNA, 19 nt, Homo sapiens
  misc_RNA (1)...(19): siRNA sense strand
gugcagggcaugaccauuc

SEQ ID NO: 393201 - RNA, 19 nt, Homo sapiens
  misc_RNA (1)...(19): siRNA sense strand
gcuaccuccuggacaagaa

SEQ ID NO: 393202 - RNA, 19 nt, Homo sapiens
  misc_RNA (1)...(19): siRNA sense strand
gagacgaagcgcuccauca

SEQ ID NO: 393203 - RNA, 19 nt, Homo sapiens
  misc_RNA (1)...(19): siRNA sense strand
ggacucacccaccaugucu

SEQ ID NO: 393204 - RNA, 19 nt, Homo sapiens
  misc_RNA (1)...(19): siRNA sense strand
gagcagaagaucaacaacu

SEQ ID NO: 393205 - RNA, 19 nt, Homo sapiens
  misc_RNA (1)...(19): siRNA sense strand
ugccagcacuguccaagga

SEQ ID NO: 393206 - RNA, 19 nt, Homo sapiens
  misc_RNA (1)...(19): siRNA sense strand
acagcuacauggccuacuu

SEQ ID NO: 393207 - RNA, 19 nt, Homo sapiens
  misc_RNA (1)...(19): siRNA sense strand
ggacaaggaggaggagauc

SEQ ID NO: 393208 - RNA, 19 nt, Homo sapiens
  misc_RNA (1)...(19): siRNA sense strand
guuccucacugccaucauc

SEQ ID NO: 393209 - RNA, 19 nt, Homo sapiens
  misc_RNA (1)...(19): siRNA sense strand
ccacaccaccaucaaauac

SEQ ID NO: 393210 - RNA, 19 nt, Homo sapiens
  misc_RNA (1)...(19): siRNA sense strand
cagcgagacccucaucuuc

SEQ ID NO: 393211 - RNA, 19 nt, Homo sapiens
  misc_RNA (1)...(19): siRNA sense strand
caucggaucuucccuuccu

SEQ ID NO: 393212 - RNA, 19 nt, Homo sapiens
  misc_RNA (1)...(19): siRNA sense strand
ccaaggaccaguucaucau

SEQ ID NO: 393213 - RNA, 19 nt, Homo sapiens
  misc_RNA (1)...(19): siRNA sense strand
ggaggaggagauccgcaaa

SEQ ID NO: 393214 - RNA, 19 nt, Homo sapiens
  misc_RNA (1)...(19): siRNA sense strand
cggcugcgguccuacaaca

SEQ ID NO: 393215 - RNA, 19 nt, Homo sapiens
  misc_RNA (1)...(19): siRNA sense strand
gagcugaagggcaaagucu

SEQ ID NO: 393216 - RNA, 19 nt, Homo sapiens
  misc_RNA (1)...(19): siRNA sense strand
gggcaucguggacaucuuc

SEQ ID NO: 393217 - RNA, 19 nt, Homo sapiens
  misc_RNA (1)...(19): siRNA sense strand
aggaaauucacaucaauga

SEQ ID NO: 393218 - RNA, 19 nt, Homo sapiens
  misc_RNA (1)...(19): siRNA sense strand
ugaggaacaacuugcagaa

SEQ ID NO: 393219 - RNA, 19 nt, Homo sapiens
  misc_RNA (1)...(19): siRNA sense strand
accacaagauggagaugaa

SEQ ID NO: 393220 - RNA, 19 nt, Homo sapiens
  misc_RNA (1)...(19): siRNA sense strand
ugugaagaagugucugaua

SEQ ID NO: 393221 - RNA, 19 nt, Homo sapiens
  misc_RNA (1)...(19): siRNA sense strand
ccugguucaucaacaaguu

SEQ ID NO: 393222 - RNA, 19 nt, Homo sapiens
  misc_RNA (1)...(19): siRNA sense strand
ggaaauucacaucaaugag

SEQ ID NO: 393223 - RNA, 19 nt, Homo sapiens
  misc_RNA (1)...(19): siRNA sense strand
gcucaaccgguuuaauaag

SEQ ID NO: 393224 - RNA, 19 nt, Homo sapiens
  misc_RNA (1)...(19): siRNA sense strand
ggaggacgaggacgacgau

SEQ ID NO: 393225 - RNA, 19 nt, Homo sapiens
  misc_RNA (1)...(19): siRNA sense strand
gcagaagaucaacaacuac

SEQ ID NO: 393226 - RNA, 19 nt, Homo sapiens
  misc_RNA (1)...(19): siRNA sense strand
cgacgucuucuuccucuuc

SEQ ID NO: 393227 - RNA, 19 nt, Homo sapiens
  misc_RNA (1)...(19): siRNA sense strand
uggccugccucaugaagau

SEQ ID NO: 393228 - RNA, 19 nt, Homo sapiens
  misc_RNA (1)...(19): siRNA sense strand
gguucuggcugucuuugag

SEQ ID NO: 393229 - RNA, 19 nt, Homo sapiens
  misc_RNA (1)...(19): siRNA sense strand
ggaacuggaccuucgucau

SEQ ID NO: 393230 - RNA, 19 nt, Homo sapiens
  misc_RNA (1)...(19): siRNA sense strand
uuaaucauuccgucacuga

SEQ ID NO: 393231 - RNA, 19 nt, Homo sapiens
  misc_RNA (1)...(19): siRNA sense strand
caucuucuucaccgucuuu

SEQ ID NO: 393232 - RNA, 19 nt, Homo sapiens
  misc_RNA (1)...(19): siRNA sense strand
cugcugcacauccuuguuu

SEQ ID NO: 393233 - RNA, 19 nt, Homo sapiens
  misc_RNA (1)...(19): siRNA sense strand
ccaacugccagcaccauuc

SEQ ID NO: 393234 - RNA, 19 nt, Homo sapiens
  misc_RNA (1)...(19): siRNA sense strand
ggcaccauccugaucuuug

SEQ ID NO: 393235 - RNA, 19 nt, Homo sapiens
  misc_RNA (1)...(19): siRNA sense strand
ggagagcugccugcugauc

SEQ ID NO: 393236 - RNA, 19 nt, Homo sapiens
  misc_RNA (1)...(19): siRNA sense strand
gcugcgguccuacaacaga

SEQ ID NO: 393237 - RNA, 19 nt, Homo sapiens
  misc_RNA (1)...(19): siRNA sense strand
gaaauaugugaagaagugu

SEQ ID NO: 393238 - RNA, 19 nt, Homo sapiens
  misc_RNA (1)...(19): siRNA sense strand
ugggcuaccuccuggacaa

SEQ ID NO: 393239 - RNA, 19 nt, Homo sapiens
  misc_RNA (1)...(19): siRNA sense strand
caaggaccaguucaucauc

SEQ ID NO: 393240 - RNA, 19 nt, Homo sapiens
  misc_RNA (1)...(19): siRNA sense strand
cccacaccaccaucaaaua

SEQ ID NO: 393241 - RNA, 19 nt, Homo sapiens
  misc_RNA (1)...(19): siRNA sense strand
uggcaucuguggccucucu

SEQ ID NO: 393242 - RNA, 19 nt, Homo sapiens
  misc_RNA (1)...(19): siRNA sense strand
ucggaucuucccuuccuua

SEQ ID NO: 393243 - RNA, 19 nt, Homo sapiens
  misc_RNA (1)...(19): siRNA sense strand
gcucuucgucuuccucuac

SEQ ID NO: 393244 - RNA, 19 nt, Homo sapiens
  misc_RNA (1)...(19): siRNA sense strand
gcuguggaacgccuucuuc

SEQ ID NO: 393245 - RNA, 19 nt, Homo sapiens
  misc_RNA (1)...(19): siRNA sense strand
ucagcgagacccucaucuu

SEQ ID NO: 393246 - RNA, 19 nt, Homo sapiens
  misc_RNA (1)...(19): siRNA sense strand
gcucuucggcagcaucauc

SEQ ID NO: 393247 - RNA, 19 nt, Homo sapiens
  misc_RNA (1)...(19): siRNA sense strand
gcacucagagcgcaagaag

SEQ ID NO: 393248 - RNA, 19 nt, Homo sapiens
  misc_RNA (1)...(19): siRNA sense strand
caagcucgacgccuucuuc

SEQ ID NO: 393249 - RNA, 19 nt, Homo sapiens
  misc_RNA (1)...(19): siRNA sense strand
ggaguggauccgagacaug

SEQ ID NO: 393250 - RNA, 19 nt, Homo sapiens
  misc_RNA (1)...(19): siRNA sense strand
gaguggauccgagacaugu

SEQ ID NO: 393251 - RNA, 19 nt, Homo sapiens
  misc_RNA (1)...(19): siRNA sense strand
ccauccacgugcaccaguu

SEQ ID NO: 393252 - RNA, 19 nt, Homo sapiens
  misc_RNA (1)...(19): siRNA sense strand
caucuuggcucucaugguu

SEQ ID NO: 393253 - RNA, 19 nt, Homo sapiens
  misc_RNA (1)...(19): siRNA sense strand
gauuggagcugauucaucu

SEQ ID NO: 393254 - RNA, 19 nt, Homo sapiens
  misc_RNA (1)...(19): siRNA sense strand
ccacaauaccaacaauaua

SEQ ID NO: 393255 - RNA, 19 nt, Homo sapiens
  misc_RNA (1)...(19): siRNA sense strand
caaccacaauaccaacaau

SEQ ID NO: 393256 - RNA, 19 nt, Homo sapiens
  misc_RNA (1)...(19): siRNA sense strand
aagauucgguuauggguau

SEQ ID NO: 393257 - RNA, 19 nt, Homo sapiens
  misc_RNA (1)...(19): siRNA sense strand
aaccauaccaaccacaaua

SEQ ID NO: 393258 - RNA, 19 nt, Homo sapiens
  misc_RNA (1)...(19): siRNA sense strand
cacuauacccacaaccaua

SEQ ID NO: 393259 - RNA, 19 nt, Homo sapiens
  misc_RNA (1)...(19): siRNA sense strand
cacaauaccaacaauauac

SEQ ID NO: 393260 - RNA, 19 nt, Homo sapiens
  misc_RNA (1)...(19): siRNA sense strand
ugucuuugccuucaucuug

SEQ ID NO: 393261 - RNA, 19 nt, Homo sapiens
  misc_RNA (1)...(19): siRNA sense strand
caaccacuauacccacaac

SEQ ID NO: 393262 - RNA, 19 nt, Homo sapiens
  misc_RNA (1)...(19): siRNA sense strand
caaccauaccaaccacaau

SEQ ID NO: 393263 - RNA, 19 nt, Homo sapiens
  misc_RNA (1)...(19): siRNA sense strand
ccaaccacaauaccaacaa

SEQ ID NO: 393264 - RNA, 19 nt, Homo sapiens
  misc_RNA (1)...(19): siRNA sense strand
aaccacaauaccaacaaua

SEQ ID NO: 393265 - RNA, 19 nt, Homo sapiens
  misc_RNA (1)...(19): siRNA sense strand
gaacaaguaccgagagaau

SEQ ID NO: 393266 - RNA, 19 nt, Homo sapiens
  misc_RNA (1)...(19): siRNA sense strand
cagagaacauuaucaagga

SEQ ID NO: 393267 - RNA, 19 nt, Homo sapiens
  misc_RNA (1)...(19): siRNA sense strand
ccaccaaggucuucuuagu

SEQ ID NO: 393268 - RNA, 19 nt, Homo sapiens
  misc_RNA (1)...(19): siRNA sense strand
acaaguaccgagagaauaa

SEQ ID NO: 393269 - RNA, 19 nt, Homo sapiens
  misc_RNA (1)...(19): siRNA sense strand
ccaacaagaccgagaguga

SEQ ID NO: 393270 - RNA, 19 nt, Homo sapiens
  misc_RNA (1)...(19): siRNA sense strand
gccuucauguggcuaguua

SEQ ID NO: 393271 - RNA, 19 nt, Homo sapiens
  misc_RNA (1)...(19): siRNA sense strand
ggacauggacguggugaau

SEQ ID NO: 393272 - RNA, 19 nt, Homo sapiens
  misc_RNA (1)...(19): siRNA sense strand
cagaacaaguaccgagaga

SEQ ID NO: 393273 - RNA, 19 nt, Homo sapiens
  misc_RNA (1)...(19): siRNA sense strand
gagcugagagacccuguga

SEQ ID NO: 393274 - RNA, 19 nt, Homo sapiens
  misc_RNA (1)...(19): siRNA sense strand
guaccgagagaauaacaaa

SEQ ID NO: 393275 - RNA, 19 nt, Homo sapiens
  misc_RNA (1)...(19): siRNA sense strand
accaaggucuucuuaguug

SEQ ID NO: 393276 - RNA, 19 nt, Homo sapiens
  misc_RNA (1)...(19): siRNA sense strand
ccacagacccagagaacau

SEQ ID NO: 393277 - RNA, 19 nt, Homo sapiens
  misc_RNA (1)...(19): siRNA sense strand
acauggacguggugaauca

SEQ ID NO: 393278 - RNA, 19 nt, Homo sapiens
  misc_RNA (1)...(19): siRNA sense strand
gcugucagaugugaagaug

SEQ ID NO: 393279 - RNA, 19 nt, Homo sapiens
  misc_RNA (1)...(19): siRNA sense strand
ccaccuccuucuccaauca

SEQ ID NO: 393280 - RNA, 19 nt, Homo sapiens
  misc_RNA (1)...(19): siRNA sense strand
ccaaggggcugucagaugu

SEQ ID NO: 393281 - RNA, 19 nt, Homo sapiens
  misc_RNA (1)...(19): siRNA sense strand
gcuaccagccugacuaugg

SEQ ID NO: 393282 - RNA, 19 nt, Homo sapiens
  misc_RNA (1)...(19): siRNA sense strand
caccaaggucuucuuaguu

SEQ ID NO: 393283 - RNA, 19 nt, Homo sapiens
  misc_RNA (1)...(19): siRNA sense strand
caccaccaaggucuucuua

SEQ ID NO: 393284 - RNA, 19 nt, Homo sapiens
  misc_RNA (1)...(19): siRNA sense strand
gaacauuaucaaggagaug

SEQ ID NO: 393285 - RNA, 19 nt, Homo sapiens
  misc_RNA (1)...(19): siRNA sense strand
ccugugaccucgggacuca

SEQ ID NO: 393286 - RNA, 19 nt, Homo sapiens
  misc_RNA (1)...(19): siRNA sense strand
agagugaccucagcaucga

SEQ ID NO: 393287 - RNA, 19 nt, Homo sapiens
  misc_RNA (1)...(19): siRNA sense strand
agacagggaacacaugcaa

SEQ ID NO: 393288 - RNA, 19 nt, Homo sapiens
  misc_RNA (1)...(19): siRNA sense strand
gggcgacuaugggcagcaa

SEQ ID NO: 393289 - RNA, 19 nt, Homo sapiens
  misc_RNA (1)...(19): siRNA sense strand
cucgucagccgaauucuuu

SEQ ID NO: 393290 - RNA, 19 nt, Homo sapiens
  misc_RNA (1)...(19): siRNA sense strand
acagacccagagaacauua

SEQ ID NO: 393291 - RNA, 19 nt, Homo sapiens
  misc_RNA (1)...(19): siRNA sense strand
ucagccgaauucuuuguca

SEQ ID NO: 393292 - RNA, 19 nt, Homo sapiens
  misc_RNA (1)...(19): siRNA sense strand
gcaccaccaaggucuucuu

SEQ ID NO: 393293 - RNA, 19 nt, Homo sapiens
  misc_RNA (1)...(19): siRNA sense strand
ggcccaugcuggacuuucu

SEQ ID NO: 393294 - RNA, 19 nt, Homo sapiens
  misc_RNA (1)...(19): siRNA sense strand
cagcugagcguggauugug

SEQ ID NO: 393295 - RNA, 19 nt, Homo sapiens
  misc_RNA (1)...(19): siRNA sense strand
uugugaaggugcugcaaug

SEQ ID NO: 393296 - RNA, 19 nt, Homo sapiens
  misc_RNA (1)...(19): siRNA sense strand
aacaaguaccgagagaaua

SEQ ID NO: 393297 - RNA, 19 nt, Homo sapiens
  misc_RNA (1)...(19): siRNA sense strand
agaacauuaucaaggagau

SEQ ID NO: 393298 - RNA, 19 nt, Homo sapiens
  misc_RNA (1)...(19): siRNA sense strand
gcaaagcacuggccucgau

SEQ ID NO: 393299 - RNA, 19 nt, Homo sapiens
  misc_RNA (1)...(19): siRNA sense strand
ccggaucacucaagcaaua

SEQ ID NO: 393300 - RNA, 19 nt, Homo sapiens
  misc_RNA (1)...(19): siRNA sense strand
gaaccugaaucccaaagca

SEQ ID NO: 393301 - RNA, 19 nt, Homo sapiens
  misc_RNA (1)...(19): siRNA sense strand
gcaccagccucaugcacaa

SEQ ID NO: 393302 - RNA, 19 nt, Homo sapiens
  misc_RNA (1)...(19): siRNA sense strand
ggaagcagcagcacguuug

SEQ ID NO: 393303 - RNA, 19 nt, Homo sapiens
  misc_RNA (1)...(19): siRNA sense strand
ucagugaccuccuggacuu

SEQ ID NO: 393304 - RNA, 19 nt, Homo sapiens
  misc_RNA (1)...(19): siRNA sense strand
gcacuggccucgaucuacu

SEQ ID NO: 393305 - RNA, 19 nt, Homo sapiens
  misc_RNA (1)...(19): siRNA sense strand
gcacagcagccucucuuca

SEQ ID NO: 393306 - RNA, 19 nt, Homo sapiens
  misc_RNA (1)...(19): siRNA sense strand
ccaagaagguccggaaggu

SEQ ID NO: 393307 - RNA, 19 nt, Homo sapiens
  misc_RNA (1)...(19): siRNA sense strand
guucggagguucaggucuu

SEQ ID NO: 393308 - RNA, 19 nt, Homo sapiens
  misc_RNA (1)...(19): siRNA sense strand
gcgcuggccucagguuuca

SEQ ID NO: 393309 - RNA, 19 nt, Homo sapiens
  misc_RNA (1)...(19): siRNA sense strand
gaaacggcgagaagaggaa

SEQ ID NO: 393310 - RNA, 19 nt, Homo sapiens
  misc_RNA (1)...(19): siRNA sense strand
gcagacggcagccuagaca

SEQ ID NO: 393311 - RNA, 19 nt, Homo sapiens
  misc_RNA (1)...(19): siRNA sense strand
cuccuggacuucagcauga

SEQ ID NO: 393312 - RNA, 19 nt, Homo sapiens
  misc_RNA (1)...(19): siRNA sense strand
cagacaaggagcucaguga

SEQ ID NO: 393313 - RNA, 19 nt, Homo sapiens
  misc_RNA (1)...(19): siRNA sense strand
agaaggaggacgaggagaa

SEQ ID NO: 393314 - RNA, 19 nt, Homo sapiens
  misc_RNA (1)...(19): siRNA sense strand
ggacgaggacgaccuucuc

SEQ ID NO: 393315 - RNA, 19 nt, Homo sapiens
  misc_RNA (1)...(19): siRNA sense strand
uccacggccugcagaguaa

SEQ ID NO: 393316 - RNA, 19 nt, Homo sapiens
  misc_RNA (1)...(19): siRNA sense strand
ggacuucagcaugauguuc

SEQ ID NO: 393317 - RNA, 19 nt, Homo sapiens
  misc_RNA (1)...(19): siRNA sense strand
ggugucaggugugguugga

SEQ ID NO: 393318 - RNA, 19 nt, Homo sapiens
  misc_RNA (1)...(19): siRNA sense strand
acacgcagcccaagaaggu

SEQ ID NO: 393319 - RNA, 19 nt, Homo sapiens
  misc_RNA (1)...(19): siRNA sense strand
acagcagccucucuucauc

SEQ ID NO: 393320 - RNA, 19 nt, Homo sapiens
  misc_RNA (1)...(19): siRNA sense strand
aaaggugucaggugugguu

SEQ ID NO: 393321 - RNA, 19 nt, Homo sapiens
  misc_RNA (1)...(19): siRNA sense strand
ucacucaagcaauaacuuc

SEQ ID NO: 393322 - RNA, 19 nt, Homo sapiens
  misc_RNA (1)...(19): siRNA sense strand
uagacacgcagcccaagaa

SEQ ID NO: 393323 - RNA, 19 nt, Homo sapiens
  misc_RNA (1)...(19): siRNA sense strand
gaaggaggacgaggagaac

SEQ ID NO: 393324 - RNA, 19 nt, Homo sapiens
  misc_RNA (1)...(19): siRNA sense strand
cggaggaggagaagaagga

SEQ ID NO: 393325 - RNA, 19 nt, Homo sapiens
  misc_RNA (1)...(19): siRNA sense strand
acucggaggaggagaagaa

SEQ ID NO: 393326 - RNA, 19 nt, Homo sapiens
  misc_RNA (1)...(19): siRNA sense strand
caaauaagggcugcuguuu

SEQ ID NO: 393327 - RNA, 19 nt, Homo sapiens
  misc_RNA (1)...(19): siRNA sense strand
gcaaauaagggcugcuguu

SEQ ID NO: 393328 - RNA, 19 nt, Homo sapiens
  misc_RNA (1)...(19): siRNA sense strand
gaagaggagugugaauuuu

SEQ ID NO: 393329 - RNA, 19 nt, Homo sapiens
  misc_RNA (1)...(19): siRNA sense strand
agaagaggagugugaauuu

SEQ ID NO: 393330 - RNA, 19 nt, Homo sapiens
  misc_RNA (1)...(19): siRNA sense strand
cgacgucccuccagaagag

SEQ ID NO: 393331 - RNA, 19 nt, Homo sapiens
  misc_RNA (1)...(19): siRNA sense strand
gaaagacagaauugugguu

SEQ ID NO: 393332 - RNA, 19 nt, Homo sapiens
  misc_RNA (1)...(19): siRNA sense strand
aauaagggcugcuguuucg

SEQ ID NO: 393333 - RNA, 19 nt, Homo sapiens
  misc_RNA (1)...(19): siRNA sense strand
cagaagaggagugugaauu

SEQ ID NO: 393334 - RNA, 19 nt, Homo sapiens
  misc_RNA (1)...(19): siRNA sense strand
aaagacagaauugugguuu

SEQ ID NO: 393335 - RNA, 19 nt, Homo sapiens
  misc_RNA (1)...(19): siRNA sense strand
ccuggugcuucuauccuaa

SEQ ID NO: 393336 - RNA, 19 nt, Homo sapiens
  misc_RNA (1)...(19): siRNA sense strand
agacagagacguguacagu

SEQ ID NO: 393337 - RNA, 19 nt, Homo sapiens
  misc_RNA (1)...(19): siRNA sense strand
aaauaagggcugcuguuuc

SEQ ID NO: 393338 - RNA, 19 nt, Homo sapiens
  misc_RNA (1)...(19): siRNA sense strand
cgugaaagacagaauugug

SEQ ID NO: 393339 - RNA, 19 nt, Homo sapiens
  misc_RNA (1)...(19): siRNA sense strand
gcccagacagagacgugua

SEQ ID NO: 393340 - RNA, 19 nt, Homo sapiens
  misc_RNA (1)...(19): siRNA sense strand
caucgacgucccuccagaa

SEQ ID NO: 393341 - RNA, 19 nt, Homo sapiens
  misc_RNA (1)...(19): siRNA sense strand
ccucccagugugcaaauaa

SEQ ID NO: 393342 - RNA, 19 nt, Homo sapiens
  misc_RNA (1)...(19): siRNA sense strand
uggugcuucuauccuaaua

SEQ ID NO: 393343 - RNA, 19 nt, Homo sapiens
  misc_RNA (1)...(19): siRNA sense strand
uggaugagcugaagauaau

SEQ ID NO: 393344 - RNA, 19 nt, Homo sapiens
  misc_RNA (1)...(19): siRNA sense strand
uagagcagcugacagaaga

SEQ ID NO: 393345 - RNA, 19 nt, Homo sapiens
  misc_RNA (1)...(19): siRNA sense strand
ucgaggagcucaugaagga

SEQ ID NO: 393346 - RNA, 19 nt, Homo sapiens
  misc_RNA (1)...(19): siRNA sense strand
ggagcugucugaccucuuc

SEQ ID NO: 393347 - RNA, 19 nt, Homo sapiens
  misc_RNA (1)...(19): siRNA sense strand
ccaaggagcugggcaaggu

SEQ ID NO: 393348 - RNA, 19 nt, Homo sapiens
  misc_RNA (1)...(19): siRNA sense strand
ugcaggagaugaucgauga

SEQ ID NO: 393349 - RNA, 19 nt, Homo sapiens
  misc_RNA (1)...(19): siRNA sense strand
gcacgguggacuuugauga

SEQ ID NO: 393350 - RNA, 19 nt, Homo sapiens
  misc_RNA (1)...(19): siRNA sense strand
gcggcacgguggacuuuga

SEQ ID NO: 393351 - RNA, 19 nt, Homo sapiens
  misc_RNA (1)...(19): siRNA sense strand
cugaggagcugcaggagau

SEQ ID NO: 393352 - RNA, 19 nt, Homo sapiens
  misc_RNA (1)...(19): siRNA sense strand
ggacgacagcaaagggaaa

SEQ ID NO: 393353 - RNA, 19 nt, Homo sapiens
  misc_RNA (1)...(19): siRNA sense strand
caugaaggacgacagcaaa

SEQ ID NO: 393354 - RNA, 19 nt, Homo sapiens
  misc_RNA (1)...(19): siRNA sense strand
gguggacuuugaugaguuc

SEQ ID NO: 393355 - RNA, 19 nt, Homo sapiens
  misc_RNA (1)...(19): siRNA sense strand
gcaugaaggacgacagcaa

SEQ ID NO: 393356 - RNA, 19 nt, Homo sapiens
  misc_RNA (1)...(19): siRNA sense strand
caugaaggguguggaguag

SEQ ID NO: 393357 - RNA, 19 nt, Homo sapiens
  misc_RNA (1)...(19): siRNA sense strand
ucaugaaggguguggagua

SEQ ID NO: 393358 - RNA, 19 nt, Homo sapiens
  misc_RNA (1)...(19): siRNA sense strand
gaaggacggagacaagaac

SEQ ID NO: 393359 - RNA, 19 nt, Homo sapiens
  misc_RNA (1)...(19): siRNA sense strand
gagcugggcaaggugauga

SEQ ID NO: 393360 - RNA, 19 nt, Homo sapiens
  misc_RNA (1)...(19): siRNA sense strand
ugaaggacggagacaagaa

SEQ ID NO: 393361 - RNA, 19 nt, Homo sapiens
  misc_RNA (1)...(19): siRNA sense strand
guagagcagcugacagaag

SEQ ID NO: 393362 - RNA, 19 nt, Homo sapiens
  misc_RNA (1)...(19): siRNA sense strand
gcugacagaagagcagaaa

SEQ ID NO: 393363 - RNA, 19 nt, Homo sapiens
  misc_RNA (1)...(19): siRNA sense strand
augaugaguuccuggaguu

SEQ ID NO: 393364 - RNA, 19 nt, Homo sapiens
  misc_RNA (1)...(19): siRNA sense strand
ggacggagacaagaacaac

SEQ ID NO: 393365 - RNA, 19 nt, Homo sapiens
  misc_RNA (1)...(19): siRNA sense strand
ucugaccucuuccgcaugu

SEQ ID NO: 393366 - RNA, 19 nt, Homo sapiens
  misc_RNA (1)...(19): siRNA sense strand
cgacaucgaggagcucaug

SEQ ID NO: 393367 - RNA, 19 nt, Homo sapiens
  misc_RNA (1)...(19): siRNA sense strand
gcaaggugaugaggaugcu

SEQ ID NO: 393368 - RNA, 19 nt, Homo sapiens
  misc_RNA (1)...(19): siRNA sense strand
cgguagagcagcugacaga

SEQ ID NO: 393369 - RNA, 19 nt, Homo sapiens
  misc_RNA (1)...(19): siRNA sense strand
cuggaugagcugaagauaa

SEQ ID NO: 393370 - RNA, 19 nt, Homo sapiens
  misc_RNA (1)...(19): siRNA sense strand
cgaccuggaugagcugaag

SEQ ID NO: 393371 - RNA, 19 nt, Homo sapiens
  misc_RNA (1)...(19): siRNA sense strand
ugaccucuuccgcauguuu

SEQ ID NO: 393372 - RNA, 19 nt, Homo sapiens
  misc_RNA (1)...(19): siRNA sense strand
caugaaggacggagacaag

SEQ ID NO: 393373 - RNA, 19 nt, Homo sapiens
  misc_RNA (1)...(19): siRNA sense strand
cgguggacuuugaugaguu

SEQ ID NO: 393374 - RNA, 19 nt, Homo sapiens
  misc_RNA (1)...(19): siRNA sense strand
ucacggaggacgacaucga

SEQ ID NO: 393375 - RNA, 19 nt, Homo sapiens
  misc_RNA (1)...(19): siRNA sense strand
cugaggaggagcugucuga

SEQ ID NO: 393376 - RNA, 19 nt, Homo sapiens
  misc_RNA (1)...(19): siRNA sense strand
gaggagcugcaggagauga

SEQ ID NO: 393377 - RNA, 19 nt, Homo sapiens
  misc_RNA (1)...(19): siRNA sense strand
cagcggcacgguggacuuu

SEQ ID NO: 393378 - RNA, 19 nt, Homo sapiens
  misc_RNA (1)...(19): siRNA sense strand
gcacaucgcugaggauuca

SEQ ID NO: 393379 - RNA, 19 nt, Homo sapiens
  misc_RNA (1)...(19): siRNA sense strand
gaaggaggcccaggagaaa

SEQ ID NO: 393380 - RNA, 19 nt, Homo sapiens
  misc_RNA (1)...(19): siRNA sense strand
ggauucagaccgcaaauau

SEQ ID NO: 393381 - RNA, 19 nt, Homo sapiens
  misc_RNA (1)...(19): siRNA sense strand
gaugagagcgagagaggaa

SEQ ID NO: 393382 - RNA, 19 nt, Homo sapiens
  misc_RNA (1)...(19): siRNA sense strand
gaagaggagaucaaacugu

SEQ ID NO: 393383 - RNA, 19 nt, Homo sapiens
  misc_RNA (1)...(19): siRNA sense strand
aagaggagaucaaacuguu

SEQ ID NO: 393384 - RNA, 19 nt, Homo sapiens
  misc_RNA (1)...(19): siRNA sense strand
ccaccaaagaagauaaaua

SEQ ID NO: 393385 - RNA, 19 nt, Homo sapiens
  misc_RNA (1)...(19): siRNA sense strand
aaccaucgaugaccuagaa

SEQ ID NO: 393386 - RNA, 19 nt, Homo sapiens
  misc_RNA (1)...(19): siRNA sense strand
gagaagaaggccacugaug

SEQ ID NO: 393387 - RNA, 19 nt, Homo sapiens
  misc_RNA (1)...(19): siRNA sense strand
ggaggagaacgucgagauu

SEQ ID NO: 393388 - RNA, 19 nt, Homo sapiens
  misc_RNA (1)...(19): siRNA sense strand
gacagaggaugagguggaa

SEQ ID NO: 393389 - RNA, 19 nt, Homo sapiens
  misc_RNA (1)...(19): siRNA sense strand
ugaaggaggcccaggagaa

SEQ ID NO: 393390 - RNA, 19 nt, Homo sapiens
  misc_RNA (1)...(19): siRNA sense strand
gaagaaggccacugaugcu

SEQ ID NO: 393391 - RNA, 19 nt, Homo sapiens
  misc_RNA (1)...(19): siRNA sense strand
agaggucuguggcaaaguu

SEQ ID NO: 393392 - RNA, 19 nt, Homo sapiens
  misc_RNA (1)...(19): siRNA sense strand
ggaacucaacaaccuguga

SEQ ID NO: 393393 - RNA, 19 nt, Homo sapiens
  misc_RNA (1)...(19): siRNA sense strand
cuacagcccugcagaagcu

SEQ ID NO: 393394 - RNA, 19 nt, Homo sapiens
  misc_RNA (1)...(19): siRNA sense strand
ucaaacuguuggaggagaa

SEQ ID NO: 393395 - RNA, 19 nt, Homo sapiens
  misc_RNA (1)...(19): siRNA sense strand
agaagaagaugcagaugcu

SEQ ID NO: 393396 - RNA, 19 nt, Homo sapiens
  misc_RNA (1)...(19): siRNA sense strand
augaagagguggccaggaa

SEQ ID NO: 393397 - RNA, 19 nt, Homo sapiens
  misc_RNA (1)...(19): siRNA sense strand
cagcaggcccuccagaaga

SEQ ID NO: 393398 - RNA, 19 nt, Homo sapiens
  misc_RNA (1)...(19): siRNA sense strand
gaggagaacgucgagauuc

SEQ ID NO: 393399 - RNA, 19 nt, Homo sapiens
  misc_RNA (1)...(19): siRNA sense strand
ccgagaaggcggcugauga

SEQ ID NO: 393400 - RNA, 19 nt, Homo sapiens
  misc_RNA (1)...(19): siRNA sense strand
cgagaggucuguggcaaag

SEQ ID NO: 393401 - RNA, 19 nt, Homo sapiens
  misc_RNA (1)...(19): siRNA sense strand
ucaagaagaagaugcagau

SEQ ID NO: 393402 - RNA, 19 nt, Homo sapiens
  misc_RNA (1)...(19): siRNA sense strand
auucagaccgcaaauauga

SEQ ID NO: 393403 - RNA, 19 nt, Homo sapiens
  misc_RNA (1)...(19): siRNA sense strand
agauggaacugcaggagau

SEQ ID NO: 393404 - RNA, 19 nt, Homo sapiens
  misc_RNA (1)...(19): siRNA sense strand
ggccgaagccgacaagaag

SEQ ID NO: 393405 - RNA, 19 nt, Homo sapiens
  misc_RNA (1)...(19): siRNA sense strand
gaaggaggccaagcacauc

SEQ ID NO: 393406 - RNA, 19 nt, Homo sapiens
  misc_RNA (1)...(19): siRNA sense strand
aggaugagguggaaaagua

SEQ ID NO: 393407 - RNA, 19 nt, Homo sapiens
  misc_RNA (1)...(19): siRNA sense strand
aggagaacgucgagauuca

SEQ ID NO: 393408 - RNA, 19 nt, Homo sapiens
  misc_RNA (1)...(19): siRNA sense strand
ugcugaagcuggacaagga

SEQ ID NO: 393409 - RNA, 19 nt, Homo sapiens
  misc_RNA (1)...(19): siRNA sense strand
caugaaggaugaggagaag

SEQ ID NO: 393410 - RNA, 19 nt, Homo sapiens
  misc_RNA (1)...(19): siRNA sense strand
ccgagaagaaggccacuga

SEQ ID NO: 393411 - RNA, 19 nt, Homo sapiens
  misc_RNA (1)...(19): siRNA sense strand
ccaugaaggaugaggagaa

SEQ ID NO: 393412 - RNA, 19 nt, Homo sapiens
  misc_RNA (1)...(19): siRNA sense strand
ugaaggaugaggagaagau

SEQ ID NO: 393413 - RNA, 19 nt, Homo sapiens
  misc_RNA (1)...(19): siRNA sense strand
ugaaggaggccaagcacau

SEQ ID NO: 393414 - RNA, 19 nt, Homo sapiens
  misc_RNA (1)...(19): siRNA sense strand
gaaggaugaggagaagaug

SEQ ID NO: 393415 - RNA, 19 nt, Homo sapiens
  misc_RNA (1)...(19): siRNA sense strand
gauucagaccgcaaauaug

SEQ ID NO: 393416 - RNA, 19 nt, Homo sapiens
  misc_RNA (1)...(19): siRNA sense strand
agcaggcccuccagaagaa

SEQ ID NO: 393417 - RNA, 19 nt, Homo sapiens
  misc_RNA (1)...(19): siRNA sense strand
gaaaaccaucgaugaccua

SEQ ID NO: 393418 - RNA, 19 nt, Homo sapiens
  misc_RNA (1)...(19): siRNA sense strand
cgagaaggcggcugaugag

SEQ ID NO: 393419 - RNA, 19 nt, Homo sapiens
  misc_RNA (1)...(19): siRNA sense strand
gagaaggcggcugaugaga

SEQ ID NO: 393420 - RNA, 19 nt, Homo sapiens
  misc_RNA (1)...(19): siRNA sense strand
uggagcaggccgagaagaa

SEQ ID NO: 393421 - RNA, 19 nt, Homo sapiens
  misc_RNA (1)...(19): siRNA sense strand
gcugagacccgagcagagu

SEQ ID NO: 393422 - RNA, 19 nt, Homo sapiens
  misc_RNA (1)...(19): siRNA sense strand
gaagcuggugauccuggaa

SEQ ID NO: 393423 - RNA, 19 nt, Homo sapiens
  misc_RNA (1)...(19): siRNA sense strand
ggagcaggccgagaagaag

SEQ ID NO: 393424 - RNA, 19 nt, Homo sapiens
  misc_RNA (1)...(19): siRNA sense strand
ugagacccgagcagaguuu

SEQ ID NO: 393425 - RNA, 19 nt, Homo sapiens
  misc_RNA (1)...(19): siRNA sense strand
gagagcgagagaggaauga

SEQ ID NO: 393426 - RNA, 19 nt, Homo sapiens
  misc_RNA (1)...(19): siRNA sense strand
agaagaugcagaugcugaa

SEQ ID NO: 393427 - RNA, 19 nt, Homo sapiens
  misc_RNA (1)...(19): siRNA sense strand
gagcgagagaggaaugaag

SEQ ID NO: 393428 - RNA, 19 nt, Homo sapiens
  misc_RNA (1)...(19): siRNA sense strand
ggacaaaucugaccugaaa

SEQ ID NO: 393429 - RNA, 19 nt, Homo sapiens
  misc_RNA (1)...(19): siRNA sense strand
gagcaaaguuucaaaguau

SEQ ID NO: 393430 - RNA, 19 nt, Homo sapiens
  misc_RNA (1)...(19): siRNA sense strand
gaacagaucguguauugaa

SEQ ID NO: 393431 - RNA, 19 nt, Homo sapiens
  misc_RNA (1)...(19): siRNA sense strand
uggaauagcuacucaauuu

SEQ ID NO: 393432 - RNA, 19 nt, Homo sapiens
  misc_RNA (1)...(19): siRNA sense strand
gaucguguauugaaacaua

SEQ ID NO: 393433 - RNA, 19 nt, Homo sapiens
  misc_RNA (1)...(19): siRNA sense strand
gaaaugagacaacaggaua

SEQ ID NO: 393434 - RNA, 19 nt, Homo sapiens
  misc_RNA (1)...(19): siRNA sense strand
ccaccaagcuuaccaaaug

SEQ ID NO: 393435 - RNA, 19 nt, Homo sapiens
  misc_RNA (1)...(19): siRNA sense strand
cagaacagaucguguauug

SEQ ID NO: 393436 - RNA, 19 nt, Homo sapiens
  misc_RNA (1)...(19): siRNA sense strand
ggaaacacaugaaagacuu

SEQ ID NO: 393437 - RNA, 19 nt, Homo sapiens
  misc_RNA (1)...(19): siRNA sense strand
gaugaaguguuacaagaaa

SEQ ID NO: 393438 - RNA, 19 nt, Homo sapiens
  misc_RNA (1)...(19): siRNA sense strand
gcacugcaaugcugccuuu

SEQ ID NO: 393439 - RNA, 19 nt, Homo sapiens
  misc_RNA (1)...(19): siRNA sense strand
ggacuacaguaugcacuua

SEQ ID NO: 393440 - RNA, 19 nt, Homo sapiens
  misc_RNA (1)...(19): siRNA sense strand
aaacguaugugccaugaaa

SEQ ID NO: 393441 - RNA, 19 nt, Homo sapiens
  misc_RNA (1)...(19): siRNA sense strand
gaagaugcgucaggagaaa

SEQ ID NO: 393442 - RNA, 19 nt, Homo sapiens
  misc_RNA (1)...(19): siRNA sense strand
gcacuuaaugucccuauaa

SEQ ID NO: 393443 - RNA, 19 nt, Homo sapiens
  misc_RNA (1)...(19): siRNA sense strand
gaggauggaucacuugguu

SEQ ID NO: 393444 - RNA, 19 nt, Homo sapiens
  misc_RNA (1)...(19): siRNA sense strand
gcaggaauacuccaaguuu

SEQ ID NO: 393445 - RNA, 19 nt, Homo sapiens
  misc_RNA (1)...(19): siRNA sense strand
gagauauccuucaguguug

SEQ ID NO: 393446 - RNA, 19 nt, Homo sapiens
  misc_RNA (1)...(19): siRNA sense strand
gaaauacacccaccuaagu

SEQ ID NO: 393447 - RNA, 19 nt, Homo sapiens
  misc_RNA (1)...(19): siRNA sense strand
ugaggaagauucuggcuuu

SEQ ID NO: 393448 - RNA, 19 nt, Homo sapiens
  misc_RNA (1)...(19): siRNA sense strand
cuggaaggauuguuucuua

SEQ ID NO: 393449 - RNA, 19 nt, Homo sapiens
  misc_RNA (1)...(19): siRNA sense strand
ggaauagcuacucaauuua

SEQ ID NO: 393450 - RNA, 19 nt, Homo sapiens
  misc_RNA (1)...(19): siRNA sense strand
agaauaugcuguugaaaug

SEQ ID NO: 393451 - RNA, 19 nt, Homo sapiens
  misc_RNA (1)...(19): siRNA sense strand
caagcauccucaucagaua

SEQ ID NO: 393452 - RNA, 19 nt, Homo sapiens
  misc_RNA (1)...(19): siRNA sense strand
gaacaacuccagauaaguc

SEQ ID NO: 393453 - RNA, 19 nt, Homo sapiens
  misc_RNA (1)...(19): siRNA sense strand
ggacagaacuagccaaaau

SEQ ID NO: 393454 - RNA, 19 nt, Homo sapiens
  misc_RNA (1)...(19): siRNA sense strand
cagaugaaguguuacaaga

SEQ ID NO: 393455 - RNA, 19 nt, Homo sapiens
  misc_RNA (1)...(19): siRNA sense strand
acaagaaagugaaaugaga

SEQ ID NO: 393456 - RNA, 19 nt, Homo sapiens
  misc_RNA (1)...(19): siRNA sense strand
gaacauugacgacaaacug

SEQ ID NO: 393457 - RNA, 19 nt, Homo sapiens
  misc_RNA (1)...(19): siRNA sense strand
gaauuucccuuggugaaug

SEQ ID NO: 393458 - RNA, 19 nt, Homo sapiens
  misc_RNA (1)...(19): siRNA sense strand
uaagaacaacuccagauaa

SEQ ID NO: 393459 - RNA, 19 nt, Homo sapiens
  misc_RNA (1)...(19): siRNA sense strand
agagcaaaguuucaaagua

SEQ ID NO: 393460 - RNA, 19 nt, Homo sapiens
  misc_RNA (1)...(19): siRNA sense strand
ggaaggauuguuucuuaaa

SEQ ID NO: 393461 - RNA, 19 nt, Homo sapiens
  misc_RNA (1)...(19): siRNA sense strand
gauccuugcugcagaugaa

SEQ ID NO: 393462 - RNA, 19 nt, Homo sapiens
  misc_RNA (1)...(19): siRNA sense strand
gauggaaacacaugaaaga

SEQ ID NO: 393463 - RNA, 19 nt, Homo sapiens
  misc_RNA (1)...(19): siRNA sense strand
guaaaccugugcauaguag

SEQ ID NO: 393464 - RNA, 19 nt, Homo sapiens
  misc_RNA (1)...(19): siRNA sense strand
uaauagagcugggaugaca

SEQ ID NO: 393465 - RNA, 19 nt, Homo sapiens
  misc_RNA (1)...(19): siRNA sense strand
gauaauagagcugggauga

SEQ ID NO: 393466 - RNA, 19 nt, Homo sapiens
  misc_RNA (1)...(19): siRNA sense strand
gcacugaauguggagauua

SEQ ID NO: 393467 - RNA, 19 nt, Homo sapiens
  misc_RNA (1)...(19): siRNA sense strand
gagacaacaggauaugaua

SEQ ID NO: 393468 - RNA, 19 nt, Homo sapiens
  misc_RNA (1)...(19): siRNA sense strand
uugaauagcccgagccuua

SEQ ID NO: 393469 - RNA, 19 nt, Homo sapiens
  misc_RNA (1)...(19): siRNA sense strand
ucagagacaugagaagauu

SEQ ID NO: 393470 - RNA, 19 nt, Homo sapiens
  misc_RNA (1)...(19): siRNA sense strand
caucuggaauggacaaaga

SEQ ID NO: 393471 - RNA, 19 nt, Homo sapiens
  misc_RNA (1)...(19): siRNA sense strand
gaagagagcaaaguuucaa

SEQ ID NO: 393472 - RNA, 19 nt, Homo sapiens
  misc_RNA (1)...(19): siRNA sense strand
ggagaaauacacccaccua

SEQ ID NO: 393473 - RNA, 19 nt, Homo sapiens
  misc_RNA (1)...(19): siRNA sense strand
gaacuaucacuuacagaga

SEQ ID NO: 393474 - RNA, 19 nt, Homo sapiens
  misc_RNA (1)...(19): siRNA sense strand
gaauagcuacucaauuuag

SEQ ID NO: 393475 - RNA, 19 nt, Homo sapiens
  misc_RNA (1)...(19): siRNA sense strand
gggaauaugcgcugaaugu

SEQ ID NO: 393476 - RNA, 19 nt, Homo sapiens
  misc_RNA (1)...(19): siRNA sense strand
gacaugcguuucauacaga

SEQ ID NO: 393477 - RNA, 19 nt, Homo sapiens
  misc_RNA (1)...(19): siRNA sense strand
aaugauuacuugccuguuu

SEQ ID NO: 393478 - RNA, 19 nt, Homo sapiens
  misc_RNA (1)...(19): siRNA sense strand
gcuacaggauucaguacuu

SEQ ID NO: 393479 - RNA, 19 nt, Homo sapiens
  misc_RNA (1)...(19): siRNA sense strand
gcagcaggcuuuggacaga

SEQ ID NO: 393480 - RNA, 19 nt, Homo sapiens
  misc_RNA (1)...(19): siRNA sense strand
cagagagccaguagacuua

SEQ ID NO: 393481 - RNA, 19 nt, Homo sapiens
  misc_RNA (1)...(19): siRNA sense strand
ggaucaagcucccaagcau

SEQ ID NO: 393482 - RNA, 19 nt, Homo sapiens
  misc_RNA (1)...(19): siRNA sense strand
gccaguagacuuacagaaa

SEQ ID NO: 393483 - RNA, 19 nt, Homo sapiens
  misc_RNA (1)...(19): siRNA sense strand
uaccacggcauccauauua

SEQ ID NO: 393484 - RNA, 19 nt, Homo sapiens
  misc_RNA (1)...(19): siRNA sense strand
uagaacgaacuaucacuua

SEQ ID NO: 393485 - RNA, 19 nt, Homo sapiens
  misc_RNA (1)...(19): siRNA sense strand
agacucuguuggaucauua

SEQ ID NO: 393486 - RNA, 19 nt, Homo sapiens
  misc_RNA (1)...(19): siRNA sense strand
gagaaauacacccaccuaa

SEQ ID NO: 393487 - RNA, 19 nt, Homo sapiens
  misc_RNA (1)...(19): siRNA sense strand
cauaagagaacucauagug

SEQ ID NO: 393488 - RNA, 19 nt, Homo sapiens
  misc_RNA (1)...(19): siRNA sense strand
cagaauaugcuguugaaau

SEQ ID NO: 393489 - RNA, 19 nt, Homo sapiens
  misc_RNA (1)...(19): siRNA sense strand
cuaagaacaacuccagaua

SEQ ID NO: 393490 - RNA, 19 nt, Homo sapiens
  misc_RNA (1)...(19): siRNA sense strand
ugagauauccuucaguguu

SEQ ID NO: 393491 - RNA, 19 nt, Homo sapiens
  misc_RNA (1)...(19): siRNA sense strand
gaacgaacuaucacuuaca

SEQ ID NO: 393492 - RNA, 19 nt, Homo sapiens
  misc_RNA (1)...(19): siRNA sense strand
ggagauccuugcugcagau

SEQ ID NO: 393493 - RNA, 19 nt, Homo sapiens
  misc_RNA (1)...(19): siRNA sense strand
ugaugaaugugguaugaga

SEQ ID NO: 393494 - RNA, 19 nt, Homo sapiens
  misc_RNA (1)...(19): siRNA sense strand
aaugaauucuccacuaaga

SEQ ID NO: 393495 - RNA, 19 nt, Homo sapiens
  misc_RNA (1)...(19): siRNA sense strand
ggagcaaaaucaaacaauu

SEQ ID NO: 393496 - RNA, 19 nt, Homo sapiens
  misc_RNA (1)...(19): siRNA sense strand
aguauaugguugcagaaua

SEQ ID NO: 393497 - RNA, 19 nt, Homo sapiens
  misc_RNA (1)...(19): siRNA sense strand
ccaguaaaccugugcauag

SEQ ID NO: 393498 - RNA, 19 nt, Homo sapiens
  misc_RNA (1)...(19): siRNA sense strand
ccacaacuggccagacuuu

SEQ ID NO: 393499 - RNA, 19 nt, Homo sapiens
  misc_RNA (1)...(19): siRNA sense strand
agggacaagugcugaauuu

SEQ ID NO: 393500 - RNA, 19 nt, Homo sapiens
  misc_RNA (1)...(19): siRNA sense strand
aagaacaacuccagauaag

SEQ ID NO: 393501 - RNA, 19 nt, Homo sapiens
  misc_RNA (1)...(19): siRNA sense strand
gcccgagccuuaacuuugu

SEQ ID NO: 393502 - RNA, 19 nt, Homo sapiens
  misc_RNA (1)...(19): siRNA sense strand
cacugaauguggagauuaa

SEQ ID NO: 393503 - RNA, 19 nt, Homo sapiens
  misc_RNA (1)...(19): siRNA sense strand
ggauggaucacuugguuug

SEQ ID NO: 393504 - RNA, 19 nt, Homo sapiens
  misc_RNA (1)...(19): siRNA sense strand
uggaaggauuguuucuuaa

SEQ ID NO: 393505 - RNA, 19 nt, Homo sapiens
  misc_RNA (1)...(19): siRNA sense strand
cgacaaacuggaaggauug

SEQ ID NO: 393506 - RNA, 19 nt, Homo sapiens
  misc_RNA (1)...(19): siRNA sense strand
uaauggacagcaugagaua

SEQ ID NO: 393507 - RNA, 19 nt, Homo sapiens
  misc_RNA (1)...(19): siRNA sense strand
uuacuugccuguuuauucu

SEQ ID NO: 393508 - RNA, 19 nt, Homo sapiens
  misc_RNA (1)...(19): siRNA sense strand
ucuuaaauguggcggcaua

SEQ ID NO: 393509 - RNA, 19 nt, Homo sapiens
  misc_RNA (1)...(19): siRNA sense strand
gcagauggaaacacaugaa

SEQ ID NO: 393510 - RNA, 19 nt, Homo sapiens
  misc_RNA (1)...(19): siRNA sense strand
cuggagagcuacaggauuc

SEQ ID NO: 393511 - RNA, 19 nt, Homo sapiens
  misc_RNA (1)...(19): siRNA sense strand
gaucauuauucccacaaag

SEQ ID NO: 393512 - RNA, 19 nt, Homo sapiens
  misc_RNA (1)...(19): siRNA sense strand
ggaucauuauucccacaaa

SEQ ID NO: 393513 - RNA, 19 nt, Homo sapiens
  misc_RNA (1)...(19): siRNA sense strand
ucagagagccaguagacuu

SEQ ID NO: 393514 - RNA, 19 nt, Homo sapiens
  misc_RNA (1)...(19): siRNA sense strand
gaauguggguaccauacgu

SEQ ID NO: 393515 - RNA, 19 nt, Homo sapiens
  misc_RNA (1)...(19): siRNA sense strand
ccauuucgcugugaugaau

SEQ ID NO: 393516 - RNA, 19 nt, Homo sapiens
  misc_RNA (1)...(19): siRNA sense strand
ugacaugcguuucauacag

SEQ ID NO: 393517 - RNA, 19 nt, Homo sapiens
  misc_RNA (1)...(19): siRNA sense strand
cugcaaugcugccuuuaga

SEQ ID NO: 393518 - RNA, 19 nt, Homo sapiens
  misc_RNA (1)...(19): siRNA sense strand
gagcagauggaaacacaug

SEQ ID NO: 393519 - RNA, 19 nt, Homo sapiens
  misc_RNA (1)...(19): siRNA sense strand
caccaagcuuaccaaauga

SEQ ID NO: 393520 - RNA, 19 nt, Homo sapiens
  misc_RNA (1)...(19): siRNA sense strand
cagauaaagccaacauguu

SEQ ID NO: 393521 - RNA, 19 nt, Homo sapiens
  misc_RNA (1)...(19): siRNA sense strand
gcuaauggacagcaugaga

SEQ ID NO: 393522 - RNA, 19 nt, Homo sapiens
  misc_RNA (1)...(19): siRNA sense strand
uaagagaagucugaaacag

SEQ ID NO: 393523 - RNA, 19 nt, Homo sapiens
  misc_RNA (1)...(19): siRNA sense strand
ccaguagacuuacagaaaa

SEQ ID NO: 393524 - RNA, 19 nt, Homo sapiens
  misc_RNA (1)...(19): siRNA sense strand
aaaugaggauggaucacuu

SEQ ID NO: 393525 - RNA, 19 nt, Homo sapiens
  misc_RNA (1)...(19): siRNA sense strand
caggaauacuccaaguuuc

SEQ ID NO: 393526 - RNA, 19 nt, Homo sapiens
  misc_RNA (1)...(19): siRNA sense strand
augauuacuugccuguuua

SEQ ID NO: 393527 - RNA, 19 nt, Homo sapiens
  misc_RNA (1)...(19): siRNA sense strand
gagaacucauaguggagaa

SEQ ID NO: 393528 - RNA, 19 nt, Homo sapiens
  misc_RNA (1)...(19): siRNA sense strand
gcaaagcugugaagcaagu

SEQ ID NO: 393529 - RNA, 19 nt, Homo sapiens
  misc_RNA (1)...(19): siRNA sense strand
gguggacgguguucacuuu

SEQ ID NO: 393530 - RNA, 19 nt, Homo sapiens
  misc_RNA (1)...(19): siRNA sense strand
gaacgagaaugaggaguca

SEQ ID NO: 393531 - RNA, 19 nt, Homo sapiens
  misc_RNA (1)...(19): siRNA sense strand
ggacuucuaucagcaguau

SEQ ID NO: 393532 - RNA, 19 nt, Homo sapiens
  misc_RNA (1)...(19): siRNA sense strand
ggugggagcugcagugaca

SEQ ID NO: 393533 - RNA, 19 nt, Homo sapiens
  misc_RNA (1)...(19): siRNA sense strand
ccaagcacaucaucauuca

SEQ ID NO: 393534 - RNA, 19 nt, Homo sapiens
  misc_RNA (1)...(19): siRNA sense strand
gcacagccagcaugucuug

SEQ ID NO: 393535 - RNA, 19 nt, Homo sapiens
  misc_RNA (1)...(19): siRNA sense strand
ggacgcagcacacccauag

SEQ ID NO: 393536 - RNA, 19 nt, Homo sapiens
  misc_RNA (1)...(19): siRNA sense strand
agagaagccuuaccugugu

SEQ ID NO: 393537 - RNA, 19 nt, Homo sapiens
  misc_RNA (1)...(19): siRNA sense strand
gugcagagcagacagagaa

SEQ ID NO: 393538 - RNA, 19 nt, Homo sapiens
  misc_RNA (1)...(19): siRNA sense strand
ugaagcaagugcaggaaga

SEQ ID NO: 393539 - RNA, 19 nt, Homo sapiens
  misc_RNA (1)...(19): siRNA sense strand
ggacgguguucacuuuaag

SEQ ID NO: 393540 - RNA, 19 nt, Homo sapiens
  misc_RNA (1)...(19): siRNA sense strand
gaagagcuaccgccucauc

SEQ ID NO: 393541 - RNA, 19 nt, Homo sapiens
  misc_RNA (1)...(19): siRNA sense strand
ccaguuggccaaucauauu

SEQ ID NO: 393542 - RNA, 19 nt, Homo sapiens
  misc_RNA (1)...(19): siRNA sense strand
gacagacgcggacuucuau

SEQ ID NO: 393543 - RNA, 19 nt, Homo sapiens
  misc_RNA (1)...(19): siRNA sense strand
agacagacgcggacuucua

SEQ ID NO: 393544 - RNA, 19 nt, Homo sapiens
  misc_RNA (1)...(19): siRNA sense strand
gcagcaaggccuucgugaa

SEQ ID NO: 393545 - RNA, 19 nt, Homo sapiens
  misc_RNA (1)...(19): siRNA sense strand
ccacuuuccuccaaaugca

SEQ ID NO: 393546 - RNA, 19 nt, Homo sapiens
  misc_RNA (1)...(19): siRNA sense strand
caagaaguucaaccaggua

SEQ ID NO: 393547 - RNA, 19 nt, Homo sapiens
  misc_RNA (1)...(19): siRNA sense strand
ccgaggagaacgagaauga

SEQ ID NO: 393548 - RNA, 19 nt, Homo sapiens
  misc_RNA (1)...(19): siRNA sense strand
gcaaggccuucgugaacgu

SEQ ID NO: 393549 - RNA, 19 nt, Homo sapiens
  misc_RNA (1)...(19): siRNA sense strand
agccuuaccugugugauaa

SEQ ID NO: 393550 - RNA, 19 nt, Homo sapiens
  misc_RNA (1)...(19): siRNA sense strand
ggacaagagagccaaagag

SEQ ID NO: 393551 - RNA, 19 nt, Homo sapiens
  misc_RNA (1)...(19): siRNA sense strand
cccuacagcuccugaaugu

SEQ ID NO: 393552 - RNA, 19 nt, Homo sapiens
  misc_RNA (1)...(19): siRNA sense strand
uggacgguguucacuuuaa

SEQ ID NO: 393553 - RNA, 19 nt, Homo sapiens
  misc_RNA (1)...(19): siRNA sense strand
gaagcaagugcaggaagaa

SEQ ID NO: 393554 - RNA, 19 nt, Homo sapiens
  misc_RNA (1)...(19): siRNA sense strand
gcaaggcaggcaucaagau

SEQ ID NO: 393555 - RNA, 19 nt, Homo sapiens
  misc_RNA (1)...(19): siRNA sense strand
caacauccgcccacacaag

SEQ ID NO: 393556 - RNA, 19 nt, Homo sapiens
  misc_RNA (1)...(19): siRNA sense strand
gacaacauccgcccacaca

SEQ ID NO: 393557 - RNA, 19 nt, Homo sapiens
  misc_RNA (1)...(19): siRNA sense strand
gcccugagaacguggauga

SEQ ID NO: 393558 - RNA, 19 nt, Homo sapiens
  misc_RNA (1)...(19): siRNA sense strand
gcagagaccuccccuacag

SEQ ID NO: 393559 - RNA, 19 nt, Homo sapiens
  misc_RNA (1)...(19): siRNA sense strand
gugcaaggcccaugagaag

SEQ ID NO: 393560 - RNA, 19 nt, Homo sapiens
  misc_RNA (1)...(19): siRNA sense strand
cugagaacguggaugaugu

SEQ ID NO: 393561 - RNA, 19 nt, Homo sapiens
  misc_RNA (1)...(19): siRNA sense strand
gggcaaggcaggcaucaag

SEQ ID NO: 393562 - RNA, 19 nt, Homo sapiens
  misc_RNA (1)...(19): siRNA sense strand
cagccagcaugucuuggaa

SEQ ID NO: 393563 - RNA, 19 nt, Homo sapiens
  misc_RNA (1)...(19): siRNA sense strand
acacuggagagaagccuua

SEQ ID NO: 393564 - RNA, 19 nt, Homo sapiens
  misc_RNA (1)...(19): siRNA sense strand
gccagcaugucuuggaaca

SEQ ID NO: 393565 - RNA, 19 nt, Homo sapiens
  misc_RNA (1)...(19): siRNA sense strand
cagcaaggccuucgugaac

SEQ ID NO: 393566 - RNA, 19 nt, Homo sapiens
  misc_RNA (1)...(19): siRNA sense strand
gcaaggcccaugagaagac

SEQ ID NO: 393567 - RNA, 19 nt, Homo sapiens
  misc_RNA (1)...(19): siRNA sense strand
gaaggccgagaucagcaaa

SEQ ID NO: 393568 - RNA, 19 nt, Homo sapiens
  misc_RNA (1)...(19): siRNA sense strand
uuaccugugugauaagugu

SEQ ID NO: 393569 - RNA, 19 nt, Homo sapiens
  misc_RNA (1)...(19): siRNA sense strand
gagagugugggaagcaguu

SEQ ID NO: 393570 - RNA, 19 nt, Homo sapiens
  misc_RNA (1)...(19): siRNA sense strand
ugcugaaccugcacaagaa

SEQ ID NO: 393571 - RNA, 19 nt, Homo sapiens
  misc_RNA (1)...(19): siRNA sense strand
gcagcgaguacuucaagau

SEQ ID NO: 393572 - RNA, 19 nt, Homo sapiens
  misc_RNA (1)...(19): siRNA sense strand
ccaaaugcaggacaucauc

SEQ ID NO: 393573 - RNA, 19 nt, Homo sapiens
  misc_RNA (1)...(19): siRNA sense strand
caaaugcaggacaucauca

SEQ ID NO: 393574 - RNA, 19 nt, Homo sapiens
  misc_RNA (1)...(19): siRNA sense strand
gggacaagagagccaaaga

SEQ ID NO: 393575 - RNA, 19 nt, Homo sapiens
  misc_RNA (1)...(19): siRNA sense strand
gccaugcccucaagucacu

SEQ ID NO: 393576 - RNA, 19 nt, Homo sapiens
  misc_RNA (1)...(19): siRNA sense strand
gaacuucaagcggcacauc

SEQ ID NO: 393577 - RNA, 19 nt, Homo sapiens
  misc_RNA (1)...(19): siRNA sense strand
gcacguccgcauucacaca

SEQ ID NO: 393578 - RNA, 19 nt, Homo sapiens
  misc_RNA (1)...(19): siRNA sense strand
ggacugcggcaagcucuuc

SEQ ID NO: 393579 - RNA, 19 nt, Homo sapiens
  misc_RNA (1)...(19): siRNA sense strand
gcgaguacuucaagaugcu

SEQ ID NO: 393580 - RNA, 19 nt, Homo sapiens
  misc_RNA (1)...(19): siRNA sense strand
cugcugaaccugcacaaga

SEQ ID NO: 393581 - RNA, 19 nt, Homo sapiens
  misc_RNA (1)...(19): siRNA sense strand
cagcacagccagcaugucu

SEQ ID NO: 393582 - RNA, 19 nt, Homo sapiens
  misc_RNA (1)...(19): siRNA sense strand
gcagugacagccgaugaga

SEQ ID NO: 393583 - RNA, 19 nt, Homo sapiens
  misc_RNA (1)...(19): siRNA sense strand
cagcgaguacuucaagaug

SEQ ID NO: 393584 - RNA, 19 nt, Homo sapiens
  misc_RNA (1)...(19): siRNA sense strand
ugagaagccaugccagugu

SEQ ID NO: 393585 - RNA, 19 nt, Homo sapiens
  misc_RNA (1)...(19): siRNA sense strand
ccaacacucacauccucua

SEQ ID NO: 393586 - RNA, 19 nt, Homo sapiens
  misc_RNA (1)...(19): siRNA sense strand
caaggcaggcaucaagauc

SEQ ID NO: 393587 - RNA, 19 nt, Homo sapiens
  misc_RNA (1)...(19): siRNA sense strand
gcuccgucauccacaagug

SEQ ID NO: 393588 - RNA, 19 nt, Homo sapiens
  misc_RNA (1)...(19): siRNA sense strand
gcacaucaucauucacacu

SEQ ID NO: 393589 - RNA, 19 nt, Homo sapiens
  misc_RNA (1)...(19): siRNA sense strand
ugaaggcccaccugaagau

SEQ ID NO: 393590 - RNA, 19 nt, Homo sapiens
  misc_RNA (1)...(19): siRNA sense strand
gcaagugcaggaagaagac

SEQ ID NO: 393591 - RNA, 19 nt, Homo sapiens
  misc_RNA (1)...(19): siRNA sense strand
aagccuuaccugugugaua

SEQ ID NO: 393592 - RNA, 19 nt, Homo sapiens
  misc_RNA (1)...(19): siRNA sense strand
ccagacagacgcggacuuc

SEQ ID NO: 393593 - RNA, 19 nt, Homo sapiens
  misc_RNA (1)...(19): siRNA sense strand
ccacaagugcgaggacugu

SEQ ID NO: 393594 - RNA, 19 nt, Homo sapiens
  misc_RNA (1)...(19): siRNA sense strand
guggacgguguucacuuua

SEQ ID NO: 393595 - RNA, 19 nt, Homo sapiens
  misc_RNA (1)...(19): siRNA sense strand
aagcacaucaucauucaca

SEQ ID NO: 393596 - RNA, 19 nt, Homo sapiens
  misc_RNA (1)...(19): siRNA sense strand
ggagugcagcaaggccuuu

SEQ ID NO: 393597 - RNA, 19 nt, Homo sapiens
  misc_RNA (1)...(19): siRNA sense strand
gagccaaagaggagaaggu

SEQ ID NO: 393598 - RNA, 19 nt, Homo sapiens
  misc_RNA (1)...(19): siRNA sense strand
guccaagcacaucaucauu

SEQ ID NO: 393599 - RNA, 19 nt, Homo sapiens
  misc_RNA (1)...(19): siRNA sense strand
ccugaaggcccaccugaag

SEQ ID NO: 393600 - RNA, 19 nt, Homo sapiens
  misc_RNA (1)...(19): siRNA sense strand
gggaagaggagcaaaagga

SEQ ID NO: 393601 - RNA, 19 nt, Homo sapiens
  misc_RNA (1)...(19): siRNA sense strand
gggaaagacuucaguagua

SEQ ID NO: 393602 - RNA, 19 nt, Homo sapiens
  misc_RNA (1)...(19): siRNA sense strand
gcagaagagucgcagaaua

SEQ ID NO: 393603 - RNA, 19 nt, Homo sapiens
  misc_RNA (1)...(19): siRNA sense strand
caacuuaugugccaacaaa

SEQ ID NO: 393604 - RNA, 19 nt, Homo sapiens
  misc_RNA (1)...(19): siRNA sense strand
ggaaagacuucaguaguaa

SEQ ID NO: 393605 - RNA, 19 nt, Homo sapiens
  misc_RNA (1)...(19): siRNA sense strand
gaaauuacgccuucuugua

SEQ ID NO: 393606 - RNA, 19 nt, Homo sapiens
  misc_RNA (1)...(19): siRNA sense strand
gagaaacccuauaguugua

SEQ ID NO: 393607 - RNA, 19 nt, Homo sapiens
  misc_RNA (1)...(19): siRNA sense strand
gguaaaggauucaguuuga

SEQ ID NO: 393608 - RNA, 19 nt, Homo sapiens
  misc_RNA (1)...(19): siRNA sense strand
ggaaaacuaugucuucuua

SEQ ID NO: 393609 - RNA, 19 nt, Homo sapiens
  misc_RNA (1)...(19): siRNA sense strand
ggaaaucacuacucauugu

SEQ ID NO: 393610 - RNA, 19 nt, Homo sapiens
  misc_RNA (1)...(19): siRNA sense strand
cgaaacaguucaugggaua

SEQ ID NO: 393611 - RNA, 19 nt, Homo sapiens
  misc_RNA (1)...(19): siRNA sense strand
gagagaaacuacaugaaug

SEQ ID NO: 393612 - RNA, 19 nt, Homo sapiens
  misc_RNA (1)...(19): siRNA sense strand
acacaggaaugaaaccuua

SEQ ID NO: 393613 - RNA, 19 nt, Homo sapiens
  misc_RNA (1)...(19): siRNA sense strand
gagagaagccuuaugaaug

SEQ ID NO: 393614 - RNA, 19 nt, Homo sapiens
  misc_RNA (1)...(19): siRNA sense strand
ggaaugaaaccuuauguau

SEQ ID NO: 393615 - RNA, 19 nt, Homo sapiens
  misc_RNA (1)...(19): siRNA sense strand
ggaaagccuucauuuggaa

SEQ ID NO: 393616 - RNA, 19 nt, Homo sapiens
  misc_RNA (1)...(19): siRNA sense strand
gggaaagucuucaguagga

SEQ ID NO: 393617 - RNA, 19 nt, Homo sapiens
  misc_RNA (1)...(19): siRNA sense strand
gagagaaacccuauaguug

SEQ ID NO: 393618 - RNA, 19 nt, Homo sapiens
  misc_RNA (1)...(19): siRNA sense strand
ucagagaacucauguagau

SEQ ID NO: 393619 - RNA, 19 nt, Homo sapiens
  misc_RNA (1)...(19): siRNA sense strand
ggaugcagcuguugugaga

SEQ ID NO: 393620 - RNA, 19 nt, Homo sapiens
  misc_RNA (1)...(19): siRNA sense strand
gcacaucagagaacacaua

SEQ ID NO: 393621 - RNA, 19 nt, Homo sapiens
  misc_RNA (1)...(19): siRNA sense strand
ggagagaaacccuauaguu

SEQ ID NO: 393622 - RNA, 19 nt, Homo sapiens
  misc_RNA (1)...(19): siRNA sense strand
ggacagaaaccauaugugu

SEQ ID NO: 393623 - RNA, 19 nt, Homo sapiens
  misc_RNA (1)...(19): siRNA sense strand
gguuuaaagucacagcuua

SEQ ID NO: 393624 - RNA, 19 nt, Homo sapiens
  misc_RNA (1)...(19): siRNA sense strand
gagaagagcuguguauggu

SEQ ID NO: 393625 - RNA, 19 nt, Homo sapiens
  misc_RNA (1)...(19): siRNA sense strand
gggaaagccuucaguuuua

SEQ ID NO: 393626 - RNA, 19 nt, Homo sapiens
  misc_RNA (1)...(19): siRNA sense strand
gaaaucacagcucauugua

SEQ ID NO: 393627 - RNA, 19 nt, Homo sapiens
  misc_RNA (1)...(19): siRNA sense strand
gaaaccauaugaaugcaau

SEQ ID NO: 393628 - RNA, 19 nt, Homo sapiens
  misc_RNA (1)...(19): siRNA sense strand
guacaucagagaauucaua

SEQ ID NO: 393629 - RNA, 19 nt, Homo sapiens
  misc_RNA (1)...(19): siRNA sense strand
gggaaagccuucauuugga

SEQ ID NO: 393630 - RNA, 19 nt, Homo sapiens
  misc_RNA (1)...(19): siRNA sense strand
caacacaccaaaccugaua

SEQ ID NO: 393631 - RNA, 19 nt, Homo sapiens
  misc_RNA (1)...(19): siRNA sense strand
caagagagaaaccauauga

SEQ ID NO: 393632 - RNA, 19 nt, Homo sapiens
  misc_RNA (1)...(19): siRNA sense strand
ggucaacccuuauaaaugc

SEQ ID NO: 393633 - RNA, 19 nt, Homo sapiens
  misc_RNA (1)...(19): siRNA sense strand
gaaugaaaccuuauguaug

SEQ ID NO: 393634 - RNA, 19 nt, Homo sapiens
  misc_RNA (1)...(19): siRNA sense strand
uagaguggcuguuuauuuc

SEQ ID NO: 393635 - RNA, 19 nt, Homo sapiens
  misc_RNA (1)...(19): siRNA sense strand
ggaaaagccuucauuagga

SEQ ID NO: 393636 - RNA, 19 nt, Homo sapiens
  misc_RNA (1)...(19): siRNA sense strand
ggagagaaaccauaugaau

SEQ ID NO: 393637 - RNA, 19 nt, Homo sapiens
  misc_RNA (1)...(19): siRNA sense strand
ggagagaaacuacaugaau

SEQ ID NO: 393638 - RNA, 19 nt, Homo sapiens
  misc_RNA (1)...(19): siRNA sense strand
aaucagaccuguccaaaca

SEQ ID NO: 393639 - RNA, 19 nt, Homo sapiens
  misc_RNA (1)...(19): siRNA sense strand
gagcaagucauaccuuauu

SEQ ID NO: 393640 - RNA, 19 nt, Homo sapiens
  misc_RNA (1)...(19): siRNA sense strand
guacaucagagaacucaua

SEQ ID NO: 393641 - RNA, 19 nt, Homo sapiens
  misc_RNA (1)...(19): siRNA sense strand
gagcaagucauaccuuauu

SEQ ID NO: 393642 - RNA, 19 nt, Homo sapiens
  misc_RNA (1)...(19): siRNA sense strand
gggaaaaccuucucucaaa

SEQ ID NO: 393643 - RNA, 19 nt, Homo sapiens
  misc_RNA (1)...(19): siRNA sense strand
guacaggagugugauguug

SEQ ID NO: 393644 - RNA, 19 nt, Homo sapiens
  misc_RNA (1)...(19): siRNA sense strand
gaaaucacuacucauugua

SEQ ID NO: 393645 - RNA, 19 nt, Homo sapiens
  misc_RNA (1)...(19): siRNA sense strand
ggagagaagccuuaugaau

SEQ ID NO: 393646 - RNA, 19 nt, Homo sapiens
  misc_RNA (1)...(19): siRNA sense strand
aaucacagcucauuauaca

SEQ ID NO: 393647 - RNA, 19 nt, Homo sapiens
  misc_RNA (1)...(19): siRNA sense strand
aaucacagcucauuauaca

SEQ ID NO: 393648 - RNA, 19 nt, Homo sapiens
  misc_RNA (1)...(19): siRNA sense strand
caccaaaccugauaucauc

SEQ ID NO: 393649 - RNA, 19 nt, Homo sapiens
  misc_RNA (1)...(19): siRNA sense strand
ggagugugauguuggagaa

SEQ ID NO: 393650 - RNA, 19 nt, Homo sapiens
  misc_RNA (1)...(19): siRNA sense strand
gagagaaaccauaugaaug

SEQ ID NO: 393651 - RNA, 19 nt, Homo sapiens
  misc_RNA (1)...(19): siRNA sense strand
ggaagucacagcucauuau

SEQ ID NO: 393652 - RNA, 19 nt, Homo sapiens
  misc_RNA (1)...(19): siRNA sense strand
gagagaaaccauaugaaug

SEQ ID NO: 393653 - RNA, 19 nt, Homo sapiens
  misc_RNA (1)...(19): siRNA sense strand
guaaagcccuaugggugua

SEQ ID NO: 393654 - RNA, 19 nt, Homo sapiens
  misc_RNA (1)...(19): siRNA sense strand
ggagagaagccuuguaagu

SEQ ID NO: 393655 - RNA, 19 nt, Homo sapiens
  misc_RNA (1)...(19): siRNA sense strand
gagagaagccuuguaagug

SEQ ID NO: 393656 - RNA, 19 nt, Homo sapiens
  misc_RNA (1)...(19): siRNA sense strand
uugaugaucuuauggauug

SEQ ID NO: 393657 - RNA, 19 nt, Homo sapiens
  misc_RNA (1)...(19): siRNA sense strand
gaaaaucauucuuccauuc

SEQ ID NO: 393658 - RNA, 19 nt, Homo sapiens
  misc_RNA (1)...(19): siRNA sense strand
aaucauaccucauuguaca

SEQ ID NO: 393659 - RNA, 19 nt, Homo sapiens
  misc_RNA (1)...(19): siRNA sense strand
ggucccaccucuccaagaa

SEQ ID NO: 393660 - RNA, 19 nt, Homo sapiens
  misc_RNA (1)...(19): siRNA sense strand
guacaucaaagaacucauu

SEQ ID NO: 393661 - RNA, 19 nt, Homo sapiens
  misc_RNA (1)...(19): siRNA sense strand
gaaaagccuucauuaggaa

SEQ ID NO: 393662 - RNA, 19 nt, Homo sapiens
  misc_RNA (1)...(19): siRNA sense strand
cagcaagucauaccuaauu

SEQ ID NO: 393663 - RNA, 19 nt, Homo sapiens
  misc_RNA (1)...(19): siRNA sense strand
cuacaugaaugcagugaau

SEQ ID NO: 393664 - RNA, 19 nt, Homo sapiens
  misc_RNA (1)...(19): siRNA sense strand
ugggaaagcuuuugguuua

SEQ ID NO: 393665 - RNA, 19 nt, Homo sapiens
  misc_RNA (1)...(19): siRNA sense strand
guacaucagagaacccaua

SEQ ID NO: 393666 - RNA, 19 nt, Homo sapiens
  misc_RNA (1)...(19): siRNA sense strand
gaaaguauugaaucuggaa

SEQ ID NO: 393667 - RNA, 19 nt, Homo sapiens
  misc_RNA (1)...(19): siRNA sense strand
ggaaaaccuucucucaaaa

SEQ ID NO: 393668 - RNA, 19 nt, Homo sapiens
  misc_RNA (1)...(19): siRNA sense strand
uaggaauucucaacucauu

SEQ ID NO: 393669 - RNA, 19 nt, Homo sapiens
  misc_RNA (1)...(19): siRNA sense strand
caaaucacagcucauugua

SEQ ID NO: 393670 - RNA, 19 nt, Homo sapiens
  misc_RNA (1)...(19): siRNA sense strand
agucacagcuuauuauaca

SEQ ID NO: 393671 - RNA, 19 nt, Homo sapiens
  misc_RNA (1)...(19): siRNA sense strand
aaugaaaccuuauguaugc

SEQ ID NO: 393672 - RNA, 19 nt, Homo sapiens
  misc_RNA (1)...(19): siRNA sense strand
gaaaccauauguguguaau

SEQ ID NO: 393673 - RNA, 19 nt, Homo sapiens
  misc_RNA (1)...(19): siRNA sense strand
ugagcaaacuguuauugga

SEQ ID NO: 393674 - RNA, 19 nt, Homo sapiens
  misc_RNA (1)...(19): siRNA sense strand
ggagagaaaccacaugagu

SEQ ID NO: 393675 - RNA, 19 nt, Homo sapiens
  misc_RNA (1)...(19): siRNA sense strand
aaucacagcucauuguaca

SEQ ID NO: 393676 - RNA, 19 nt, Homo sapiens
  misc_RNA (1)...(19): siRNA sense strand
aaucacagcucauuguaca

SEQ ID NO: 393677 - RNA, 19 nt, Homo sapiens
  misc_RNA (1)...(19): siRNA sense strand
ccauauguguguaaugaau

SEQ ID NO: 393678 - RNA, 19 nt, Homo sapiens
  misc_RNA (1)...(19): siRNA sense strand
caggagagaagccuuguaa

SEQ ID NO: 393679 - RNA, 19 nt, Homo sapiens
  misc_RNA (1)...(19): siRNA sense strand
ccacaugagugcagggaau

SEQ ID NO: 393680 - RNA, 19 nt, Homo sapiens
  misc_RNA (1)...(19): siRNA sense strand
caggagagaagccuuauga

SEQ ID NO: 393681 - RNA, 19 nt, Homo sapiens
  misc_RNA (1)...(19): siRNA sense strand
ccauaugaaugcaaugaau

SEQ ID NO: 393682 - RNA, 19 nt, Homo sapiens
  misc_RNA (1)...(19): siRNA sense strand
gagcaaacuguuauuggaa

SEQ ID NO: 393683 - RNA, 19 nt, Homo sapiens
  misc_RNA (1)...(19): siRNA sense strand
ggaaugcgggaaauccuuu

SEQ ID NO: 393684 - RNA, 19 nt, Homo sapiens
  misc_RNA (1)...(19): siRNA sense strand
gaauagagaaaguccuaga

SEQ ID NO: 393685 - RNA, 19 nt, Homo sapiens
  misc_RNA (1)...(19): siRNA sense strand
aaccauauguguguaauga

SEQ ID NO: 393686 - RNA, 19 nt, Homo sapiens
  misc_RNA (1)...(19): siRNA sense strand
gaaagacuucaguaguaaa

SEQ ID NO: 393687 - RNA, 19 nt, Homo sapiens
  misc_RNA (1)...(19): siRNA sense strand
guccuagaguggcuguuua

SEQ ID NO: 393688 - RNA, 19 nt, Homo sapiens
  misc_RNA (1)...(19): siRNA sense strand
ucacagcucauuguacaua

SEQ ID NO: 393689 - RNA, 19 nt, Homo sapiens
  misc_RNA (1)...(19): siRNA sense strand
ggaaagucuucaguaggaa

SEQ ID NO: 393690 - RNA, 19 nt, Homo sapiens
  misc_RNA (1)...(19): siRNA sense strand
cuagaguggcuguuuauuu

SEQ ID NO: 393691 - RNA, 19 nt, Homo sapiens
  misc_RNA (1)...(19): siRNA sense strand
gaacacauacaggagagaa

SEQ ID NO: 393692 - RNA, 19 nt, Homo sapiens
  misc_RNA (1)...(19): siRNA sense strand
cagaagagucgcagaauag

SEQ ID NO: 393693 - RNA, 19 nt, Homo sapiens
  misc_RNA (1)...(19): siRNA sense strand
auacauacaaggacucaua

SEQ ID NO: 393694 - RNA, 19 nt, Homo sapiens
  misc_RNA (1)...(19): siRNA sense strand
gaaagucuucaguaggaaa

SEQ ID NO: 393695 - RNA, 19 nt, Homo sapiens
  misc_RNA (1)...(19): siRNA sense strand
agacuucaguaguaaauca

SEQ ID NO: 393696 - RNA, 19 nt, Homo sapiens
  misc_RNA (1)...(19): siRNA sense strand
gagaaaaucccuaugaaug

SEQ ID NO: 393697 - RNA, 19 nt, Homo sapiens
  misc_RNA (1)...(19): siRNA sense strand
ggaaagccuucaggagcaa

SEQ ID NO: 393698 - RNA, 19 nt, Homo sapiens
  misc_RNA (1)...(19): siRNA sense strand
gaaacccuauaguuguaau

SEQ ID NO: 393699 - RNA, 19 nt, Homo sapiens
  misc_RNA (1)...(19): siRNA sense strand
agagaagccuuaugaaugc

SEQ ID NO: 393700 - RNA, 19 nt, Homo sapiens
  misc_RNA (1)...(19): siRNA sense strand
gcaaagccuucaggagcaa

SEQ ID NO: 393701 - RNA, 19 nt, Homo sapiens
  misc_RNA (1)...(19): siRNA sense strand
gagaagcccuauaaaugua

SEQ ID NO: 393702 - RNA, 19 nt, Homo sapiens
  misc_RNA (1)...(19): siRNA sense strand
gagagaagcccuauaaaug

SEQ ID NO: 393703 - RNA, 19 nt, Homo sapiens
  misc_RNA (1)...(19): siRNA sense strand
gcacacaucuccugcaaca

SEQ ID NO: 393704 - RNA, 19 nt, Homo sapiens
  misc_RNA (1)...(19): siRNA sense strand
ggccaagucuuucgacaua

SEQ ID NO: 393705 - RNA, 19 nt, Homo sapiens
  misc_RNA (1)...(19): siRNA sense strand
guaaagaucccaugauuca

SEQ ID NO: 393706 - RNA, 19 nt, Homo sapiens
  misc_RNA (1)...(19): siRNA sense strand
aaacacaggucauaucuca

SEQ ID NO: 393707 - RNA, 19 nt, Homo sapiens
  misc_RNA (1)...(19): siRNA sense strand
gagagaagccuuacaagug

SEQ ID NO: 393708 - RNA, 19 nt, Homo sapiens
  misc_RNA (1)...(19): siRNA sense strand
gagagaagcccuaugaaug

SEQ ID NO: 393709 - RNA, 19 nt, Homo sapiens
  misc_RNA (1)...(19): siRNA sense strand
ccacagaaccuaccacuug

SEQ ID NO: 393710 - RNA, 19 nt, Homo sapiens
  misc_RNA (1)...(19): siRNA sense strand
gaagaccucucccaagaca

SEQ ID NO: 393711 - RNA, 19 nt, Homo sapiens
  misc_RNA (1)...(19): siRNA sense strand
gggaaaaccuuuauuaaga

SEQ ID NO: 393712 - RNA, 19 nt, Homo sapiens
  misc_RNA (1)...(19): siRNA sense strand
ggagagaagcccuauaaau

SEQ ID NO: 393713 - RNA, 19 nt, Homo sapiens
  misc_RNA (1)...(19): siRNA sense strand
gaagaugagcccugaaugu

SEQ ID NO: 393714 - RNA, 19 nt, Homo sapiens
  misc_RNA (1)...(19): siRNA sense strand
gaaacucaguggacucaca

SEQ ID NO: 393715 - RNA, 19 nt, Homo sapiens
  misc_RNA (1)...(19): siRNA sense strand
gagcacacaucuccugcaa

SEQ ID NO: 393716 - RNA, 19 nt, Homo sapiens
  misc_RNA (1)...(19): siRNA sense strand
ggagagaagcccuaugaau

SEQ ID NO: 393717 - RNA, 19 nt, Homo sapiens
  misc_RNA (1)...(19): siRNA sense strand
gaguuaagcccuaugaaug

SEQ ID NO: 393718 - RNA, 19 nt, Homo sapiens
  misc_RNA (1)...(19): siRNA sense strand
gaugagcccugaaugugau

SEQ ID NO: 393719 - RNA, 19 nt, Homo sapiens
  misc_RNA (1)...(19): siRNA sense strand
gaugguguguguucaagga

SEQ ID NO: 393720 - RNA, 19 nt, Homo sapiens
  misc_RNA (1)...(19): siRNA sense strand
ggcaaggucuucaaacaca

SEQ ID NO: 393721 - RNA, 19 nt, Homo sapiens
  misc_RNA (1)...(19): siRNA sense strand
ggaguuaagcccuaugaau

SEQ ID NO: 393722 - RNA, 19 nt, Homo sapiens
  misc_RNA (1)...(19): siRNA sense strand
aggaagaccucucccaaga

SEQ ID NO: 393723 - RNA, 19 nt, Homo sapiens
  misc_RNA (1)...(19): siRNA sense strand
gaucaaccauaccaaagag

SEQ ID NO: 393724 - RNA, 19 nt, Homo sapiens
  misc_RNA (1)...(19): siRNA sense strand
ggagagaagccuuacaagu

SEQ ID NO: 393725 - RNA, 19 nt, Homo sapiens
  misc_RNA (1)...(19): siRNA sense strand
ggacaagugacacaaggaa

SEQ ID NO: 393726 - RNA, 19 nt, Homo sapiens
  misc_RNA (1)...(19): siRNA sense strand
ggagagugcagcccugauu

SEQ ID NO: 393727 - RNA, 19 nt, Homo sapiens
  misc_RNA (1)...(19): siRNA sense strand
gcacuauguuguccacagu

SEQ ID NO: 393728 - RNA, 19 nt, Homo sapiens
  misc_RNA (1)...(19): siRNA sense strand
gagaagcccuaugaaugug

SEQ ID NO: 393729 - RNA, 19 nt, Homo sapiens
  misc_RNA (1)...(19): siRNA sense strand
ggagagaagcccuaugagu

SEQ ID NO: 393730 - RNA, 19 nt, Homo sapiens
  misc_RNA (1)...(19): siRNA sense strand
ggagagaagcccuuugagu

SEQ ID NO: 393731 - RNA, 19 nt, Homo sapiens
  misc_RNA (1)...(19): siRNA sense strand
gaagcccuaugaauguguu

SEQ ID NO: 393732 - RNA, 19 nt, Homo sapiens
  misc_RNA (1)...(19): siRNA sense strand
agguaaagaucccaugauu

SEQ ID NO: 393733 - RNA, 19 nt, Homo sapiens
  misc_RNA (1)...(19): siRNA sense strand
ggaccucauucgccacuuc

SEQ ID NO: 393734 - RNA, 19 nt, Homo sapiens
  misc_RNA (1)...(19): siRNA sense strand
gggaagaccuuuuacaagu

SEQ ID NO: 393735 - RNA, 19 nt, Homo sapiens
  misc_RNA (1)...(19): siRNA sense strand
aaccgcaagucauaccuua

SEQ ID NO: 393736 - RNA, 19 nt, Homo sapiens
  misc_RNA (1)...(19): siRNA sense strand
agagaagcccuauaaaugu

SEQ ID NO: 393737 - RNA, 19 nt, Homo sapiens
  misc_RNA (1)...(19): siRNA sense strand
guggagagaagcccuauga

SEQ ID NO: 393738 - RNA, 19 nt, Homo sapiens
  misc_RNA (1)...(19): siRNA sense strand
caggaugggcuaucagaaa

SEQ ID NO: 393739 - RNA, 19 nt, Homo sapiens
  misc_RNA (1)...(19): siRNA sense strand
gugcaaagagugugggaaa

SEQ ID NO: 393740 - RNA, 19 nt, Homo sapiens
  misc_RNA (1)...(19): siRNA sense strand
gaagucuccugggaagaug

SEQ ID NO: 393741 - RNA, 19 nt, Homo sapiens
  misc_RNA (1)...(19): siRNA sense strand
gaauagauccccaggagaa

SEQ ID NO: 393742 - RNA, 19 nt, Homo sapiens
  misc_RNA (1)...(19): siRNA sense strand
guggcaaggucuucaaaca

SEQ ID NO: 393743 - RNA, 19 nt, Homo sapiens
  misc_RNA (1)...(19): siRNA sense strand
agagaagcccuaugaaugu

SEQ ID NO: 393744 - RNA, 19 nt, Homo sapiens
  misc_RNA (1)...(19): siRNA sense strand
ggaucaggaugggcuauca

SEQ ID NO: 393745 - RNA, 19 nt, Homo sapiens
  misc_RNA (1)...(19): siRNA sense strand
cuaugaauguguugagugu

SEQ ID NO: 393746 - RNA, 19 nt, Homo sapiens
  misc_RNA (1)...(19): siRNA sense strand
gguguguguucaaggauug

SEQ ID NO: 393747 - RNA, 19 nt, Homo sapiens
  misc_RNA (1)...(19): siRNA sense strand
cccugaaugugaugguuua

SEQ ID NO: 393748 - RNA, 19 nt, Homo sapiens
  misc_RNA (1)...(19): siRNA sense strand
ggaaaaccuuuauuaagag

SEQ ID NO: 393749 - RNA, 19 nt, Homo sapiens
  misc_RNA (1)...(19): siRNA sense strand
guggugagaaucccuauga

SEQ ID NO: 393750 - RNA, 19 nt, Homo sapiens
  misc_RNA (1)...(19): siRNA sense strand
ucacccaccgcuccaauuu

SEQ ID NO: 393751 - RNA, 19 nt, Homo sapiens
  misc_RNA (1)...(19): siRNA sense strand
cagagggaaucucacuuca

SEQ ID NO: 393752 - RNA, 19 nt, Homo sapiens
  misc_RNA (1)...(19): siRNA sense strand
uguaacagaugugggaaga

SEQ ID NO: 393753 - RNA, 19 nt, Homo sapiens
  misc_RNA (1)...(19): siRNA sense strand
cuggagagaagcccuauaa

SEQ ID NO: 393754 - RNA, 19 nt, Homo sapiens
  misc_RNA (1)...(19): siRNA sense strand
ggaagaugagcccugaaug

SEQ ID NO: 393755 - RNA, 19 nt, Homo sapiens
  misc_RNA (1)...(19): siRNA sense strand
ggacacuucagaccaggaa

SEQ ID NO: 393756 - RNA, 19 nt, Homo sapiens
  misc_RNA (1)...(19): siRNA sense strand
cacagaaccuaccacuugu

SEQ ID NO: 393757 - RNA, 19 nt, Homo sapiens
  misc_RNA (1)...(19): siRNA sense strand
caaccauaccaaagagaaa

SEQ ID NO: 393758 - RNA, 19 nt, Homo sapiens
  misc_RNA (1)...(19): siRNA sense strand
gagcacaaaccucauucga

SEQ ID NO: 393759 - RNA, 19 nt, Homo sapiens
  misc_RNA (1)...(19): siRNA sense strand
acacaggucauaucucaug

SEQ ID NO: 393760 - RNA, 19 nt, Homo sapiens
  misc_RNA (1)...(19): siRNA sense strand
cgacauaggccaggcuuuc

SEQ ID NO: 393761 - RNA, 19 nt, Homo sapiens
  misc_RNA (1)...(19): siRNA sense strand
agaauguggccaagucuuu

SEQ ID NO: 393762 - RNA, 19 nt, Homo sapiens
  misc_RNA (1)...(19): siRNA sense strand
ccaauuuugucuugcauaa

SEQ ID NO: 393763 - RNA, 19 nt, Homo sapiens
  misc_RNA (1)...(19): siRNA sense strand
gggaagaugagcccugaau

SEQ ID NO: 393764 - RNA, 19 nt, Homo sapiens
  misc_RNA (1)...(19): siRNA sense strand
acacaucuccugcaacauc

SEQ ID NO: 393765 - RNA, 19 nt, Homo sapiens
  misc_RNA (1)...(19): siRNA sense strand
uaacaagaaacaccuccuu

SEQ ID NO: 393766 - RNA, 19 nt, Homo sapiens
  misc_RNA (1)...(19): siRNA sense strand
gguaaagaucccaugauuc

SEQ ID NO: 393767 - RNA, 19 nt, Homo sapiens
  misc_RNA (1)...(19): siRNA sense strand
acacuucagaccaggaaua

SEQ ID NO: 393768 - RNA, 19 nt, Homo sapiens
  misc_RNA (1)...(19): siRNA sense strand
ggaagaccuuuuacaagug

SEQ ID NO: 393769 - RNA, 19 nt, Homo sapiens
  misc_RNA (1)...(19): siRNA sense strand
aggaugggcuaucagaaau

SEQ ID NO: 393770 - RNA, 19 nt, Homo sapiens
  misc_RNA (1)...(19): siRNA sense strand
gaaacaucuuccucugcau

SEQ ID NO: 393771 - RNA, 19 nt, Homo sapiens
  misc_RNA (1)...(19): siRNA sense strand
ccacugaggcaaauauuuu

SEQ ID NO: 393772 - RNA, 19 nt, Homo sapiens
  misc_RNA (1)...(19): siRNA sense strand
uaaccacugaggcaaauau

SEQ ID NO: 393773 - RNA, 19 nt, Homo sapiens
  misc_RNA (1)...(19): siRNA sense strand
ucacucagcaucaaaggau

SEQ ID NO: 393774 - RNA, 19 nt, Homo sapiens
  misc_RNA (1)...(19): siRNA sense strand
ggaagaggaaaauaacuuu

SEQ ID NO: 393775 - RNA, 19 nt, Homo sapiens
  misc_RNA (1)...(19): siRNA sense strand
ucugugaccuuugaugaug

SEQ ID NO: 393776 - RNA, 19 nt, Homo sapiens
  misc_RNA (1)...(19): siRNA sense strand
cccuauaaauguagugaau

SEQ ID NO: 393777 - RNA, 19 nt, Homo sapiens
  misc_RNA (1)...(19): siRNA sense strand
guggagagaagccuuacaa

SEQ ID NO: 393778 - RNA, 19 nt, Homo sapiens
  misc_RNA (1)...(19): siRNA sense strand
cagaaccuaccacuuguga

SEQ ID NO: 393779 - RNA, 19 nt, Homo sapiens
  misc_RNA (1)...(19): siRNA sense strand
gacagcugauggugugugu

SEQ ID NO: 393780 - RNA, 19 nt, Homo sapiens
  misc_RNA (1)...(19): siRNA sense strand
ccaccgauccuaccucaag

SEQ ID NO: 393781 - RNA, 19 nt, Homo sapiens
  misc_RNA (1)...(19): siRNA sense strand
gacaagugacacaaggaaa

SEQ ID NO: 393782 - RNA, 19 nt, Homo sapiens
  misc_RNA (1)...(19): siRNA sense strand
gcacaagcggauucauagu

SEQ ID NO: 393783 - RNA, 19 nt, Homo sapiens
  misc_RNA (1)...(19): siRNA sense strand
aggcacaagcggauucaua

SEQ ID NO: 393784 - RNA, 19 nt, Homo sapiens
  misc_RNA (1)...(19): siRNA sense strand
gaauguggccaagucuuuc

SEQ ID NO: 393785 - RNA, 19 nt, Homo sapiens
  misc_RNA (1)...(19): siRNA sense strand
cagugaauguggaaaagua

SEQ ID NO: 393786 - RNA, 19 nt, Homo sapiens
  misc_RNA (1)...(19): siRNA sense strand
uagcucagcggacccugua

SEQ ID NO: 393787 - RNA, 19 nt, Homo sapiens
  misc_RNA (1)...(19): siRNA sense strand
gaugugggaagaccuuuua

SEQ ID NO: 393788 - RNA, 19 nt, Homo sapiens
  misc_RNA (1)...(19): siRNA sense strand
gaagcccuauaaauguagu

SEQ ID NO: 393789 - RNA, 19 nt, Homo sapiens
  misc_RNA (1)...(19): siRNA sense strand
ugauguggcugugacuuuc

SEQ ID NO: 393790 - RNA, 19 nt, Homo sapiens
  misc_RNA (1)...(19): siRNA sense strand
ggcacaagcggauucauag

SEQ ID NO: 393791 - RNA, 19 nt, Homo sapiens
  misc_RNA (1)...(19): siRNA sense strand
ucaaacacaggucauaucu

SEQ ID NO: 393792 - RNA, 19 nt, Homo sapiens
  misc_RNA (1)...(19): siRNA sense strand
ccaagucuuucgacauagg

SEQ ID NO: 393793 - RNA, 19 nt, Homo sapiens
  misc_RNA (1)...(19): siRNA sense strand
ccuuacaagugcaaugaau

SEQ ID NO: 393794 - RNA, 19 nt, Homo sapiens
  misc_RNA (1)...(19): siRNA sense strand
ucagagggaaucucacuuc

SEQ ID NO: 393795 - RNA, 19 nt, Homo sapiens
  misc_RNA (1)...(19): siRNA sense strand
gaugggcuaucagaaaugc

SEQ ID NO: 393796 - RNA, 19 nt, Homo sapiens
  misc_RNA (1)...(19): siRNA sense strand
cuggagagaagcccuauga

SEQ ID NO: 393797 - RNA, 19 nt, Homo sapiens
  misc_RNA (1)...(19): siRNA sense strand
ccuaagaccacagaaccua

SEQ ID NO: 393798 - RNA, 19 nt, Homo sapiens
  misc_RNA (1)...(19): siRNA sense strand
gagagugcagcccugauuc

SEQ ID NO: 393799 - RNA, 19 nt, Homo sapiens
  misc_RNA (1)...(19): siRNA sense strand
gcaaagagugugggaaagc

SEQ ID NO: 393800 - RNA, 19 nt, Homo sapiens
  misc_RNA (1)...(19): siRNA sense strand
ucaaccauaccaaagagaa

SEQ ID NO: 393801 - RNA, 19 nt, Homo sapiens
  misc_RNA (1)...(19): siRNA sense strand
gaugaaacuucguagauuu

SEQ ID NO: 393802 - RNA, 19 nt, Homo sapiens
  misc_RNA (1)...(19): siRNA sense strand
gaaauagucuaguaagcuu

SEQ ID NO: 393803 - RNA, 19 nt, Homo sapiens
  misc_RNA (1)...(19): siRNA sense strand
ucagaaggcuacuaaguuu

SEQ ID NO: 393804 - RNA, 19 nt, Homo sapiens
  misc_RNA (1)...(19): siRNA sense strand
guacugcgguuucaaauuc

SEQ ID NO: 393805 - RNA, 19 nt, Homo sapiens
  misc_RNA (1)...(19): siRNA sense strand
gaguaucugucuuuguuua

SEQ ID NO: 393806 - RNA, 19 nt, Homo sapiens
  misc_RNA (1)...(19): siRNA sense strand
gcuaggagauguacgugua

SEQ ID NO: 393807 - RNA, 19 nt, Homo sapiens
  misc_RNA (1)...(19): siRNA sense strand
ggauagaggugauuuaugc

SEQ ID NO: 393808 - RNA, 19 nt, Homo sapiens
  misc_RNA (1)...(19): siRNA sense strand
guacuuccauuuagauaug

SEQ ID NO: 393809 - RNA, 19 nt, Homo sapiens
  misc_RNA (1)...(19): siRNA sense strand
gauaggugcucugauacua

SEQ ID NO: 393810 - RNA, 19 nt, Homo sapiens
  misc_RNA (1)...(19): siRNA sense strand
cuaguaagcuuaaccuuuc

SEQ ID NO: 393811 - RNA, 19 nt, Homo sapiens
  misc_RNA (1)...(19): siRNA sense strand
ucaagaagauuaccacagu

SEQ ID NO: 393812 - RNA, 19 nt, Homo sapiens
  misc_RNA (1)...(19): siRNA sense strand
gccaugcacuguuacuuaa

SEQ ID NO: 393813 - RNA, 19 nt, Homo sapiens
  misc_RNA (1)...(19): siRNA sense strand
gaagagguucucacccaua

SEQ ID NO: 393814 - RNA, 19 nt, Homo sapiens
  misc_RNA (1)...(19): siRNA sense strand
aaccuaagcuugccaauuc

SEQ ID NO: 393815 - RNA, 19 nt, Homo sapiens
  misc_RNA (1)...(19): siRNA sense strand
gaagauuaccacagucaaa

SEQ ID NO: 393816 - RNA, 19 nt, Homo sapiens
  misc_RNA (1)...(19): siRNA sense strand
guggagcuauuuccuauga

SEQ ID NO: 393817 - RNA, 19 nt, Homo sapiens
  misc_RNA (1)...(19): siRNA sense strand
guuaaucaaccuuuccuua

SEQ ID NO: 393818 - RNA, 19 nt, Homo sapiens
  misc_RNA (1)...(19): siRNA sense strand
acagauggcuuugaaaugu

SEQ ID NO: 393819 - RNA, 19 nt, Homo sapiens
  misc_RNA (1)...(19): siRNA sense strand
ggccaugcacuguuacuua

SEQ ID NO: 393820 - RNA, 19 nt, Homo sapiens
  misc_RNA (1)...(19): siRNA sense strand
gaaagcaggcaacaaaugg

SEQ ID NO: 393821 - RNA, 19 nt, Homo sapiens
  misc_RNA (1)...(19): siRNA sense strand
ucuuagaucuucacgcuuu

SEQ ID NO: 393822 - RNA, 19 nt, Homo sapiens
  misc_RNA (1)...(19): siRNA sense strand
gaaccuaagcuugccaauu

SEQ ID NO: 393823 - RNA, 19 nt, Homo sapiens
  misc_RNA (1)...(19): siRNA sense strand
gcuuugaaaugugcugaua

SEQ ID NO: 393824 - RNA, 19 nt, Homo sapiens
  misc_RNA (1)...(19): siRNA sense strand
gauaugaugaaacuucgua

SEQ ID NO: 393825 - RNA, 19 nt, Homo sapiens
  misc_RNA (1)...(19): siRNA sense strand
gaaugaguaucugucuuug

SEQ ID NO: 393826 - RNA, 19 nt, Homo sapiens
  misc_RNA (1)...(19): siRNA sense strand
uuagaaagcaggcaacaaa

SEQ ID NO: 393827 - RNA, 19 nt, Homo sapiens
  misc_RNA (1)...(19): siRNA sense strand
ucucacaucugccauuaga

SEQ ID NO: 393828 - RNA, 19 nt, Homo sapiens
  misc_RNA (1)...(19): siRNA sense strand
ugaugaaacuucguagauu

SEQ ID NO: 393829 - RNA, 19 nt, Homo sapiens
  misc_RNA (1)...(19): siRNA sense strand
gaucugcagugggcuuauu

SEQ ID NO: 393830 - RNA, 19 nt, Homo sapiens
  misc_RNA (1)...(19): siRNA sense strand
gcguggagcuauuuccuau

SEQ ID NO: 393831 - RNA, 19 nt, Homo sapiens
  misc_RNA (1)...(19): siRNA sense strand
ucacaucugccauuagaaa

SEQ ID NO: 393832 - RNA, 19 nt, Homo sapiens
  misc_RNA (1)...(19): siRNA sense strand
gagccgagcaggauuugaa

SEQ ID NO: 393833 - RNA, 19 nt, Homo sapiens
  misc_RNA (1)...(19): siRNA sense strand
auacaagaauaccucagua

SEQ ID NO: 393834 - RNA, 19 nt, Homo sapiens
  misc_RNA (1)...(19): siRNA sense strand
ggagcuauuuccuaugaca

SEQ ID NO: 393835 - RNA, 19 nt, Homo sapiens
  misc_RNA (1)...(19): siRNA sense strand
acacagacauuugguuuua

SEQ ID NO: 393836 - RNA, 19 nt, Homo sapiens
  misc_RNA (1)...(19): siRNA sense strand
caacaaauggagacacaga

SEQ ID NO: 393837 - RNA, 19 nt, Homo sapiens
  misc_RNA (1)...(19): siRNA sense strand
gagguucucacccauauau

SEQ ID NO: 393838 - RNA, 19 nt, Homo sapiens
  misc_RNA (1)...(19): siRNA sense strand
gcacuguuacuuaaaggaa

SEQ ID NO: 393839 - RNA, 19 nt, Homo sapiens
  misc_RNA (1)...(19): siRNA sense strand
agaaugaguaucugucuuu

SEQ ID NO: 393840 - RNA, 19 nt, Homo sapiens
  misc_RNA (1)...(19): siRNA sense strand
agacaucagucgccagaau

SEQ ID NO: 393841 - RNA, 19 nt, Homo sapiens
  misc_RNA (1)...(19): siRNA sense strand
gaaauugaagugucugucu

SEQ ID NO: 393842 - RNA, 19 nt, Homo sapiens
  misc_RNA (1)...(19): siRNA sense strand
acaaauggagacacagaua

SEQ ID NO: 393843 - RNA, 19 nt, Homo sapiens
  misc_RNA (1)...(19): siRNA sense strand
gaauaccucaguacuggaa

SEQ ID NO: 393844 - RNA, 19 nt, Homo sapiens
  misc_RNA (1)...(19): siRNA sense strand
gauacuagccacagacauc

SEQ ID NO: 393845 - RNA, 19 nt, Homo sapiens
  misc_RNA (1)...(19): siRNA sense strand
agacacagacauuugguuu

SEQ ID NO: 393846 - RNA, 19 nt, Homo sapiens
  misc_RNA (1)...(19): siRNA sense strand
gauagacuaacaaauggaa

SEQ ID NO: 393847 - RNA, 19 nt, Homo sapiens
  misc_RNA (1)...(19): siRNA sense strand
augaguaucugucuuuguu

SEQ ID NO: 393848 - RNA, 19 nt, Homo sapiens
  misc_RNA (1)...(19): siRNA sense strand
ggcaacaaauggagacaca

SEQ ID NO: 393849 - RNA, 19 nt, Homo sapiens
  misc_RNA (1)...(19): siRNA sense strand
cuucauggauuaauugagu

SEQ ID NO: 393850 - RNA, 19 nt, Homo sapiens
  misc_RNA (1)...(19): siRNA sense strand
ggaaauagucuaguaagcu

SEQ ID NO: 393851 - RNA, 19 nt, Homo sapiens
  misc_RNA (1)...(19): siRNA sense strand
cagacugcauuauacauuc

SEQ ID NO: 393852 - RNA, 19 nt, Homo sapiens
  misc_RNA (1)...(19): siRNA sense strand
caucaaggagauauagaaa

SEQ ID NO: 393853 - RNA, 19 nt, Homo sapiens
  misc_RNA (1)...(19): siRNA sense strand
guaaggagccgagcaggau

SEQ ID NO: 393854 - RNA, 19 nt, Homo sapiens
  misc_RNA (1)...(19): siRNA sense strand
gaucagacugcauuauaca

SEQ ID NO: 393855 - RNA, 19 nt, Homo sapiens
  misc_RNA (1)...(19): siRNA sense strand
ugucggacgugggaauuaa

SEQ ID NO: 393856 - RNA, 19 nt, Homo sapiens
  misc_RNA (1)...(19): siRNA sense strand
caagaauaccucaguacug

SEQ ID NO: 393857 - RNA, 19 nt, Homo sapiens
  misc_RNA (1)...(19): siRNA sense strand
ggacaagccaaguguaugc

SEQ ID NO: 393858 - RNA, 19 nt, Homo sapiens
  misc_RNA (1)...(19): siRNA sense strand
ggagauguacguguaagga

SEQ ID NO: 393859 - RNA, 19 nt, Homo sapiens
  misc_RNA (1)...(19): siRNA sense strand
cugaucagacugcauuaua

SEQ ID NO: 393860 - RNA, 19 nt, Homo sapiens
  misc_RNA (1)...(19): siRNA sense strand
aagagguucucacccauau

SEQ ID NO: 393861 - RNA, 19 nt, Homo sapiens
  misc_RNA (1)...(19): siRNA sense strand
cucaggccaugcacuguua

SEQ ID NO: 393862 - RNA, 19 nt, Homo sapiens
  misc_RNA (1)...(19): siRNA sense strand
ucuaguaagcuuaaccuuu

SEQ ID NO: 393863 - RNA, 19 nt, Homo sapiens
  misc_RNA (1)...(19): siRNA sense strand
aauaucagaaggcuacuaa

SEQ ID NO: 393864 - RNA, 19 nt, Homo sapiens
  misc_RNA (1)...(19): siRNA sense strand
guucucacccauauauuga

SEQ ID NO: 393865 - RNA, 19 nt, Homo sapiens
  misc_RNA (1)...(19): siRNA sense strand
gaguacuuccauuuagaua

SEQ ID NO: 393866 - RNA, 19 nt, Homo sapiens
  misc_RNA (1)...(19): siRNA sense strand
ccaaguguaugcuggaaaa

SEQ ID NO: 393867 - RNA, 19 nt, Homo sapiens
  misc_RNA (1)...(19): siRNA sense strand
gaucgucacacugaaucua

SEQ ID NO: 393868 - RNA, 19 nt, Homo sapiens
  misc_RNA (1)...(19): siRNA sense strand
ggacgugggaauuaagcaa

SEQ ID NO: 393869 - RNA, 19 nt, Homo sapiens
  misc_RNA (1)...(19): siRNA sense strand
caaauggagacacagauag

SEQ ID NO: 393870 - RNA, 19 nt, Homo sapiens
  misc_RNA (1)...(19): siRNA sense strand
uggcaacuuuauacaagaa

SEQ ID NO: 393871 - RNA, 19 nt, Homo sapiens
  misc_RNA (1)...(19): siRNA sense strand
gucaaaauccuuaccauaa

SEQ ID NO: 393872 - RNA, 19 nt, Homo sapiens
  misc_RNA (1)...(19): siRNA sense strand
uaagcaagcaguggaguga

SEQ ID NO: 393873 - RNA, 19 nt, Homo sapiens
  misc_RNA (1)...(19): siRNA sense strand
accauuacuuggcaacuuu

SEQ ID NO: 393874 - RNA, 19 nt, Homo sapiens
  misc_RNA (1)...(19): siRNA sense strand
gcuauuuccuaugacaguu

SEQ ID NO: 393875 - RNA, 19 nt, Homo sapiens
  misc_RNA (1)...(19): siRNA sense strand
uuacagauggcuuugaaau

SEQ ID NO: 393876 - RNA, 19 nt, Homo sapiens
  misc_RNA (1)...(19): siRNA sense strand
ggugauuuaugccuagaag

SEQ ID NO: 393877 - RNA, 19 nt, Homo sapiens
  misc_RNA (1)...(19): siRNA sense strand
ucagacugcauuauacauu

SEQ ID NO: 393878 - RNA, 19 nt, Homo sapiens
  misc_RNA (1)...(19): siRNA sense strand
ucucacccauauauugauu

SEQ ID NO: 393879 - RNA, 19 nt, Homo sapiens
  misc_RNA (1)...(19): siRNA sense strand
ugaucagacugcauuauac

SEQ ID NO: 393880 - RNA, 19 nt, Homo sapiens
  misc_RNA (1)...(19): siRNA sense strand
gaauaucagaaggcuacua

SEQ ID NO: 393881 - RNA, 19 nt, Homo sapiens
  misc_RNA (1)...(19): siRNA sense strand
gguucucacccauauauug

SEQ ID NO: 393882 - RNA, 19 nt, Homo sapiens
  misc_RNA (1)...(19): siRNA sense strand
cagauggcuuugaaaugug

SEQ ID NO: 393883 - RNA, 19 nt, Homo sapiens
  misc_RNA (1)...(19): siRNA sense strand
agaaagcaggcaacaaaug

SEQ ID NO: 393884 - RNA, 19 nt, Homo sapiens
  misc_RNA (1)...(19): siRNA sense strand
gauaucuugcugagcuuaa

SEQ ID NO: 393885 - RNA, 19 nt, Homo sapiens
  misc_RNA (1)...(19): siRNA sense strand
uaucagaaggcuacuaagu

SEQ ID NO: 393886 - RNA, 19 nt, Homo sapiens
  misc_RNA (1)...(19): siRNA sense strand
ccaucaaggagauauagaa

SEQ ID NO: 393887 - RNA, 19 nt, Homo sapiens
  misc_RNA (1)...(19): siRNA sense strand
gagaucugcagugggcuua

SEQ ID NO: 393888 - RNA, 19 nt, Homo sapiens
  misc_RNA (1)...(19): siRNA sense strand
gaaaaucaccacuggagau

SEQ ID NO: 393889 - RNA, 19 nt, Homo sapiens
  misc_RNA (1)...(19): siRNA sense strand
ggauaucuugcugagcuua

SEQ ID NO: 393890 - RNA, 19 nt, Homo sapiens
  misc_RNA (1)...(19): siRNA sense strand
gguacugcgguuucaaauu

SEQ ID NO: 393891 - RNA, 19 nt, Homo sapiens
  misc_RNA (1)...(19): siRNA sense strand
caccagacacagacauuug

SEQ ID NO: 393892 - RNA, 19 nt, Homo sapiens
  misc_RNA (1)...(19): siRNA sense strand
uugaguacuuccauuuaga

SEQ ID NO: 393893 - RNA, 19 nt, Homo sapiens
  misc_RNA (1)...(19): siRNA sense strand
cugaaucuauugccaacau

SEQ ID NO: 393894 - RNA, 19 nt, Homo sapiens
  misc_RNA (1)...(19): siRNA sense strand
agcaagcaguggagugaaa

SEQ ID NO: 393895 - RNA, 19 nt, Homo sapiens
  misc_RNA (1)...(19): siRNA sense strand
auucucacaucugccauua

SEQ ID NO: 393896 - RNA, 19 nt, Homo sapiens
  misc_RNA (1)...(19): siRNA sense strand
gaucauccagguguuaauc

SEQ ID NO: 393897 - RNA, 19 nt, Homo sapiens
  misc_RNA (1)...(19): siRNA sense strand
caugcacuguuacuuaaag

SEQ ID NO: 393898 - RNA, 19 nt, Homo sapiens
  misc_RNA (1)...(19): siRNA sense strand
ucauccagguguuaaucaa

SEQ ID NO: 393899 - RNA, 19 nt, Homo sapiens
  misc_RNA (1)...(19): siRNA sense strand
gacaucagucgccagaaug

SEQ ID NO: 393900 - RNA, 19 nt, Homo sapiens
  misc_RNA (1)...(19): siRNA sense strand
auugagagaaucaggcuua

SEQ ID NO: 393901 - RNA, 19 nt, Homo sapiens
  misc_RNA (1)...(19): siRNA sense strand
gaugaaacuucguagauuu

SEQ ID NO: 393902 - RNA, 19 nt, Homo sapiens
  misc_RNA (1)...(19): siRNA sense strand
gaaauagucuaguaagcuu

SEQ ID NO: 393903 - RNA, 19 nt, Homo sapiens
  misc_RNA (1)...(19): siRNA sense strand
ucagaaggcuacuaaguuu

SEQ ID NO: 393904 - RNA, 19 nt, Homo sapiens
  misc_RNA (1)...(19): siRNA sense strand
guacugcgguuucaaauuc

SEQ ID NO: 393905 - RNA, 19 nt, Homo sapiens
  misc_RNA (1)...(19): siRNA sense strand
gaguaucugucuuuguuua

SEQ ID NO: 393906 - RNA, 19 nt, Homo sapiens
  misc_RNA (1)...(19): siRNA sense strand
gcuaggagauguacgugua

SEQ ID NO: 393907 - RNA, 19 nt, Homo sapiens
  misc_RNA (1)...(19): siRNA sense strand
ggauagaggugauuuaugc

SEQ ID NO: 393908 - RNA, 19 nt, Homo sapiens
  misc_RNA (1)...(19): siRNA sense strand
guacuuccauuuagauaug

SEQ ID NO: 393909 - RNA, 19 nt, Homo sapiens
  misc_RNA (1)...(19): siRNA sense strand
gauaggugcucugauacua

SEQ ID NO: 393910 - RNA, 19 nt, Homo sapiens
  misc_RNA (1)...(19): siRNA sense strand
cuaguaagcuuaaccuuuc

SEQ ID NO: 393911 - RNA, 19 nt, Homo sapiens
  misc_RNA (1)...(19): siRNA sense strand
ucaagaagauuaccacagu

SEQ ID NO: 393912 - RNA, 19 nt, Homo sapiens
  misc_RNA (1)...(19): siRNA sense strand
gccaugcacuguuacuuaa

SEQ ID NO: 393913 - RNA, 19 nt, Homo sapiens
  misc_RNA (1)...(19): siRNA sense strand
gaagagguucucacccaua

SEQ ID NO: 393914 - RNA, 19 nt, Homo sapiens
  misc_RNA (1)...(19): siRNA sense strand
aaccuaagcuugccaauuc

SEQ ID NO: 393915 - RNA, 19 nt, Homo sapiens
  misc_RNA (1)...(19): siRNA sense strand
gaagauuaccacagucaaa

SEQ ID NO: 393916 - RNA, 19 nt, Homo sapiens
  misc_RNA (1)...(19): siRNA sense strand
guggagcuauuuccuauga

SEQ ID NO: 393917 - RNA, 19 nt, Homo sapiens
  misc_RNA (1)...(19): siRNA sense strand
guuaaucaaccuuuccuua

SEQ ID NO: 393918 - RNA, 19 nt, Homo sapiens
  misc_RNA (1)...(19): siRNA sense strand
acagauggcuuugaaaugu

SEQ ID NO: 393919 - RNA, 19 nt, Homo sapiens
  misc_RNA (1)...(19): siRNA sense strand
ggccaugcacuguuacuua

SEQ ID NO: 393920 - RNA, 19 nt, Homo sapiens
  misc_RNA (1)...(19): siRNA sense strand
gaaagcaggcaacaaaugg

SEQ ID NO: 393921 - RNA, 19 nt, Homo sapiens
  misc_RNA (1)...(19): siRNA sense strand
ucuuagaucuucacgcuuu

SEQ ID NO: 393922 - RNA, 19 nt, Homo sapiens
  misc_RNA (1)...(19): siRNA sense strand
gaaccuaagcuugccaauu

SEQ ID NO: 393923 - RNA, 19 nt, Homo sapiens
  misc_RNA (1)...(19): siRNA sense strand
gcuuugaaaugugcugaua

SEQ ID NO: 393924 - RNA, 19 nt, Homo sapiens
  misc_RNA (1)...(19): siRNA sense strand
gauaugaugaaacuucgua

SEQ ID NO: 393925 - RNA, 19 nt, Homo sapiens
  misc_RNA (1)...(19): siRNA sense strand
gaaugaguaucugucuuug

SEQ ID NO: 393926 - RNA, 19 nt, Homo sapiens
  misc_RNA (1)...(19): siRNA sense strand
uuagaaagcaggcaacaaa

SEQ ID NO: 393927 - RNA, 19 nt, Homo sapiens
  misc_RNA (1)...(19): siRNA sense strand
ucucacaucugccauuaga

SEQ ID NO: 393928 - RNA, 19 nt, Homo sapiens
  misc_RNA (1)...(19): siRNA sense strand
ugaugaaacuucguagauu

SEQ ID NO: 393929 - RNA, 19 nt, Homo sapiens
  misc_RNA (1)...(19): siRNA sense strand
gaucugcagugggcuuauu

SEQ ID NO: 393930 - RNA, 19 nt, Homo sapiens
  misc_RNA (1)...(19): siRNA sense strand
gcguggagcuauuuccuau

SEQ ID NO: 393931 - RNA, 19 nt, Homo sapiens
  misc_RNA (1)...(19): siRNA sense strand
ucacaucugccauuagaaa

SEQ ID NO: 393932 - RNA, 19 nt, Homo sapiens
  misc_RNA (1)...(19): siRNA sense strand
gagccgagcaggauuugaa

SEQ ID NO: 393933 - RNA, 19 nt, Homo sapiens
  misc_RNA (1)...(19): siRNA sense strand
auacaagaauaccucagua

SEQ ID NO: 393934 - RNA, 19 nt, Homo sapiens
  misc_RNA (1)...(19): siRNA sense strand
ggagcuauuuccuaugaca

SEQ ID NO: 393935 - RNA, 19 nt, Homo sapiens
  misc_RNA (1)...(19): siRNA sense strand
acacagacauuugguuuua

SEQ ID NO: 393936 - RNA, 19 nt, Homo sapiens
  misc_RNA (1)...(19): siRNA sense strand
caacaaauggagacacaga

SEQ ID NO: 393937 - RNA, 19 nt, Homo sapiens
  misc_RNA (1)...(19): siRNA sense strand
gagguucucacccauauau

SEQ ID NO: 393938 - RNA, 19 nt, Homo sapiens
  misc_RNA (1)...(19): siRNA sense strand
gcacuguuacuuaaaggaa

SEQ ID NO: 393939 - RNA, 19 nt, Homo sapiens
  misc_RNA (1)...(19): siRNA sense strand
agaaugaguaucugucuuu

SEQ ID NO: 393940 - RNA, 19 nt, Homo sapiens
  misc_RNA (1)...(19): siRNA sense strand
agacaucagucgccagaau

SEQ ID NO: 393941 - RNA, 19 nt, Homo sapiens
  misc_RNA (1)...(19): siRNA sense strand
gaaauugaagugucugucu

SEQ ID NO: 393942 - RNA, 19 nt, Homo sapiens
  misc_RNA (1)...(19): siRNA sense strand
acaaauggagacacagaua

SEQ ID NO: 393943 - RNA, 19 nt, Homo sapiens
  misc_RNA (1)...(19): siRNA sense strand
gaauaccucaguacuggaa

SEQ ID NO: 393944 - RNA, 19 nt, Homo sapiens
  misc_RNA (1)...(19): siRNA sense strand
gauacuagccacagacauc

SEQ ID NO: 393945 - RNA, 19 nt, Homo sapiens
  misc_RNA (1)...(19): siRNA sense strand
agacacagacauuugguuu

SEQ ID NO: 393946 - RNA, 19 nt, Homo sapiens
  misc_RNA (1)...(19): siRNA sense strand
gauagacuaacaaauggaa

SEQ ID NO: 393947 - RNA, 19 nt, Homo sapiens
  misc_RNA (1)...(19): siRNA sense strand
augaguaucugucuuuguu

SEQ ID NO: 393948 - RNA, 19 nt, Homo sapiens
  misc_RNA (1)...(19): siRNA sense strand
ggcaacaaauggagacaca

SEQ ID NO: 393949 - RNA, 19 nt, Homo sapiens
  misc_RNA (1)...(19): siRNA sense strand
cuucauggauuaauugagu

SEQ ID NO: 393950 - RNA, 19 nt, Homo sapiens
  misc_RNA (1)...(19): siRNA sense strand
ggaaauagucuaguaagcu

SEQ ID NO: 393951 - RNA, 19 nt, Homo sapiens
  misc_RNA (1)...(19): siRNA sense strand
cagacugcauuauacauuc

SEQ ID NO: 393952 - RNA, 19 nt, Homo sapiens
  misc_RNA (1)...(19): siRNA sense strand
caucaaggagauauagaaa

SEQ ID NO: 393953 - RNA, 19 nt, Homo sapiens
  misc_RNA (1)...(19): siRNA sense strand
guaaggagccgagcaggau

SEQ ID NO: 393954 - RNA, 19 nt, Homo sapiens
  misc_RNA (1)...(19): siRNA sense strand
gaucagacugcauuauaca

SEQ ID NO: 393955 - RNA, 19 nt, Homo sapiens
  misc_RNA (1)...(19): siRNA sense strand
ugucggacgugggaauuaa

SEQ ID NO: 393956 - RNA, 19 nt, Homo sapiens
  misc_RNA (1)...(19): siRNA sense strand
caagaauaccucaguacug

SEQ ID NO: 393957 - RNA, 19 nt, Homo sapiens
  misc_RNA (1)...(19): siRNA sense strand
ggacaagccaaguguaugc

SEQ ID NO: 393958 - RNA, 19 nt, Homo sapiens
  misc_RNA (1)...(19): siRNA sense strand
ggagauguacguguaagga

SEQ ID NO: 393959 - RNA, 19 nt, Homo sapiens
  misc_RNA (1)...(19): siRNA sense strand
cugaucagacugcauuaua

SEQ ID NO: 393960 - RNA, 19 nt, Homo sapiens
  misc_RNA (1)...(19): siRNA sense strand
aagagguucucacccauau

SEQ ID NO: 393961 - RNA, 19 nt, Homo sapiens
  misc_RNA (1)...(19): siRNA sense strand
cucaggccaugcacuguua

SEQ ID NO: 393962 - RNA, 19 nt, Homo sapiens
  misc_RNA (1)...(19): siRNA sense strand
ucuaguaagcuuaaccuuu

SEQ ID NO: 393963 - RNA, 19 nt, Homo sapiens
  misc_RNA (1)...(19): siRNA sense strand
aauaucagaaggcuacuaa

SEQ ID NO: 393964 - RNA, 19 nt, Homo sapiens
  misc_RNA (1)...(19): siRNA sense strand
guucucacccauauauuga

SEQ ID NO: 393965 - RNA, 19 nt, Homo sapiens
  misc_RNA (1)...(19): siRNA sense strand
gaguacuuccauuuagaua

SEQ ID NO: 393966 - RNA, 19 nt, Homo sapiens
  misc_RNA (1)...(19): siRNA sense strand
ccaaguguaugcuggaaaa

SEQ ID NO: 393967 - RNA, 19 nt, Homo sapiens
  misc_RNA (1)...(19): siRNA sense strand
gaucgucacacugaaucua

SEQ ID NO: 393968 - RNA, 19 nt, Homo sapiens
  misc_RNA (1)...(19): siRNA sense strand
ggacgugggaauuaagcaa

SEQ ID NO: 393969 - RNA, 19 nt, Homo sapiens
  misc_RNA (1)...(19): siRNA sense strand
caaauggagacacagauag

SEQ ID NO: 393970 - RNA, 19 nt, Homo sapiens
  misc_RNA (1)...(19): siRNA sense strand
uggcaacuuuauacaagaa

SEQ ID NO: 393971 - RNA, 19 nt, Homo sapiens
  misc_RNA (1)...(19): siRNA sense strand
gucaaaauccuuaccauaa

SEQ ID NO: 393972 - RNA, 19 nt, Homo sapiens
  misc_RNA (1)...(19): siRNA sense strand
uaagcaagcaguggaguga

SEQ ID NO: 393973 - RNA, 19 nt, Homo sapiens
  misc_RNA (1)...(19): siRNA sense strand
accauuacuuggcaacuuu

SEQ ID NO: 393974 - RNA, 19 nt, Homo sapiens
  misc_RNA (1)...(19): siRNA sense strand
gcuauuuccuaugacaguu

SEQ ID NO: 393975 - RNA, 19 nt, Homo sapiens
  misc_RNA (1)...(19): siRNA sense strand
uuacagauggcuuugaaau

SEQ ID NO: 393976 - RNA, 19 nt, Homo sapiens
  misc_RNA (1)...(19): siRNA sense strand
ggugauuuaugccuagaag

SEQ ID NO: 393977 - RNA, 19 nt, Homo sapiens
  misc_RNA (1)...(19): siRNA sense strand
ucagacugcauuauacauu

SEQ ID NO: 393978 - RNA, 19 nt, Homo sapiens
  misc_RNA (1)...(19): siRNA sense strand
ucucacccauauauugauu

SEQ ID NO: 393979 - RNA, 19 nt, Homo sapiens
  misc_RNA (1)...(19): siRNA sense strand
ugaucagacugcauuauac

SEQ ID NO: 393980 - RNA, 19 nt, Homo sapiens
  misc_RNA (1)...(19): siRNA sense strand
gaauaucagaaggcuacua

SEQ ID NO: 393981 - RNA, 19 nt, Homo sapiens
  misc_RNA (1)...(19): siRNA sense strand
gguucucacccauauauug

SEQ ID NO: 393982 - RNA, 19 nt, Homo sapiens
  misc_RNA (1)...(19): siRNA sense strand
cagauggcuuugaaaugug

SEQ ID NO: 393983 - RNA, 19 nt, Homo sapiens
  misc_RNA (1)...(19): siRNA sense strand
agaaagcaggcaacaaaug

SEQ ID NO: 393984 - RNA, 19 nt, Homo sapiens
  misc_RNA (1)...(19): siRNA sense strand
gauaucuugcugagcuuaa

SEQ ID NO: 393985 - RNA, 19 nt, Homo sapiens
  misc_RNA (1)...(19): siRNA sense strand
uaucagaaggcuacuaagu

SEQ ID NO: 393986 - RNA, 19 nt, Homo sapiens
  misc_RNA (1)...(19): siRNA sense strand
ccaucaaggagauauagaa

SEQ ID NO: 393987 - RNA, 19 nt, Homo sapiens
  misc_RNA (1)...(19): siRNA sense strand
gagaucugcagugggcuua

SEQ ID NO: 393988 - RNA, 19 nt, Homo sapiens
  misc_RNA (1)...(19): siRNA sense strand
gaaaaucaccacuggagau

SEQ ID NO: 393989 - RNA, 19 nt, Homo sapiens
  misc_RNA (1)...(19): siRNA sense strand
ggauaucuugcugagcuua

SEQ ID NO: 393990 - RNA, 19 nt, Homo sapiens
  misc_RNA (1)...(19): siRNA sense strand
gguacugcgguuucaaauu

SEQ ID NO: 393991 - RNA, 19 nt, Homo sapiens
  misc_RNA (1)...(19): siRNA sense strand
caccagacacagacauuug

SEQ ID NO: 393992 - RNA, 19 nt, Homo sapiens
  misc_RNA (1)...(19): siRNA sense strand
uugaguacuuccauuuaga

SEQ ID NO: 393993 - RNA, 19 nt, Homo sapiens
  misc_RNA (1)...(19): siRNA sense strand
cugaaucuauugccaacau

SEQ ID NO: 393994 - RNA, 19 nt, Homo sapiens
  misc_RNA (1)...(19): siRNA sense strand
agcaagcaguggagugaaa

SEQ ID NO: 393995 - RNA, 19 nt, Homo sapiens
  misc_RNA (1)...(19): siRNA sense strand
auucucacaucugccauua

SEQ ID NO: 393996 - RNA, 19 nt, Homo sapiens
  misc_RNA (1)...(19): siRNA sense strand
gaucauccagguguuaauc

SEQ ID NO: 393997 - RNA, 19 nt, Homo sapiens
  misc_RNA (1)...(19): siRNA sense strand
caugcacuguuacuuaaag

SEQ ID NO: 393998 - RNA, 19 nt, Homo sapiens
  misc_RNA (1)...(19): siRNA sense strand
ucauccagguguuaaucaa

SEQ ID NO: 393999 - RNA, 19 nt, Homo sapiens
  misc_RNA (1)...(19): siRNA sense strand
gacaucagucgccagaaug

SEQ ID NO: 394000 - RNA, 19 nt, Homo sapiens
  misc_RNA (1)...(19): siRNA sense strand
auugagagaaucaggcuua

SEQ ID NO: 394001 - RNA, 19 nt, Homo sapiens
  misc_RNA (1)...(19): siRNA sense strand
uaaagaaagucauccagaa

SEQ ID NO: 394002 - RNA, 19 nt, Homo sapiens
  misc_RNA (1)...(19): siRNA sense strand
gagcugcguugcacuuguu

SEQ ID NO: 394003 - RNA, 19 nt, Homo sapiens
  misc_RNA (1)...(19): siRNA sense strand
gaacgggaagcaaguuugu

SEQ ID NO: 394004 - RNA, 19 nt, Homo sapiens
  misc_RNA (1)...(19): siRNA sense strand
ggacaguggaaacaagaaa

SEQ ID NO: 394005 - RNA, 19 nt, Homo sapiens
  misc_RNA (1)...(19): siRNA sense strand
aaagaaagucauccagaaa

SEQ ID NO: 394006 - RNA, 19 nt, Homo sapiens
  misc_RNA (1)...(19): siRNA sense strand
gaagaacgggaagcaaguu

SEQ ID NO: 394007 - RNA, 19 nt, Homo sapiens
  misc_RNA (1)...(19): siRNA sense strand
gugguagccucccugaaga

SEQ ID NO: 394008 - RNA, 19 nt, Homo sapiens
  misc_RNA (1)...(19): siRNA sense strand
uugguaaacugcagguguu

SEQ ID NO: 394009 - RNA, 19 nt, Homo sapiens
  misc_RNA (1)...(19): siRNA sense strand
gaaagucauccagaaaauu

SEQ ID NO: 394010 - RNA, 19 nt, Homo sapiens
  misc_RNA (1)...(19): siRNA sense strand
caaaacgauugguaaacug

SEQ ID NO: 394011 - RNA, 19 nt, Homo sapiens
  misc_RNA (1)...(19): siRNA sense strand
ugaagaacgggaagcaagu

SEQ ID NO: 394012 - RNA, 19 nt, Homo sapiens
  misc_RNA (1)...(19): siRNA sense strand
gcacuuguuuacgcguuac

SEQ ID NO: 394013 - RNA, 19 nt, Homo sapiens
  misc_RNA (1)...(19): siRNA sense strand
ugcacuuguuuacgcguua

SEQ ID NO: 394014 - RNA, 19 nt, Homo sapiens
  misc_RNA (1)...(19): siRNA sense strand
agaaagucauccagaaaau

SEQ ID NO: 394015 - RNA, 19 nt, Homo sapiens
  misc_RNA (1)...(19): siRNA sense strand
gagaagcaguggauaaaua

SEQ ID NO: 394016 - RNA, 19 nt, Homo sapiens
  misc_RNA (1)...(19): siRNA sense strand
gaccauagcugagaacuaa

SEQ ID NO: 394017 - RNA, 19 nt, Homo sapiens
  misc_RNA (1)...(19): siRNA sense strand
gagauaaacuuccugaaug

SEQ ID NO: 394018 - RNA, 19 nt, Homo sapiens
  misc_RNA (1)...(19): siRNA sense strand
gagauaaacuuccugaaug

SEQ ID NO: 394019 - RNA, 19 nt, Homo sapiens
  misc_RNA (1)...(19): siRNA sense strand
gcaaugaugucacggauau

SEQ ID NO: 394020 - RNA, 19 nt, Homo sapiens
  misc_RNA (1)...(19): siRNA sense strand
aagaagcaguggauaaaua

SEQ ID NO: 394021 - RNA, 19 nt, Homo sapiens
  misc_RNA (1)...(19): siRNA sense strand
gauaagaagcaguggauaa

SEQ ID NO: 394022 - RNA, 19 nt, Homo sapiens
  misc_RNA (1)...(19): siRNA sense strand
ucacggauaucgcagauga

SEQ ID NO: 394023 - RNA, 19 nt, Homo sapiens
  misc_RNA (1)...(19): siRNA sense strand
ggagauaaacuuccugaau

SEQ ID NO: 394024 - RNA, 19 nt, Homo sapiens
  misc_RNA (1)...(19): siRNA sense strand
ggagauaaacuuccugaau

SEQ ID NO: 394025 - RNA, 19 nt, Homo sapiens
  misc_RNA (1)...(19): siRNA sense strand
gugccacgcugaucaauga

SEQ ID NO: 394026 - RNA, 19 nt, Homo sapiens
  misc_RNA (1)...(19): siRNA sense strand
gaccaagaccaaugcauaa

SEQ ID NO: 394027 - RNA, 19 nt, Homo sapiens
  misc_RNA (1)...(19): siRNA sense strand
cgacugggaucuuaagcuu

SEQ ID NO: 394028 - RNA, 19 nt, Homo sapiens
  misc_RNA (1)...(19): siRNA sense strand
aaauaaggcuguuggagau

SEQ ID NO: 394029 - RNA, 19 nt, Homo sapiens
  misc_RNA (1)...(19): siRNA sense strand
aaauaaggcuguuggagau

SEQ ID NO: 394030 - RNA, 19 nt, Homo sapiens
  misc_RNA (1)...(19): siRNA sense strand
gcaguggacucaggcaaug

SEQ ID NO: 394031 - RNA, 19 nt, Homo sapiens
  misc_RNA (1)...(19): siRNA sense strand
gagauggaguguacaccuu

SEQ ID NO: 394032 - RNA, 19 nt, Homo sapiens
  misc_RNA (1)...(19): siRNA sense strand
gauggaguguacaccuuaa

SEQ ID NO: 394033 - RNA, 19 nt, Homo sapiens
  misc_RNA (1)...(19): siRNA sense strand
guaugcgacugggaucuua

SEQ ID NO: 394034 - RNA, 19 nt, Homo sapiens
  misc_RNA (1)...(19): siRNA sense strand
ugaccaagaccaaugcaua

SEQ ID NO: 394035 - RNA, 19 nt, Homo sapiens
  misc_RNA (1)...(19): siRNA sense strand
gcugaucaaugaacaaugg

SEQ ID NO: 394036 - RNA, 19 nt, Homo sapiens
  misc_RNA (1)...(19): siRNA sense strand
agaaggagauggaguguac

SEQ ID NO: 394037 - RNA, 19 nt, Homo sapiens
  misc_RNA (1)...(19): siRNA sense strand
ucaucaaacucaaacagaa

SEQ ID NO: 394038 - RNA, 19 nt, Homo sapiens
  misc_RNA (1)...(19): siRNA sense strand
uaaauuuacugaccaucug

SEQ ID NO: 394039 - RNA, 19 nt, Homo sapiens
  misc_RNA (1)...(19): siRNA sense strand
gcugugcuguggcugagua

SEQ ID NO: 394040 - RNA, 19 nt, Homo sapiens
  misc_RNA (1)...(19): siRNA sense strand
uaaacuuccugaaugugaa

SEQ ID NO: 394041 - RNA, 19 nt, Homo sapiens
  misc_RNA (1)...(19): siRNA sense strand
uaaacuuccugaaugugaa

SEQ ID NO: 394042 - RNA, 19 nt, Homo sapiens
  misc_RNA (1)...(19): siRNA sense strand
agauaaacuuccugaaugu

SEQ ID NO: 394043 - RNA, 19 nt, Homo sapiens
  misc_RNA (1)...(19): siRNA sense strand
agauaaacuuccugaaugu

SEQ ID NO: 394044 - RNA, 19 nt, Homo sapiens
  misc_RNA (1)...(19): siRNA sense strand
agaagcaguggauaaauaa

SEQ ID NO: 394045 - RNA, 19 nt, Homo sapiens
  misc_RNA (1)...(19): siRNA sense strand
agaagcaguggauaaauaa

SEQ ID NO: 394046 - RNA, 19 nt, Homo sapiens
  misc_RNA (1)...(19): siRNA sense strand
gaaaagaagacaccgaaga

SEQ ID NO: 394047 - RNA, 19 nt, Homo sapiens
  misc_RNA (1)...(19): siRNA sense strand
ccaagaagacaccugcuau

SEQ ID NO: 394048 - RNA, 19 nt, Homo sapiens
  misc_RNA (1)...(19): siRNA sense strand
gaaugaacacaccuucugu

SEQ ID NO: 394049 - RNA, 19 nt, Homo sapiens
  misc_RNA (1)...(19): siRNA sense strand
acugggaucuuaagcuuug

SEQ ID NO: 394050 - RNA, 19 nt, Homo sapiens
  misc_RNA (1)...(19): siRNA sense strand
caagaagacaccugcuaug

SEQ ID NO: 394051 - RNA, 19 nt, Homo sapiens
  misc_RNA (1)...(19): siRNA sense strand
gcagugccuuugccguuca

SEQ ID NO: 394052 - RNA, 19 nt, Homo sapiens
  misc_RNA (1)...(19): siRNA sense strand
uaaggcuguuggagauaaa

SEQ ID NO: 394053 - RNA, 19 nt, Homo sapiens
  misc_RNA (1)...(19): siRNA sense strand
uaaggcuguuggagauaaa

SEQ ID NO: 394054 - RNA, 19 nt, Homo sapiens
  misc_RNA (1)...(19): siRNA sense strand
auaaggcuguuggagauaa

SEQ ID NO: 394055 - RNA, 19 nt, Homo sapiens
  misc_RNA (1)...(19): siRNA sense strand
auaaggcuguuggagauaa

SEQ ID NO: 394056 - RNA, 19 nt, Homo sapiens
  misc_RNA (1)...(19): siRNA sense strand
agaagaccauagcugagaa

SEQ ID NO: 394057 - RNA, 19 nt, Homo sapiens
  misc_RNA (1)...(19): siRNA sense strand
gggcguguggguuauguuu

SEQ ID NO: 394058 - RNA, 19 nt, Homo sapiens
  misc_RNA (1)...(19): siRNA sense strand
auaagaagcaguggauaaa

SEQ ID NO: 394059 - RNA, 19 nt, Homo sapiens
  misc_RNA (1)...(19): siRNA sense strand
gaguaugguguguauguga

SEQ ID NO: 394060 - RNA, 19 nt, Homo sapiens
  misc_RNA (1)...(19): siRNA sense strand
ccacgcugaucaaugaaca

SEQ ID NO: 394061 - RNA, 19 nt, Homo sapiens
  misc_RNA (1)...(19): siRNA sense strand
ggacucaggcaaugauguc

SEQ ID NO: 394062 - RNA, 19 nt, Homo sapiens
  misc_RNA (1)...(19): siRNA sense strand
cagaagaccauagcugaga

SEQ ID NO: 394063 - RNA, 19 nt, Homo sapiens
  misc_RNA (1)...(19): siRNA sense strand
ggaggaggacaccugguau

SEQ ID NO: 394064 - RNA, 19 nt, Homo sapiens
  misc_RNA (1)...(19): siRNA sense strand
cugaccaucugaaguaugu

SEQ ID NO: 394065 - RNA, 19 nt, Homo sapiens
  misc_RNA (1)...(19): siRNA sense strand
aaugagaagcaguggauaa

SEQ ID NO: 394066 - RNA, 19 nt, Homo sapiens
  misc_RNA (1)...(19): siRNA sense strand
ucgguucgcuaccagugua

SEQ ID NO: 394067 - RNA, 19 nt, Homo sapiens
  misc_RNA (1)...(19): siRNA sense strand
ucgguucgcuaccagugua

SEQ ID NO: 394068 - RNA, 19 nt, Homo sapiens
  misc_RNA (1)...(19): siRNA sense strand
cgagauugcacauggcuau

SEQ ID NO: 394069 - RNA, 19 nt, Homo sapiens
  misc_RNA (1)...(19): siRNA sense strand
cgagauugcacauggcuau

SEQ ID NO: 394070 - RNA, 19 nt, Homo sapiens
  misc_RNA (1)...(19): siRNA sense strand
gcacaguccccgaaaagaa

SEQ ID NO: 394071 - RNA, 19 nt, Homo sapiens
  misc_RNA (1)...(19): siRNA sense strand
agaaggugucuguuaauga

SEQ ID NO: 394072 - RNA, 19 nt, Homo sapiens
  misc_RNA (1)...(19): siRNA sense strand
aaguagggcguguggguua

SEQ ID NO: 394073 - RNA, 19 nt, Homo sapiens
  misc_RNA (1)...(19): siRNA sense strand
gaggaggacaccugguaug

SEQ ID NO: 394074 - RNA, 19 nt, Homo sapiens
  misc_RNA (1)...(19): siRNA sense strand
ugaaugaacacaccuucug

SEQ ID NO: 394075 - RNA, 19 nt, Homo sapiens
  misc_RNA (1)...(19): siRNA sense strand
gcguguggguuauguuucu

SEQ ID NO: 394076 - RNA, 19 nt, Homo sapiens
  misc_RNA (1)...(19): siRNA sense strand
gcgcacagaaggagaugga

SEQ ID NO: 394077 - RNA, 19 nt, Homo sapiens
  misc_RNA (1)...(19): siRNA sense strand
gauaaauaaggcuguugga

SEQ ID NO: 394078 - RNA, 19 nt, Homo sapiens
  misc_RNA (1)...(19): siRNA sense strand
gugcagcccauacugaaug

SEQ ID NO: 394079 - RNA, 19 nt, Homo sapiens
  misc_RNA (1)...(19): siRNA sense strand
gcgcacagaaggagaugga

SEQ ID NO: 394080 - RNA, 19 nt, Homo sapiens
  misc_RNA (1)...(19): siRNA sense strand
gauaaauaaggcuguugga

SEQ ID NO: 394081 - RNA, 19 nt, Homo sapiens
  misc_RNA (1)...(19): siRNA sense strand
gcuaccaguguaagaacua

SEQ ID NO: 394082 - RNA, 19 nt, Homo sapiens
  misc_RNA (1)...(19): siRNA sense strand
gcuaccaguguaagaacua

SEQ ID NO: 394083 - RNA, 19 nt, Homo sapiens
  misc_RNA (1)...(19): siRNA sense strand
gcaugucuaaguaccaaga

SEQ ID NO: 394084 - RNA, 19 nt, Homo sapiens
  misc_RNA (1)...(19): siRNA sense strand
agauggaguguacaccuua

SEQ ID NO: 394085 - RNA, 19 nt, Homo sapiens
  misc_RNA (1)...(19): siRNA sense strand
ggcugaguaugguguguau

SEQ ID NO: 394086 - RNA, 19 nt, Homo sapiens
  misc_RNA (1)...(19): siRNA sense strand
guggauaaauaaggcuguu

SEQ ID NO: 394087 - RNA, 19 nt, Homo sapiens
  misc_RNA (1)...(19): siRNA sense strand
ggaucuuaagcuuugauaa

SEQ ID NO: 394088 - RNA, 19 nt, Homo sapiens
  misc_RNA (1)...(19): siRNA sense strand
uggaggaggacaccuggua

SEQ ID NO: 394089 - RNA, 19 nt, Homo sapiens
  misc_RNA (1)...(19): siRNA sense strand
auaaacuuccugaauguga

SEQ ID NO: 394090 - RNA, 19 nt, Homo sapiens
  misc_RNA (1)...(19): siRNA sense strand
uaagaagcaguggauaaau

SEQ ID NO: 394091 - RNA, 19 nt, Homo sapiens
  misc_RNA (1)...(19): siRNA sense strand
ugaaugugaagcaguaugu

SEQ ID NO: 394092 - RNA, 19 nt, Homo sapiens
  misc_RNA (1)...(19): siRNA sense strand
uccugaaugugaagcagua

SEQ ID NO: 394093 - RNA, 19 nt, Homo sapiens
  misc_RNA (1)...(19): siRNA sense strand
auaaacuuccugaauguga

SEQ ID NO: 394094 - RNA, 19 nt, Homo sapiens
  misc_RNA (1)...(19): siRNA sense strand
guggauaaauaaggcuguu

SEQ ID NO: 394095 - RNA, 19 nt, Homo sapiens
  misc_RNA (1)...(19): siRNA sense strand
gauaaacuuccugaaugug

SEQ ID NO: 394096 - RNA, 19 nt, Homo sapiens
  misc_RNA (1)...(19): siRNA sense strand
gggaucuuaagcuuugaua

SEQ ID NO: 394097 - RNA, 19 nt, Homo sapiens
  misc_RNA (1)...(19): siRNA sense strand
gauaaacuuccugaaugug

SEQ ID NO: 394098 - RNA, 19 nt, Homo sapiens
  misc_RNA (1)...(19): siRNA sense strand
ggcaaugaugucacggaua

SEQ ID NO: 394099 - RNA, 19 nt, Homo sapiens
  misc_RNA (1)...(19): siRNA sense strand
caacagcgaaagacauugc

SEQ ID NO: 394100 - RNA, 19 nt, Homo sapiens
  misc_RNA (1)...(19): siRNA sense strand
uuguagagauugagaaggu

SEQ ID NO: 394101 - RNA, 19 nt, Homo sapiens
  misc_RNA (1)...(19): siRNA sense strand
aguaugguguguaugugaa

SEQ ID NO: 394102 - RNA, 19 nt, Homo sapiens
  misc_RNA (1)...(19): siRNA sense strand
gcagcacaguccccgaaaa

SEQ ID NO: 394103 - RNA, 19 nt, Homo sapiens
  misc_RNA (1)...(19): siRNA sense strand
gggugcagcccauacugaa

SEQ ID NO: 394104 - RNA, 19 nt, Homo sapiens
  misc_RNA (1)...(19): siRNA sense strand
gaccaucugaaguauguca

SEQ ID NO: 394105 - RNA, 19 nt, Homo sapiens
  misc_RNA (1)...(19): siRNA sense strand
caucaaacucaaacagaag

SEQ ID NO: 394106 - RNA, 19 nt, Homo sapiens
  misc_RNA (1)...(19): siRNA sense strand
ugcaacagcgaaagacauu

SEQ ID NO: 394107 - RNA, 19 nt, Homo sapiens
  misc_RNA (1)...(19): siRNA sense strand
gcuguuggagauaaacuuc

SEQ ID NO: 394108 - RNA, 19 nt, Homo sapiens
  misc_RNA (1)...(19): siRNA sense strand
ugaguaugguguguaugug

SEQ ID NO: 394109 - RNA, 19 nt, Homo sapiens
  misc_RNA (1)...(19): siRNA sense strand
ugucuaaguaccaagaaga

SEQ ID NO: 394110 - RNA, 19 nt, Homo sapiens
  misc_RNA (1)...(19): siRNA sense strand
gcuguuggagauaaacuuc

SEQ ID NO: 394111 - RNA, 19 nt, Homo sapiens
  misc_RNA (1)...(19): siRNA sense strand
gaaaccaggucucagagua

SEQ ID NO: 394112 - RNA, 19 nt, Homo sapiens
  misc_RNA (1)...(19): siRNA sense strand
ggaagaggaggaagaaaua

SEQ ID NO: 394113 - RNA, 19 nt, Homo sapiens
  misc_RNA (1)...(19): siRNA sense strand
caacauuccuggacaaaca

SEQ ID NO: 394114 - RNA, 19 nt, Homo sapiens
  misc_RNA (1)...(19): siRNA sense strand
gaagaccgaucaagaagag

SEQ ID NO: 394115 - RNA, 19 nt, Homo sapiens
  misc_RNA (1)...(19): siRNA sense strand
ucacacaccugucagaaau

SEQ ID NO: 394116 - RNA, 19 nt, Homo sapiens
  misc_RNA (1)...(19): siRNA sense strand
ccaagccgcuggagcugua

SEQ ID NO: 394117 - RNA, 19 nt, Homo sapiens
  misc_RNA (1)...(19): siRNA sense strand
ggaggacccugucuguuuc

SEQ ID NO: 394118 - RNA, 19 nt, Homo sapiens
  misc_RNA (1)...(19): siRNA sense strand
ucacucaccugcaucaugu

SEQ ID NO: 394119 - RNA, 19 nt, Homo sapiens
  misc_RNA (1)...(19): siRNA sense strand
ggacaacugcgacaucuuc

SEQ ID NO: 394120 - RNA, 19 nt, Homo sapiens
  misc_RNA (1)...(19): siRNA sense strand
ggacaaacagaaugaagug

SEQ ID NO: 394121 - RNA, 19 nt, Homo sapiens
  misc_RNA (1)...(19): siRNA sense strand
ucacggaccuggagauucu

SEQ ID NO: 394122 - RNA, 19 nt, Homo sapiens
  misc_RNA (1)...(19): siRNA sense strand
gggaccugcugaagaaauu

SEQ ID NO: 394123 - RNA, 19 nt, Homo sapiens
  misc_RNA (1)...(19): siRNA sense strand
cugaacaacucuaacauuc

SEQ ID NO: 394124 - RNA, 19 nt, Homo sapiens
  misc_RNA (1)...(19): siRNA sense strand
uggagaaccugaacaagug

SEQ ID NO: 394125 - RNA, 19 nt, Homo sapiens
  misc_RNA (1)...(19): siRNA sense strand
ggugaagaccgaucaagaa

SEQ ID NO: 394126 - RNA, 19 nt, Homo sapiens
  misc_RNA (1)...(19): siRNA sense strand
ggaggaagaaauaucaaug

SEQ ID NO: 394127 - RNA, 19 nt, Homo sapiens
  misc_RNA (1)...(19): siRNA sense strand
ccacaacauuccuggacaa

SEQ ID NO: 394128 - RNA, 19 nt, Homo sapiens
  misc_RNA (1)...(19): siRNA sense strand
cggcagagccuacgcaaga

SEQ ID NO: 394129 - RNA, 19 nt, Homo sapiens
  misc_RNA (1)...(19): siRNA sense strand
ggaauucgugguugcugua

SEQ ID NO: 394130 - RNA, 19 nt, Homo sapiens
  misc_RNA (1)...(19): siRNA sense strand
guaacagccugaacaacuc

SEQ ID NO: 394131 - RNA, 19 nt, Homo sapiens
  misc_RNA (1)...(19): siRNA sense strand
uggacacgauggugacaua

SEQ ID NO: 394132 - RNA, 19 nt, Homo sapiens
  misc_RNA (1)...(19): siRNA sense strand
caggagaucuuggacacuu

SEQ ID NO: 394133 - RNA, 19 nt, Homo sapiens
  misc_RNA (1)...(19): siRNA sense strand
gcacagcccaagaggcauu

SEQ ID NO: 394134 - RNA, 19 nt, Homo sapiens
  misc_RNA (1)...(19): siRNA sense strand
gagcgggaccugcugaaga

SEQ ID NO: 394135 - RNA, 19 nt, Homo sapiens
  misc_RNA (1)...(19): siRNA sense strand
ggaggaagaggaggaagaa

SEQ ID NO: 394136 - RNA, 19 nt, Homo sapiens
  misc_RNA (1)...(19): siRNA sense strand
guacauuuccacaacauuc

SEQ ID NO: 394137 - RNA, 19 nt, Homo sapiens
  misc_RNA (1)...(19): siRNA sense strand
caggagucguuggaaguua

SEQ ID NO: 394138 - RNA, 19 nt, Homo sapiens
  misc_RNA (1)...(19): siRNA sense strand
acacaccugucagaaauga

SEQ ID NO: 394139 - RNA, 19 nt, Homo sapiens
  misc_RNA (1)...(19): siRNA sense strand
ccaaaucacaggguugaaa

SEQ ID NO: 394140 - RNA, 19 nt, Homo sapiens
  misc_RNA (1)...(19): siRNA sense strand
uggaggacccugucuguuu

SEQ ID NO: 394141 - RNA, 19 nt, Homo sapiens
  misc_RNA (1)...(19): siRNA sense strand
cgaggaagcucuggaugca

SEQ ID NO: 394142 - RNA, 19 nt, Homo sapiens
  misc_RNA (1)...(19): siRNA sense strand
gaagaggaggaagaaauau

SEQ ID NO: 394143 - RNA, 19 nt, Homo sapiens
  misc_RNA (1)...(19): siRNA sense strand
gaggacaacugcgacaucu

SEQ ID NO: 394144 - RNA, 19 nt, Homo sapiens
  misc_RNA (1)...(19): siRNA sense strand
cagaguacauuuccacaac

SEQ ID NO: 394145 - RNA, 19 nt, Homo sapiens
  misc_RNA (1)...(19): siRNA sense strand
gagcguggcauggaaauca

SEQ ID NO: 394146 - RNA, 19 nt, Homo sapiens
  misc_RNA (1)...(19): siRNA sense strand
gacguggccuaccauaaca

SEQ ID NO: 394147 - RNA, 19 nt, Homo sapiens
  misc_RNA (1)...(19): siRNA sense strand
ccaaccaguuccucaucaa

SEQ ID NO: 394148 - RNA, 19 nt, Homo sapiens
  misc_RNA (1)...(19): siRNA sense strand
ggccacgccugcacuagau

SEQ ID NO: 394149 - RNA, 19 nt, Homo sapiens
  misc_RNA (1)...(19): siRNA sense strand
cagcccaugucccaaauca

SEQ ID NO: 394150 - RNA, 19 nt, Homo sapiens
  misc_RNA (1)...(19): siRNA sense strand
ccugacaaguuccaguuug

SEQ ID NO: 394151 - RNA, 19 nt, Homo sapiens
  misc_RNA (1)...(19): siRNA sense strand
gaguacauuuccacaacau

SEQ ID NO: 394152 - RNA, 19 nt, Homo sapiens
  misc_RNA (1)...(19): siRNA sense strand
aaauaucaauggcccagau

SEQ ID NO: 394153 - RNA, 19 nt, Homo sapiens
  misc_RNA (1)...(19): siRNA sense strand
cugacaaguuccaguuuga

SEQ ID NO: 394154 - RNA, 19 nt, Homo sapiens
  misc_RNA (1)...(19): siRNA sense strand
gaggaagaaauaucaaugg

SEQ ID NO: 394155 - RNA, 19 nt, Homo sapiens
  misc_RNA (1)...(19): siRNA sense strand
agucggugcucgagaauca

SEQ ID NO: 394156 - RNA, 19 nt, Homo sapiens
  misc_RNA (1)...(19): siRNA sense strand
ggagaucuuggacacuuug

SEQ ID NO: 394157 - RNA, 19 nt, Homo sapiens
  misc_RNA (1)...(19): siRNA sense strand
cauaguaacagccugaaca

SEQ ID NO: 394158 - RNA, 19 nt, Homo sapiens
  misc_RNA (1)...(19): siRNA sense strand
gggugaagaccgaucaaga

SEQ ID NO: 394159 - RNA, 19 nt, Homo sapiens
  misc_RNA (1)...(19): siRNA sense strand
agaagucucagguggguuu

SEQ ID NO: 394160 - RNA, 19 nt, Homo sapiens
  misc_RNA (1)...(19): siRNA sense strand
guggagaccaagaaaguga

SEQ ID NO: 394161 - RNA, 19 nt, Homo sapiens
  misc_RNA (1)...(19): siRNA sense strand
gaacuggagaaccugaaca

SEQ ID NO: 394162 - RNA, 19 nt, Homo sapiens
  misc_RNA (1)...(19): siRNA sense strand
gcccaugucccaaaucaca

SEQ ID NO: 394163 - RNA, 19 nt, Homo sapiens
  misc_RNA (1)...(19): siRNA sense strand
ccucugcccuggcucuuca

SEQ ID NO: 394164 - RNA, 19 nt, Homo sapiens
  misc_RNA (1)...(19): siRNA sense strand
uggcugaccugaagaccau

SEQ ID NO: 394165 - RNA, 19 nt, Homo sapiens
  misc_RNA (1)...(19): siRNA sense strand
acacgauggugacauacau

SEQ ID NO: 394166 - RNA, 19 nt, Homo sapiens
  misc_RNA (1)...(19): siRNA sense strand
ccugaacaacucuaacauu

SEQ ID NO: 394167 - RNA, 19 nt, Homo sapiens
  misc_RNA (1)...(19): siRNA sense strand
ggaggacaacugcgacauc

SEQ ID NO: 394168 - RNA, 19 nt, Homo sapiens
  misc_RNA (1)...(19): siRNA sense strand
ucaccugcaucauguacau

SEQ ID NO: 394169 - RNA, 19 nt, Homo sapiens
  misc_RNA (1)...(19): siRNA sense strand
uuacagcccaugucccaaa

SEQ ID NO: 394170 - RNA, 19 nt, Homo sapiens
  misc_RNA (1)...(19): siRNA sense strand
agcgggaccugcugaagaa

SEQ ID NO: 394171 - RNA, 19 nt, Homo sapiens
  misc_RNA (1)...(19): siRNA sense strand
ggaaaccaggucucagagu

SEQ ID NO: 394172 - RNA, 19 nt, Homo sapiens
  misc_RNA (1)...(19): siRNA sense strand
ccuccuggcugaccugaag

SEQ ID NO: 394173 - RNA, 19 nt, Homo sapiens
  misc_RNA (1)...(19): siRNA sense strand
ugacguggccuaccauaac

SEQ ID NO: 394174 - RNA, 19 nt, Homo sapiens
  misc_RNA (1)...(19): siRNA sense strand
gcuccuggcccaagaacug

SEQ ID NO: 394175 - RNA, 19 nt, Homo sapiens
  misc_RNA (1)...(19): siRNA sense strand
ggaggcaguguauuugaca

SEQ ID NO: 394176 - RNA, 19 nt, Homo sapiens
  misc_RNA (1)...(19): siRNA sense strand
gcagagccuacgcaagaug

SEQ ID NO: 394177 - RNA, 19 nt, Homo sapiens
  misc_RNA (1)...(19): siRNA sense strand
cccaagaacuggagaaccu

SEQ ID NO: 394178 - RNA, 19 nt, Homo sapiens
  misc_RNA (1)...(19): siRNA sense strand
gaccuuguccacccagaug

SEQ ID NO: 394179 - RNA, 19 nt, Homo sapiens
  misc_RNA (1)...(19): siRNA sense strand
gaauucgugguugcuguaa

SEQ ID NO: 394180 - RNA, 19 nt, Homo sapiens
  misc_RNA (1)...(19): siRNA sense strand
agaggaggaagaaauauca

SEQ ID NO: 394181 - RNA, 19 nt, Homo sapiens
  misc_RNA (1)...(19): siRNA sense strand
gcucacacaccugucagaa

SEQ ID NO: 394182 - RNA, 19 nt, Homo sapiens
  misc_RNA (1)...(19): siRNA sense strand
gcuggaggcaguguauuug

SEQ ID NO: 394183 - RNA, 19 nt, Homo sapiens
  misc_RNA (1)...(19): siRNA sense strand
ccggaaaccaggucucaga

SEQ ID NO: 394184 - RNA, 19 nt, Homo sapiens
  misc_RNA (1)...(19): siRNA sense strand
ugaagaccgaucaagaaga

SEQ ID NO: 394185 - RNA, 19 nt, Homo sapiens
  misc_RNA (1)...(19): siRNA sense strand
ggaggaggaagaggaggaa

SEQ ID NO: 394186 - RNA, 19 nt, Homo sapiens
  misc_RNA (1)...(19): siRNA sense strand
ggguccuccugcuagauaa

SEQ ID NO: 394187 - RNA, 19 nt, Homo sapiens
  misc_RNA (1)...(19): siRNA sense strand
gugaagaccgaucaagaag

SEQ ID NO: 394188 - RNA, 19 nt, Homo sapiens
  misc_RNA (1)...(19): siRNA sense strand
ggaaguuauggcacaggaa

SEQ ID NO: 394189 - RNA, 19 nt, Homo sapiens
  misc_RNA (1)...(19): siRNA sense strand
aggagucguuggaaguuau

SEQ ID NO: 394190 - RNA, 19 nt, Homo sapiens
  misc_RNA (1)...(19): siRNA sense strand
agaguacauuuccacaaca

SEQ ID NO: 394191 - RNA, 19 nt, Homo sapiens
  misc_RNA (1)...(19): siRNA sense strand
ggaaaucagccccaugugu

SEQ ID NO: 394192 - RNA, 19 nt, Homo sapiens
  misc_RNA (1)...(19): siRNA sense strand
ccaggucucagaguacauu

SEQ ID NO: 394193 - RNA, 19 nt, Homo sapiens
  misc_RNA (1)...(19): siRNA sense strand
gaggaggaagaaauaucaa

SEQ ID NO: 394194 - RNA, 19 nt, Homo sapiens
  misc_RNA (1)...(19): siRNA sense strand
aggaagaggaggaagaaau

SEQ ID NO: 394195 - RNA, 19 nt, Homo sapiens
  misc_RNA (1)...(19): siRNA sense strand
gcugacguggccuaccaua

SEQ ID NO: 394196 - RNA, 19 nt, Homo sapiens
  misc_RNA (1)...(19): siRNA sense strand
ccaggagucguuggaaguu

SEQ ID NO: 394197 - RNA, 19 nt, Homo sapiens
  misc_RNA (1)...(19): siRNA sense strand
cuacauugugcacccauug

SEQ ID NO: 394198 - RNA, 19 nt, Homo sapiens
  misc_RNA (1)...(19): siRNA sense strand
augagucggugcucgagaa

SEQ ID NO: 394199 - RNA, 19 nt, Homo sapiens
  misc_RNA (1)...(19): siRNA sense strand
caaaucacaggguugaaaa

SEQ ID NO: 394200 - RNA, 19 nt, Homo sapiens
  misc_RNA (1)...(19): siRNA sense strand
ucagaguacauuuccacaa

SEQ ID NO: 394201 - RNA, 19 nt, Homo sapiens
  misc_RNA (1)...(19): siRNA sense strand
aggagaucuuggacacuuu

SEQ ID NO: 394202 - RNA, 19 nt, Homo sapiens
  misc_RNA (1)...(19): siRNA sense strand
ggcagagccuacgcaagau

SEQ ID NO: 394203 - RNA, 19 nt, Homo sapiens
  misc_RNA (1)...(19): siRNA sense strand
ugaaguggagaucccauca

SEQ ID NO: 394204 - RNA, 19 nt, Homo sapiens
  misc_RNA (1)...(19): siRNA sense strand
agaaagagcuuauauagug

SEQ ID NO: 394205 - RNA, 19 nt, Homo sapiens
  misc_RNA (1)...(19): siRNA sense strand
gaaagggucugugaaagaa

SEQ ID NO: 394206 - RNA, 19 nt, Homo sapiens
  misc_RNA (1)...(19): siRNA sense strand
ggaguuggcucgcuuaaau

SEQ ID NO: 394207 - RNA, 19 nt, Homo sapiens
  misc_RNA (1)...(19): siRNA sense strand
uagaagaccugacucguaa

SEQ ID NO: 394208 - RNA, 19 nt, Homo sapiens
  misc_RNA (1)...(19): siRNA sense strand
gcgcaaagauggccagaug

SEQ ID NO: 394209 - RNA, 19 nt, Homo sapiens
  misc_RNA (1)...(19): siRNA sense strand
gaacaagaaagagcuuaua

SEQ ID NO: 394210 - RNA, 19 nt, Homo sapiens
  misc_RNA (1)...(19): siRNA sense strand
ggagugcaaugccaagauu

SEQ ID NO: 394211 - RNA, 19 nt, Homo sapiens
  misc_RNA (1)...(19): siRNA sense strand
ccacauugcuucagacugu

SEQ ID NO: 394212 - RNA, 19 nt, Homo sapiens
  misc_RNA (1)...(19): siRNA sense strand
caagaaagagcuuauauag

SEQ ID NO: 394213 - RNA, 19 nt, Homo sapiens
  misc_RNA (1)...(19): siRNA sense strand
ggaaagggucugugaaaga

SEQ ID NO: 394214 - RNA, 19 nt, Homo sapiens
  misc_RNA (1)...(19): siRNA sense strand
caacacgugugagugauaa

SEQ ID NO: 394215 - RNA, 19 nt, Homo sapiens
  misc_RNA (1)...(19): siRNA sense strand
uaagaaacauccugaagca

SEQ ID NO: 394216 - RNA, 19 nt, Homo sapiens
  misc_RNA (1)...(19): siRNA sense strand
caagaugaguacccagaaa

SEQ ID NO: 394217 - RNA, 19 nt, Homo sapiens
  misc_RNA (1)...(19): siRNA sense strand
gauaaagcacggauggaua

SEQ ID NO: 394218 - RNA, 19 nt, Homo sapiens
  misc_RNA (1)...(19): siRNA sense strand
gaaccaagacacaauggaa

SEQ ID NO: 394219 - RNA, 19 nt, Homo sapiens
  misc_RNA (1)...(19): siRNA sense strand
ccaggaaugccuacaguua

SEQ ID NO: 394220 - RNA, 19 nt, Homo sapiens
  misc_RNA (1)...(19): siRNA sense strand
uuacaaaccuccagcaaca

SEQ ID NO: 394221 - RNA, 19 nt, Homo sapiens
  misc_RNA (1)...(19): siRNA sense strand
ggaacacccugaagaacau

SEQ ID NO: 394222 - RNA, 19 nt, Homo sapiens
  misc_RNA (1)...(19): siRNA sense strand
ucagggacccgcagcauua

SEQ ID NO: 394223 - RNA, 19 nt, Homo sapiens
  misc_RNA (1)...(19): siRNA sense strand
gcaaagauggccagauguu

SEQ ID NO: 394224 - RNA, 19 nt, Homo sapiens
  misc_RNA (1)...(19): siRNA sense strand
gaacagaagacagugauuc

SEQ ID NO: 394225 - RNA, 19 nt, Homo sapiens
  misc_RNA (1)...(19): siRNA sense strand
gacgauaacaggaucuuaa

SEQ ID NO: 394226 - RNA, 19 nt, Homo sapiens
  misc_RNA (1)...(19): siRNA sense strand
ugaagaacauagagaagga

SEQ ID NO: 394227 - RNA, 19 nt, Homo sapiens
  misc_RNA (1)...(19): siRNA sense strand
ucagucagcucaggauaaa

SEQ ID NO: 394228 - RNA, 19 nt, Homo sapiens
  misc_RNA (1)...(19): siRNA sense strand
ucaagccaccugcagauua

SEQ ID NO: 394229 - RNA, 19 nt, Homo sapiens
  misc_RNA (1)...(19): siRNA sense strand
ggcacaaccucaucacaga

SEQ ID NO: 394230 - RNA, 19 nt, Homo sapiens
  misc_RNA (1)...(19): siRNA sense strand
gaucaguaccugggaagua

SEQ ID NO: 394231 - RNA, 19 nt, Homo sapiens
  misc_RNA (1)...(19): siRNA sense strand
gcaacacgugugagugaua

SEQ ID NO: 394232 - RNA, 19 nt, Homo sapiens
  misc_RNA (1)...(19): siRNA sense strand
aagcacggauggauaaaga

SEQ ID NO: 394233 - RNA, 19 nt, Homo sapiens
  misc_RNA (1)...(19): siRNA sense strand
cagcuucccacacccauua

SEQ ID NO: 394234 - RNA, 19 nt, Homo sapiens
  misc_RNA (1)...(19): siRNA sense strand
gagcuuauauagugcaacu

SEQ ID NO: 394235 - RNA, 19 nt, Homo sapiens
  misc_RNA (1)...(19): siRNA sense strand
gauaagaaacauccugaag

SEQ ID NO: 394236 - RNA, 19 nt, Homo sapiens
  misc_RNA (1)...(19): siRNA sense strand
aggaaugccuacaguuauu

SEQ ID NO: 394237 - RNA, 19 nt, Homo sapiens
  misc_RNA (1)...(19): siRNA sense strand
caucgagugucuucuuugu

SEQ ID NO: 394238 - RNA, 19 nt, Homo sapiens
  misc_RNA (1)...(19): siRNA sense strand
gcaguggaacagauaagaa

SEQ ID NO: 394239 - RNA, 19 nt, Homo sapiens
  misc_RNA (1)...(19): siRNA sense strand
ugucuucuuugucuucuuu

SEQ ID NO: 394240 - RNA, 19 nt, Homo sapiens
  misc_RNA (1)...(19): siRNA sense strand
auaaagcacggauggauaa

SEQ ID NO: 394241 - RNA, 19 nt, Homo sapiens
  misc_RNA (1)...(19): siRNA sense strand
gcagauagaagaccugacu

SEQ ID NO: 394242 - RNA, 19 nt, Homo sapiens
  misc_RNA (1)...(19): siRNA sense strand
gcacggauggauaaagaau

SEQ ID NO: 394243 - RNA, 19 nt, Homo sapiens
  misc_RNA (1)...(19): siRNA sense strand
gggaaagggucugugaaag

SEQ ID NO: 394244 - RNA, 19 nt, Homo sapiens
  misc_RNA (1)...(19): siRNA sense strand
cagcaacacgugugaguga

SEQ ID NO: 394245 - RNA, 19 nt, Homo sapiens
  misc_RNA (1)...(19): siRNA sense strand
caagccaccugcagauuac

SEQ ID NO: 394246 - RNA, 19 nt, Homo sapiens
  misc_RNA (1)...(19): siRNA sense strand
agagaugguugcacucaau

SEQ ID NO: 394247 - RNA, 19 nt, Homo sapiens
  misc_RNA (1)...(19): siRNA sense strand
acggauggauaaagaauau

SEQ ID NO: 394248 - RNA, 19 nt, Homo sapiens
  misc_RNA (1)...(19): siRNA sense strand
ccaauacaauggagaacgu

SEQ ID NO: 394249 - RNA, 19 nt, Homo sapiens
  misc_RNA (1)...(19): siRNA sense strand
gggaacacccugaagaaca

SEQ ID NO: 394250 - RNA, 19 nt, Homo sapiens
  misc_RNA (1)...(19): siRNA sense strand
gagaacaagaaagagcuua

SEQ ID NO: 394251 - RNA, 19 nt, Homo sapiens
  misc_RNA (1)...(19): siRNA sense strand
guacccagaaaucaacuuu

SEQ ID NO: 394252 - RNA, 19 nt, Homo sapiens
  misc_RNA (1)...(19): siRNA sense strand
ccauggcccuccuccaaug

SEQ ID NO: 394253 - RNA, 19 nt, Homo sapiens
  misc_RNA (1)...(19): siRNA sense strand
gauaacaggaucuuaagac

SEQ ID NO: 394254 - RNA, 19 nt, Homo sapiens
  misc_RNA (1)...(19): siRNA sense strand
ggauaaagcacggauggau

SEQ ID NO: 394255 - RNA, 19 nt, Homo sapiens
  misc_RNA (1)...(19): siRNA sense strand
auagaagaccugacucgua

SEQ ID NO: 394256 - RNA, 19 nt, Homo sapiens
  misc_RNA (1)...(19): siRNA sense strand
gaagcaggguaucgagacu

SEQ ID NO: 394257 - RNA, 19 nt, Homo sapiens
  misc_RNA (1)...(19): siRNA sense strand
gcaaugccaagauuaugau

SEQ ID NO: 394258 - RNA, 19 nt, Homo sapiens
  misc_RNA (1)...(19): siRNA sense strand
ccugagcccaucuacaaua

SEQ ID NO: 394259 - RNA, 19 nt, Homo sapiens
  misc_RNA (1)...(19): siRNA sense strand
agaccugacucguaaacug

SEQ ID NO: 394260 - RNA, 19 nt, Homo sapiens
  misc_RNA (1)...(19): siRNA sense strand
gaacacccugaagaacaua

SEQ ID NO: 394261 - RNA, 19 nt, Homo sapiens
  misc_RNA (1)...(19): siRNA sense strand
aaaggcaguggaacagaua

SEQ ID NO: 394262 - RNA, 19 nt, Homo sapiens
  misc_RNA (1)...(19): siRNA sense strand
ccaaaggccuggugauccu

SEQ ID NO: 394263 - RNA, 19 nt, Homo sapiens
  misc_RNA (1)...(19): siRNA sense strand
gaugaguacccagaaauca

SEQ ID NO: 394264 - RNA, 19 nt, Homo sapiens
  misc_RNA (1)...(19): siRNA sense strand
ccacuucaugcccugguua

SEQ ID NO: 394265 - RNA, 19 nt, Homo sapiens
  misc_RNA (1)...(19): siRNA sense strand
caaagauggccagauguug

SEQ ID NO: 394266 - RNA, 19 nt, Homo sapiens
  misc_RNA (1)...(19): siRNA sense strand
acccagaaaucaacuuugu

SEQ ID NO: 394267 - RNA, 19 nt, Homo sapiens
  misc_RNA (1)...(19): siRNA sense strand
gagugcaaugccaagauua

SEQ ID NO: 394268 - RNA, 19 nt, Homo sapiens
  misc_RNA (1)...(19): siRNA sense strand
caggaaugccuacaguuau

SEQ ID NO: 394269 - RNA, 19 nt, Homo sapiens
  misc_RNA (1)...(19): siRNA sense strand
caccgucucucaugucuac

SEQ ID NO: 394270 - RNA, 19 nt, Homo sapiens
  misc_RNA (1)...(19): siRNA sense strand
caguggaacagauaagaaa

SEQ ID NO: 394271 - RNA, 19 nt, Homo sapiens
  misc_RNA (1)...(19): siRNA sense strand
gaagguugggcgcaaagau

SEQ ID NO: 394272 - RNA, 19 nt, Homo sapiens
  misc_RNA (1)...(19): siRNA sense strand
ggaacagaagacagugauu

SEQ ID NO: 394273 - RNA, 19 nt, Homo sapiens
  misc_RNA (1)...(19): siRNA sense strand
ucgagugucuucuuugucu

SEQ ID NO: 394274 - RNA, 19 nt, Homo sapiens
  misc_RNA (1)...(19): siRNA sense strand
gggaagacgauaacaggau

SEQ ID NO: 394275 - RNA, 19 nt, Homo sapiens
  misc_RNA (1)...(19): siRNA sense strand
gcuuaacacccgagaguuc

SEQ ID NO: 394276 - RNA, 19 nt, Homo sapiens
  misc_RNA (1)...(19): siRNA sense strand
gacaucccaugcagcacaa

SEQ ID NO: 394277 - RNA, 19 nt, Homo sapiens
  misc_RNA (1)...(19): siRNA sense strand
gauguugccaggagaagau

SEQ ID NO: 394278 - RNA, 19 nt, Homo sapiens
  misc_RNA (1)...(19): siRNA sense strand
gugauaaagucaugauucc

SEQ ID NO: 394279 - RNA, 19 nt, Homo sapiens
  misc_RNA (1)...(19): siRNA sense strand
caauggaacagaagacagu

SEQ ID NO: 394280 - RNA, 19 nt, Homo sapiens
  misc_RNA (1)...(19): siRNA sense strand
ggaagaggagccgcuggaa

SEQ ID NO: 394281 - RNA, 19 nt, Homo sapiens
  misc_RNA (1)...(19): siRNA sense strand
cagagaugguugcacucaa

SEQ ID NO: 394282 - RNA, 19 nt, Homo sapiens
  misc_RNA (1)...(19): siRNA sense strand
caccauggcccuccuccaa

SEQ ID NO: 394283 - RNA, 19 nt, Homo sapiens
  misc_RNA (1)...(19): siRNA sense strand
cagaaugaucuacggaaga

SEQ ID NO: 394284 - RNA, 19 nt, Homo sapiens
  misc_RNA (1)...(19): siRNA sense strand
gaagaccugacucguaaac

SEQ ID NO: 394285 - RNA, 19 nt, Homo sapiens
  misc_RNA (1)...(19): siRNA sense strand
aagacacaauggaacagaa

SEQ ID NO: 394286 - RNA, 19 nt, Homo sapiens
  misc_RNA (1)...(19): siRNA sense strand
gauuacaaaccuccagcaa

SEQ ID NO: 394287 - RNA, 19 nt, Homo sapiens
  misc_RNA (1)...(19): siRNA sense strand
cgcccacccuggaugaauu

SEQ ID NO: 394288 - RNA, 19 nt, Homo sapiens
  misc_RNA (1)...(19): siRNA sense strand
ccaaguaagaagcggaaga

SEQ ID NO: 394289 - RNA, 19 nt, Homo sapiens
  misc_RNA (1)...(19): siRNA sense strand
ggacuuacucgagaacaag

SEQ ID NO: 394290 - RNA, 19 nt, Homo sapiens
  misc_RNA (1)...(19): siRNA sense strand
ccagaggaccagaaugauc

SEQ ID NO: 394291 - RNA, 19 nt, Homo sapiens
  misc_RNA (1)...(19): siRNA sense strand
gcaguauggcuuccaguac

SEQ ID NO: 394292 - RNA, 19 nt, Homo sapiens
  misc_RNA (1)...(19): siRNA sense strand
agaugcagcuucgggaguu

SEQ ID NO: 394293 - RNA, 19 nt, Homo sapiens
  misc_RNA (1)...(19): siRNA sense strand
cuccagaggaccagaauga

SEQ ID NO: 394294 - RNA, 19 nt, Homo sapiens
  misc_RNA (1)...(19): siRNA sense strand
ggaaccaagacacaaugga

SEQ ID NO: 394295 - RNA, 19 nt, Homo sapiens
  misc_RNA (1)...(19): siRNA sense strand
gagcggcacaaccucauca

SEQ ID NO: 394296 - RNA, 19 nt, Homo sapiens
  misc_RNA (1)...(19): siRNA sense strand
aagaauauuugucccucau

SEQ ID NO: 394297 - RNA, 19 nt, Homo sapiens
  misc_RNA (1)...(19): siRNA sense strand
cagaggaccagaaugaucu

SEQ ID NO: 394298 - RNA, 19 nt, Homo sapiens
  misc_RNA (1)...(19): siRNA sense strand
agucaugauuccacaagau

SEQ ID NO: 394299 - RNA, 19 nt, Homo sapiens
  misc_RNA (1)...(19): siRNA sense strand
gcaucgagugucuucuuug

SEQ ID NO: 394300 - RNA, 19 nt, Homo sapiens
  misc_RNA (1)...(19): siRNA sense strand
ccaccaccaccaccgauga

SEQ ID NO: 394301 - RNA, 19 nt, Homo sapiens
  misc_RNA (1)...(19): siRNA sense strand
caagacacaauggaacaga

SEQ ID NO: 394302 - RNA, 19 nt, Homo sapiens
  misc_RNA (1)...(19): siRNA sense strand
ugugagugauaaagucaug

SEQ ID NO: 394303 - RNA, 19 nt, Homo sapiens
  misc_RNA (1)...(19): siRNA sense strand
uagcaucgagugucuucuu

SEQ ID NO: 394304 - RNA, 19 nt, Homo sapiens
  misc_RNA (1)...(19): siRNA sense strand
gaagaaacuuguacuauuc

SEQ ID NO: 394305 - RNA, 19 nt, Homo sapiens
  misc_RNA (1)...(19): siRNA sense strand
ccagagaccuguuguguuu

SEQ ID NO: 394306 - RNA, 19 nt, Homo sapiens
  misc_RNA (1)...(19): siRNA sense strand
gaagugacuaugaacauua

SEQ ID NO: 394307 - RNA, 19 nt, Homo sapiens
  misc_RNA (1)...(19): siRNA sense strand
gaacauuagucagaugauu

SEQ ID NO: 394308 - RNA, 19 nt, Homo sapiens
  misc_RNA (1)...(19): siRNA sense strand
gaagugugcucccgugaga

SEQ ID NO: 394309 - RNA, 19 nt, Homo sapiens
  misc_RNA (1)...(19): siRNA sense strand
ccacacaacuucuuugauc

SEQ ID NO: 394310 - RNA, 19 nt, Homo sapiens
  misc_RNA (1)...(19): siRNA sense strand
caacagccuugccuucauu

SEQ ID NO: 394311 - RNA, 19 nt, Homo sapiens
  misc_RNA (1)...(19): siRNA sense strand
cagcaaugccuuauuuaua

SEQ ID NO: 394312 - RNA, 19 nt, Homo sapiens
  misc_RNA (1)...(19): siRNA sense strand
gacugaagaugguuauauu

SEQ ID NO: 394313 - RNA, 19 nt, Homo sapiens
  misc_RNA (1)...(19): siRNA sense strand
cgacuucauuguaaagaaa

SEQ ID NO: 394314 - RNA, 19 nt, Homo sapiens
  misc_RNA (1)...(19): siRNA sense strand
ugaagaauaugaaguugug

SEQ ID NO: 394315 - RNA, 19 nt, Homo sapiens
  misc_RNA (1)...(19): siRNA sense strand
gacuacacaugguuuguuu

SEQ ID NO: 394316 - RNA, 19 nt, Homo sapiens
  misc_RNA (1)...(19): siRNA sense strand
caaucccucuucaaguuua

SEQ ID NO: 394317 - RNA, 19 nt, Homo sapiens
  misc_RNA (1)...(19): siRNA sense strand
aauaugaaguugugacuga

SEQ ID NO: 394318 - RNA, 19 nt, Homo sapiens
  misc_RNA (1)...(19): siRNA sense strand
agaagcagcuacacuaugu

SEQ ID NO: 394319 - RNA, 19 nt, Homo sapiens
  misc_RNA (1)...(19): siRNA sense strand
acacaugguuuguuuggaa

SEQ ID NO: 394320 - RNA, 19 nt, Homo sapiens
  misc_RNA (1)...(19): siRNA sense strand
cucaagaaguuuacaauga

SEQ ID NO: 394321 - RNA, 19 nt, Homo sapiens
  misc_RNA (1)...(19): siRNA sense strand
gacagaagcagcuacacua

SEQ ID NO: 394322 - RNA, 19 nt, Homo sapiens
  misc_RNA (1)...(19): siRNA sense strand
ucaauagaauuccuuaugg

SEQ ID NO: 394323 - RNA, 19 nt, Homo sapiens
  misc_RNA (1)...(19): siRNA sense strand
caaccucccuacuacaaug

SEQ ID NO: 394324 - RNA, 19 nt, Homo sapiens
  misc_RNA (1)...(19): siRNA sense strand
gaagcccaguucagaauag

SEQ ID NO: 394325 - RNA, 19 nt, Homo sapiens
  misc_RNA (1)...(19): siRNA sense strand
gcccugaagugacuaugaa

SEQ ID NO: 394326 - RNA, 19 nt, Homo sapiens
  misc_RNA (1)...(19): siRNA sense strand
ccaaaacuccccaaucuua

SEQ ID NO: 394327 - RNA, 19 nt, Homo sapiens
  misc_RNA (1)...(19): siRNA sense strand
gaugaaauggcuaaauaug

SEQ ID NO: 394328 - RNA, 19 nt, Homo sapiens
  misc_RNA (1)...(19): siRNA sense strand
gcagcaaugccuuauuuau

SEQ ID NO: 394329 - RNA, 19 nt, Homo sapiens
  misc_RNA (1)...(19): siRNA sense strand
ugaaauggcuaaauaugac

SEQ ID NO: 394330 - RNA, 19 nt, Homo sapiens
  misc_RNA (1)...(19): siRNA sense strand
ugaagugacuaugaacauu

SEQ ID NO: 394331 - RNA, 19 nt, Homo sapiens
  misc_RNA (1)...(19): siRNA sense strand
ggaagcccaguucagaaua

SEQ ID NO: 394332 - RNA, 19 nt, Homo sapiens
  misc_RNA (1)...(19): siRNA sense strand
gucagaugauuacuuauug

SEQ ID NO: 394333 - RNA, 19 nt, Homo sapiens
  misc_RNA (1)...(19): siRNA sense strand
gacccaggcuguuaagucu

SEQ ID NO: 394334 - RNA, 19 nt, Homo sapiens
  misc_RNA (1)...(19): siRNA sense strand
caagaaguuuacaaugaca

SEQ ID NO: 394335 - RNA, 19 nt, Homo sapiens
  misc_RNA (1)...(19): siRNA sense strand
cucaaucccucuucaaguu

SEQ ID NO: 394336 - RNA, 19 nt, Homo sapiens
  misc_RNA (1)...(19): siRNA sense strand
uaacacgagucgcuuggau

SEQ ID NO: 394337 - RNA, 19 nt, Homo sapiens
  misc_RNA (1)...(19): siRNA sense strand
ccagaagaaacuuguacua

SEQ ID NO: 394338 - RNA, 19 nt, Homo sapiens
  misc_RNA (1)...(19): siRNA sense strand
ucaagaaguuuacaaugac

SEQ ID NO: 394339 - RNA, 19 nt, Homo sapiens
  misc_RNA (1)...(19): siRNA sense strand
auucugggcuuucagcuuu

SEQ ID NO: 394340 - RNA, 19 nt, Homo sapiens
  misc_RNA (1)...(19): siRNA sense strand
cagaagaaacuuguacuau

SEQ ID NO: 394341 - RNA, 19 nt, Homo sapiens
  misc_RNA (1)...(19): siRNA sense strand
ggacuacacaugguuuguu

SEQ ID NO: 394342 - RNA, 19 nt, Homo sapiens
  misc_RNA (1)...(19): siRNA sense strand
ggcagaugcugguuaugau

SEQ ID NO: 394343 - RNA, 19 nt, Homo sapiens
  misc_RNA (1)...(19): siRNA sense strand
gcuguuaagucugggaaau

SEQ ID NO: 394344 - RNA, 19 nt, Homo sapiens
  misc_RNA (1)...(19): siRNA sense strand
guguaucuaucacauaauc

SEQ ID NO: 394345 - RNA, 19 nt, Homo sapiens
  misc_RNA (1)...(19): siRNA sense strand
gauacccaaaugaagaaua

SEQ ID NO: 394346 - RNA, 19 nt, Homo sapiens
  misc_RNA (1)...(19): siRNA sense strand
aacaauggcaaguuugaua

SEQ ID NO: 394347 - RNA, 19 nt, Homo sapiens
  misc_RNA (1)...(19): siRNA sense strand
gucaauagaauuccuuaug

SEQ ID NO: 394348 - RNA, 19 nt, Homo sapiens
  misc_RNA (1)...(19): siRNA sense strand
aaagaaaacuggacagaag

SEQ ID NO: 394349 - RNA, 19 nt, Homo sapiens
  misc_RNA (1)...(19): siRNA sense strand
ggacccaggcuguuaaguc

SEQ ID NO: 394350 - RNA, 19 nt, Homo sapiens
  misc_RNA (1)...(19): siRNA sense strand
ccacugugaaguauacaaa

SEQ ID NO: 394351 - RNA, 19 nt, Homo sapiens
  misc_RNA (1)...(19): siRNA sense strand
ggacagaagcagcuacacu

SEQ ID NO: 394352 - RNA, 19 nt, Homo sapiens
  misc_RNA (1)...(19): siRNA sense strand
gggaagcccaguucagaau

SEQ ID NO: 394353 - RNA, 19 nt, Homo sapiens
  misc_RNA (1)...(19): siRNA sense strand
gacuuuaucugggcaaugg

SEQ ID NO: 394354 - RNA, 19 nt, Homo sapiens
  misc_RNA (1)...(19): siRNA sense strand
ccaaucuuauuuaccacaa

SEQ ID NO: 394355 - RNA, 19 nt, Homo sapiens
  misc_RNA (1)...(19): siRNA sense strand
gggauacccaaaugaagaa

SEQ ID NO: 394356 - RNA, 19 nt, Homo sapiens
  misc_RNA (1)...(19): siRNA sense strand
gaagucaauagaauuccuu

SEQ ID NO: 394357 - RNA, 19 nt, Homo sapiens
  misc_RNA (1)...(19): siRNA sense strand
ugacugaagaugguuauau

SEQ ID NO: 394358 - RNA, 19 nt, Homo sapiens
  misc_RNA (1)...(19): siRNA sense strand
agccaugaauguaccaauu

SEQ ID NO: 394359 - RNA, 19 nt, Homo sapiens
  misc_RNA (1)...(19): siRNA sense strand
guacuauucaccagauuca

SEQ ID NO: 394360 - RNA, 19 nt, Homo sapiens
  misc_RNA (1)...(19): siRNA sense strand
gcagaugcugguuaugaug

SEQ ID NO: 394361 - RNA, 19 nt, Homo sapiens
  misc_RNA (1)...(19): siRNA sense strand
gauuugacaguaagaacuu

SEQ ID NO: 394362 - RNA, 19 nt, Homo sapiens
  misc_RNA (1)...(19): siRNA sense strand
gcuuggauguguaucuauc

SEQ ID NO: 394363 - RNA, 19 nt, Homo sapiens
  misc_RNA (1)...(19): siRNA sense strand
cacaugguuuguuuggaaa

SEQ ID NO: 394364 - RNA, 19 nt, Homo sapiens
  misc_RNA (1)...(19): siRNA sense strand
uggcaaguuugauaucugu

SEQ ID NO: 394365 - RNA, 19 nt, Homo sapiens
  misc_RNA (1)...(19): siRNA sense strand
gccaugaauguaccaauug

SEQ ID NO: 394366 - RNA, 19 nt, Homo sapiens
  misc_RNA (1)...(19): siRNA sense strand
gaaauuccaagcuuaugac

SEQ ID NO: 394367 - RNA, 19 nt, Homo sapiens
  misc_RNA (1)...(19): siRNA sense strand
gaaguugugacugaagaug

SEQ ID NO: 394368 - RNA, 19 nt, Homo sapiens
  misc_RNA (1)...(19): siRNA sense strand
ucgcuuggauguguaucua

SEQ ID NO: 394369 - RNA, 19 nt, Homo sapiens
  misc_RNA (1)...(19): siRNA sense strand
cacacaacuucuuugauca

SEQ ID NO: 394370 - RNA, 19 nt, Homo sapiens
  misc_RNA (1)...(19): siRNA sense strand
uuuccaaccugccgaacaa

SEQ ID NO: 394371 - RNA, 19 nt, Homo sapiens
  misc_RNA (1)...(19): siRNA sense strand
ucaauuucuugcuacugaa

SEQ ID NO: 394372 - RNA, 19 nt, Homo sapiens
  misc_RNA (1)...(19): siRNA sense strand
uggcagaugcugguuauga

SEQ ID NO: 394373 - RNA, 19 nt, Homo sapiens
  misc_RNA (1)...(19): siRNA sense strand
uguuaagucugggaaauuc

SEQ ID NO: 394374 - RNA, 19 nt, Homo sapiens
  misc_RNA (1)...(19): siRNA sense strand
cgagucgcuuggaugugua

SEQ ID NO: 394375 - RNA, 19 nt, Homo sapiens
  misc_RNA (1)...(19): siRNA sense strand
gacaguaagaacuuuaaca

SEQ ID NO: 394376 - RNA, 19 nt, Homo sapiens
  misc_RNA (1)...(19): siRNA sense strand
ucaaucccucuucaaguuu

SEQ ID NO: 394377 - RNA, 19 nt, Homo sapiens
  misc_RNA (1)...(19): siRNA sense strand
ucagaugauuacuuauugg

SEQ ID NO: 394378 - RNA, 19 nt, Homo sapiens
  misc_RNA (1)...(19): siRNA sense strand
ucacauaauccagcaggaa

SEQ ID NO: 394379 - RNA, 19 nt, Homo sapiens
  misc_RNA (1)...(19): siRNA sense strand
ccuggaagcccugaaguga

SEQ ID NO: 394380 - RNA, 19 nt, Homo sapiens
  misc_RNA (1)...(19): siRNA sense strand
uaugaacauuagucagaug

SEQ ID NO: 394381 - RNA, 19 nt, Homo sapiens
  misc_RNA (1)...(19): siRNA sense strand
uggaagcccugaagugacu

SEQ ID NO: 394382 - RNA, 19 nt, Homo sapiens
  misc_RNA (1)...(19): siRNA sense strand
caaugugacagccaugaau

SEQ ID NO: 394383 - RNA, 19 nt, Homo sapiens
  misc_RNA (1)...(19): siRNA sense strand
aucaauuucuugcuacuga

SEQ ID NO: 394384 - RNA, 19 nt, Homo sapiens
  misc_RNA (1)...(19): siRNA sense strand
cagaagcagcuacacuaug

SEQ ID NO: 394385 - RNA, 19 nt, Homo sapiens
  misc_RNA (1)...(19): siRNA sense strand
ggccagagaccuguugugu

SEQ ID NO: 394386 - RNA, 19 nt, Homo sapiens
  misc_RNA (1)...(19): siRNA sense strand
acaauggcaaguuugauau

SEQ ID NO: 394387 - RNA, 19 nt, Homo sapiens
  misc_RNA (1)...(19): siRNA sense strand
ggaugccccucaagaaguu

SEQ ID NO: 394388 - RNA, 19 nt, Homo sapiens
  misc_RNA (1)...(19): siRNA sense strand
gucccaaccucccuacuac

SEQ ID NO: 394389 - RNA, 19 nt, Homo sapiens
  misc_RNA (1)...(19): siRNA sense strand
cauuggacccaggcuguua

SEQ ID NO: 394390 - RNA, 19 nt, Homo sapiens
  misc_RNA (1)...(19): siRNA sense strand
uuaacaauggcaaguuuga

SEQ ID NO: 394391 - RNA, 19 nt, Homo sapiens
  misc_RNA (1)...(19): siRNA sense strand
gcaaguuugauaucuguac

SEQ ID NO: 394392 - RNA, 19 nt, Homo sapiens
  misc_RNA (1)...(19): siRNA sense strand
acaacagccuugccuucau

SEQ ID NO: 394393 - RNA, 19 nt, Homo sapiens
  misc_RNA (1)...(19): siRNA sense strand
caaguuugauaucuguacu

SEQ ID NO: 394394 - RNA, 19 nt, Homo sapiens
  misc_RNA (1)...(19): siRNA sense strand
ccaaaugaagaauaugaag

SEQ ID NO: 394395 - RNA, 19 nt, Homo sapiens
  misc_RNA (1)...(19): siRNA sense strand
uuuguggauuugacaguaa

SEQ ID NO: 394396 - RNA, 19 nt, Homo sapiens
  misc_RNA (1)...(19): siRNA sense strand
gaagcagcuacacuauguu

SEQ ID NO: 394397 - RNA, 19 nt, Homo sapiens
  misc_RNA (1)...(19): siRNA sense strand
gccagagaccuguuguguu

SEQ ID NO: 394398 - RNA, 19 nt, Homo sapiens
  misc_RNA (1)...(19): siRNA sense strand
ccucaagaaguuuacaaug

SEQ ID NO: 394399 - RNA, 19 nt, Homo sapiens
  misc_RNA (1)...(19): siRNA sense strand
acgagucgcuuggaugugu

SEQ ID NO: 394400 - RNA, 19 nt, Homo sapiens
  misc_RNA (1)...(19): siRNA sense strand
acacaacuucuuugaucaa

SEQ ID NO: 394401 - RNA, 19 nt, Homo sapiens
  misc_RNA (1)...(19): siRNA sense strand
ucgacuucauuguaaagaa

SEQ ID NO: 394402 - RNA, 19 nt, Homo sapiens
  misc_RNA (1)...(19): siRNA sense strand
caguugaauucugggcuuu

SEQ ID NO: 394403 - RNA, 19 nt, Homo sapiens
  misc_RNA (1)...(19): siRNA sense strand
ccaugaauguaccaauugc

SEQ ID NO: 394404 - RNA, 19 nt, Homo sapiens
  misc_RNA (1)...(19): siRNA sense strand
cauggaaccucuuuacaua

SEQ ID NO: 394405 - RNA, 19 nt, Homo sapiens
  misc_RNA (1)...(19): siRNA sense strand
cgacaaaguccacaaguua

SEQ ID NO: 394406 - RNA, 19 nt, Homo sapiens
  misc_RNA (1)...(19): siRNA sense strand
caacgcgggucucagguuu

SEQ ID NO: 394407 - RNA, 19 nt, Homo sapiens
  misc_RNA (1)...(19): siRNA sense strand
ccaggcagcauguucauua

SEQ ID NO: 394408 - RNA, 19 nt, Homo sapiens
  misc_RNA (1)...(19): siRNA sense strand
ccagaaggcugcggauauu

SEQ ID NO: 394409 - RNA, 19 nt, Homo sapiens
  misc_RNA (1)...(19): siRNA sense strand
gcacaauaaugaccucaca

SEQ ID NO: 394410 - RNA, 19 nt, Homo sapiens
  misc_RNA (1)...(19): siRNA sense strand
auaaugaccucacauggaa

SEQ ID NO: 394411 - RNA, 19 nt, Homo sapiens
  misc_RNA (1)...(19): siRNA sense strand
gcucaccgcuugcaaacug

SEQ ID NO: 394412 - RNA, 19 nt, Homo sapiens
  misc_RNA (1)...(19): siRNA sense strand
ggaagaaggcggaagaucu

SEQ ID NO: 394413 - RNA, 19 nt, Homo sapiens
  misc_RNA (1)...(19): siRNA sense strand
gaagaaggcggaagaucug

SEQ ID NO: 394414 - RNA, 19 nt, Homo sapiens
  misc_RNA (1)...(19): siRNA sense strand
uuacauaccuggaguuugc

SEQ ID NO: 394415 - RNA, 19 nt, Homo sapiens
  misc_RNA (1)...(19): siRNA sense strand
aaacgaaggugaaguucuc

SEQ ID NO: 394416 - RNA, 19 nt, Homo sapiens
  misc_RNA (1)...(19): siRNA sense strand
ggcagcauguucauuauag

SEQ ID NO: 394417 - RNA, 19 nt, Homo sapiens
  misc_RNA (1)...(19): siRNA sense strand
aagagaagcuggacaaagc

SEQ ID NO: 394418 - RNA, 19 nt, Homo sapiens
  misc_RNA (1)...(19): siRNA sense strand
ccuccaaguuuaaagagaa

SEQ ID NO: 394419 - RNA, 19 nt, Homo sapiens
  misc_RNA (1)...(19): siRNA sense strand
acaccagggucucggaauu

SEQ ID NO: 394420 - RNA, 19 nt, Homo sapiens
  misc_RNA (1)...(19): siRNA sense strand
gaagacagagcaagguuac

SEQ ID NO: 394421 - RNA, 19 nt, Homo sapiens
  misc_RNA (1)...(19): siRNA sense strand
guaugcaggugacuguguu

SEQ ID NO: 394422 - RNA, 19 nt, Homo sapiens
  misc_RNA (1)...(19): siRNA sense strand
aacugaagguguucgauuu

SEQ ID NO: 394423 - RNA, 19 nt, Homo sapiens
  misc_RNA (1)...(19): siRNA sense strand
gagaagacagagcaagguu

SEQ ID NO: 394424 - RNA, 19 nt, Homo sapiens
  misc_RNA (1)...(19): siRNA sense strand
gauugagggcuuuaugcua

SEQ ID NO: 394425 - RNA, 19 nt, Homo sapiens
  misc_RNA (1)...(19): siRNA sense strand
aaacugaagguguucgauu

SEQ ID NO: 394426 - RNA, 19 nt, Homo sapiens
  misc_RNA (1)...(19): siRNA sense strand
gcuucaucaugcacaauaa

SEQ ID NO: 394427 - RNA, 19 nt, Homo sapiens
  misc_RNA (1)...(19): siRNA sense strand
gaaggcggaagaucuguuc

SEQ ID NO: 394428 - RNA, 19 nt, Homo sapiens
  misc_RNA (1)...(19): siRNA sense strand
auugagggcuuuaugcuau

SEQ ID NO: 394429 - RNA, 19 nt, Homo sapiens
  misc_RNA (1)...(19): siRNA sense strand
uuaaagagaagcuggacaa

SEQ ID NO: 394430 - RNA, 19 nt, Homo sapiens
  misc_RNA (1)...(19): siRNA sense strand
gaaacgaaggugaaguucu

SEQ ID NO: 394431 - RNA, 19 nt, Homo sapiens
  misc_RNA (1)...(19): siRNA sense strand
ugacuggccagacgacaaa

SEQ ID NO: 394432 - RNA, 19 nt, Homo sapiens
  misc_RNA (1)...(19): siRNA sense strand
agaagacagagcaagguua

SEQ ID NO: 394433 - RNA, 19 nt, Homo sapiens
  misc_RNA (1)...(19): siRNA sense strand
cggcagaggcugaguguca

SEQ ID NO: 394434 - RNA, 19 nt, Homo sapiens
  misc_RNA (1)...(19): siRNA sense strand
ggagaggcuucuggacauc

SEQ ID NO: 394435 - RNA, 19 nt, Homo sapiens
  misc_RNA (1)...(19): siRNA sense strand
gcccgugaguacccucgua

SEQ ID NO: 394436 - RNA, 19 nt, Homo sapiens
  misc_RNA (1)...(19): siRNA sense strand
gccacggccuucaaucugu

SEQ ID NO: 394437 - RNA, 19 nt, Homo sapiens
  misc_RNA (1)...(19): siRNA sense strand
ggagcugauugagggcuuu

SEQ ID NO: 394438 - RNA, 19 nt, Homo sapiens
  misc_RNA (1)...(19): siRNA sense strand
acgacaaaguccacaaguu

SEQ ID NO: 394439 - RNA, 19 nt, Homo sapiens
  misc_RNA (1)...(19): siRNA sense strand
gcaacgcgggucucagguu

SEQ ID NO: 394440 - RNA, 19 nt, Homo sapiens
  misc_RNA (1)...(19): siRNA sense strand
gauucccgcugaaccacuu

SEQ ID NO: 394441 - RNA, 19 nt, Homo sapiens
  misc_RNA (1)...(19): siRNA sense strand
caggcagcauguucauuau

SEQ ID NO: 394442 - RNA, 19 nt, Homo sapiens
  misc_RNA (1)...(19): siRNA sense strand
gcaggugacuguguuugac

SEQ ID NO: 394443 - RNA, 19 nt, Homo sapiens
  misc_RNA (1)...(19): siRNA sense strand
uugggaagcugcugcacaa

SEQ ID NO: 394444 - RNA, 19 nt, Homo sapiens
  misc_RNA (1)...(19): siRNA sense strand
aauaaugaccucacaugga

SEQ ID NO: 394445 - RNA, 19 nt, Homo sapiens
  misc_RNA (1)...(19): siRNA sense strand
uggagaggcuucuggacau

SEQ ID NO: 394446 - RNA, 19 nt, Homo sapiens
  misc_RNA (1)...(19): siRNA sense strand
acaauaaugaccucacaug

SEQ ID NO: 394447 - RNA, 19 nt, Homo sapiens
  misc_RNA (1)...(19): siRNA sense strand
acagagcaagguuacagua

SEQ ID NO: 394448 - RNA, 19 nt, Homo sapiens
  misc_RNA (1)...(19): siRNA sense strand
ucacauggaaccucuuuac

SEQ ID NO: 394449 - RNA, 19 nt, Homo sapiens
  misc_RNA (1)...(19): siRNA sense strand
uggagaagccgguggacaa

SEQ ID NO: 394450 - RNA, 19 nt, Homo sapiens
  misc_RNA (1)...(19): siRNA sense strand
uaaagagaagcuggacaaa

SEQ ID NO: 394451 - RNA, 19 nt, Homo sapiens
  misc_RNA (1)...(19): siRNA sense strand
cuucgcagcaggugacuuu

SEQ ID NO: 394452 - RNA, 19 nt, Homo sapiens
  misc_RNA (1)...(19): siRNA sense strand
ggaaacgaaggugaaguuc

SEQ ID NO: 394453 - RNA, 19 nt, Homo sapiens
  misc_RNA (1)...(19): siRNA sense strand
agaagccgguggacaagca

SEQ ID NO: 394454 - RNA, 19 nt, Homo sapiens
  misc_RNA (1)...(19): siRNA sense strand
ggcuucaucaugcacaaua

SEQ ID NO: 394455 - RNA, 19 nt, Homo sapiens
  misc_RNA (1)...(19): siRNA sense strand
gagcugauugagggcuuua

SEQ ID NO: 394456 - RNA, 19 nt, Homo sapiens
  misc_RNA (1)...(19): siRNA sense strand
ucacaggugucgcgaucgu

SEQ ID NO: 394457 - RNA, 19 nt, Homo sapiens
  misc_RNA (1)...(19): siRNA sense strand
gacaaaguccacaaguuac

SEQ ID NO: 394458 - RNA, 19 nt, Homo sapiens
  misc_RNA (1)...(19): siRNA sense strand
ggagaagacagagcaaggu

SEQ ID NO: 394459 - RNA, 19 nt, Homo sapiens
  misc_RNA (1)...(19): siRNA sense strand
cuugcaaacugaagguguu

SEQ ID NO: 394460 - RNA, 19 nt, Homo sapiens
  misc_RNA (1)...(19): siRNA sense strand
gcaaacugaagguguucga

SEQ ID NO: 394461 - RNA, 19 nt, Homo sapiens
  misc_RNA (1)...(19): siRNA sense strand
cccagaaggcugcggauau

SEQ ID NO: 394462 - RNA, 19 nt, Homo sapiens
  misc_RNA (1)...(19): siRNA sense strand
gagacgcggcugagguuca

SEQ ID NO: 394463 - RNA, 19 nt, Homo sapiens
  misc_RNA (1)...(19): siRNA sense strand
aggaaacgaaggugaaguu

SEQ ID NO: 394464 - RNA, 19 nt, Homo sapiens
  misc_RNA (1)...(19): siRNA sense strand
acgcgggucucagguuuga

SEQ ID NO: 394465 - RNA, 19 nt, Homo sapiens
  misc_RNA (1)...(19): siRNA sense strand
ggagaagccgguggacaag

SEQ ID NO: 394466 - RNA, 19 nt, Homo sapiens
  misc_RNA (1)...(19): siRNA sense strand
acauggaaccucuuuacau

SEQ ID NO: 394467 - RNA, 19 nt, Homo sapiens
  misc_RNA (1)...(19): siRNA sense strand
ccucacauggaaccucuuu

SEQ ID NO: 394468 - RNA, 19 nt, Homo sapiens
  misc_RNA (1)...(19): siRNA sense strand
gcugauugagggcuuuaug

SEQ ID NO: 394469 - RNA, 19 nt, Homo sapiens
  misc_RNA (1)...(19): siRNA sense strand
ccgcggacaccuucgaaga

SEQ ID NO: 394470 - RNA, 19 nt, Homo sapiens
  misc_RNA (1)...(19): siRNA sense strand
ccauggagaccgccaagca

SEQ ID NO: 394471 - RNA, 19 nt, Homo sapiens
  misc_RNA (1)...(19): siRNA sense strand
cuccuucgcuacuccguau

SEQ ID NO: 394472 - RNA, 19 nt, Homo sapiens
  misc_RNA (1)...(19): siRNA sense strand
acacagagacagcgaacgu

SEQ ID NO: 394473 - RNA, 19 nt, Homo sapiens
  misc_RNA (1)...(19): siRNA sense strand
aaagagaagcuggacaaag

SEQ ID NO: 394474 - RNA, 19 nt, Homo sapiens
  misc_RNA (1)...(19): siRNA sense strand
aggaugcugucccgguuga

SEQ ID NO: 394475 - RNA, 19 nt, Homo sapiens
  misc_RNA (1)...(19): siRNA sense strand
ggacaacccuuucgaguuc

SEQ ID NO: 394476 - RNA, 19 nt, Homo sapiens
  misc_RNA (1)...(19): siRNA sense strand
ccagugaccucaacaggaa

SEQ ID NO: 394477 - RNA, 19 nt, Homo sapiens
  misc_RNA (1)...(19): siRNA sense strand
ugacugagcucuacaucga

SEQ ID NO: 394478 - RNA, 19 nt, Homo sapiens
  misc_RNA (1)...(19): siRNA sense strand
ccacaauacuucagugaug

SEQ ID NO: 394479 - RNA, 19 nt, Homo sapiens
  misc_RNA (1)...(19): siRNA sense strand
ccagaugccuuccauuuca

SEQ ID NO: 394480 - RNA, 19 nt, Homo sapiens
  misc_RNA (1)...(19): siRNA sense strand
gagaccagcuucaucuuca

SEQ ID NO: 394481 - RNA, 19 nt, Homo sapiens
  misc_RNA (1)...(19): siRNA sense strand
gcgcagagaaccugacuga

SEQ ID NO: 394482 - RNA, 19 nt, Homo sapiens
  misc_RNA (1)...(19): siRNA sense strand
gaaccugacugagcucuac

SEQ ID NO: 394483 - RNA, 19 nt, Homo sapiens
  misc_RNA (1)...(19): siRNA sense strand
aacagaagcugcaguguca

SEQ ID NO: 394484 - RNA, 19 nt, Homo sapiens
  misc_RNA (1)...(19): siRNA sense strand
gagacccgguggagaagaa

SEQ ID NO: 394485 - RNA, 19 nt, Homo sapiens
  misc_RNA (1)...(19): siRNA sense strand
caaaggcucugggcuccaa

SEQ ID NO: 394486 - RNA, 19 nt, Homo sapiens
  misc_RNA (1)...(19): siRNA sense strand
ggacugguggucaagauug

SEQ ID NO: 394487 - RNA, 19 nt, Homo sapiens
  misc_RNA (1)...(19): siRNA sense strand
ucugggagaucuucaccua

SEQ ID NO: 394488 - RNA, 19 nt, Homo sapiens
  misc_RNA (1)...(19): siRNA sense strand
gaaggaggcguccgagagu

SEQ ID NO: 394489 - RNA, 19 nt, Homo sapiens
  misc_RNA (1)...(19): siRNA sense strand
gcucauggucuucgaguau

SEQ ID NO: 394490 - RNA, 19 nt, Homo sapiens
  misc_RNA (1)...(19): siRNA sense strand
ggagaagaaggacgaaaca

SEQ ID NO: 394491 - RNA, 19 nt, Homo sapiens
  misc_RNA (1)...(19): siRNA sense strand
cagccacggugaugaaauc

SEQ ID NO: 394492 - RNA, 19 nt, Homo sapiens
  misc_RNA (1)...(19): siRNA sense strand
gcaccaugcugcccauucg

SEQ ID NO: 394493 - RNA, 19 nt, Homo sapiens
  misc_RNA (1)...(19): siRNA sense strand
ggucaagauuggugauuuu

SEQ ID NO: 394494 - RNA, 19 nt, Homo sapiens
  misc_RNA (1)...(19): siRNA sense strand
ccucugcacuguucuugug

SEQ ID NO: 394495 - RNA, 19 nt, Homo sapiens
  misc_RNA (1)...(19): siRNA sense strand
cgagaacccacaauacuuc

SEQ ID NO: 394496 - RNA, 19 nt, Homo sapiens
  misc_RNA (1)...(19): siRNA sense strand
ucucgccgguggacacuaa

SEQ ID NO: 394497 - RNA, 19 nt, Homo sapiens
  misc_RNA (1)...(19): siRNA sense strand
cagcaacgccacagcauca

SEQ ID NO: 394498 - RNA, 19 nt, Homo sapiens
  misc_RNA (1)...(19): siRNA sense strand
cgccagaugccuuccauuu

SEQ ID NO: 394499 - RNA, 19 nt, Homo sapiens
  misc_RNA (1)...(19): siRNA sense strand
ucucugcgcuggcucuuca

SEQ ID NO: 394500 - RNA, 19 nt, Homo sapiens
  misc_RNA (1)...(19): siRNA sense strand
ccugcuggcuuggcugaua

SEQ ID NO: 394501 - RNA, 19 nt, Homo sapiens
  misc_RNA (1)...(19): siRNA sense strand
gcggagugccugaacagaa

SEQ ID NO: 394502 - RNA, 19 nt, Homo sapiens
  misc_RNA (1)...(19): siRNA sense strand
ccagaggucuacgccauca

SEQ ID NO: 394503 - RNA, 19 nt, Homo sapiens
  misc_RNA (1)...(19): siRNA sense strand
ucaacgcucuggagucucu

SEQ ID NO: 394504 - RNA, 19 nt, Homo sapiens
  misc_RNA (1)...(19): siRNA sense strand
ucuacagcaccgacuauua

SEQ ID NO: 394505 - RNA, 19 nt, Homo sapiens
  misc_RNA (1)...(19): siRNA sense strand
ccagcuucaucuucacuga

SEQ ID NO: 394506 - RNA, 19 nt, Homo sapiens
  misc_RNA (1)...(19): siRNA sense strand
gcaagcagcccugguacca

SEQ ID NO: 394507 - RNA, 19 nt, Homo sapiens
  misc_RNA (1)...(19): siRNA sense strand
cuacagcaccgacuauuac

SEQ ID NO: 394508 - RNA, 19 nt, Homo sapiens
  misc_RNA (1)...(19): siRNA sense strand
gaacccacaauacuucagu

SEQ ID NO: 394509 - RNA, 19 nt, Homo sapiens
  misc_RNA (1)...(19): siRNA sense strand
cggagugccugaacagaag

SEQ ID NO: 394510 - RNA, 19 nt, Homo sapiens
  misc_RNA (1)...(19): siRNA sense strand
gguaccagcucuccaacac

SEQ ID NO: 394511 - RNA, 19 nt, Homo sapiens
  misc_RNA (1)...(19): siRNA sense strand
ucaucgagaacccacaaua

SEQ ID NO: 394512 - RNA, 19 nt, Homo sapiens
  misc_RNA (1)...(19): siRNA sense strand
agagcauccuguaccguaa

SEQ ID NO: 394513 - RNA, 19 nt, Homo sapiens
  misc_RNA (1)...(19): siRNA sense strand
gcagucagccacggugaug

SEQ ID NO: 394514 - RNA, 19 nt, Homo sapiens
  misc_RNA (1)...(19): siRNA sense strand
ccaugucccugcauuucau

SEQ ID NO: 394515 - RNA, 19 nt, Homo sapiens
  misc_RNA (1)...(19): siRNA sense strand
ggcugacccuggccaaugu

SEQ ID NO: 394516 - RNA, 19 nt, Homo sapiens
  misc_RNA (1)...(19): siRNA sense strand
gcuccaaggccacaucauc

SEQ ID NO: 394517 - RNA, 19 nt, Homo sapiens
  misc_RNA (1)...(19): siRNA sense strand
uuucuacgcugcuccuugu

SEQ ID NO: 394518 - RNA, 19 nt, Homo sapiens
  misc_RNA (1)...(19): siRNA sense strand
gcaugagcagggauaucua

SEQ ID NO: 394519 - RNA, 19 nt, Homo sapiens
  misc_RNA (1)...(19): siRNA sense strand
ugaagaguggucuccguuu

SEQ ID NO: 394520 - RNA, 19 nt, Homo sapiens
  misc_RNA (1)...(19): siRNA sense strand
acacggcgguggagaugca

SEQ ID NO: 394521 - RNA, 19 nt, Homo sapiens
  misc_RNA (1)...(19): siRNA sense strand
gccagaugccuuccauuuc

SEQ ID NO: 394522 - RNA, 19 nt, Homo sapiens
  misc_RNA (1)...(19): siRNA sense strand
cucauggucuucgaguaua

SEQ ID NO: 394523 - RNA, 19 nt, Homo sapiens
  misc_RNA (1)...(19): siRNA sense strand
uggucaagauuggugauuu

SEQ ID NO: 394524 - RNA, 19 nt, Homo sapiens
  misc_RNA (1)...(19): siRNA sense strand
gccugccucuuccuuucua

SEQ ID NO: 394525 - RNA, 19 nt, Homo sapiens
  misc_RNA (1)...(19): siRNA sense strand
cuucaacgcucuggagucu

SEQ ID NO: 394526 - RNA, 19 nt, Homo sapiens
  misc_RNA (1)...(19): siRNA sense strand
ucgagaacccacaauacuu

SEQ ID NO: 394527 - RNA, 19 nt, Homo sapiens
  misc_RNA (1)...(19): siRNA sense strand
ucauggucuucgaguauau

SEQ ID NO: 394528 - RNA, 19 nt, Homo sapiens
  misc_RNA (1)...(19): siRNA sense strand
gugcagggccucuccuuac

SEQ ID NO: 394529 - RNA, 19 nt, Homo sapiens
  misc_RNA (1)...(19): siRNA sense strand
gggacaucgugcucaagug

SEQ ID NO: 394530 - RNA, 19 nt, Homo sapiens
  misc_RNA (1)...(19): siRNA sense strand
cuucagugaugccuguguu

SEQ ID NO: 394531 - RNA, 19 nt, Homo sapiens
  misc_RNA (1)...(19): siRNA sense strand
gagaacccacaauacuuca

SEQ ID NO: 394532 - RNA, 19 nt, Homo sapiens
  misc_RNA (1)...(19): siRNA sense strand
aaauguggacggagaaaca

SEQ ID NO: 394533 - RNA, 19 nt, Homo sapiens
  misc_RNA (1)...(19): siRNA sense strand
uggacaacccuuucgaguu

SEQ ID NO: 394534 - RNA, 19 nt, Homo sapiens
  misc_RNA (1)...(19): siRNA sense strand
gaggcaaucgacugcauca

SEQ ID NO: 394535 - RNA, 19 nt, Homo sapiens
  misc_RNA (1)...(19): siRNA sense strand
gccgggacaucgugcucaa

SEQ ID NO: 394536 - RNA, 19 nt, Homo sapiens
  misc_RNA (1)...(19): siRNA sense strand
caucgagaacccacaauac

SEQ ID NO: 394537 - RNA, 19 nt, Homo sapiens
  misc_RNA (1)...(19): siRNA sense strand
cagaagcugcagugucaug

SEQ ID NO: 394538 - RNA, 19 nt, Homo sapiens
  misc_RNA (1)...(19): siRNA sense strand
ggcaugagcagggauaucu

SEQ ID NO: 394539 - RNA, 19 nt, Homo sapiens
  misc_RNA (1)...(19): siRNA sense strand
ggccaugucccugcauuuc

SEQ ID NO: 394540 - RNA, 19 nt, Homo sapiens
  misc_RNA (1)...(19): siRNA sense strand
ccggcuggauccucacaga

SEQ ID NO: 394541 - RNA, 19 nt, Homo sapiens
  misc_RNA (1)...(19): siRNA sense strand
gagucucucuccuggaaaa

SEQ ID NO: 394542 - RNA, 19 nt, Homo sapiens
  misc_RNA (1)...(19): siRNA sense strand
cgucuuugccugccucuuc

SEQ ID NO: 394543 - RNA, 19 nt, Homo sapiens
  misc_RNA (1)...(19): siRNA sense strand
cuggagacccgguggagaa

SEQ ID NO: 394544 - RNA, 19 nt, Homo sapiens
  misc_RNA (1)...(19): siRNA sense strand
ugagaccagcuucaucuuc

SEQ ID NO: 394545 - RNA, 19 nt, Homo sapiens
  misc_RNA (1)...(19): siRNA sense strand
caucaucgagaacccacaa

SEQ ID NO: 394546 - RNA, 19 nt, Homo sapiens
  misc_RNA (1)...(19): siRNA sense strand
gacacuaacagcacaucug

SEQ ID NO: 394547 - RNA, 19 nt, Homo sapiens
  misc_RNA (1)...(19): siRNA sense strand
ggauaaagcuggaaaccau

SEQ ID NO: 394548 - RNA, 19 nt, Homo sapiens
  misc_RNA (1)...(19): siRNA sense strand
ucagagacuuccaguuuaa

SEQ ID NO: 394549 - RNA, 19 nt, Homo sapiens
  misc_RNA (1)...(19): siRNA sense strand
caaagcagcacuucucauu

SEQ ID NO: 394550 - RNA, 19 nt, Homo sapiens
  misc_RNA (1)...(19): siRNA sense strand
gagaggaucuaccacacuu

SEQ ID NO: 394551 - RNA, 19 nt, Homo sapiens
  misc_RNA (1)...(19): siRNA sense strand
aaacaggagccauuuauga

SEQ ID NO: 394552 - RNA, 19 nt, Homo sapiens
  misc_RNA (1)...(19): siRNA sense strand
gauguaagaucaccguuuu

SEQ ID NO: 394553 - RNA, 19 nt, Homo sapiens
  misc_RNA (1)...(19): siRNA sense strand
ucacgcagcucuacucucu

SEQ ID NO: 394554 - RNA, 19 nt, Homo sapiens
  misc_RNA (1)...(19): siRNA sense strand
gagaaggaaggaaccagua

SEQ ID NO: 394555 - RNA, 19 nt, Homo sapiens
  misc_RNA (1)...(19): siRNA sense strand
ccuaucgccuccuuaauga

SEQ ID NO: 394556 - RNA, 19 nt, Homo sapiens
  misc_RNA (1)...(19): siRNA sense strand
cuucagagacuuccaguuu

SEQ ID NO: 394557 - RNA, 19 nt, Homo sapiens
  misc_RNA (1)...(19): siRNA sense strand
gcucuacucucugaacaug

SEQ ID NO: 394558 - RNA, 19 nt, Homo sapiens
  misc_RNA (1)...(19): siRNA sense strand
uugaaagccuccuggauga

SEQ ID NO: 394559 - RNA, 19 nt, Homo sapiens
  misc_RNA (1)...(19): siRNA sense strand
gaaaacaggagccauuuau

SEQ ID NO: 394560 - RNA, 19 nt, Homo sapiens
  misc_RNA (1)...(19): siRNA sense strand
ggauguaagaucaccguuu

SEQ ID NO: 394561 - RNA, 19 nt, Homo sapiens
  misc_RNA (1)...(19): siRNA sense strand
uucagagacuuccaguuua

SEQ ID NO: 394562 - RNA, 19 nt, Homo sapiens
  misc_RNA (1)...(19): siRNA sense strand
ggugguggcauucugguaa

SEQ ID NO: 394563 - RNA, 19 nt, Homo sapiens
  misc_RNA (1)...(19): siRNA sense strand
aggaaugcaugucucugua

SEQ ID NO: 394564 - RNA, 19 nt, Homo sapiens
  misc_RNA (1)...(19): siRNA sense strand
acgcagcucuacucucuga

SEQ ID NO: 394565 - RNA, 19 nt, Homo sapiens
  misc_RNA (1)...(19): siRNA sense strand
ggaagcugaucuguacauc

SEQ ID NO: 394566 - RNA, 19 nt, Homo sapiens
  misc_RNA (1)...(19): siRNA sense strand
gccuaucgccuccuuaaug

SEQ ID NO: 394567 - RNA, 19 nt, Homo sapiens
  misc_RNA (1)...(19): siRNA sense strand
ccaggaggaagaacagauu

SEQ ID NO: 394568 - RNA, 19 nt, Homo sapiens
  misc_RNA (1)...(19): siRNA sense strand
gagacuuccaguuuaagaa

SEQ ID NO: 394569 - RNA, 19 nt, Homo sapiens
  misc_RNA (1)...(19): siRNA sense strand
aagaacagauugacuucca

SEQ ID NO: 394570 - RNA, 19 nt, Homo sapiens
  misc_RNA (1)...(19): siRNA sense strand
gaaagccuccuggaugaag

SEQ ID NO: 394571 - RNA, 19 nt, Homo sapiens
  misc_RNA (1)...(19): siRNA sense strand
cccugaagcugcugaaagu

SEQ ID NO: 394572 - RNA, 19 nt, Homo sapiens
  misc_RNA (1)...(19): siRNA sense strand
guggcauucugguaauuga

SEQ ID NO: 394573 - RNA, 19 nt, Homo sapiens
  misc_RNA (1)...(19): siRNA sense strand
cuggagcucuggcuaagga

SEQ ID NO: 394574 - RNA, 19 nt, Homo sapiens
  misc_RNA (1)...(19): siRNA sense strand
gggcuggagcucuggcuaa

SEQ ID NO: 394575 - RNA, 19 nt, Homo sapiens
  misc_RNA (1)...(19): siRNA sense strand
agacuuccaguuuaagaaa

SEQ ID NO: 394576 - RNA, 19 nt, Homo sapiens
  misc_RNA (1)...(19): siRNA sense strand
uacccuggauguaagauca

SEQ ID NO: 394577 - RNA, 19 nt, Homo sapiens
  misc_RNA (1)...(19): siRNA sense strand
ggaucuaccacacuugcaa

SEQ ID NO: 394578 - RNA, 19 nt, Homo sapiens
  misc_RNA (1)...(19): siRNA sense strand
uccggaagcugaucuguac

SEQ ID NO: 394579 - RNA, 19 nt, Homo sapiens
  misc_RNA (1)...(19): siRNA sense strand
ggacggcaaagcagcacuu

SEQ ID NO: 394580 - RNA, 19 nt, Homo sapiens
  misc_RNA (1)...(19): siRNA sense strand
gcgagcggcuacaguucau

SEQ ID NO: 394581 - RNA, 19 nt, Homo sapiens
  misc_RNA (1)...(19): siRNA sense strand
ggcauucugguaauugaaa

SEQ ID NO: 394582 - RNA, 19 nt, Homo sapiens
  misc_RNA (1)...(19): siRNA sense strand
uggccaggguccuccauga

SEQ ID NO: 394583 - RNA, 19 nt, Homo sapiens
  misc_RNA (1)...(19): siRNA sense strand
aaccaucauucucagcaaa

SEQ ID NO: 394584 - RNA, 19 nt, Homo sapiens
  misc_RNA (1)...(19): siRNA sense strand
aaaccaucauucucagcaa

SEQ ID NO: 394585 - RNA, 19 nt, Homo sapiens
  misc_RNA (1)...(19): siRNA sense strand
cagcucuacucucugaaca

SEQ ID NO: 394586 - RNA, 19 nt, Homo sapiens
  misc_RNA (1)...(19): siRNA sense strand
gcagacgccgugagagaag

SEQ ID NO: 394587 - RNA, 19 nt, Homo sapiens
  misc_RNA (1)...(19): siRNA sense strand
uaagaaaacaggagccauu

SEQ ID NO: 394588 - RNA, 19 nt, Homo sapiens
  misc_RNA (1)...(19): siRNA sense strand
gcauucugguaauugaaag

SEQ ID NO: 394589 - RNA, 19 nt, Homo sapiens
  misc_RNA (1)...(19): siRNA sense strand
aagcagcacuucucauucc

SEQ ID NO: 394590 - RNA, 19 nt, Homo sapiens
  misc_RNA (1)...(19): siRNA sense strand
gcaaagcagcacuucucau

SEQ ID NO: 394591 - RNA, 19 nt, Homo sapiens
  misc_RNA (1)...(19): siRNA sense strand
gagcucuggcuaaggaaug

SEQ ID NO: 394592 - RNA, 19 nt, Homo sapiens
  misc_RNA (1)...(19): siRNA sense strand
ggaaugcaugucucuguac

SEQ ID NO: 394593 - RNA, 19 nt, Homo sapiens
  misc_RNA (1)...(19): siRNA sense strand
aggaagaacagauugacuu

SEQ ID NO: 394594 - RNA, 19 nt, Homo sapiens
  misc_RNA (1)...(19): siRNA sense strand
ccgcguguucucacucaua

SEQ ID NO: 394595 - RNA, 19 nt, Homo sapiens
  misc_RNA (1)...(19): siRNA sense strand
aagcugaucuguacauccu

SEQ ID NO: 394596 - RNA, 19 nt, Homo sapiens
  misc_RNA (1)...(19): siRNA sense strand
gugguggcauucugguaau

SEQ ID NO: 394597 - RNA, 19 nt, Homo sapiens
  misc_RNA (1)...(19): siRNA sense strand
aaagccuccuggaugaaga

SEQ ID NO: 394598 - RNA, 19 nt, Homo sapiens
  misc_RNA (1)...(19): siRNA sense strand
uggcagacgccgugagaga

SEQ ID NO: 394599 - RNA, 19 nt, Homo sapiens
  misc_RNA (1)...(19): siRNA sense strand
cuggaaaccaucauucuca

SEQ ID NO: 394600 - RNA, 19 nt, Homo sapiens
  misc_RNA (1)...(19): siRNA sense strand
ggcagacgccgugagagaa

SEQ ID NO: 394601 - RNA, 19 nt, Homo sapiens
  misc_RNA (1)...(19): siRNA sense strand
cggcaaagcagcacuucuc

SEQ ID NO: 394602 - RNA, 19 nt, Homo sapiens
  misc_RNA (1)...(19): siRNA sense strand
acaggagccauuuaugaug

SEQ ID NO: 394603 - RNA, 19 nt, Homo sapiens
  misc_RNA (1)...(19): siRNA sense strand
ggagaggaucuaccacacu

SEQ ID NO: 394604 - RNA, 19 nt, Homo sapiens
  misc_RNA (1)...(19): siRNA sense strand
caucauucucagcaaacua

SEQ ID NO: 394605 - RNA, 19 nt, Homo sapiens
  misc_RNA (1)...(19): siRNA sense strand
ggcaaagcagcacuucuca

SEQ ID NO: 394606 - RNA, 19 nt, Homo sapiens
  misc_RNA (1)...(19): siRNA sense strand
cggaaugccucugcuguua

SEQ ID NO: 394607 - RNA, 19 nt, Homo sapiens
  misc_RNA (1)...(19): siRNA sense strand
gaagcuugaugacucuaaa

SEQ ID NO: 394608 - RNA, 19 nt, Homo sapiens
  misc_RNA (1)...(19): siRNA sense strand
ucacagagcaauuaaaguu

SEQ ID NO: 394609 - RNA, 19 nt, Homo sapiens
  misc_RNA (1)...(19): siRNA sense strand
gaaugccucugcuguuaug

SEQ ID NO: 394610 - RNA, 19 nt, Homo sapiens
  misc_RNA (1)...(19): siRNA sense strand
gcaauuaaaguuacaguag

SEQ ID NO: 394611 - RNA, 19 nt, Homo sapiens
  misc_RNA (1)...(19): siRNA sense strand
caaauuugccuaaccagaa

SEQ ID NO: 394612 - RNA, 19 nt, Homo sapiens
  misc_RNA (1)...(19): siRNA sense strand
ccauaaccgucuucacaaa

SEQ ID NO: 394613 - RNA, 19 nt, Homo sapiens
  misc_RNA (1)...(19): siRNA sense strand
caaggacagagucagauua

SEQ ID NO: 394614 - RNA, 19 nt, Homo sapiens
  misc_RNA (1)...(19): siRNA sense strand
gaccauaaccgucuucaca

SEQ ID NO: 394615 - RNA, 19 nt, Homo sapiens
  misc_RNA (1)...(19): siRNA sense strand
ccaggcaggugcuucagaa

SEQ ID NO: 394616 - RNA, 19 nt, Homo sapiens
  misc_RNA (1)...(19): siRNA sense strand
gauggaagccacagcaguu

SEQ ID NO: 394617 - RNA, 19 nt, Homo sapiens
  misc_RNA (1)...(19): siRNA sense strand
gucaggauccuaucaguuu

SEQ ID NO: 394618 - RNA, 19 nt, Homo sapiens
  misc_RNA (1)...(19): siRNA sense strand
ggacgaggcaagaguuuca

SEQ ID NO: 394619 - RNA, 19 nt, Homo sapiens
  misc_RNA (1)...(19): siRNA sense strand
gaauggcagcacgcuauua

SEQ ID NO: 394620 - RNA, 19 nt, Homo sapiens
  misc_RNA (1)...(19): siRNA sense strand
cuugaugacucuaaaccua

SEQ ID NO: 394621 - RNA, 19 nt, Homo sapiens
  misc_RNA (1)...(19): siRNA sense strand
cuucagaacugggcccuuu

SEQ ID NO: 394622 - RNA, 19 nt, Homo sapiens
  misc_RNA (1)...(19): siRNA sense strand
gcacuauccagccaccuuu

SEQ ID NO: 394623 - RNA, 19 nt, Homo sapiens
  misc_RNA (1)...(19): siRNA sense strand
ccaaguagcuaccuaucac

SEQ ID NO: 394624 - RNA, 19 nt, Homo sapiens
  misc_RNA (1)...(19): siRNA sense strand
ggacugugguuacugucau

SEQ ID NO: 394625 - RNA, 19 nt, Homo sapiens
  misc_RNA (1)...(19): siRNA sense strand
gcagcacgcuauuaaaucc

SEQ ID NO: 394626 - RNA, 19 nt, Homo sapiens
  misc_RNA (1)...(19): siRNA sense strand
ggacagagucagauuacag

SEQ ID NO: 394627 - RNA, 19 nt, Homo sapiens
  misc_RNA (1)...(19): siRNA sense strand
ccacaaggacagagucaga

SEQ ID NO: 394628 - RNA, 19 nt, Homo sapiens
  misc_RNA (1)...(19): siRNA sense strand
cacagagcaauuaaaguua

SEQ ID NO: 394629 - RNA, 19 nt, Homo sapiens
  misc_RNA (1)...(19): siRNA sense strand
cagcagcacuccauaucuc

SEQ ID NO: 394630 - RNA, 19 nt, Homo sapiens
  misc_RNA (1)...(19): siRNA sense strand
ccagccaccuuuacuuaca

SEQ ID NO: 394631 - RNA, 19 nt, Homo sapiens
  misc_RNA (1)...(19): siRNA sense strand
ggaaugccucugcuguuau

SEQ ID NO: 394632 - RNA, 19 nt, Homo sapiens
  misc_RNA (1)...(19): siRNA sense strand
gaauggaugaaucuguuug

SEQ ID NO: 394633 - RNA, 19 nt, Homo sapiens
  misc_RNA (1)...(19): siRNA sense strand
aaauuugccuaaccagaau

SEQ ID NO: 394634 - RNA, 19 nt, Homo sapiens
  misc_RNA (1)...(19): siRNA sense strand
uagcaagguucaacgaucu

SEQ ID NO: 394635 - RNA, 19 nt, Homo sapiens
  misc_RNA (1)...(19): siRNA sense strand
ggcaggugcuucagaacug

SEQ ID NO: 394636 - RNA, 19 nt, Homo sapiens
  misc_RNA (1)...(19): siRNA sense strand
gacagagucagauuacaga

SEQ ID NO: 394637 - RNA, 19 nt, Homo sapiens
  misc_RNA (1)...(19): siRNA sense strand
ccagaugggacugugguua

SEQ ID NO: 394638 - RNA, 19 nt, Homo sapiens
  misc_RNA (1)...(19): siRNA sense strand
aguuucaccuugaccauaa

SEQ ID NO: 394639 - RNA, 19 nt, Homo sapiens
  misc_RNA (1)...(19): siRNA sense strand
gcacuccauaucucuacua

SEQ ID NO: 394640 - RNA, 19 nt, Homo sapiens
  misc_RNA (1)...(19): siRNA sense strand
gcacgcuauuaaauccaaa

SEQ ID NO: 394641 - RNA, 19 nt, Homo sapiens
  misc_RNA (1)...(19): siRNA sense strand
guaggugucccgccucaga

SEQ ID NO: 394642 - RNA, 19 nt, Homo sapiens
  misc_RNA (1)...(19): siRNA sense strand
ccagucaccucaggcaugu

SEQ ID NO: 394643 - RNA, 19 nt, Homo sapiens
  misc_RNA (1)...(19): siRNA sense strand
ccugaacucugcaccaagu

SEQ ID NO: 394644 - RNA, 19 nt, Homo sapiens
  misc_RNA (1)...(19): siRNA sense strand
gaguuucaccuugaccaua

SEQ ID NO: 394645 - RNA, 19 nt, Homo sapiens
  misc_RNA (1)...(19): siRNA sense strand
ggccuuccacucucaguaa

SEQ ID NO: 394646 - RNA, 19 nt, Homo sapiens
  misc_RNA (1)...(19): siRNA sense strand
cuaggcgcauuucagauga

SEQ ID NO: 394647 - RNA, 19 nt, Homo sapiens
  misc_RNA (1)...(19): siRNA sense strand
acagacagaagcuugauga

SEQ ID NO: 394648 - RNA, 19 nt, Homo sapiens
  misc_RNA (1)...(19): siRNA sense strand
acagagcaauuaaaguuac

SEQ ID NO: 394649 - RNA, 19 nt, Homo sapiens
  misc_RNA (1)...(19): siRNA sense strand
uaucacagagcaauuaaag

SEQ ID NO: 394650 - RNA, 19 nt, Homo sapiens
  misc_RNA (1)...(19): siRNA sense strand
gcaguucccaagcauuuca

SEQ ID NO: 394651 - RNA, 19 nt, Homo sapiens
  misc_RNA (1)...(19): siRNA sense strand
cacuggcgcugcaacaaga

SEQ ID NO: 394652 - RNA, 19 nt, Homo sapiens
  misc_RNA (1)...(19): siRNA sense strand
aauggcagcacgcuauuaa

SEQ ID NO: 394653 - RNA, 19 nt, Homo sapiens
  misc_RNA (1)...(19): siRNA sense strand
gcauuucaucccucacuga

SEQ ID NO: 394654 - RNA, 19 nt, Homo sapiens
  misc_RNA (1)...(19): siRNA sense strand
gcacuggcgcugcaacaag

SEQ ID NO: 394655 - RNA, 19 nt, Homo sapiens
  misc_RNA (1)...(19): siRNA sense strand
ggguaacgaugaaaauuau

SEQ ID NO: 394656 - RNA, 19 nt, Homo sapiens
  misc_RNA (1)...(19): siRNA sense strand
ccagaaggcacagacagaa

SEQ ID NO: 394657 - RNA, 19 nt, Homo sapiens
  misc_RNA (1)...(19): siRNA sense strand
gcagcacuccauaucucua

SEQ ID NO: 394658 - RNA, 19 nt, Homo sapiens
  misc_RNA (1)...(19): siRNA sense strand
uaaaguuacaguagaugga

SEQ ID NO: 394659 - RNA, 19 nt, Homo sapiens
  misc_RNA (1)...(19): siRNA sense strand
cacaaauccuccccaagua

SEQ ID NO: 394660 - RNA, 19 nt, Homo sapiens
  misc_RNA (1)...(19): siRNA sense strand
gcaccaccaccucgaaugg

SEQ ID NO: 394661 - RNA, 19 nt, Homo sapiens
  misc_RNA (1)...(19): siRNA sense strand
gaccagcagcacuccauau

SEQ ID NO: 394662 - RNA, 19 nt, Homo sapiens
  misc_RNA (1)...(19): siRNA sense strand
gcaugucccucgguauguc

SEQ ID NO: 394663 - RNA, 19 nt, Homo sapiens
  misc_RNA (1)...(19): siRNA sense strand
ugccucugcuguuaugaaa

SEQ ID NO: 394664 - RNA, 19 nt, Homo sapiens
  misc_RNA (1)...(19): siRNA sense strand
ccagaaugaugguguugac

SEQ ID NO: 394665 - RNA, 19 nt, Homo sapiens
  misc_RNA (1)...(19): siRNA sense strand
gcacuucgucaggauccua

SEQ ID NO: 394666 - RNA, 19 nt, Homo sapiens
  misc_RNA (1)...(19): siRNA sense strand
gcauuccucaucccaguau

SEQ ID NO: 394667 - RNA, 19 nt, Homo sapiens
  misc_RNA (1)...(19): siRNA sense strand
gaggcaagaguuucaccuu

SEQ ID NO: 394668 - RNA, 19 nt, Homo sapiens
  misc_RNA (1)...(19): siRNA sense strand
uggcagcacgcuauuaaau

SEQ ID NO: 394669 - RNA, 19 nt, Homo sapiens
  misc_RNA (1)...(19): siRNA sense strand
aaccuaguuuguucucuga

SEQ ID NO: 394670 - RNA, 19 nt, Homo sapiens
  misc_RNA (1)...(19): siRNA sense strand
auaaccgucuucacaaauc

SEQ ID NO: 394671 - RNA, 19 nt, Homo sapiens
  misc_RNA (1)...(19): siRNA sense strand
cauaaccgucuucacaaau

SEQ ID NO: 394672 - RNA, 19 nt, Homo sapiens
  misc_RNA (1)...(19): siRNA sense strand
ccuaggcgcauuucagaug

SEQ ID NO: 394673 - RNA, 19 nt, Homo sapiens
  misc_RNA (1)...(19): siRNA sense strand
gcacagacagaagcuugau

SEQ ID NO: 394674 - RNA, 19 nt, Homo sapiens
  misc_RNA (1)...(19): siRNA sense strand
cagagcaauuaaaguuaca

SEQ ID NO: 394675 - RNA, 19 nt, Homo sapiens
  misc_RNA (1)...(19): siRNA sense strand
gaugugccuaggcgcauuu

SEQ ID NO: 394676 - RNA, 19 nt, Homo sapiens
  misc_RNA (1)...(19): siRNA sense strand
gcaagguucaacgaucuga

SEQ ID NO: 394677 - RNA, 19 nt, Homo sapiens
  misc_RNA (1)...(19): siRNA sense strand
ucaggauccuaucaguuuc

SEQ ID NO: 394678 - RNA, 19 nt, Homo sapiens
  misc_RNA (1)...(19): siRNA sense strand
aggcaguucccaagcauuu

SEQ ID NO: 394679 - RNA, 19 nt, Homo sapiens
  misc_RNA (1)...(19): siRNA sense strand
gagccaggcaggugcuuca

SEQ ID NO: 394680 - RNA, 19 nt, Homo sapiens
  misc_RNA (1)...(19): siRNA sense strand
ggaccucgggaacccagaa

SEQ ID NO: 394681 - RNA, 19 nt, Homo sapiens
  misc_RNA (1)...(19): siRNA sense strand
gaaucuguuuggcgaccau

SEQ ID NO: 394682 - RNA, 19 nt, Homo sapiens
  misc_RNA (1)...(19): siRNA sense strand
cgaauggcagcacgcuauu

SEQ ID NO: 394683 - RNA, 19 nt, Homo sapiens
  misc_RNA (1)...(19): siRNA sense strand
ucgaauggcagcacgcuau

SEQ ID NO: 394684 - RNA, 19 nt, Homo sapiens
  misc_RNA (1)...(19): siRNA sense strand
ccaggcaguucccaagcau

SEQ ID NO: 394685 - RNA, 19 nt, Homo sapiens
  misc_RNA (1)...(19): siRNA sense strand
acaaggacagagucagauu

SEQ ID NO: 394686 - RNA, 19 nt, Homo sapiens
  misc_RNA (1)...(19): siRNA sense strand
acagaagcuugaugacucu

SEQ ID NO: 394687 - RNA, 19 nt, Homo sapiens
  misc_RNA (1)...(19): siRNA sense strand
ugaccgccucagugauuua

SEQ ID NO: 394688 - RNA, 19 nt, Homo sapiens
  misc_RNA (1)...(19): siRNA sense strand
cugcugagcuccggaaugc

SEQ ID NO: 394689 - RNA, 19 nt, Homo sapiens
  misc_RNA (1)...(19): siRNA sense strand
cauggcggguaacgaugaa

SEQ ID NO: 394690 - RNA, 19 nt, Homo sapiens
  misc_RNA (1)...(19): siRNA sense strand
cuuccacucucaguaagaa

SEQ ID NO: 394691 - RNA, 19 nt, Homo sapiens
  misc_RNA (1)...(19): siRNA sense strand
cauuucagaugaugacacu

SEQ ID NO: 394692 - RNA, 19 nt, Homo sapiens
  misc_RNA (1)...(19): siRNA sense strand
gcaccaaguccuuuuaauc

SEQ ID NO: 394693 - RNA, 19 nt, Homo sapiens
  misc_RNA (1)...(19): siRNA sense strand
gacugugguuacugucaug

SEQ ID NO: 394694 - RNA, 19 nt, Homo sapiens
  misc_RNA (1)...(19): siRNA sense strand
ggcagcacgcuauuaaauc

SEQ ID NO: 394695 - RNA, 19 nt, Homo sapiens
  misc_RNA (1)...(19): siRNA sense strand
ugaugacucuaaaccuagu

SEQ ID NO: 394696 - RNA, 19 nt, Homo sapiens
  misc_RNA (1)...(19): siRNA sense strand
ccuaucaguuucccauggu

SEQ ID NO: 394697 - RNA, 19 nt, Homo sapiens
  misc_RNA (1)...(19): siRNA sense strand
ccuaucacagagcaauuaa

SEQ ID NO: 394698 - RNA, 19 nt, Homo sapiens
  misc_RNA (1)...(19): siRNA sense strand
ccacucacuaccacaccua

SEQ ID NO: 394699 - RNA, 19 nt, Homo sapiens
  misc_RNA (1)...(19): siRNA sense strand
auccagccaccuuuacuua

SEQ ID NO: 394700 - RNA, 19 nt, Homo sapiens
  misc_RNA (1)...(19): siRNA sense strand
ccucggaacugaacccauu

SEQ ID NO: 394701 - RNA, 19 nt, Homo sapiens
  misc_RNA (1)...(19): siRNA sense strand
caaggcaccucggaacuga

SEQ ID NO: 394702 - RNA, 19 nt, Homo sapiens
  misc_RNA (1)...(19): siRNA sense strand
gccguucccugaccgcuuu

SEQ ID NO: 394703 - RNA, 19 nt, Homo sapiens
  misc_RNA (1)...(19): siRNA sense strand
gcaaugacgagaacuacuc

SEQ ID NO: 394704 - RNA, 19 nt, Homo sapiens
  misc_RNA (1)...(19): siRNA sense strand
ccucggccgucaugaagaa

SEQ ID NO: 394705 - RNA, 19 nt, Homo sapiens
  misc_RNA (1)...(19): siRNA sense strand
guacgguggugacugugau

SEQ ID NO: 394706 - RNA, 19 nt, Homo sapiens
  misc_RNA (1)...(19): siRNA sense strand
ggacauccucuggcuccua

SEQ ID NO: 394707 - RNA, 19 nt, Homo sapiens
  misc_RNA (1)...(19): siRNA sense strand
gcacuggcgcugcaacaag

SEQ ID NO: 394708 - RNA, 19 nt, Homo sapiens
  misc_RNA (1)...(19): siRNA sense strand
cacuggcgcugcaacaaga

SEQ ID NO: 394709 - RNA, 19 nt, Homo sapiens
  misc_RNA (1)...(19): siRNA sense strand
gcggcaagaugggcgagaa

SEQ ID NO: 394710 - RNA, 19 nt, Homo sapiens
  misc_RNA (1)...(19): siRNA sense strand
accagccgcuuccaccaua

SEQ ID NO: 394711 - RNA, 19 nt, Homo sapiens
  misc_RNA (1)...(19): siRNA sense strand
ccaucacuguguucaccaa

SEQ ID NO: 394712 - RNA, 19 nt, Homo sapiens
  misc_RNA (1)...(19): siRNA sense strand
ggcaggcaaugacgagaac

SEQ ID NO: 394713 - RNA, 19 nt, Homo sapiens
  misc_RNA (1)...(19): siRNA sense strand
caggcaaugacgagaacua

SEQ ID NO: 394714 - RNA, 19 nt, Homo sapiens
  misc_RNA (1)...(19): siRNA sense strand
gaccuuaucuccaacaaug

SEQ ID NO: 394715 - RNA, 19 nt, Homo sapiens
  misc_RNA (1)...(19): siRNA sense strand
gcagaaugccaccaaguau

SEQ ID NO: 394716 - RNA, 19 nt, Homo sapiens
  misc_RNA (1)...(19): siRNA sense strand
gagaaccugagacaccuua

SEQ ID NO: 394717 - RNA, 19 nt, Homo sapiens
  misc_RNA (1)...(19): siRNA sense strand
caccaaguauggcaacaug

SEQ ID NO: 394718 - RNA, 19 nt, Homo sapiens
  misc_RNA (1)...(19): siRNA sense strand
accauuggcuccuguuuga

SEQ ID NO: 394719 - RNA, 19 nt, Homo sapiens
  misc_RNA (1)...(19): siRNA sense strand
gaaagagucacuggaacug

SEQ ID NO: 394720 - RNA, 19 nt, Homo sapiens
  misc_RNA (1)...(19): siRNA sense strand
gaagaucagaagccaguca

SEQ ID NO: 394721 - RNA, 19 nt, Homo sapiens
  misc_RNA (1)...(19): siRNA sense strand
ugaugcaccugcuccagaa

SEQ ID NO: 394722 - RNA, 19 nt, Homo sapiens
  misc_RNA (1)...(19): siRNA sense strand
ugagacaccuuaagaacac

SEQ ID NO: 394723 - RNA, 19 nt, Homo sapiens
  misc_RNA (1)...(19): siRNA sense strand
gacagaggaccaugugaug

SEQ ID NO: 394724 - RNA, 19 nt, Homo sapiens
  misc_RNA (1)...(19): siRNA sense strand
agagcuggaugcaccauug

SEQ ID NO: 394725 - RNA, 19 nt, Homo sapiens
  misc_RNA (1)...(19): siRNA sense strand
uggagaaccugcgcaugaa

SEQ ID NO: 394726 - RNA, 19 nt, Homo sapiens
  misc_RNA (1)...(19): siRNA sense strand
cacugacgcuccaccgaaa

SEQ ID NO: 394727 - RNA, 19 nt, Homo sapiens
  misc_RNA (1)...(19): siRNA sense strand
gcaccauuggcuccuguuu

SEQ ID NO: 394728 - RNA, 19 nt, Homo sapiens
  misc_RNA (1)...(19): siRNA sense strand
cuggagaaccugcgcauga

SEQ ID NO: 394729 - RNA, 19 nt, Homo sapiens
  misc_RNA (1)...(19): siRNA sense strand
ugacagaggaccaugugau

SEQ ID NO: 394730 - RNA, 19 nt, Homo sapiens
  misc_RNA (1)...(19): siRNA sense strand
cagaaugccaccaaguaug

SEQ ID NO: 394731 - RNA, 19 nt, Homo sapiens
  misc_RNA (1)...(19): siRNA sense strand
cauuggcuccuguuugaaa

SEQ ID NO: 394732 - RNA, 19 nt, Homo sapiens
  misc_RNA (1)...(19): siRNA sense strand
gaaccugagacaccuuaag

SEQ ID NO: 394733 - RNA, 19 nt, Homo sapiens
  misc_RNA (1)...(19): siRNA sense strand
gaccagcgcgaccuuaucu

SEQ ID NO: 394734 - RNA, 19 nt, Homo sapiens
  misc_RNA (1)...(19): siRNA sense strand
gaugaccagcgcgaccuua

SEQ ID NO: 394735 - RNA, 19 nt, Homo sapiens
  misc_RNA (1)...(19): siRNA sense strand
ggagcugucgggaagauca

SEQ ID NO: 394736 - RNA, 19 nt, Homo sapiens
  misc_RNA (1)...(19): siRNA sense strand
ugcagaaugccaccaagua

SEQ ID NO: 394737 - RNA, 19 nt, Homo sapiens
  misc_RNA (1)...(19): siRNA sense strand
cgaaagagucacuggaacu

SEQ ID NO: 394738 - RNA, 19 nt, Homo sapiens
  misc_RNA (1)...(19): siRNA sense strand
ccaagccugugagcaagau

SEQ ID NO: 394739 - RNA, 19 nt, Homo sapiens
  misc_RNA (1)...(19): siRNA sense strand
caacaugacagaggaccau

SEQ ID NO: 394740 - RNA, 19 nt, Homo sapiens
  misc_RNA (1)...(19): siRNA sense strand
uggcuccuguuugaaauga

SEQ ID NO: 394741 - RNA, 19 nt, Homo sapiens
  misc_RNA (1)...(19): siRNA sense strand
aaccugagacaccuuaaga

SEQ ID NO: 394742 - RNA, 19 nt, Homo sapiens
  misc_RNA (1)...(19): siRNA sense strand
caggagcugucgggaagau

SEQ ID NO: 394743 - RNA, 19 nt, Homo sapiens
  misc_RNA (1)...(19): siRNA sense strand
gaacuggaggacccgucuu

SEQ ID NO: 394744 - RNA, 19 nt, Homo sapiens
  misc_RNA (1)...(19): siRNA sense strand
ucagaagccagucauggau

SEQ ID NO: 394745 - RNA, 19 nt, Homo sapiens
  misc_RNA (1)...(19): siRNA sense strand
uggagaccauagacuggaa

SEQ ID NO: 394746 - RNA, 19 nt, Homo sapiens
  misc_RNA (1)...(19): siRNA sense strand
gcgaccuuaucuccaacaa

SEQ ID NO: 394747 - RNA, 19 nt, Homo sapiens
  misc_RNA (1)...(19): siRNA sense strand
cagaggaccaugugaugca

SEQ ID NO: 394748 - RNA, 19 nt, Homo sapiens
  misc_RNA (1)...(19): siRNA sense strand
agaaugccaccaaguaugg

SEQ ID NO: 394749 - RNA, 19 nt, Homo sapiens
  misc_RNA (1)...(19): siRNA sense strand
gacagucaccucccagaac

SEQ ID NO: 394750 - RNA, 19 nt, Homo sapiens
  misc_RNA (1)...(19): siRNA sense strand
gauggcaaccgucaaauua

SEQ ID NO: 394751 - RNA, 19 nt, Homo sapiens
  misc_RNA (1)...(19): siRNA sense strand
gcacaguacucuugguuug

SEQ ID NO: 394752 - RNA, 19 nt, Homo sapiens
  misc_RNA (1)...(19): siRNA sense strand
agucagaucuugugaauga

SEQ ID NO: 394753 - RNA, 19 nt, Homo sapiens
  misc_RNA (1)...(19): siRNA sense strand
gaaaugacacagcaagcua

SEQ ID NO: 394754 - RNA, 19 nt, Homo sapiens
  misc_RNA (1)...(19): siRNA sense strand
ugaggaugcuguagccuua

SEQ ID NO: 394755 - RNA, 19 nt, Homo sapiens
  misc_RNA (1)...(19): siRNA sense strand
gaagaacagcggacucuau

SEQ ID NO: 394756 - RNA, 19 nt, Homo sapiens
  misc_RNA (1)...(19): siRNA sense strand
gcucacagccucacuucua

SEQ ID NO: 394757 - RNA, 19 nt, Homo sapiens
  misc_RNA (1)...(19): siRNA sense strand
acacacaaguucucuuuau

SEQ ID NO: 394758 - RNA, 19 nt, Homo sapiens
  misc_RNA (1)...(19): siRNA sense strand
ggucagagccucccaguca

SEQ ID NO: 394759 - RNA, 19 nt, Homo sapiens
  misc_RNA (1)...(19): siRNA sense strand
uggcaaccgucaaauuaua

SEQ ID NO: 394760 - RNA, 19 nt, Homo sapiens
  misc_RNA (1)...(19): siRNA sense strand
uaacccaccugcacaguau

SEQ ID NO: 394761 - RNA, 19 nt, Homo sapiens
  misc_RNA (1)...(19): siRNA sense strand
caacaggacccucacucua

SEQ ID NO: 394762 - RNA, 19 nt, Homo sapiens
  misc_RNA (1)...(19): siRNA sense strand
cacaagaaaugacgcaaga

SEQ ID NO: 394763 - RNA, 19 nt, Homo sapiens
  misc_RNA (1)...(19): siRNA sense strand
caacaggacccucacucua

SEQ ID NO: 394764 - RNA, 19 nt, Homo sapiens
  misc_RNA (1)...(19): siRNA sense strand
caacaggacccucacucua

SEQ ID NO: 394765 - RNA, 19 nt, Homo sapiens
  misc_RNA (1)...(19): siRNA sense strand
auacaguggucgagagaua

SEQ ID NO: 394766 - RNA, 19 nt, Homo sapiens
  misc_RNA (1)...(19): siRNA sense strand
cagaacgaauuaaguguug

SEQ ID NO: 394767 - RNA, 19 nt, Homo sapiens
  misc_RNA (1)...(19): siRNA sense strand
aaagucagaucuugugaau

SEQ ID NO: 394768 - RNA, 19 nt, Homo sapiens
  misc_RNA (1)...(19): siRNA sense strand
gcuacuggccgcaauaauu

SEQ ID NO: 394769 - RNA, 19 nt, Homo sapiens
  misc_RNA (1)...(19): siRNA sense strand
ucacgacgaucacagucua

SEQ ID NO: 394770 - RNA, 19 nt, Homo sapiens
  misc_RNA (1)...(19): siRNA sense strand
caacaucacugagaagaac

SEQ ID NO: 394771 - RNA, 19 nt, Homo sapiens
  misc_RNA (1)...(19): siRNA sense strand
cugccaagcucacuauuga

SEQ ID NO: 394772 - RNA, 19 nt, Homo sapiens
  misc_RNA (1)...(19): siRNA sense strand
ggcugcagcuguccaauga

SEQ ID NO: 394773 - RNA, 19 nt, Homo sapiens
  misc_RNA (1)...(19): siRNA sense strand
gaacauccagcaacacaca

SEQ ID NO: 394774 - RNA, 19 nt, Homo sapiens
  misc_RNA (1)...(19): siRNA sense strand
gacccucacucuauucaau

SEQ ID NO: 394775 - RNA, 19 nt, Homo sapiens
  misc_RNA (1)...(19): siRNA sense strand
gcaagagccuauguaugug

SEQ ID NO: 394776 - RNA, 19 nt, Homo sapiens
  misc_RNA (1)...(19): siRNA sense strand
gacccucacucuauucaau

SEQ ID NO: 394777 - RNA, 19 nt, Homo sapiens
  misc_RNA (1)...(19): siRNA sense strand
caaugggacuuuccagcaa

SEQ ID NO: 394778 - RNA, 19 nt, Homo sapiens
  misc_RNA (1)...(19): siRNA sense strand
cgcaagagccuauguaugu

SEQ ID NO: 394779 - RNA, 19 nt, Homo sapiens
  misc_RNA (1)...(19): siRNA sense strand
ugacacagcaagcuacaaa

SEQ ID NO: 394780 - RNA, 19 nt, Homo sapiens
  misc_RNA (1)...(19): siRNA sense strand
gcaauaauuccauagucaa

SEQ ID NO: 394781 - RNA, 19 nt, Homo sapiens
  misc_RNA (1)...(19): siRNA sense strand
gcgcagugauucagucauc

SEQ ID NO: 394782 - RNA, 19 nt, Homo sapiens
  misc_RNA (1)...(19): siRNA sense strand
cacaaggaaugauguagga

SEQ ID NO: 394783 - RNA, 19 nt, Homo sapiens
  misc_RNA (1)...(19): siRNA sense strand
aagaacagcggacucuaua

SEQ ID NO: 394784 - RNA, 19 nt, Homo sapiens
  misc_RNA (1)...(19): siRNA sense strand
ggauggcaaccgucaaauu

SEQ ID NO: 394785 - RNA, 19 nt, Homo sapiens
  misc_RNA (1)...(19): siRNA sense strand
acaggacccucacucuauu

SEQ ID NO: 394786 - RNA, 19 nt, Homo sapiens
  misc_RNA (1)...(19): siRNA sense strand
acaggacccucacucuauu

SEQ ID NO: 394787 - RNA, 19 nt, Homo sapiens
  misc_RNA (1)...(19): siRNA sense strand
ggaccacagucacgacgau

SEQ ID NO: 394788 - RNA, 19 nt, Homo sapiens
  misc_RNA (1)...(19): siRNA sense strand
uaacccaccugcacaguac

SEQ ID NO: 394789 - RNA, 19 nt, Homo sapiens
  misc_RNA (1)...(19): siRNA sense strand
ccaaacccguggaggacaa

SEQ ID NO: 394790 - RNA, 19 nt, Homo sapiens
  misc_RNA (1)...(19): siRNA sense strand
cgcaauaauuccauaguca

SEQ ID NO: 394791 - RNA, 19 nt, Homo sapiens
  misc_RNA (1)...(19): siRNA sense strand
caaauaauaacgggaccua

SEQ ID NO: 394792 - RNA, 19 nt, Homo sapiens
  misc_RNA (1)...(19): siRNA sense strand
acacacacaaguucucuuu

SEQ ID NO: 394793 - RNA, 19 nt, Homo sapiens
  misc_RNA (1)...(19): siRNA sense strand
ccaaacccguggaggacaa

SEQ ID NO: 394794 - RNA, 19 nt, Homo sapiens
  misc_RNA (1)...(19): siRNA sense strand
cauccugaauguccucuau

SEQ ID NO: 394795 - RNA, 19 nt, Homo sapiens
  misc_RNA (1)...(19): siRNA sense strand
cauccugaauguccucuau

SEQ ID NO: 394796 - RNA, 19 nt, Homo sapiens
  misc_RNA (1)...(19): siRNA sense strand
aauaggaacucaacaagcu

SEQ ID NO: 394797 - RNA, 19 nt, Homo sapiens
  misc_RNA (1)...(19): siRNA sense strand
ucuauucaaugucacaaga

SEQ ID NO: 394798 - RNA, 19 nt, Homo sapiens
  misc_RNA (1)...(19): siRNA sense strand
acagcaagcuacaaaugug

SEQ ID NO: 394799 - RNA, 19 nt, Homo sapiens
  misc_RNA (1)...(19): siRNA sense strand
ucuauucaaugucacaaga

SEQ ID NO: 394800 - RNA, 19 nt, Homo sapiens
  misc_RNA (1)...(19): siRNA sense strand
gucauaaagucagaucuug

SEQ ID NO: 394801 - RNA, 19 nt, Homo sapiens
  misc_RNA (1)...(19): siRNA sense strand
cagccucacuucuaaccuu

SEQ ID NO: 394802 - RNA, 19 nt, Homo sapiens
  misc_RNA (1)...(19): siRNA sense strand
gccaaaaucacgccaaaua

SEQ ID NO: 394803 - RNA, 19 nt, Homo sapiens
  misc_RNA (1)...(19): siRNA sense strand
ggcuacagcugguacaaag

SEQ ID NO: 394804 - RNA, 19 nt, Homo sapiens
  misc_RNA (1)...(19): siRNA sense strand
gcagcaacacacacaaguu

SEQ ID NO: 394805 - RNA, 19 nt, Homo sapiens
  misc_RNA (1)...(19): siRNA sense strand
gacacuggccucaauagga

SEQ ID NO: 394806 - RNA, 19 nt, Homo sapiens
  misc_RNA (1)...(19): siRNA sense strand
cagaacaucauccagaaug

SEQ ID NO: 394807 - RNA, 19 nt, Homo sapiens
  misc_RNA (1)...(19): siRNA sense strand
gugccaagcccauaacuca

SEQ ID NO: 394808 - RNA, 19 nt, Homo sapiens
  misc_RNA (1)...(19): siRNA sense strand
gacccucacucuacucagu

SEQ ID NO: 394809 - RNA, 19 nt, Homo sapiens
  misc_RNA (1)...(19): siRNA sense strand
ccacagcgacccagucauc

SEQ ID NO: 394810 - RNA, 19 nt, Homo sapiens
  misc_RNA (1)...(19): siRNA sense strand
guaauaggaacucaacaag

SEQ ID NO: 394811 - RNA, 19 nt, Homo sapiens
  misc_RNA (1)...(19): siRNA sense strand
cagcaacacacacaaguuc

SEQ ID NO: 394812 - RNA, 19 nt, Homo sapiens
  misc_RNA (1)...(19): siRNA sense strand
ggaggugcuucuacuuguc

SEQ ID NO: 394813 - RNA, 19 nt, Homo sapiens
  misc_RNA (1)...(19): siRNA sense strand
gagauaauauaccccaaug

SEQ ID NO: 394814 - RNA, 19 nt, Homo sapiens
  misc_RNA (1)...(19): siRNA sense strand
cauaaagucagaucuugug

SEQ ID NO: 394815 - RNA, 19 nt, Homo sapiens
  misc_RNA (1)...(19): siRNA sense strand
ccagaacgaauuaaguguu

SEQ ID NO: 394816 - RNA, 19 nt, Homo sapiens
  misc_RNA (1)...(19): siRNA sense strand
uccagaacaucauccagaa

SEQ ID NO: 394817 - RNA, 19 nt, Homo sapiens
  misc_RNA (1)...(19): siRNA sense strand
cuacuggccgcaauaauuc

SEQ ID NO: 394818 - RNA, 19 nt, Homo sapiens
  misc_RNA (1)...(19): siRNA sense strand
cacccuggauguccucuau

SEQ ID NO: 394819 - RNA, 19 nt, Homo sapiens
  misc_RNA (1)...(19): siRNA sense strand
gcaagcuacaaaugugaaa

SEQ ID NO: 394820 - RNA, 19 nt, Homo sapiens
  misc_RNA (1)...(19): siRNA sense strand
ggaggaugaggaugcugua

SEQ ID NO: 394821 - RNA, 19 nt, Homo sapiens
  misc_RNA (1)...(19): siRNA sense strand
aauaauaacgggaccuaug

SEQ ID NO: 394822 - RNA, 19 nt, Homo sapiens
  misc_RNA (1)...(19): siRNA sense strand
cacacaaguucucuuuauc

SEQ ID NO: 394823 - RNA, 19 nt, Homo sapiens
  misc_RNA (1)...(19): siRNA sense strand
gcaguauucuuggcguauc

SEQ ID NO: 394824 - RNA, 19 nt, Homo sapiens
  misc_RNA (1)...(19): siRNA sense strand
ggcugcagcuguccaaugg

SEQ ID NO: 394825 - RNA, 19 nt, Homo sapiens
  misc_RNA (1)...(19): siRNA sense strand
gauauguaauaggaacuca

SEQ ID NO: 394826 - RNA, 19 nt, Homo sapiens
  misc_RNA (1)...(19): siRNA sense strand
gcaacaggacccucacucu

SEQ ID NO: 394827 - RNA, 19 nt, Homo sapiens
  misc_RNA (1)...(19): siRNA sense strand
ggcugcagcuguccaaugg

SEQ ID NO: 394828 - RNA, 19 nt, Homo sapiens
  misc_RNA (1)...(19): siRNA sense strand
gagaagaacagcggacucu

SEQ ID NO: 394829 - RNA, 19 nt, Homo sapiens
  misc_RNA (1)...(19): siRNA sense strand
gccaagcucacuauugaau

SEQ ID NO: 394830 - RNA, 19 nt, Homo sapiens
  misc_RNA (1)...(19): siRNA sense strand
ugugguggguaaauaauca

SEQ ID NO: 394831 - RNA, 19 nt, Homo sapiens
  misc_RNA (1)...(19): siRNA sense strand
acacagcaagcuacaaaug

SEQ ID NO: 394832 - RNA, 19 nt, Homo sapiens
  misc_RNA (1)...(19): siRNA sense strand
gcaacaggacccucacucu

SEQ ID NO: 394833 - RNA, 19 nt, Homo sapiens
  misc_RNA (1)...(19): siRNA sense strand
caucccugcugauccagaa

SEQ ID NO: 394834 - RNA, 19 nt, Homo sapiens
  misc_RNA (1)...(19): siRNA sense strand
cucacagccucacuucuaa

SEQ ID NO: 394835 - RNA, 19 nt, Homo sapiens
  misc_RNA (1)...(19): siRNA sense strand
gcauacaguggucgagaga

SEQ ID NO: 394836 - RNA, 19 nt, Homo sapiens
  misc_RNA (1)...(19): siRNA sense strand
gaacagcggacucuauacc

SEQ ID NO: 394837 - RNA, 19 nt, Homo sapiens
  misc_RNA (1)...(19): siRNA sense strand
gggaacauccagcaacaca

SEQ ID NO: 394838 - RNA, 19 nt, Homo sapiens
  misc_RNA (1)...(19): siRNA sense strand
acaguauucuuggcugauu

SEQ ID NO: 394839 - RNA, 19 nt, Homo sapiens
  misc_RNA (1)...(19): siRNA sense strand
gaccacagcgacccaguca

SEQ ID NO: 394840 - RNA, 19 nt, Homo sapiens
  misc_RNA (1)...(19): siRNA sense strand
gccaagcccauaacucaga

SEQ ID NO: 394841 - RNA, 19 nt, Homo sapiens
  misc_RNA (1)...(19): siRNA sense strand
ucuaaacacaucuuacaga

SEQ ID NO: 394842 - RNA, 19 nt, Homo sapiens
  misc_RNA (1)...(19): siRNA sense strand
uaaagucagaucuugugaa

SEQ ID NO: 394843 - RNA, 19 nt, Homo sapiens
  misc_RNA (1)...(19): siRNA sense strand
ugaauaauaguggauccua

SEQ ID NO: 394844 - RNA, 19 nt, Homo sapiens
  misc_RNA (1)...(19): siRNA sense strand
ggaauccagaacucaguga

SEQ ID NO: 394845 - RNA, 19 nt, Homo sapiens
  misc_RNA (1)...(19): siRNA sense strand
ugacgcaagagccuaugua

SEQ ID NO: 394846 - RNA, 19 nt, Homo sapiens
  misc_RNA (1)...(19): siRNA sense strand
caagcucacuauugaaucc

SEQ ID NO: 394847 - RNA, 19 nt, Homo sapiens
  misc_RNA (1)...(19): siRNA sense strand
caaaaucacgccaaauaau

SEQ ID NO: 394848 - RNA, 19 nt, Homo sapiens
  misc_RNA (1)...(19): siRNA sense strand
gucaagagcaucacagucu

SEQ ID NO: 394849 - RNA, 19 nt, Homo sapiens
  misc_RNA (1)...(19): siRNA sense strand
ccgcaauaauuccauaguc

SEQ ID NO: 394850 - RNA, 19 nt, Homo sapiens
  misc_RNA (1)...(19): siRNA sense strand
gaacuucgccagucaacua

SEQ ID NO: 394851 - RNA, 19 nt, Homo sapiens
  misc_RNA (1)...(19): siRNA sense strand
gaucacagaccauuucuuu

SEQ ID NO: 394852 - RNA, 19 nt, Homo sapiens
  misc_RNA (1)...(19): siRNA sense strand
cgacauuccucgguauuua

SEQ ID NO: 394853 - RNA, 19 nt, Homo sapiens
  misc_RNA (1)...(19): siRNA sense strand
acacaucccuucuucuuug

SEQ ID NO: 394854 - RNA, 19 nt, Homo sapiens
  misc_RNA (1)...(19): siRNA sense strand
ggacacaucccuucuucuu

SEQ ID NO: 394855 - RNA, 19 nt, Homo sapiens
  misc_RNA (1)...(19): siRNA sense strand
guacguggccgacuucuug

SEQ ID NO: 394856 - RNA, 19 nt, Homo sapiens
  misc_RNA (1)...(19): siRNA sense strand
gcagguucuucuugaaauu

SEQ ID NO: 394857 - RNA, 19 nt, Homo sapiens
  misc_RNA (1)...(19): siRNA sense strand
gcaagaucguccacuacaa

SEQ ID NO: 394858 - RNA, 19 nt, Homo sapiens
  misc_RNA (1)...(19): siRNA sense strand
gggcuuggcuccaccacuu

SEQ ID NO: 394859 - RNA, 19 nt, Homo sapiens
  misc_RNA (1)...(19): siRNA sense strand
gcacuucgccuuccaggau

SEQ ID NO: 394860 - RNA, 19 nt, Homo sapiens
  misc_RNA (1)...(19): siRNA sense strand
gcaaagcuuucuugugcau

SEQ ID NO: 394861 - RNA, 19 nt, Homo sapiens
  misc_RNA (1)...(19): siRNA sense strand
ugaggaggcucgagacuuc

SEQ ID NO: 394862 - RNA, 19 nt, Homo sapiens
  misc_RNA (1)...(19): siRNA sense strand
ggauccaccuucccaucua

SEQ ID NO: 394863 - RNA, 19 nt, Homo sapiens
  misc_RNA (1)...(19): siRNA sense strand
agagagaaguggccagaga

SEQ ID NO: 394864 - RNA, 19 nt, Homo sapiens
  misc_RNA (1)...(19): siRNA sense strand
cgcgaucucugccugcuua

SEQ ID NO: 394865 - RNA, 19 nt, Homo sapiens
  misc_RNA (1)...(19): siRNA sense strand
ggagaccuauggcaagauc

SEQ ID NO: 394866 - RNA, 19 nt, Homo sapiens
  misc_RNA (1)...(19): siRNA sense strand
ccuaugaaauguucuaugg

SEQ ID NO: 394867 - RNA, 19 nt, Homo sapiens
  misc_RNA (1)...(19): siRNA sense strand
caucaaacccgacaacauc

SEQ ID NO: 394868 - RNA, 19 nt, Homo sapiens
  misc_RNA (1)...(19): siRNA sense strand
gcacggacaaccagaacuu

SEQ ID NO: 394869 - RNA, 19 nt, Homo sapiens
  misc_RNA (1)...(19): siRNA sense strand
gagggacgacuucgagauu

SEQ ID NO: 394870 - RNA, 19 nt, Homo sapiens
  misc_RNA (1)...(19): siRNA sense strand
aaagcuuucuugugcauga

SEQ ID NO: 394871 - RNA, 19 nt, Homo sapiens
  misc_RNA (1)...(19): siRNA sense strand
acagaccauuucuuucuuu

SEQ ID NO: 394872 - RNA, 19 nt, Homo sapiens
  misc_RNA (1)...(19): siRNA sense strand
ggaugaaacagcugaagug

SEQ ID NO: 394873 - RNA, 19 nt, Homo sapiens
  misc_RNA (1)...(19): siRNA sense strand
gcggagaccuauggcaaga

SEQ ID NO: 394874 - RNA, 19 nt, Homo sapiens
  misc_RNA (1)...(19): siRNA sense strand
uguauucgccuaugaaaug

SEQ ID NO: 394875 - RNA, 19 nt, Homo sapiens
  misc_RNA (1)...(19): siRNA sense strand
ugaagaucaugaacaagug

SEQ ID NO: 394876 - RNA, 19 nt, Homo sapiens
  misc_RNA (1)...(19): siRNA sense strand
ucacagaccauuucuuucu

SEQ ID NO: 394877 - RNA, 19 nt, Homo sapiens
  misc_RNA (1)...(19): siRNA sense strand
gcaaugggcagguucuucu

SEQ ID NO: 394878 - RNA, 19 nt, Homo sapiens
  misc_RNA (1)...(19): siRNA sense strand
gcacugagaccccgacauu

SEQ ID NO: 394879 - RNA, 19 nt, Homo sapiens
  misc_RNA (1)...(19): siRNA sense strand
ggugggcgcuggguguauu

SEQ ID NO: 394880 - RNA, 19 nt, Homo sapiens
  misc_RNA (1)...(19): siRNA sense strand
gcacugaaggguucugaag

SEQ ID NO: 394881 - RNA, 19 nt, Homo sapiens
  misc_RNA (1)...(19): siRNA sense strand
ggcagguucuucuugaaau

SEQ ID NO: 394882 - RNA, 19 nt, Homo sapiens
  misc_RNA (1)...(19): siRNA sense strand
gggcagguucuucuugaaa

SEQ ID NO: 394883 - RNA, 19 nt, Homo sapiens
  misc_RNA (1)...(19): siRNA sense strand
gacacaucccuucuucuuu

SEQ ID NO: 394884 - RNA, 19 nt, Homo sapiens
  misc_RNA (1)...(19): siRNA sense strand
agagggacguguuggugaa

SEQ ID NO: 394885 - RNA, 19 nt, Homo sapiens
  misc_RNA (1)...(19): siRNA sense strand
gauccaccuucccaucuag

SEQ ID NO: 394886 - RNA, 19 nt, Homo sapiens
  misc_RNA (1)...(19): siRNA sense strand
cgagguagcgguagugaag

SEQ ID NO: 394887 - RNA, 19 nt, Homo sapiens
  misc_RNA (1)...(19): siRNA sense strand
cgguuuggauauuuauuga

SEQ ID NO: 394888 - RNA, 19 nt, Homo sapiens
  misc_RNA (1)...(19): siRNA sense strand
caagaucguccacuacaag

SEQ ID NO: 394889 - RNA, 19 nt, Homo sapiens
  misc_RNA (1)...(19): siRNA sense strand
ccagguguaugccaugaag

SEQ ID NO: 394890 - RNA, 19 nt, Homo sapiens
  misc_RNA (1)...(19): siRNA sense strand
cacagaccauuucuuucuu

SEQ ID NO: 394891 - RNA, 19 nt, Homo sapiens
  misc_RNA (1)...(19): siRNA sense strand
ccugagggcuaaauuuaac

SEQ ID NO: 394892 - RNA, 19 nt, Homo sapiens
  misc_RNA (1)...(19): siRNA sense strand
gcgguuuggauauuuauug

SEQ ID NO: 394893 - RNA, 19 nt, Homo sapiens
  misc_RNA (1)...(19): siRNA sense strand
guucagcaaugggcagguu

SEQ ID NO: 394894 - RNA, 19 nt, Homo sapiens
  misc_RNA (1)...(19): siRNA sense strand
ccggacacaucccuucuuc

SEQ ID NO: 394895 - RNA, 19 nt, Homo sapiens
  misc_RNA (1)...(19): siRNA sense strand
ggaauccaucucugaguca

SEQ ID NO: 394896 - RNA, 19 nt, Homo sapiens
  misc_RNA (1)...(19): siRNA sense strand
gccugagggcuaaauuuaa

SEQ ID NO: 394897 - RNA, 19 nt, Homo sapiens
  misc_RNA (1)...(19): siRNA sense strand
gacauuccucgguauuuau

SEQ ID NO: 394898 - RNA, 19 nt, Homo sapiens
  misc_RNA (1)...(19): siRNA sense strand
ggacaucaaacccgacaac

SEQ ID NO: 394899 - RNA, 19 nt, Homo sapiens
  misc_RNA (1)...(19): siRNA sense strand
gcagacgggccagguguau

SEQ ID NO: 394900 - RNA, 19 nt, Homo sapiens
  misc_RNA (1)...(19): siRNA sense strand
uagcgguagugaagaugaa

SEQ ID NO: 394901 - RNA, 19 nt, Homo sapiens
  misc_RNA (1)...(19): siRNA sense strand
ucggcgguuuggauauuua

SEQ ID NO: 394902 - RNA, 19 nt, Homo sapiens
  misc_RNA (1)...(19): siRNA sense strand
acaaggagcaccucucucu

SEQ ID NO: 394903 - RNA, 19 nt, Homo sapiens
  misc_RNA (1)...(19): siRNA sense strand
gcuucuaccuggcggagau

SEQ ID NO: 394904 - RNA, 19 nt, Homo sapiens
  misc_RNA (1)...(19): siRNA sense strand
ggugcugccuguccaacau

SEQ ID NO: 394905 - RNA, 19 nt, Homo sapiens
  misc_RNA (1)...(19): siRNA sense strand
ggccagguguaugccauga

SEQ ID NO: 394906 - RNA, 19 nt, Homo sapiens
  misc_RNA (1)...(19): siRNA sense strand
gggacgacuucgagauucu

SEQ ID NO: 394907 - RNA, 19 nt, Homo sapiens
  misc_RNA (1)...(19): siRNA sense strand
ugacguggaugggcaaacu

SEQ ID NO: 394908 - RNA, 19 nt, Homo sapiens
  misc_RNA (1)...(19): siRNA sense strand
guauucgccuaugaaaugu

SEQ ID NO: 394909 - RNA, 19 nt, Homo sapiens
  misc_RNA (1)...(19): siRNA sense strand
ggagauugucauggccaua

SEQ ID NO: 394910 - RNA, 19 nt, Homo sapiens
  misc_RNA (1)...(19): siRNA sense strand
cuucggcgguuuggauauu

SEQ ID NO: 394911 - RNA, 19 nt, Homo sapiens
  misc_RNA (1)...(19): siRNA sense strand
ggcaagaucguccacuaca

SEQ ID NO: 394912 - RNA, 19 nt, Homo sapiens
  misc_RNA (1)...(19): siRNA sense strand
gguguauucgccuaugaaa

SEQ ID NO: 394913 - RNA, 19 nt, Homo sapiens
  misc_RNA (1)...(19): siRNA sense strand
gagauugucauggccauag

SEQ ID NO: 394914 - RNA, 19 nt, Homo sapiens
  misc_RNA (1)...(19): siRNA sense strand
cagaccauuucuuucuuuc

SEQ ID NO: 394915 - RNA, 19 nt, Homo sapiens
  misc_RNA (1)...(19): siRNA sense strand
ggaugagaacuaccuguac

SEQ ID NO: 394916 - RNA, 19 nt, Homo sapiens
  misc_RNA (1)...(19): siRNA sense strand
cacaugcaacuucgacuug

SEQ ID NO: 394917 - RNA, 19 nt, Homo sapiens
  misc_RNA (1)...(19): siRNA sense strand
guagcgguagugaagauga

SEQ ID NO: 394918 - RNA, 19 nt, Homo sapiens
  misc_RNA (1)...(19): siRNA sense strand
gaucucugccugcuuacuc

SEQ ID NO: 394919 - RNA, 19 nt, Homo sapiens
  misc_RNA (1)...(19): siRNA sense strand
aggaugagaacuaccugua

SEQ ID NO: 394920 - RNA, 19 nt, Homo sapiens
  misc_RNA (1)...(19): siRNA sense strand
ccagggacaggcagacaug

SEQ ID NO: 394921 - RNA, 19 nt, Homo sapiens
  misc_RNA (1)...(19): siRNA sense strand
ccucugugcucuaccuuuu

SEQ ID NO: 394922 - RNA, 19 nt, Homo sapiens
  misc_RNA (1)...(19): siRNA sense strand
ggaucacgcagcugcacuu

SEQ ID NO: 394923 - RNA, 19 nt, Homo sapiens
  misc_RNA (1)...(19): siRNA sense strand
gggacguguuggugaaugg

SEQ ID NO: 394924 - RNA, 19 nt, Homo sapiens
  misc_RNA (1)...(19): siRNA sense strand
ggucacucagccucaauug

SEQ ID NO: 394925 - RNA, 19 nt, Homo sapiens
  misc_RNA (1)...(19): siRNA sense strand
gugaggagagggacguguu

SEQ ID NO: 394926 - RNA, 19 nt, Homo sapiens
  misc_RNA (1)...(19): siRNA sense strand
uaucguugguucgcaaagu

SEQ ID NO: 394927 - RNA, 19 nt, Homo sapiens
  misc_RNA (1)...(19): siRNA sense strand
aauuggcccuguucagcaa

SEQ ID NO: 394928 - RNA, 19 nt, Homo sapiens
  misc_RNA (1)...(19): siRNA sense strand
ccccgacccucgcgaauaa

SEQ ID NO: 394929 - RNA, 19 nt, Homo sapiens
  misc_RNA (1)...(19): siRNA sense strand
caaccccaauccacguuuu

SEQ ID NO: 394930 - RNA, 19 nt, Homo sapiens
  misc_RNA (1)...(19): siRNA sense strand
cuacaaggagcaccucucu

SEQ ID NO: 394931 - RNA, 19 nt, Homo sapiens
  misc_RNA (1)...(19): siRNA sense strand
guucugaagggcccuggaa

SEQ ID NO: 394932 - RNA, 19 nt, Homo sapiens
  misc_RNA (1)...(19): siRNA sense strand
gaacacaccugaccugguu

SEQ ID NO: 394933 - RNA, 19 nt, Homo sapiens
  misc_RNA (1)...(19): siRNA sense strand
gcaaugagcucccaguaca

SEQ ID NO: 394934 - RNA, 19 nt, Homo sapiens
  misc_RNA (1)...(19): siRNA sense strand
ggaaaccaguggcagauga

SEQ ID NO: 394935 - RNA, 19 nt, Homo sapiens
  misc_RNA (1)...(19): siRNA sense strand
caaaggcagugcuugaaug

SEQ ID NO: 394936 - RNA, 19 nt, Homo sapiens
  misc_RNA (1)...(19): siRNA sense strand
gcagcucuccuauuaguaa

SEQ ID NO: 394937 - RNA, 19 nt, Homo sapiens
  misc_RNA (1)...(19): siRNA sense strand
cacaagcgcuucugcaugu

SEQ ID NO: 394938 - RNA, 19 nt, Homo sapiens
  misc_RNA (1)...(19): siRNA sense strand
gcagagggcauguggagaa

SEQ ID NO: 394939 - RNA, 19 nt, Homo sapiens
  misc_RNA (1)...(19): siRNA sense strand
aguacaggaugcauucuua

SEQ ID NO: 394940 - RNA, 19 nt, Homo sapiens
  misc_RNA (1)...(19): siRNA sense strand
gaggaggaauuggguauca

SEQ ID NO: 394941 - RNA, 19 nt, Homo sapiens
  misc_RNA (1)...(19): siRNA sense strand
cgucucuguuuccuuauua

SEQ ID NO: 394942 - RNA, 19 nt, Homo sapiens
  misc_RNA (1)...(19): siRNA sense strand
aggcagugcuugaauguga

SEQ ID NO: 394943 - RNA, 19 nt, Homo sapiens
  misc_RNA (1)...(19): siRNA sense strand
gagaaccgccaugcaauga

SEQ ID NO: 394944 - RNA, 19 nt, Homo sapiens
  misc_RNA (1)...(19): siRNA sense strand
gagagaacaauggcaguaa

SEQ ID NO: 394945 - RNA, 19 nt, Homo sapiens
  misc_RNA (1)...(19): siRNA sense strand
ggagaaccgccaugcaaug

SEQ ID NO: 394946 - RNA, 19 nt, Homo sapiens
  misc_RNA (1)...(19): siRNA sense strand
acaacaaucuauacaacug

SEQ ID NO: 394947 - RNA, 19 nt, Homo sapiens
  misc_RNA (1)...(19): siRNA sense strand
agccgucucuguuuccuua

SEQ ID NO: 394948 - RNA, 19 nt, Homo sapiens
  misc_RNA (1)...(19): siRNA sense strand
ggccuuggcugcugauucu

SEQ ID NO: 394949 - RNA, 19 nt, Homo sapiens
  misc_RNA (1)...(19): siRNA sense strand
gaaaccaguggcagaugaa

SEQ ID NO: 394950 - RNA, 19 nt, Homo sapiens
  misc_RNA (1)...(19): siRNA sense strand
cccagcagcuucacaguca

SEQ ID NO: 394951 - RNA, 19 nt, Homo sapiens
  misc_RNA (1)...(19): siRNA sense strand
caggaugcauucuuacuac

SEQ ID NO: 394952 - RNA, 19 nt, Homo sapiens
  misc_RNA (1)...(19): siRNA sense strand
gcaagaagugcaaccugau

SEQ ID NO: 394953 - RNA, 19 nt, Homo sapiens
  misc_RNA (1)...(19): siRNA sense strand
cggccgagcugcuugucaa

SEQ ID NO: 394954 - RNA, 19 nt, Homo sapiens
  misc_RNA (1)...(19): siRNA sense strand
gcccagcagucaagauucu

SEQ ID NO: 394955 - RNA, 19 nt, Homo sapiens
  misc_RNA (1)...(19): siRNA sense strand
gcucuccuauuaguaacaa

SEQ ID NO: 394956 - RNA, 19 nt, Homo sapiens
  misc_RNA (1)...(19): siRNA sense strand
cacagucacucccgucauc

SEQ ID NO: 394957 - RNA, 19 nt, Homo sapiens
  misc_RNA (1)...(19): siRNA sense strand
acaggaugcauucuuacua

SEQ ID NO: 394958 - RNA, 19 nt, Homo sapiens
  misc_RNA (1)...(19): siRNA sense strand
gaagccagggcgagcguau

SEQ ID NO: 394959 - RNA, 19 nt, Homo sapiens
  misc_RNA (1)...(19): siRNA sense strand
caucgaggaggacgaguga

SEQ ID NO: 394960 - RNA, 19 nt, Homo sapiens
  misc_RNA (1)...(19): siRNA sense strand
cuaccagccgucucuguuu

SEQ ID NO: 394961 - RNA, 19 nt, Homo sapiens
  misc_RNA (1)...(19): siRNA sense strand
gcauucagcaagcccucua

SEQ ID NO: 394962 - RNA, 19 nt, Homo sapiens
  misc_RNA (1)...(19): siRNA sense strand
aguaacccgugccucauga

SEQ ID NO: 394963 - RNA, 19 nt, Homo sapiens
  misc_RNA (1)...(19): siRNA sense strand
caagaagugcaaccugauc

SEQ ID NO: 394964 - RNA, 19 nt, Homo sapiens
  misc_RNA (1)...(19): siRNA sense strand
acccgugccucaugacuga

SEQ ID NO: 394965 - RNA, 19 nt, Homo sapiens
  misc_RNA (1)...(19): siRNA sense strand
uaccagccgucucuguuuc

SEQ ID NO: 394966 - RNA, 19 nt, Homo sapiens
  misc_RNA (1)...(19): siRNA sense strand
agagagaacaauggcagua

SEQ ID NO: 394967 - RNA, 19 nt, Homo sapiens
  misc_RNA (1)...(19): siRNA sense strand
acuacccgccucccucuua

SEQ ID NO: 394968 - RNA, 19 nt, Homo sapiens
  misc_RNA (1)...(19): siRNA sense strand
gagggcauguggagaacac

SEQ ID NO: 394969 - RNA, 19 nt, Homo sapiens
  misc_RNA (1)...(19): siRNA sense strand
acaaaggcagugcuugaau

SEQ ID NO: 394970 - RNA, 19 nt, Homo sapiens
  misc_RNA (1)...(19): siRNA sense strand
agaugaagaacauggagaa

SEQ ID NO: 394971 - RNA, 19 nt, Homo sapiens
  misc_RNA (1)...(19): siRNA sense strand
uuaugugccuggucagaca

SEQ ID NO: 394972 - RNA, 19 nt, Homo sapiens
  misc_RNA (1)...(19): siRNA sense strand
uuucagacuccaccuacua

SEQ ID NO: 394973 - RNA, 19 nt, Homo sapiens
  misc_RNA (1)...(19): siRNA sense strand
agagaacaauggcaguaac

SEQ ID NO: 394974 - RNA, 19 nt, Homo sapiens
  misc_RNA (1)...(19): siRNA sense strand
aaaggcagugcuugaaugu

SEQ ID NO: 394975 - RNA, 19 nt, Homo sapiens
  misc_RNA (1)...(19): siRNA sense strand
cacaaaggcagugcuugaa

SEQ ID NO: 394976 - RNA, 19 nt, Homo sapiens
  misc_RNA (1)...(19): siRNA sense strand
gcaguaacccgugccucau

SEQ ID NO: 394977 - RNA, 19 nt, Homo sapiens
  misc_RNA (1)...(19): siRNA sense strand
ccgcccagcagucaagauu

SEQ ID NO: 394978 - RNA, 19 nt, Homo sapiens
  misc_RNA (1)...(19): siRNA sense strand
gaagagcacucagguacua

SEQ ID NO: 394979 - RNA, 19 nt, Homo sapiens
  misc_RNA (1)...(19): siRNA sense strand
gaaagggaaacacaauuua

SEQ ID NO: 394980 - RNA, 19 nt, Homo sapiens
  misc_RNA (1)...(19): siRNA sense strand
gcacaaccaucagaaguuu

SEQ ID NO: 394981 - RNA, 19 nt, Homo sapiens
  misc_RNA (1)...(19): siRNA sense strand
ccaaugacaugauuacuga

SEQ ID NO: 394982 - RNA, 19 nt, Homo sapiens
  misc_RNA (1)...(19): siRNA sense strand
gaagaucauuugaaagaga

SEQ ID NO: 394983 - RNA, 19 nt, Homo sapiens
  misc_RNA (1)...(19): siRNA sense strand
ggaaagggaaacacaauuu

SEQ ID NO: 394984 - RNA, 19 nt, Homo sapiens
  misc_RNA (1)...(19): siRNA sense strand
ggauguugcugaagaagaa

SEQ ID NO: 394985 - RNA, 19 nt, Homo sapiens
  misc_RNA (1)...(19): siRNA sense strand
ccaaauauaucugugaaga

SEQ ID NO: 394986 - RNA, 19 nt, Homo sapiens
  misc_RNA (1)...(19): siRNA sense strand
caugcaggaugaaacauua

SEQ ID NO: 394987 - RNA, 19 nt, Homo sapiens
  misc_RNA (1)...(19): siRNA sense strand
gaaagagaacacugagaaa

SEQ ID NO: 394988 - RNA, 19 nt, Homo sapiens
  misc_RNA (1)...(19): siRNA sense strand
caauuuaucuuugggaguu

SEQ ID NO: 394989 - RNA, 19 nt, Homo sapiens
  misc_RNA (1)...(19): siRNA sense strand
caacagaacgaccuaguau

SEQ ID NO: 394990 - RNA, 19 nt, Homo sapiens
  misc_RNA (1)...(19): siRNA sense strand
gaagaugacaugguuguug

SEQ ID NO: 394991 - RNA, 19 nt, Homo sapiens
  misc_RNA (1)...(19): siRNA sense strand
caaagauccuguggaaguu

SEQ ID NO: 394992 - RNA, 19 nt, Homo sapiens
  misc_RNA (1)...(19): siRNA sense strand
gauccaaguuccagcauag

SEQ ID NO: 394993 - RNA, 19 nt, Homo sapiens
  misc_RNA (1)...(19): siRNA sense strand
acagaacgaccuaguauuu

SEQ ID NO: 394994 - RNA, 19 nt, Homo sapiens
  misc_RNA (1)...(19): siRNA sense strand
agaacgaccuaguauuuga

SEQ ID NO: 394995 - RNA, 19 nt, Homo sapiens
  misc_RNA (1)...(19): siRNA sense strand
cagaacagccuaagaggaa

SEQ ID NO: 394996 - RNA, 19 nt, Homo sapiens
  misc_RNA (1)...(19): siRNA sense strand
ccaaagauccuguggaagu

SEQ ID NO: 394997 - RNA, 19 nt, Homo sapiens
  misc_RNA (1)...(19): siRNA sense strand
cgaccuaguauuugaauuu

SEQ ID NO: 394998 - RNA, 19 nt, Homo sapiens
  misc_RNA (1)...(19): siRNA sense strand
ugaaagagaacacugagaa

SEQ ID NO: 394999 - RNA, 19 nt, Homo sapiens
  misc_RNA (1)...(19): siRNA sense strand
ggauccaaguuccagcaua

SEQ ID NO: 395000 - RNA, 19 nt, Homo sapiens
  misc_RNA (1)...(19): siRNA sense strand
gcaguugcauacaguaaca

SEQ ID NO: 395001 - RNA, 19 nt, Homo sapiens
  misc_RNA (1)...(19): siRNA sense strand
cuaaagcaguguccagguu

SEQ ID NO: 395002 - RNA, 19 nt, Homo sapiens
  misc_RNA (1)...(19): siRNA sense strand
ucagguagcuaugaaacaa

SEQ ID NO: 395003 - RNA, 19 nt, Homo sapiens
  misc_RNA (1)...(19): siRNA sense strand
ggaaucagcaguugcauac

SEQ ID NO: 395004 - RNA, 19 nt, Homo sapiens
  misc_RNA (1)...(19): siRNA sense strand
ccaguaccaugcaggauga

SEQ ID NO: 395005 - RNA, 19 nt, Homo sapiens
  misc_RNA (1)...(19): siRNA sense strand
gagcacucagguacuauua

SEQ ID NO: 395006 - RNA, 19 nt, Homo sapiens
  misc_RNA (1)...(19): siRNA sense strand
ugacaucacccuuacaguu

SEQ ID NO: 395007 - RNA, 19 nt, Homo sapiens
  misc_RNA (1)...(19): siRNA sense strand
ccaauggauuuacuucuca

SEQ ID NO: 395008 - RNA, 19 nt, Homo sapiens
  misc_RNA (1)...(19): siRNA sense strand
gaccuaguauuugaauuug

SEQ ID NO: 395009 - RNA, 19 nt, Homo sapiens
  misc_RNA (1)...(19): siRNA sense strand
aaacacagcaggugcaaga

SEQ ID NO: 395010 - RNA, 19 nt, Homo sapiens
  misc_RNA (1)...(19): siRNA sense strand
uguaaucacuucaguuauc

SEQ ID NO: 395011 - RNA, 19 nt, Homo sapiens
  misc_RNA (1)...(19): siRNA sense strand
guaaucacuucaguuauca

SEQ ID NO: 395012 - RNA, 19 nt, Homo sapiens
  misc_RNA (1)...(19): siRNA sense strand
ggaagagcccaaugacaug

SEQ ID NO: 395013 - RNA, 19 nt, Homo sapiens
  misc_RNA (1)...(19): siRNA sense strand
gacaucacccuuacaguug

SEQ ID NO: 395014 - RNA, 19 nt, Homo sapiens
  misc_RNA (1)...(19): siRNA sense strand
cauagacgaugaugaugau

SEQ ID NO: 395015 - RNA, 19 nt, Homo sapiens
  misc_RNA (1)...(19): siRNA sense strand
gaacgaccuaguauuugaa

SEQ ID NO: 395016 - RNA, 19 nt, Homo sapiens
  misc_RNA (1)...(19): siRNA sense strand
ucacccaccuggcacugua

SEQ ID NO: 395017 - RNA, 19 nt, Homo sapiens
  misc_RNA (1)...(19): siRNA sense strand
ggucagcgcuugguguauc

SEQ ID NO: 395018 - RNA, 19 nt, Homo sapiens
  misc_RNA (1)...(19): siRNA sense strand
uggauuuacuucucaggua

SEQ ID NO: 395019 - RNA, 19 nt, Homo sapiens
  misc_RNA (1)...(19): siRNA sense strand
gaagagcccaaugacauga

SEQ ID NO: 395020 - RNA, 19 nt, Homo sapiens
  misc_RNA (1)...(19): siRNA sense strand
gcaauggaaccgucagugu

SEQ ID NO: 395021 - RNA, 19 nt, Homo sapiens
  misc_RNA (1)...(19): siRNA sense strand
gggcucuccuccuucaauu

SEQ ID NO: 395022 - RNA, 19 nt, Homo sapiens
  misc_RNA (1)...(19): siRNA sense strand
ccaacagaacgaccuagua

SEQ ID NO: 395023 - RNA, 19 nt, Homo sapiens
  misc_RNA (1)...(19): siRNA sense strand
cugaagaucauuugaaaga

SEQ ID NO: 395024 - RNA, 19 nt, Homo sapiens
  misc_RNA (1)...(19): siRNA sense strand
acccaaagauccuguggaa

SEQ ID NO: 395025 - RNA, 19 nt, Homo sapiens
  misc_RNA (1)...(19): siRNA sense strand
ccacuacgccaaauauauc

SEQ ID NO: 395026 - RNA, 19 nt, Homo sapiens
  misc_RNA (1)...(19): siRNA sense strand
ugacaguacugaaagaaaa

SEQ ID NO: 395027 - RNA, 19 nt, Homo sapiens
  misc_RNA (1)...(19): siRNA sense strand
caucacagcccaugacagu

SEQ ID NO: 395028 - RNA, 19 nt, Homo sapiens
  misc_RNA (1)...(19): siRNA sense strand
gguacuggaucucagaagu

SEQ ID NO: 395029 - RNA, 19 nt, Homo sapiens
  misc_RNA (1)...(19): siRNA sense strand
guucagaguauuaggacua

SEQ ID NO: 395030 - RNA, 19 nt, Homo sapiens
  misc_RNA (1)...(19): siRNA sense strand
caauaguuaugccggucua

SEQ ID NO: 395031 - RNA, 19 nt, Homo sapiens
  misc_RNA (1)...(19): siRNA sense strand
uagaugggauuccugaagu

SEQ ID NO: 395032 - RNA, 19 nt, Homo sapiens
  misc_RNA (1)...(19): siRNA sense strand
gcccaugacaguacugaaa

SEQ ID NO: 395033 - RNA, 19 nt, Homo sapiens
  misc_RNA (1)...(19): siRNA sense strand
guacuggaucucagaaguu

SEQ ID NO: 395034 - RNA, 19 nt, Homo sapiens
  misc_RNA (1)...(19): siRNA sense strand
caucagccacuucaaauag

SEQ ID NO: 395035 - RNA, 19 nt, Homo sapiens
  misc_RNA (1)...(19): siRNA sense strand
ggaauucuaaagcugcaaa

SEQ ID NO: 395036 - RNA, 19 nt, Homo sapiens
  misc_RNA (1)...(19): siRNA sense strand
acagauccaucagcaggua

SEQ ID NO: 395037 - RNA, 19 nt, Homo sapiens
  misc_RNA (1)...(19): siRNA sense strand
caguaacacuccaaacagu

SEQ ID NO: 395038 - RNA, 19 nt, Homo sapiens
  misc_RNA (1)...(19): siRNA sense strand
gcgcuugguguaucaguuu

SEQ ID NO: 395039 - RNA, 19 nt, Homo sapiens
  misc_RNA (1)...(19): siRNA sense strand
gugccacucacaacaguua

SEQ ID NO: 395040 - RNA, 19 nt, Homo sapiens
  misc_RNA (1)...(19): siRNA sense strand
cagcauagagucuucagau

SEQ ID NO: 395041 - RNA, 19 nt, Homo sapiens
  misc_RNA (1)...(19): siRNA sense strand
cauagagucuucagaucca

SEQ ID NO: 395042 - RNA, 19 nt, Homo sapiens
  misc_RNA (1)...(19): siRNA sense strand
ccaugacaguacugaaaga

SEQ ID NO: 395043 - RNA, 19 nt, Homo sapiens
  misc_RNA (1)...(19): siRNA sense strand
cuuccggacuguucaugua

SEQ ID NO: 395044 - RNA, 19 nt, Homo sapiens
  misc_RNA (1)...(19): siRNA sense strand
ugacggggaugaaacaauu

SEQ ID NO: 395045 - RNA, 19 nt, Homo sapiens
  misc_RNA (1)...(19): siRNA sense strand
uacuggaucucagaaguuu

SEQ ID NO: 395046 - RNA, 19 nt, Homo sapiens
  misc_RNA (1)...(19): siRNA sense strand
gcacuccucaauauggauu

SEQ ID NO: 395047 - RNA, 19 nt, Homo sapiens
  misc_RNA (1)...(19): siRNA sense strand
guugaagcuucuugucaug

SEQ ID NO: 395048 - RNA, 19 nt, Homo sapiens
  misc_RNA (1)...(19): siRNA sense strand
gaacgacagcuuggugauc

SEQ ID NO: 395049 - RNA, 19 nt, Homo sapiens
  misc_RNA (1)...(19): siRNA sense strand
gguugugucuccuaggaau

SEQ ID NO: 395050 - RNA, 19 nt, Homo sapiens
  misc_RNA (1)...(19): siRNA sense strand
cgccaaauauaucugugaa

SEQ ID NO: 395051 - RNA, 19 nt, Homo sapiens
  misc_RNA (1)...(19): siRNA sense strand
gccacuacgccaaauauau

SEQ ID NO: 395052 - RNA, 19 nt, Homo sapiens
  misc_RNA (1)...(19): siRNA sense strand
gggaaacacaauuuaucuu

SEQ ID NO: 395053 - RNA, 19 nt, Homo sapiens
  misc_RNA (1)...(19): siRNA sense strand
cagcagguccuuacuagca

SEQ ID NO: 395054 - RNA, 19 nt, Homo sapiens
  misc_RNA (1)...(19): siRNA sense strand
gcagguacuggaucucaga

SEQ ID NO: 395055 - RNA, 19 nt, Homo sapiens
  misc_RNA (1)...(19): siRNA sense strand
gaagcagcuagaaccagua

SEQ ID NO: 395056 - RNA, 19 nt, Homo sapiens
  misc_RNA (1)...(19): siRNA sense strand
cuacuuguccuaaauacau

SEQ ID NO: 395057 - RNA, 19 nt, Homo sapiens
  misc_RNA (1)...(19): siRNA sense strand
ugacaugauuacugagagu

SEQ ID NO: 395058 - RNA, 19 nt, Homo sapiens
  misc_RNA (1)...(19): siRNA sense strand
gguccuuacuagcaauguu

SEQ ID NO: 395059 - RNA, 19 nt, Homo sapiens
  misc_RNA (1)...(19): siRNA sense strand
gcagguccuuacuagcaau

SEQ ID NO: 395060 - RNA, 19 nt, Homo sapiens
  misc_RNA (1)...(19): siRNA sense strand
gauggaaagggaaacacaa

SEQ ID NO: 395061 - RNA, 19 nt, Homo sapiens
  misc_RNA (1)...(19): siRNA sense strand
guucagcagguccuuacua

SEQ ID NO: 395062 - RNA, 19 nt, Homo sapiens
  misc_RNA (1)...(19): siRNA sense strand
uacaagccauuccaucauc

SEQ ID NO: 395063 - RNA, 19 nt, Homo sapiens
  misc_RNA (1)...(19): siRNA sense strand
ggaucucagaaguuuauuu

SEQ ID NO: 395064 - RNA, 19 nt, Homo sapiens
  misc_RNA (1)...(19): siRNA sense strand
uggaagagcccaaugacau

SEQ ID NO: 395065 - RNA, 19 nt, Homo sapiens
  misc_RNA (1)...(19): siRNA sense strand
gcaggaugaaacauuaaau

SEQ ID NO: 395066 - RNA, 19 nt, Homo sapiens
  misc_RNA (1)...(19): siRNA sense strand
ccggacuguucauguagua

SEQ ID NO: 395067 - RNA, 19 nt, Homo sapiens
  misc_RNA (1)...(19): siRNA sense strand
ggucgagaguaucuucaag

SEQ ID NO: 395068 - RNA, 19 nt, Homo sapiens
  misc_RNA (1)...(19): siRNA sense strand
ucaucagccacuucaaaua

SEQ ID NO: 395069 - RNA, 19 nt, Homo sapiens
  misc_RNA (1)...(19): siRNA sense strand
ggaugaaacaauugaaacu

SEQ ID NO: 395070 - RNA, 19 nt, Homo sapiens
  misc_RNA (1)...(19): siRNA sense strand
gugguugugucuccuagga

SEQ ID NO: 395071 - RNA, 19 nt, Homo sapiens
  misc_RNA (1)...(19): siRNA sense strand
ucaaauaggaaucaaacca

SEQ ID NO: 395072 - RNA, 19 nt, Homo sapiens
  misc_RNA (1)...(19): siRNA sense strand
gagcccaaugacaugauua

SEQ ID NO: 395073 - RNA, 19 nt, Homo sapiens
  misc_RNA (1)...(19): siRNA sense strand
acacagcaggugcaagaaa

SEQ ID NO: 395074 - RNA, 19 nt, Homo sapiens
  misc_RNA (1)...(19): siRNA sense strand
gcucuccuccuucaauugu

SEQ ID NO: 395075 - RNA, 19 nt, Homo sapiens
  misc_RNA (1)...(19): siRNA sense strand
cagaacgaccuaguauuug

SEQ ID NO: 395076 - RNA, 19 nt, Homo sapiens
  misc_RNA (1)...(19): siRNA sense strand
gcuuggugauccagcuauu

SEQ ID NO: 395077 - RNA, 19 nt, Homo sapiens
  misc_RNA (1)...(19): siRNA sense strand
acaaagauggaaagggaaa

SEQ ID NO: 395078 - RNA, 19 nt, Homo sapiens
  misc_RNA (1)...(19): siRNA sense strand
gaccucagcugccugguuu

SEQ ID NO: 395079 - RNA, 19 nt, Homo sapiens
  misc_RNA (1)...(19): siRNA sense strand
ccaacaggcugggaaauaa

SEQ ID NO: 395080 - RNA, 19 nt, Homo sapiens
  misc_RNA (1)...(19): siRNA sense strand
agacauaccagccuuauaa

SEQ ID NO: 395081 - RNA, 19 nt, Homo sapiens
  misc_RNA (1)...(19): siRNA sense strand
gagcugauacccagacaua

SEQ ID NO: 395082 - RNA, 19 nt, Homo sapiens
  misc_RNA (1)...(19): siRNA sense strand
gaacuuaugcugacuacga

SEQ ID NO: 395083 - RNA, 19 nt, Homo sapiens
  misc_RNA (1)...(19): siRNA sense strand
cauggaagguguuuguaaa

SEQ ID NO: 395084 - RNA, 19 nt, Homo sapiens
  misc_RNA (1)...(19): siRNA sense strand
ucagucaguuguuugauuu

SEQ ID NO: 395085 - RNA, 19 nt, Homo sapiens
  misc_RNA (1)...(19): siRNA sense strand
cuacgaaucugugaaugaa

SEQ ID NO: 395086 - RNA, 19 nt, Homo sapiens
  misc_RNA (1)...(19): siRNA sense strand
gcauggaagguguuuguaa

SEQ ID NO: 395087 - RNA, 19 nt, Homo sapiens
  misc_RNA (1)...(19): siRNA sense strand
guaugaagaacaucugaaa

SEQ ID NO: 395088 - RNA, 19 nt, Homo sapiens
  misc_RNA (1)...(19): siRNA sense strand
auaccagccuuauaacaaa

SEQ ID NO: 395089 - RNA, 19 nt, Homo sapiens
  misc_RNA (1)...(19): siRNA sense strand
ccagaaggcagaacuuaug

SEQ ID NO: 395090 - RNA, 19 nt, Homo sapiens
  misc_RNA (1)...(19): siRNA sense strand
ggauuaaagagaagaucua

SEQ ID NO: 395091 - RNA, 19 nt, Homo sapiens
  misc_RNA (1)...(19): siRNA sense strand
aacaaagacuggauuaaag

SEQ ID NO: 395092 - RNA, 19 nt, Homo sapiens
  misc_RNA (1)...(19): siRNA sense strand
uaucacauaugacaucagu

SEQ ID NO: 395093 - RNA, 19 nt, Homo sapiens
  misc_RNA (1)...(19): siRNA sense strand
gaagguguuuguaaaaugu

SEQ ID NO: 395094 - RNA, 19 nt, Homo sapiens
  misc_RNA (1)...(19): siRNA sense strand
caacagucccucuaucaca

SEQ ID NO: 395095 - RNA, 19 nt, Homo sapiens
  misc_RNA (1)...(19): siRNA sense strand
cauaccagccuuauaacaa

SEQ ID NO: 395096 - RNA, 19 nt, Homo sapiens
  misc_RNA (1)...(19): siRNA sense strand
gaacaucugaaaagaauga

SEQ ID NO: 395097 - RNA, 19 nt, Homo sapiens
  misc_RNA (1)...(19): siRNA sense strand
aagacuggauuaaagagaa

SEQ ID NO: 395098 - RNA, 19 nt, Homo sapiens
  misc_RNA (1)...(19): siRNA sense strand
ggaagguguuuguaaaaug

SEQ ID NO: 395099 - RNA, 19 nt, Homo sapiens
  misc_RNA (1)...(19): siRNA sense strand
gcagaacuuaugcugacua

SEQ ID NO: 395100 - RNA, 19 nt, Homo sapiens
  misc_RNA (1)...(19): siRNA sense strand
acaaagacuggauuaaaga

SEQ ID NO: 395101 - RNA, 19 nt, Homo sapiens
  misc_RNA (1)...(19): siRNA sense strand
ggccagaaggcagaacuua

SEQ ID NO: 395102 - RNA, 19 nt, Homo sapiens
  misc_RNA (1)...(19): siRNA sense strand
acgaaucugugaaugaaug

SEQ ID NO: 395103 - RNA, 19 nt, Homo sapiens
  misc_RNA (1)...(19): siRNA sense strand
gaagaucuacgugcuccuu

SEQ ID NO: 395104 - RNA, 19 nt, Homo sapiens
  misc_RNA (1)...(19): siRNA sense strand
gucccucuaucacauauga

SEQ ID NO: 395105 - RNA, 19 nt, Homo sapiens
  misc_RNA (1)...(19): siRNA sense strand
gaagaacaucugaaaagaa

SEQ ID NO: 395106 - RNA, 19 nt, Homo sapiens
  misc_RNA (1)...(19): siRNA sense strand
aagaaugaaucccaacagu

SEQ ID NO: 395107 - RNA, 19 nt, Homo sapiens
  misc_RNA (1)...(19): siRNA sense strand
ucaguuguuugauuucauc

SEQ ID NO: 395108 - RNA, 19 nt, Homo sapiens
  misc_RNA (1)...(19): siRNA sense strand
ugacuacgaaucugugaau

SEQ ID NO: 395109 - RNA, 19 nt, Homo sapiens
  misc_RNA (1)...(19): siRNA sense strand
ugaagaacaucugaaaaga

SEQ ID NO: 395110 - RNA, 19 nt, Homo sapiens
  misc_RNA (1)...(19): siRNA sense strand
guuguuugauuucaucgau

SEQ ID NO: 395111 - RNA, 19 nt, Homo sapiens
  misc_RNA (1)...(19): siRNA sense strand
gccagaaggcagaacuuau

SEQ ID NO: 395112 - RNA, 19 nt, Homo sapiens
  misc_RNA (1)...(19): siRNA sense strand
uuaaagagaagaucuacgu

SEQ ID NO: 395113 - RNA, 19 nt, Homo sapiens
  misc_RNA (1)...(19): siRNA sense strand
gaaugcauggaagguguuu

SEQ ID NO: 395114 - RNA, 19 nt, Homo sapiens
  misc_RNA (1)...(19): siRNA sense strand
gacaucagucaguuguuug

SEQ ID NO: 395115 - RNA, 19 nt, Homo sapiens
  misc_RNA (1)...(19): siRNA sense strand
cagaacuuaugcugacuac

SEQ ID NO: 395116 - RNA, 19 nt, Homo sapiens
  misc_RNA (1)...(19): siRNA sense strand
cagacauaccagccuuaua

SEQ ID NO: 395117 - RNA, 19 nt, Homo sapiens
  misc_RNA (1)...(19): siRNA sense strand
caaagacuggauuaaagag

SEQ ID NO: 395118 - RNA, 19 nt, Homo sapiens
  misc_RNA (1)...(19): siRNA sense strand
gaaugaaugcauggaaggu

SEQ ID NO: 395119 - RNA, 19 nt, Homo sapiens
  misc_RNA (1)...(19): siRNA sense strand
aacagucccucuaucacau

SEQ ID NO: 395120 - RNA, 19 nt, Homo sapiens
  misc_RNA (1)...(19): siRNA sense strand
agacuggauuaaagagaag

SEQ ID NO: 395121 - RNA, 19 nt, Homo sapiens
  misc_RNA (1)...(19): siRNA sense strand
aaagacuggauuaaagaga

SEQ ID NO: 395122 - RNA, 19 nt, Homo sapiens
  misc_RNA (1)...(19): siRNA sense strand
aacuuaugcugacuacgaa

SEQ ID NO: 395123 - RNA, 19 nt, Homo sapiens
  misc_RNA (1)...(19): siRNA sense strand
gacuacgaaucugugaaug

SEQ ID NO: 395124 - RNA, 19 nt, Homo sapiens
  misc_RNA (1)...(19): siRNA sense strand
ccucugagcugucgucuug

SEQ ID NO: 395125 - RNA, 19 nt, Homo sapiens
  misc_RNA (1)...(19): siRNA sense strand
gcaaaugucagaaccuauu

SEQ ID NO: 395126 - RNA, 19 nt, Homo sapiens
  misc_RNA (1)...(19): siRNA sense strand
cgaaggcuuugcuuacuaa

SEQ ID NO: 395127 - RNA, 19 nt, Homo sapiens
  misc_RNA (1)...(19): siRNA sense strand
ggccagccaugaacuauga

SEQ ID NO: 395128 - RNA, 19 nt, Homo sapiens
  misc_RNA (1)...(19): siRNA sense strand
gcgauacgucuacaaauuu

SEQ ID NO: 395129 - RNA, 19 nt, Homo sapiens
  misc_RNA (1)...(19): siRNA sense strand
gaccacagcagcaaacauu

SEQ ID NO: 395130 - RNA, 19 nt, Homo sapiens
  misc_RNA (1)...(19): siRNA sense strand
ccaaagaugaugccugaaa

SEQ ID NO: 395131 - RNA, 19 nt, Homo sapiens
  misc_RNA (1)...(19): siRNA sense strand
ucacgauucugaagagcua

SEQ ID NO: 395132 - RNA, 19 nt, Homo sapiens
  misc_RNA (1)...(19): siRNA sense strand
aagcacaaguuccugauga

SEQ ID NO: 395133 - RNA, 19 nt, Homo sapiens
  misc_RNA (1)...(19): siRNA sense strand
gagauaaucgccccaguua

SEQ ID NO: 395134 - RNA, 19 nt, Homo sapiens
  misc_RNA (1)...(19): siRNA sense strand
cgauacgucuacaaauuug

SEQ ID NO: 395135 - RNA, 19 nt, Homo sapiens
  misc_RNA (1)...(19): siRNA sense strand
acaaguuccugaugaugaa

SEQ ID NO: 395136 - RNA, 19 nt, Homo sapiens
  misc_RNA (1)...(19): siRNA sense strand
aaaccaguauccaucagaa

SEQ ID NO: 395137 - RNA, 19 nt, Homo sapiens
  misc_RNA (1)...(19): siRNA sense strand
aaaagugccucuacaacua

SEQ ID NO: 395138 - RNA, 19 nt, Homo sapiens
  misc_RNA (1)...(19): siRNA sense strand
gaacaguuugucccagauu

SEQ ID NO: 395139 - RNA, 19 nt, Homo sapiens
  misc_RNA (1)...(19): siRNA sense strand
caacuauugugccuaugau

SEQ ID NO: 395140 - RNA, 19 nt, Homo sapiens
  misc_RNA (1)...(19): siRNA sense strand
ccgaaggcuuugcuuacua

SEQ ID NO: 395141 - RNA, 19 nt, Homo sapiens
  misc_RNA (1)...(19): siRNA sense strand
cggcaaaugucagaaccua

SEQ ID NO: 395142 - RNA, 19 nt, Homo sapiens
  misc_RNA (1)...(19): siRNA sense strand
gccgcucucuccgcuauua

SEQ ID NO: 395143 - RNA, 19 nt, Homo sapiens
  misc_RNA (1)...(19): siRNA sense strand
gcauggaguucaagcugau

SEQ ID NO: 395144 - RNA, 19 nt, Homo sapiens
  misc_RNA (1)...(19): siRNA sense strand
ccucagggauucaaacaag

SEQ ID NO: 395145 - RNA, 19 nt, Homo sapiens
  misc_RNA (1)...(19): siRNA sense strand
caaagaugaugccugaaaa

SEQ ID NO: 395146 - RNA, 19 nt, Homo sapiens
  misc_RNA (1)...(19): siRNA sense strand
aacaggagccuaccaugua

SEQ ID NO: 395147 - RNA, 19 nt, Homo sapiens
  misc_RNA (1)...(19): siRNA sense strand
agcgauacgucuacaaauu

SEQ ID NO: 395148 - RNA, 19 nt, Homo sapiens
  misc_RNA (1)...(19): siRNA sense strand
ggugcuaacuauggagaaa

SEQ ID NO: 395149 - RNA, 19 nt, Homo sapiens
  misc_RNA (1)...(19): siRNA sense strand
ugacccagaugcccucuuc

SEQ ID NO: 395150 - RNA, 19 nt, Homo sapiens
  misc_RNA (1)...(19): siRNA sense strand
ucugagcugucgucuugua

SEQ ID NO: 395151 - RNA, 19 nt, Homo sapiens
  misc_RNA (1)...(19): siRNA sense strand
ccagggaaaucucgaucug

SEQ ID NO: 395152 - RNA, 19 nt, Homo sapiens
  misc_RNA (1)...(19): siRNA sense strand
cugauaaccuggugcuuca

SEQ ID NO: 395153 - RNA, 19 nt, Homo sapiens
  misc_RNA (1)...(19): siRNA sense strand
ccauggcuuucccggauaa

SEQ ID NO: 395154 - RNA, 19 nt, Homo sapiens
  misc_RNA (1)...(19): siRNA sense strand
gcaggagccucgggauuac

SEQ ID NO: 395155 - RNA, 19 nt, Homo sapiens
  misc_RNA (1)...(19): siRNA sense strand
ggaucucagucaacuucaa

SEQ ID NO: 395156 - RNA, 19 nt, Homo sapiens
  misc_RNA (1)...(19): siRNA sense strand
acaggagccuaccauguau

SEQ ID NO: 395157 - RNA, 19 nt, Homo sapiens
  misc_RNA (1)...(19): siRNA sense strand
uugguuagcugaagcacaa

SEQ ID NO: 395158 - RNA, 19 nt, Homo sapiens
  misc_RNA (1)...(19): siRNA sense strand
gaucagcaagucccuuuua

SEQ ID NO: 395159 - RNA, 19 nt, Homo sapiens
  misc_RNA (1)...(19): siRNA sense strand
ggagagcgauacgucuaca

SEQ ID NO: 395160 - RNA, 19 nt, Homo sapiens
  misc_RNA (1)...(19): siRNA sense strand
gcacaaguuccugaugaug

SEQ ID NO: 395161 - RNA, 19 nt, Homo sapiens
  misc_RNA (1)...(19): siRNA sense strand
cagaugcccucuucuccau

SEQ ID NO: 395162 - RNA, 19 nt, Homo sapiens
  misc_RNA (1)...(19): siRNA sense strand
aaacaggagccuaccaugu

SEQ ID NO: 395163 - RNA, 19 nt, Homo sapiens
  misc_RNA (1)...(19): siRNA sense strand
caucagaacagagauuuca

SEQ ID NO: 395164 - RNA, 19 nt, Homo sapiens
  misc_RNA (1)...(19): siRNA sense strand
ggagaaaagugccucuaca

SEQ ID NO: 395165 - RNA, 19 nt, Homo sapiens
  misc_RNA (1)...(19): siRNA sense strand
ccgcuuaccuccuggacau

SEQ ID NO: 395166 - RNA, 19 nt, Homo sapiens
  misc_RNA (1)...(19): siRNA sense strand
ucaaacaagaauaccauga

SEQ ID NO: 395167 - RNA, 19 nt, Homo sapiens
  misc_RNA (1)...(19): siRNA sense strand
cacaaguuccugaugauga

SEQ ID NO: 395168 - RNA, 19 nt, Homo sapiens
  misc_RNA (1)...(19): siRNA sense strand
ugacagaaagaggaaguuu

SEQ ID NO: 395169 - RNA, 19 nt, Homo sapiens
  misc_RNA (1)...(19): siRNA sense strand
ccucuggguucaagccauu

SEQ ID NO: 395170 - RNA, 19 nt, Homo sapiens
  misc_RNA (1)...(19): siRNA sense strand
gaagcacaaguuccugaug

SEQ ID NO: 395171 - RNA, 19 nt, Homo sapiens
  misc_RNA (1)...(19): siRNA sense strand
caaaugucagaaccuauug

SEQ ID NO: 395172 - RNA, 19 nt, Homo sapiens
  misc_RNA (1)...(19): siRNA sense strand
cugcagaugccaaagauga

SEQ ID NO: 395173 - RNA, 19 nt, Homo sapiens
  misc_RNA (1)...(19): siRNA sense strand
gaaaucucgaucugaggaa

SEQ ID NO: 395174 - RNA, 19 nt, Homo sapiens
  misc_RNA (1)...(19): siRNA sense strand
cugcgucgauucagaagug

SEQ ID NO: 395175 - RNA, 19 nt, Homo sapiens
  misc_RNA (1)...(19): siRNA sense strand
gauaaccuggugcuucaug

SEQ ID NO: 395176 - RNA, 19 nt, Homo sapiens
  misc_RNA (1)...(19): siRNA sense strand
gagcgauacgucuacaaau

SEQ ID NO: 395177 - RNA, 19 nt, Homo sapiens
  misc_RNA (1)...(19): siRNA sense strand
ggaguucaagcugauagaa

SEQ ID NO: 395178 - RNA, 19 nt, Homo sapiens
  misc_RNA (1)...(19): siRNA sense strand
ggauuacugcgucgauuca

SEQ ID NO: 395179 - RNA, 19 nt, Homo sapiens
  misc_RNA (1)...(19): siRNA sense strand
aacaguuugucccagauuu

SEQ ID NO: 395180 - RNA, 19 nt, Homo sapiens
  misc_RNA (1)...(19): siRNA sense strand
cagcagccaugaagguuuu

SEQ ID NO: 395181 - RNA, 19 nt, Homo sapiens
  misc_RNA (1)...(19): siRNA sense strand
agcaggagccucgggauua

SEQ ID NO: 395182 - RNA, 19 nt, Homo sapiens
  misc_RNA (1)...(19): siRNA sense strand
acagagauuucagagacaa

SEQ ID NO: 395183 - RNA, 19 nt, Homo sapiens
  misc_RNA (1)...(19): siRNA sense strand
gcagaugccaaagaugaug

SEQ ID NO: 395184 - RNA, 19 nt, Homo sapiens
  misc_RNA (1)...(19): siRNA sense strand
gaaaagugccucuacaacu

SEQ ID NO: 395185 - RNA, 19 nt, Homo sapiens
  misc_RNA (1)...(19): siRNA sense strand
caggaucucagucaacuuc

SEQ ID NO: 395186 - RNA, 19 nt, Homo sapiens
  misc_RNA (1)...(19): siRNA sense strand
gaggcgagguucccuucag

SEQ ID NO: 395187 - RNA, 19 nt, Homo sapiens
  misc_RNA (1)...(19): siRNA sense strand
ucagaacagagauuucaga

SEQ ID NO: 395188 - RNA, 19 nt, Homo sapiens
  misc_RNA (1)...(19): siRNA sense strand
auucagaagugccuaacug

SEQ ID NO: 395189 - RNA, 19 nt, Homo sapiens
  misc_RNA (1)...(19): siRNA sense strand
gacccacucuaugaacaug

SEQ ID NO: 395190 - RNA, 19 nt, Homo sapiens
  misc_RNA (1)...(19): siRNA sense strand
caaacaagaauaccaugac

SEQ ID NO: 395191 - RNA, 19 nt, Homo sapiens
  misc_RNA (1)...(19): siRNA sense strand
ucuccgcuauuacuaugaa

SEQ ID NO: 395192 - RNA, 19 nt, Homo sapiens
  misc_RNA (1)...(19): siRNA sense strand
ucucuccgcuauuacuaug

SEQ ID NO: 395193 - RNA, 19 nt, Homo sapiens
  misc_RNA (1)...(19): siRNA sense strand
caguauccaucagaacaga

SEQ ID NO: 395194 - RNA, 19 nt, Homo sapiens
  misc_RNA (1)...(19): siRNA sense strand
gccgaaggcuuugcuuacu

SEQ ID NO: 395195 - RNA, 19 nt, Homo sapiens
  misc_RNA (1)...(19): siRNA sense strand
agagcgauacgucuacaaa

SEQ ID NO: 395196 - RNA, 19 nt, Homo sapiens
  misc_RNA (1)...(19): siRNA sense strand
gaaccggccagccaugaac

SEQ ID NO: 395197 - RNA, 19 nt, Homo sapiens
  misc_RNA (1)...(19): siRNA sense strand
ucagggauucaaacaagaa

SEQ ID NO: 395198 - RNA, 19 nt, Homo sapiens
  misc_RNA (1)...(19): siRNA sense strand
gagaaaagugccucuacaa

SEQ ID NO: 395199 - RNA, 19 nt, Homo sapiens
  misc_RNA (1)...(19): siRNA sense strand
gaucucagucaacuucaag

SEQ ID NO: 395200 - RNA, 19 nt, Homo sapiens
  misc_RNA (1)...(19): siRNA sense strand
gcucucuccgcuauuacua

SEQ ID NO: 395201 - RNA, 19 nt, Homo sapiens
  misc_RNA (1)...(19): siRNA sense strand
ccagcagccaugaagguuu

SEQ ID NO: 395202 - RNA, 19 nt, Homo sapiens
  misc_RNA (1)...(19): siRNA sense strand
aaagugccucuacaacuau

SEQ ID NO: 395203 - RNA, 19 nt, Homo sapiens
  misc_RNA (1)...(19): siRNA sense strand
ggacaggucgaggcaugga

SEQ ID NO: 395204 - RNA, 19 nt, Homo sapiens
  misc_RNA (1)...(19): siRNA sense strand
gggauuacugcgucgauuc

SEQ ID NO: 395205 - RNA, 19 nt, Homo sapiens
  misc_RNA (1)...(19): siRNA sense strand
ccaguuaccaucggcaaau

SEQ ID NO: 395206 - RNA, 19 nt, Homo sapiens
  misc_RNA (1)...(19): siRNA sense strand
ugaacaguuugucccagau

SEQ ID NO: 395207 - RNA, 19 nt, Homo sapiens
  misc_RNA (1)...(19): siRNA sense strand
gauccccgauuauacuuug

SEQ ID NO: 395208 - RNA, 19 nt, Homo sapiens
  misc_RNA (1)...(19): siRNA sense strand
uuacugcgucgauucagaa

SEQ ID NO: 395209 - RNA, 19 nt, Homo sapiens
  misc_RNA (1)...(19): siRNA sense strand
agaucuggcucacgauucu

SEQ ID NO: 395210 - RNA, 19 nt, Homo sapiens
  misc_RNA (1)...(19): siRNA sense strand
gucgaggcauggaguucaa

SEQ ID NO: 395211 - RNA, 19 nt, Homo sapiens
  misc_RNA (1)...(19): siRNA sense strand
uggucacccuucuugauga

SEQ ID NO: 395212 - RNA, 19 nt, Homo sapiens
  misc_RNA (1)...(19): siRNA sense strand
uaccaugacccacucuaug

SEQ ID NO: 395213 - RNA, 19 nt, Homo sapiens
  misc_RNA (1)...(19): siRNA sense strand
accaugacccacucuauga

SEQ ID NO: 395214 - RNA, 19 nt, Homo sapiens
  misc_RNA (1)...(19): siRNA sense strand
ucaaacaggagccuaccau

SEQ ID NO: 395215 - RNA, 19 nt, Homo sapiens
  misc_RNA (1)...(19): siRNA sense strand
ccaugacccacucuaugaa

SEQ ID NO: 395216 - RNA, 19 nt, Homo sapiens
  misc_RNA (1)...(19): siRNA sense strand
ccaucagaauccccuauuu

SEQ ID NO: 395217 - RNA, 19 nt, Homo sapiens
  misc_RNA (1)...(19): siRNA sense strand
uccauggcuuucccggaua

SEQ ID NO: 395218 - RNA, 19 nt, Homo sapiens
  misc_RNA (1)...(19): siRNA sense strand
cgggauuacugcgucgauu

SEQ ID NO: 395219 - RNA, 19 nt, Homo sapiens
  misc_RNA (1)...(19): siRNA sense strand
caguuaccaucggcaaaug

SEQ ID NO: 395220 - RNA, 19 nt, Homo sapiens
  misc_RNA (1)...(19): siRNA sense strand
ggagauaaucgccccaguu

SEQ ID NO: 395221 - RNA, 19 nt, Homo sapiens
  misc_RNA (1)...(19): siRNA sense strand
caggugcgcugcuggauaa

SEQ ID NO: 395222 - RNA, 19 nt, Homo sapiens
  misc_RNA (1)...(19): siRNA sense strand
gggcaaaggucaagaucau

SEQ ID NO: 395223 - RNA, 19 nt, Homo sapiens
  misc_RNA (1)...(19): siRNA sense strand
agagagagcccuuggguaa

SEQ ID NO: 395224 - RNA, 19 nt, Homo sapiens
  misc_RNA (1)...(19): siRNA sense strand
uggagaaccugaaguuguu

SEQ ID NO: 395225 - RNA, 19 nt, Homo sapiens
  misc_RNA (1)...(19): siRNA sense strand
ucccaaaccucaguucuuu

SEQ ID NO: 395226 - RNA, 19 nt, Homo sapiens
  misc_RNA (1)...(19): siRNA sense strand
gcaaaggucaagaucauag

SEQ ID NO: 395227 - RNA, 19 nt, Homo sapiens
  misc_RNA (1)...(19): siRNA sense strand
ugacggagcugcaguucca

SEQ ID NO: 395228 - RNA, 19 nt, Homo sapiens
  misc_RNA (1)...(19): siRNA sense strand
gaaaucacauccguuccau

SEQ ID NO: 395229 - RNA, 19 nt, Homo sapiens
  misc_RNA (1)...(19): siRNA sense strand
caucguguuugcuaugauu

SEQ ID NO: 395230 - RNA, 19 nt, Homo sapiens
  misc_RNA (1)...(19): siRNA sense strand
ccucugcgcucuuucuuca

SEQ ID NO: 395231 - RNA, 19 nt, Homo sapiens
  misc_RNA (1)...(19): siRNA sense strand
ccaacucuuucgaaaauua

SEQ ID NO: 395232 - RNA, 19 nt, Homo sapiens
  misc_RNA (1)...(19): siRNA sense strand
gaaccagaaucagcucgau

SEQ ID NO: 395233 - RNA, 19 nt, Homo sapiens
  misc_RNA (1)...(19): siRNA sense strand
gccagucucuucacgaauc

SEQ ID NO: 395234 - RNA, 19 nt, Homo sapiens
  misc_RNA (1)...(19): siRNA sense strand
ccaccaaccucacgcacau

SEQ ID NO: 395235 - RNA, 19 nt, Homo sapiens
  misc_RNA (1)...(19): siRNA sense strand
ucacgaaucuggagaaccu

SEQ ID NO: 395236 - RNA, 19 nt, Homo sapiens
  misc_RNA (1)...(19): siRNA sense strand
aaccugaaguuguuggauu

SEQ ID NO: 395237 - RNA, 19 nt, Homo sapiens
  misc_RNA (1)...(19): siRNA sense strand
ugaaguuguuggauuuauc

SEQ ID NO: 395238 - RNA, 19 nt, Homo sapiens
  misc_RNA (1)...(19): siRNA sense strand
gaucaucguguuugcuaug

SEQ ID NO: 395239 - RNA, 19 nt, Homo sapiens
  misc_RNA (1)...(19): siRNA sense strand
ggccaacucuuucgaaaau

SEQ ID NO: 395240 - RNA, 19 nt, Homo sapiens
  misc_RNA (1)...(19): siRNA sense strand
uaaaauuggccaacucuuu

SEQ ID NO: 395241 - RNA, 19 nt, Homo sapiens
  misc_RNA (1)...(19): siRNA sense strand
gaucuccgacagccacauu

SEQ ID NO: 395242 - RNA, 19 nt, Homo sapiens
  misc_RNA (1)...(19): siRNA sense strand
gugcgcugcuggauaagau

SEQ ID NO: 395243 - RNA, 19 nt, Homo sapiens
  misc_RNA (1)...(19): siRNA sense strand
gugaucaucguguuugcua

SEQ ID NO: 395244 - RNA, 19 nt, Homo sapiens
  misc_RNA (1)...(19): siRNA sense strand
ucugcgcucuuucuucauu

SEQ ID NO: 395245 - RNA, 19 nt, Homo sapiens
  misc_RNA (1)...(19): siRNA sense strand
aggcuaagcucgagagacu

SEQ ID NO: 395246 - RNA, 19 nt, Homo sapiens
  misc_RNA (1)...(19): siRNA sense strand
ggauuuaucgggaaacaac

SEQ ID NO: 395247 - RNA, 19 nt, Homo sapiens
  misc_RNA (1)...(19): siRNA sense strand
gcaacaaaaucacgcaucu

SEQ ID NO: 395248 - RNA, 19 nt, Homo sapiens
  misc_RNA (1)...(19): siRNA sense strand
cgcacaaucugacucuguu

SEQ ID NO: 395249 - RNA, 19 nt, Homo sapiens
  misc_RNA (1)...(19): siRNA sense strand
ucacgcacauccugcucuu

SEQ ID NO: 395250 - RNA, 19 nt, Homo sapiens
  misc_RNA (1)...(19): siRNA sense strand
gcuaagcucgagagacuuc

SEQ ID NO: 395251 - RNA, 19 nt, Homo sapiens
  misc_RNA (1)...(19): siRNA sense strand
ggaccacaaugcgcuaagg

SEQ ID NO: 395252 - RNA, 19 nt, Homo sapiens
  misc_RNA (1)...(19): siRNA sense strand
gcguccagcucgaccacaa

SEQ ID NO: 395253 - RNA, 19 nt, Homo sapiens
  misc_RNA (1)...(19): siRNA sense strand
uaaggggcauugaccaaaa

SEQ ID NO: 395254 - RNA, 19 nt, Homo sapiens
  misc_RNA (1)...(19): siRNA sense strand
cguguuugcuaugauuaaa

SEQ ID NO: 395255 - RNA, 19 nt, Homo sapiens
  misc_RNA (1)...(19): siRNA sense strand
cgaaccgccuugugucucu

SEQ ID NO: 395256 - RNA, 19 nt, Homo sapiens
  misc_RNA (1)...(19): siRNA sense strand
gacuucugcuccacucgaa

SEQ ID NO: 395257 - RNA, 19 nt, Homo sapiens
  misc_RNA (1)...(19): siRNA sense strand
gaaguuguuggauuuaucg

SEQ ID NO: 395258 - RNA, 19 nt, Homo sapiens
  misc_RNA (1)...(19): siRNA sense strand
gaggcugucgcgcaacaaa

SEQ ID NO: 395259 - RNA, 19 nt, Homo sapiens
  misc_RNA (1)...(19): siRNA sense strand
ggcaaaggucaagaucaua

SEQ ID NO: 395260 - RNA, 19 nt, Homo sapiens
  misc_RNA (1)...(19): siRNA sense strand
uguugacucuguucgagaa

SEQ ID NO: 395261 - RNA, 19 nt, Homo sapiens
  misc_RNA (1)...(19): siRNA sense strand
gcacaaucugacucuguug

SEQ ID NO: 395262 - RNA, 19 nt, Homo sapiens
  misc_RNA (1)...(19): siRNA sense strand
ucaguucuuugacgcuuuc

SEQ ID NO: 395263 - RNA, 19 nt, Homo sapiens
  misc_RNA (1)...(19): siRNA sense strand
cugccagucucuucacgaa

SEQ ID NO: 395264 - RNA, 19 nt, Homo sapiens
  misc_RNA (1)...(19): siRNA sense strand
accugaaguuguuggauuu

SEQ ID NO: 395265 - RNA, 19 nt, Homo sapiens
  misc_RNA (1)...(19): siRNA sense strand
cgccuugugucucuggauu

SEQ ID NO: 395266 - RNA, 19 nt, Homo sapiens
  misc_RNA (1)...(19): siRNA sense strand
ugcaggagcuguggcugaa

SEQ ID NO: 395267 - RNA, 19 nt, Homo sapiens
  misc_RNA (1)...(19): siRNA sense strand
cgaaaucacauccguucca

SEQ ID NO: 395268 - RNA, 19 nt, Homo sapiens
  misc_RNA (1)...(19): siRNA sense strand
ugacucuguugacucuguu

SEQ ID NO: 395269 - RNA, 19 nt, Homo sapiens
  misc_RNA (1)...(19): siRNA sense strand
gcugacggagguccuguug

SEQ ID NO: 395270 - RNA, 19 nt, Homo sapiens
  misc_RNA (1)...(19): siRNA sense strand
cugcagagccagagcuuca

SEQ ID NO: 395271 - RNA, 19 nt, Homo sapiens
  misc_RNA (1)...(19): siRNA sense strand
gaaccugaaguuguuggau

SEQ ID NO: 395272 - RNA, 19 nt, Homo sapiens
  misc_RNA (1)...(19): siRNA sense strand
cugaaguuguuggauuuau

SEQ ID NO: 395273 - RNA, 19 nt, Homo sapiens
  misc_RNA (1)...(19): siRNA sense strand
cacaaucugacucuguuga

SEQ ID NO: 395274 - RNA, 19 nt, Homo sapiens
  misc_RNA (1)...(19): siRNA sense strand
caacucaucuucuucauca

SEQ ID NO: 395275 - RNA, 19 nt, Homo sapiens
  misc_RNA (1)...(19): siRNA sense strand
gggcuggccuccaugaaua

SEQ ID NO: 395276 - RNA, 19 nt, Homo sapiens
  misc_RNA (1)...(19): siRNA sense strand
ggaggagucuggacaagug

SEQ ID NO: 395277 - RNA, 19 nt, Homo sapiens
  misc_RNA (1)...(19): siRNA sense strand
uggaagagaucaauaccaa

SEQ ID NO: 395278 - RNA, 19 nt, Homo sapiens
  misc_RNA (1)...(19): siRNA sense strand
gaagagaucaauaccaaag

SEQ ID NO: 395279 - RNA, 19 nt, Homo sapiens
  misc_RNA (1)...(19): siRNA sense strand
gaacucuacaugcaauauu

SEQ ID NO: 395280 - RNA, 19 nt, Homo sapiens
  misc_RNA (1)...(19): siRNA sense strand
gucagcaacuucuucauga

SEQ ID NO: 395281 - RNA, 19 nt, Homo sapiens
  misc_RNA (1)...(19): siRNA sense strand
ggucagcaauggaaguaau

SEQ ID NO: 395282 - RNA, 19 nt, Homo sapiens
  misc_RNA (1)...(19): siRNA sense strand
caugcaauauucaaggaaa

SEQ ID NO: 395283 - RNA, 19 nt, Homo sapiens
  misc_RNA (1)...(19): siRNA sense strand
aaauaagcguccauccaaa

SEQ ID NO: 395284 - RNA, 19 nt, Homo sapiens
  misc_RNA (1)...(19): siRNA sense strand
ucaggcaacucaucuucuu

SEQ ID NO: 395285 - RNA, 19 nt, Homo sapiens
  misc_RNA (1)...(19): siRNA sense strand
gaaggaggagucuggacaa

SEQ ID NO: 395286 - RNA, 19 nt, Homo sapiens
  misc_RNA (1)...(19): siRNA sense strand
ccagguuggucuucacaga

SEQ ID NO: 395287 - RNA, 19 nt, Homo sapiens
  misc_RNA (1)...(19): siRNA sense strand
gagggcagcuccaauucag

SEQ ID NO: 395288 - RNA, 19 nt, Homo sapiens
  misc_RNA (1)...(19): siRNA sense strand
gacgagggcagcuccaauu

SEQ ID NO: 395289 - RNA, 19 nt, Homo sapiens
  misc_RNA (1)...(19): siRNA sense strand
uccaaagaauugcaaauca

SEQ ID NO: 395290 - RNA, 19 nt, Homo sapiens
  misc_RNA (1)...(19): siRNA sense strand
caagaacaugggaaggaua

SEQ ID NO: 395291 - RNA, 19 nt, Homo sapiens
  misc_RNA (1)...(19): siRNA sense strand
gguuggagcugagcacugu

SEQ ID NO: 395292 - RNA, 19 nt, Homo sapiens
  misc_RNA (1)...(19): siRNA sense strand
ggaagagaucaauaccaaa

SEQ ID NO: 395293 - RNA, 19 nt, Homo sapiens
  misc_RNA (1)...(19): siRNA sense strand
ccaaagaauugcaaaucac

SEQ ID NO: 395294 - RNA, 19 nt, Homo sapiens
  misc_RNA (1)...(19): siRNA sense strand
gcgcaggucagcaauggaa

SEQ ID NO: 395295 - RNA, 19 nt, Homo sapiens
  misc_RNA (1)...(19): siRNA sense strand
ccgcuuagcagcaugcaaa

SEQ ID NO: 395296 - RNA, 19 nt, Homo sapiens
  misc_RNA (1)...(19): siRNA sense strand
ucagcaacuucuucaugaa

SEQ ID NO: 395297 - RNA, 19 nt, Homo sapiens
  misc_RNA (1)...(19): siRNA sense strand
gaacaugggaaggauagag

SEQ ID NO: 395298 - RNA, 19 nt, Homo sapiens
  misc_RNA (1)...(19): siRNA sense strand
cagauggaagagaucaaua

SEQ ID NO: 395299 - RNA, 19 nt, Homo sapiens
  misc_RNA (1)...(19): siRNA sense strand
ggacgagggcagcuccaau

SEQ ID NO: 395300 - RNA, 19 nt, Homo sapiens
  misc_RNA (1)...(19): siRNA sense strand
aagcguccauccaaagaau

SEQ ID NO: 395301 - RNA, 19 nt, Homo sapiens
  misc_RNA (1)...(19): siRNA sense strand
gaccauggccugcgagacu

SEQ ID NO: 395302 - RNA, 19 nt, Homo sapiens
  misc_RNA (1)...(19): siRNA sense strand
acaagaacaugggaaggau

SEQ ID NO: 395303 - RNA, 19 nt, Homo sapiens
  misc_RNA (1)...(19): siRNA sense strand
cauguccgcgcuccgcuua

SEQ ID NO: 395304 - RNA, 19 nt, Homo sapiens
  misc_RNA (1)...(19): siRNA sense strand
acgcgcagcugaccaugga

SEQ ID NO: 395305 - RNA, 19 nt, Homo sapiens
  misc_RNA (1)...(19): siRNA sense strand
caaaaggaaagaacaagaa

SEQ ID NO: 395306 - RNA, 19 nt, Homo sapiens
  misc_RNA (1)...(19): siRNA sense strand
agagaucaauaccaaagag

SEQ ID NO: 395307 - RNA, 19 nt, Homo sapiens
  misc_RNA (1)...(19): siRNA sense strand
gcaacucaucuucuucauc

SEQ ID NO: 395308 - RNA, 19 nt, Homo sapiens
  misc_RNA (1)...(19): siRNA sense strand
gaaaauaagcguccaucca

SEQ ID NO: 395309 - RNA, 19 nt, Homo sapiens
  misc_RNA (1)...(19): siRNA sense strand
uacaugcaauauucaagga

SEQ ID NO: 395310 - RNA, 19 nt, Homo sapiens
  misc_RNA (1)...(19): siRNA sense strand
gcgucgaacucuacaugca

SEQ ID NO: 395311 - RNA, 19 nt, Homo sapiens
  misc_RNA (1)...(19): siRNA sense strand
gcaaaaggaaagaacaaga

SEQ ID NO: 395312 - RNA, 19 nt, Homo sapiens
  misc_RNA (1)...(19): siRNA sense strand
ccacagucucggacaaguu

SEQ ID NO: 395313 - RNA, 19 nt, Homo sapiens
  misc_RNA (1)...(19): siRNA sense strand
gucgaacucuacaugcaau

SEQ ID NO: 395314 - RNA, 19 nt, Homo sapiens
  misc_RNA (1)...(19): siRNA sense strand
cuccaugaauaaccucuau

SEQ ID NO: 395315 - RNA, 19 nt, Homo sapiens
  misc_RNA (1)...(19): siRNA sense strand
gcacugucagcaacuucuu

SEQ ID NO: 395316 - RNA, 19 nt, Homo sapiens
  misc_RNA (1)...(19): siRNA sense strand
aaaauaagcguccauccaa

SEQ ID NO: 395317 - RNA, 19 nt, Homo sapiens
  misc_RNA (1)...(19): siRNA sense strand
cagcgucgaacucuacaug

SEQ ID NO: 395318 - RNA, 19 nt, Homo sapiens
  misc_RNA (1)...(19): siRNA sense strand
cccaaacccuggagcaaac

SEQ ID NO: 395319 - RNA, 19 nt, Homo sapiens
  misc_RNA (1)...(19): siRNA sense strand
caggucagcaauggaagua

SEQ ID NO: 395320 - RNA, 19 nt, Homo sapiens
  misc_RNA (1)...(19): siRNA sense strand
ugucagcaacuucuucaug

SEQ ID NO: 395321 - RNA, 19 nt, Homo sapiens
  misc_RNA (1)...(19): siRNA sense strand
acagauguccagcgucgaa

SEQ ID NO: 395322 - RNA, 19 nt, Homo sapiens
  misc_RNA (1)...(19): siRNA sense strand
gaaggauagaggcaacaca

SEQ ID NO: 395323 - RNA, 19 nt, Homo sapiens
  misc_RNA (1)...(19): siRNA sense strand
gcgcuccgcuuagcagcau

SEQ ID NO: 395324 - RNA, 19 nt, Homo sapiens
  misc_RNA (1)...(19): siRNA sense strand
aaggaaagaacaagaacau

SEQ ID NO: 395325 - RNA, 19 nt, Homo sapiens
  misc_RNA (1)...(19): siRNA sense strand
ccaauucaggcaacucauc

SEQ ID NO: 395326 - RNA, 19 nt, Homo sapiens
  misc_RNA (1)...(19): siRNA sense strand
ccaugaauaaccucuauac

SEQ ID NO: 395327 - RNA, 19 nt, Homo sapiens
  misc_RNA (1)...(19): siRNA sense strand
gcaggucagcaauggaagu

SEQ ID NO: 395328 - RNA, 19 nt, Homo sapiens
  misc_RNA (1)...(19): siRNA sense strand
cgagggcagcuccaauuca

SEQ ID NO: 395329 - RNA, 19 nt, Homo sapiens
  misc_RNA (1)...(19): siRNA sense strand
ccucccaucuccacagucu

SEQ ID NO: 395330 - RNA, 19 nt, Homo sapiens
  misc_RNA (1)...(19): siRNA sense strand
gagguggcgcagcguauca

SEQ ID NO: 395331 - RNA, 19 nt, Homo sapiens
  misc_RNA (1)...(19): siRNA sense strand
gcguccauccaaagaauug

SEQ ID NO: 395332 - RNA, 19 nt, Homo sapiens
  misc_RNA (1)...(19): siRNA sense strand
uaagcguccauccaaagaa

SEQ ID NO: 395333 - RNA, 19 nt, Homo sapiens
  misc_RNA (1)...(19): siRNA sense strand
aacucuacaugcaauauuc

SEQ ID NO: 395334 - RNA, 19 nt, Homo sapiens
  misc_RNA (1)...(19): siRNA sense strand
gaagaugacuguaaagaua

SEQ ID NO: 395335 - RNA, 19 nt, Homo sapiens
  misc_RNA (1)...(19): siRNA sense strand
gcagaugugugcccaauua

SEQ ID NO: 395336 - RNA, 19 nt, Homo sapiens
  misc_RNA (1)...(19): siRNA sense strand
gagaaaggcuguggcauua

SEQ ID NO: 395337 - RNA, 19 nt, Homo sapiens
  misc_RNA (1)...(19): siRNA sense strand
ggucagaugucaagaauaa

SEQ ID NO: 395338 - RNA, 19 nt, Homo sapiens
  misc_RNA (1)...(19): siRNA sense strand
ggacugugcugauuaguaa

SEQ ID NO: 395339 - RNA, 19 nt, Homo sapiens
  misc_RNA (1)...(19): siRNA sense strand
gaacaugccuagcugauga

SEQ ID NO: 395340 - RNA, 19 nt, Homo sapiens
  misc_RNA (1)...(19): siRNA sense strand
gaacagugcuugugucaga

SEQ ID NO: 395341 - RNA, 19 nt, Homo sapiens
  misc_RNA (1)...(19): siRNA sense strand
caagauugcucacaaagua

SEQ ID NO: 395342 - RNA, 19 nt, Homo sapiens
  misc_RNA (1)...(19): siRNA sense strand
ggaaagaccugccggcaaa

SEQ ID NO: 395343 - RNA, 19 nt, Homo sapiens
  misc_RNA (1)...(19): siRNA sense strand
gaaaucaacugcacugaga

SEQ ID NO: 395344 - RNA, 19 nt, Homo sapiens
  misc_RNA (1)...(19): siRNA sense strand
gcacaguaguucaguauuu

SEQ ID NO: 395345 - RNA, 19 nt, Homo sapiens
  misc_RNA (1)...(19): siRNA sense strand
gauggaagcuaucggguua

SEQ ID NO: 395346 - RNA, 19 nt, Homo sapiens
  misc_RNA (1)...(19): siRNA sense strand
guagacaacugccaugaua

SEQ ID NO: 395347 - RNA, 19 nt, Homo sapiens
  misc_RNA (1)...(19): siRNA sense strand
ggaaagaacugucaugucu

SEQ ID NO: 395348 - RNA, 19 nt, Homo sapiens
  misc_RNA (1)...(19): siRNA sense strand
gaaauuggcugcgcuguug

SEQ ID NO: 395349 - RNA, 19 nt, Homo sapiens
  misc_RNA (1)...(19): siRNA sense strand
gaaaugugauggacagaaa

SEQ ID NO: 395350 - RNA, 19 nt, Homo sapiens
  misc_RNA (1)...(19): siRNA sense strand
gaaagcagaugguggagaa

SEQ ID NO: 395351 - RNA, 19 nt, Homo sapiens
  misc_RNA (1)...(19): siRNA sense strand
ggaguaagcuuauuugaag

SEQ ID NO: 395352 - RNA, 19 nt, Homo sapiens
  misc_RNA (1)...(19): siRNA sense strand
gagaagagauuguauugga

SEQ ID NO: 395353 - RNA, 19 nt, Homo sapiens
  misc_RNA (1)...(19): siRNA sense strand
cauaaacccuucugagaua

SEQ ID NO: 395354 - RNA, 19 nt, Homo sapiens
  misc_RNA (1)...(19): siRNA sense strand
gaaagaacaugugcugaaa

SEQ ID NO: 395355 - RNA, 19 nt, Homo sapiens
  misc_RNA (1)...(19): siRNA sense strand
gaacagauaaugaugguuu

SEQ ID NO: 395356 - RNA, 19 nt, Homo sapiens
  misc_RNA (1)...(19): siRNA sense strand
gggaacagcugcucagauu

SEQ ID NO: 395357 - RNA, 19 nt, Homo sapiens
  misc_RNA (1)...(19): siRNA sense strand
ggagaaguauggaaacaaa

SEQ ID NO: 395358 - RNA, 19 nt, Homo sapiens
  misc_RNA (1)...(19): siRNA sense strand
ggacuuguguugauauuga

SEQ ID NO: 395359 - RNA, 19 nt, Homo sapiens
  misc_RNA (1)...(19): siRNA sense strand
gugcauaccucgugaguuu

SEQ ID NO: 395360 - RNA, 19 nt, Homo sapiens
  misc_RNA (1)...(19): siRNA sense strand
caacaacccuugcuuggaa

SEQ ID NO: 395361 - RNA, 19 nt, Homo sapiens
  misc_RNA (1)...(19): siRNA sense strand
gcaaacaaguucacagaga

SEQ ID NO: 395362 - RNA, 19 nt, Homo sapiens
  misc_RNA (1)...(19): siRNA sense strand
uaaagaagacucugaagua

SEQ ID NO: 395363 - RNA, 19 nt, Homo sapiens
  misc_RNA (1)...(19): siRNA sense strand
gauaaucuccaccaaguua

SEQ ID NO: 395364 - RNA, 19 nt, Homo sapiens
  misc_RNA (1)...(19): siRNA sense strand
ggauuuaucugcuccugua

SEQ ID NO: 395365 - RNA, 19 nt, Homo sapiens
  misc_RNA (1)...(19): siRNA sense strand
gaacgggacugugagauga

SEQ ID NO: 395366 - RNA, 19 nt, Homo sapiens
  misc_RNA (1)...(19): siRNA sense strand
ggaagcagcccauaauauu

SEQ ID NO: 395367 - RNA, 19 nt, Homo sapiens
  misc_RNA (1)...(19): siRNA sense strand
gaagaagacugggccauau

SEQ ID NO: 395368 - RNA, 19 nt, Homo sapiens
  misc_RNA (1)...(19): siRNA sense strand
gcauugcuguucagaauuu

SEQ ID NO: 395369 - RNA, 19 nt, Homo sapiens
  misc_RNA (1)...(19): siRNA sense strand
gaacuggguugcaauaaag

SEQ ID NO: 395370 - RNA, 19 nt, Homo sapiens
  misc_RNA (1)...(19): siRNA sense strand
gacgaugcaucuccauuua

SEQ ID NO: 395371 - RNA, 19 nt, Homo sapiens
  misc_RNA (1)...(19): siRNA sense strand
caaaggaaguuaugagugu

SEQ ID NO: 395372 - RNA, 19 nt, Homo sapiens
  misc_RNA (1)...(19): siRNA sense strand
gaaaggcuguggcauuaau

SEQ ID NO: 395373 - RNA, 19 nt, Homo sapiens
  misc_RNA (1)...(19): siRNA sense strand
ggacuggguuaauaauaaa

SEQ ID NO: 395374 - RNA, 19 nt, Homo sapiens
  misc_RNA (1)...(19): siRNA sense strand
gggcagaucuuaacaugga

SEQ ID NO: 395375 - RNA, 19 nt, Homo sapiens
  misc_RNA (1)...(19): siRNA sense strand
gaggguagcucuccuuugu

SEQ ID NO: 395376 - RNA, 19 nt, Homo sapiens
  misc_RNA (1)...(19): siRNA sense strand
aacaaucgcugcauuuaua

SEQ ID NO: 395377 - RNA, 19 nt, Homo sapiens
  misc_RNA (1)...(19): siRNA sense strand
gacaaugacuguggagaua

SEQ ID NO: 395378 - RNA, 19 nt, Homo sapiens
  misc_RNA (1)...(19): siRNA sense strand
gcaaagugauggcaagaau

SEQ ID NO: 395379 - RNA, 19 nt, Homo sapiens
  misc_RNA (1)...(19): siRNA sense strand
gcaggauucuuccacuaua

SEQ ID NO: 395380 - RNA, 19 nt, Homo sapiens
  misc_RNA (1)...(19): siRNA sense strand
ugacggaucucaccucuug

SEQ ID NO: 395381 - RNA, 19 nt, Homo sapiens
  misc_RNA (1)...(19): siRNA sense strand
caacaagucugugauaauc

SEQ ID NO: 395382 - RNA, 19 nt, Homo sapiens
  misc_RNA (1)...(19): siRNA sense strand
caacaacaccuucugcuuu

SEQ ID NO: 395383 - RNA, 19 nt, Homo sapiens
  misc_RNA (1)...(19): siRNA sense strand
gaagugauggcuacguuua

SEQ ID NO: 395384 - RNA, 19 nt, Homo sapiens
  misc_RNA (1)...(19): siRNA sense strand
ugagguugguuguguauua

SEQ ID NO: 395385 - RNA, 19 nt, Homo sapiens
  misc_RNA (1)...(19): siRNA sense strand
guucagaauuuccucauuu

SEQ ID NO: 395386 - RNA, 19 nt, Homo sapiens
  misc_RNA (1)...(19): siRNA sense strand
ggacaacagugaugagcaa

SEQ ID NO: 395387 - RNA, 19 nt, Homo sapiens
  misc_RNA (1)...(19): siRNA sense strand
guuacaagcucaugucuga

SEQ ID NO: 395388 - RNA, 19 nt, Homo sapiens
  misc_RNA (1)...(19): siRNA sense strand
ggacaauggugaacgaugu

SEQ ID NO: 395389 - RNA, 19 nt, Homo sapiens
  misc_RNA (1)...(19): siRNA sense strand
cagcagaggucaacaacaa

SEQ ID NO: 395390 - RNA, 19 nt, Homo sapiens
  misc_RNA (1)...(19): siRNA sense strand
gagauaugcuugcacaaug

SEQ ID NO: 395391 - RNA, 19 nt, Homo sapiens
  misc_RNA (1)...(19): siRNA sense strand
gaucacaacugcacagaca

SEQ ID NO: 395392 - RNA, 19 nt, Homo sapiens
  misc_RNA (1)...(19): siRNA sense strand
gaaguucugcggaucaaua

SEQ ID NO: 395393 - RNA, 19 nt, Homo sapiens
  misc_RNA (1)...(19): siRNA sense strand
ucaaauggcuguagcaaca

SEQ ID NO: 395394 - RNA, 19 nt, Homo sapiens
  misc_RNA (1)...(19): siRNA sense strand
gaagaggagugauugaaag

SEQ ID NO: 395395 - RNA, 19 nt, Homo sapiens
  misc_RNA (1)...(19): siRNA sense strand
ggagcaguguggcuuauuu

SEQ ID NO: 395396 - RNA, 19 nt, Homo sapiens
  misc_RNA (1)...(19): siRNA sense strand
gaaugaggcuggcuuccaa

SEQ ID NO: 395397 - RNA, 19 nt, Homo sapiens
  misc_RNA (1)...(19): siRNA sense strand
cgaugcaucuccauuuaua

SEQ ID NO: 395398 - RNA, 19 nt, Homo sapiens
  misc_RNA (1)...(19): siRNA sense strand
gaauauaaguguggcaaug

SEQ ID NO: 395399 - RNA, 19 nt, Homo sapiens
  misc_RNA (1)...(19): siRNA sense strand
gauaauaacacuucagaug

SEQ ID NO: 395400 - RNA, 19 nt, Homo sapiens
  misc_RNA (1)...(19): siRNA sense strand
gacaguauuugcuucuaua

SEQ ID NO: 395401 - RNA, 19 nt, Homo sapiens
  misc_RNA (1)...(19): siRNA sense strand
gaaaagaacugcaauucga

SEQ ID NO: 395402 - RNA, 19 nt, Homo sapiens
  misc_RNA (1)...(19): siRNA sense strand
caaaguacaugcucaaguc

SEQ ID NO: 395403 - RNA, 19 nt, Homo sapiens
  misc_RNA (1)...(19): siRNA sense strand
uauccaagcuguugauuau

SEQ ID NO: 395404 - RNA, 19 nt, Homo sapiens
  misc_RNA (1)...(19): siRNA sense strand
gaacagcagucuggucaug

SEQ ID NO: 395405 - RNA, 19 nt, Homo sapiens
  misc_RNA (1)...(19): siRNA sense strand
caagagcaauuguguuaga

SEQ ID NO: 395406 - RNA, 19 nt, Homo sapiens
  misc_RNA (1)...(19): siRNA sense strand
uaagaccugugaagacaua

SEQ ID NO: 395407 - RNA, 19 nt, Homo sapiens
  misc_RNA (1)...(19): siRNA sense strand
gugagcagcuuacuuguga

SEQ ID NO: 395408 - RNA, 19 nt, Homo sapiens
  misc_RNA (1)...(19): siRNA sense strand
guaauaaacacuacucuug

SEQ ID NO: 395409 - RNA, 19 nt, Homo sapiens
  misc_RNA (1)...(19): siRNA sense strand
ggacauaggccucaguguu

SEQ ID NO: 395410 - RNA, 19 nt, Homo sapiens
  misc_RNA (1)...(19): siRNA sense strand
ggacagaagagugguauuu

SEQ ID NO: 395411 - RNA, 19 nt, Homo sapiens
  misc_RNA (1)...(19): siRNA sense strand
caucauauuuccacuguga

SEQ ID NO: 395412 - RNA, 19 nt, Homo sapiens
  misc_RNA (1)...(19): siRNA sense strand
caagaggacuagcauuaga

SEQ ID NO: 395413 - RNA, 19 nt, Homo sapiens
  misc_RNA (1)...(19): siRNA sense strand
gaagcagcccauaauauuu

SEQ ID NO: 395414 - RNA, 19 nt, Homo sapiens
  misc_RNA (1)...(19): siRNA sense strand
caacucagauacaauaagu

SEQ ID NO: 395415 - RNA, 19 nt, Homo sapiens
  misc_RNA (1)...(19): siRNA sense strand
gaaaugugauggcgaugau

SEQ ID NO: 395416 - RNA, 19 nt, Homo sapiens
  misc_RNA (1)...(19): siRNA sense strand
gaacugaaaugcgauggau

SEQ ID NO: 395417 - RNA, 19 nt, Homo sapiens
  misc_RNA (1)...(19): siRNA sense strand
gaacaugcuugcaacuauc

SEQ ID NO: 395418 - RNA, 19 nt, Homo sapiens
  misc_RNA (1)...(19): siRNA sense strand
gaacucaggugacaaaaug

SEQ ID NO: 395419 - RNA, 19 nt, Homo sapiens
  misc_RNA (1)...(19): siRNA sense strand
ggcaaugagugaagacuuu

SEQ ID NO: 395420 - RNA, 19 nt, Homo sapiens
  misc_RNA (1)...(19): siRNA sense strand
ggacguuauugaaaccaua

SEQ ID NO: 395421 - RNA, 19 nt, Homo sapiens
  misc_RNA (1)...(19): siRNA sense strand
gcugauggcuucacgucua

SEQ ID NO: 395422 - RNA, 19 nt, Homo sapiens
  misc_RNA (1)...(19): siRNA sense strand
ggacaacagcgaugagaaa

SEQ ID NO: 395423 - RNA, 19 nt, Homo sapiens
  misc_RNA (1)...(19): siRNA sense strand
gaucuucucugaugaacau

SEQ ID NO: 395424 - RNA, 19 nt, Homo sapiens
  misc_RNA (1)...(19): siRNA sense strand
ggacaguauuugcuucuau

SEQ ID NO: 395425 - RNA, 19 nt, Homo sapiens
  misc_RNA (1)...(19): siRNA sense strand
gaacagcugcucagauuuc

SEQ ID NO: 395426 - RNA, 19 nt, Homo sapiens
  misc_RNA (1)...(19): siRNA sense strand
ccaggaagaugucaugguu

SEQ ID NO: 395427 - RNA, 19 nt, Homo sapiens
  misc_RNA (1)...(19): siRNA sense strand
gaagugugauuggaaaguu

SEQ ID NO: 395428 - RNA, 19 nt, Homo sapiens
  misc_RNA (1)...(19): siRNA sense strand
uuaccgagcuaacaaauau

SEQ ID NO: 395429 - RNA, 19 nt, Homo sapiens
  misc_RNA (1)...(19): siRNA sense strand
gggcagagaccaaagauug

SEQ ID NO: 395430 - RNA, 19 nt, Homo sapiens
  misc_RNA (1)...(19): siRNA sense strand
cagaaagacugcucagaug

SEQ ID NO: 395431 - RNA, 19 nt, Homo sapiens
  misc_RNA (1)...(19): siRNA sense strand
caacugcacagacaccuua

SEQ ID NO: 395432 - RNA, 19 nt, Homo sapiens
  misc_RNA (1)...(19): siRNA sense strand
ccaccuagaugacuguuug

SEQ ID NO: 395433 - RNA, 19 nt, Homo sapiens
  misc_RNA (1)...(19): siRNA sense strand
caaagaauuuaccgagcua

SEQ ID NO: 395434 - RNA, 19 nt, Homo sapiens
  misc_RNA (1)...(19): siRNA sense strand
caaguacuccgucaugauc

SEQ ID NO: 395435 - RNA, 19 nt, Homo sapiens
  misc_RNA (1)...(19): siRNA sense strand
gcgccuuccucaagaaugc

SEQ ID NO: 395436 - RNA, 19 nt, Homo sapiens
  misc_RNA (1)...(19): siRNA sense strand
caagaaugccugggacaag

SEQ ID NO: 395437 - RNA, 19 nt, Homo sapiens
  misc_RNA (1)...(19): siRNA sense strand
ucaaguacuccgucaugau

SEQ ID NO: 395438 - RNA, 19 nt, Homo sapiens
  misc_RNA (1)...(19): siRNA sense strand
ucaagaaugccugggacaa

SEQ ID NO: 395439 - RNA, 19 nt, Homo sapiens
  misc_RNA (1)...(19): siRNA sense strand
aggccacgcccuacaacua

SEQ ID NO: 395440 - RNA, 19 nt, Homo sapiens
  misc_RNA (1)...(19): siRNA sense strand
gaacagguauuacuacuac

SEQ ID NO: 395441 - RNA, 19 nt, Homo sapiens
  misc_RNA (1)...(19): siRNA sense strand
ggaagugccuggccaaaca

SEQ ID NO: 395442 - RNA, 19 nt, Homo sapiens
  misc_RNA (1)...(19): siRNA sense strand
caaagucgaccaagaaauu

SEQ ID NO: 395443 - RNA, 19 nt, Homo sapiens
  misc_RNA (1)...(19): siRNA sense strand
caaagaacagguauuacua

SEQ ID NO: 395444 - RNA, 19 nt, Homo sapiens
  misc_RNA (1)...(19): siRNA sense strand
gcagaacuguaucaaggaa

SEQ ID NO: 395445 - RNA, 19 nt, Homo sapiens
  misc_RNA (1)...(19): siRNA sense strand
gagaaaagcugcaaaagag

SEQ ID NO: 395446 - RNA, 19 nt, Homo sapiens
  misc_RNA (1)...(19): siRNA sense strand
ucaaggaaguggagcaguu

SEQ ID NO: 395447 - RNA, 19 nt, Homo sapiens
  misc_RNA (1)...(19): siRNA sense strand
gcaaagaacagguauuacu

SEQ ID NO: 395448 - RNA, 19 nt, Homo sapiens
  misc_RNA (1)...(19): siRNA sense strand
cuacaaagucgaccaagaa

SEQ ID NO: 395449 - RNA, 19 nt, Homo sapiens
  misc_RNA (1)...(19): siRNA sense strand
ggaagagggacuacaaagu

SEQ ID NO: 395450 - RNA, 19 nt, Homo sapiens
  misc_RNA (1)...(19): siRNA sense strand
acgcaaagaacagguauua

SEQ ID NO: 395451 - RNA, 19 nt, Homo sapiens
  misc_RNA (1)...(19): siRNA sense strand
gcaaggaggaggacaucau

SEQ ID NO: 395452 - RNA, 19 nt, Homo sapiens
  misc_RNA (1)...(19): siRNA sense strand
aaagucgaccaagaaauua

SEQ ID NO: 395453 - RNA, 19 nt, Homo sapiens
  misc_RNA (1)...(19): siRNA sense strand
ggacagcugggacaaggau

SEQ ID NO: 395454 - RNA, 19 nt, Homo sapiens
  misc_RNA (1)...(19): siRNA sense strand
caaggaggaggacaucaug

SEQ ID NO: 395455 - RNA, 19 nt, Homo sapiens
  misc_RNA (1)...(19): siRNA sense strand
cagaggaugcugcaagaga

SEQ ID NO: 395456 - RNA, 19 nt, Homo sapiens
  misc_RNA (1)...(19): siRNA sense strand
gaacuaccagcagaacugu

SEQ ID NO: 395457 - RNA, 19 nt, Homo sapiens
  misc_RNA (1)...(19): siRNA sense strand
aagccgaaaugcaguggaa

SEQ ID NO: 395458 - RNA, 19 nt, Homo sapiens
  misc_RNA (1)...(19): siRNA sense strand
ugaaagcguucgaccucau

SEQ ID NO: 395459 - RNA, 19 nt, Homo sapiens
  misc_RNA (1)...(19): siRNA sense strand
ccaaacagaggcagaggau

SEQ ID NO: 395460 - RNA, 19 nt, Homo sapiens
  misc_RNA (1)...(19): siRNA sense strand
ccucgugagagaauuuaua

SEQ ID NO: 395461 - RNA, 19 nt, Homo sapiens
  misc_RNA (1)...(19): siRNA sense strand
gaccaagaaauuaucaaca

SEQ ID NO: 395462 - RNA, 19 nt, Homo sapiens
  misc_RNA (1)...(19): siRNA sense strand
gcacgcaaagaacagguau

SEQ ID NO: 395463 - RNA, 19 nt, Homo sapiens
  misc_RNA (1)...(19): siRNA sense strand
gaaagcguucgaccucauc

SEQ ID NO: 395464 - RNA, 19 nt, Homo sapiens
  misc_RNA (1)...(19): siRNA sense strand
acuacaaagucgaccaaga

SEQ ID NO: 395465 - RNA, 19 nt, Homo sapiens
  misc_RNA (1)...(19): siRNA sense strand
agaacuguaucaaggaagu

SEQ ID NO: 395466 - RNA, 19 nt, Homo sapiens
  misc_RNA (1)...(19): siRNA sense strand
gcagagggaaggacagaac

SEQ ID NO: 395467 - RNA, 19 nt, Homo sapiens
  misc_RNA (1)...(19): siRNA sense strand
gcugggacaaggaugugua

SEQ ID NO: 395468 - RNA, 19 nt, Homo sapiens
  misc_RNA (1)...(19): siRNA sense strand
gggaaggacagaacuacca

SEQ ID NO: 395469 - RNA, 19 nt, Homo sapiens
  misc_RNA (1)...(19): siRNA sense strand
cgugagagaauuuauagag

SEQ ID NO: 395470 - RNA, 19 nt, Homo sapiens
  misc_RNA (1)...(19): siRNA sense strand
gacagaacuaccagcagaa

SEQ ID NO: 395471 - RNA, 19 nt, Homo sapiens
  misc_RNA (1)...(19): siRNA sense strand
agaacagguauuacuacua

SEQ ID NO: 395472 - RNA, 19 nt, Homo sapiens
  misc_RNA (1)...(19): siRNA sense strand
uacaaagucgaccaagaaa

SEQ ID NO: 395473 - RNA, 19 nt, Homo sapiens
  misc_RNA (1)...(19): siRNA sense strand
gcauguaugaagccgaaau

SEQ ID NO: 395474 - RNA, 19 nt, Homo sapiens
  misc_RNA (1)...(19): siRNA sense strand
aagaacagguauuacuacu

SEQ ID NO: 395475 - RNA, 19 nt, Homo sapiens
  misc_RNA (1)...(19): siRNA sense strand
gaggaugcugcaagagaga

SEQ ID NO: 395476 - RNA, 19 nt, Homo sapiens
  misc_RNA (1)...(19): siRNA sense strand
uaugcaggaucggcucaaa

SEQ ID NO: 395477 - RNA, 19 nt, Homo sapiens
  misc_RNA (1)...(19): siRNA sense strand
ccgugacccucgugagaga

SEQ ID NO: 395478 - RNA, 19 nt, Homo sapiens
  misc_RNA (1)...(19): siRNA sense strand
gacccucgugagagaauuu

SEQ ID NO: 395479 - RNA, 19 nt, Homo sapiens
  misc_RNA (1)...(19): siRNA sense strand
aaagaacagguauuacuac

SEQ ID NO: 395480 - RNA, 19 nt, Homo sapiens
  misc_RNA (1)...(19): siRNA sense strand
gccgaaaugcaguggaaga

SEQ ID NO: 395481 - RNA, 19 nt, Homo sapiens
  misc_RNA (1)...(19): siRNA sense strand
caaggaaguggagcaguuc

SEQ ID NO: 395482 - RNA, 19 nt, Homo sapiens
  misc_RNA (1)...(19): siRNA sense strand
guggaagagggacuacaaa

SEQ ID NO: 395483 - RNA, 19 nt, Homo sapiens
  misc_RNA (1)...(19): siRNA sense strand
ggaugcugcaagagagaaa

SEQ ID NO: 395484 - RNA, 19 nt, Homo sapiens
  misc_RNA (1)...(19): siRNA sense strand
gaacucaaguccgaaauua

SEQ ID NO: 395485 - RNA, 19 nt, Homo sapiens
  misc_RNA (1)...(19): siRNA sense strand
gaaauuaacuccuugaaag

SEQ ID NO: 395486 - RNA, 19 nt, Homo sapiens
  misc_RNA (1)...(19): siRNA sense strand
gaaagcagcuggagaggau

SEQ ID NO: 395487 - RNA, 19 nt, Homo sapiens
  misc_RNA (1)...(19): siRNA sense strand
agaaagggcugacagauga

SEQ ID NO: 395488 - RNA, 19 nt, Homo sapiens
  misc_RNA (1)...(19): siRNA sense strand
gcagugaaguuucuacaga

SEQ ID NO: 395489 - RNA, 19 nt, Homo sapiens
  misc_RNA (1)...(19): siRNA sense strand
gcugacagaugaagagauu

SEQ ID NO: 395490 - RNA, 19 nt, Homo sapiens
  misc_RNA (1)...(19): siRNA sense strand
gcagaucccagucaaguca

SEQ ID NO: 395491 - RNA, 19 nt, Homo sapiens
  misc_RNA (1)...(19): siRNA sense strand
cgaaauuaacuccuugaaa

SEQ ID NO: 395492 - RNA, 19 nt, Homo sapiens
  misc_RNA (1)...(19): siRNA sense strand
gaagaaagggcugacagau

SEQ ID NO: 395493 - RNA, 19 nt, Homo sapiens
  misc_RNA (1)...(19): siRNA sense strand
uccaggagcugcugauuca

SEQ ID NO: 395494 - RNA, 19 nt, Homo sapiens
  misc_RNA (1)...(19): siRNA sense strand
gaauaucaacgaacucaag

SEQ ID NO: 395495 - RNA, 19 nt, Homo sapiens
  misc_RNA (1)...(19): siRNA sense strand
caccagcucuacaagaaau

SEQ ID NO: 395496 - RNA, 19 nt, Homo sapiens
  misc_RNA (1)...(19): siRNA sense strand
ccucauaucucagccauac

SEQ ID NO: 395497 - RNA, 19 nt, Homo sapiens
  misc_RNA (1)...(19): siRNA sense strand
ugaggaggaugaugaugug

SEQ ID NO: 395498 - RNA, 19 nt, Homo sapiens
  misc_RNA (1)...(19): siRNA sense strand
ccagacagugacucaguua

SEQ ID NO: 395499 - RNA, 19 nt, Homo sapiens
  misc_RNA (1)...(19): siRNA sense strand
ugacagaugaagagauuga

SEQ ID NO: 395500 - RNA, 19 nt, Homo sapiens
  misc_RNA (1)...(19): siRNA sense strand
ccacggcagugaaguuucu

SEQ ID NO: 395501 - RNA, 19 nt, Homo sapiens
  misc_RNA (1)...(19): siRNA sense strand
cagaugaagagauugauau

SEQ ID NO: 395502 - RNA, 19 nt, Homo sapiens
  misc_RNA (1)...(19): siRNA sense strand
ucaacgagcagguggagaa

SEQ ID NO: 395503 - RNA, 19 nt, Homo sapiens
  misc_RNA (1)...(19): siRNA sense strand
ccgaugagccuucguccuu

SEQ ID NO: 395504 - RNA, 19 nt, Homo sapiens
  misc_RNA (1)...(19): siRNA sense strand
cgaacucaaguccgaaauu

SEQ ID NO: 395505 - RNA, 19 nt, Homo sapiens
  misc_RNA (1)...(19): siRNA sense strand
gaaagggcugacagaugaa

SEQ ID NO: 395506 - RNA, 19 nt, Homo sapiens
  misc_RNA (1)...(19): siRNA sense strand
gggaugggcagaucaacga

SEQ ID NO: 395507 - RNA, 19 nt, Homo sapiens
  misc_RNA (1)...(19): siRNA sense strand
gauggaggccggucucucu

SEQ ID NO: 395508 - RNA, 19 nt, Homo sapiens
  misc_RNA (1)...(19): siRNA sense strand
cgccagagcccacuugcaa

SEQ ID NO: 395509 - RNA, 19 nt, Homo sapiens
  misc_RNA (1)...(19): siRNA sense strand
acagaugaagagauugaua

SEQ ID NO: 395510 - RNA, 19 nt, Homo sapiens
  misc_RNA (1)...(19): siRNA sense strand
aagaaagggcugacagaug

SEQ ID NO: 395511 - RNA, 19 nt, Homo sapiens
  misc_RNA (1)...(19): siRNA sense strand
gacagugacucaguuacag

SEQ ID NO: 395512 - RNA, 19 nt, Homo sapiens
  misc_RNA (1)...(19): siRNA sense strand
gcauugcauuuggcuuuca

SEQ ID NO: 395513 - RNA, 19 nt, Homo sapiens
  misc_RNA (1)...(19): siRNA sense strand
cauggcaggcauugcauuu

SEQ ID NO: 395514 - RNA, 19 nt, Homo sapiens
  misc_RNA (1)...(19): siRNA sense strand
uucaccagcucuacaagaa

SEQ ID NO: 395515 - RNA, 19 nt, Homo sapiens
  misc_RNA (1)...(19): siRNA sense strand
caucauggcaggcauugca

SEQ ID NO: 395516 - RNA, 19 nt, Homo sapiens
  misc_RNA (1)...(19): siRNA sense strand
gcuccacggucaccuacca

SEQ ID NO: 395517 - RNA, 19 nt, Homo sapiens
  misc_RNA (1)...(19): siRNA sense strand
cagcagcagcgacaucuca

SEQ ID NO: 395518 - RNA, 19 nt, Homo sapiens
  misc_RNA (1)...(19): siRNA sense strand
cagaauaucaacgaacuca

SEQ ID NO: 395519 - RNA, 19 nt, Homo sapiens
  misc_RNA (1)...(19): siRNA sense strand
agaagaaagggcugacaga

SEQ ID NO: 395520 - RNA, 19 nt, Homo sapiens
  misc_RNA (1)...(19): siRNA sense strand
cgaggaggaugaggaggau

SEQ ID NO: 395521 - RNA, 19 nt, Homo sapiens
  misc_RNA (1)...(19): siRNA sense strand
uggcaggcauugcauuugg

SEQ ID NO: 395522 - RNA, 19 nt, Homo sapiens
  misc_RNA (1)...(19): siRNA sense strand
gcucuacuccaggaaguga

SEQ ID NO: 395523 - RNA, 19 nt, Homo sapiens
  misc_RNA (1)...(19): siRNA sense strand
cccagacagugacucaguu

SEQ ID NO: 395524 - RNA, 19 nt, Homo sapiens
  misc_RNA (1)...(19): siRNA sense strand
ugauucagcagcagcagaa

SEQ ID NO: 395525 - RNA, 19 nt, Homo sapiens
  misc_RNA (1)...(19): siRNA sense strand
ggaugaggaggaugaugau

SEQ ID NO: 395526 - RNA, 19 nt, Homo sapiens
  misc_RNA (1)...(19): siRNA sense strand
aggaugaggaggaugauga

SEQ ID NO: 395527 - RNA, 19 nt, Homo sapiens
  misc_RNA (1)...(19): siRNA sense strand
aguccgaaauuaacuccuu

SEQ ID NO: 395528 - RNA, 19 nt, Homo sapiens
  misc_RNA (1)...(19): siRNA sense strand
aggcauugcauuuggcuuu

SEQ ID NO: 395529 - RNA, 19 nt, Homo sapiens
  misc_RNA (1)...(19): siRNA sense strand
agacagugacucaguuaca

SEQ ID NO: 395530 - RNA, 19 nt, Homo sapiens
  misc_RNA (1)...(19): siRNA sense strand
gaugaagagauugauaugg

SEQ ID NO: 395531 - RNA, 19 nt, Homo sapiens
  misc_RNA (1)...(19): siRNA sense strand
agaagagggaggacaagga

SEQ ID NO: 395532 - RNA, 19 nt, Homo sapiens
  misc_RNA (1)...(19): siRNA sense strand
cccagaauaucaacgaacu

SEQ ID NO: 395533 - RNA, 19 nt, Homo sapiens
  misc_RNA (1)...(19): siRNA sense strand
ggcauugcauuuggcuuuc

SEQ ID NO: 395534 - RNA, 19 nt, Homo sapiens
  misc_RNA (1)...(19): siRNA sense strand
ucaccagcucuacaagaaa

SEQ ID NO: 395535 - RNA, 19 nt, Homo sapiens
  misc_RNA (1)...(19): siRNA sense strand
cacggucaccuaccacuug

SEQ ID NO: 395536 - RNA, 19 nt, Homo sapiens
  misc_RNA (1)...(19): siRNA sense strand
gcaaggcgaggaggagaag

SEQ ID NO: 395537 - RNA, 19 nt, Homo sapiens
  misc_RNA (1)...(19): siRNA sense strand
ggacagaucgggcacaauu

SEQ ID NO: 395538 - RNA, 19 nt, Homo sapiens
  misc_RNA (1)...(19): siRNA sense strand
gagacaaggucaaggagaa

SEQ ID NO: 395539 - RNA, 19 nt, Homo sapiens
  misc_RNA (1)...(19): siRNA sense strand
ggacauauccggacagauc

SEQ ID NO: 395540 - RNA, 19 nt, Homo sapiens
  misc_RNA (1)...(19): siRNA sense strand
gcgcagaauuucaccauca

SEQ ID NO: 395541 - RNA, 19 nt, Homo sapiens
  misc_RNA (1)...(19): siRNA sense strand
gcacgcagauucccuacuc

SEQ ID NO: 395542 - RNA, 19 nt, Homo sapiens
  misc_RNA (1)...(19): siRNA sense strand
ggagaaagacuuggaacuu

SEQ ID NO: 395543 - RNA, 19 nt, Homo sapiens
  misc_RNA (1)...(19): siRNA sense strand
gggagucgcugcugaacga

SEQ ID NO: 395544 - RNA, 19 nt, Homo sapiens
  misc_RNA (1)...(19): siRNA sense strand
ggaagcgccuggaguccuu

SEQ ID NO: 395545 - RNA, 19 nt, Homo sapiens
  misc_RNA (1)...(19): siRNA sense strand
ggagagcccugcgcagaau

SEQ ID NO: 395546 - RNA, 19 nt, Homo sapiens
  misc_RNA (1)...(19): siRNA sense strand
gagaccggauccugaaugu

SEQ ID NO: 395547 - RNA, 19 nt, Homo sapiens
  misc_RNA (1)...(19): siRNA sense strand
caacuaugaugaggagaug

SEQ ID NO: 395548 - RNA, 19 nt, Homo sapiens
  misc_RNA (1)...(19): siRNA sense strand
gaggacauauccggacaga

SEQ ID NO: 395549 - RNA, 19 nt, Homo sapiens
  misc_RNA (1)...(19): siRNA sense strand
ccacaucgcguccuucaca

SEQ ID NO: 395550 - RNA, 19 nt, Homo sapiens
  misc_RNA (1)...(19): siRNA sense strand
gacagaucgggcacaauua

SEQ ID NO: 395551 - RNA, 19 nt, Homo sapiens
  misc_RNA (1)...(19): siRNA sense strand
gggcauaguguccuucuuc

SEQ ID NO: 395552 - RNA, 19 nt, Homo sapiens
  misc_RNA (1)...(19): siRNA sense strand
ggaauugacaacccugugu

SEQ ID NO: 395553 - RNA, 19 nt, Homo sapiens
  misc_RNA (1)...(19): siRNA sense strand
gaaacaggaccgggaaauc

SEQ ID NO: 395554 - RNA, 19 nt, Homo sapiens
  misc_RNA (1)...(19): siRNA sense strand
gcaccaccaucaucguagu

SEQ ID NO: 395555 - RNA, 19 nt, Homo sapiens
  misc_RNA (1)...(19): siRNA sense strand
ucaacgagguccuguucau

SEQ ID NO: 395556 - RNA, 19 nt, Homo sapiens
  misc_RNA (1)...(19): siRNA sense strand
caauguguuugaaucuuuc

SEQ ID NO: 395557 - RNA, 19 nt, Homo sapiens
  misc_RNA (1)...(19): siRNA sense strand
gaauugacaacccuguguu

SEQ ID NO: 395558 - RNA, 19 nt, Homo sapiens
  misc_RNA (1)...(19): siRNA sense strand
ccacggaggacgagaaaca

SEQ ID NO: 395559 - RNA, 19 nt, Homo sapiens
  misc_RNA (1)...(19): siRNA sense strand
ucaccaagcaugugcguau

SEQ ID NO: 395560 - RNA, 19 nt, Homo sapiens
  misc_RNA (1)...(19): siRNA sense strand
gaccggauccugaaugucu

SEQ ID NO: 395561 - RNA, 19 nt, Homo sapiens
  misc_RNA (1)...(19): siRNA sense strand
ucaccgugguucuguacaa

SEQ ID NO: 395562 - RNA, 19 nt, Homo sapiens
  misc_RNA (1)...(19): siRNA sense strand
ucaaggagaagaaccuguu

SEQ ID NO: 395563 - RNA, 19 nt, Homo sapiens
  misc_RNA (1)...(19): siRNA sense strand
agauugggcugcuggacuu

SEQ ID NO: 395564 - RNA, 19 nt, Homo sapiens
  misc_RNA (1)...(19): siRNA sense strand
gagaccaucaucuucaugu

SEQ ID NO: 395565 - RNA, 19 nt, Homo sapiens
  misc_RNA (1)...(19): siRNA sense strand
gcccagaagcggagaaaca

SEQ ID NO: 395566 - RNA, 19 nt, Homo sapiens
  misc_RNA (1)...(19): siRNA sense strand
guucuucaccgucaucuuc

SEQ ID NO: 395567 - RNA, 19 nt, Homo sapiens
  misc_RNA (1)...(19): siRNA sense strand
cagcaccaccaucaucgua

SEQ ID NO: 395568 - RNA, 19 nt, Homo sapiens
  misc_RNA (1)...(19): siRNA sense strand
gaccaucaucuucauguuc

SEQ ID NO: 395569 - RNA, 19 nt, Homo sapiens
  misc_RNA (1)...(19): siRNA sense strand
uguacaauguguuugaauc

SEQ ID NO: 395570 - RNA, 19 nt, Homo sapiens
  misc_RNA (1)...(19): siRNA sense strand
gggcucaaccagaacaaga

SEQ ID NO: 395571 - RNA, 19 nt, Homo sapiens
  misc_RNA (1)...(19): siRNA sense strand
guacaauguguuugaaucu

SEQ ID NO: 395572 - RNA, 19 nt, Homo sapiens
  misc_RNA (1)...(19): siRNA sense strand
uccacgagcugaaccugaa

SEQ ID NO: 395573 - RNA, 19 nt, Homo sapiens
  misc_RNA (1)...(19): siRNA sense strand
ugcaguggcugaaggugaa

SEQ ID NO: 395574 - RNA, 19 nt, Homo sapiens
  misc_RNA (1)...(19): siRNA sense strand
aaacaggaccgggaaaucu

SEQ ID NO: 395575 - RNA, 19 nt, Homo sapiens
  misc_RNA (1)...(19): siRNA sense strand
gcaggaucccuacgucauc

SEQ ID NO: 395576 - RNA, 19 nt, Homo sapiens
  misc_RNA (1)...(19): siRNA sense strand
gagaaacaggaccgggaaa

SEQ ID NO: 395577 - RNA, 19 nt, Homo sapiens
  misc_RNA (1)...(19): siRNA sense strand
cagcaggguccucaugaga

SEQ ID NO: 395578 - RNA, 19 nt, Homo sapiens
  misc_RNA (1)...(19): siRNA sense strand
acagaucgggcacaauuau

SEQ ID NO: 395579 - RNA, 19 nt, Homo sapiens
  misc_RNA (1)...(19): siRNA sense strand
gcgccgagaccaucaucuu

SEQ ID NO: 395580 - RNA, 19 nt, Homo sapiens
  misc_RNA (1)...(19): siRNA sense strand
uggcuagugucaccaagga

SEQ ID NO: 395581 - RNA, 19 nt, Homo sapiens
  misc_RNA (1)...(19): siRNA sense strand
gaccacaucgcguccuuca

SEQ ID NO: 395582 - RNA, 19 nt, Homo sapiens
  misc_RNA (1)...(19): siRNA sense strand
ggucccacuucgacaggaa

SEQ ID NO: 395583 - RNA, 19 nt, Homo sapiens
  misc_RNA (1)...(19): siRNA sense strand
ccaccgucuucuucuucua

SEQ ID NO: 395584 - RNA, 19 nt, Homo sapiens
  misc_RNA (1)...(19): siRNA sense strand
gcuggacuuccuccuguuu

SEQ ID NO: 395585 - RNA, 19 nt, Homo sapiens
  misc_RNA (1)...(19): siRNA sense strand
cgacuccccugcaggaauu

SEQ ID NO: 395586 - RNA, 19 nt, Homo sapiens
  misc_RNA (1)...(19): siRNA sense strand
ccaccaucaucguaguguu

SEQ ID NO: 395587 - RNA, 19 nt, Homo sapiens
  misc_RNA (1)...(19): siRNA sense strand
agaccaucaucuucauguu

SEQ ID NO: 395588 - RNA, 19 nt, Homo sapiens
  misc_RNA (1)...(19): siRNA sense strand
ggacugcgugaagggcaua

SEQ ID NO: 395589 - RNA, 19 nt, Homo sapiens
  misc_RNA (1)...(19): siRNA sense strand
cgcagaauuucaccaucaa

SEQ ID NO: 395590 - RNA, 19 nt, Homo sapiens
  misc_RNA (1)...(19): siRNA sense strand
gccgagaccaucaucuuca

SEQ ID NO: 395591 - RNA, 19 nt, Homo sapiens
  misc_RNA (1)...(19): siRNA sense strand
gguuccaccugucccacaa

SEQ ID NO: 395592 - RNA, 19 nt, Homo sapiens
  misc_RNA (1)...(19): siRNA sense strand
ucgaguuccuggcuagugu

SEQ ID NO: 395593 - RNA, 19 nt, Homo sapiens
  misc_RNA (1)...(19): siRNA sense strand
gcaccgacaacguggucaa

SEQ ID NO: 395594 - RNA, 19 nt, Homo sapiens
  misc_RNA (1)...(19): siRNA sense strand
ccaagcaugugcguaucau

SEQ ID NO: 395595 - RNA, 19 nt, Homo sapiens
  misc_RNA (1)...(19): siRNA sense strand
gugguucuguacaaugugu

SEQ ID NO: 395596 - RNA, 19 nt, Homo sapiens
  misc_RNA (1)...(19): siRNA sense strand
gcagucaccgugguucugu

SEQ ID NO: 395597 - RNA, 19 nt, Homo sapiens
  misc_RNA (1)...(19): siRNA sense strand
gcccaaccgccucuucuuc

SEQ ID NO: 395598 - RNA, 19 nt, Homo sapiens
  misc_RNA (1)...(19): siRNA sense strand
accacacgcuacagcagua

SEQ ID NO: 395599 - RNA, 19 nt, Homo sapiens
  misc_RNA (1)...(19): siRNA sense strand
gcugucagaaguaugugaa

SEQ ID NO: 395600 - RNA, 19 nt, Homo sapiens
  misc_RNA (1)...(19): siRNA sense strand
ccgugguucuguacaaugu

SEQ ID NO: 395601 - RNA, 19 nt, Homo sapiens
  misc_RNA (1)...(19): siRNA sense strand
gcuucuggauggagacaag

SEQ ID NO: 395602 - RNA, 19 nt, Homo sapiens
  misc_RNA (1)...(19): siRNA sense strand
ccaacuaugaugaggagau

SEQ ID NO: 395603 - RNA, 19 nt, Homo sapiens
  misc_RNA (1)...(19): siRNA sense strand
gcccacggaggacgagaaa

SEQ ID NO: 395604 - RNA, 19 nt, Homo sapiens
  misc_RNA (1)...(19): siRNA sense strand
cgagaccggauccugaaug

SEQ ID NO: 395605 - RNA, 19 nt, Homo sapiens
  misc_RNA (1)...(19): siRNA sense strand
caacgagguccuguucauc

SEQ ID NO: 395606 - RNA, 19 nt, Homo sapiens
  misc_RNA (1)...(19): siRNA sense strand
cgggcacaauuaucucaga

SEQ ID NO: 395607 - RNA, 19 nt, Homo sapiens
  misc_RNA (1)...(19): siRNA sense strand
ccgagaccaucaucuucau

SEQ ID NO: 395608 - RNA, 19 nt, Homo sapiens
  misc_RNA (1)...(19): siRNA sense strand
gggaaccucggcucaacga

SEQ ID NO: 395609 - RNA, 19 nt, Homo sapiens
  misc_RNA (1)...(19): siRNA sense strand
caaaguucguuccaaguua

SEQ ID NO: 395610 - RNA, 19 nt, Homo sapiens
  misc_RNA (1)...(19): siRNA sense strand
ggacagcgaugaugaugau

SEQ ID NO: 395611 - RNA, 19 nt, Homo sapiens
  misc_RNA (1)...(19): siRNA sense strand
gaagacagcaaacaaaguu

SEQ ID NO: 395612 - RNA, 19 nt, Homo sapiens
  misc_RNA (1)...(19): siRNA sense strand
ccaagaaggccgucaagua

SEQ ID NO: 395613 - RNA, 19 nt, Homo sapiens
  misc_RNA (1)...(19): siRNA sense strand
gaacagcauccgugagcua

SEQ ID NO: 395614 - RNA, 19 nt, Homo sapiens
  misc_RNA (1)...(19): siRNA sense strand
aaaguucguuccaaguuaa

SEQ ID NO: 395615 - RNA, 19 nt, Homo sapiens
  misc_RNA (1)...(19): siRNA sense strand
uaaagaagacagcaaacaa

SEQ ID NO: 395616 - RNA, 19 nt, Homo sapiens
  misc_RNA (1)...(19): siRNA sense strand
ggaacacgcgguagacuau

SEQ ID NO: 395617 - RNA, 19 nt, Homo sapiens
  misc_RNA (1)...(19): siRNA sense strand
ggaccgagaccgcuucaug

SEQ ID NO: 395618 - RNA, 19 nt, Homo sapiens
  misc_RNA (1)...(19): siRNA sense strand
caagaaggccgucaaguac

SEQ ID NO: 395619 - RNA, 19 nt, Homo sapiens
  misc_RNA (1)...(19): siRNA sense strand
gagagaugauugacaggau

SEQ ID NO: 395620 - RNA, 19 nt, Homo sapiens
  misc_RNA (1)...(19): siRNA sense strand
gagauucgaggcuucauug

SEQ ID NO: 395621 - RNA, 19 nt, Homo sapiens
  misc_RNA (1)...(19): siRNA sense strand
caaacaaaguucguuccaa

SEQ ID NO: 395622 - RNA, 19 nt, Homo sapiens
  misc_RNA (1)...(19): siRNA sense strand
aaagaagacagcaaacaaa

SEQ ID NO: 395623 - RNA, 19 nt, Homo sapiens
  misc_RNA (1)...(19): siRNA sense strand
gugaggagcuggaggacau

SEQ ID NO: 395624 - RNA, 19 nt, Homo sapiens
  misc_RNA (1)...(19): siRNA sense strand
gaaaguuuguggaggucau

SEQ ID NO: 395625 - RNA, 19 nt, Homo sapiens
  misc_RNA (1)...(19): siRNA sense strand
ccaaggacagcgaugauga

SEQ ID NO: 395626 - RNA, 19 nt, Homo sapiens
  misc_RNA (1)...(19): siRNA sense strand
gaaggaggagcuggaagaa

SEQ ID NO: 395627 - RNA, 19 nt, Homo sapiens
  misc_RNA (1)...(19): siRNA sense strand
gcaggaccacgaccaguga

SEQ ID NO: 395628 - RNA, 19 nt, Homo sapiens
  misc_RNA (1)...(19): siRNA sense strand
cgaaggaggagcuggaaga

SEQ ID NO: 395629 - RNA, 19 nt, Homo sapiens
  misc_RNA (1)...(19): siRNA sense strand
ggaagaaaaucaugaucau

SEQ ID NO: 395630 - RNA, 19 nt, Homo sapiens
  misc_RNA (1)...(19): siRNA sense strand
acuccacgcuguccagaaa

SEQ ID NO: 395631 - RNA, 19 nt, Homo sapiens
  misc_RNA (1)...(19): siRNA sense strand
ccucugggaucaucaugga

SEQ ID NO: 395632 - RNA, 19 nt, Homo sapiens
  misc_RNA (1)...(19): siRNA sense strand
acagugagaucaucaagcu

SEQ ID NO: 395633 - RNA, 19 nt, Homo sapiens
  misc_RNA (1)...(19): siRNA sense strand
ggagauucgaggcuucauu

SEQ ID NO: 395634 - RNA, 19 nt, Homo sapiens
  misc_RNA (1)...(19): siRNA sense strand
gaccugaggauccggaaga

SEQ ID NO: 395635 - RNA, 19 nt, Homo sapiens
  misc_RNA (1)...(19): siRNA sense strand
gaucgaguacaauguggaa

SEQ ID NO: 395636 - RNA, 19 nt, Homo sapiens
  misc_RNA (1)...(19): siRNA sense strand
gcgaugaugaugaugaugu

SEQ ID NO: 395637 - RNA, 19 nt, Homo sapiens
  misc_RNA (1)...(19): siRNA sense strand
gacaggaucgaguacaaug

SEQ ID NO: 395638 - RNA, 19 nt, Homo sapiens
  misc_RNA (1)...(19): siRNA sense strand
cagcgaugaugaugaugau

SEQ ID NO: 395639 - RNA, 19 nt, Homo sapiens
  misc_RNA (1)...(19): siRNA sense strand
ggagagccagggagagaug

SEQ ID NO: 395640 - RNA, 19 nt, Homo sapiens
  misc_RNA (1)...(19): siRNA sense strand
acaaaguucguuccaaguu

SEQ ID NO: 395641 - RNA, 19 nt, Homo sapiens
  misc_RNA (1)...(19): siRNA sense strand
acauaaagaagacagcaaa

SEQ ID NO: 395642 - RNA, 19 nt, Homo sapiens
  misc_RNA (1)...(19): siRNA sense strand
gucaucgccuccacuguug

SEQ ID NO: 395643 - RNA, 19 nt, Homo sapiens
  misc_RNA (1)...(19): siRNA sense strand
cgucaucgccuccacuguu

SEQ ID NO: 395644 - RNA, 19 nt, Homo sapiens
  misc_RNA (1)...(19): siRNA sense strand
ucaucaagcuggagaacag

SEQ ID NO: 395645 - RNA, 19 nt, Homo sapiens
  misc_RNA (1)...(19): siRNA sense strand
uugacaagaucgcagagaa

SEQ ID NO: 395646 - RNA, 19 nt, Homo sapiens
  misc_RNA (1)...(19): siRNA sense strand
gcaaacaaaguucguucca

SEQ ID NO: 395647 - RNA, 19 nt, Homo sapiens
  misc_RNA (1)...(19): siRNA sense strand
aggaggagcuggaagaacu

SEQ ID NO: 395648 - RNA, 19 nt, Homo sapiens
  misc_RNA (1)...(19): siRNA sense strand
ggagcuggaagaacucaug

SEQ ID NO: 395649 - RNA, 19 nt, Homo sapiens
  misc_RNA (1)...(19): siRNA sense strand
gaggcuucauugacaagau

SEQ ID NO: 395650 - RNA, 19 nt, Homo sapiens
  misc_RNA (1)...(19): siRNA sense strand
gcaagaggaaggccugaac

SEQ ID NO: 395651 - RNA, 19 nt, Homo sapiens
  misc_RNA (1)...(19): siRNA sense strand
auucgaggcuucauugaca

SEQ ID NO: 395652 - RNA, 19 nt, Homo sapiens
  misc_RNA (1)...(19): siRNA sense strand
gcacagugagaucaucaag

SEQ ID NO: 395653 - RNA, 19 nt, Homo sapiens
  misc_RNA (1)...(19): siRNA sense strand
ugauugacaggaucgagua

SEQ ID NO: 395654 - RNA, 19 nt, Homo sapiens
  misc_RNA (1)...(19): siRNA sense strand
uggaggucaugucggagua

SEQ ID NO: 395655 - RNA, 19 nt, Homo sapiens
  misc_RNA (1)...(19): siRNA sense strand
gagcuacacgacauguuca

SEQ ID NO: 395656 - RNA, 19 nt, Homo sapiens
  misc_RNA (1)...(19): siRNA sense strand
caaggacagcgaugaugau

SEQ ID NO: 395657 - RNA, 19 nt, Homo sapiens
  misc_RNA (1)...(19): siRNA sense strand
aucaucaucugcuguguga

SEQ ID NO: 395658 - RNA, 19 nt, Homo sapiens
  misc_RNA (1)...(19): siRNA sense strand
gaacacgcgguagacuaug

SEQ ID NO: 395659 - RNA, 19 nt, Homo sapiens
  misc_RNA (1)...(19): siRNA sense strand
agaaggccgucaaguacca

SEQ ID NO: 395660 - RNA, 19 nt, Homo sapiens
  misc_RNA (1)...(19): siRNA sense strand
cgaugaugaugaugauguc

SEQ ID NO: 395661 - RNA, 19 nt, Homo sapiens
  misc_RNA (1)...(19): siRNA sense strand
gacauaaagaagacagcaa

SEQ ID NO: 395662 - RNA, 19 nt, Homo sapiens
  misc_RNA (1)...(19): siRNA sense strand
gagacgcggcacagugaga

SEQ ID NO: 395663 - RNA, 19 nt, Homo sapiens
  misc_RNA (1)...(19): siRNA sense strand
ugagcuacacgacauguuc

SEQ ID NO: 395664 - RNA, 19 nt, Homo sapiens
  misc_RNA (1)...(19): siRNA sense strand
uugacaggaucgaguacaa

SEQ ID NO: 395665 - RNA, 19 nt, Homo sapiens
  misc_RNA (1)...(19): siRNA sense strand
guuccaaguuaaagagcau

SEQ ID NO: 395666 - RNA, 19 nt, Homo sapiens
  misc_RNA (1)...(19): siRNA sense strand
uggaacacgcgguagacua

SEQ ID NO: 395667 - RNA, 19 nt, Homo sapiens
  misc_RNA (1)...(19): siRNA sense strand
caggaucgaguacaaugug

SEQ ID NO: 395668 - RNA, 19 nt, Homo sapiens
  misc_RNA (1)...(19): siRNA sense strand
gagccagggagagaugauu

SEQ ID NO: 395669 - RNA, 19 nt, Homo sapiens
  misc_RNA (1)...(19): siRNA sense strand
gagcuggaagaacucaugu

SEQ ID NO: 395670 - RNA, 19 nt, Homo sapiens
  misc_RNA (1)...(19): siRNA sense strand
guggagagccagggagaga

SEQ ID NO: 395671 - RNA, 19 nt, Homo sapiens
  misc_RNA (1)...(19): siRNA sense strand
gaggucaugucggaguaca

SEQ ID NO: 395672 - RNA, 19 nt, Homo sapiens
  misc_RNA (1)...(19): siRNA sense strand
guccaucgagcaagaggaa

SEQ ID NO: 395673 - RNA, 19 nt, Homo sapiens
  misc_RNA (1)...(19): siRNA sense strand
uggagagggccgugucuga

SEQ ID NO: 395674 - RNA, 19 nt, Homo sapiens
  misc_RNA (1)...(19): siRNA sense strand
aagaagacagcaaacaaag

SEQ ID NO: 395675 - RNA, 19 nt, Homo sapiens
  misc_RNA (1)...(19): siRNA sense strand
gagcggagguuuccuaaua

SEQ ID NO: 395676 - RNA, 19 nt, Homo sapiens
  misc_RNA (1)...(19): siRNA sense strand
gcugacaccugaacuauuu

SEQ ID NO: 395677 - RNA, 19 nt, Homo sapiens
  misc_RNA (1)...(19): siRNA sense strand
gaaaggcccugcuggagaa

SEQ ID NO: 395678 - RNA, 19 nt, Homo sapiens
  misc_RNA (1)...(19): siRNA sense strand
ggaggaaggugguuaugaa

SEQ ID NO: 395679 - RNA, 19 nt, Homo sapiens
  misc_RNA (1)...(19): siRNA sense strand
gagaggagcuagagccaaa

SEQ ID NO: 395680 - RNA, 19 nt, Homo sapiens
  misc_RNA (1)...(19): siRNA sense strand
ccacagcaaugcccaguuu

SEQ ID NO: 395681 - RNA, 19 nt, Homo sapiens
  misc_RNA (1)...(19): siRNA sense strand
guggacaacuucagguuua

SEQ ID NO: 395682 - RNA, 19 nt, Homo sapiens
  misc_RNA (1)...(19): siRNA sense strand
gcaaggauaugccuaaggu

SEQ ID NO: 395683 - RNA, 19 nt, Homo sapiens
  misc_RNA (1)...(19): siRNA sense strand
ugacauccauuccaaagaa

SEQ ID NO: 395684 - RNA, 19 nt, Homo sapiens
  misc_RNA (1)...(19): siRNA sense strand
gaaccagaauggcuuggaa

SEQ ID NO: 395685 - RNA, 19 nt, Homo sapiens
  misc_RNA (1)...(19): siRNA sense strand
caaccaaggcuacaacuuu

SEQ ID NO: 395686 - RNA, 19 nt, Homo sapiens
  misc_RNA (1)...(19): siRNA sense strand
gagugaaacugaacuacuu

SEQ ID NO: 395687 - RNA, 19 nt, Homo sapiens
  misc_RNA (1)...(19): siRNA sense strand
gaggagggcucagguaaga

SEQ ID NO: 395688 - RNA, 19 nt, Homo sapiens
  misc_RNA (1)...(19): siRNA sense strand
uaaauagcauugaggaaga

SEQ ID NO: 395689 - RNA, 19 nt, Homo sapiens
  misc_RNA (1)...(19): siRNA sense strand
caacaucgccuaagaccuu

SEQ ID NO: 395690 - RNA, 19 nt, Homo sapiens
  misc_RNA (1)...(19): siRNA sense strand
gagcugacauccauuccaa

SEQ ID NO: 395691 - RNA, 19 nt, Homo sapiens
  misc_RNA (1)...(19): siRNA sense strand
gaagagcggcgucuacgaa

SEQ ID NO: 395692 - RNA, 19 nt, Homo sapiens
  misc_RNA (1)...(19): siRNA sense strand
ccagaacccugcaccaaga

SEQ ID NO: 395693 - RNA, 19 nt, Homo sapiens
  misc_RNA (1)...(19): siRNA sense strand
uggaagaagugaugaagaa

SEQ ID NO: 395694 - RNA, 19 nt, Homo sapiens
  misc_RNA (1)...(19): siRNA sense strand
uaacacacguccauuugau

SEQ ID NO: 395695 - RNA, 19 nt, Homo sapiens
  misc_RNA (1)...(19): siRNA sense strand
cagagaagcuagaccugaa

SEQ ID NO: 395696 - RNA, 19 nt, Homo sapiens
  misc_RNA (1)...(19): siRNA sense strand
gcaccaagaugaccaugag

SEQ ID NO: 395697 - RNA, 19 nt, Homo sapiens
  misc_RNA (1)...(19): siRNA sense strand
ccacaucaaugcagauauc

SEQ ID NO: 395698 - RNA, 19 nt, Homo sapiens
  misc_RNA (1)...(19): siRNA sense strand
gaugagaaccacagcauau

SEQ ID NO: 395699 - RNA, 19 nt, Homo sapiens
  misc_RNA (1)...(19): siRNA sense strand
ucaaugaucucugcaagug

SEQ ID NO: 395700 - RNA, 19 nt, Homo sapiens
  misc_RNA (1)...(19): siRNA sense strand
ggaccagauugccaaauuc

SEQ ID NO: 395701 - RNA, 19 nt, Homo sapiens
  misc_RNA (1)...(19): siRNA sense strand
gaacugagggcacuagagu

SEQ ID NO: 395702 - RNA, 19 nt, Homo sapiens
  misc_RNA (1)...(19): siRNA sense strand
cgagauggccgacuccuuu

SEQ ID NO: 395703 - RNA, 19 nt, Homo sapiens
  misc_RNA (1)...(19): siRNA sense strand
gaaggacaaggaauacaaa

SEQ ID NO: 395704 - RNA, 19 nt, Homo sapiens
  misc_RNA (1)...(19): siRNA sense strand
gagaggauccgcacacuuc

SEQ ID NO: 395705 - RNA, 19 nt, Homo sapiens
  misc_RNA (1)...(19): siRNA sense strand
ccuuaaagauucccaaugu

SEQ ID NO: 395706 - RNA, 19 nt, Homo sapiens
  misc_RNA (1)...(19): siRNA sense strand
gcagagcuuuggcgagaug

SEQ ID NO: 395707 - RNA, 19 nt, Homo sapiens
  misc_RNA (1)...(19): siRNA sense strand
aggaagacauugagaagaa

SEQ ID NO: 395708 - RNA, 19 nt, Homo sapiens
  misc_RNA (1)...(19): siRNA sense strand
gcaaggaggagcugaguca

SEQ ID NO: 395709 - RNA, 19 nt, Homo sapiens
  misc_RNA (1)...(19): siRNA sense strand
caacuugucacccucauga

SEQ ID NO: 395710 - RNA, 19 nt, Homo sapiens
  misc_RNA (1)...(19): siRNA sense strand
gaaggugguuaugaagcua

SEQ ID NO: 395711 - RNA, 19 nt, Homo sapiens
  misc_RNA (1)...(19): siRNA sense strand
gcuacaggcugaaccuaga

SEQ ID NO: 395712 - RNA, 19 nt, Homo sapiens
  misc_RNA (1)...(19): siRNA sense strand
gggaaugggacaccaaauu

SEQ ID NO: 395713 - RNA, 19 nt, Homo sapiens
  misc_RNA (1)...(19): siRNA sense strand
ccaagaccuuccucaagaa

SEQ ID NO: 395714 - RNA, 19 nt, Homo sapiens
  misc_RNA (1)...(19): siRNA sense strand
ggagguuuccuaauaguga

SEQ ID NO: 395715 - RNA, 19 nt, Homo sapiens
  misc_RNA (1)...(19): siRNA sense strand
gaugagcgccaguguauca

SEQ ID NO: 395716 - RNA, 19 nt, Homo sapiens
  misc_RNA (1)...(19): siRNA sense strand
gaagcugacaccugaacua

SEQ ID NO: 395717 - RNA, 19 nt, Homo sapiens
  misc_RNA (1)...(19): siRNA sense strand
cuuuaaagcugacuacuuc

SEQ ID NO: 395718 - RNA, 19 nt, Homo sapiens
  misc_RNA (1)...(19): siRNA sense strand
gaacuacuuggaccagauu

SEQ ID NO: 395719 - RNA, 19 nt, Homo sapiens
  misc_RNA (1)...(19): siRNA sense strand
uggaggagcucaugaugga

SEQ ID NO: 395720 - RNA, 19 nt, Homo sapiens
  misc_RNA (1)...(19): siRNA sense strand
gaccaguccugagaaggua

SEQ ID NO: 395721 - RNA, 19 nt, Homo sapiens
  misc_RNA (1)...(19): siRNA sense strand
gaggaucacuggaguuacu

SEQ ID NO: 395722 - RNA, 19 nt, Homo sapiens
  misc_RNA (1)...(19): siRNA sense strand
ccacagaggaagacauuga

SEQ ID NO: 395723 - RNA, 19 nt, Homo sapiens
  misc_RNA (1)...(19): siRNA sense strand
cagcagaacauuuggaaga

SEQ ID NO: 395724 - RNA, 19 nt, Homo sapiens
  misc_RNA (1)...(19): siRNA sense strand
gagguucucugcccaugug

SEQ ID NO: 395725 - RNA, 19 nt, Homo sapiens
  misc_RNA (1)...(19): siRNA sense strand
uccaagaccuuccucaaga

SEQ ID NO: 395726 - RNA, 19 nt, Homo sapiens
  misc_RNA (1)...(19): siRNA sense strand
ugccgaggcugucaacuuu

SEQ ID NO: 395727 - RNA, 19 nt, Homo sapiens
  misc_RNA (1)...(19): siRNA sense strand
ggaagacauugagaagaau

SEQ ID NO: 395728 - RNA, 19 nt, Homo sapiens
  misc_RNA (1)...(19): siRNA sense strand
uaaaugugaugccgguguu

SEQ ID NO: 395729 - RNA, 19 nt, Homo sapiens
  misc_RNA (1)...(19): siRNA sense strand
gacaguaaacggcaccuaa

SEQ ID NO: 395730 - RNA, 19 nt, Homo sapiens
  misc_RNA (1)...(19): siRNA sense strand
gagucaacaucgccuaaga

SEQ ID NO: 395731 - RNA, 19 nt, Homo sapiens
  misc_RNA (1)...(19): siRNA sense strand
ggaaggugguuaugaagcu

SEQ ID NO: 395732 - RNA, 19 nt, Homo sapiens
  misc_RNA (1)...(19): siRNA sense strand
gagaauggagacaguguga

SEQ ID NO: 395733 - RNA, 19 nt, Homo sapiens
  misc_RNA (1)...(19): siRNA sense strand
ugucaaggguguucuggaa

SEQ ID NO: 395734 - RNA, 19 nt, Homo sapiens
  misc_RNA (1)...(19): siRNA sense strand
gagauggccgacuccuuua

SEQ ID NO: 395735 - RNA, 19 nt, Homo sapiens
  misc_RNA (1)...(19): siRNA sense strand
gcaggagaguuugucauca

SEQ ID NO: 395736 - RNA, 19 nt, Homo sapiens
  misc_RNA (1)...(19): siRNA sense strand
acaagacucugcggaagaa

SEQ ID NO: 395737 - RNA, 19 nt, Homo sapiens
  misc_RNA (1)...(19): siRNA sense strand
gaauccagaggcugaauga

SEQ ID NO: 395738 - RNA, 19 nt, Homo sapiens
  misc_RNA (1)...(19): siRNA sense strand
ugagggcacuagagucuga

SEQ ID NO: 395739 - RNA, 19 nt, Homo sapiens
  misc_RNA (1)...(19): siRNA sense strand
aggaagaugugacuguuga

SEQ ID NO: 395740 - RNA, 19 nt, Homo sapiens
  misc_RNA (1)...(19): siRNA sense strand
ucauaugucugccggaugu

SEQ ID NO: 395741 - RNA, 19 nt, Homo sapiens
  misc_RNA (1)...(19): siRNA sense strand
gaagaauccagagcugaaa

SEQ ID NO: 395742 - RNA, 19 nt, Homo sapiens
  misc_RNA (1)...(19): siRNA sense strand
gaagcgcagccuugaagaa

SEQ ID NO: 395743 - RNA, 19 nt, Homo sapiens
  misc_RNA (1)...(19): siRNA sense strand
gaagaggaggaguaugcua

SEQ ID NO: 395744 - RNA, 19 nt, Homo sapiens
  misc_RNA (1)...(19): siRNA sense strand
ucuggaggcugguaaauag

SEQ ID NO: 395745 - RNA, 19 nt, Homo sapiens
  misc_RNA (1)...(19): siRNA sense strand
cuuaaagauucccaaugua

SEQ ID NO: 395746 - RNA, 19 nt, Homo sapiens
  misc_RNA (1)...(19): siRNA sense strand
ggaugagaaccacagcaua

SEQ ID NO: 395747 - RNA, 19 nt, Homo sapiens
  misc_RNA (1)...(19): siRNA sense strand
ugacuuggagggccuagua

SEQ ID NO: 395748 - RNA, 19 nt, Homo sapiens
  misc_RNA (1)...(19): siRNA sense strand
uggaccagauugccaaauu

SEQ ID NO: 395749 - RNA, 19 nt, Homo sapiens
  misc_RNA (1)...(19): siRNA sense strand
ugucagcccuggccugcua

SEQ ID NO: 395750 - RNA, 19 nt, Homo sapiens
  misc_RNA (1)...(19): siRNA sense strand
gagaguuugucaucaccuu

SEQ ID NO: 395751 - RNA, 19 nt, Homo sapiens
  misc_RNA (1)...(19): siRNA sense strand
agaugugacuguugaguau

SEQ ID NO: 395752 - RNA, 19 nt, Homo sapiens
  misc_RNA (1)...(19): siRNA sense strand
guaacacacguccauuuga

SEQ ID NO: 395753 - RNA, 19 nt, Homo sapiens
  misc_RNA (1)...(19): siRNA sense strand
gcucuggccucugaagaug

SEQ ID NO: 395754 - RNA, 19 nt, Homo sapiens
  misc_RNA (1)...(19): siRNA sense strand
aaccaaggcuacaacuuug

SEQ ID NO: 395755 - RNA, 19 nt, Homo sapiens
  misc_RNA (1)...(19): siRNA sense strand
gcuggcauauugaggauca

SEQ ID NO: 395756 - RNA, 19 nt, Homo sapiens
  misc_RNA (1)...(19): siRNA sense strand
gaacccugcaccaagauga

SEQ ID NO: 395757 - RNA, 19 nt, Homo sapiens
  misc_RNA (1)...(19): siRNA sense strand
acacacguccauuugauaa

SEQ ID NO: 395758 - RNA, 19 nt, Homo sapiens
  misc_RNA (1)...(19): siRNA sense strand
gggccuggauugcugaugu

SEQ ID NO: 395759 - RNA, 19 nt, Homo sapiens
  misc_RNA (1)...(19): siRNA sense strand
gaugaugagcgccagugua

SEQ ID NO: 395760 - RNA, 19 nt, Homo sapiens
  misc_RNA (1)...(19): siRNA sense strand
ugaggaagaugugacuguu

SEQ ID NO: 395761 - RNA, 19 nt, Homo sapiens
  misc_RNA (1)...(19): siRNA sense strand
uaaagaacugccugaguga

SEQ ID NO: 395762 - RNA, 19 nt, Homo sapiens
  misc_RNA (1)...(19): siRNA sense strand
ccacagcggcuucaaccaa

SEQ ID NO: 395763 - RNA, 19 nt, Homo sapiens
  misc_RNA (1)...(19): siRNA sense strand
gaucuuggaccucuacagu

SEQ ID NO: 395764 - RNA, 19 nt, Homo sapiens
  misc_RNA (1)...(19): siRNA sense strand
ggagggcucagguaagaga

SEQ ID NO: 395765 - RNA, 19 nt, Homo sapiens
  misc_RNA (1)...(19): siRNA sense strand
gggcuccuccuuaaagauu

SEQ ID NO: 395766 - RNA, 19 nt, Homo sapiens
  misc_RNA (1)...(19): siRNA sense strand
uguaucaagugcaagacua

SEQ ID NO: 395767 - RNA, 19 nt, Homo sapiens
  misc_RNA (1)...(19): siRNA sense strand
cggcagcugugcauaagga

SEQ ID NO: 395768 - RNA, 19 nt, Homo sapiens
  misc_RNA (1)...(19): siRNA sense strand
augaggagcuuaucugcaa

SEQ ID NO: 395769 - RNA, 19 nt, Homo sapiens
  misc_RNA (1)...(19): siRNA sense strand
cagaacauuuggaagaagu

SEQ ID NO: 395770 - RNA, 19 nt, Homo sapiens
  misc_RNA (1)...(19): siRNA sense strand
gcagaacauuuggaagaag

SEQ ID NO: 395771 - RNA, 19 nt, Homo sapiens
  misc_RNA (1)...(19): siRNA sense strand
ugacaacuaccacaucuuc

SEQ ID NO: 395772 - RNA, 19 nt, Homo sapiens
  misc_RNA (1)...(19): siRNA sense strand
uaaagauucccaauguaga

SEQ ID NO: 395773 - RNA, 19 nt, Homo sapiens
  misc_RNA (1)...(19): siRNA sense strand
gggaacagaaggagaagga

SEQ ID NO: 395774 - RNA, 19 nt, Homo sapiens
  misc_RNA (1)...(19): siRNA sense strand
agacgagagugaaacugaa

SEQ ID NO: 395775 - RNA, 19 nt, Homo sapiens
  misc_RNA (1)...(19): siRNA sense strand
gagaaucuguccaagguua

SEQ ID NO: 395776 - RNA, 19 nt, Homo sapiens
  misc_RNA (1)...(19): siRNA sense strand
cagccuaccuccuguauua

SEQ ID NO: 395777 - RNA, 19 nt, Homo sapiens
  misc_RNA (1)...(19): siRNA sense strand
gaggaaauguugaaccuaa

SEQ ID NO: 395778 - RNA, 19 nt, Homo sapiens
  misc_RNA (1)...(19): siRNA sense strand
ggacaagaauaucagagaa

SEQ ID NO: 395779 - RNA, 19 nt, Homo sapiens
  misc_RNA (1)...(19): siRNA sense strand
gggaacuggugcuacauua

SEQ ID NO: 395780 - RNA, 19 nt, Homo sapiens
  misc_RNA (1)...(19): siRNA sense strand
ccauaaagauugcagaguu

SEQ ID NO: 395781 - RNA, 19 nt, Homo sapiens
  misc_RNA (1)...(19): siRNA sense strand
gaaguucauuccucuguau

SEQ ID NO: 395782 - RNA, 19 nt, Homo sapiens
  misc_RNA (1)...(19): siRNA sense strand
caaacaagagguugagaua

SEQ ID NO: 395783 - RNA, 19 nt, Homo sapiens
  misc_RNA (1)...(19): siRNA sense strand
uaaacuaccugauggacaa

SEQ ID NO: 395784 - RNA, 19 nt, Homo sapiens
  misc_RNA (1)...(19): siRNA sense strand
acaagaagaugcugaggaa

SEQ ID NO: 395785 - RNA, 19 nt, Homo sapiens
  misc_RNA (1)...(19): siRNA sense strand
gaaagaugguggcgaugau

SEQ ID NO: 395786 - RNA, 19 nt, Homo sapiens
  misc_RNA (1)...(19): siRNA sense strand
ccacauauauuuacagacu

SEQ ID NO: 395787 - RNA, 19 nt, Homo sapiens
  misc_RNA (1)...(19): siRNA sense strand
aagcuucucucaccaagua

SEQ ID NO: 395788 - RNA, 19 nt, Homo sapiens
  misc_RNA (1)...(19): siRNA sense strand
gagauaagucgaagaguga

SEQ ID NO: 395789 - RNA, 19 nt, Homo sapiens
  misc_RNA (1)...(19): siRNA sense strand
gcacaccacggaaagcaua

SEQ ID NO: 395790 - RNA, 19 nt, Homo sapiens
  misc_RNA (1)...(19): siRNA sense strand
gaacuggugcuacauuaau

SEQ ID NO: 395791 - RNA, 19 nt, Homo sapiens
  misc_RNA (1)...(19): siRNA sense strand
gcucagcccugcguuggua

SEQ ID NO: 395792 - RNA, 19 nt, Homo sapiens
  misc_RNA (1)...(19): siRNA sense strand
ucaaggugaucaaccagua

SEQ ID NO: 395793 - RNA, 19 nt, Homo sapiens
  misc_RNA (1)...(19): siRNA sense strand
ccuguggacuuggaaauua

SEQ ID NO: 395794 - RNA, 19 nt, Homo sapiens
  misc_RNA (1)...(19): siRNA sense strand
ggaaauuaguaaagaacug

SEQ ID NO: 395795 - RNA, 19 nt, Homo sapiens
  misc_RNA (1)...(19): siRNA sense strand
cauaaagauugcagaguug

SEQ ID NO: 395796 - RNA, 19 nt, Homo sapiens
  misc_RNA (1)...(19): siRNA sense strand
cagaguugcuggagaaugu

SEQ ID NO: 395797 - RNA, 19 nt, Homo sapiens
  misc_RNA (1)...(19): siRNA sense strand
cccgugggcugaucaauaa

SEQ ID NO: 395798 - RNA, 19 nt, Homo sapiens
  misc_RNA (1)...(19): siRNA sense strand
cagaagcccuggucaaugg

SEQ ID NO: 395799 - RNA, 19 nt, Homo sapiens
  misc_RNA (1)...(19): siRNA sense strand
gcgcaucgaugaccagaca

SEQ ID NO: 395800 - RNA, 19 nt, Homo sapiens
  misc_RNA (1)...(19): siRNA sense strand
aagaagaugcugaggaaua

SEQ ID NO: 395801 - RNA, 19 nt, Homo sapiens
  misc_RNA (1)...(19): siRNA sense strand
gcuaauggacaaauacuug

SEQ ID NO: 395802 - RNA, 19 nt, Homo sapiens
  misc_RNA (1)...(19): siRNA sense strand
ggaagaacaaggugaagga

SEQ ID NO: 395803 - RNA, 19 nt, Homo sapiens
  misc_RNA (1)...(19): siRNA sense strand
cuacagacgucuuccagau

SEQ ID NO: 395804 - RNA, 19 nt, Homo sapiens
  misc_RNA (1)...(19): siRNA sense strand
gaauguaacccuaauccau

SEQ ID NO: 395805 - RNA, 19 nt, Homo sapiens
  misc_RNA (1)...(19): siRNA sense strand
ggacuuggaaauuaguaaa

SEQ ID NO: 395806 - RNA, 19 nt, Homo sapiens
  misc_RNA (1)...(19): siRNA sense strand
ggaacuggugcuacauuaa

SEQ ID NO: 395807 - RNA, 19 nt, Homo sapiens
  misc_RNA (1)...(19): siRNA sense strand
gauaaaaucgugagggaua

SEQ ID NO: 395808 - RNA, 19 nt, Homo sapiens
  misc_RNA (1)...(19): siRNA sense strand
gcucugcccucgcuuugga

SEQ ID NO: 395809 - RNA, 19 nt, Homo sapiens
  misc_RNA (1)...(19): siRNA sense strand
aaagggaacuggugcuaca

SEQ ID NO: 395810 - RNA, 19 nt, Homo sapiens
  misc_RNA (1)...(19): siRNA sense strand
ggaaaaugauggugucuca

SEQ ID NO: 395811 - RNA, 19 nt, Homo sapiens
  misc_RNA (1)...(19): siRNA sense strand
gcaggaagaacaaggugaa

SEQ ID NO: 395812 - RNA, 19 nt, Homo sapiens
  misc_RNA (1)...(19): siRNA sense strand
uacagacuccugacaguua

SEQ ID NO: 395813 - RNA, 19 nt, Homo sapiens
  misc_RNA (1)...(19): siRNA sense strand
gcccacauauauuuacaga

SEQ ID NO: 395814 - RNA, 19 nt, Homo sapiens
  misc_RNA (1)...(19): siRNA sense strand
uggccuauguggaaacuaa

SEQ ID NO: 395815 - RNA, 19 nt, Homo sapiens
  misc_RNA (1)...(19): siRNA sense strand
ggauauuacagcuauuuga

SEQ ID NO: 395816 - RNA, 19 nt, Homo sapiens
  misc_RNA (1)...(19): siRNA sense strand
gcagaggaugcagaauuua

SEQ ID NO: 395817 - RNA, 19 nt, Homo sapiens
  misc_RNA (1)...(19): siRNA sense strand
aagagaaucuguccaaggu

SEQ ID NO: 395818 - RNA, 19 nt, Homo sapiens
  misc_RNA (1)...(19): siRNA sense strand
aauguaacccuaauccaua

SEQ ID NO: 395819 - RNA, 19 nt, Homo sapiens
  misc_RNA (1)...(19): siRNA sense strand
ugaaaagggucgacaagaa

SEQ ID NO: 395820 - RNA, 19 nt, Homo sapiens
  misc_RNA (1)...(19): siRNA sense strand
gaaggaagcgaggaugaau

SEQ ID NO: 395821 - RNA, 19 nt, Homo sapiens
  misc_RNA (1)...(19): siRNA sense strand
ggaauacuuaggcuucauu

SEQ ID NO: 395822 - RNA, 19 nt, Homo sapiens
  misc_RNA (1)...(19): siRNA sense strand
agaggauccuguagccaua

SEQ ID NO: 395823 - RNA, 19 nt, Homo sapiens
  misc_RNA (1)...(19): siRNA sense strand
aacaagagguugagauaag

SEQ ID NO: 395824 - RNA, 19 nt, Homo sapiens
  misc_RNA (1)...(19): siRNA sense strand
gaaauguugaaccuaaaga

SEQ ID NO: 395825 - RNA, 19 nt, Homo sapiens
  misc_RNA (1)...(19): siRNA sense strand
ggacaaagggagcguaaaa

SEQ ID NO: 395826 - RNA, 19 nt, Homo sapiens
  misc_RNA (1)...(19): siRNA sense strand
ugaauauccuguggacuug

SEQ ID NO: 395827 - RNA, 19 nt, Homo sapiens
  misc_RNA (1)...(19): siRNA sense strand
auacuuaggcuucauucua

SEQ ID NO: 395828 - RNA, 19 nt, Homo sapiens
  misc_RNA (1)...(19): siRNA sense strand
ccuuugagcccacauauau

SEQ ID NO: 395829 - RNA, 19 nt, Homo sapiens
  misc_RNA (1)...(19): siRNA sense strand
gaaccuaucggcucuuugc

SEQ ID NO: 395830 - RNA, 19 nt, Homo sapiens
  misc_RNA (1)...(19): siRNA sense strand
gaugguaucacuaaagaag

SEQ ID NO: 395831 - RNA, 19 nt, Homo sapiens
  misc_RNA (1)...(19): siRNA sense strand
gaagaacaaggugaaggaa

SEQ ID NO: 395832 - RNA, 19 nt, Homo sapiens
  misc_RNA (1)...(19): siRNA sense strand
acagacuccugacaguuaa

SEQ ID NO: 395833 - RNA, 19 nt, Homo sapiens
  misc_RNA (1)...(19): siRNA sense strand
caaaggccuuguacgucaa

SEQ ID NO: 395834 - RNA, 19 nt, Homo sapiens
  misc_RNA (1)...(19): siRNA sense strand
ugaguuuggugucgaugaa

SEQ ID NO: 395835 - RNA, 19 nt, Homo sapiens
  misc_RNA (1)...(19): siRNA sense strand
aaacaagagguugagauaa

SEQ ID NO: 395836 - RNA, 19 nt, Homo sapiens
  misc_RNA (1)...(19): siRNA sense strand
gaaucuguccaagguuaua

SEQ ID NO: 395837 - RNA, 19 nt, Homo sapiens
  misc_RNA (1)...(19): siRNA sense strand
gauauccagucagacaaga

SEQ ID NO: 395838 - RNA, 19 nt, Homo sapiens
  misc_RNA (1)...(19): siRNA sense strand
aaauggacuucaugaggaa

SEQ ID NO: 395839 - RNA, 19 nt, Homo sapiens
  misc_RNA (1)...(19): siRNA sense strand
gaggaauacuuaggcuuca

SEQ ID NO: 395840 - RNA, 19 nt, Homo sapiens
  misc_RNA (1)...(19): siRNA sense strand
caugauagacagcuuuguu

SEQ ID NO: 395841 - RNA, 19 nt, Homo sapiens
  misc_RNA (1)...(19): siRNA sense strand
uguaccaccugaugaaguu

SEQ ID NO: 395842 - RNA, 19 nt, Homo sapiens
  misc_RNA (1)...(19): siRNA sense strand
gaauaucagagaauugagu

SEQ ID NO: 395843 - RNA, 19 nt, Homo sapiens
  misc_RNA (1)...(19): siRNA sense strand
caucaggucugugguuuac

SEQ ID NO: 395844 - RNA, 19 nt, Homo sapiens
  misc_RNA (1)...(19): siRNA sense strand
gaugguggcgaugauagua

SEQ ID NO: 395845 - RNA, 19 nt, Homo sapiens
  misc_RNA (1)...(19): siRNA sense strand
uugcagaguugcuggagaa

SEQ ID NO: 395846 - RNA, 19 nt, Homo sapiens
  misc_RNA (1)...(19): siRNA sense strand
gaagggcuuguuccgguuu

SEQ ID NO: 395847 - RNA, 19 nt, Homo sapiens
  misc_RNA (1)...(19): siRNA sense strand
cgucaacacccaugauaga

SEQ ID NO: 395848 - RNA, 19 nt, Homo sapiens
  misc_RNA (1)...(19): siRNA sense strand
uaaaugccaccgaaccuau

SEQ ID NO: 395849 - RNA, 19 nt, Homo sapiens
  misc_RNA (1)...(19): siRNA sense strand
aagaagagcaggaagaaca

SEQ ID NO: 395850 - RNA, 19 nt, Homo sapiens
  misc_RNA (1)...(19): siRNA sense strand
gagcccacauauauuuaca

SEQ ID NO: 395851 - RNA, 19 nt, Homo sapiens
  misc_RNA (1)...(19): siRNA sense strand
gacaagaauaucagagaau

SEQ ID NO: 395852 - RNA, 19 nt, Homo sapiens
  misc_RNA (1)...(19): siRNA sense strand
gaggaugaaugggaacaag

SEQ ID NO: 395853 - RNA, 19 nt, Homo sapiens
  misc_RNA (1)...(19): siRNA sense strand
ugaagaagagcaggaagaa

SEQ ID NO: 395854 - RNA, 19 nt, Homo sapiens
  misc_RNA (1)...(19): siRNA sense strand
ccacagaagcccuggucaa

SEQ ID NO: 395855 - RNA, 19 nt, Homo sapiens
  misc_RNA (1)...(19): siRNA sense strand
ggugggugccagaagcuua

SEQ ID NO: 395856 - RNA, 19 nt, Homo sapiens
  misc_RNA (1)...(19): siRNA sense strand
ggcaagagaaucuguccaa

SEQ ID NO: 395857 - RNA, 19 nt, Homo sapiens
  misc_RNA (1)...(19): siRNA sense strand
cagcagaguucaaaagaau

SEQ ID NO: 395858 - RNA, 19 nt, Homo sapiens
  misc_RNA (1)...(19): siRNA sense strand
ggaugaaugggaacaagug

SEQ ID NO: 395859 - RNA, 19 nt, Homo sapiens
  misc_RNA (1)...(19): siRNA sense strand
caagaauaucagagaauug

SEQ ID NO: 395860 - RNA, 19 nt, Homo sapiens
  misc_RNA (1)...(19): siRNA sense strand
agaagaugcugaggaauac

SEQ ID NO: 395861 - RNA, 19 nt, Homo sapiens
  misc_RNA (1)...(19): siRNA sense strand
ccacagcccgcaguauauu

SEQ ID NO: 395862 - RNA, 19 nt, Homo sapiens
  misc_RNA (1)...(19): siRNA sense strand
cagaggaugcagaauuuau

SEQ ID NO: 395863 - RNA, 19 nt, Homo sapiens
  misc_RNA (1)...(19): siRNA sense strand
ucacguugcaguuggauau

SEQ ID NO: 395864 - RNA, 19 nt, Homo sapiens
  misc_RNA (1)...(19): siRNA sense strand
ggaaauguugaaccuaaag

SEQ ID NO: 395865 - RNA, 19 nt, Homo sapiens
  misc_RNA (1)...(19): siRNA sense strand
ugaaagaugguggcgauga

SEQ ID NO: 395866 - RNA, 19 nt, Homo sapiens
  misc_RNA (1)...(19): siRNA sense strand
gauccuguagccauaaaga

SEQ ID NO: 395867 - RNA, 19 nt, Homo sapiens
  misc_RNA (1)...(19): siRNA sense strand
uaucagagaauugaguuug

SEQ ID NO: 395868 - RNA, 19 nt, Homo sapiens
  misc_RNA (1)...(19): siRNA sense strand
ccacggaaagcauagacuu

SEQ ID NO: 395869 - RNA, 19 nt, Homo sapiens
  misc_RNA (1)...(19): siRNA sense strand
uuguacagcuuccaaaaua

SEQ ID NO: 395870 - RNA, 19 nt, Homo sapiens
  misc_RNA (1)...(19): siRNA sense strand
ucauuccucuguauuccaa

SEQ ID NO: 395871 - RNA, 19 nt, Homo sapiens
  misc_RNA (1)...(19): siRNA sense strand
uuugagcccacauauauuu

SEQ ID NO: 395872 - RNA, 19 nt, Homo sapiens
  misc_RNA (1)...(19): siRNA sense strand
acaagagguugagauaagu

SEQ ID NO: 395873 - RNA, 19 nt, Homo sapiens
  misc_RNA (1)...(19): siRNA sense strand
ucacuaaagaagcaagcua

SEQ ID NO: 395874 - RNA, 19 nt, Homo sapiens
  misc_RNA (1)...(19): siRNA sense strand
acuccucgaucuucaguug

SEQ ID NO: 395875 - RNA, 19 nt, Homo sapiens
  misc_RNA (1)...(19): siRNA sense strand
ccaaggagcugcagaugaa

SEQ ID NO: 395876 - RNA, 19 nt, Homo sapiens
  misc_RNA (1)...(19): siRNA sense strand
gggaagagaucaccacgaa

SEQ ID NO: 395877 - RNA, 19 nt, Homo sapiens
  misc_RNA (1)...(19): siRNA sense strand
gaagagaucaccacgaaga

SEQ ID NO: 395878 - RNA, 19 nt, Homo sapiens
  misc_RNA (1)...(19): siRNA sense strand
ggaccacucuucaacuuug

SEQ ID NO: 395879 - RNA, 19 nt, Homo sapiens
  misc_RNA (1)...(19): siRNA sense strand
agaagcagcuggccaagaa

SEQ ID NO: 395880 - RNA, 19 nt, Homo sapiens
  misc_RNA (1)...(19): siRNA sense strand
ggaagaacccagacguuga

SEQ ID NO: 395881 - RNA, 19 nt, Homo sapiens
  misc_RNA (1)...(19): siRNA sense strand
gcaacaccaugcagcaguu

SEQ ID NO: 395882 - RNA, 19 nt, Homo sapiens
  misc_RNA (1)...(19): siRNA sense strand
gaggagaacaucaugaaau

SEQ ID NO: 395883 - RNA, 19 nt, Homo sapiens
  misc_RNA (1)...(19): siRNA sense strand
ccaugcaccugaugaagaa

SEQ ID NO: 395884 - RNA, 19 nt, Homo sapiens
  misc_RNA (1)...(19): siRNA sense strand
gaaguucucugcgcacuac

SEQ ID NO: 395885 - RNA, 19 nt, Homo sapiens
  misc_RNA (1)...(19): siRNA sense strand
aggagaagaucaagaguga

SEQ ID NO: 395886 - RNA, 19 nt, Homo sapiens
  misc_RNA (1)...(19): siRNA sense strand
gcaggaggcucuggugaag

SEQ ID NO: 395887 - RNA, 19 nt, Homo sapiens
  misc_RNA (1)...(19): siRNA sense strand
aauccaacauugacaagaa

SEQ ID NO: 395888 - RNA, 19 nt, Homo sapiens
  misc_RNA (1)...(19): siRNA sense strand
ggacagucaagaugagaaa

SEQ ID NO: 395889 - RNA, 19 nt, Homo sapiens
  misc_RNA (1)...(19): siRNA sense strand
uggagaagcuucgagagaa

SEQ ID NO: 395890 - RNA, 19 nt, Homo sapiens
  misc_RNA (1)...(19): siRNA sense strand
gcagaaggcgcucgagauc

SEQ ID NO: 395891 - RNA, 19 nt, Homo sapiens
  misc_RNA (1)...(19): siRNA sense strand
gaacccagacguugacaca

SEQ ID NO: 395892 - RNA, 19 nt, Homo sapiens
  misc_RNA (1)...(19): siRNA sense strand
gaaggagcguaagaaggaa

SEQ ID NO: 395893 - RNA, 19 nt, Homo sapiens
  misc_RNA (1)...(19): siRNA sense strand
agaaggagcguaagaagga

SEQ ID NO: 395894 - RNA, 19 nt, Homo sapiens
  misc_RNA (1)...(19): siRNA sense strand
gagcagauggagcagauga

SEQ ID NO: 395895 - RNA, 19 nt, Homo sapiens
  misc_RNA (1)...(19): siRNA sense strand
gagaucaccuucagcuacu

SEQ ID NO: 395896 - RNA, 19 nt, Homo sapiens
  misc_RNA (1)...(19): siRNA sense strand
gaaaagaagugggacaagu

SEQ ID NO: 395897 - RNA, 19 nt, Homo sapiens
  misc_RNA (1)...(19): siRNA sense strand
gaucaucccucaccaucac

SEQ ID NO: 395898 - RNA, 19 nt, Homo sapiens
  misc_RNA (1)...(19): siRNA sense strand
gcgagcagauggagcagau

SEQ ID NO: 395899 - RNA, 19 nt, Homo sapiens
  misc_RNA (1)...(19): siRNA sense strand
gagagaaggagcguaagaa

SEQ ID NO: 395900 - RNA, 19 nt, Homo sapiens
  misc_RNA (1)...(19): siRNA sense strand
gagaucaccacgaagaaga

SEQ ID NO: 395901 - RNA, 19 nt, Homo sapiens
  misc_RNA (1)...(19): siRNA sense strand
ggaggagaacaucaugaaa

SEQ ID NO: 395902 - RNA, 19 nt, Homo sapiens
  misc_RNA (1)...(19): siRNA sense strand
agaaggagcaguccaagga

SEQ ID NO: 395903 - RNA, 19 nt, Homo sapiens
  misc_RNA (1)...(19): siRNA sense strand
gagaagaacaagcacaucu

SEQ ID NO: 395904 - RNA, 19 nt, Homo sapiens
  misc_RNA (1)...(19): siRNA sense strand
caacuuugauguucaugac

SEQ ID NO: 395905 - RNA, 19 nt, Homo sapiens
  misc_RNA (1)...(19): siRNA sense strand
caucaugaaauccaacauu

SEQ ID NO: 395906 - RNA, 19 nt, Homo sapiens
  misc_RNA (1)...(19): siRNA sense strand
ugaagaagcgggagaagca

SEQ ID NO: 395907 - RNA, 19 nt, Homo sapiens
  misc_RNA (1)...(19): siRNA sense strand
aggagaacaucaugaaauc

SEQ ID NO: 395908 - RNA, 19 nt, Homo sapiens
  misc_RNA (1)...(19): siRNA sense strand
ugaaggagcgggagaagca

SEQ ID NO: 395909 - RNA, 19 nt, Homo sapiens
  misc_RNA (1)...(19): siRNA sense strand
ccaagaaggagcaguccaa

SEQ ID NO: 395910 - RNA, 19 nt, Homo sapiens
  misc_RNA (1)...(19): siRNA sense strand
gagaacaucaugaaaucca

SEQ ID NO: 395911 - RNA, 19 nt, Homo sapiens
  misc_RNA (1)...(19): siRNA sense strand
gaaauccaacauugacaag

SEQ ID NO: 395912 - RNA, 19 nt, Homo sapiens
  misc_RNA (1)...(19): siRNA sense strand
gaagaacccagacguugac

SEQ ID NO: 395913 - RNA, 19 nt, Homo sapiens
  misc_RNA (1)...(19): siRNA sense strand
cgagagaaggagcguaaga

SEQ ID NO: 395914 - RNA, 19 nt, Homo sapiens
  misc_RNA (1)...(19): siRNA sense strand
gccaugcaccugaugaaga

SEQ ID NO: 395915 - RNA, 19 nt, Homo sapiens
  misc_RNA (1)...(19): siRNA sense strand
gaaagggcaacaccaugca

SEQ ID NO: 395916 - RNA, 19 nt, Homo sapiens
  misc_RNA (1)...(19): siRNA sense strand
caacauugacaagaaguuc

SEQ ID NO: 395917 - RNA, 19 nt, Homo sapiens
  misc_RNA (1)...(19): siRNA sense strand
ugaaauccaacauugacaa

SEQ ID NO: 395918 - RNA, 19 nt, Homo sapiens
  misc_RNA (1)...(19): siRNA sense strand
gacccugaaugacaugaag

SEQ ID NO: 395919 - RNA, 19 nt, Homo sapiens
  misc_RNA (1)...(19): siRNA sense strand
gagaagcagcuggccaaga

SEQ ID NO: 395920 - RNA, 19 nt, Homo sapiens
  misc_RNA (1)...(19): siRNA sense strand
aggaggcucuggugaagga

SEQ ID NO: 395921 - RNA, 19 nt, Homo sapiens
  misc_RNA (1)...(19): siRNA sense strand
aucaugaaauccaacauug

SEQ ID NO: 395922 - RNA, 19 nt, Homo sapiens
  misc_RNA (1)...(19): siRNA sense strand
ccaagcaggagaagaucaa

SEQ ID NO: 395923 - RNA, 19 nt, Homo sapiens
  misc_RNA (1)...(19): siRNA sense strand
agagaaaacuggggaagaa

SEQ ID NO: 395924 - RNA, 19 nt, Homo sapiens
  misc_RNA (1)...(19): siRNA sense strand
ucaccacgaagaagagaaa

SEQ ID NO: 395925 - RNA, 19 nt, Homo sapiens
  misc_RNA (1)...(19): siRNA sense strand
gauggaaagggaagagauc

SEQ ID NO: 395926 - RNA, 19 nt, Homo sapiens
  misc_RNA (1)...(19): siRNA sense strand
cggaggagaacaucaugaa

SEQ ID NO: 395927 - RNA, 19 nt, Homo sapiens
  misc_RNA (1)...(19): siRNA sense strand
ggagcugguacgagaagaa

SEQ ID NO: 395928 - RNA, 19 nt, Homo sapiens
  misc_RNA (1)...(19): siRNA sense strand
ucacagcuucuacgacuuc

SEQ ID NO: 395929 - RNA, 19 nt, Homo sapiens
  misc_RNA (1)...(19): siRNA sense strand
ucaugaaauccaacauuga

SEQ ID NO: 395930 - RNA, 19 nt, Homo sapiens
  misc_RNA (1)...(19): siRNA sense strand
gggaagccaagcaggagaa

SEQ ID NO: 395931 - RNA, 19 nt, Homo sapiens
  misc_RNA (1)...(19): siRNA sense strand
gaagccaagcggaagaucu

SEQ ID NO: 395932 - RNA, 19 nt, Homo sapiens
  misc_RNA (1)...(19): siRNA sense strand
aaaagaagugggacaagua

SEQ ID NO: 395933 - RNA, 19 nt, Homo sapiens
  misc_RNA (1)...(19): siRNA sense strand
gcugguacgagaagaacaa

SEQ ID NO: 395934 - RNA, 19 nt, Homo sapiens
  misc_RNA (1)...(19): siRNA sense strand
gcagauggagcagaugaag

SEQ ID NO: 395935 - RNA, 19 nt, Homo sapiens
  misc_RNA (1)...(19): siRNA sense strand
gguacgagaagaacaagca

SEQ ID NO: 395936 - RNA, 19 nt, Homo sapiens
  misc_RNA (1)...(19): siRNA sense strand
gaacccuacgacccugaaa

SEQ ID NO: 395937 - RNA, 19 nt, Homo sapiens
  misc_RNA (1)...(19): siRNA sense strand
agaacaucaugaaauccaa

SEQ ID NO: 395938 - RNA, 19 nt, Homo sapiens
  misc_RNA (1)...(19): siRNA sense strand
agaaggcgcucgagauccu

SEQ ID NO: 395939 - RNA, 19 nt, Homo sapiens
  misc_RNA (1)...(19): siRNA sense strand
ugagaaagggcaacaccau

SEQ ID NO: 395940 - RNA, 19 nt, Homo sapiens
  misc_RNA (1)...(19): siRNA sense strand
cggcggacagucaagauga

SEQ ID NO: 395941 - RNA, 19 nt, Homo sapiens
  misc_RNA (1)...(19): siRNA sense strand
gaaggaugagucccaugca

SEQ ID NO: 395942 - RNA, 19 nt, Homo sapiens
  misc_RNA (1)...(19): siRNA sense strand
ucgagauccuucggaaaga

SEQ ID NO: 395943 - RNA, 19 nt, Homo sapiens
  misc_RNA (1)...(19): siRNA sense strand
gcucgagauccuucggaaa

SEQ ID NO: 395944 - RNA, 19 nt, Homo sapiens
  misc_RNA (1)...(19): siRNA sense strand
aagccaagcaggagaagau

SEQ ID NO: 395945 - RNA, 19 nt, Homo sapiens
  misc_RNA (1)...(19): siRNA sense strand
gcggaggagaacaucauga

SEQ ID NO: 395946 - RNA, 19 nt, Homo sapiens
  misc_RNA (1)...(19): siRNA sense strand
ggaacccuacgacccugaa

SEQ ID NO: 395947 - RNA, 19 nt, Homo sapiens
  misc_RNA (1)...(19): siRNA sense strand
caugaaauccaacauugac

SEQ ID NO: 395948 - RNA, 19 nt, Homo sapiens
  misc_RNA (1)...(19): siRNA sense strand
cagcuucuacgacuucauc

SEQ ID NO: 395949 - RNA, 19 nt, Homo sapiens
  misc_RNA (1)...(19): siRNA sense strand
agaagcagcgcgagcagau

SEQ ID NO: 395950 - RNA, 19 nt, Homo sapiens
  misc_RNA (1)...(19): siRNA sense strand
acccagacguugacacaag

SEQ ID NO: 395951 - RNA, 19 nt, Homo sapiens
  misc_RNA (1)...(19): siRNA sense strand
gaucaccacgaagaagaga

SEQ ID NO: 395952 - RNA, 19 nt, Homo sapiens
  misc_RNA (1)...(19): siRNA sense strand
gagauggaaagggaagaga

SEQ ID NO: 395953 - RNA, 19 nt, Homo sapiens
  misc_RNA (1)...(19): siRNA sense strand
caagcaggguuauguauua

SEQ ID NO: 395954 - RNA, 19 nt, Homo sapiens
  misc_RNA (1)...(19): siRNA sense strand
ugaaauggaugacacagaa

SEQ ID NO: 395955 - RNA, 19 nt, Homo sapiens
  misc_RNA (1)...(19): siRNA sense strand
guauuaagcucuauugaag

SEQ ID NO: 395956 - RNA, 19 nt, Homo sapiens
  misc_RNA (1)...(19): siRNA sense strand
ucugauggcuuuguaaaua

SEQ ID NO: 395957 - RNA, 19 nt, Homo sapiens
  misc_RNA (1)...(19): siRNA sense strand
ucacuugccuucaguaaug

SEQ ID NO: 395958 - RNA, 19 nt, Homo sapiens
  misc_RNA (1)...(19): siRNA sense strand
gaguggcaguugaguauuu

SEQ ID NO: 395959 - RNA, 19 nt, Homo sapiens
  misc_RNA (1)...(19): siRNA sense strand
uaucagauguguugaauac

SEQ ID NO: 395960 - RNA, 19 nt, Homo sapiens
  misc_RNA (1)...(19): siRNA sense strand
gagcagauuuacccaguca

SEQ ID NO: 395961 - RNA, 19 nt, Homo sapiens
  misc_RNA (1)...(19): siRNA sense strand
ggacugcgccuucuacgau

SEQ ID NO: 395962 - RNA, 19 nt, Homo sapiens
  misc_RNA (1)...(19): siRNA sense strand
gcccugagguacagaagaa

SEQ ID NO: 395963 - RNA, 19 nt, Homo sapiens
  misc_RNA (1)...(19): siRNA sense strand
gaacacugaucaagaaaau

SEQ ID NO: 395964 - RNA, 19 nt, Homo sapiens
  misc_RNA (1)...(19): siRNA sense strand
cuucaaaugucacagacua

SEQ ID NO: 395965 - RNA, 19 nt, Homo sapiens
  misc_RNA (1)...(19): siRNA sense strand
aaacccaagucaccaugua

SEQ ID NO: 395966 - RNA, 19 nt, Homo sapiens
  misc_RNA (1)...(19): siRNA sense strand
aggacuagaucaucaauug

SEQ ID NO: 395967 - RNA, 19 nt, Homo sapiens
  misc_RNA (1)...(19): siRNA sense strand
ugaauacuguccagaagug

SEQ ID NO: 395968 - RNA, 19 nt, Homo sapiens
  misc_RNA (1)...(19): siRNA sense strand
guauauacccucucagugu

SEQ ID NO: 395969 - RNA, 19 nt, Homo sapiens
  misc_RNA (1)...(19): siRNA sense strand
ugacagaugcagaaacaaa

SEQ ID NO: 395970 - RNA, 19 nt, Homo sapiens
  misc_RNA (1)...(19): siRNA sense strand
gguuauguauuaagcucua

SEQ ID NO: 395971 - RNA, 19 nt, Homo sapiens
  misc_RNA (1)...(19): siRNA sense strand
ucagauguguugaauacug

SEQ ID NO: 395972 - RNA, 19 nt, Homo sapiens
  misc_RNA (1)...(19): siRNA sense strand
acacagaacauccugaaga

SEQ ID NO: 395973 - RNA, 19 nt, Homo sapiens
  misc_RNA (1)...(19): siRNA sense strand
aaacaagcaggguuaugua

SEQ ID NO: 395974 - RNA, 19 nt, Homo sapiens
  misc_RNA (1)...(19): siRNA sense strand
caaacaagcaggguuaugu

SEQ ID NO: 395975 - RNA, 19 nt, Homo sapiens
  misc_RNA (1)...(19): siRNA sense strand
guaaauauuugggauccau

SEQ ID NO: 395976 - RNA, 19 nt, Homo sapiens
  misc_RNA (1)...(19): siRNA sense strand
ggacuagaucaucaauuga

SEQ ID NO: 395977 - RNA, 19 nt, Homo sapiens
  misc_RNA (1)...(19): siRNA sense strand
gggaguccagccugaaaua

SEQ ID NO: 395978 - RNA, 19 nt, Homo sapiens
  misc_RNA (1)...(19): siRNA sense strand
cacagaacauccugaagau

SEQ ID NO: 395979 - RNA, 19 nt, Homo sapiens
  misc_RNA (1)...(19): siRNA sense strand
auaccagacucgcugcaua

SEQ ID NO: 395980 - RNA, 19 nt, Homo sapiens
  misc_RNA (1)...(19): siRNA sense strand
gacuagaucaucaauugaa

SEQ ID NO: 395981 - RNA, 19 nt, Homo sapiens
  misc_RNA (1)...(19): siRNA sense strand
caauagcgucaucauauau

SEQ ID NO: 395982 - RNA, 19 nt, Homo sapiens
  misc_RNA (1)...(19): siRNA sense strand
guggaggacuagaucauca

SEQ ID NO: 395983 - RNA, 19 nt, Homo sapiens
  misc_RNA (1)...(19): siRNA sense strand
ucccagaacuccuuguaau

SEQ ID NO: 395984 - RNA, 19 nt, Homo sapiens
  misc_RNA (1)...(19): siRNA sense strand
gaucccagaacuccuugua

SEQ ID NO: 395985 - RNA, 19 nt, Homo sapiens
  misc_RNA (1)...(19): siRNA sense strand
gaaguugggaucagacagu

SEQ ID NO: 395986 - RNA, 19 nt, Homo sapiens
  misc_RNA (1)...(19): siRNA sense strand
ccaagugacagaugcagaa

SEQ ID NO: 395987 - RNA, 19 nt, Homo sapiens
  misc_RNA (1)...(19): siRNA sense strand
aagcaggguuauguauuaa

SEQ ID NO: 395988 - RNA, 19 nt, Homo sapiens
  misc_RNA (1)...(19): siRNA sense strand
gcagauuuacccagucaau

SEQ ID NO: 395989 - RNA, 19 nt, Homo sapiens
  misc_RNA (1)...(19): siRNA sense strand
guacagaagaagaaguaug

SEQ ID NO: 395990 - RNA, 19 nt, Homo sapiens
  misc_RNA (1)...(19): siRNA sense strand
gaucaucaauugaaaaugc

SEQ ID NO: 395991 - RNA, 19 nt, Homo sapiens
  misc_RNA (1)...(19): siRNA sense strand
cagauguguugaauacugu

SEQ ID NO: 395992 - RNA, 19 nt, Homo sapiens
  misc_RNA (1)...(19): siRNA sense strand
gcaggguuauguauuaagc

SEQ ID NO: 395993 - RNA, 19 nt, Homo sapiens
  misc_RNA (1)...(19): siRNA sense strand
gaccgguucuaacgaguuc

SEQ ID NO: 395994 - RNA, 19 nt, Homo sapiens
  misc_RNA (1)...(19): siRNA sense strand
guugggaucagacaguuaa

SEQ ID NO: 395995 - RNA, 19 nt, Homo sapiens
  misc_RNA (1)...(19): siRNA sense strand
ugcaugauuugaacacuga

SEQ ID NO: 395996 - RNA, 19 nt, Homo sapiens
  misc_RNA (1)...(19): siRNA sense strand
cugauggcuuuguaaauau

SEQ ID NO: 395997 - RNA, 19 nt, Homo sapiens
  misc_RNA (1)...(19): siRNA sense strand
guccagaagugaaugugau

SEQ ID NO: 395998 - RNA, 19 nt, Homo sapiens
  misc_RNA (1)...(19): siRNA sense strand
ccuaucagauguguugaau

SEQ ID NO: 395999 - RNA, 19 nt, Homo sapiens
  misc_RNA (1)...(19): siRNA sense strand
agugacagaugcagaaaca

SEQ ID NO: 396000 - RNA, 19 nt, Homo sapiens
  misc_RNA (1)...(19): siRNA sense strand
ugacacagaacauccugaa

SEQ ID NO: 396001 - RNA, 19 nt, Homo sapiens
  misc_RNA (1)...(19): siRNA sense strand
ucaaaugucacagacuaaa

SEQ ID NO: 396002 - RNA, 19 nt, Homo sapiens
  misc_RNA (1)...(19): siRNA sense strand
guugaauacuguccagaag

SEQ ID NO: 396003 - RNA, 19 nt, Homo sapiens
  misc_RNA (1)...(19): siRNA sense strand
cacaauauccacaauacau

SEQ ID NO: 396004 - RNA, 19 nt, Homo sapiens
  misc_RNA (1)...(19): siRNA sense strand
gcauacgagcguuuccaaa

SEQ ID NO: 396005 - RNA, 19 nt, Homo sapiens
  misc_RNA (1)...(19): siRNA sense strand
uaucuucauucgccaagug

SEQ ID NO: 396006 - RNA, 19 nt, Homo sapiens
  misc_RNA (1)...(19): siRNA sense strand
gaaccagccacccgaggau

SEQ ID NO: 396007 - RNA, 19 nt, Homo sapiens
  misc_RNA (1)...(19): siRNA sense strand
guucugauggcuuuguaaa

SEQ ID NO: 396008 - RNA, 19 nt, Homo sapiens
  misc_RNA (1)...(19): siRNA sense strand
ccacgagcaucgcaucacu

SEQ ID NO: 396009 - RNA, 19 nt, Homo sapiens
  misc_RNA (1)...(19): siRNA sense strand
acaagcaggguuauguauu

SEQ ID NO: 396010 - RNA, 19 nt, Homo sapiens
  misc_RNA (1)...(19): siRNA sense strand
caucacuugccuucaguaa

SEQ ID NO: 396011 - RNA, 19 nt, Homo sapiens
  misc_RNA (1)...(19): siRNA sense strand
ccgaguggcaguugaguau

SEQ ID NO: 396012 - RNA, 19 nt, Homo sapiens
  misc_RNA (1)...(19): siRNA sense strand
gaacagcaggccgcagagu

SEQ ID NO: 396013 - RNA, 19 nt, Homo sapiens
  misc_RNA (1)...(19): siRNA sense strand
ccaugcggcucaaguacca

SEQ ID NO: 396014 - RNA, 19 nt, Homo sapiens
  misc_RNA (1)...(19): siRNA sense strand
gaaggccgaguggcaguug

SEQ ID NO: 396015 - RNA, 19 nt, Homo sapiens
  misc_RNA (1)...(19): siRNA sense strand
aaguaugccuucaaauguc

SEQ ID NO: 396016 - RNA, 19 nt, Homo sapiens
  misc_RNA (1)...(19): siRNA sense strand
gaauacuguccagaaguga

SEQ ID NO: 396017 - RNA, 19 nt, Homo sapiens
  misc_RNA (1)...(19): siRNA sense strand
caagugacagaugcagaaa

SEQ ID NO: 396018 - RNA, 19 nt, Homo sapiens
  misc_RNA (1)...(19): siRNA sense strand
ggaggacuagaucaucaau

SEQ ID NO: 396019 - RNA, 19 nt, Homo sapiens
  misc_RNA (1)...(19): siRNA sense strand
ccagaacuccuuguaaugc

SEQ ID NO: 396020 - RNA, 19 nt, Homo sapiens
  misc_RNA (1)...(19): siRNA sense strand
gugugggacuuacggaaca

SEQ ID NO: 396021 - RNA, 19 nt, Homo sapiens
  misc_RNA (1)...(19): siRNA sense strand
ucgcaucacuugccuucag

SEQ ID NO: 396022 - RNA, 19 nt, Homo sapiens
  misc_RNA (1)...(19): siRNA sense strand
gaggacuagaucaucaauu

SEQ ID NO: 396023 - RNA, 19 nt, Homo sapiens
  misc_RNA (1)...(19): siRNA sense strand
ggaguggaggacuagauca

SEQ ID NO: 396024 - RNA, 19 nt, Homo sapiens
  misc_RNA (1)...(19): siRNA sense strand
uuccaaacaagcaggguua

SEQ ID NO: 396025 - RNA, 19 nt, Homo sapiens
  misc_RNA (1)...(19): siRNA sense strand
uauuugggauccauuuaac

SEQ ID NO: 396026 - RNA, 19 nt, Homo sapiens
  misc_RNA (1)...(19): siRNA sense strand
aguaugccuucaaauguca

SEQ ID NO: 396027 - RNA, 19 nt, Homo sapiens
  misc_RNA (1)...(19): siRNA sense strand
cagaacuccuuguaaugcu

SEQ ID NO: 396028 - RNA, 19 nt, Homo sapiens
  misc_RNA (1)...(19): siRNA sense strand
uagcgucaucauauaugua

SEQ ID NO: 396029 - RNA, 19 nt, Homo sapiens
  misc_RNA (1)...(19): siRNA sense strand
ccaaacaagcaggguuaug

SEQ ID NO: 396030 - RNA, 19 nt, Homo sapiens
  misc_RNA (1)...(19): siRNA sense strand
ggaaguacaucucuaccaa

SEQ ID NO: 396031 - RNA, 19 nt, Homo sapiens
  misc_RNA (1)...(19): siRNA sense strand
ccaaggugcugcagaagua

SEQ ID NO: 396032 - RNA, 19 nt, Homo sapiens
  misc_RNA (1)...(19): siRNA sense strand
ccaaggagcuuuccaagac

SEQ ID NO: 396033 - RNA, 19 nt, Homo sapiens
  misc_RNA (1)...(19): siRNA sense strand
gcaaacugguggaguacuu

SEQ ID NO: 396034 - RNA, 19 nt, Homo sapiens
  misc_RNA (1)...(19): siRNA sense strand
gagcagguguuucuguaug

SEQ ID NO: 396035 - RNA, 19 nt, Homo sapiens
  misc_RNA (1)...(19): siRNA sense strand
gcaagguguggaaguauuu

SEQ ID NO: 396036 - RNA, 19 nt, Homo sapiens
  misc_RNA (1)...(19): siRNA sense strand
ccaagggccugcuggacaa

SEQ ID NO: 396037 - RNA, 19 nt, Homo sapiens
  misc_RNA (1)...(19): siRNA sense strand
ccaaggccaucccugagaa

SEQ ID NO: 396038 - RNA, 19 nt, Homo sapiens
  misc_RNA (1)...(19): siRNA sense strand
gaacaccacgcucaacauc

SEQ ID NO: 396039 - RNA, 19 nt, Homo sapiens
  misc_RNA (1)...(19): siRNA sense strand
gccgcaaacugguggagua

SEQ ID NO: 396040 - RNA, 19 nt, Homo sapiens
  misc_RNA (1)...(19): siRNA sense strand
ucacgcgagugcucuauga

SEQ ID NO: 396041 - RNA, 19 nt, Homo sapiens
  misc_RNA (1)...(19): siRNA sense strand
caacaaccaccaccucaug

SEQ ID NO: 396042 - RNA, 19 nt, Homo sapiens
  misc_RNA (1)...(19): siRNA sense strand
agagcaagguguggaagua

SEQ ID NO: 396043 - RNA, 19 nt, Homo sapiens
  misc_RNA (1)...(19): siRNA sense strand
acaccacgcucaacaucaa

SEQ ID NO: 396044 - RNA, 19 nt, Homo sapiens
  misc_RNA (1)...(19): siRNA sense strand
ggcgguuucuuuggcauua

SEQ ID NO: 396045 - RNA, 19 nt, Homo sapiens
  misc_RNA (1)...(19): siRNA sense strand
ccuaccaccuggagaagaa

SEQ ID NO: 396046 - RNA, 19 nt, Homo sapiens
  misc_RNA (1)...(19): siRNA sense strand
uggaggagcugagcaacuu

SEQ ID NO: 396047 - RNA, 19 nt, Homo sapiens
  misc_RNA (1)...(19): siRNA sense strand
ucaagcagguggccgagau

SEQ ID NO: 396048 - RNA, 19 nt, Homo sapiens
  misc_RNA (1)...(19): siRNA sense strand
ggacgucgcagugcacaug

SEQ ID NO: 396049 - RNA, 19 nt, Homo sapiens
  misc_RNA (1)...(19): siRNA sense strand
gaaggugcuuggccucaac

SEQ ID NO: 396050 - RNA, 19 nt, Homo sapiens
  misc_RNA (1)...(19): siRNA sense strand
acgagcagguguuucugua

SEQ ID NO: 396051 - RNA, 19 nt, Homo sapiens
  misc_RNA (1)...(19): siRNA sense strand
ucaaggugcugcugaagac

SEQ ID NO: 396052 - RNA, 19 nt, Homo sapiens
  misc_RNA (1)...(19): siRNA sense strand
ggaggagugagaaucagaa

SEQ ID NO: 396053 - RNA, 19 nt, Homo sapiens
  misc_RNA (1)...(19): siRNA sense strand
ugaagccgcugcugcacau

SEQ ID NO: 396054 - RNA, 19 nt, Homo sapiens
  misc_RNA (1)...(19): siRNA sense strand
uguacaugcucuaugagaa

SEQ ID NO: 396055 - RNA, 19 nt, Homo sapiens
  misc_RNA (1)...(19): siRNA sense strand
ggacgagcccaccuucaag

SEQ ID NO: 396056 - RNA, 19 nt, Homo sapiens
  misc_RNA (1)...(19): siRNA sense strand
gagcaacacggagcagaug

SEQ ID NO: 396057 - RNA, 19 nt, Homo sapiens
  misc_RNA (1)...(19): siRNA sense strand
guacaugcucuaugagaag

SEQ ID NO: 396058 - RNA, 19 nt, Homo sapiens
  misc_RNA (1)...(19): siRNA sense strand
gcgaguucgucaagagcaa

SEQ ID NO: 396059 - RNA, 19 nt, Homo sapiens
  misc_RNA (1)...(19): siRNA sense strand
ggccaucccugagaaguac

SEQ ID NO: 396060 - RNA, 19 nt, Homo sapiens
  misc_RNA (1)...(19): siRNA sense strand
ggcagcagguggagaaucg

SEQ ID NO: 396061 - RNA, 19 nt, Homo sapiens
  misc_RNA (1)...(19): siRNA sense strand
gagcaagguguggaaguau

SEQ ID NO: 396062 - RNA, 19 nt, Homo sapiens
  misc_RNA (1)...(19): siRNA sense strand
agaaucgcgugguggaaga

SEQ ID NO: 396063 - RNA, 19 nt, Homo sapiens
  misc_RNA (1)...(19): siRNA sense strand
gccaaggagcuuuccaaga

SEQ ID NO: 396064 - RNA, 19 nt, Homo sapiens
  misc_RNA (1)...(19): siRNA sense strand
cgcccgagaucgacauguu

SEQ ID NO: 396065 - RNA, 19 nt, Homo sapiens
  misc_RNA (1)...(19): siRNA sense strand
agucugccguggccaugua

SEQ ID NO: 396066 - RNA, 19 nt, Homo sapiens
  misc_RNA (1)...(19): siRNA sense strand
ccuccaaccuguccuacca

SEQ ID NO: 396067 - RNA, 19 nt, Homo sapiens
  misc_RNA (1)...(19): siRNA sense strand
acaacaugcuggccgagau

SEQ ID NO: 396068 - RNA, 19 nt, Homo sapiens
  misc_RNA (1)...(19): siRNA sense strand
cgaggaauucugcgaguuc

SEQ ID NO: 396069 - RNA, 19 nt, Homo sapiens
  misc_RNA (1)...(19): siRNA sense strand
gcaacaaccaccaccucau

SEQ ID NO: 396070 - RNA, 19 nt, Homo sapiens
  misc_RNA (1)...(19): siRNA sense strand
ccaagagcaagguguggaa

SEQ ID NO: 396071 - RNA, 19 nt, Homo sapiens
  misc_RNA (1)...(19): siRNA sense strand
caucagcgccaaggucuuc

SEQ ID NO: 396072 - RNA, 19 nt, Homo sapiens
  misc_RNA (1)...(19): siRNA sense strand
ugcccaaggugcugcagaa

SEQ ID NO: 396073 - RNA, 19 nt, Homo sapiens
  misc_RNA (1)...(19): siRNA sense strand
gcccgagaucgacauguuu

SEQ ID NO: 396074 - RNA, 19 nt, Homo sapiens
  misc_RNA (1)...(19): siRNA sense strand
ggucaucgccaaggagcuu

SEQ ID NO: 396075 - RNA, 19 nt, Homo sapiens
  misc_RNA (1)...(19): siRNA sense strand
gaagaaccaccccgaggaa

SEQ ID NO: 396076 - RNA, 19 nt, Homo sapiens
  misc_RNA (1)...(19): siRNA sense strand
agcaagguguggaaguauu

SEQ ID NO: 396077 - RNA, 19 nt, Homo sapiens
  misc_RNA (1)...(19): siRNA sense strand
agaagcagaagcagcagaa

SEQ ID NO: 396078 - RNA, 19 nt, Homo sapiens
  misc_RNA (1)...(19): siRNA sense strand
ucaaggagcagcaguucgu

SEQ ID NO: 396079 - RNA, 19 nt, Homo sapiens
  misc_RNA (1)...(19): siRNA sense strand
acaagaggcugcccuuccu

SEQ ID NO: 396080 - RNA, 19 nt, Homo sapiens
  misc_RNA (1)...(19): siRNA sense strand
caacaugcuggccgagauc

SEQ ID NO: 396081 - RNA, 19 nt, Homo sapiens
  misc_RNA (1)...(19): siRNA sense strand
gcagguguuucuguaugag

SEQ ID NO: 396082 - RNA, 19 nt, Homo sapiens
  misc_RNA (1)...(19): siRNA sense strand
ccgaggaauucugcgaguu

SEQ ID NO: 396083 - RNA, 19 nt, Homo sapiens
  misc_RNA (1)...(19): siRNA sense strand
gaggagcugagcaacuuca

SEQ ID NO: 396084 - RNA, 19 nt, Homo sapiens
  misc_RNA (1)...(19): siRNA sense strand
ccgccagcgucaucaacaa

SEQ ID NO: 396085 - RNA, 19 nt, Homo sapiens
  misc_RNA (1)...(19): siRNA sense strand
ggagaaucgcgugguggaa

SEQ ID NO: 396086 - RNA, 19 nt, Homo sapiens
  misc_RNA (1)...(19): siRNA sense strand
agaaggugcuuggccucaa

SEQ ID NO: 396087 - RNA, 19 nt, Homo sapiens
  misc_RNA (1)...(19): siRNA sense strand
uccgggaggugauccugaa

SEQ ID NO: 396088 - RNA, 19 nt, Homo sapiens
  misc_RNA (1)...(19): siRNA sense strand
ggaccaggagcagguguuc

SEQ ID NO: 396089 - RNA, 19 nt, Homo sapiens
  misc_RNA (1)...(19): siRNA sense strand
agcagguguuucuguauga

SEQ ID NO: 396090 - RNA, 19 nt, Homo sapiens
  misc_RNA (1)...(19): siRNA sense strand
ggacagcacuaucaucaga

SEQ ID NO: 396091 - RNA, 19 nt, Homo sapiens
  misc_RNA (1)...(19): siRNA sense strand
ccaguuaccuccccaaaua

SEQ ID NO: 396092 - RNA, 19 nt, Homo sapiens
  misc_RNA (1)...(19): siRNA sense strand
aaggugaucuugagaguga

SEQ ID NO: 396093 - RNA, 19 nt, Homo sapiens
  misc_RNA (1)...(19): siRNA sense strand
ucacaagacagaacuggua

SEQ ID NO: 396094 - RNA, 19 nt, Homo sapiens
  misc_RNA (1)...(19): siRNA sense strand
cuacuuaacacucaucauu

SEQ ID NO: 396095 - RNA, 19 nt, Homo sapiens
  misc_RNA (1)...(19): siRNA sense strand
caagacagaacugguauga

SEQ ID NO: 396096 - RNA, 19 nt, Homo sapiens
  misc_RNA (1)...(19): siRNA sense strand
gaaauacagagcggagauu

SEQ ID NO: 396097 - RNA, 19 nt, Homo sapiens
  misc_RNA (1)...(19): siRNA sense strand
ccaaugaaaggcccuauuc

SEQ ID NO: 396098 - RNA, 19 nt, Homo sapiens
  misc_RNA (1)...(19): siRNA sense strand
cugaagauccgaaacacua

SEQ ID NO: 396099 - RNA, 19 nt, Homo sapiens
  misc_RNA (1)...(19): siRNA sense strand
gcugcuggcucugguuauu

SEQ ID NO: 396100 - RNA, 19 nt, Homo sapiens
  misc_RNA (1)...(19): siRNA sense strand
gggcagagaaaccuaagug

SEQ ID NO: 396101 - RNA, 19 nt, Homo sapiens
  misc_RNA (1)...(19): siRNA sense strand
ucuccugggucaaguuauu

SEQ ID NO: 396102 - RNA, 19 nt, Homo sapiens
  misc_RNA (1)...(19): siRNA sense strand
ggucuccugggucaaguua

SEQ ID NO: 396103 - RNA, 19 nt, Homo sapiens
  misc_RNA (1)...(19): siRNA sense strand
uucuaaagcuggcauggaa

SEQ ID NO: 396104 - RNA, 19 nt, Homo sapiens
  misc_RNA (1)...(19): siRNA sense strand
ggacauacaggugcacucu

SEQ ID NO: 396105 - RNA, 19 nt, Homo sapiens
  misc_RNA (1)...(19): siRNA sense strand
gcacggcuacagaguaucu

SEQ ID NO: 396106 - RNA, 19 nt, Homo sapiens
  misc_RNA (1)...(19): siRNA sense strand
gaugggcagagaaaccuaa

SEQ ID NO: 396107 - RNA, 19 nt, Homo sapiens
  misc_RNA (1)...(19): siRNA sense strand
uugcacggcuacagaguau

SEQ ID NO: 396108 - RNA, 19 nt, Homo sapiens
  misc_RNA (1)...(19): siRNA sense strand
gaaacacuaccagcugcaa

SEQ ID NO: 396109 - RNA, 19 nt, Homo sapiens
  misc_RNA (1)...(19): siRNA sense strand
cugcacagcguaaagaaga

SEQ ID NO: 396110 - RNA, 19 nt, Homo sapiens
  misc_RNA (1)...(19): siRNA sense strand
gcacagcguaaagaagaga

SEQ ID NO: 396111 - RNA, 19 nt, Homo sapiens
  misc_RNA (1)...(19): siRNA sense strand
cuccgaagauguggacuug

SEQ ID NO: 396112 - RNA, 19 nt, Homo sapiens
  misc_RNA (1)...(19): siRNA sense strand
gcauuuagggcuagugacu

SEQ ID NO: 396113 - RNA, 19 nt, Homo sapiens
  misc_RNA (1)...(19): siRNA sense strand
ugacuccucacaagacaga

SEQ ID NO: 396114 - RNA, 19 nt, Homo sapiens
  misc_RNA (1)...(19): siRNA sense strand
cagaagagcugcacauuug

SEQ ID NO: 396115 - RNA, 19 nt, Homo sapiens
  misc_RNA (1)...(19): siRNA sense strand
gcagagagaucgaaaucca

SEQ ID NO: 396116 - RNA, 19 nt, Homo sapiens
  misc_RNA (1)...(19): siRNA sense strand
ccaaacugcucaggcauaa

SEQ ID NO: 396117 - RNA, 19 nt, Homo sapiens
  misc_RNA (1)...(19): siRNA sense strand
gccagaaggugauggagaa

SEQ ID NO: 396118 - RNA, 19 nt, Homo sapiens
  misc_RNA (1)...(19): siRNA sense strand
acaaggagcugcagaagag

SEQ ID NO: 396119 - RNA, 19 nt, Homo sapiens
  misc_RNA (1)...(19): siRNA sense strand
gaacagccacgaucaugga

SEQ ID NO: 396120 - RNA, 19 nt, Homo sapiens
  misc_RNA (1)...(19): siRNA sense strand
gcauuggagugcuuugcua

SEQ ID NO: 396121 - RNA, 19 nt, Homo sapiens
  misc_RNA (1)...(19): siRNA sense strand
guacuuggcucgggagaag

SEQ ID NO: 396122 - RNA, 19 nt, Homo sapiens
  misc_RNA (1)...(19): siRNA sense strand
ggaguuggcagaugcucua

SEQ ID NO: 396123 - RNA, 19 nt, Homo sapiens
  misc_RNA (1)...(19): siRNA sense strand
guuggcagaugcucuaaug

SEQ ID NO: 396124 - RNA, 19 nt, Homo sapiens
  misc_RNA (1)...(19): siRNA sense strand
cuucacaauugaugacuuu

SEQ ID NO: 396125 - RNA, 19 nt, Homo sapiens
  misc_RNA (1)...(19): siRNA sense strand
gaacccacccuuugagagu

SEQ ID NO: 396126 - RNA, 19 nt, Homo sapiens
  misc_RNA (1)...(19): siRNA sense strand
agaaggugauggagaauag

SEQ ID NO: 396127 - RNA, 19 nt, Homo sapiens
  misc_RNA (1)...(19): siRNA sense strand
guggaucuguggugcauug

SEQ ID NO: 396128 - RNA, 19 nt, Homo sapiens
  misc_RNA (1)...(19): siRNA sense strand
acgcggcacuucacaauug

SEQ ID NO: 396129 - RNA, 19 nt, Homo sapiens
  misc_RNA (1)...(19): siRNA sense strand
ugggacacccgacaucuua

SEQ ID NO: 396130 - RNA, 19 nt, Homo sapiens
  misc_RNA (1)...(19): siRNA sense strand
uggcagaugcucuaaugua

SEQ ID NO: 396131 - RNA, 19 nt, Homo sapiens
  misc_RNA (1)...(19): siRNA sense strand
ccucugcccuucaaucugu

SEQ ID NO: 396132 - RNA, 19 nt, Homo sapiens
  misc_RNA (1)...(19): siRNA sense strand
cagaugcucuaauguacug

SEQ ID NO: 396133 - RNA, 19 nt, Homo sapiens
  misc_RNA (1)...(19): siRNA sense strand
ucaagguccucuucaaguc

SEQ ID NO: 396134 - RNA, 19 nt, Homo sapiens
  misc_RNA (1)...(19): siRNA sense strand
ggcagaugcucuaauguac

SEQ ID NO: 396135 - RNA, 19 nt, Homo sapiens
  misc_RNA (1)...(19): siRNA sense strand
ccacgaucauggaggaguu

SEQ ID NO: 396136 - RNA, 19 nt, Homo sapiens
  misc_RNA (1)...(19): siRNA sense strand
caagggagagcugaagauu

SEQ ID NO: 396137 - RNA, 19 nt, Homo sapiens
  misc_RNA (1)...(19): siRNA sense strand
gcgcagagagaucgaaauc

SEQ ID NO: 396138 - RNA, 19 nt, Homo sapiens
  misc_RNA (1)...(19): siRNA sense strand
gcggggagcucuacaagga

SEQ ID NO: 396139 - RNA, 19 nt, Homo sapiens
  misc_RNA (1)...(19): siRNA sense strand
ucaagucccagauagagaa

SEQ ID NO: 396140 - RNA, 19 nt, Homo sapiens
  misc_RNA (1)...(19): siRNA sense strand
uaacgcggcacuucacaau

SEQ ID NO: 396141 - RNA, 19 nt, Homo sapiens
  misc_RNA (1)...(19): siRNA sense strand
agggagagcugaagauugc

SEQ ID NO: 396142 - RNA, 19 nt, Homo sapiens
  misc_RNA (1)...(19): siRNA sense strand
ucacaauugaugacuuuga

SEQ ID NO: 396143 - RNA, 19 nt, Homo sapiens
  misc_RNA (1)...(19): siRNA sense strand
caucugcacuuguccucau

SEQ ID NO: 396144 - RNA, 19 nt, Homo sapiens
  misc_RNA (1)...(19): siRNA sense strand
guacugccaugggaagaag

SEQ ID NO: 396145 - RNA, 19 nt, Homo sapiens
  misc_RNA (1)...(19): siRNA sense strand
cagaaggugauggagaaua

SEQ ID NO: 396146 - RNA, 19 nt, Homo sapiens
  misc_RNA (1)...(19): siRNA sense strand
gcgaacagccacgaucaug

SEQ ID NO: 396147 - RNA, 19 nt, Homo sapiens
  misc_RNA (1)...(19): siRNA sense strand
uuggagugcuuugcuauga

SEQ ID NO: 396148 - RNA, 19 nt, Homo sapiens
  misc_RNA (1)...(19): siRNA sense strand
cacaauugaugacuuugag

SEQ ID NO: 396149 - RNA, 19 nt, Homo sapiens
  misc_RNA (1)...(19): siRNA sense strand
caucacacaacgagaccua

SEQ ID NO: 396150 - RNA, 19 nt, Homo sapiens
  misc_RNA (1)...(19): siRNA sense strand
cugcgucucuacaacuauu

SEQ ID NO: 396151 - RNA, 19 nt, Homo sapiens
  misc_RNA (1)...(19): siRNA sense strand
caucagcugcgcagagaga

SEQ ID NO: 396152 - RNA, 19 nt, Homo sapiens
  misc_RNA (1)...(19): siRNA sense strand
gcucaagguccucuucaag

SEQ ID NO: 396153 - RNA, 19 nt, Homo sapiens
  misc_RNA (1)...(19): siRNA sense strand
ccucuucaagucccagaua

SEQ ID NO: 396154 - RNA, 19 nt, Homo sapiens
  misc_RNA (1)...(19): siRNA sense strand
caauugaugacuuugagau

SEQ ID NO: 396155 - RNA, 19 nt, Homo sapiens
  misc_RNA (1)...(19): siRNA sense strand
gggaacccacccuuugaga

SEQ ID NO: 396156 - RNA, 19 nt, Homo sapiens
  misc_RNA (1)...(19): siRNA sense strand
auugaugacuuugagauug

SEQ ID NO: 396157 - RNA, 19 nt, Homo sapiens
  misc_RNA (1)...(19): siRNA sense strand
gaagagcugcacauuugac

SEQ ID NO: 396158 - RNA, 19 nt, Homo sapiens
  misc_RNA (1)...(19): siRNA sense strand
ccaacauccugcgucucua

SEQ ID NO: 396159 - RNA, 19 nt, Homo sapiens
  misc_RNA (1)...(19): siRNA sense strand
acaaugagaagguggaucu

SEQ ID NO: 396160 - RNA, 19 nt, Homo sapiens
  misc_RNA (1)...(19): siRNA sense strand
caacauccugcgucucuac

SEQ ID NO: 396161 - RNA, 19 nt, Homo sapiens
  misc_RNA (1)...(19): siRNA sense strand
caucuuaacgcggcacuuc

SEQ ID NO: 396162 - RNA, 19 nt, Homo sapiens
  misc_RNA (1)...(19): siRNA sense strand
gcacuucacaauugaugac

SEQ ID NO: 396163 - RNA, 19 nt, Homo sapiens
  misc_RNA (1)...(19): siRNA sense strand
cagcgaacagccacgauca

SEQ ID NO: 396164 - RNA, 19 nt, Homo sapiens
  misc_RNA (1)...(19): siRNA sense strand
gaaggagggcguggagcau

SEQ ID NO: 396165 - RNA, 19 nt, Homo sapiens
  misc_RNA (1)...(19): siRNA sense strand
uccaaacugcucaggcaua

SEQ ID NO: 396166 - RNA, 19 nt, Homo sapiens
  misc_RNA (1)...(19): siRNA sense strand
gaggaggaagacaaugugu

SEQ ID NO: 396167 - RNA, 19 nt, Homo sapiens
  misc_RNA (1)...(19): siRNA sense strand
gggacacccgacaucuuaa

SEQ ID NO: 396168 - RNA, 19 nt, Homo sapiens
  misc_RNA (1)...(19): siRNA sense strand
ccagcgaguccuccggaaa

SEQ ID NO: 396169 - RNA, 19 nt, Homo sapiens
  misc_RNA (1)...(19): siRNA sense strand
ggacacccgacaucuuaac

SEQ ID NO: 396170 - RNA, 19 nt, Homo sapiens
  misc_RNA (1)...(19): siRNA sense strand
gcagaugcucuaauguacu

SEQ ID NO: 396171 - RNA, 19 nt, Homo sapiens
  misc_RNA (1)...(19): siRNA sense strand
gcaaagagauggagagaga

SEQ ID NO: 396172 - RNA, 19 nt, Homo sapiens
  misc_RNA (1)...(19): siRNA sense strand
ggacaaaggccuucaguuc

SEQ ID NO: 396173 - RNA, 19 nt, Homo sapiens
  misc_RNA (1)...(19): siRNA sense strand
ggaaagaaaggaagaaaga

SEQ ID NO: 396174 - RNA, 19 nt, Homo sapiens
  misc_RNA (1)...(19): siRNA sense strand
gaacaaggagucacagcua

SEQ ID NO: 396175 - RNA, 19 nt, Homo sapiens
  misc_RNA (1)...(19): siRNA sense strand
gaagugggaguuacauuaa

SEQ ID NO: 396176 - RNA, 19 nt, Homo sapiens
  misc_RNA (1)...(19): siRNA sense strand
gagauucccugcaggagaa

SEQ ID NO: 396177 - RNA, 19 nt, Homo sapiens
  misc_RNA (1)...(19): siRNA sense strand
gcagcugucucauauacaa

SEQ ID NO: 396178 - RNA, 19 nt, Homo sapiens
  misc_RNA (1)...(19): siRNA sense strand
ggaggaaauucucgguaaa

SEQ ID NO: 396179 - RNA, 19 nt, Homo sapiens
  misc_RNA (1)...(19): siRNA sense strand
ggagaucaaugggcaauuc

SEQ ID NO: 396180 - RNA, 19 nt, Homo sapiens
  misc_RNA (1)...(19): siRNA sense strand
gacaucaccuccaccauca

SEQ ID NO: 396181 - RNA, 19 nt, Homo sapiens
  misc_RNA (1)...(19): siRNA sense strand
ucagugaaguugaaucuca

SEQ ID NO: 396182 - RNA, 19 nt, Homo sapiens
  misc_RNA (1)...(19): siRNA sense strand
cggaggaaauucucgguaa

SEQ ID NO: 396183 - RNA, 19 nt, Homo sapiens
  misc_RNA (1)...(19): siRNA sense strand
gaaggcuggugcaaagaga

SEQ ID NO: 396184 - RNA, 19 nt, Homo sapiens
  misc_RNA (1)...(19): siRNA sense strand
gcgaguccgucuucaguga

SEQ ID NO: 396185 - RNA, 19 nt, Homo sapiens
  misc_RNA (1)...(19): siRNA sense strand
agaagugggaguuacauua

SEQ ID NO: 396186 - RNA, 19 nt, Homo sapiens
  misc_RNA (1)...(19): siRNA sense strand
gaaagaaaggaagaaagaa

SEQ ID NO: 396187 - RNA, 19 nt, Homo sapiens
  misc_RNA (1)...(19): siRNA sense strand
uggcaaagaugaggagauu

SEQ ID NO: 396188 - RNA, 19 nt, Homo sapiens
  misc_RNA (1)...(19): siRNA sense strand
ggacagcgacagcaccuau

SEQ ID NO: 396189 - RNA, 19 nt, Homo sapiens
  misc_RNA (1)...(19): siRNA sense strand
gaaugagaagugggaguua

SEQ ID NO: 396190 - RNA, 19 nt, Homo sapiens
  misc_RNA (1)...(19): siRNA sense strand
gaaauucucgguaaaauca

SEQ ID NO: 396191 - RNA, 19 nt, Homo sapiens
  misc_RNA (1)...(19): siRNA sense strand
gaaguuucccaucacaaga

SEQ ID NO: 396192 - RNA, 19 nt, Homo sapiens
  misc_RNA (1)...(19): siRNA sense strand
gcaagaggagcaagagcaa

SEQ ID NO: 396193 - RNA, 19 nt, Homo sapiens
  misc_RNA (1)...(19): siRNA sense strand
ggaaacggccacagauucu

SEQ ID NO: 396194 - RNA, 19 nt, Homo sapiens
  misc_RNA (1)...(19): siRNA sense strand
gcgcagagcagcaccgaau

SEQ ID NO: 396195 - RNA, 19 nt, Homo sapiens
  misc_RNA (1)...(19): siRNA sense strand
aagcgcagcuccuggucua

SEQ ID NO: 396196 - RNA, 19 nt, Homo sapiens
  misc_RNA (1)...(19): siRNA sense strand
gaaaggucccgccuccaau

SEQ ID NO: 396197 - RNA, 19 nt, Homo sapiens
  misc_RNA (1)...(19): siRNA sense strand
cccaagacaucaccaaagu

SEQ ID NO: 396198 - RNA, 19 nt, Homo sapiens
  misc_RNA (1)...(19): siRNA sense strand
gcaaguggaagaugagaag

SEQ ID NO: 396199 - RNA, 19 nt, Homo sapiens
  misc_RNA (1)...(19): siRNA sense strand
aaaggucccgccuccaaua

SEQ ID NO: 396200 - RNA, 19 nt, Homo sapiens
  misc_RNA (1)...(19): siRNA sense strand
cgacagacaacgccaggaa

SEQ ID NO: 396201 - RNA, 19 nt, Homo sapiens
  misc_RNA (1)...(19): siRNA sense strand
gcaacaacgacgucaagug

SEQ ID NO: 396202 - RNA, 19 nt, Homo sapiens
  misc_RNA (1)...(19): siRNA sense strand
ccagaaauuccagcaguuu

SEQ ID NO: 396203 - RNA, 19 nt, Homo sapiens
  misc_RNA (1)...(19): siRNA sense strand
gggugcaaguggaagauga

SEQ ID NO: 396204 - RNA, 19 nt, Homo sapiens
  misc_RNA (1)...(19): siRNA sense strand
cagagccgcugcugaaguc

SEQ ID NO: 396205 - RNA, 19 nt, Homo sapiens
  misc_RNA (1)...(19): siRNA sense strand
ccaagaugacgaauguauu

SEQ ID NO: 396206 - RNA, 19 nt, Homo sapiens
  misc_RNA (1)...(19): siRNA sense strand
ucccagagcaucagccaua

SEQ ID NO: 396207 - RNA, 19 nt, Homo sapiens
  misc_RNA (1)...(19): siRNA sense strand
gagaagugggaguuacauu

SEQ ID NO: 396208 - RNA, 19 nt, Homo sapiens
  misc_RNA (1)...(19): siRNA sense strand
ggaccugcccgacagacaa

SEQ ID NO: 396209 - RNA, 19 nt, Homo sapiens
  misc_RNA (1)...(19): siRNA sense strand
agagagaggcggaggagaa

SEQ ID NO: 396210 - RNA, 19 nt, Homo sapiens
  misc_RNA (1)...(19): siRNA sense strand
gagcaacaacgacgucaag

SEQ ID NO: 396211 - RNA, 19 nt, Homo sapiens
  misc_RNA (1)...(19): siRNA sense strand
gauggaaggcuggugcaaa

SEQ ID NO: 396212 - RNA, 19 nt, Homo sapiens
  misc_RNA (1)...(19): siRNA sense strand
gcagggauggcucgugguu

SEQ ID NO: 396213 - RNA, 19 nt, Homo sapiens
  misc_RNA (1)...(19): siRNA sense strand
uaccagagccgcugcugaa

SEQ ID NO: 396214 - RNA, 19 nt, Homo sapiens
  misc_RNA (1)...(19): siRNA sense strand
gcaaagaugaggagauucc

SEQ ID NO: 396215 - RNA, 19 nt, Homo sapiens
  misc_RNA (1)...(19): siRNA sense strand
cagcuaccuucgagccauu

SEQ ID NO: 396216 - RNA, 19 nt, Homo sapiens
  misc_RNA (1)...(19): siRNA sense strand
cucaacgacuggaagauga

SEQ ID NO: 396217 - RNA, 19 nt, Homo sapiens
  misc_RNA (1)...(19): siRNA sense strand
gcucaacgacuggaagaug

SEQ ID NO: 396218 - RNA, 19 nt, Homo sapiens
  misc_RNA (1)...(19): siRNA sense strand
ccaucgggauucaggauuc

SEQ ID NO: 396219 - RNA, 19 nt, Homo sapiens
  misc_RNA (1)...(19): siRNA sense strand
gcugucucauauacaaauu

SEQ ID NO: 396220 - RNA, 19 nt, Homo sapiens
  misc_RNA (1)...(19): siRNA sense strand
gaaaggaagaaagaaaggu

SEQ ID NO: 396221 - RNA, 19 nt, Homo sapiens
  misc_RNA (1)...(19): siRNA sense strand
gcaacaaggccaugaaccu

SEQ ID NO: 396222 - RNA, 19 nt, Homo sapiens
  misc_RNA (1)...(19): siRNA sense strand
gugcccagcuucucauguc

SEQ ID NO: 396223 - RNA, 19 nt, Homo sapiens
  misc_RNA (1)...(19): siRNA sense strand
gaacuacaacuccccgaaa

SEQ ID NO: 396224 - RNA, 19 nt, Homo sapiens
  misc_RNA (1)...(19): siRNA sense strand
agaaaggucccgccuccaa

SEQ ID NO: 396225 - RNA, 19 nt, Homo sapiens
  misc_RNA (1)...(19): siRNA sense strand
caucagccauacccaaggu

SEQ ID NO: 396226 - RNA, 19 nt, Homo sapiens
  misc_RNA (1)...(19): siRNA sense strand
aagugggaguuacauuaaa

SEQ ID NO: 396227 - RNA, 19 nt, Homo sapiens
  misc_RNA (1)...(19): siRNA sense strand
gagcgaggcggagaucaau

SEQ ID NO: 396228 - RNA, 19 nt, Homo sapiens
  misc_RNA (1)...(19): siRNA sense strand
cucccaagaugacgaaugu

SEQ ID NO: 396229 - RNA, 19 nt, Homo sapiens
  misc_RNA (1)...(19): siRNA sense strand
cccagaaauuccagcaguu

SEQ ID NO: 396230 - RNA, 19 nt, Homo sapiens
  misc_RNA (1)...(19): siRNA sense strand
gagaagcgacacggacguu

SEQ ID NO: 396231 - RNA, 19 nt, Homo sapiens
  misc_RNA (1)...(19): siRNA sense strand
aaggaggccuaccgcaaga

SEQ ID NO: 396232 - RNA, 19 nt, Homo sapiens
  misc_RNA (1)...(19): siRNA sense strand
guagagacugggaggaugu

SEQ ID NO: 396233 - RNA, 19 nt, Homo sapiens
  misc_RNA (1)...(19): siRNA sense strand
cggacagcaucgagaucua

SEQ ID NO: 396234 - RNA, 19 nt, Homo sapiens
  misc_RNA (1)...(19): siRNA sense strand
ggaaggcuggugcaaagag

SEQ ID NO: 396235 - RNA, 19 nt, Homo sapiens
  misc_RNA (1)...(19): siRNA sense strand
gagaggcggaggagaacga

SEQ ID NO: 396236 - RNA, 19 nt, Homo sapiens
  misc_RNA (1)...(19): siRNA sense strand
ugcugcagcucuccauuga

SEQ ID NO: 396237 - RNA, 19 nt, Homo sapiens
  misc_RNA (1)...(19): siRNA sense strand
uggaaacggccacagauuc

SEQ ID NO: 396238 - RNA, 19 nt, Homo sapiens
  misc_RNA (1)...(19): siRNA sense strand
ucucaugucccagaaauuc

SEQ ID NO: 396239 - RNA, 19 nt, Homo sapiens
  misc_RNA (1)...(19): siRNA sense strand
caggggcucuucagcuaua

SEQ ID NO: 396240 - RNA, 19 nt, Homo sapiens
  misc_RNA (1)...(19): siRNA sense strand
gaagcgacacggacguuuu

SEQ ID NO: 396241 - RNA, 19 nt, Homo sapiens
  misc_RNA (1)...(19): siRNA sense strand
ggacgucagcaugaaguuc

SEQ ID NO: 396242 - RNA, 19 nt, Homo sapiens
  misc_RNA (1)...(19): siRNA sense strand
gggagugcccagcuucuca

SEQ ID NO: 396243 - RNA, 19 nt, Homo sapiens
  misc_RNA (1)...(19): siRNA sense strand
cccaagaugacgaauguau

SEQ ID NO: 396244 - RNA, 19 nt, Homo sapiens
  misc_RNA (1)...(19): siRNA sense strand
ggacagcaucgagaucuac

SEQ ID NO: 396245 - RNA, 19 nt, Homo sapiens
  misc_RNA (1)...(19): siRNA sense strand
agaaauuccagcaguuuua

SEQ ID NO: 396246 - RNA, 19 nt, Homo sapiens
  misc_RNA (1)...(19): siRNA sense strand
cggacagccuggacagcaa

SEQ ID NO: 396247 - RNA, 19 nt, Homo sapiens
  misc_RNA (1)...(19): siRNA sense strand
ggaaccagagcuacaugag

SEQ ID NO: 396248 - RNA, 19 nt, Homo sapiens
  misc_RNA (1)...(19): siRNA sense strand
ucaagugcucggccuguga

SEQ ID NO: 396249 - RNA, 19 nt, Homo sapiens
  misc_RNA (1)...(19): siRNA sense strand
agaaugagaagugggaguu

SEQ ID NO: 396250 - RNA, 19 nt, Homo sapiens
  misc_RNA (1)...(19): siRNA sense strand
gcgaggcggagaucaaugg

SEQ ID NO: 396251 - RNA, 19 nt, Homo sapiens
  misc_RNA (1)...(19): siRNA sense strand
guacagcgcggugagaacu

SEQ ID NO: 396252 - RNA, 19 nt, Homo sapiens
  misc_RNA (1)...(19): siRNA sense strand
gcacuacagcucgcacuac

SEQ ID NO: 396253 - RNA, 19 nt, Homo sapiens
  misc_RNA (1)...(19): siRNA sense strand
gacccagaccuaccugcaa

SEQ ID NO: 396254 - RNA, 19 nt, Homo sapiens
  misc_RNA (1)...(19): siRNA sense strand
aagaaaggaagaaagaaag

SEQ ID NO: 396255 - RNA, 19 nt, Homo sapiens
  misc_RNA (1)...(19): siRNA sense strand
gaggacgucagcaugaagu

SEQ ID NO: 396256 - RNA, 19 nt, Homo sapiens
  misc_RNA (1)...(19): siRNA sense strand
auggaaggcuggugcaaag

SEQ ID NO: 396257 - RNA, 19 nt, Homo sapiens
  misc_RNA (1)...(19): siRNA sense strand
gaggacaaaggccuucagu

SEQ ID NO: 396258 - RNA, 19 nt, Homo sapiens
  misc_RNA (1)...(19): siRNA sense strand
gcuccuccaucgggauuca

SEQ ID NO: 396259 - RNA, 19 nt, Homo sapiens
  misc_RNA (1)...(19): siRNA sense strand
gaaccucgcgcuggaaacg

SEQ ID NO: 396260 - RNA, 19 nt, Homo sapiens
  misc_RNA (1)...(19): siRNA sense strand
ggucccgccuccaauacca

SEQ ID NO: 396261 - RNA, 19 nt, Homo sapiens
  misc_RNA (1)...(19): siRNA sense strand
ggagacaucccauucuauu

SEQ ID NO: 396262 - RNA, 19 nt, Homo sapiens
  misc_RNA (1)...(19): siRNA sense strand
gaucucuucugggacauaa

SEQ ID NO: 396263 - RNA, 19 nt, Homo sapiens
  misc_RNA (1)...(19): siRNA sense strand
gcgagaagccacacaagug

SEQ ID NO: 396264 - RNA, 19 nt, Homo sapiens
  misc_RNA (1)...(19): siRNA sense strand
ccacacaagugcccugagu

SEQ ID NO: 396265 - RNA, 19 nt, Homo sapiens
  misc_RNA (1)...(19): siRNA sense strand
ccauggaccuguggcauug

SEQ ID NO: 396266 - RNA, 19 nt, Homo sapiens
  misc_RNA (1)...(19): siRNA sense strand
gagacaucccauucuauuu

SEQ ID NO: 396267 - RNA, 19 nt, Homo sapiens
  misc_RNA (1)...(19): siRNA sense strand
cuacagaagcagccaguga

SEQ ID NO: 396268 - RNA, 19 nt, Homo sapiens
  misc_RNA (1)...(19): siRNA sense strand
agacaucccauucuauuuc

SEQ ID NO: 396269 - RNA, 19 nt, Homo sapiens
  misc_RNA (1)...(19): siRNA sense strand
acaggaaucugcccagcau

SEQ ID NO: 396270 - RNA, 19 nt, Homo sapiens
  misc_RNA (1)...(19): siRNA sense strand
gacaucccauucuauuucu

SEQ ID NO: 396271 - RNA, 19 nt, Homo sapiens
  misc_RNA (1)...(19): siRNA sense strand
uggaggaccuacagaagca

SEQ ID NO: 396272 - RNA, 19 nt, Homo sapiens
  misc_RNA (1)...(19): siRNA sense strand
ggacauaaagcgggagaac

SEQ ID NO: 396273 - RNA, 19 nt, Homo sapiens
  misc_RNA (1)...(19): siRNA sense strand
gcuucucgcugcgcuccua

SEQ ID NO: 396274 - RNA, 19 nt, Homo sapiens
  misc_RNA (1)...(19): siRNA sense strand
uacagaagcagccagugaa

SEQ ID NO: 396275 - RNA, 19 nt, Homo sapiens
  misc_RNA (1)...(19): siRNA sense strand
acagaagcagccagugaaa

SEQ ID NO: 396276 - RNA, 19 nt, Homo sapiens
  misc_RNA (1)...(19): siRNA sense strand
gagccugcacgccaagaug

SEQ ID NO: 396277 - RNA, 19 nt, Homo sapiens
  misc_RNA (1)...(19): siRNA sense strand
gagagugcgacaagagcuu

SEQ ID NO: 396278 - RNA, 19 nt, Homo sapiens
  misc_RNA (1)...(19): siRNA sense strand
gcauacacacgggcgagaa

SEQ ID NO: 396279 - RNA, 19 nt, Homo sapiens
  misc_RNA (1)...(19): siRNA sense strand
cgacggacaccugcuuugu

SEQ ID NO: 396280 - RNA, 19 nt, Homo sapiens
  misc_RNA (1)...(19): siRNA sense strand
caggagcagcacagccaua

SEQ ID NO: 396281 - RNA, 19 nt, Homo sapiens
  misc_RNA (1)...(19): siRNA sense strand
acauaaagcgggagaacuc

SEQ ID NO: 396282 - RNA, 19 nt, Homo sapiens
  misc_RNA (1)...(19): siRNA sense strand
gacgacggacaccugcuuu

SEQ ID NO: 396283 - RNA, 19 nt, Homo sapiens
  misc_RNA (1)...(19): siRNA sense strand
cagccuccugcucuucuua

SEQ ID NO: 396284 - RNA, 19 nt, Homo sapiens
  misc_RNA (1)...(19): siRNA sense strand
gggcucaaaggccaaagug

SEQ ID NO: 396285 - RNA, 19 nt, Homo sapiens
  misc_RNA (1)...(19): siRNA sense strand
ucaaaggccaaagugagaa

SEQ ID NO: 396286 - RNA, 19 nt, Homo sapiens
  misc_RNA (1)...(19): siRNA sense strand
ggacaaggcuuucuccuau

SEQ ID NO: 396287 - RNA, 19 nt, Homo sapiens
  misc_RNA (1)...(19): siRNA sense strand
gaaaguccgugaagucugu

SEQ ID NO: 396288 - RNA, 19 nt, Homo sapiens
  misc_RNA (1)...(19): siRNA sense strand
caaagccacuguagagaaa

SEQ ID NO: 396289 - RNA, 19 nt, Homo sapiens
  misc_RNA (1)...(19): siRNA sense strand
cagaagaacucgccuuuca

SEQ ID NO: 396290 - RNA, 19 nt, Homo sapiens
  misc_RNA (1)...(19): siRNA sense strand
gaagaacucgccuuucaaa

SEQ ID NO: 396291 - RNA, 19 nt, Homo sapiens
  misc_RNA (1)...(19): siRNA sense strand
gcacacagaucaguucauc

SEQ ID NO: 396292 - RNA, 19 nt, Homo sapiens
  misc_RNA (1)...(19): siRNA sense strand
gacaaggcuuucuccuaua

SEQ ID NO: 396293 - RNA, 19 nt, Homo sapiens
  misc_RNA (1)...(19): siRNA sense strand
gcacugacuuccaggugaa

SEQ ID NO: 396294 - RNA, 19 nt, Homo sapiens
  misc_RNA (1)...(19): siRNA sense strand
gcaaagccacuguagagaa

SEQ ID NO: 396295 - RNA, 19 nt, Homo sapiens
  misc_RNA (1)...(19): siRNA sense strand
ccucacagaugguggcaaa

SEQ ID NO: 396296 - RNA, 19 nt, Homo sapiens
  misc_RNA (1)...(19): siRNA sense strand
caaaagacauucgagauug

SEQ ID NO: 396297 - RNA, 19 nt, Homo sapiens
  misc_RNA (1)...(19): siRNA sense strand
acaaggcuuucuccuauau

SEQ ID NO: 396298 - RNA, 19 nt, Homo sapiens
  misc_RNA (1)...(19): siRNA sense strand
gaaugcacgugugugaaga

SEQ ID NO: 396299 - RNA, 19 nt, Homo sapiens
  misc_RNA (1)...(19): siRNA sense strand
gugaagaugcggugaagaa

SEQ ID NO: 396300 - RNA, 19 nt, Homo sapiens
  misc_RNA (1)...(19): siRNA sense strand
cauucgagauugaacugua

SEQ ID NO: 396301 - RNA, 19 nt, Homo sapiens
  misc_RNA (1)...(19): siRNA sense strand
gcaaaagacauucgagauu

SEQ ID NO: 396302 - RNA, 19 nt, Homo sapiens
  misc_RNA (1)...(19): siRNA sense strand
ggaaugcacgugugugaag

SEQ ID NO: 396303 - RNA, 19 nt, Homo sapiens
  misc_RNA (1)...(19): siRNA sense strand
gcacucagccagaagaacu

SEQ ID NO: 396304 - RNA, 19 nt, Homo sapiens
  misc_RNA (1)...(19): siRNA sense strand
ugaaggcgaugggccgaaa

SEQ ID NO: 396305 - RNA, 19 nt, Homo sapiens
  misc_RNA (1)...(19): siRNA sense strand
gccagaagaacucgccuuu

SEQ ID NO: 396306 - RNA, 19 nt, Homo sapiens
  misc_RNA (1)...(19): siRNA sense strand
gaaggcaaagccacuguag

SEQ ID NO: 396307 - RNA, 19 nt, Homo sapiens
  misc_RNA (1)...(19): siRNA sense strand
ggaggaagccagccuacgu

SEQ ID NO: 396308 - RNA, 19 nt, Homo sapiens
  misc_RNA (1)...(19): siRNA sense strand
gcagcuucccggucaggua

SEQ ID NO: 396309 - RNA, 19 nt, Homo sapiens
  misc_RNA (1)...(19): siRNA sense strand
gggcaccaugaacaaguua

SEQ ID NO: 396310 - RNA, 19 nt, Homo sapiens
  misc_RNA (1)...(19): siRNA sense strand
gcacaagcggacaccuuca

SEQ ID NO: 396311 - RNA, 19 nt, Homo sapiens
  misc_RNA (1)...(19): siRNA sense strand
aaaagacauucgagauuga

SEQ ID NO: 396312 - RNA, 19 nt, Homo sapiens
  misc_RNA (1)...(19): siRNA sense strand
gccaccaccugccacaaca

SEQ ID NO: 396313 - RNA, 19 nt, Homo sapiens
  misc_RNA (1)...(19): siRNA sense strand
gggcacaagcggacaccuu

SEQ ID NO: 396314 - RNA, 19 nt, Homo sapiens
  misc_RNA (1)...(19): siRNA sense strand
uggacaaggcuuucuccua

SEQ ID NO: 396315 - RNA, 19 nt, Homo sapiens
  misc_RNA (1)...(19): siRNA sense strand
gcaaccuggacaaggcuuu

SEQ ID NO: 396316 - RNA, 19 nt, Homo sapiens
  misc_RNA (1)...(19): siRNA sense strand
gaaaacagcgacgggagaa

SEQ ID NO: 396317 - RNA, 19 nt, Homo sapiens
  misc_RNA (1)...(19): siRNA sense strand
ggccgaaaguccgugaagu

SEQ ID NO: 396318 - RNA, 19 nt, Homo sapiens
  misc_RNA (1)...(19): siRNA sense strand
aagaugcggugaagaagcu

SEQ ID NO: 396319 - RNA, 19 nt, Homo sapiens
  misc_RNA (1)...(19): siRNA sense strand
cgggcaccaugaacaaguu

SEQ ID NO: 396320 - RNA, 19 nt, Homo sapiens
  misc_RNA (1)...(19): siRNA sense strand
ggaagggcacgugcagcuu

SEQ ID NO: 396321 - RNA, 19 nt, Homo sapiens
  misc_RNA (1)...(19): siRNA sense strand
gcaucacacccucacagau

SEQ ID NO: 396322 - RNA, 19 nt, Homo sapiens
  misc_RNA (1)...(19): siRNA sense strand
gcugugggcugugcuuuug

SEQ ID NO: 396323 - RNA, 19 nt, Homo sapiens
  misc_RNA (1)...(19): siRNA sense strand
aggcaaagccacuguagag

SEQ ID NO: 396324 - RNA, 19 nt, Homo sapiens
  misc_RNA (1)...(19): siRNA sense strand
gccgaaaguccgugaaguc

SEQ ID NO: 396325 - RNA, 19 nt, Homo sapiens
  misc_RNA (1)...(19): siRNA sense strand
agaagaacucgccuuucaa

SEQ ID NO: 396326 - RNA, 19 nt, Homo sapiens
  misc_RNA (1)...(19): siRNA sense strand
ucccagcacucagccagaa

SEQ ID NO: 396327 - RNA, 19 nt, Homo sapiens
  misc_RNA (1)...(19): siRNA sense strand
ccaaagaacuaauagguuu

SEQ ID NO: 396328 - RNA, 19 nt, Homo sapiens
  misc_RNA (1)...(19): siRNA sense strand
gagcuuugauuccaacuua

SEQ ID NO: 396329 - RNA, 19 nt, Homo sapiens
  misc_RNA (1)...(19): siRNA sense strand
gaaccuagaccauguuaaa

SEQ ID NO: 396330 - RNA, 19 nt, Homo sapiens
  misc_RNA (1)...(19): siRNA sense strand
gcacugacguuagccauaa

SEQ ID NO: 396331 - RNA, 19 nt, Homo sapiens
  misc_RNA (1)...(19): siRNA sense strand
ccaaaugacccaauugaua

SEQ ID NO: 396332 - RNA, 19 nt, Homo sapiens
  misc_RNA (1)...(19): siRNA sense strand
gaacaguuauugauguaga

SEQ ID NO: 396333 - RNA, 19 nt, Homo sapiens
  misc_RNA (1)...(19): siRNA sense strand
aacaagaggugcaccauua

SEQ ID NO: 396334 - RNA, 19 nt, Homo sapiens
  misc_RNA (1)...(19): siRNA sense strand
ccugagcucugcuaucuua

SEQ ID NO: 396335 - RNA, 19 nt, Homo sapiens
  misc_RNA (1)...(19): siRNA sense strand
uuacaggucuaacugauaa

SEQ ID NO: 396336 - RNA, 19 nt, Homo sapiens
  misc_RNA (1)...(19): siRNA sense strand
cuagauaacuggcuguuga

SEQ ID NO: 396337 - RNA, 19 nt, Homo sapiens
  misc_RNA (1)...(19): siRNA sense strand
caagagcaccuuuaagaaa

SEQ ID NO: 396338 - RNA, 19 nt, Homo sapiens
  misc_RNA (1)...(19): siRNA sense strand
gcgaagaaauuaugaagca

SEQ ID NO: 396339 - RNA, 19 nt, Homo sapiens
  misc_RNA (1)...(19): siRNA sense strand
gagaggaggucgucguaga

SEQ ID NO: 396340 - RNA, 19 nt, Homo sapiens
  misc_RNA (1)...(19): siRNA sense strand
caaaugacccaauugauau

SEQ ID NO: 396341 - RNA, 19 nt, Homo sapiens
  misc_RNA (1)...(19): siRNA sense strand
gaggauaacgaucacuuua

SEQ ID NO: 396342 - RNA, 19 nt, Homo sapiens
  misc_RNA (1)...(19): siRNA sense strand
gaacaaguuuccaaagaac

SEQ ID NO: 396343 - RNA, 19 nt, Homo sapiens
  misc_RNA (1)...(19): siRNA sense strand
gaagugggacgacucauug

SEQ ID NO: 396344 - RNA, 19 nt, Homo sapiens
  misc_RNA (1)...(19): siRNA sense strand
gcaacaaauuggacgaaau

SEQ ID NO: 396345 - RNA, 19 nt, Homo sapiens
  misc_RNA (1)...(19): siRNA sense strand
caauugauauuccaaguca

SEQ ID NO: 396346 - RNA, 19 nt, Homo sapiens
  misc_RNA (1)...(19): siRNA sense strand
acacgaagaucuaauugga

SEQ ID NO: 396347 - RNA, 19 nt, Homo sapiens
  misc_RNA (1)...(19): siRNA sense strand
uggaauagcugcaaugagu

SEQ ID NO: 396348 - RNA, 19 nt, Homo sapiens
  misc_RNA (1)...(19): siRNA sense strand
gaacugaagccuacuuaag

SEQ ID NO: 396349 - RNA, 19 nt, Homo sapiens
  misc_RNA (1)...(19): siRNA sense strand
guaaucggaaggacaaaua

SEQ ID NO: 396350 - RNA, 19 nt, Homo sapiens
  misc_RNA (1)...(19): siRNA sense strand
cuacaaagauugcccuaca

SEQ ID NO: 396351 - RNA, 19 nt, Homo sapiens
  misc_RNA (1)...(19): siRNA sense strand
uaacccaaaugacccaauu

SEQ ID NO: 396352 - RNA, 19 nt, Homo sapiens
  misc_RNA (1)...(19): siRNA sense strand
gcucugagggcuuggaaua

SEQ ID NO: 396353 - RNA, 19 nt, Homo sapiens
  misc_RNA (1)...(19): siRNA sense strand
ugggacgacucauugauua

SEQ ID NO: 396354 - RNA, 19 nt, Homo sapiens
  misc_RNA (1)...(19): siRNA sense strand
agaacaaguuuccaaagaa

SEQ ID NO: 396355 - RNA, 19 nt, Homo sapiens
  misc_RNA (1)...(19): siRNA sense strand
ggauaacgaucacuuuaac

SEQ ID NO: 396356 - RNA, 19 nt, Homo sapiens
  misc_RNA (1)...(19): siRNA sense strand
ggccauugcuacaaagauu

SEQ ID NO: 396357 - RNA, 19 nt, Homo sapiens
  misc_RNA (1)...(19): siRNA sense strand
aagaacaaguuuccaaaga

SEQ ID NO: 396358 - RNA, 19 nt, Homo sapiens
  misc_RNA (1)...(19): siRNA sense strand
gcagacacccagauaguug

SEQ ID NO: 396359 - RNA, 19 nt, Homo sapiens
  misc_RNA (1)...(19): siRNA sense strand
ccaccuacaucaccaacuu

SEQ ID NO: 396360 - RNA, 19 nt, Homo sapiens
  misc_RNA (1)...(19): siRNA sense strand
acgaagaucuaauuggaaa

SEQ ID NO: 396361 - RNA, 19 nt, Homo sapiens
  misc_RNA (1)...(19): siRNA sense strand
ccaaaucugucacugucaa

SEQ ID NO: 396362 - RNA, 19 nt, Homo sapiens
  misc_RNA (1)...(19): siRNA sense strand
ugaaaacacuggugaacua

SEQ ID NO: 396363 - RNA, 19 nt, Homo sapiens
  misc_RNA (1)...(19): siRNA sense strand
gcugguagaugggcucaaa

SEQ ID NO: 396364 - RNA, 19 nt, Homo sapiens
  misc_RNA (1)...(19): siRNA sense strand
gcaccauuaauuaguguua

SEQ ID NO: 396365 - RNA, 19 nt, Homo sapiens
  misc_RNA (1)...(19): siRNA sense strand
cuacaucaccaacuuguuu

SEQ ID NO: 396366 - RNA, 19 nt, Homo sapiens
  misc_RNA (1)...(19): siRNA sense strand
ucacaaggacuccagauau

SEQ ID NO: 396367 - RNA, 19 nt, Homo sapiens
  misc_RNA (1)...(19): siRNA sense strand
agaggugcaccauuaauua

SEQ ID NO: 396368 - RNA, 19 nt, Homo sapiens
  misc_RNA (1)...(19): siRNA sense strand
ccuagaccauguuaaagaa

SEQ ID NO: 396369 - RNA, 19 nt, Homo sapiens
  misc_RNA (1)...(19): siRNA sense strand
guaccgcgauggcguagga

SEQ ID NO: 396370 - RNA, 19 nt, Homo sapiens
  misc_RNA (1)...(19): siRNA sense strand
auaacuggcuguugaucua

SEQ ID NO: 396371 - RNA, 19 nt, Homo sapiens
  misc_RNA (1)...(19): siRNA sense strand
gcaaaagguuacugaaguu

SEQ ID NO: 396372 - RNA, 19 nt, Homo sapiens
  misc_RNA (1)...(19): siRNA sense strand
caacuggccaggugucauu

SEQ ID NO: 396373 - RNA, 19 nt, Homo sapiens
  misc_RNA (1)...(19): siRNA sense strand
ggagaggaugugaggauaa

SEQ ID NO: 396374 - RNA, 19 nt, Homo sapiens
  misc_RNA (1)...(19): siRNA sense strand
ggaauagcugcaaugagua

SEQ ID NO: 396375 - RNA, 19 nt, Homo sapiens
  misc_RNA (1)...(19): siRNA sense strand
cauaaaguccuucgaagug

SEQ ID NO: 396376 - RNA, 19 nt, Homo sapiens
  misc_RNA (1)...(19): siRNA sense strand
ggcagaaccuagaccaugu

SEQ ID NO: 396377 - RNA, 19 nt, Homo sapiens
  misc_RNA (1)...(19): siRNA sense strand
gagagaggaggucgucgua

SEQ ID NO: 396378 - RNA, 19 nt, Homo sapiens
  misc_RNA (1)...(19): siRNA sense strand
uggaacaguuauugaugua

SEQ ID NO: 396379 - RNA, 19 nt, Homo sapiens
  misc_RNA (1)...(19): siRNA sense strand
agacuuagccguucauaca

SEQ ID NO: 396380 - RNA, 19 nt, Homo sapiens
  misc_RNA (1)...(19): siRNA sense strand
gcaauacaaccaagagauc

SEQ ID NO: 396381 - RNA, 19 nt, Homo sapiens
  misc_RNA (1)...(19): siRNA sense strand
ggaggucgucguagagauu

SEQ ID NO: 396382 - RNA, 19 nt, Homo sapiens
  misc_RNA (1)...(19): siRNA sense strand
caaguaaucggaaggacaa

SEQ ID NO: 396383 - RNA, 19 nt, Homo sapiens
  misc_RNA (1)...(19): siRNA sense strand
cacaaggacuccagauauc

SEQ ID NO: 396384 - RNA, 19 nt, Homo sapiens
  misc_RNA (1)...(19): siRNA sense strand
ccaagagcaccuuuaagaa

SEQ ID NO: 396385 - RNA, 19 nt, Homo sapiens
  misc_RNA (1)...(19): siRNA sense strand
gaugugaggauaacgauca

SEQ ID NO: 396386 - RNA, 19 nt, Homo sapiens
  misc_RNA (1)...(19): siRNA sense strand
ugucaaaccgccuuuacua

SEQ ID NO: 396387 - RNA, 19 nt, Homo sapiens
  misc_RNA (1)...(19): siRNA sense strand
gcaaaggcagcgugaagug

SEQ ID NO: 396388 - RNA, 19 nt, Homo sapiens
  misc_RNA (1)...(19): siRNA sense strand
uaguuguucuuaccaagua

SEQ ID NO: 396389 - RNA, 19 nt, Homo sapiens
  misc_RNA (1)...(19): siRNA sense strand
ucagacagaagaacauaaa

SEQ ID NO: 396390 - RNA, 19 nt, Homo sapiens
  misc_RNA (1)...(19): siRNA sense strand
auacagcgcuugaccuaca

SEQ ID NO: 396391 - RNA, 19 nt, Homo sapiens
  misc_RNA (1)...(19): siRNA sense strand
uaacgguaauuguggugaa

SEQ ID NO: 396392 - RNA, 19 nt, Homo sapiens
  misc_RNA (1)...(19): siRNA sense strand
guucucacgcugcauauuu

SEQ ID NO: 396393 - RNA, 19 nt, Homo sapiens
  misc_RNA (1)...(19): siRNA sense strand
cccaagagcaccuuuaaga

SEQ ID NO: 396394 - RNA, 19 nt, Homo sapiens
  misc_RNA (1)...(19): siRNA sense strand
cauacagaguggaugauau

SEQ ID NO: 396395 - RNA, 19 nt, Homo sapiens
  misc_RNA (1)...(19): siRNA sense strand
caacacgaagaucuaauug

SEQ ID NO: 396396 - RNA, 19 nt, Homo sapiens
  misc_RNA (1)...(19): siRNA sense strand
gccagaguauucacagaga

SEQ ID NO: 396397 - RNA, 19 nt, Homo sapiens
  misc_RNA (1)...(19): siRNA sense strand
uaacgugaugaaagacuua

SEQ ID NO: 396398 - RNA, 19 nt, Homo sapiens
  misc_RNA (1)...(19): siRNA sense strand
gagcaaaggcagcgugaag

SEQ ID NO: 396399 - RNA, 19 nt, Homo sapiens
  misc_RNA (1)...(19): siRNA sense strand
aaacacuggugaacuacga

SEQ ID NO: 396400 - RNA, 19 nt, Homo sapiens
  misc_RNA (1)...(19): siRNA sense strand
gcucaaagucugccugcaa

SEQ ID NO: 396401 - RNA, 19 nt, Homo sapiens
  misc_RNA (1)...(19): siRNA sense strand
aaagauugcccuacagaug

SEQ ID NO: 396402 - RNA, 19 nt, Homo sapiens
  misc_RNA (1)...(19): siRNA sense strand
aaauacccguguacagauu

SEQ ID NO: 396403 - RNA, 19 nt, Homo sapiens
  misc_RNA (1)...(19): siRNA sense strand
ggcauuauaguaagguuaa

SEQ ID NO: 396404 - RNA, 19 nt, Homo sapiens
  misc_RNA (1)...(19): siRNA sense strand
gagguuaccagaccagaau

SEQ ID NO: 396405 - RNA, 19 nt, Homo sapiens
  misc_RNA (1)...(19): siRNA sense strand
ugaaguggaugacagaacu

SEQ ID NO: 396406 - RNA, 19 nt, Homo sapiens
  misc_RNA (1)...(19): siRNA sense strand
acaaaugaacuuccaccua

SEQ ID NO: 396407 - RNA, 19 nt, Homo sapiens
  misc_RNA (1)...(19): siRNA sense strand
gaagaucuaauuggaaagu

SEQ ID NO: 396408 - RNA, 19 nt, Homo sapiens
  misc_RNA (1)...(19): siRNA sense strand
ucaacacgaagaucuaauu

SEQ ID NO: 396409 - RNA, 19 nt, Homo sapiens
  misc_RNA (1)...(19): siRNA sense strand
gugagaagugguaguguuu

SEQ ID NO: 396410 - RNA, 19 nt, Homo sapiens
  misc_RNA (1)...(19): siRNA sense strand
cuacgaagugccacaguuu

SEQ ID NO: 396411 - RNA, 19 nt, Homo sapiens
  misc_RNA (1)...(19): siRNA sense strand
ucauggccauugcuacaaa

SEQ ID NO: 396412 - RNA, 19 nt, Homo sapiens
  misc_RNA (1)...(19): siRNA sense strand
gaagccuacuuaagagucu

SEQ ID NO: 396413 - RNA, 19 nt, Homo sapiens
  misc_RNA (1)...(19): siRNA sense strand
aagacuaacuccagagcaa

SEQ ID NO: 396414 - RNA, 19 nt, Homo sapiens
  misc_RNA (1)...(19): siRNA sense strand
ucaagaacaaguuuccaaa

SEQ ID NO: 396415 - RNA, 19 nt, Homo sapiens
  misc_RNA (1)...(19): siRNA sense strand
cuaaaagacuacagcaaaa

SEQ ID NO: 396416 - RNA, 19 nt, Homo sapiens
  misc_RNA (1)...(19): siRNA sense strand
ggacaggagcugguagaug

SEQ ID NO: 396417 - RNA, 19 nt, Homo sapiens
  misc_RNA (1)...(19): siRNA sense strand
ucguuggcaucgauuguua

SEQ ID NO: 396418 - RNA, 19 nt, Homo sapiens
  misc_RNA (1)...(19): siRNA sense strand
gauaguugucugucuguug

SEQ ID NO: 396419 - RNA, 19 nt, Homo sapiens
  misc_RNA (1)...(19): siRNA sense strand
cagaacugaagccuacuua

SEQ ID NO: 396420 - RNA, 19 nt, Homo sapiens
  misc_RNA (1)...(19): siRNA sense strand
caacuuacuguccuucuca

SEQ ID NO: 396421 - RNA, 19 nt, Homo sapiens
  misc_RNA (1)...(19): siRNA sense strand
gaucuuggugugaauacaa

SEQ ID NO: 396422 - RNA, 19 nt, Homo sapiens
  misc_RNA (1)...(19): siRNA sense strand
gagaggaugugaggauaac

SEQ ID NO: 396423 - RNA, 19 nt, Homo sapiens
  misc_RNA (1)...(19): siRNA sense strand
ucuauacgcgaagaaauua

SEQ ID NO: 396424 - RNA, 19 nt, Homo sapiens
  misc_RNA (1)...(19): siRNA sense strand
guguuaauccacuagauaa

SEQ ID NO: 396425 - RNA, 19 nt, Homo sapiens
  misc_RNA (1)...(19): siRNA sense strand
ggauuucauguucaacuuu

SEQ ID NO: 396426 - RNA, 19 nt, Homo sapiens
  misc_RNA (1)...(19): siRNA sense strand
auaaaguccuucgaaguga

SEQ ID NO: 396427 - RNA, 19 nt, Homo sapiens
  misc_RNA (1)...(19): siRNA sense strand
gaacacaagugcuuauaaa

SEQ ID NO: 396428 - RNA, 19 nt, Homo sapiens
  misc_RNA (1)...(19): siRNA sense strand
gcacugaaacaaaugauua

SEQ ID NO: 396429 - RNA, 19 nt, Homo sapiens
  misc_RNA (1)...(19): siRNA sense strand
guaagugccuaucagaaua

SEQ ID NO: 396430 - RNA, 19 nt, Homo sapiens
  misc_RNA (1)...(19): siRNA sense strand
aaacaacacuggaagcuuu

SEQ ID NO: 396431 - RNA, 19 nt, Homo sapiens
  misc_RNA (1)...(19): siRNA sense strand
ggaauacucugaagauagu

SEQ ID NO: 396432 - RNA, 19 nt, Homo sapiens
  misc_RNA (1)...(19): siRNA sense strand
ugacaucacugaauuugaa

SEQ ID NO: 396433 - RNA, 19 nt, Homo sapiens
  misc_RNA (1)...(19): siRNA sense strand
gagggaaggugaauuugaa

SEQ ID NO: 396434 - RNA, 19 nt, Homo sapiens
  misc_RNA (1)...(19): siRNA sense strand
gauagacugugguuuaaga

SEQ ID NO: 396435 - RNA, 19 nt, Homo sapiens
  misc_RNA (1)...(19): siRNA sense strand
ggaauucuaugaaacaaca

SEQ ID NO: 396436 - RNA, 19 nt, Homo sapiens
  misc_RNA (1)...(19): siRNA sense strand
ugaaagaugcuaagaauga

SEQ ID NO: 396437 - RNA, 19 nt, Homo sapiens
  misc_RNA (1)...(19): siRNA sense strand
ggagugcagucacaagaaa

SEQ ID NO: 396438 - RNA, 19 nt, Homo sapiens
  misc_RNA (1)...(19): siRNA sense strand
gaauagauauaagcagcua

SEQ ID NO: 396439 - RNA, 19 nt, Homo sapiens
  misc_RNA (1)...(19): siRNA sense strand
gcaaugacgaauuuaguaa

SEQ ID NO: 396440 - RNA, 19 nt, Homo sapiens
  misc_RNA (1)...(19): siRNA sense strand
gcauuaagcaguuuccaaa

SEQ ID NO: 396441 - RNA, 19 nt, Homo sapiens
  misc_RNA (1)...(19): siRNA sense strand
gaaagaugcuaagaaugau

SEQ ID NO: 396442 - RNA, 19 nt, Homo sapiens
  misc_RNA (1)...(19): siRNA sense strand
caaccaggcuguagucagu

SEQ ID NO: 396443 - RNA, 19 nt, Homo sapiens
  misc_RNA (1)...(19): siRNA sense strand
uaagagaacacauugaaga

SEQ ID NO: 396444 - RNA, 19 nt, Homo sapiens
  misc_RNA (1)...(19): siRNA sense strand
aaugauagacugugguuua

SEQ ID NO: 396445 - RNA, 19 nt, Homo sapiens
  misc_RNA (1)...(19): siRNA sense strand
cagagaauguggugguaaa

SEQ ID NO: 396446 - RNA, 19 nt, Homo sapiens
  misc_RNA (1)...(19): siRNA sense strand
gguacacaguuauuagaaa

SEQ ID NO: 396447 - RNA, 19 nt, Homo sapiens
  misc_RNA (1)...(19): siRNA sense strand
acacaaagcuuggaaaauu

SEQ ID NO: 396448 - RNA, 19 nt, Homo sapiens
  misc_RNA (1)...(19): siRNA sense strand
gaacagucacuucacauca

SEQ ID NO: 396449 - RNA, 19 nt, Homo sapiens
  misc_RNA (1)...(19): siRNA sense strand
uuaaagcacucuaugaaca

SEQ ID NO: 396450 - RNA, 19 nt, Homo sapiens
  misc_RNA (1)...(19): siRNA sense strand
aagcagcuauugaccuaua

SEQ ID NO: 396451 - RNA, 19 nt, Homo sapiens
  misc_RNA (1)...(19): siRNA sense strand
aaaagaagaugacccaaaa

SEQ ID NO: 396452 - RNA, 19 nt, Homo sapiens
  misc_RNA (1)...(19): siRNA sense strand
gaauauggaaagcuucaaa

SEQ ID NO: 396453 - RNA, 19 nt, Homo sapiens
  misc_RNA (1)...(19): siRNA sense strand
gauauacugcacuagauaa

SEQ ID NO: 396454 - RNA, 19 nt, Homo sapiens
  misc_RNA (1)...(19): siRNA sense strand
uaaauggaccaaccaacua

SEQ ID NO: 396455 - RNA, 19 nt, Homo sapiens
  misc_RNA (1)...(19): siRNA sense strand
cauaagagaacacauugaa

SEQ ID NO: 396456 - RNA, 19 nt, Homo sapiens
  misc_RNA (1)...(19): siRNA sense strand
cuaaggaguuaaacauaga

SEQ ID NO: 396457 - RNA, 19 nt, Homo sapiens
  misc_RNA (1)...(19): siRNA sense strand
ggaccaaccaacuaaauuc

SEQ ID NO: 396458 - RNA, 19 nt, Homo sapiens
  misc_RNA (1)...(19): siRNA sense strand
auaagcagcuauugaccua

SEQ ID NO: 396459 - RNA, 19 nt, Homo sapiens
  misc_RNA (1)...(19): siRNA sense strand
guacuauaauuccaaagca

SEQ ID NO: 396460 - RNA, 19 nt, Homo sapiens
  misc_RNA (1)...(19): siRNA sense strand
gcaggaauucuaugaaaca

SEQ ID NO: 396461 - RNA, 19 nt, Homo sapiens
  misc_RNA (1)...(19): siRNA sense strand
gcagucacaagaaauuauu

SEQ ID NO: 396462 - RNA, 19 nt, Homo sapiens
  misc_RNA (1)...(19): siRNA sense strand
cugcaggaauucuaugaaa

SEQ ID NO: 396463 - RNA, 19 nt, Homo sapiens
  misc_RNA (1)...(19): siRNA sense strand
auacugcacuagauaaaug

SEQ ID NO: 396464 - RNA, 19 nt, Homo sapiens
  misc_RNA (1)...(19): siRNA sense strand
gacugugguuuaagacaaa

SEQ ID NO: 396465 - RNA, 19 nt, Homo sapiens
  misc_RNA (1)...(19): siRNA sense strand
agacgaaccacuugcuuaa

SEQ ID NO: 396466 - RNA, 19 nt, Homo sapiens
  misc_RNA (1)...(19): siRNA sense strand
gaacgagaggaauauggaa

SEQ ID NO: 396467 - RNA, 19 nt, Homo sapiens
  misc_RNA (1)...(19): siRNA sense strand
gauauaagcagcuauugac

SEQ ID NO: 396468 - RNA, 19 nt, Homo sapiens
  misc_RNA (1)...(19): siRNA sense strand
ccaacuaaauucucucaac

SEQ ID NO: 396469 - RNA, 19 nt, Homo sapiens
  misc_RNA (1)...(19): siRNA sense strand
gaacuggaucaucagaaga

SEQ ID NO: 396470 - RNA, 19 nt, Homo sapiens
  misc_RNA (1)...(19): siRNA sense strand
ucuaaggaguuaaacauag

SEQ ID NO: 396471 - RNA, 19 nt, Homo sapiens
  misc_RNA (1)...(19): siRNA sense strand
gugccuaucagaauaauga

SEQ ID NO: 396472 - RNA, 19 nt, Homo sapiens
  misc_RNA (1)...(19): siRNA sense strand
cacaaagcuuggaaaauua

SEQ ID NO: 396473 - RNA, 19 nt, Homo sapiens
  misc_RNA (1)...(19): siRNA sense strand
ccagacugaugauggagaa

SEQ ID NO: 396474 - RNA, 19 nt, Homo sapiens
  misc_RNA (1)...(19): siRNA sense strand
agaggaauauggaaagcuu

SEQ ID NO: 396475 - RNA, 19 nt, Homo sapiens
  misc_RNA (1)...(19): siRNA sense strand
ccagaaaugaugaauagau

SEQ ID NO: 396476 - RNA, 19 nt, Homo sapiens
  misc_RNA (1)...(19): siRNA sense strand
cgauauacugcacuagaua

SEQ ID NO: 396477 - RNA, 19 nt, Homo sapiens
  misc_RNA (1)...(19): siRNA sense strand
caucagaacacaagugcuu

SEQ ID NO: 396478 - RNA, 19 nt, Homo sapiens
  misc_RNA (1)...(19): siRNA sense strand
cuucuaaacagauggauuu

SEQ ID NO: 396479 - RNA, 19 nt, Homo sapiens
  misc_RNA (1)...(19): siRNA sense strand
gcauauuggauaacacuau

SEQ ID NO: 396480 - RNA, 19 nt, Homo sapiens
  misc_RNA (1)...(19): siRNA sense strand
agaauaaugacaucacuga

SEQ ID NO: 396481 - RNA, 19 nt, Homo sapiens
  misc_RNA (1)...(19): siRNA sense strand
ccacugauuaugggaguua

SEQ ID NO: 396482 - RNA, 19 nt, Homo sapiens
  misc_RNA (1)...(19): siRNA sense strand
gaaacaacacuggaagcuu

SEQ ID NO: 396483 - RNA, 19 nt, Homo sapiens
  misc_RNA (1)...(19): siRNA sense strand
uggauuuacugcaggaauu

SEQ ID NO: 396484 - RNA, 19 nt, Homo sapiens
  misc_RNA (1)...(19): siRNA sense strand
ugacauggaggaugauuuc

SEQ ID NO: 396485 - RNA, 19 nt, Homo sapiens
  misc_RNA (1)...(19): siRNA sense strand
ccaaccaacuaaauucucu

SEQ ID NO: 396486 - RNA, 19 nt, Homo sapiens
  misc_RNA (1)...(19): siRNA sense strand
ugaacuggaucaucagaag

SEQ ID NO: 396487 - RNA, 19 nt, Homo sapiens
  misc_RNA (1)...(19): siRNA sense strand
gaagagcuuuugcgaaaca

SEQ ID NO: 396488 - RNA, 19 nt, Homo sapiens
  misc_RNA (1)...(19): siRNA sense strand
uaagugccuaucagaauaa

SEQ ID NO: 396489 - RNA, 19 nt, Homo sapiens
  misc_RNA (1)...(19): siRNA sense strand
uuccagaaaugaugaauag

SEQ ID NO: 396490 - RNA, 19 nt, Homo sapiens
  misc_RNA (1)...(19): siRNA sense strand
cgaaacaucagaacacaag

SEQ ID NO: 396491 - RNA, 19 nt, Homo sapiens
  misc_RNA (1)...(19): siRNA sense strand
gaacacauugaagagcuuu

SEQ ID NO: 396492 - RNA, 19 nt, Homo sapiens
  misc_RNA (1)...(19): siRNA sense strand
gaauaaugacaucacugaa

SEQ ID NO: 396493 - RNA, 19 nt, Homo sapiens
  misc_RNA (1)...(19): siRNA sense strand
agacugugguuuaagacaa

SEQ ID NO: 396494 - RNA, 19 nt, Homo sapiens
  misc_RNA (1)...(19): siRNA sense strand
ggacuacgaccuggaauac

SEQ ID NO: 396495 - RNA, 19 nt, Homo sapiens
  misc_RNA (1)...(19): siRNA sense strand
ggaggacuacgaccuggaa

SEQ ID NO: 396496 - RNA, 19 nt, Homo sapiens
  misc_RNA (1)...(19): siRNA sense strand
acaaaucacagcaacauca

SEQ ID NO: 396497 - RNA, 19 nt, Homo sapiens
  misc_RNA (1)...(19): siRNA sense strand
gaauuuaguaagugccuau

SEQ ID NO: 396498 - RNA, 19 nt, Homo sapiens
  misc_RNA (1)...(19): siRNA sense strand
gauuaugggaguuaucaga

SEQ ID NO: 396499 - RNA, 19 nt, Homo sapiens
  misc_RNA (1)...(19): siRNA sense strand
uaugggaguuaucagagaa

SEQ ID NO: 396500 - RNA, 19 nt, Homo sapiens
  misc_RNA (1)...(19): siRNA sense strand
ggaguuaucagagaaugug

SEQ ID NO: 396501 - RNA, 19 nt, Homo sapiens
  misc_RNA (1)...(19): siRNA sense strand
gaaaaggcacacacugauu

SEQ ID NO: 396502 - RNA, 19 nt, Homo sapiens
  misc_RNA (1)...(19): siRNA sense strand
gcgaugaugaggaggacua

SEQ ID NO: 396503 - RNA, 19 nt, Homo sapiens
  misc_RNA (1)...(19): siRNA sense strand
aaauggaccaaccaacuaa

SEQ ID NO: 396504 - RNA, 19 nt, Homo sapiens
  misc_RNA (1)...(19): siRNA sense strand
aaacaaaucacagcaacau

SEQ ID NO: 396505 - RNA, 19 nt, Homo sapiens
  misc_RNA (1)...(19): siRNA sense strand
ccagaaauuuuagcaauga

SEQ ID NO: 396506 - RNA, 19 nt, Homo sapiens
  misc_RNA (1)...(19): siRNA sense strand
aagacgaaccacuugcuua

SEQ ID NO: 396507 - RNA, 19 nt, Homo sapiens
  misc_RNA (1)...(19): siRNA sense strand
aaacuuaaagcacucuaug

SEQ ID NO: 396508 - RNA, 19 nt, Homo sapiens
  misc_RNA (1)...(19): siRNA sense strand
aaagcggcauuaagcaguu

SEQ ID NO: 396509 - RNA, 19 nt, Homo sapiens
  misc_RNA (1)...(19): siRNA sense strand
cuggaauacucugaagaua

SEQ ID NO: 396510 - RNA, 19 nt, Homo sapiens
  misc_RNA (1)...(19): siRNA sense strand
agaacacaagugcuuauaa

SEQ ID NO: 396511 - RNA, 19 nt, Homo sapiens
  misc_RNA (1)...(19): siRNA sense strand
uugaagagcuuuugcgaaa

SEQ ID NO: 396512 - RNA, 19 nt, Homo sapiens
  misc_RNA (1)...(19): siRNA sense strand
gaaccacuugcuuaaaaua

SEQ ID NO: 396513 - RNA, 19 nt, Homo sapiens
  misc_RNA (1)...(19): siRNA sense strand
gcacuugagggaaggugaa

SEQ ID NO: 396514 - RNA, 19 nt, Homo sapiens
  misc_RNA (1)...(19): siRNA sense strand
gugccagacugaugaugga

SEQ ID NO: 396515 - RNA, 19 nt, Homo sapiens
  misc_RNA (1)...(19): siRNA sense strand
cagaacacaagugcuuaua

SEQ ID NO: 396516 - RNA, 19 nt, Homo sapiens
  misc_RNA (1)...(19): siRNA sense strand
ugagggaaggugaauuuga

SEQ ID NO: 396517 - RNA, 19 nt, Homo sapiens
  misc_RNA (1)...(19): siRNA sense strand
augauagacugugguuuaa

SEQ ID NO: 396518 - RNA, 19 nt, Homo sapiens
  misc_RNA (1)...(19): siRNA sense strand
aacagucacuucacaucaa

SEQ ID NO: 396519 - RNA, 19 nt, Homo sapiens
  misc_RNA (1)...(19): siRNA sense strand
caaacacaaagcuuggaaa

SEQ ID NO: 396520 - RNA, 19 nt, Homo sapiens
  misc_RNA (1)...(19): siRNA sense strand
aaucgggaauaaauccauu

SEQ ID NO: 396521 - RNA, 19 nt, Homo sapiens
  misc_RNA (1)...(19): siRNA sense strand
gugcagucacaagaaauua

SEQ ID NO: 396522 - RNA, 19 nt, Homo sapiens
  misc_RNA (1)...(19): siRNA sense strand
gauuuaaagcacugaaaca

SEQ ID NO: 396523 - RNA, 19 nt, Homo sapiens
  misc_RNA (1)...(19): siRNA sense strand
gaccuggaauacucugaag

SEQ ID NO: 396524 - RNA, 19 nt, Homo sapiens
  misc_RNA (1)...(19): siRNA sense strand
agauauaagcagcuauuga

SEQ ID NO: 396525 - RNA, 19 nt, Homo sapiens
  misc_RNA (1)...(19): siRNA sense strand
guugacaaacuuuccagaa

SEQ ID NO: 396526 - RNA, 19 nt, Homo sapiens
  misc_RNA (1)...(19): siRNA sense strand
cuugagggaaggugaauuu

SEQ ID NO: 396527 - RNA, 19 nt, Homo sapiens
  misc_RNA (1)...(19): siRNA sense strand
gaacugacaucucugauuu

SEQ ID NO: 396528 - RNA, 19 nt, Homo sapiens
  misc_RNA (1)...(19): siRNA sense strand
gaacacagauggugcgaua

SEQ ID NO: 396529 - RNA, 19 nt, Homo sapiens
  misc_RNA (1)...(19): siRNA sense strand
gagcacagcuuaugaaaga

SEQ ID NO: 396530 - RNA, 19 nt, Homo sapiens
  misc_RNA (1)...(19): siRNA sense strand
ccaaagaucugcuuacaaa

SEQ ID NO: 396531 - RNA, 19 nt, Homo sapiens
  misc_RNA (1)...(19): siRNA sense strand
gacaaagacucauacaaua

SEQ ID NO: 396532 - RNA, 19 nt, Homo sapiens
  misc_RNA (1)...(19): siRNA sense strand
gauaccaucuccaauaaua

SEQ ID NO: 396533 - RNA, 19 nt, Homo sapiens
  misc_RNA (1)...(19): siRNA sense strand
caaauaagccacauaguaa

SEQ ID NO: 396534 - RNA, 19 nt, Homo sapiens
  misc_RNA (1)...(19): siRNA sense strand
gcagagagaucagauuaaa

SEQ ID NO: 396535 - RNA, 19 nt, Homo sapiens
  misc_RNA (1)...(19): siRNA sense strand
gcaagaaacuucacugaca

SEQ ID NO: 396536 - RNA, 19 nt, Homo sapiens
  misc_RNA (1)...(19): siRNA sense strand
gagaggagcugcugaaaca

SEQ ID NO: 396537 - RNA, 19 nt, Homo sapiens
  misc_RNA (1)...(19): siRNA sense strand
ccaaacagcuccaacgaaa

SEQ ID NO: 396538 - RNA, 19 nt, Homo sapiens
  misc_RNA (1)...(19): siRNA sense strand
ggaagaagcugcaguucau

SEQ ID NO: 396539 - RNA, 19 nt, Homo sapiens
  misc_RNA (1)...(19): siRNA sense strand
cagcagggaugauucuuua

SEQ ID NO: 396540 - RNA, 19 nt, Homo sapiens
  misc_RNA (1)...(19): siRNA sense strand
ugacaucucugauuuguga

SEQ ID NO: 396541 - RNA, 19 nt, Homo sapiens
  misc_RNA (1)...(19): siRNA sense strand
uuagaaaccuugacuauga

SEQ ID NO: 396542 - RNA, 19 nt, Homo sapiens
  misc_RNA (1)...(19): siRNA sense strand
gaaagagaauccacagaug

SEQ ID NO: 396543 - RNA, 19 nt, Homo sapiens
  misc_RNA (1)...(19): siRNA sense strand
ggacaaagacucauacaau

SEQ ID NO: 396544 - RNA, 19 nt, Homo sapiens
  misc_RNA (1)...(19): siRNA sense strand
gcuaauugcugccagagua

SEQ ID NO: 396545 - RNA, 19 nt, Homo sapiens
  misc_RNA (1)...(19): siRNA sense strand
gagcagagagaucagauua

SEQ ID NO: 396546 - RNA, 19 nt, Homo sapiens
  misc_RNA (1)...(19): siRNA sense strand
caaagacacugauggaaug

SEQ ID NO: 396547 - RNA, 19 nt, Homo sapiens
  misc_RNA (1)...(19): siRNA sense strand
gcaccuagauuggauagaa

SEQ ID NO: 396548 - RNA, 19 nt, Homo sapiens
  misc_RNA (1)...(19): siRNA sense strand
gcucauaucgcaaagguua

SEQ ID NO: 396549 - RNA, 19 nt, Homo sapiens
  misc_RNA (1)...(19): siRNA sense strand
acagagaguucuuguguaa

SEQ ID NO: 396550 - RNA, 19 nt, Homo sapiens
  misc_RNA (1)...(19): siRNA sense strand
gagguuauuucuccaguuu

SEQ ID NO: 396551 - RNA, 19 nt, Homo sapiens
  misc_RNA (1)...(19): siRNA sense strand
caaagagagucuacaguau

SEQ ID NO: 396552 - RNA, 19 nt, Homo sapiens
  misc_RNA (1)...(19): siRNA sense strand
ccaaagaaaugcauuagca

SEQ ID NO: 396553 - RNA, 19 nt, Homo sapiens
  misc_RNA (1)...(19): siRNA sense strand
uaucauggauuucagauug

SEQ ID NO: 396554 - RNA, 19 nt, Homo sapiens
  misc_RNA (1)...(19): siRNA sense strand
ccaaggcuaucauggauuu

SEQ ID NO: 396555 - RNA, 19 nt, Homo sapiens
  misc_RNA (1)...(19): siRNA sense strand
gaaauuauuccaacuagug

SEQ ID NO: 396556 - RNA, 19 nt, Homo sapiens
  misc_RNA (1)...(19): siRNA sense strand
ccaaagagagucuacagua

SEQ ID NO: 396557 - RNA, 19 nt, Homo sapiens
  misc_RNA (1)...(19): siRNA sense strand
gcaggcacauaaauuugua

SEQ ID NO: 396558 - RNA, 19 nt, Homo sapiens
  misc_RNA (1)...(19): siRNA sense strand
gaagacccgucauuagaug

SEQ ID NO: 396559 - RNA, 19 nt, Homo sapiens
  misc_RNA (1)...(19): siRNA sense strand
gagagaggaugaagaaagu

SEQ ID NO: 396560 - RNA, 19 nt, Homo sapiens
  misc_RNA (1)...(19): siRNA sense strand
gaacauuugcugccguaua

SEQ ID NO: 396561 - RNA, 19 nt, Homo sapiens
  misc_RNA (1)...(19): siRNA sense strand
caacauaguggauuuguga

SEQ ID NO: 396562 - RNA, 19 nt, Homo sapiens
  misc_RNA (1)...(19): siRNA sense strand
acaaauaagccacauagua

SEQ ID NO: 396563 - RNA, 19 nt, Homo sapiens
  misc_RNA (1)...(19): siRNA sense strand
caaggucgauuaagugaug

SEQ ID NO: 396564 - RNA, 19 nt, Homo sapiens
  misc_RNA (1)...(19): siRNA sense strand
ggacagagaguucuugugu

SEQ ID NO: 396565 - RNA, 19 nt, Homo sapiens
  misc_RNA (1)...(19): siRNA sense strand
gaagagagaucugcgaaac

SEQ ID NO: 396566 - RNA, 19 nt, Homo sapiens
  misc_RNA (1)...(19): siRNA sense strand
gcacauaaauuuguagaac

SEQ ID NO: 396567 - RNA, 19 nt, Homo sapiens
  misc_RNA (1)...(19): siRNA sense strand
ggagcaggcacauaaauuu

SEQ ID NO: 396568 - RNA, 19 nt, Homo sapiens
  misc_RNA (1)...(19): siRNA sense strand
gcagguugcuuccaaagau

SEQ ID NO: 396569 - RNA, 19 nt, Homo sapiens
  misc_RNA (1)...(19): siRNA sense strand
cuagaauucuucagcauaa

SEQ ID NO: 396570 - RNA, 19 nt, Homo sapiens
  misc_RNA (1)...(19): siRNA sense strand
cauaguaagucaaagaaga

SEQ ID NO: 396571 - RNA, 19 nt, Homo sapiens
  misc_RNA (1)...(19): siRNA sense strand
gaaaggagggaaggauaua

SEQ ID NO: 396572 - RNA, 19 nt, Homo sapiens
  misc_RNA (1)...(19): siRNA sense strand
gaacagcacgugccauuca

SEQ ID NO: 396573 - RNA, 19 nt, Homo sapiens
  misc_RNA (1)...(19): siRNA sense strand
gaaaugcacagaacacaga

SEQ ID NO: 396574 - RNA, 19 nt, Homo sapiens
  misc_RNA (1)...(19): siRNA sense strand
gaacuuaugccauguuuac

SEQ ID NO: 396575 - RNA, 19 nt, Homo sapiens
  misc_RNA (1)...(19): siRNA sense strand
ugaaucaacuggugcagaa

SEQ ID NO: 396576 - RNA, 19 nt, Homo sapiens
  misc_RNA (1)...(19): siRNA sense strand
ucgcaaagguuaagaugaa

SEQ ID NO: 396577 - RNA, 19 nt, Homo sapiens
  misc_RNA (1)...(19): siRNA sense strand
uuaaagcgauuucuucaug

SEQ ID NO: 396578 - RNA, 19 nt, Homo sapiens
  misc_RNA (1)...(19): siRNA sense strand
ccaaaggcauguacgaaug

SEQ ID NO: 396579 - RNA, 19 nt, Homo sapiens
  misc_RNA (1)...(19): siRNA sense strand
gaaagaggauccggaacug

SEQ ID NO: 396580 - RNA, 19 nt, Homo sapiens
  misc_RNA (1)...(19): siRNA sense strand
gaagggaaaugcacagaac

SEQ ID NO: 396581 - RNA, 19 nt, Homo sapiens
  misc_RNA (1)...(19): siRNA sense strand
gaagcaacccugcauugaa

SEQ ID NO: 396582 - RNA, 19 nt, Homo sapiens
  misc_RNA (1)...(19): siRNA sense strand
gcaaagacacugauggaau

SEQ ID NO: 396583 - RNA, 19 nt, Homo sapiens
  misc_RNA (1)...(19): siRNA sense strand
gaagggaccaaguauauuc

SEQ ID NO: 396584 - RNA, 19 nt, Homo sapiens
  misc_RNA (1)...(19): siRNA sense strand
agaaguaacucuuagcaau

SEQ ID NO: 396585 - RNA, 19 nt, Homo sapiens
  misc_RNA (1)...(19): siRNA sense strand
gcaaugugcaaggaaauua

SEQ ID NO: 396586 - RNA, 19 nt, Homo sapiens
  misc_RNA (1)...(19): siRNA sense strand
caacugaaaucugcacaau

SEQ ID NO: 396587 - RNA, 19 nt, Homo sapiens
  misc_RNA (1)...(19): siRNA sense strand
ucacugacaucacacgauu

SEQ ID NO: 396588 - RNA, 19 nt, Homo sapiens
  misc_RNA (1)...(19): siRNA sense strand
gcaaauaggcaacuucaag

SEQ ID NO: 396589 - RNA, 19 nt, Homo sapiens
  misc_RNA (1)...(19): siRNA sense strand
guacaugauuucccuagug

SEQ ID NO: 396590 - RNA, 19 nt, Homo sapiens
  misc_RNA (1)...(19): siRNA sense strand
guagaaauccguagcauag

SEQ ID NO: 396591 - RNA, 19 nt, Homo sapiens
  misc_RNA (1)...(19): siRNA sense strand
gguagugacuccacccauu

SEQ ID NO: 396592 - RNA, 19 nt, Homo sapiens
  misc_RNA (1)...(19): siRNA sense strand
gaaucagucuucccacuca

SEQ ID NO: 396593 - RNA, 19 nt, Homo sapiens
  misc_RNA (1)...(19): siRNA sense strand
gcaauuugauucguucaga

SEQ ID NO: 396594 - RNA, 19 nt, Homo sapiens
  misc_RNA (1)...(19): siRNA sense strand
uccaagagaugaugacaaa

SEQ ID NO: 396595 - RNA, 19 nt, Homo sapiens
  misc_RNA (1)...(19): siRNA sense strand
guacucaccuccaagagau

SEQ ID NO: 396596 - RNA, 19 nt, Homo sapiens
  misc_RNA (1)...(19): siRNA sense strand
gagaagguguaaugcauca

SEQ ID NO: 396597 - RNA, 19 nt, Homo sapiens
  misc_RNA (1)...(19): siRNA sense strand
gccaagaccugaagauagu

SEQ ID NO: 396598 - RNA, 19 nt, Homo sapiens
  misc_RNA (1)...(19): siRNA sense strand
caauggaaguugucaggaa

SEQ ID NO: 396599 - RNA, 19 nt, Homo sapiens
  misc_RNA (1)...(19): siRNA sense strand
aaacccagaugacuucuug

SEQ ID NO: 396600 - RNA, 19 nt, Homo sapiens
  misc_RNA (1)...(19): siRNA sense strand
gaauccaccuuugacaauu

SEQ ID NO: 396601 - RNA, 19 nt, Homo sapiens
  misc_RNA (1)...(19): siRNA sense strand
aaacuucacugacaucaca

SEQ ID NO: 396602 - RNA, 19 nt, Homo sapiens
  misc_RNA (1)...(19): siRNA sense strand
gcaguacggcaguuuagua

SEQ ID NO: 396603 - RNA, 19 nt, Homo sapiens
  misc_RNA (1)...(19): siRNA sense strand
agagauaccuuguaguuag

SEQ ID NO: 396604 - RNA, 19 nt, Homo sapiens
  misc_RNA (1)...(19): siRNA sense strand
gcgauuucuucauguauuu

SEQ ID NO: 396605 - RNA, 19 nt, Homo sapiens
  misc_RNA (1)...(19): siRNA sense strand
agaaaugcauuagcaauug

SEQ ID NO: 396606 - RNA, 19 nt, Homo sapiens
  misc_RNA (1)...(19): siRNA sense strand
uuggagaggugaagaagua

SEQ ID NO: 396607 - RNA, 19 nt, Homo sapiens
  misc_RNA (1)...(19): siRNA sense strand
gguauaaaccugugagaga

SEQ ID NO: 396608 - RNA, 19 nt, Homo sapiens
  misc_RNA (1)...(19): siRNA sense strand
guacggcaguuuaguauac

SEQ ID NO: 396609 - RNA, 19 nt, Homo sapiens
  misc_RNA (1)...(19): siRNA sense strand
ggguggaccugucaagauu

SEQ ID NO: 396610 - RNA, 19 nt, Homo sapiens
  misc_RNA (1)...(19): siRNA sense strand
guagaacguuauuucaguu

SEQ ID NO: 396611 - RNA, 19 nt, Homo sapiens
  misc_RNA (1)...(19): siRNA sense strand
gcuaacacaucaggauaaa

SEQ ID NO: 396612 - RNA, 19 nt, Homo sapiens
  misc_RNA (1)...(19): siRNA sense strand
gaaacaaauaagccacaua

SEQ ID NO: 396613 - RNA, 19 nt, Homo sapiens
  misc_RNA (1)...(19): siRNA sense strand
cagcaaagccagcucauau

SEQ ID NO: 396614 - RNA, 19 nt, Homo sapiens
  misc_RNA (1)...(19): siRNA sense strand
caagaagggaccaaguaua

SEQ ID NO: 396615 - RNA, 19 nt, Homo sapiens
  misc_RNA (1)...(19): siRNA sense strand
cguauaacaugacugugua

SEQ ID NO: 396616 - RNA, 19 nt, Homo sapiens
  misc_RNA (1)...(19): siRNA sense strand
gagauaccuuguaguuaga

SEQ ID NO: 396617 - RNA, 19 nt, Homo sapiens
  misc_RNA (1)...(19): siRNA sense strand
uaagugauguucuaaagag

SEQ ID NO: 396618 - RNA, 19 nt, Homo sapiens
  misc_RNA (1)...(19): siRNA sense strand
gaaucagagucuuuguuga

SEQ ID NO: 396619 - RNA, 19 nt, Homo sapiens
  misc_RNA (1)...(19): siRNA sense strand
gagcaauucuuaggauaau

SEQ ID NO: 396620 - RNA, 19 nt, Homo sapiens
  misc_RNA (1)...(19): siRNA sense strand
gacagagaguucuugugua

SEQ ID NO: 396621 - RNA, 19 nt, Homo sapiens
  misc_RNA (1)...(19): siRNA sense strand
uacaagccaucgagagaua

SEQ ID NO: 396622 - RNA, 19 nt, Homo sapiens
  misc_RNA (1)...(19): siRNA sense strand
ucagucaucuucaguacuu

SEQ ID NO: 396623 - RNA, 19 nt, Homo sapiens
  misc_RNA (1)...(19): siRNA sense strand
ugacaucgacccaguugua

SEQ ID NO: 396624 - RNA, 19 nt, Homo sapiens
  misc_RNA (1)...(19): siRNA sense strand
aacauuugcugccguauaa

SEQ ID NO: 396625 - RNA, 19 nt, Homo sapiens
  misc_RNA (1)...(19): siRNA sense strand
gaucagaugaggaaauaga

SEQ ID NO: 396626 - RNA, 19 nt, Homo sapiens
  misc_RNA (1)...(19): siRNA sense strand
gagagauaccuuguaguua

SEQ ID NO: 396627 - RNA, 19 nt, Homo sapiens
  misc_RNA (1)...(19): siRNA sense strand
ggacauuacuaaagaguua

SEQ ID NO: 396628 - RNA, 19 nt, Homo sapiens
  misc_RNA (1)...(19): siRNA sense strand
ggaagcagcucuuaucaaa

SEQ ID NO: 396629 - RNA, 19 nt, Homo sapiens
  misc_RNA (1)...(19): siRNA sense strand
gcagaaagauuuggagaua

SEQ ID NO: 396630 - RNA, 19 nt, Homo sapiens
  misc_RNA (1)...(19): siRNA sense strand
caacagaaauugacagaaa

SEQ ID NO: 396631 - RNA, 19 nt, Homo sapiens
  misc_RNA (1)...(19): siRNA sense strand
gaaagaaagucacaguauu

SEQ ID NO: 396632 - RNA, 19 nt, Homo sapiens
  misc_RNA (1)...(19): siRNA sense strand
ggaaauagcagaacucaaa

SEQ ID NO: 396633 - RNA, 19 nt, Homo sapiens
  misc_RNA (1)...(19): siRNA sense strand
gaacagcuauugaaagaga

SEQ ID NO: 396634 - RNA, 19 nt, Homo sapiens
  misc_RNA (1)...(19): siRNA sense strand
gggcaagacuggagaguua

SEQ ID NO: 396635 - RNA, 19 nt, Homo sapiens
  misc_RNA (1)...(19): siRNA sense strand
gaacuuaaggagcauauua

SEQ ID NO: 396636 - RNA, 19 nt, Homo sapiens
  misc_RNA (1)...(19): siRNA sense strand
ggacuuuggugauauaauu

SEQ ID NO: 396637 - RNA, 19 nt, Homo sapiens
  misc_RNA (1)...(19): siRNA sense strand
ggagauagcaucaucagua

SEQ ID NO: 396638 - RNA, 19 nt, Homo sapiens
  misc_RNA (1)...(19): siRNA sense strand
gcaaacagcucagaaggaa

SEQ ID NO: 396639 - RNA, 19 nt, Homo sapiens
  misc_RNA (1)...(19): siRNA sense strand
ggaaguggaagcagaauua

SEQ ID NO: 396640 - RNA, 19 nt, Homo sapiens
  misc_RNA (1)...(19): siRNA sense strand
cgaaauagaugcacuaagu

SEQ ID NO: 396641 - RNA, 19 nt, Homo sapiens
  misc_RNA (1)...(19): siRNA sense strand
ggccagauaucaaacuuua

SEQ ID NO: 396642 - RNA, 19 nt, Homo sapiens
  misc_RNA (1)...(19): siRNA sense strand
gaaugagguucaacguuua

SEQ ID NO: 396643 - RNA, 19 nt, Homo sapiens
  misc_RNA (1)...(19): siRNA sense strand
gaacaaaccgauucagaaa

SEQ ID NO: 396644 - RNA, 19 nt, Homo sapiens
  misc_RNA (1)...(19): siRNA sense strand
gaagacaaucugaaacuua

SEQ ID NO: 396645 - RNA, 19 nt, Homo sapiens
  misc_RNA (1)...(19): siRNA sense strand
guagaaaucagccaucuua

SEQ ID NO: 396646 - RNA, 19 nt, Homo sapiens
  misc_RNA (1)...(19): siRNA sense strand
gagugaaucuucugaauug

SEQ ID NO: 396647 - RNA, 19 nt, Homo sapiens
  misc_RNA (1)...(19): siRNA sense strand
caagguggcucuggaguua

SEQ ID NO: 396648 - RNA, 19 nt, Homo sapiens
  misc_RNA (1)...(19): siRNA sense strand
gaaaguaguggccaagaua

SEQ ID NO: 396649 - RNA, 19 nt, Homo sapiens
  misc_RNA (1)...(19): siRNA sense strand
gagauagcaucaucaguaa

SEQ ID NO: 396650 - RNA, 19 nt, Homo sapiens
  misc_RNA (1)...(19): siRNA sense strand
gaaccgaagucaggaaauu

SEQ ID NO: 396651 - RNA, 19 nt, Homo sapiens
  misc_RNA (1)...(19): siRNA sense strand
gacaagaaaugcuggauga

SEQ ID NO: 396652 - RNA, 19 nt, Homo sapiens
  misc_RNA (1)...(19): siRNA sense strand
ggaaauggaugaguuuaga

SEQ ID NO: 396653 - RNA, 19 nt, Homo sapiens
  misc_RNA (1)...(19): siRNA sense strand
gaaggagaauuuagaacuu

SEQ ID NO: 396654 - RNA, 19 nt, Homo sapiens
  misc_RNA (1)...(19): siRNA sense strand
guacugaucuagaagagaa

SEQ ID NO: 396655 - RNA, 19 nt, Homo sapiens
  misc_RNA (1)...(19): siRNA sense strand
gaggagcuuucuagaauaa

SEQ ID NO: 396656 - RNA, 19 nt, Homo sapiens
  misc_RNA (1)...(19): siRNA sense strand
aaagagaagucauuacuga

SEQ ID NO: 396657 - RNA, 19 nt, Homo sapiens
  misc_RNA (1)...(19): siRNA sense strand
gcaaguaagucugaaguau

SEQ ID NO: 396658 - RNA, 19 nt, Homo sapiens
  misc_RNA (1)...(19): siRNA sense strand
ccucagagcuagaaagaaa

SEQ ID NO: 396659 - RNA, 19 nt, Homo sapiens
  misc_RNA (1)...(19): siRNA sense strand
gaacaagaacucaaucaga

SEQ ID NO: 396660 - RNA, 19 nt, Homo sapiens
  misc_RNA (1)...(19): siRNA sense strand
agaaugagguucaacguuu

SEQ ID NO: 396661 - RNA, 19 nt, Homo sapiens
  misc_RNA (1)...(19): siRNA sense strand
gaaauaaaccgacucucaa

SEQ ID NO: 396662 - RNA, 19 nt, Homo sapiens
  misc_RNA (1)...(19): siRNA sense strand
gaaaggaaacagaauauca

SEQ ID NO: 396663 - RNA, 19 nt, Homo sapiens
  misc_RNA (1)...(19): siRNA sense strand
gaaaaucacuacaggaaaa

SEQ ID NO: 396664 - RNA, 19 nt, Homo sapiens
  misc_RNA (1)...(19): siRNA sense strand
ggaggagcuuucuagaaua

SEQ ID NO: 396665 - RNA, 19 nt, Homo sapiens
  misc_RNA (1)...(19): siRNA sense strand
gaagcagaauuaccugauu

SEQ ID NO: 396666 - RNA, 19 nt, Homo sapiens
  misc_RNA (1)...(19): siRNA sense strand
gaaaucagccaucuuaaag

SEQ ID NO: 396667 - RNA, 19 nt, Homo sapiens
  misc_RNA (1)...(19): siRNA sense strand
acaggaacgugacaaguua

SEQ ID NO: 396668 - RNA, 19 nt, Homo sapiens
  misc_RNA (1)...(19): siRNA sense strand
ggaagaagcaaacaaguau

SEQ ID NO: 396669 - RNA, 19 nt, Homo sapiens
  misc_RNA (1)...(19): siRNA sense strand
gaaguggcccuaaaugauu

SEQ ID NO: 396670 - RNA, 19 nt, Homo sapiens
  misc_RNA (1)...(19): siRNA sense strand
gaagaaguguucagacuac

SEQ ID NO: 396671 - RNA, 19 nt, Homo sapiens
  misc_RNA (1)...(19): siRNA sense strand
gcaacuacuucagucuuua

SEQ ID NO: 396672 - RNA, 19 nt, Homo sapiens
  misc_RNA (1)...(19): siRNA sense strand
gaauguaguuuccaagcaa

SEQ ID NO: 396673 - RNA, 19 nt, Homo sapiens
  misc_RNA (1)...(19): siRNA sense strand
caaaggauaugcugaugga

SEQ ID NO: 396674 - RNA, 19 nt, Homo sapiens
  misc_RNA (1)...(19): siRNA sense strand
ucagaaaugucagacuuua

SEQ ID NO: 396675 - RNA, 19 nt, Homo sapiens
  misc_RNA (1)...(19): siRNA sense strand
cuaaacagauugaucaguu

SEQ ID NO: 396676 - RNA, 19 nt, Homo sapiens
  misc_RNA (1)...(19): siRNA sense strand
uggaacaacuugaggauaa

SEQ ID NO: 396677 - RNA, 19 nt, Homo sapiens
  misc_RNA (1)...(19): siRNA sense strand
ggagaagacaguuguguuu

SEQ ID NO: 396678 - RNA, 19 nt, Homo sapiens
  misc_RNA (1)...(19): siRNA sense strand
guucagagccuuaauauag

SEQ ID NO: 396679 - RNA, 19 nt, Homo sapiens
  misc_RNA (1)...(19): siRNA sense strand
agaguuagauguacagaaa

SEQ ID NO: 396680 - RNA, 19 nt, Homo sapiens
  misc_RNA (1)...(19): siRNA sense strand
gaacuucagaugucacuuu

SEQ ID NO: 396681 - RNA, 19 nt, Homo sapiens
  misc_RNA (1)...(19): siRNA sense strand
gaagcaaagugauacuaug

SEQ ID NO: 396682 - RNA, 19 nt, Homo sapiens
  misc_RNA (1)...(19): siRNA sense strand
gaacaagaacagcuaaaug

SEQ ID NO: 396683 - RNA, 19 nt, Homo sapiens
  misc_RNA (1)...(19): siRNA sense strand
aagagaagcugaaguuaga

SEQ ID NO: 396684 - RNA, 19 nt, Homo sapiens
  misc_RNA (1)...(19): siRNA sense strand
caccaaagcuuucuguuca

SEQ ID NO: 396685 - RNA, 19 nt, Homo sapiens
  misc_RNA (1)...(19): siRNA sense strand
gaaugaaaccaaacucaaa

SEQ ID NO: 396686 - RNA, 19 nt, Homo sapiens
  misc_RNA (1)...(19): siRNA sense strand
uaaauauucucaggccuua

SEQ ID NO: 396687 - RNA, 19 nt, Homo sapiens
  misc_RNA (1)...(19): siRNA sense strand
gacauggacuuuggugaua

SEQ ID NO: 396688 - RNA, 19 nt, Homo sapiens
  misc_RNA (1)...(19): siRNA sense strand
ggagagagaccaagucaug

SEQ ID NO: 396689 - RNA, 19 nt, Homo sapiens
  misc_RNA (1)...(19): siRNA sense strand
gccaagauauguuuagaga

SEQ ID NO: 396690 - RNA, 19 nt, Homo sapiens
  misc_RNA (1)...(19): siRNA sense strand
gaaagagaagcugaaguua

SEQ ID NO: 396691 - RNA, 19 nt, Homo sapiens
  misc_RNA (1)...(19): siRNA sense strand
gcagaaacuugaggacaaa

SEQ ID NO: 396692 - RNA, 19 nt, Homo sapiens
  misc_RNA (1)...(19): siRNA sense strand
uaaaccgacucucaaauga

SEQ ID NO: 396693 - RNA, 19 nt, Homo sapiens
  misc_RNA (1)...(19): siRNA sense strand
gcuggaacaugagcauuua

SEQ ID NO: 396694 - RNA, 19 nt, Homo sapiens
  misc_RNA (1)...(19): siRNA sense strand
gcagcuguaccucuuauua

SEQ ID NO: 396695 - RNA, 19 nt, Homo sapiens
  misc_RNA (1)...(19): siRNA sense strand
caagaacaguugaauguag

SEQ ID NO: 396696 - RNA, 19 nt, Homo sapiens
  misc_RNA (1)...(19): siRNA sense strand
ggagaaggcucuugcuuuu

SEQ ID NO: 396697 - RNA, 19 nt, Homo sapiens
  misc_RNA (1)...(19): siRNA sense strand
gguaaacuaacucagauua

SEQ ID NO: 396698 - RNA, 19 nt, Homo sapiens
  misc_RNA (1)...(19): siRNA sense strand
gggaggagauggagcaguu

SEQ ID NO: 396699 - RNA, 19 nt, Homo sapiens
  misc_RNA (1)...(19): siRNA sense strand
gaacuagcaucugagguau

SEQ ID NO: 396700 - RNA, 19 nt, Homo sapiens
  misc_RNA (1)...(19): siRNA sense strand
caaaugcaccagaaaguuu

SEQ ID NO: 396701 - RNA, 19 nt, Homo sapiens
  misc_RNA (1)...(19): siRNA sense strand
gaaaagguauuugcuguuu

SEQ ID NO: 396702 - RNA, 19 nt, Homo sapiens
  misc_RNA (1)...(19): siRNA sense strand
gacaggacauucaaacaga

SEQ ID NO: 396703 - RNA, 19 nt, Homo sapiens
  misc_RNA (1)...(19): siRNA sense strand
ggaagaaugugaaaacuug

SEQ ID NO: 396704 - RNA, 19 nt, Homo sapiens
  misc_RNA (1)...(19): siRNA sense strand
gaagacaguuguguuucaa

SEQ ID NO: 396705 - RNA, 19 nt, Homo sapiens
  misc_RNA (1)...(19): siRNA sense strand
gaaggaaauggaugaguuu

SEQ ID NO: 396706 - RNA, 19 nt, Homo sapiens
  misc_RNA (1)...(19): siRNA sense strand
gcaaagugauacuaugaca

SEQ ID NO: 396707 - RNA, 19 nt, Homo sapiens
  misc_RNA (1)...(19): siRNA sense strand
uagcugagauagaagaauu

SEQ ID NO: 396708 - RNA, 19 nt, Homo sapiens
  misc_RNA (1)...(19): siRNA sense strand
ugagaaaccucuucauugg

SEQ ID NO: 396709 - RNA, 19 nt, Homo sapiens
  misc_RNA (1)...(19): siRNA sense strand
caucaagacuuacagaaca

SEQ ID NO: 396710 - RNA, 19 nt, Homo sapiens
  misc_RNA (1)...(19): siRNA sense strand
gauucagcaucaagacuua

SEQ ID NO: 396711 - RNA, 19 nt, Homo sapiens
  misc_RNA (1)...(19): siRNA sense strand
ucaagcagcuaaaggagaa

SEQ ID NO: 396712 - RNA, 19 nt, Homo sapiens
  misc_RNA (1)...(19): siRNA sense strand
uuacugaacuagcaucuga

SEQ ID NO: 396713 - RNA, 19 nt, Homo sapiens
  misc_RNA (1)...(19): siRNA sense strand
uaaagaaacuaaggacguu

SEQ ID NO: 396714 - RNA, 19 nt, Homo sapiens
  misc_RNA (1)...(19): siRNA sense strand
ggacagacagaaucaagaa

SEQ ID NO: 396715 - RNA, 19 nt, Homo sapiens
  misc_RNA (1)...(19): siRNA sense strand
uagagaggcuaaacuaaga

SEQ ID NO: 396716 - RNA, 19 nt, Homo sapiens
  misc_RNA (1)...(19): siRNA sense strand
cgaaaucaacuucaacaaa

SEQ ID NO: 396717 - RNA, 19 nt, Homo sapiens
  misc_RNA (1)...(19): siRNA sense strand
gacaaagaauuucguucaa

SEQ ID NO: 396718 - RNA, 19 nt, Homo sapiens
  misc_RNA (1)...(19): siRNA sense strand
caacuacuuucuuccaaug

SEQ ID NO: 396719 - RNA, 19 nt, Homo sapiens
  misc_RNA (1)...(19): siRNA sense strand
ggaagaaguguucagacua

SEQ ID NO: 396720 - RNA, 19 nt, Homo sapiens
  misc_RNA (1)...(19): siRNA sense strand
ggaacaacuugaggauaaa

SEQ ID NO: 396721 - RNA, 19 nt, Homo sapiens
  misc_RNA (1)...(19): siRNA sense strand
aacagaauaucaagcguua

SEQ ID NO: 396722 - RNA, 19 nt, Homo sapiens
  misc_RNA (1)...(19): siRNA sense strand
ggacuauacuggccugauc

SEQ ID NO: 396723 - RNA, 19 nt, Homo sapiens
  misc_RNA (1)...(19): siRNA sense strand
gaucaguuguccaaagaug

SEQ ID NO: 396724 - RNA, 19 nt, Homo sapiens
  misc_RNA (1)...(19): siRNA sense strand
gaaugaaaggcuuaagaaa

SEQ ID NO: 396725 - RNA, 19 nt, Homo sapiens
  misc_RNA (1)...(19): siRNA sense strand
gaaacuuuguacugaucua

SEQ ID NO: 396726 - RNA, 19 nt, Homo sapiens
  misc_RNA (1)...(19): siRNA sense strand
caugaaguguuacgguuaa

SEQ ID NO: 396727 - RNA, 19 nt, Homo sapiens
  misc_RNA (1)...(19): siRNA sense strand
ggacagauauguaaaguuc

SEQ ID NO: 396728 - RNA, 19 nt, Homo sapiens
  misc_RNA (1)...(19): siRNA sense strand
gcacugagcugugggauca

SEQ ID NO: 396729 - RNA, 19 nt, Homo sapiens
  misc_RNA (1)...(19): siRNA sense strand
ggaacaggcuuacgccaaa

SEQ ID NO: 396730 - RNA, 19 nt, Homo sapiens
  misc_RNA (1)...(19): siRNA sense strand
uuaaacagcuggagaauag

SEQ ID NO: 396731 - RNA, 19 nt, Homo sapiens
  misc_RNA (1)...(19): siRNA sense strand
caagagaccugccaaggau

SEQ ID NO: 396732 - RNA, 19 nt, Homo sapiens
  misc_RNA (1)...(19): siRNA sense strand
gaaccucaguguccgugua

SEQ ID NO: 396733 - RNA, 19 nt, Homo sapiens
  misc_RNA (1)...(19): siRNA sense strand
gcaugaagguggcugcaaa

SEQ ID NO: 396734 - RNA, 19 nt, Homo sapiens
  misc_RNA (1)...(19): siRNA sense strand
ugaaggaugucuaugagaa

SEQ ID NO: 396735 - RNA, 19 nt, Homo sapiens
  misc_RNA (1)...(19): siRNA sense strand
gaagguggcugcaaaugcu

SEQ ID NO: 396736 - RNA, 19 nt, Homo sapiens
  misc_RNA (1)...(19): siRNA sense strand
caacaguccuucguacaga

SEQ ID NO: 396737 - RNA, 19 nt, Homo sapiens
  misc_RNA (1)...(19): siRNA sense strand
ugaagagccucccucagaa

SEQ ID NO: 396738 - RNA, 19 nt, Homo sapiens
  misc_RNA (1)...(19): siRNA sense strand
gaacgacucccacguccuu

SEQ ID NO: 396739 - RNA, 19 nt, Homo sapiens
  misc_RNA (1)...(19): siRNA sense strand
ggagucacauggccgaaga

SEQ ID NO: 396740 - RNA, 19 nt, Homo sapiens
  misc_RNA (1)...(19): siRNA sense strand
gaaagaacgcaccgaagug

SEQ ID NO: 396741 - RNA, 19 nt, Homo sapiens
  misc_RNA (1)...(19): siRNA sense strand
ggagguggugcccauaaua

SEQ ID NO: 396742 - RNA, 19 nt, Homo sapiens
  misc_RNA (1)...(19): siRNA sense strand
gcaagaagaacaagacagu

SEQ ID NO: 396743 - RNA, 19 nt, Homo sapiens
  misc_RNA (1)...(19): siRNA sense strand
uuauagagcugcacaaguc

SEQ ID NO: 396744 - RNA, 19 nt, Homo sapiens
  misc_RNA (1)...(19): siRNA sense strand
gaaagucgaguccuuagca

SEQ ID NO: 396745 - RNA, 19 nt, Homo sapiens
  misc_RNA (1)...(19): siRNA sense strand
gauccugaguccaaauuca

SEQ ID NO: 396746 - RNA, 19 nt, Homo sapiens
  misc_RNA (1)...(19): siRNA sense strand
gagaauaguaagcguaaau

SEQ ID NO: 396747 - RNA, 19 nt, Homo sapiens
  misc_RNA (1)...(19): siRNA sense strand
gaagaacgcagucgugaac

SEQ ID NO: 396748 - RNA, 19 nt, Homo sapiens
  misc_RNA (1)...(19): siRNA sense strand
gaacggcuagaccaggaua

SEQ ID NO: 396749 - RNA, 19 nt, Homo sapiens
  misc_RNA (1)...(19): siRNA sense strand
ggaggugaaugacuuugca

SEQ ID NO: 396750 - RNA, 19 nt, Homo sapiens
  misc_RNA (1)...(19): siRNA sense strand
ggaguuugaugaggauuuc

SEQ ID NO: 396751 - RNA, 19 nt, Homo sapiens
  misc_RNA (1)...(19): siRNA sense strand
gcugaaagucgaguccuua

SEQ ID NO: 396752 - RNA, 19 nt, Homo sapiens
  misc_RNA (1)...(19): siRNA sense strand
aauuggaagugcagaagua

SEQ ID NO: 396753 - RNA, 19 nt, Homo sapiens
  misc_RNA (1)...(19): siRNA sense strand
gcaccaagcgcuggccuuu

SEQ ID NO: 396754 - RNA, 19 nt, Homo sapiens
  misc_RNA (1)...(19): siRNA sense strand
agaccaagcccacuucuau

SEQ ID NO: 396755 - RNA, 19 nt, Homo sapiens
  misc_RNA (1)...(19): siRNA sense strand
aaaugaaggaugucuauga

SEQ ID NO: 396756 - RNA, 19 nt, Homo sapiens
  misc_RNA (1)...(19): siRNA sense strand
ucgauaagcuccaagacau

SEQ ID NO: 396757 - RNA, 19 nt, Homo sapiens
  misc_RNA (1)...(19): siRNA sense strand
gauauucgauaagcuccaa

SEQ ID NO: 396758 - RNA, 19 nt, Homo sapiens
  misc_RNA (1)...(19): siRNA sense strand
ccaaggagagcucugaaga

SEQ ID NO: 396759 - RNA, 19 nt, Homo sapiens
  misc_RNA (1)...(19): siRNA sense strand
aaacagcuggagaauagua

SEQ ID NO: 396760 - RNA, 19 nt, Homo sapiens
  misc_RNA (1)...(19): siRNA sense strand
gcugaaacccugagcaaca

SEQ ID NO: 396761 - RNA, 19 nt, Homo sapiens
  misc_RNA (1)...(19): siRNA sense strand
ccaagagaccugccaagga

SEQ ID NO: 396762 - RNA, 19 nt, Homo sapiens
  misc_RNA (1)...(19): siRNA sense strand
gagccucccucagaagaga

SEQ ID NO: 396763 - RNA, 19 nt, Homo sapiens
  misc_RNA (1)...(19): siRNA sense strand
gaacgcagucgugaacuuc

SEQ ID NO: 396764 - RNA, 19 nt, Homo sapiens
  misc_RNA (1)...(19): siRNA sense strand
ggaagaacgcagucgugaa

SEQ ID NO: 396765 - RNA, 19 nt, Homo sapiens
  misc_RNA (1)...(19): siRNA sense strand
caaguacucacaagagaug

SEQ ID NO: 396766 - RNA, 19 nt, Homo sapiens
  misc_RNA (1)...(19): siRNA sense strand
gaaaaugaaggaugucuau

SEQ ID NO: 396767 - RNA, 19 nt, Homo sapiens
  misc_RNA (1)...(19): siRNA sense strand
ggagaauaguaagcguaaa

SEQ ID NO: 396768 - RNA, 19 nt, Homo sapiens
  misc_RNA (1)...(19): siRNA sense strand
ugaaagaacgcaccgaagu

SEQ ID NO: 396769 - RNA, 19 nt, Homo sapiens
  misc_RNA (1)...(19): siRNA sense strand
gaccaagcccacuucuauu

SEQ ID NO: 396770 - RNA, 19 nt, Homo sapiens
  misc_RNA (1)...(19): siRNA sense strand
cgacucccacguccuuaua

SEQ ID NO: 396771 - RNA, 19 nt, Homo sapiens
  misc_RNA (1)...(19): siRNA sense strand
gaaauuggaagugcagaag

SEQ ID NO: 396772 - RNA, 19 nt, Homo sapiens
  misc_RNA (1)...(19): siRNA sense strand
cgagggcacuaucucuaug

SEQ ID NO: 396773 - RNA, 19 nt, Homo sapiens
  misc_RNA (1)...(19): siRNA sense strand
ccauuuacacggaguuuga

SEQ ID NO: 396774 - RNA, 19 nt, Homo sapiens
  misc_RNA (1)...(19): siRNA sense strand
ucacauggccgaagaaagc

SEQ ID NO: 396775 - RNA, 19 nt, Homo sapiens
  misc_RNA (1)...(19): siRNA sense strand
gaaacccugagcaacauug

SEQ ID NO: 396776 - RNA, 19 nt, Homo sapiens
  misc_RNA (1)...(19): siRNA sense strand
gcuggaaaauggcuuuaaa

SEQ ID NO: 396777 - RNA, 19 nt, Homo sapiens
  misc_RNA (1)...(19): siRNA sense strand
acauugaacggcugaaauu

SEQ ID NO: 396778 - RNA, 19 nt, Homo sapiens
  misc_RNA (1)...(19): siRNA sense strand
caacauugaacggcugaaa

SEQ ID NO: 396779 - RNA, 19 nt, Homo sapiens
  misc_RNA (1)...(19): siRNA sense strand
gggaagcccuaaagaaaau

SEQ ID NO: 396780 - RNA, 19 nt, Homo sapiens
  misc_RNA (1)...(19): siRNA sense strand
aaacgaauaugcggcucaa

SEQ ID NO: 396781 - RNA, 19 nt, Homo sapiens
  misc_RNA (1)...(19): siRNA sense strand
ggagaaggccaagcagcaa

SEQ ID NO: 396782 - RNA, 19 nt, Homo sapiens
  misc_RNA (1)...(19): siRNA sense strand
uggaagugcagaaguauga

SEQ ID NO: 396783 - RNA, 19 nt, Homo sapiens
  misc_RNA (1)...(19): siRNA sense strand
uugaacggcugaaauugga

SEQ ID NO: 396784 - RNA, 19 nt, Homo sapiens
  misc_RNA (1)...(19): siRNA sense strand
gaagagccucccucagaag

SEQ ID NO: 396785 - RNA, 19 nt, Homo sapiens
  misc_RNA (1)...(19): siRNA sense strand
gagguggugcccauaauag

SEQ ID NO: 396786 - RNA, 19 nt, Homo sapiens
  misc_RNA (1)...(19): siRNA sense strand
gcgagggcacuaucucuau

SEQ ID NO: 396787 - RNA, 19 nt, Homo sapiens
  misc_RNA (1)...(19): siRNA sense strand
gaacaggcuuacgccaaac

SEQ ID NO: 396788 - RNA, 19 nt, Homo sapiens
  misc_RNA (1)...(19): siRNA sense strand
ccagacagcagcagcaaca

SEQ ID NO: 396789 - RNA, 19 nt, Homo sapiens
  misc_RNA (1)...(19): siRNA sense strand
gaaggaugucuaugagaag

SEQ ID NO: 396790 - RNA, 19 nt, Homo sapiens
  misc_RNA (1)...(19): siRNA sense strand
uccaggaggugaaugacuu

SEQ ID NO: 396791 - RNA, 19 nt, Homo sapiens
  misc_RNA (1)...(19): siRNA sense strand
caucacaggacaccaagga

SEQ ID NO: 396792 - RNA, 19 nt, Homo sapiens
  misc_RNA (1)...(19): siRNA sense strand
gcaacaguccuucguacag

SEQ ID NO: 396793 - RNA, 19 nt, Homo sapiens
  misc_RNA (1)...(19): siRNA sense strand
gcuuuaaacagcuggagaa

SEQ ID NO: 396794 - RNA, 19 nt, Homo sapiens
  misc_RNA (1)...(19): siRNA sense strand
ggccaucuaccacuuugaa

SEQ ID NO: 396795 - RNA, 19 nt, Homo sapiens
  misc_RNA (1)...(19): siRNA sense strand
gcgcaucacaggacaccaa

SEQ ID NO: 396796 - RNA, 19 nt, Homo sapiens
  misc_RNA (1)...(19): siRNA sense strand
agaacgcagucgugaacuu

SEQ ID NO: 396797 - RNA, 19 nt, Homo sapiens
  misc_RNA (1)...(19): siRNA sense strand
gggagcugguggcugagaa

SEQ ID NO: 396798 - RNA, 19 nt, Homo sapiens
  misc_RNA (1)...(19): siRNA sense strand
gagaccaagcccacuucua

SEQ ID NO: 396799 - RNA, 19 nt, Homo sapiens
  misc_RNA (1)...(19): siRNA sense strand
guacucacaagagaugaaa

SEQ ID NO: 396800 - RNA, 19 nt, Homo sapiens
  misc_RNA (1)...(19): siRNA sense strand
aaugaaggaugucuaugag

SEQ ID NO: 396801 - RNA, 19 nt, Homo sapiens
  misc_RNA (1)...(19): siRNA sense strand
gagcugcacaagucagguu

SEQ ID NO: 396802 - RNA, 19 nt, Homo sapiens
  misc_RNA (1)...(19): siRNA sense strand
gaccaaguacucacaagag

SEQ ID NO: 396803 - RNA, 19 nt, Homo sapiens
  misc_RNA (1)...(19): siRNA sense strand
aaagucgaguccuuagcaa

SEQ ID NO: 396804 - RNA, 19 nt, Homo sapiens
  misc_RNA (1)...(19): siRNA sense strand
auguaaaguucgugaaaga

SEQ ID NO: 396805 - RNA, 19 nt, Homo sapiens
  misc_RNA (1)...(19): siRNA sense strand
ccagcaacaguccuucgua

SEQ ID NO: 396806 - RNA, 19 nt, Homo sapiens
  misc_RNA (1)...(19): siRNA sense strand
uggagaauaguaagcguaa

SEQ ID NO: 396807 - RNA, 19 nt, Homo sapiens
  misc_RNA (1)...(19): siRNA sense strand
acagauauguaaaguucgu

SEQ ID NO: 396808 - RNA, 19 nt, Homo sapiens
  misc_RNA (1)...(19): siRNA sense strand
accaagcccacuucuauuu

SEQ ID NO: 396809 - RNA, 19 nt, Homo sapiens
  misc_RNA (1)...(19): siRNA sense strand
gaaacaggagaggaagaug

SEQ ID NO: 396810 - RNA, 19 nt, Homo sapiens
  misc_RNA (1)...(19): siRNA sense strand
gcuacgugcccaccuccua

SEQ ID NO: 396811 - RNA, 19 nt, Homo sapiens
  misc_RNA (1)...(19): siRNA sense strand
aaggaugucuaugagaaga

SEQ ID NO: 396812 - RNA, 19 nt, Homo sapiens
  misc_RNA (1)...(19): siRNA sense strand
cgaauaugcggcucaacug

SEQ ID NO: 396813 - RNA, 19 nt, Homo sapiens
  misc_RNA (1)...(19): siRNA sense strand
accaaguacucacaagaga

SEQ ID NO: 396814 - RNA, 19 nt, Homo sapiens
  misc_RNA (1)...(19): siRNA sense strand
ccgagucacgcucaauuga

SEQ ID NO: 396815 - RNA, 19 nt, Homo sapiens
  misc_RNA (1)...(19): siRNA sense strand
gacuucagccagcccauga

SEQ ID NO: 396816 - RNA, 19 nt, Homo sapiens
  misc_RNA (1)...(19): siRNA sense strand
uauguaaaguucgugaaag

SEQ ID NO: 396817 - RNA, 19 nt, Homo sapiens
  misc_RNA (1)...(19): siRNA sense strand
ccaaggcugauguggagaa

SEQ ID NO: 396818 - RNA, 19 nt, Homo sapiens
  misc_RNA (1)...(19): siRNA sense strand
ugaccaaguacucacaaga

SEQ ID NO: 396819 - RNA, 19 nt, Homo sapiens
  misc_RNA (1)...(19): siRNA sense strand
ccaggaggugaaugacuuu

SEQ ID NO: 396820 - RNA, 19 nt, Homo sapiens
  misc_RNA (1)...(19): siRNA sense strand
gauauguaaaguucgugaa

SEQ ID NO: 396821 - RNA, 19 nt, Homo sapiens
  misc_RNA (1)...(19): siRNA sense strand
agaacgcaccgaaguggaa

SEQ ID NO: 396822 - RNA, 19 nt, Homo sapiens
  misc_RNA (1)...(19): siRNA sense strand
ugaaacaggagaggaagau

SEQ ID NO: 396823 - RNA, 19 nt, Homo sapiens
  misc_RNA (1)...(19): siRNA sense strand
ugaaauuggaagugcagaa

SEQ ID NO: 396824 - RNA, 19 nt, Homo sapiens
  misc_RNA (1)...(19): siRNA sense strand
gcgcuucaaccgagaccaa

SEQ ID NO: 396825 - RNA, 19 nt, Homo sapiens
  misc_RNA (1)...(19): siRNA sense strand
gucacuguguggccaucua

SEQ ID NO: 396826 - RNA, 19 nt, Homo sapiens
  misc_RNA (1)...(19): siRNA sense strand
gcagcaacagcgcaucaca

SEQ ID NO: 396827 - RNA, 19 nt, Homo sapiens
  misc_RNA (1)...(19): siRNA sense strand
gaaagaagauuggcaaaua

SEQ ID NO: 396828 - RNA, 19 nt, Homo sapiens
  misc_RNA (1)...(19): siRNA sense strand
caacaaaucuccauauuga

SEQ ID NO: 396829 - RNA, 19 nt, Homo sapiens
  misc_RNA (1)...(19): siRNA sense strand
gaaagauguugacaagaua

SEQ ID NO: 396830 - RNA, 19 nt, Homo sapiens
  misc_RNA (1)...(19): siRNA sense strand
ggagagagguuaaacaaau

SEQ ID NO: 396831 - RNA, 19 nt, Homo sapiens
  misc_RNA (1)...(19): siRNA sense strand
caaaugaccuuucuagaug

SEQ ID NO: 396832 - RNA, 19 nt, Homo sapiens
  misc_RNA (1)...(19): siRNA sense strand
ggaaagauguugacaagau

SEQ ID NO: 396833 - RNA, 19 nt, Homo sapiens
  misc_RNA (1)...(19): siRNA sense strand
gagagagguuaaacaaaua

SEQ ID NO: 396834 - RNA, 19 nt, Homo sapiens
  misc_RNA (1)...(19): siRNA sense strand
gaagaguucuagagauaaa

SEQ ID NO: 396835 - RNA, 19 nt, Homo sapiens
  misc_RNA (1)...(19): siRNA sense strand
guaacaaccuucagaaaug

SEQ ID NO: 396836 - RNA, 19 nt, Homo sapiens
  misc_RNA (1)...(19): siRNA sense strand
caaccaaacuaccauacua

SEQ ID NO: 396837 - RNA, 19 nt, Homo sapiens
  misc_RNA (1)...(19): siRNA sense strand
caaguuaacuccuccagaa

SEQ ID NO: 396838 - RNA, 19 nt, Homo sapiens
  misc_RNA (1)...(19): siRNA sense strand
gucagaaccuguacucuua

SEQ ID NO: 396839 - RNA, 19 nt, Homo sapiens
  misc_RNA (1)...(19): siRNA sense strand
acaaagaacuuacccuuga

SEQ ID NO: 396840 - RNA, 19 nt, Homo sapiens
  misc_RNA (1)...(19): siRNA sense strand
gaagaaagcauaauaucug

SEQ ID NO: 396841 - RNA, 19 nt, Homo sapiens
  misc_RNA (1)...(19): siRNA sense strand
cauagaaccuguuuaaauc

SEQ ID NO: 396842 - RNA, 19 nt, Homo sapiens
  misc_RNA (1)...(19): siRNA sense strand
agaaguauccguccaaaua

SEQ ID NO: 396843 - RNA, 19 nt, Homo sapiens
  misc_RNA (1)...(19): siRNA sense strand
gagaaaaggugaaauagaa

SEQ ID NO: 396844 - RNA, 19 nt, Homo sapiens
  misc_RNA (1)...(19): siRNA sense strand
gaaggcagcuauaguaguc

SEQ ID NO: 396845 - RNA, 19 nt, Homo sapiens
  misc_RNA (1)...(19): siRNA sense strand
gaaacaggagcuaaucaua

SEQ ID NO: 396846 - RNA, 19 nt, Homo sapiens
  misc_RNA (1)...(19): siRNA sense strand
gaaaauggauccuaauguu

SEQ ID NO: 396847 - RNA, 19 nt, Homo sapiens
  misc_RNA (1)...(19): siRNA sense strand
gauaaguucugucaauuag

SEQ ID NO: 396848 - RNA, 19 nt, Homo sapiens
  misc_RNA (1)...(19): siRNA sense strand
gaaggacucaagugaaaua

SEQ ID NO: 396849 - RNA, 19 nt, Homo sapiens
  misc_RNA (1)...(19): siRNA sense strand
gaaacuggaagaaucauuu

SEQ ID NO: 396850 - RNA, 19 nt, Homo sapiens
  misc_RNA (1)...(19): siRNA sense strand
ggauagcacuguaaucugu

SEQ ID NO: 396851 - RNA, 19 nt, Homo sapiens
  misc_RNA (1)...(19): siRNA sense strand
gaucauacccauccaaaga

SEQ ID NO: 396852 - RNA, 19 nt, Homo sapiens
  misc_RNA (1)...(19): siRNA sense strand
gaacaacaaaucuccauau

SEQ ID NO: 396853 - RNA, 19 nt, Homo sapiens
  misc_RNA (1)...(19): siRNA sense strand
cauaauaucugcaguggau

SEQ ID NO: 396854 - RNA, 19 nt, Homo sapiens
  misc_RNA (1)...(19): siRNA sense strand
ggaagucuguugacacuca

SEQ ID NO: 396855 - RNA, 19 nt, Homo sapiens
  misc_RNA (1)...(19): siRNA sense strand
cauaauugcuucaguuguu

SEQ ID NO: 396856 - RNA, 19 nt, Homo sapiens
  misc_RNA (1)...(19): siRNA sense strand
uaacaaagcaaacucugua

SEQ ID NO: 396857 - RNA, 19 nt, Homo sapiens
  misc_RNA (1)...(19): siRNA sense strand
gaacaugagcuaucaagau

SEQ ID NO: 396858 - RNA, 19 nt, Homo sapiens
  misc_RNA (1)...(19): siRNA sense strand
gaaaugaucacuugaacau

SEQ ID NO: 396859 - RNA, 19 nt, Homo sapiens
  misc_RNA (1)...(19): siRNA sense strand
ggucagugauguaguuaaa

SEQ ID NO: 396860 - RNA, 19 nt, Homo sapiens
  misc_RNA (1)...(19): siRNA sense strand
gaaguauccguccaaauaa

SEQ ID NO: 396861 - RNA, 19 nt, Homo sapiens
  misc_RNA (1)...(19): siRNA sense strand
gaaagcaagucagagcaaa

SEQ ID NO: 396862 - RNA, 19 nt, Homo sapiens
  misc_RNA (1)...(19): siRNA sense strand
gccauguucugucaacuua

SEQ ID NO: 396863 - RNA, 19 nt, Homo sapiens
  misc_RNA (1)...(19): siRNA sense strand
caaacaagauauggaugua

SEQ ID NO: 396864 - RNA, 19 nt, Homo sapiens
  misc_RNA (1)...(19): siRNA sense strand
aaccagagcuuaaagaaga

SEQ ID NO: 396865 - RNA, 19 nt, Homo sapiens
  misc_RNA (1)...(19): siRNA sense strand
ggagaugugugaugcaugu

SEQ ID NO: 396866 - RNA, 19 nt, Homo sapiens
  misc_RNA (1)...(19): siRNA sense strand
gauugcaucucacucagua

SEQ ID NO: 396867 - RNA, 19 nt, Homo sapiens
  misc_RNA (1)...(19): siRNA sense strand
ugacaauguuucagacuuu

SEQ ID NO: 396868 - RNA, 19 nt, Homo sapiens
  misc_RNA (1)...(19): siRNA sense strand
caagaaauuugaggaagaa

SEQ ID NO: 396869 - RNA, 19 nt, Homo sapiens
  misc_RNA (1)...(19): siRNA sense strand
ugaaguuucugauguugua

SEQ ID NO: 396870 - RNA, 19 nt, Homo sapiens
  misc_RNA (1)...(19): siRNA sense strand
gcaaagauagcaucauuuc

SEQ ID NO: 396871 - RNA, 19 nt, Homo sapiens
  misc_RNA (1)...(19): siRNA sense strand
ugacauaauugcuucaguu

SEQ ID NO: 396872 - RNA, 19 nt, Homo sapiens
  misc_RNA (1)...(19): siRNA sense strand
cagaacaucuuccacauca

SEQ ID NO: 396873 - RNA, 19 nt, Homo sapiens
  misc_RNA (1)...(19): siRNA sense strand
caacagcaacaaagaagua

SEQ ID NO: 396874 - RNA, 19 nt, Homo sapiens
  misc_RNA (1)...(19): siRNA sense strand
ugaagaauauggagucaga

SEQ ID NO: 396875 - RNA, 19 nt, Homo sapiens
  misc_RNA (1)...(19): siRNA sense strand
aggaagaguucuagagaua

SEQ ID NO: 396876 - RNA, 19 nt, Homo sapiens
  misc_RNA (1)...(19): siRNA sense strand
gaaugucgauccuucuaug

SEQ ID NO: 396877 - RNA, 19 nt, Homo sapiens
  misc_RNA (1)...(19): siRNA sense strand
ucagaacaguccacaguuu

SEQ ID NO: 396878 - RNA, 19 nt, Homo sapiens
  misc_RNA (1)...(19): siRNA sense strand
ggugauaaguucugucaau

SEQ ID NO: 396879 - RNA, 19 nt, Homo sapiens
  misc_RNA (1)...(19): siRNA sense strand
gaaaagcagcggaaaguua

SEQ ID NO: 396880 - RNA, 19 nt, Homo sapiens
  misc_RNA (1)...(19): siRNA sense strand
uaacaaccuucagaaauga

SEQ ID NO: 396881 - RNA, 19 nt, Homo sapiens
  misc_RNA (1)...(19): siRNA sense strand
cuaauaguguggucaauga

SEQ ID NO: 396882 - RNA, 19 nt, Homo sapiens
  misc_RNA (1)...(19): siRNA sense strand
gaacagaagccagagaaug

SEQ ID NO: 396883 - RNA, 19 nt, Homo sapiens
  misc_RNA (1)...(19): siRNA sense strand
aaaggcugcuugaagaaua

SEQ ID NO: 396884 - RNA, 19 nt, Homo sapiens
  misc_RNA (1)...(19): siRNA sense strand
cagaaguaauuuccucuuu

SEQ ID NO: 396885 - RNA, 19 nt, Homo sapiens
  misc_RNA (1)...(19): siRNA sense strand
auaaucagcuuggacuuua

SEQ ID NO: 396886 - RNA, 19 nt, Homo sapiens
  misc_RNA (1)...(19): siRNA sense strand
ggacuugguuugccuucuu

SEQ ID NO: 396887 - RNA, 19 nt, Homo sapiens
  misc_RNA (1)...(19): siRNA sense strand
aaacaagaguggagaaaca

SEQ ID NO: 396888 - RNA, 19 nt, Homo sapiens
  misc_RNA (1)...(19): siRNA sense strand
gcaaugcaguuagcuucua

SEQ ID NO: 396889 - RNA, 19 nt, Homo sapiens
  misc_RNA (1)...(19): siRNA sense strand
gaacaucuuccacaucaga

SEQ ID NO: 396890 - RNA, 19 nt, Homo sapiens
  misc_RNA (1)...(19): siRNA sense strand
gggcucagauagcaguaua

SEQ ID NO: 396891 - RNA, 19 nt, Homo sapiens
  misc_RNA (1)...(19): siRNA sense strand
uaaagaagagccugaagaa

SEQ ID NO: 396892 - RNA, 19 nt, Homo sapiens
  misc_RNA (1)...(19): siRNA sense strand
gaacaagacaacucugaau

SEQ ID NO: 396893 - RNA, 19 nt, Homo sapiens
  misc_RNA (1)...(19): siRNA sense strand
caaagcaacaguaauaguu

SEQ ID NO: 396894 - RNA, 19 nt, Homo sapiens
  misc_RNA (1)...(19): siRNA sense strand
ggaaugcaauauggauaaa

SEQ ID NO: 396895 - RNA, 19 nt, Homo sapiens
  misc_RNA (1)...(19): siRNA sense strand
gaucaaauacaggaagaua

SEQ ID NO: 396896 - RNA, 19 nt, Homo sapiens
  misc_RNA (1)...(19): siRNA sense strand
gauaauuccucagaacaga

SEQ ID NO: 396897 - RNA, 19 nt, Homo sapiens
  misc_RNA (1)...(19): siRNA sense strand
ucacagcuguauucaggua

SEQ ID NO: 396898 - RNA, 19 nt, Homo sapiens
  misc_RNA (1)...(19): siRNA sense strand
caaagaacuuacccuugaa

SEQ ID NO: 396899 - RNA, 19 nt, Homo sapiens
  misc_RNA (1)...(19): siRNA sense strand
uuaauagccucuacaucua

SEQ ID NO: 396900 - RNA, 19 nt, Homo sapiens
  misc_RNA (1)...(19): siRNA sense strand
guuguucacucuuuguuaa

SEQ ID NO: 396901 - RNA, 19 nt, Homo sapiens
  misc_RNA (1)...(19): siRNA sense strand
uggaaaagauugucacuua

SEQ ID NO: 396902 - RNA, 19 nt, Homo sapiens
  misc_RNA (1)...(19): siRNA sense strand
gguauuggauuacuuaguc

SEQ ID NO: 396903 - RNA, 19 nt, Homo sapiens
  misc_RNA (1)...(19): siRNA sense strand
uuacagagauccugcacuu

SEQ ID NO: 396904 - RNA, 19 nt, Homo sapiens
  misc_RNA (1)...(19): siRNA sense strand
uaagauagaacaugagcua

SEQ ID NO: 396905 - RNA, 19 nt, Homo sapiens
  misc_RNA (1)...(19): siRNA sense strand
ccaaucaaguguuacaaau

SEQ ID NO: 396906 - RNA, 19 nt, Homo sapiens
  misc_RNA (1)...(19): siRNA sense strand
gaaggaaaaccccauaaua

SEQ ID NO: 396907 - RNA, 19 nt, Homo sapiens
  misc_RNA (1)...(19): siRNA sense strand
gaugguauuggauuacuua

SEQ ID NO: 396908 - RNA, 19 nt, Homo sapiens
  misc_RNA (1)...(19): siRNA sense strand
gacugaaccuaaugcuaua

SEQ ID NO: 396909 - RNA, 19 nt, Homo sapiens
  misc_RNA (1)...(19): siRNA sense strand
cagaauguguaucuucaaa

SEQ ID NO: 396910 - RNA, 19 nt, Homo sapiens
  misc_RNA (1)...(19): siRNA sense strand
uaaaacagauugccucaaa

SEQ ID NO: 396911 - RNA, 19 nt, Homo sapiens
  misc_RNA (1)...(19): siRNA sense strand
acauagagcaccaguauuu

SEQ ID NO: 396912 - RNA, 19 nt, Homo sapiens
  misc_RNA (1)...(19): siRNA sense strand
gugcguccaucuucuagua

SEQ ID NO: 396913 - RNA, 19 nt, Homo sapiens
  misc_RNA (1)...(19): siRNA sense strand
gaagaaagagaacaagaca

SEQ ID NO: 396914 - RNA, 19 nt, Homo sapiens
  misc_RNA (1)...(19): siRNA sense strand
gaagaugaugaacuagaua

SEQ ID NO: 396915 - RNA, 19 nt, Homo sapiens
  misc_RNA (1)...(19): siRNA sense strand
aaacggaguaguuagaaua

SEQ ID NO: 396916 - RNA, 19 nt, Homo sapiens
  misc_RNA (1)...(19): siRNA sense strand
gauaguaagaucauaguug

SEQ ID NO: 396917 - RNA, 19 nt, Homo sapiens
  misc_RNA (1)...(19): siRNA sense strand
gagaaaauccuaaagguaa

SEQ ID NO: 396918 - RNA, 19 nt, Homo sapiens
  misc_RNA (1)...(19): siRNA sense strand
cuccugaacugcaaagaua

SEQ ID NO: 396919 - RNA, 19 nt, Homo sapiens
  misc_RNA (1)...(19): siRNA sense strand
ugaccaauaugaugaugaa

SEQ ID NO: 396920 - RNA, 19 nt, Homo sapiens
  misc_RNA (1)...(19): siRNA sense strand
gaauagaugguuucucuuc

SEQ ID NO: 396921 - RNA, 19 nt, Homo sapiens
  misc_RNA (1)...(19): siRNA sense strand
cagcaggagugccaaagaa

SEQ ID NO: 396922 - RNA, 19 nt, Homo sapiens
  misc_RNA (1)...(19): siRNA sense strand
ccaguuacauuagccagua

SEQ ID NO: 396923 - RNA, 19 nt, Homo sapiens
  misc_RNA (1)...(19): siRNA sense strand
caaacucugacuucauuua

SEQ ID NO: 396924 - RNA, 19 nt, Homo sapiens
  misc_RNA (1)...(19): siRNA sense strand
gaacaccgucgaauucuuc

SEQ ID NO: 396925 - RNA, 19 nt, Homo sapiens
  misc_RNA (1)...(19): siRNA sense strand
gaaucuggcucugaaagug

SEQ ID NO: 396926 - RNA, 19 nt, Homo sapiens
  misc_RNA (1)...(19): siRNA sense strand
ggcagaacaucaccucuug

SEQ ID NO: 396927 - RNA, 19 nt, Homo sapiens
  misc_RNA (1)...(19): siRNA sense strand
gaucagcucuuccuaccaa

SEQ ID NO: 396928 - RNA, 19 nt, Homo sapiens
  misc_RNA (1)...(19): siRNA sense strand
gaacagugcaacccugaaa

SEQ ID NO: 396929 - RNA, 19 nt, Homo sapiens
  misc_RNA (1)...(19): siRNA sense strand
aaacaaagaugaugaugac

SEQ ID NO: 396930 - RNA, 19 nt, Homo sapiens
  misc_RNA (1)...(19): siRNA sense strand
gcaagagccuuuguuugug

SEQ ID NO: 396931 - RNA, 19 nt, Homo sapiens
  misc_RNA (1)...(19): siRNA sense strand
caaagaugaugaugacucu

SEQ ID NO: 396932 - RNA, 19 nt, Homo sapiens
  misc_RNA (1)...(19): siRNA sense strand
agacugcuguuuaggaauu

SEQ ID NO: 396933 - RNA, 19 nt, Homo sapiens
  misc_RNA (1)...(19): siRNA sense strand
caauagugaugaggaagaa

SEQ ID NO: 396934 - RNA, 19 nt, Homo sapiens
  misc_RNA (1)...(19): siRNA sense strand
caaccucgaucagggagaa

SEQ ID NO: 396935 - RNA, 19 nt, Homo sapiens
  misc_RNA (1)...(19): siRNA sense strand
ggaaucugcaacauuaaga

SEQ ID NO: 396936 - RNA, 19 nt, Homo sapiens
  misc_RNA (1)...(19): siRNA sense strand
agaugaugaugacucuaua

SEQ ID NO: 396937 - RNA, 19 nt, Homo sapiens
  misc_RNA (1)...(19): siRNA sense strand
caaagcaaagcucaugaga

SEQ ID NO: 396938 - RNA, 19 nt, Homo sapiens
  misc_RNA (1)...(19): siRNA sense strand
gaggaagaagacagaguuu

SEQ ID NO: 396939 - RNA, 19 nt, Homo sapiens
  misc_RNA (1)...(19): siRNA sense strand
gaaucugcaacauuaagaa

SEQ ID NO: 396940 - RNA, 19 nt, Homo sapiens
  misc_RNA (1)...(19): siRNA sense strand
ugcaagagccuuuguuugu

SEQ ID NO: 396941 - RNA, 19 nt, Homo sapiens
  misc_RNA (1)...(19): siRNA sense strand
gaaacucguccuguugaga

SEQ ID NO: 396942 - RNA, 19 nt, Homo sapiens
  misc_RNA (1)...(19): siRNA sense strand
aaacucguccuguugagaa

SEQ ID NO: 396943 - RNA, 19 nt, Homo sapiens
  misc_RNA (1)...(19): siRNA sense strand
caugcaagagccuuuguuu

SEQ ID NO: 396944 - RNA, 19 nt, Homo sapiens
  misc_RNA (1)...(19): siRNA sense strand
guggagccaucccagaaug

SEQ ID NO: 396945 - RNA, 19 nt, Homo sapiens
  misc_RNA (1)...(19): siRNA sense strand
ugaggaagaagacagaguu

SEQ ID NO: 396946 - RNA, 19 nt, Homo sapiens
  misc_RNA (1)...(19): siRNA sense strand
aggggaaucugcaacauua

SEQ ID NO: 396947 - RNA, 19 nt, Homo sapiens
  misc_RNA (1)...(19): siRNA sense strand
cccagaaugaggagucuua

SEQ ID NO: 396948 - RNA, 19 nt, Homo sapiens
  misc_RNA (1)...(19): siRNA sense strand
gggagaagacaaagcaaag

SEQ ID NO: 396949 - RNA, 19 nt, Homo sapiens
  misc_RNA (1)...(19): siRNA sense strand
ccacaccucaggcaguuga

SEQ ID NO: 396950 - RNA, 19 nt, Homo sapiens
  misc_RNA (1)...(19): siRNA sense strand
gacaaagcaaagcucauga

SEQ ID NO: 396951 - RNA, 19 nt, Homo sapiens
  misc_RNA (1)...(19): siRNA sense strand
agacaaagcaaagcucaug

SEQ ID NO: 396952 - RNA, 19 nt, Homo sapiens
  misc_RNA (1)...(19): siRNA sense strand
ucaauagugaugaggaaga

SEQ ID NO: 396953 - RNA, 19 nt, Homo sapiens
  misc_RNA (1)...(19): siRNA sense strand
aagaugaugaugacucuau

SEQ ID NO: 396954 - RNA, 19 nt, Homo sapiens
  misc_RNA (1)...(19): siRNA sense strand
gagaagacaaagcaaagcu

SEQ ID NO: 396955 - RNA, 19 nt, Homo sapiens
  misc_RNA (1)...(19): siRNA sense strand
gaugaugaugacucuauag

SEQ ID NO: 396956 - RNA, 19 nt, Homo sapiens
  misc_RNA (1)...(19): siRNA sense strand
ccugaaacucguccuguug

SEQ ID NO: 396957 - RNA, 19 nt, Homo sapiens
  misc_RNA (1)...(19): siRNA sense strand
ucagggagaagacaaagca

SEQ ID NO: 396958 - RNA, 19 nt, Homo sapiens
  misc_RNA (1)...(19): siRNA sense strand
gggaaucugcaacauuaag

SEQ ID NO: 396959 - RNA, 19 nt, Homo sapiens
  misc_RNA (1)...(19): siRNA sense strand
uaaagccuguggaaaacaa

SEQ ID NO: 396960 - RNA, 19 nt, Homo sapiens
  misc_RNA (1)...(19): siRNA sense strand
uagcugauuuucucaauag

SEQ ID NO: 396961 - RNA, 19 nt, Homo sapiens
  misc_RNA (1)...(19): siRNA sense strand
ccagaaugaggagucuuaa

SEQ ID NO: 396962 - RNA, 19 nt, Homo sapiens
  misc_RNA (1)...(19): siRNA sense strand
ugaugacucuauagcugau

SEQ ID NO: 396963 - RNA, 19 nt, Homo sapiens
  misc_RNA (1)...(19): siRNA sense strand
cccugaaacucguccuguu

SEQ ID NO: 396964 - RNA, 19 nt, Homo sapiens
  misc_RNA (1)...(19): siRNA sense strand
cugaaacucguccuguuga

SEQ ID NO: 396965 - RNA, 19 nt, Homo sapiens
  misc_RNA (1)...(19): siRNA sense strand
uaaagaagauggcauuguu

SEQ ID NO: 396966 - RNA, 19 nt, Homo sapiens
  misc_RNA (1)...(19): siRNA sense strand
gaaacaaagugagaauuga

SEQ ID NO: 396967 - RNA, 19 nt, Homo sapiens
  misc_RNA (1)...(19): siRNA sense strand
gaugaacagcugcuuauua

SEQ ID NO: 396968 - RNA, 19 nt, Homo sapiens
  misc_RNA (1)...(19): siRNA sense strand
gacagaggaugauauuaaa

SEQ ID NO: 396969 - RNA, 19 nt, Homo sapiens
  misc_RNA (1)...(19): siRNA sense strand
gaaucaaggugaagaggaa

SEQ ID NO: 396970 - RNA, 19 nt, Homo sapiens
  misc_RNA (1)...(19): siRNA sense strand
gaggaaacaacaagaauuu

SEQ ID NO: 396971 - RNA, 19 nt, Homo sapiens
  misc_RNA (1)...(19): siRNA sense strand
ugacagaggaugauauuaa

SEQ ID NO: 396972 - RNA, 19 nt, Homo sapiens
  misc_RNA (1)...(19): siRNA sense strand
gcaaugaggacacagauau

SEQ ID NO: 396973 - RNA, 19 nt, Homo sapiens
  misc_RNA (1)...(19): siRNA sense strand
gaacagcugccaccaacaa

SEQ ID NO: 396974 - RNA, 19 nt, Homo sapiens
  misc_RNA (1)...(19): siRNA sense strand
gaacagcugcuuauuacug

SEQ ID NO: 396975 - RNA, 19 nt, Homo sapiens
  misc_RNA (1)...(19): siRNA sense strand
gaagaggaaacaacaagaa

SEQ ID NO: 396976 - RNA, 19 nt, Homo sapiens
  misc_RNA (1)...(19): siRNA sense strand
ggacacagauauuccaaaa

SEQ ID NO: 396977 - RNA, 19 nt, Homo sapiens
  misc_RNA (1)...(19): siRNA sense strand
gugaaugucuuaaugaaag

SEQ ID NO: 396978 - RNA, 19 nt, Homo sapiens
  misc_RNA (1)...(19): siRNA sense strand
ggucagggcccuaaauaug

SEQ ID NO: 396979 - RNA, 19 nt, Homo sapiens
  misc_RNA (1)...(19): siRNA sense strand
gaacugacagaggaugaua

SEQ ID NO: 396980 - RNA, 19 nt, Homo sapiens
  misc_RNA (1)...(19): siRNA sense strand
caaagcugguugugaaugu

SEQ ID NO: 396981 - RNA, 19 nt, Homo sapiens
  misc_RNA (1)...(19): siRNA sense strand
cgaaacaaagugagaauug

SEQ ID NO: 396982 - RNA, 19 nt, Homo sapiens
  misc_RNA (1)...(19): siRNA sense strand
caaucaaccuguuaagcuu

SEQ ID NO: 396983 - RNA, 19 nt, Homo sapiens
  misc_RNA (1)...(19): siRNA sense strand
gacacaaccuucuuggaau

SEQ ID NO: 396984 - RNA, 19 nt, Homo sapiens
  misc_RNA (1)...(19): siRNA sense strand
ucagggcccuaaauaugua

SEQ ID NO: 396985 - RNA, 19 nt, Homo sapiens
  misc_RNA (1)...(19): siRNA sense strand
gcauggauuugacaacugu

SEQ ID NO: 396986 - RNA, 19 nt, Homo sapiens
  misc_RNA (1)...(19): siRNA sense strand
gcugugggauuagaagaaa

SEQ ID NO: 396987 - RNA, 19 nt, Homo sapiens
  misc_RNA (1)...(19): siRNA sense strand
ccaaaaggcuauauggauu

SEQ ID NO: 396988 - RNA, 19 nt, Homo sapiens
  misc_RNA (1)...(19): siRNA sense strand
gagcauggauuugacaacu

SEQ ID NO: 396989 - RNA, 19 nt, Homo sapiens
  misc_RNA (1)...(19): siRNA sense strand
agaaagaagugaaccaacu

SEQ ID NO: 396990 - RNA, 19 nt, Homo sapiens
  misc_RNA (1)...(19): siRNA sense strand
guuaagcuuuauuccauga

SEQ ID NO: 396991 - RNA, 19 nt, Homo sapiens
  misc_RNA (1)...(19): siRNA sense strand
gguugugaaugucuuaaug

SEQ ID NO: 396992 - RNA, 19 nt, Homo sapiens
  misc_RNA (1)...(19): siRNA sense strand
agacacaaccuucuuggaa

SEQ ID NO: 396993 - RNA, 19 nt, Homo sapiens
  misc_RNA (1)...(19): siRNA sense strand
gcauucaaucaaccuguua

SEQ ID NO: 396994 - RNA, 19 nt, Homo sapiens
  misc_RNA (1)...(19): siRNA sense strand
gcagaaagaagugaaccaa

SEQ ID NO: 396995 - RNA, 19 nt, Homo sapiens
  misc_RNA (1)...(19): siRNA sense strand
gaagcaaugaggacacaga

SEQ ID NO: 396996 - RNA, 19 nt, Homo sapiens
  misc_RNA (1)...(19): siRNA sense strand
gcauuguuccacuucguua

SEQ ID NO: 396997 - RNA, 19 nt, Homo sapiens
  misc_RNA (1)...(19): siRNA sense strand
cagaggaugauauuaaaga

SEQ ID NO: 396998 - RNA, 19 nt, Homo sapiens
  misc_RNA (1)...(19): siRNA sense strand
caaccuucuuggaaucuga

SEQ ID NO: 396999 - RNA, 19 nt, Homo sapiens
  misc_RNA (1)...(19): siRNA sense strand
ugacaacuguuuacgaaaa

SEQ ID NO: 397000 - RNA, 19 nt, Homo sapiens
  misc_RNA (1)...(19): siRNA sense strand
ggaaucugacugugaugaa

SEQ ID NO: 397001 - RNA, 19 nt, Homo sapiens
  misc_RNA (1)...(19): siRNA sense strand
gaagaggcagaaagaagug

SEQ ID NO: 397002 - RNA, 19 nt, Homo sapiens
  misc_RNA (1)...(19): siRNA sense strand
uaaugaaagugaugagcau

SEQ ID NO: 397003 - RNA, 19 nt, Homo sapiens
  misc_RNA (1)...(19): siRNA sense strand
gaaagaagugaaccaacuc

SEQ ID NO: 397004 - RNA, 19 nt, Homo sapiens
  misc_RNA (1)...(19): siRNA sense strand
uuugacaacuguuuacgaa

SEQ ID NO: 397005 - RNA, 19 nt, Homo sapiens
  misc_RNA (1)...(19): siRNA sense strand
gugaugagcauggauuuga

SEQ ID NO: 397006 - RNA, 19 nt, Homo sapiens
  misc_RNA (1)...(19): siRNA sense strand
caaacgaguaguuggcaaa

SEQ ID NO: 397007 - RNA, 19 nt, Homo sapiens
  misc_RNA (1)...(19): siRNA sense strand
gaaugacuucaaacgagua

SEQ ID NO: 397008 - RNA, 19 nt, Homo sapiens
  misc_RNA (1)...(19): siRNA sense strand
ucagaauguuaacagugua

SEQ ID NO: 397009 - RNA, 19 nt, Homo sapiens
  misc_RNA (1)...(19): siRNA sense strand
ggcauucaaucaaccuguu

SEQ ID NO: 397010 - RNA, 19 nt, Homo sapiens
  misc_RNA (1)...(19): siRNA sense strand
acacaaccuucuuggaauc

SEQ ID NO: 397011 - RNA, 19 nt, Homo sapiens
  misc_RNA (1)...(19): siRNA sense strand
aaaugacccuggaagcaau

SEQ ID NO: 397012 - RNA, 19 nt, Homo sapiens
  misc_RNA (1)...(19): siRNA sense strand
augaacagcugcuuauuac

SEQ ID NO: 397013 - RNA, 19 nt, Homo sapiens
  misc_RNA (1)...(19): siRNA sense strand
ugaaagugaugagcaugga

SEQ ID NO: 397014 - RNA, 19 nt, Homo sapiens
  misc_RNA (1)...(19): siRNA sense strand
caaugaggacacagauauu

SEQ ID NO: 397015 - RNA, 19 nt, Homo sapiens
  misc_RNA (1)...(19): siRNA sense strand
cagcugccaccaacaauau

SEQ ID NO: 397016 - RNA, 19 nt, Homo sapiens
  misc_RNA (1)...(19): siRNA sense strand
gggccauguuugaggauug

SEQ ID NO: 397017 - RNA, 19 nt, Homo sapiens
  misc_RNA (1)...(19): siRNA sense strand
gagagggugugggccaugu

SEQ ID NO: 397018 - RNA, 19 nt, Homo sapiens
  misc_RNA (1)...(19): siRNA sense strand
gaaucugacugugaugaac

SEQ ID NO: 397019 - RNA, 19 nt, Homo sapiens
  misc_RNA (1)...(19): siRNA sense strand
ccaguccaggcaacaaaua

SEQ ID NO: 397020 - RNA, 19 nt, Homo sapiens
  misc_RNA (1)...(19): siRNA sense strand
guuccacuucguuauguua

SEQ ID NO: 397021 - RNA, 19 nt, Homo sapiens
  misc_RNA (1)...(19): siRNA sense strand
ugaagaggcagaaagaagu

SEQ ID NO: 397022 - RNA, 19 nt, Homo sapiens
  misc_RNA (1)...(19): siRNA sense strand
gugaugaacagcugcuuau

SEQ ID NO: 397023 - RNA, 19 nt, Homo sapiens
  misc_RNA (1)...(19): siRNA sense strand
gagggugugggccauguuu

SEQ ID NO: 397024 - RNA, 19 nt, Homo sapiens
  misc_RNA (1)...(19): siRNA sense strand
ugacuucaaacgaguaguu

SEQ ID NO: 397025 - RNA, 19 nt, Homo sapiens
  misc_RNA (1)...(19): siRNA sense strand
agaggaaacaacaagaauu

SEQ ID NO: 397026 - RNA, 19 nt, Homo sapiens
  misc_RNA (1)...(19): siRNA sense strand
cuauauuuguucagucgaa

SEQ ID NO: 397027 - RNA, 19 nt, Homo sapiens
  misc_RNA (1)...(19): siRNA sense strand
cagaugcugugggauuaga

SEQ ID NO: 397028 - RNA, 19 nt, Homo sapiens
  misc_RNA (1)...(19): siRNA sense strand
aaaucaagcagcacuuaga

SEQ ID NO: 397029 - RNA, 19 nt, Homo sapiens
  misc_RNA (1)...(19): siRNA sense strand
cuguuaagcuuuauuccau

SEQ ID NO: 397030 - RNA, 19 nt, Homo sapiens
  misc_RNA (1)...(19): siRNA sense strand
gcuuauuacuguggcauuc

SEQ ID NO: 397031 - RNA, 19 nt, Homo sapiens
  misc_RNA (1)...(19): siRNA sense strand
aaagugaugagcauggauu

SEQ ID NO: 397032 - RNA, 19 nt, Homo sapiens
  misc_RNA (1)...(19): siRNA sense strand
guugugaaugucuuaauga

SEQ ID NO: 397033 - RNA, 19 nt, Homo sapiens
  misc_RNA (1)...(19): siRNA sense strand
uaucagcaacaccuacauu

SEQ ID NO: 397034 - RNA, 19 nt, Homo sapiens
  misc_RNA (1)...(19): siRNA sense strand
cagaauguuaacaguguaa

SEQ ID NO: 397035 - RNA, 19 nt, Homo sapiens
  misc_RNA (1)...(19): siRNA sense strand
aaauuucaagggccagaua

SEQ ID NO: 397036 - RNA, 19 nt, Homo sapiens
  misc_RNA (1)...(19): siRNA sense strand
guccaggcaacaaauauga

SEQ ID NO: 397037 - RNA, 19 nt, Homo sapiens
  misc_RNA (1)...(19): siRNA sense strand
caaagugagaauugaucaa

SEQ ID NO: 397038 - RNA, 19 nt, Homo sapiens
  misc_RNA (1)...(19): siRNA sense strand
aggcaacaaauaugaauga

SEQ ID NO: 397039 - RNA, 19 nt, Homo sapiens
  misc_RNA (1)...(19): siRNA sense strand
ucagucgaaucaaggugaa

SEQ ID NO: 397040 - RNA, 19 nt, Homo sapiens
  misc_RNA (1)...(19): siRNA sense strand
aucaaccuguuaagcuuua

SEQ ID NO: 397041 - RNA, 19 nt, Homo sapiens
  misc_RNA (1)...(19): siRNA sense strand
ucaaucaaccuguuaagcu

SEQ ID NO: 397042 - RNA, 19 nt, Homo sapiens
  misc_RNA (1)...(19): siRNA sense strand
acacagauauuccaaaagg

SEQ ID NO: 397043 - RNA, 19 nt, Homo sapiens
  misc_RNA (1)...(19): siRNA sense strand
aaucaagcagcacuuagaa

SEQ ID NO: 397044 - RNA, 19 nt, Homo sapiens
  misc_RNA (1)...(19): siRNA sense strand
ugaagaggaaacaacaaga

SEQ ID NO: 397045 - RNA, 19 nt, Homo sapiens
  misc_RNA (1)...(19): siRNA sense strand
gaaaaugacccuggaagca

SEQ ID NO: 397046 - RNA, 19 nt, Homo sapiens
  misc_RNA (1)...(19): siRNA sense strand
gucagggcccuaaauaugu

SEQ ID NO: 397047 - RNA, 19 nt, Homo sapiens
  misc_RNA (1)...(19): siRNA sense strand
caaaaggcuauauggauuu

SEQ ID NO: 397048 - RNA, 19 nt, Homo sapiens
  misc_RNA (1)...(19): siRNA sense strand
gaaagugaugagcauggau

SEQ ID NO: 397049 - RNA, 19 nt, Homo sapiens
  misc_RNA (1)...(19): siRNA sense strand
uucagaauguuaacagugu

SEQ ID NO: 397050 - RNA, 19 nt, Homo sapiens
  misc_RNA (1)...(19): siRNA sense strand
gggugugggccauguuuga

SEQ ID NO: 397051 - RNA, 19 nt, Homo sapiens
  misc_RNA (1)...(19): siRNA sense strand
caacucaagcucuggaacu

SEQ ID NO: 397052 - RNA, 19 nt, Homo sapiens
  misc_RNA (1)...(19): siRNA sense strand
cuuggaaucugacugugau

SEQ ID NO: 397053 - RNA, 19 nt, Homo sapiens
  misc_RNA (1)...(19): siRNA sense strand
uggauuugacaacuguuua

SEQ ID NO: 397054 - RNA, 19 nt, Homo sapiens
  misc_RNA (1)...(19): siRNA sense strand
acagcugccaccaacaaua

SEQ ID NO: 397055 - RNA, 19 nt, Homo sapiens
  misc_RNA (1)...(19): siRNA sense strand
ggucaaguucaccaugaga

SEQ ID NO: 397056 - RNA, 19 nt, Homo sapiens
  misc_RNA (1)...(19): siRNA sense strand
caacaauauaucagcaaca

SEQ ID NO: 397057 - RNA, 19 nt, Homo sapiens
  misc_RNA (1)...(19): siRNA sense strand
gcaacaaauaugaaugacu

SEQ ID NO: 397058 - RNA, 19 nt, Homo sapiens
  misc_RNA (1)...(19): siRNA sense strand
ucaagcagcacuuagaaaa

SEQ ID NO: 397059 - RNA, 19 nt, Homo sapiens
  misc_RNA (1)...(19): siRNA sense strand
gugaagaggaaacaacaag

SEQ ID NO: 397060 - RNA, 19 nt, Homo sapiens
  misc_RNA (1)...(19): siRNA sense strand
ggagcgacccggauuucca

SEQ ID NO: 397061 - RNA, 19 nt, Homo sapiens
  misc_RNA (1)...(19): siRNA sense strand
ugugaugaacagcugcuua

SEQ ID NO: 397062 - RNA, 19 nt, Homo sapiens
  misc_RNA (1)...(19): siRNA sense strand
ccaggcaacaaauaugaau

SEQ ID NO: 397063 - RNA, 19 nt, Homo sapiens
  misc_RNA (1)...(19): siRNA sense strand
gacucgccguggucaaguu

SEQ ID NO: 397064 - RNA, 19 nt, Homo sapiens
  misc_RNA (1)...(19): siRNA sense strand
gaggaugauauuaaagaag

SEQ ID NO: 397065 - RNA, 19 nt, Homo sapiens
  misc_RNA (1)...(19): siRNA sense strand
gcagagugaucccaucuca

SEQ ID NO: 397066 - RNA, 19 nt, Homo sapiens
  misc_RNA (1)...(19): siRNA sense strand
cagauggacuggagcaaga

SEQ ID NO: 397067 - RNA, 19 nt, Homo sapiens
  misc_RNA (1)...(19): siRNA sense strand
gagcugaauucccaagaca

SEQ ID NO: 397068 - RNA, 19 nt, Homo sapiens
  misc_RNA (1)...(19): siRNA sense strand
ccucggcucuguaccauga

SEQ ID NO: 397069 - RNA, 19 nt, Homo sapiens
  misc_RNA (1)...(19): siRNA sense strand
agagagggcccaccagaaa

SEQ ID NO: 397070 - RNA, 19 nt, Homo sapiens
  misc_RNA (1)...(19): siRNA sense strand
uucaagaaaugcagaguga

SEQ ID NO: 397071 - RNA, 19 nt, Homo sapiens
  misc_RNA (1)...(19): siRNA sense strand
caagaaaugcagagugauc

SEQ ID NO: 397072 - RNA, 19 nt, Homo sapiens
  misc_RNA (1)...(19): siRNA sense strand
gcgaaaacguggagaagga

SEQ ID NO: 397073 - RNA, 19 nt, Homo sapiens
  misc_RNA (1)...(19): siRNA sense strand
gaaggagaacagucgugaa

SEQ ID NO: 397074 - RNA, 19 nt, Homo sapiens
  misc_RNA (1)...(19): siRNA sense strand
ccugugcccuucaccaaug

SEQ ID NO: 397075 - RNA, 19 nt, Homo sapiens
  misc_RNA (1)...(19): siRNA sense strand
ccagaaacgcagcagcaaa

SEQ ID NO: 397076 - RNA, 19 nt, Homo sapiens
  misc_RNA (1)...(19): siRNA sense strand
ggagcugaauucccaagac

SEQ ID NO: 397077 - RNA, 19 nt, Homo sapiens
  misc_RNA (1)...(19): siRNA sense strand
ugagauccgccuccaguga

SEQ ID NO: 397078 - RNA, 19 nt, Homo sapiens
  misc_RNA (1)...(19): siRNA sense strand
aaaacgaacucuucagcaa

SEQ ID NO: 397079 - RNA, 19 nt, Homo sapiens
  misc_RNA (1)...(19): siRNA sense strand
cauccuagacuucaacauc

SEQ ID NO: 397080 - RNA, 19 nt, Homo sapiens
  misc_RNA (1)...(19): siRNA sense strand
gcaaguugggccaguacau

SEQ ID NO: 397081 - RNA, 19 nt, Homo sapiens
  misc_RNA (1)...(19): siRNA sense strand
ggcccaggaucgcauugug

SEQ ID NO: 397082 - RNA, 19 nt, Homo sapiens
  misc_RNA (1)...(19): siRNA sense strand
cagaaacgcagcagcaaac

SEQ ID NO: 397083 - RNA, 19 nt, Homo sapiens
  misc_RNA (1)...(19): siRNA sense strand
gggagauacagaaggagaa

SEQ ID NO: 397084 - RNA, 19 nt, Homo sapiens
  misc_RNA (1)...(19): siRNA sense strand
gauggacuggagcaagaaa

SEQ ID NO: 397085 - RNA, 19 nt, Homo sapiens
  misc_RNA (1)...(19): siRNA sense strand
cggacgagcagcugcagaa

SEQ ID NO: 397086 - RNA, 19 nt, Homo sapiens
  misc_RNA (1)...(19): siRNA sense strand
caaguugggccaguacauc

SEQ ID NO: 397087 - RNA, 19 nt, Homo sapiens
  misc_RNA (1)...(19): siRNA sense strand
gaggucaucugcaauagua

SEQ ID NO: 397088 - RNA, 19 nt, Homo sapiens
  misc_RNA (1)...(19): siRNA sense strand
ggaaggcgcugguguugug

SEQ ID NO: 397089 - RNA, 19 nt, Homo sapiens
  misc_RNA (1)...(19): siRNA sense strand
ucaaacagguggaggaguu

SEQ ID NO: 397090 - RNA, 19 nt, Homo sapiens
  misc_RNA (1)...(19): siRNA sense strand
gcaauaguauggcuaagac

SEQ ID NO: 397091 - RNA, 19 nt, Homo sapiens
  misc_RNA (1)...(19): siRNA sense strand
guaccgcacacuagucaua

SEQ ID NO: 397092 - RNA, 19 nt, Homo sapiens
  misc_RNA (1)...(19): siRNA sense strand
ucaaagaccucagcaagac

SEQ ID NO: 397093 - RNA, 19 nt, Homo sapiens
  misc_RNA (1)...(19): siRNA sense strand
gcaaguaccgcacacuagu

SEQ ID NO: 397094 - RNA, 19 nt, Homo sapiens
  misc_RNA (1)...(19): siRNA sense strand
cuccaagccuuucguggua

SEQ ID NO: 397095 - RNA, 19 nt, Homo sapiens
  misc_RNA (1)...(19): siRNA sense strand
gaggaggagugccgcaagu

SEQ ID NO: 397096 - RNA, 19 nt, Homo sapiens
  misc_RNA (1)...(19): siRNA sense strand
cuauggaggucaucugcaa

SEQ ID NO: 397097 - RNA, 19 nt, Homo sapiens
  misc_RNA (1)...(19): siRNA sense strand
guaggaaggcgcugguguu

SEQ ID NO: 397098 - RNA, 19 nt, Homo sapiens
  misc_RNA (1)...(19): siRNA sense strand
cuacggagaguguacgauu

SEQ ID NO: 397099 - RNA, 19 nt, Homo sapiens
  misc_RNA (1)...(19): siRNA sense strand
uacggagaguguacgauuu

SEQ ID NO: 397100 - RNA, 19 nt, Homo sapiens
  misc_RNA (1)...(19): siRNA sense strand
gcugcgaccucucugucuu

SEQ ID NO: 397101 - RNA, 19 nt, Homo sapiens
  misc_RNA (1)...(19): siRNA sense strand
gcaguuugcccugaacaug

SEQ ID NO: 397102 - RNA, 19 nt, Homo sapiens
  misc_RNA (1)...(19): siRNA sense strand
gcccugaggaggucaaaga

SEQ ID NO: 397103 - RNA, 19 nt, Homo sapiens
  misc_RNA (1)...(19): siRNA sense strand
gcuaugagcgggucaacag

SEQ ID NO: 397104 - RNA, 19 nt, Homo sapiens
  misc_RNA (1)...(19): siRNA sense strand
gucaaagaccucagcaaga

SEQ ID NO: 397105 - RNA, 19 nt, Homo sapiens
  misc_RNA (1)...(19): siRNA sense strand
ucaccacgcugggcaucuu

SEQ ID NO: 397106 - RNA, 19 nt, Homo sapiens
  misc_RNA (1)...(19): siRNA sense strand
ucaaccuccuggacuacaa

SEQ ID NO: 397107 - RNA, 19 nt, Homo sapiens
  misc_RNA (1)...(19): siRNA sense strand
caguuugcccugaacauga

SEQ ID NO: 397108 - RNA, 19 nt, Homo sapiens
  misc_RNA (1)...(19): siRNA sense strand
ggucaucugcaauaguaug

SEQ ID NO: 397109 - RNA, 19 nt, Homo sapiens
  misc_RNA (1)...(19): siRNA sense strand
gacgaccgcgugugcaaga

SEQ ID NO: 397110 - RNA, 19 nt, Homo sapiens
  misc_RNA (1)...(19): siRNA sense strand
ucaagacacuacggagagu

SEQ ID NO: 397111 - RNA, 19 nt, Homo sapiens
  misc_RNA (1)...(19): siRNA sense strand
uaaagggugugcgcgucuu

SEQ ID NO: 397112 - RNA, 19 nt, Homo sapiens
  misc_RNA (1)...(19): siRNA sense strand
gaccgcgugugcaagaagu

SEQ ID NO: 397113 - RNA, 19 nt, Homo sapiens
  misc_RNA (1)...(19): siRNA sense strand
ccgcaaguaccgcacacua

SEQ ID NO: 397114 - RNA, 19 nt, Homo sapiens
  misc_RNA (1)...(19): siRNA sense strand
ggaggagugccgcaaguac

SEQ ID NO: 397115 - RNA, 19 nt, Homo sapiens
  misc_RNA (1)...(19): siRNA sense strand
ggaggucaucugcaauagu

SEQ ID NO: 397116 - RNA, 19 nt, Homo sapiens
  misc_RNA (1)...(19): siRNA sense strand
acaagcggcagcuggugua

SEQ ID NO: 397117 - RNA, 19 nt, Homo sapiens
  misc_RNA (1)...(19): siRNA sense strand
augaagguguuccguagga

SEQ ID NO: 397118 - RNA, 19 nt, Homo sapiens
  misc_RNA (1)...(19): siRNA sense strand
gcgcagccaccaacaaggu

SEQ ID NO: 397119 - RNA, 19 nt, Homo sapiens
  misc_RNA (1)...(19): siRNA sense strand
ucucugucuuccaguugua

SEQ ID NO: 397120 - RNA, 19 nt, Homo sapiens
  misc_RNA (1)...(19): siRNA sense strand
ccgagguguucuuucucua

SEQ ID NO: 397121 - RNA, 19 nt, Homo sapiens
  misc_RNA (1)...(19): siRNA sense strand
gcgagcuauucaaccagaa

SEQ ID NO: 397122 - RNA, 19 nt, Homo sapiens
  misc_RNA (1)...(19): siRNA sense strand
gaaucccgagguguucuuu

SEQ ID NO: 397123 - RNA, 19 nt, Homo sapiens
  misc_RNA (1)...(19): siRNA sense strand
uggagcaguuugcccugaa

SEQ ID NO: 397124 - RNA, 19 nt, Homo sapiens
  misc_RNA (1)...(19): siRNA sense strand
guucuucggcgagcuauuc

SEQ ID NO: 397125 - RNA, 19 nt, Homo sapiens
  misc_RNA (1)...(19): siRNA sense strand
ggagcaguuugcccugaac

SEQ ID NO: 397126 - RNA, 19 nt, Homo sapiens
  misc_RNA (1)...(19): siRNA sense strand
gcagcugguguacguguuc

SEQ ID NO: 397127 - RNA, 19 nt, Homo sapiens
  misc_RNA (1)...(19): siRNA sense strand
ccaagccuuucgugguauc

SEQ ID NO: 397128 - RNA, 19 nt, Homo sapiens
  misc_RNA (1)...(19): siRNA sense strand
cgaaucaccuggaggaaga

SEQ ID NO: 397129 - RNA, 19 nt, Homo sapiens
  misc_RNA (1)...(19): siRNA sense strand
caccggagcuggaguauca

SEQ ID NO: 397130 - RNA, 19 nt, Homo sapiens
  misc_RNA (1)...(19): siRNA sense strand
gccaauggguccuugauga

SEQ ID NO: 397131 - RNA, 19 nt, Homo sapiens
  misc_RNA (1)...(19): siRNA sense strand
gaacagugcgggcucauca

SEQ ID NO: 397132 - RNA, 19 nt, Homo sapiens
  misc_RNA (1)...(19): siRNA sense strand
gaagaacagagucccaauu

SEQ ID NO: 397133 - RNA, 19 nt, Homo sapiens
  misc_RNA (1)...(19): siRNA sense strand
ccucaaacaucgccaguau

SEQ ID NO: 397134 - RNA, 19 nt, Homo sapiens
  misc_RNA (1)...(19): siRNA sense strand
ggaugaaggugacuaugag

SEQ ID NO: 397135 - RNA, 19 nt, Homo sapiens
  misc_RNA (1)...(19): siRNA sense strand
gaacagagucccaauugac

SEQ ID NO: 397136 - RNA, 19 nt, Homo sapiens
  misc_RNA (1)...(19): siRNA sense strand
ggagccaagugaugauguu

SEQ ID NO: 397137 - RNA, 19 nt, Homo sapiens
  misc_RNA (1)...(19): siRNA sense strand
gaaaccucaucaucucaga

SEQ ID NO: 397138 - RNA, 19 nt, Homo sapiens
  misc_RNA (1)...(19): siRNA sense strand
cgagaaacguguggauaug

SEQ ID NO: 397139 - RNA, 19 nt, Homo sapiens
  misc_RNA (1)...(19): siRNA sense strand
agaaacguguggauaugaa

SEQ ID NO: 397140 - RNA, 19 nt, Homo sapiens
  misc_RNA (1)...(19): siRNA sense strand
caggaaaccucaucaucuc

SEQ ID NO: 397141 - RNA, 19 nt, Homo sapiens
  misc_RNA (1)...(19): siRNA sense strand
caucuucuguguccucuuc

SEQ ID NO: 397142 - RNA, 19 nt, Homo sapiens
  misc_RNA (1)...(19): siRNA sense strand
gagaaacguguggauauga

SEQ ID NO: 397143 - RNA, 19 nt, Homo sapiens
  misc_RNA (1)...(19): siRNA sense strand
ugaggacgguggcaucuuc

SEQ ID NO: 397144 - RNA, 19 nt, Homo sapiens
  misc_RNA (1)...(19): siRNA sense strand
ugaagcugcucgccuacaa

SEQ ID NO: 397145 - RNA, 19 nt, Homo sapiens
  misc_RNA (1)...(19): siRNA sense strand
ccggaaggcucgcauccaa

SEQ ID NO: 397146 - RNA, 19 nt, Homo sapiens
  misc_RNA (1)...(19): siRNA sense strand
agaacagagucccaauuga

SEQ ID NO: 397147 - RNA, 19 nt, Homo sapiens
  misc_RNA (1)...(19): siRNA sense strand
ccaccuugcuggccaaugg

SEQ ID NO: 397148 - RNA, 19 nt, Homo sapiens
  misc_RNA (1)...(19): siRNA sense strand
caacagcacacugaccauu

SEQ ID NO: 397149 - RNA, 19 nt, Homo sapiens
  misc_RNA (1)...(19): siRNA sense strand
ggaaccgucuccuccuaca

SEQ ID NO: 397150 - RNA, 19 nt, Homo sapiens
  misc_RNA (1)...(19): siRNA sense strand
acgucaggcucaagaauaa

SEQ ID NO: 397151 - RNA, 19 nt, Homo sapiens
  misc_RNA (1)...(19): siRNA sense strand
gaugaagccauuuaucagu

SEQ ID NO: 397152 - RNA, 19 nt, Homo sapiens
  misc_RNA (1)...(19): siRNA sense strand
acacugaccauuucuggaa

SEQ ID NO: 397153 - RNA, 19 nt, Homo sapiens
  misc_RNA (1)...(19): siRNA sense strand
ccaaaccccugaucacuug

SEQ ID NO: 397154 - RNA, 19 nt, Homo sapiens
  misc_RNA (1)...(19): siRNA sense strand
gacgagaaacguguggaua

SEQ ID NO: 397155 - RNA, 19 nt, Homo sapiens
  misc_RNA (1)...(19): siRNA sense strand
guaaagauguggaaaacca

SEQ ID NO: 397156 - RNA, 19 nt, Homo sapiens
  misc_RNA (1)...(19): siRNA sense strand
aagaacagagucccaauug

SEQ ID NO: 397157 - RNA, 19 nt, Homo sapiens
  misc_RNA (1)...(19): siRNA sense strand
gcagaucacaggacuucga

SEQ ID NO: 397158 - RNA, 19 nt, Homo sapiens
  misc_RNA (1)...(19): siRNA sense strand
ucacuugcaucaucuucug

SEQ ID NO: 397159 - RNA, 19 nt, Homo sapiens
  misc_RNA (1)...(19): siRNA sense strand
aauaacaacagcacacuga

SEQ ID NO: 397160 - RNA, 19 nt, Homo sapiens
  misc_RNA (1)...(19): siRNA sense strand
acacggacaaugagaggua

SEQ ID NO: 397161 - RNA, 19 nt, Homo sapiens
  misc_RNA (1)...(19): siRNA sense strand
cggaugaaggugacuauga

SEQ ID NO: 397162 - RNA, 19 nt, Homo sapiens
  misc_RNA (1)...(19): siRNA sense strand
gccuacaguuucuacauca

SEQ ID NO: 397163 - RNA, 19 nt, Homo sapiens
  misc_RNA (1)...(19): siRNA sense strand
acagcacacugaccauuuc

SEQ ID NO: 397164 - RNA, 19 nt, Homo sapiens
  misc_RNA (1)...(19): siRNA sense strand
guagagcugccagagagua

SEQ ID NO: 397165 - RNA, 19 nt, Homo sapiens
  misc_RNA (1)...(19): siRNA sense strand
cacgucaggcucaagaaua

SEQ ID NO: 397166 - RNA, 19 nt, Homo sapiens
  misc_RNA (1)...(19): siRNA sense strand
gaggcagcccuucggauga

SEQ ID NO: 397167 - RNA, 19 nt, Homo sapiens
  misc_RNA (1)...(19): siRNA sense strand
ccgcggugcuugagugugu

SEQ ID NO: 397168 - RNA, 19 nt, Homo sapiens
  misc_RNA (1)...(19): siRNA sense strand
gcacaggaaaccucaucau

SEQ ID NO: 397169 - RNA, 19 nt, Homo sapiens
  misc_RNA (1)...(19): siRNA sense strand
ugaagccauuuaucagugu

SEQ ID NO: 397170 - RNA, 19 nt, Homo sapiens
  misc_RNA (1)...(19): siRNA sense strand
ggaugaagccauuuaucag

SEQ ID NO: 397171 - RNA, 19 nt, Homo sapiens
  misc_RNA (1)...(19): siRNA sense strand
gcaagcaagaccuccuuca

SEQ ID NO: 397172 - RNA, 19 nt, Homo sapiens
  misc_RNA (1)...(19): siRNA sense strand
gaggaugaagccauuuauc

SEQ ID NO: 397173 - RNA, 19 nt, Homo sapiens
  misc_RNA (1)...(19): siRNA sense strand
acaggaaaccucaucaucu

SEQ ID NO: 397174 - RNA, 19 nt, Homo sapiens
  misc_RNA (1)...(19): siRNA sense strand
ugaaggugacuaugagugu

SEQ ID NO: 397175 - RNA, 19 nt, Homo sapiens
  misc_RNA (1)...(19): siRNA sense strand
aggaugaagccauuuauca

SEQ ID NO: 397176 - RNA, 19 nt, Homo sapiens
  misc_RNA (1)...(19): siRNA sense strand
ccaauggguccuugaugau

SEQ ID NO: 397177 - RNA, 19 nt, Homo sapiens
  misc_RNA (1)...(19): siRNA sense strand
cagcucacucggaacagua

SEQ ID NO: 397178 - RNA, 19 nt, Homo sapiens
  misc_RNA (1)...(19): siRNA sense strand
gaaccgucuccuccuacaa

SEQ ID NO: 397179 - RNA, 19 nt, Homo sapiens
  misc_RNA (1)...(19): siRNA sense strand
cugcaaccaugucggacuu

SEQ ID NO: 397180 - RNA, 19 nt, Homo sapiens
  misc_RNA (1)...(19): siRNA sense strand
acgagaaacguguggauau

SEQ ID NO: 397181 - RNA, 19 nt, Homo sapiens
  misc_RNA (1)...(19): siRNA sense strand
cuggaaccgucuccuccua

SEQ ID NO: 397182 - RNA, 19 nt, Homo sapiens
  misc_RNA (1)...(19): siRNA sense strand
cugaggaugaagccauuua

SEQ ID NO: 397183 - RNA, 19 nt, Homo sapiens
  misc_RNA (1)...(19): siRNA sense strand
aggcagcccuucggaugaa

SEQ ID NO: 397184 - RNA, 19 nt, Homo sapiens
  misc_RNA (1)...(19): siRNA sense strand
caaugccacaguccgcuuu

SEQ ID NO: 397185 - RNA, 19 nt, Homo sapiens
  misc_RNA (1)...(19): siRNA sense strand
gaaacguguggauaugaag

SEQ ID NO: 397186 - RNA, 19 nt, Homo sapiens
  misc_RNA (1)...(19): siRNA sense strand
ccugaucacuugggagaag

SEQ ID NO: 397187 - RNA, 19 nt, Homo sapiens
  misc_RNA (1)...(19): siRNA sense strand
guccuccuguguaaagaug

SEQ ID NO: 397188 - RNA, 19 nt, Homo sapiens
  misc_RNA (1)...(19): siRNA sense strand
ccacgucaggcucaagaau

SEQ ID NO: 397189 - RNA, 19 nt, Homo sapiens
  misc_RNA (1)...(19): siRNA sense strand
gagccaccgccucauguca

SEQ ID NO: 397190 - RNA, 19 nt, Homo sapiens
  misc_RNA (1)...(19): siRNA sense strand
ucaaacaucgccaguaucc

SEQ ID NO: 397191 - RNA, 19 nt, Homo sapiens
  misc_RNA (1)...(19): siRNA sense strand
gcaagccccagcugaguuu

SEQ ID NO: 397192 - RNA, 19 nt, Homo sapiens
  misc_RNA (1)...(19): siRNA sense strand
agacccagcucuccuugcu

SEQ ID NO: 397193 - RNA, 19 nt, Homo sapiens
  misc_RNA (1)...(19): siRNA sense strand
ucagcaagagcaccuuuca

SEQ ID NO: 397194 - RNA, 19 nt, Homo sapiens
  misc_RNA (1)...(19): siRNA sense strand
cacaggaaaccucaucauc

SEQ ID NO: 397195 - RNA, 19 nt, Homo sapiens
  misc_RNA (1)...(19): siRNA sense strand
gcuguggagccaagugaug

SEQ ID NO: 397196 - RNA, 19 nt, Homo sapiens
  misc_RNA (1)...(19): siRNA sense strand
gccuugagcccaccaugug

SEQ ID NO: 397197 - RNA, 19 nt, Homo sapiens
  misc_RNA (1)...(19): siRNA sense strand
aacagcacacugaccauuu

SEQ ID NO: 397198 - RNA, 19 nt, Homo sapiens
  misc_RNA (1)...(19): siRNA sense strand
gggagcaucucggggauua

SEQ ID NO: 397199 - RNA, 19 nt, Homo sapiens
  misc_RNA (1)...(19): siRNA sense strand
uacaacaaguacaucaaug

SEQ ID NO: 397200 - RNA, 19 nt, Homo sapiens
  misc_RNA (1)...(19): siRNA sense strand
caugcuacgugcucuuuag

SEQ ID NO: 397201 - RNA, 19 nt, Homo sapiens
  misc_RNA (1)...(19): siRNA sense strand
uuucggagcguuucaaaga

SEQ ID NO: 397202 - RNA, 19 nt, Homo sapiens
  misc_RNA (1)...(19): siRNA sense strand
gcaugcuacgugcucuuua

SEQ ID NO: 397203 - RNA, 19 nt, Homo sapiens
  misc_RNA (1)...(19): siRNA sense strand
gcucuuuagcuacuccuuu

SEQ ID NO: 397204 - RNA, 19 nt, Homo sapiens
  misc_RNA (1)...(19): siRNA sense strand
cuacaacaaguacaucaau

SEQ ID NO: 397205 - RNA, 19 nt, Homo sapiens
  misc_RNA (1)...(19): siRNA sense strand
gagcguuucaaagagguua

SEQ ID NO: 397206 - RNA, 19 nt, Homo sapiens
  misc_RNA (1)...(19): siRNA sense strand
guuacuaccgguacuacaa

SEQ ID NO: 397207 - RNA, 19 nt, Homo sapiens
  misc_RNA (1)...(19): siRNA sense strand
ggcgucaguuggugagugu

SEQ ID NO: 397208 - RNA, 19 nt, Homo sapiens
  misc_RNA (1)...(19): siRNA sense strand
cuucaguccuaguggcauu

SEQ ID NO: 397209 - RNA, 19 nt, Homo sapiens
  misc_RNA (1)...(19): siRNA sense strand
gagguuacuaccgguacua

SEQ ID NO: 397210 - RNA, 19 nt, Homo sapiens
  misc_RNA (1)...(19): siRNA sense strand
caguaccagugaaggacaa

SEQ ID NO: 397211 - RNA, 19 nt, Homo sapiens
  misc_RNA (1)...(19): siRNA sense strand
ggcaugcuacgugcucuuu

SEQ ID NO: 397212 - RNA, 19 nt, Homo sapiens
  misc_RNA (1)...(19): siRNA sense strand
gaacaucgauggcgccaaa

SEQ ID NO: 397213 - RNA, 19 nt, Homo sapiens
  misc_RNA (1)...(19): siRNA sense strand
gaaagauaccaaccaguua

SEQ ID NO: 397214 - RNA, 19 nt, Homo sapiens
  misc_RNA (1)...(19): siRNA sense strand
gaauggcgauggguugaua

SEQ ID NO: 397215 - RNA, 19 nt, Homo sapiens
  misc_RNA (1)...(19): siRNA sense strand
ggaaagauaccaaccaguu

SEQ ID NO: 397216 - RNA, 19 nt, Homo sapiens
  misc_RNA (1)...(19): siRNA sense strand
caaauaaggaacaugguua

SEQ ID NO: 397217 - RNA, 19 nt, Homo sapiens
  misc_RNA (1)...(19): siRNA sense strand
cacaagaucuggaaaugaa

SEQ ID NO: 397218 - RNA, 19 nt, Homo sapiens
  misc_RNA (1)...(19): siRNA sense strand
ggaaacagaggauucauug

SEQ ID NO: 397219 - RNA, 19 nt, Homo sapiens
  misc_RNA (1)...(19): siRNA sense strand
ggagauaucgagaacuaua

SEQ ID NO: 397220 - RNA, 19 nt, Homo sapiens
  misc_RNA (1)...(19): siRNA sense strand
gaaacauggugacuagaug

SEQ ID NO: 397221 - RNA, 19 nt, Homo sapiens
  misc_RNA (1)...(19): siRNA sense strand
caacaaggacgaacaucua

SEQ ID NO: 397222 - RNA, 19 nt, Homo sapiens
  misc_RNA (1)...(19): siRNA sense strand
gguaguaaaccuuucauuu

SEQ ID NO: 397223 - RNA, 19 nt, Homo sapiens
  misc_RNA (1)...(19): siRNA sense strand
guggagauaucgagaacua

SEQ ID NO: 397224 - RNA, 19 nt, Homo sapiens
  misc_RNA (1)...(19): siRNA sense strand
ggacaaacugcauaaucua

SEQ ID NO: 397225 - RNA, 19 nt, Homo sapiens
  misc_RNA (1)...(19): siRNA sense strand
ugacagaauucaaguaugg

SEQ ID NO: 397226 - RNA, 19 nt, Homo sapiens
  misc_RNA (1)...(19): siRNA sense strand
ggauaaccaugacaaucaa

SEQ ID NO: 397227 - RNA, 19 nt, Homo sapiens
  misc_RNA (1)...(19): siRNA sense strand
ugauauugcucuugaaugu

SEQ ID NO: 397228 - RNA, 19 nt, Homo sapiens
  misc_RNA (1)...(19): siRNA sense strand
gcacaagaucuggaaauga

SEQ ID NO: 397229 - RNA, 19 nt, Homo sapiens
  misc_RNA (1)...(19): siRNA sense strand
gugacuagaugcaacaaug

SEQ ID NO: 397230 - RNA, 19 nt, Homo sapiens
  misc_RNA (1)...(19): siRNA sense strand
caaggacgaacaucuauug

SEQ ID NO: 397231 - RNA, 19 nt, Homo sapiens
  misc_RNA (1)...(19): siRNA sense strand
ugucauuucuggagauaaa

SEQ ID NO: 397232 - RNA, 19 nt, Homo sapiens
  misc_RNA (1)...(19): siRNA sense strand
gaugucauuucuggagaua

SEQ ID NO: 397233 - RNA, 19 nt, Homo sapiens
  misc_RNA (1)...(19): siRNA sense strand
gcacaguuauucgcaagug

SEQ ID NO: 397234 - RNA, 19 nt, Homo sapiens
  misc_RNA (1)...(19): siRNA sense strand
gacaaacugcauaaucuaa

SEQ ID NO: 397235 - RNA, 19 nt, Homo sapiens
  misc_RNA (1)...(19): siRNA sense strand
guucaggucucuccaccaa

SEQ ID NO: 397236 - RNA, 19 nt, Homo sapiens
  misc_RNA (1)...(19): siRNA sense strand
ugaaugugagcgauauuua

SEQ ID NO: 397237 - RNA, 19 nt, Homo sapiens
  misc_RNA (1)...(19): siRNA sense strand
uuagaaacauggugacuag

SEQ ID NO: 397238 - RNA, 19 nt, Homo sapiens
  misc_RNA (1)...(19): siRNA sense strand
uuauguggaugcuguaauu

SEQ ID NO: 397239 - RNA, 19 nt, Homo sapiens
  misc_RNA (1)...(19): siRNA sense strand
gcaaugacugggucuguga

SEQ ID NO: 397240 - RNA, 19 nt, Homo sapiens
  misc_RNA (1)...(19): siRNA sense strand
gaacuauaaugaugcuacu

SEQ ID NO: 397241 - RNA, 19 nt, Homo sapiens
  misc_RNA (1)...(19): siRNA sense strand
gagauaucgagaacuauaa

SEQ ID NO: 397242 - RNA, 19 nt, Homo sapiens
  misc_RNA (1)...(19): siRNA sense strand
ggguugauauugcucuuga

SEQ ID NO: 397243 - RNA, 19 nt, Homo sapiens
  misc_RNA (1)...(19): siRNA sense strand
ucaggucucuccaccaaau

SEQ ID NO: 397244 - RNA, 19 nt, Homo sapiens
  misc_RNA (1)...(19): siRNA sense strand
ccaaccaguuagcuauaaa

SEQ ID NO: 397245 - RNA, 19 nt, Homo sapiens
  misc_RNA (1)...(19): siRNA sense strand
gaaguggagauaucgagaa

SEQ ID NO: 397246 - RNA, 19 nt, Homo sapiens
  misc_RNA (1)...(19): siRNA sense strand
cuacucaggucagagauug

SEQ ID NO: 397247 - RNA, 19 nt, Homo sapiens
  misc_RNA (1)...(19): siRNA sense strand
guugcaggguucagaauug

SEQ ID NO: 397248 - RNA, 19 nt, Homo sapiens
  misc_RNA (1)...(19): siRNA sense strand
caaguggaauggagagaag

SEQ ID NO: 397249 - RNA, 19 nt, Homo sapiens
  misc_RNA (1)...(19): siRNA sense strand
gaaugugagcgauauuuag

SEQ ID NO: 397250 - RNA, 19 nt, Homo sapiens
  misc_RNA (1)...(19): siRNA sense strand
caucgauggcgccaaauaa

SEQ ID NO: 397251 - RNA, 19 nt, Homo sapiens
  misc_RNA (1)...(19): siRNA sense strand
ggagacauaaaggcaauuu

SEQ ID NO: 397252 - RNA, 19 nt, Homo sapiens
  misc_RNA (1)...(19): siRNA sense strand
ggugacagaauucaaguau

SEQ ID NO: 397253 - RNA, 19 nt, Homo sapiens
  misc_RNA (1)...(19): siRNA sense strand
ccaaauaaggaacaugguu

SEQ ID NO: 397254 - RNA, 19 nt, Homo sapiens
  misc_RNA (1)...(19): siRNA sense strand
auauugcucuugaauguga

SEQ ID NO: 397255 - RNA, 19 nt, Homo sapiens
  misc_RNA (1)...(19): siRNA sense strand
gagaggaaacagaggauuc

SEQ ID NO: 397256 - RNA, 19 nt, Homo sapiens
  misc_RNA (1)...(19): siRNA sense strand
caaacugcauaaucuaaac

SEQ ID NO: 397257 - RNA, 19 nt, Homo sapiens
  misc_RNA (1)...(19): siRNA sense strand
uggacaaacugcauaaucu

SEQ ID NO: 397258 - RNA, 19 nt, Homo sapiens
  misc_RNA (1)...(19): siRNA sense strand
gaccuuggugggaaagaua

SEQ ID NO: 397259 - RNA, 19 nt, Homo sapiens
  misc_RNA (1)...(19): siRNA sense strand
gauaccaaccaguuagcua

SEQ ID NO: 397260 - RNA, 19 nt, Homo sapiens
  misc_RNA (1)...(19): siRNA sense strand
ggagcaaccaaguggcuuu

SEQ ID NO: 397261 - RNA, 19 nt, Homo sapiens
  misc_RNA (1)...(19): siRNA sense strand
gcaaguggaauggagagaa

SEQ ID NO: 397262 - RNA, 19 nt, Homo sapiens
  misc_RNA (1)...(19): siRNA sense strand
gcaguaccuguggaaguua

SEQ ID NO: 397263 - RNA, 19 nt, Homo sapiens
  misc_RNA (1)...(19): siRNA sense strand
gaauucaaguauggugcaa

SEQ ID NO: 397264 - RNA, 19 nt, Homo sapiens
  misc_RNA (1)...(19): siRNA sense strand
cugcauaaucuaaacagua

SEQ ID NO: 397265 - RNA, 19 nt, Homo sapiens
  misc_RNA (1)...(19): siRNA sense strand
caucuauuguucaucuguu

SEQ ID NO: 397266 - RNA, 19 nt, Homo sapiens
  misc_RNA (1)...(19): siRNA sense strand
uguggaugcuguaauuaau

SEQ ID NO: 397267 - RNA, 19 nt, Homo sapiens
  misc_RNA (1)...(19): siRNA sense strand
gacuggacauuuucuuuaa

SEQ ID NO: 397268 - RNA, 19 nt, Homo sapiens
  misc_RNA (1)...(19): siRNA sense strand
uggauaaccaugacaauca

SEQ ID NO: 397269 - RNA, 19 nt, Homo sapiens
  misc_RNA (1)...(19): siRNA sense strand
gaugguaaauguaaaacug

SEQ ID NO: 397270 - RNA, 19 nt, Homo sapiens
  misc_RNA (1)...(19): siRNA sense strand
uggaugcuguaauuaauca

SEQ ID NO: 397271 - RNA, 19 nt, Homo sapiens
  misc_RNA (1)...(19): siRNA sense strand
caagaucuggaaaugaaga

SEQ ID NO: 397272 - RNA, 19 nt, Homo sapiens
  misc_RNA (1)...(19): siRNA sense strand
gaaacagaggauucauugu

SEQ ID NO: 397273 - RNA, 19 nt, Homo sapiens
  misc_RNA (1)...(19): siRNA sense strand
gcaggguucagaauugaug

SEQ ID NO: 397274 - RNA, 19 nt, Homo sapiens
  misc_RNA (1)...(19): siRNA sense strand
gcagucccauauucuggau

SEQ ID NO: 397275 - RNA, 19 nt, Homo sapiens
  misc_RNA (1)...(19): siRNA sense strand
caugcugaaucuaaauugu

SEQ ID NO: 397276 - RNA, 19 nt, Homo sapiens
  misc_RNA (1)...(19): siRNA sense strand
guuaauuuccgcaauguag

SEQ ID NO: 397277 - RNA, 19 nt, Homo sapiens
  misc_RNA (1)...(19): siRNA sense strand
agacacuacuuguggcaau

SEQ ID NO: 397278 - RNA, 19 nt, Homo sapiens
  misc_RNA (1)...(19): siRNA sense strand
ggcgauggguugauauugc

SEQ ID NO: 397279 - RNA, 19 nt, Homo sapiens
  misc_RNA (1)...(19): siRNA sense strand
gggcucaguauuccucaaa

SEQ ID NO: 397280 - RNA, 19 nt, Homo sapiens
  misc_RNA (1)...(19): siRNA sense strand
gugacagaauucaaguaug

SEQ ID NO: 397281 - RNA, 19 nt, Homo sapiens
  misc_RNA (1)...(19): siRNA sense strand
cacgaguaaugucaagcua

SEQ ID NO: 397282 - RNA, 19 nt, Homo sapiens
  misc_RNA (1)...(19): siRNA sense strand
aaagauaccaaccaguuag

SEQ ID NO: 397283 - RNA, 19 nt, Homo sapiens
  misc_RNA (1)...(19): siRNA sense strand
aauggcaguuggauuuaug

SEQ ID NO: 397284 - RNA, 19 nt, Homo sapiens
  misc_RNA (1)...(19): siRNA sense strand
uaaaggcaauuuuggacaa

SEQ ID NO: 397285 - RNA, 19 nt, Homo sapiens
  misc_RNA (1)...(19): siRNA sense strand
aagauugccgaauauauga

SEQ ID NO: 397286 - RNA, 19 nt, Homo sapiens
  misc_RNA (1)...(19): siRNA sense strand
ggaauggagagaagauguc

SEQ ID NO: 397287 - RNA, 19 nt, Homo sapiens
  misc_RNA (1)...(19): siRNA sense strand
ggagaggaaacagaggauu

SEQ ID NO: 397288 - RNA, 19 nt, Homo sapiens
  misc_RNA (1)...(19): siRNA sense strand
caaacugguaugauaaugg

SEQ ID NO: 397289 - RNA, 19 nt, Homo sapiens
  misc_RNA (1)...(19): siRNA sense strand
acaaacugguaugauaaug

SEQ ID NO: 397290 - RNA, 19 nt, Homo sapiens
  misc_RNA (1)...(19): siRNA sense strand
caaccaguuagcuauaaau

SEQ ID NO: 397291 - RNA, 19 nt, Homo sapiens
  misc_RNA (1)...(19): siRNA sense strand
ugacuggacauuuucuuua

SEQ ID NO: 397292 - RNA, 19 nt, Homo sapiens
  misc_RNA (1)...(19): siRNA sense strand
gacacuacuuguggcaaug

SEQ ID NO: 397293 - RNA, 19 nt, Homo sapiens
  misc_RNA (1)...(19): siRNA sense strand
gauaucgagaacuauaaug

SEQ ID NO: 397294 - RNA, 19 nt, Homo sapiens
  misc_RNA (1)...(19): siRNA sense strand
agcaguaccuguggaaguu

SEQ ID NO: 397295 - RNA, 19 nt, Homo sapiens
  misc_RNA (1)...(19): siRNA sense strand
cgauggcgccaaauaagga

SEQ ID NO: 397296 - RNA, 19 nt, Homo sapiens
  misc_RNA (1)...(19): siRNA sense strand
gcgauggguugauauugcu

SEQ ID NO: 397297 - RNA, 19 nt, Homo sapiens
  misc_RNA (1)...(19): siRNA sense strand
uaccaaccaguuagcuaua

SEQ ID NO: 397298 - RNA, 19 nt, Homo sapiens
  misc_RNA (1)...(19): siRNA sense strand
ggauuuaugcuugcucauc

SEQ ID NO: 397299 - RNA, 19 nt, Homo sapiens
  misc_RNA (1)...(19): siRNA sense strand
gacaaucaacgaggacaug

SEQ ID NO: 397300 - RNA, 19 nt, Homo sapiens
  misc_RNA (1)...(19): siRNA sense strand
cgagaacuauaaugaugcu

SEQ ID NO: 397301 - RNA, 19 nt, Homo sapiens
  misc_RNA (1)...(19): siRNA sense strand
agaaacauggugacuagau

SEQ ID NO: 397302 - RNA, 19 nt, Homo sapiens
  misc_RNA (1)...(19): siRNA sense strand
accaaccaguuagcuauaa

SEQ ID NO: 397303 - RNA, 19 nt, Homo sapiens
  misc_RNA (1)...(19): siRNA sense strand
auacugugaugucauuucu

SEQ ID NO: 397304 - RNA, 19 nt, Homo sapiens
  misc_RNA (1)...(19): siRNA sense strand
ugcacaagaucuggaaaug

SEQ ID NO: 397305 - RNA, 19 nt, Homo sapiens
  misc_RNA (1)...(19): siRNA sense strand
uuccagcagucccauauuc

SEQ ID NO: 397306 - RNA, 19 nt, Homo sapiens
  misc_RNA (1)...(19): siRNA sense strand
uugcaggguucagaauuga

SEQ ID NO: 397307 - RNA, 19 nt, Homo sapiens
  misc_RNA (1)...(19): siRNA sense strand
aucgagaacuauaaugaug

SEQ ID NO: 397308 - RNA, 19 nt, Homo sapiens
  misc_RNA (1)...(19): siRNA sense strand
guggauggccagccuuuua

SEQ ID NO: 397309 - RNA, 19 nt, Homo sapiens
  misc_RNA (1)...(19): siRNA sense strand
ugacuagaugcaacaaugu

SEQ ID NO: 397310 - RNA, 19 nt, Homo sapiens
  misc_RNA (1)...(19): siRNA sense strand
caugguuaauuuccgcaau

SEQ ID NO: 397311 - RNA, 19 nt, Homo sapiens
  misc_RNA (1)...(19): siRNA sense strand
gcuacucaggucagagauu

SEQ ID NO: 397312 - RNA, 19 nt, Homo sapiens
  misc_RNA (1)...(19): siRNA sense strand
guacugaccuucucauuga

SEQ ID NO: 397313 - RNA, 19 nt, Homo sapiens
  misc_RNA (1)...(19): siRNA sense strand
gaggaaccauugcagauua

SEQ ID NO: 397314 - RNA, 19 nt, Homo sapiens
  misc_RNA (1)...(19): siRNA sense strand
ggagguggcugaacuaaau

SEQ ID NO: 397315 - RNA, 19 nt, Homo sapiens
  misc_RNA (1)...(19): siRNA sense strand
gaaugaaauugccaaagaa

SEQ ID NO: 397316 - RNA, 19 nt, Homo sapiens
  misc_RNA (1)...(19): siRNA sense strand
gcacagcgauuaccaguac

SEQ ID NO: 397317 - RNA, 19 nt, Homo sapiens
  misc_RNA (1)...(19): siRNA sense strand
gcacaacugccacuuauga

SEQ ID NO: 397318 - RNA, 19 nt, Homo sapiens
  misc_RNA (1)...(19): siRNA sense strand
ccagagacuuggagacuaa

SEQ ID NO: 397319 - RNA, 19 nt, Homo sapiens
  misc_RNA (1)...(19): siRNA sense strand
aagaaacucucccugauuu

SEQ ID NO: 397320 - RNA, 19 nt, Homo sapiens
  misc_RNA (1)...(19): siRNA sense strand
caaagaaacucucccugau

SEQ ID NO: 397321 - RNA, 19 nt, Homo sapiens
  misc_RNA (1)...(19): siRNA sense strand
agaaugaaauugccaaaga

SEQ ID NO: 397322 - RNA, 19 nt, Homo sapiens
  misc_RNA (1)...(19): siRNA sense strand
ggauguaucuguccuugau

SEQ ID NO: 397323 - RNA, 19 nt, Homo sapiens
  misc_RNA (1)...(19): siRNA sense strand
ugaagacaaugacaacaaa

SEQ ID NO: 397324 - RNA, 19 nt, Homo sapiens
  misc_RNA (1)...(19): siRNA sense strand
gaccauacagucaauuuaa

SEQ ID NO: 397325 - RNA, 19 nt, Homo sapiens
  misc_RNA (1)...(19): siRNA sense strand
gaagaggguuaaccagcuu

SEQ ID NO: 397326 - RNA, 19 nt, Homo sapiens
  misc_RNA (1)...(19): siRNA sense strand
caagaaggcucaguuuaag

SEQ ID NO: 397327 - RNA, 19 nt, Homo sapiens
  misc_RNA (1)...(19): siRNA sense strand
acaagaaggcucaguuuaa

SEQ ID NO: 397328 - RNA, 19 nt, Homo sapiens
  misc_RNA (1)...(19): siRNA sense strand
gaagaggaacagcacagua

SEQ ID NO: 397329 - RNA, 19 nt, Homo sapiens
  misc_RNA (1)...(19): siRNA sense strand
ucaagaaucucaugauaac

SEQ ID NO: 397330 - RNA, 19 nt, Homo sapiens
  misc_RNA (1)...(19): siRNA sense strand
gugggaaucugcucacuga

SEQ ID NO: 397331 - RNA, 19 nt, Homo sapiens
  misc_RNA (1)...(19): siRNA sense strand
gaagcaaaccagagacuug

SEQ ID NO: 397332 - RNA, 19 nt, Homo sapiens
  misc_RNA (1)...(19): siRNA sense strand
gcuaaaggcuggcacaacu

SEQ ID NO: 397333 - RNA, 19 nt, Homo sapiens
  misc_RNA (1)...(19): siRNA sense strand
acucaagaaucucaugaua

SEQ ID NO: 397334 - RNA, 19 nt, Homo sapiens
  misc_RNA (1)...(19): siRNA sense strand
aggcagagcucccagagaa

SEQ ID NO: 397335 - RNA, 19 nt, Homo sapiens
  misc_RNA (1)...(19): siRNA sense strand
gaaaagcgaugagaagaug

SEQ ID NO: 397336 - RNA, 19 nt, Homo sapiens
  misc_RNA (1)...(19): siRNA sense strand
gcaggcagcgccacuuuga

SEQ ID NO: 397337 - RNA, 19 nt, Homo sapiens
  misc_RNA (1)...(19): siRNA sense strand
ggagagcgcacuugacugu

SEQ ID NO: 397338 - RNA, 19 nt, Homo sapiens
  misc_RNA (1)...(19): siRNA sense strand
caugauaacagaagcauug

SEQ ID NO: 397339 - RNA, 19 nt, Homo sapiens
  misc_RNA (1)...(19): siRNA sense strand
ugaggagacuggagauuuc

SEQ ID NO: 397340 - RNA, 19 nt, Homo sapiens
  misc_RNA (1)...(19): siRNA sense strand
caacaaagcaaguaaagcu

SEQ ID NO: 397341 - RNA, 19 nt, Homo sapiens
  misc_RNA (1)...(19): siRNA sense strand
uaacagaccauacagucaa

SEQ ID NO: 397342 - RNA, 19 nt, Homo sapiens
  misc_RNA (1)...(19): siRNA sense strand
uugacucacugguccauua

SEQ ID NO: 397343 - RNA, 19 nt, Homo sapiens
  misc_RNA (1)...(19): siRNA sense strand
gcacgcgaccuucuaaaca

SEQ ID NO: 397344 - RNA, 19 nt, Homo sapiens
  misc_RNA (1)...(19): siRNA sense strand
caacaaaaguauuggaugu

SEQ ID NO: 397345 - RNA, 19 nt, Homo sapiens
  misc_RNA (1)...(19): siRNA sense strand
ggagaauugugugugcauu

SEQ ID NO: 397346 - RNA, 19 nt, Homo sapiens
  misc_RNA (1)...(19): siRNA sense strand
gaagcucggaagaggguua

SEQ ID NO: 397347 - RNA, 19 nt, Homo sapiens
  misc_RNA (1)...(19): siRNA sense strand
cagauuaccagccagauga

SEQ ID NO: 397348 - RNA, 19 nt, Homo sapiens
  misc_RNA (1)...(19): siRNA sense strand
uguggaauuugucaucuaa

SEQ ID NO: 397349 - RNA, 19 nt, Homo sapiens
  misc_RNA (1)...(19): siRNA sense strand
ccagcaguguuccugagua

SEQ ID NO: 397350 - RNA, 19 nt, Homo sapiens
  misc_RNA (1)...(19): siRNA sense strand
gcaguguuccugaguaugu

SEQ ID NO: 397351 - RNA, 19 nt, Homo sapiens
  misc_RNA (1)...(19): siRNA sense strand
cagcaguguuccugaguau

SEQ ID NO: 397352 - RNA, 19 nt, Homo sapiens
  misc_RNA (1)...(19): siRNA sense strand
aaagaaacucucccugauu

SEQ ID NO: 397353 - RNA, 19 nt, Homo sapiens
  misc_RNA (1)...(19): siRNA sense strand
acacauaccacagacagua

SEQ ID NO: 397354 - RNA, 19 nt, Homo sapiens
  misc_RNA (1)...(19): siRNA sense strand
gcuguggcauuccauuguu

SEQ ID NO: 397355 - RNA, 19 nt, Homo sapiens
  misc_RNA (1)...(19): siRNA sense strand
agucgaagcaggaaaguaa

SEQ ID NO: 397356 - RNA, 19 nt, Homo sapiens
  misc_RNA (1)...(19): siRNA sense strand
gugugugcauucuucauaa

SEQ ID NO: 397357 - RNA, 19 nt, Homo sapiens
  misc_RNA (1)...(19): siRNA sense strand
acaaauaacagaccauaca

SEQ ID NO: 397358 - RNA, 19 nt, Homo sapiens
  misc_RNA (1)...(19): siRNA sense strand
caguacagcucccagaagu

SEQ ID NO: 397359 - RNA, 19 nt, Homo sapiens
  misc_RNA (1)...(19): siRNA sense strand
uacaagaaggcucaguuua

SEQ ID NO: 397360 - RNA, 19 nt, Homo sapiens
  misc_RNA (1)...(19): siRNA sense strand
ccaucucgcugcugaggaa

SEQ ID NO: 397361 - RNA, 19 nt, Homo sapiens
  misc_RNA (1)...(19): siRNA sense strand
uggaauuugucaucuaaug

SEQ ID NO: 397362 - RNA, 19 nt, Homo sapiens
  misc_RNA (1)...(19): siRNA sense strand
cuacaagaaggcucaguuu

SEQ ID NO: 397363 - RNA, 19 nt, Homo sapiens
  misc_RNA (1)...(19): siRNA sense strand
gaaugcacgcgaccuucua

SEQ ID NO: 397364 - RNA, 19 nt, Homo sapiens
  misc_RNA (1)...(19): siRNA sense strand
caacuacacacaagaagca

SEQ ID NO: 397365 - RNA, 19 nt, Homo sapiens
  misc_RNA (1)...(19): siRNA sense strand
gcagagcucccagagaaau

SEQ ID NO: 397366 - RNA, 19 nt, Homo sapiens
  misc_RNA (1)...(19): siRNA sense strand
guaccagcauggcucuguu

SEQ ID NO: 397367 - RNA, 19 nt, Homo sapiens
  misc_RNA (1)...(19): siRNA sense strand
gauuugguuuccaucauuc

SEQ ID NO: 397368 - RNA, 19 nt, Homo sapiens
  misc_RNA (1)...(19): siRNA sense strand
cacgagugcuuccagaaau

SEQ ID NO: 397369 - RNA, 19 nt, Homo sapiens
  misc_RNA (1)...(19): siRNA sense strand
gaggagagcgcacuugacu

SEQ ID NO: 397370 - RNA, 19 nt, Homo sapiens
  misc_RNA (1)...(19): siRNA sense strand
agaaggcucaguuuaagaa

SEQ ID NO: 397371 - RNA, 19 nt, Homo sapiens
  misc_RNA (1)...(19): siRNA sense strand
gcagcacacccgaaagaug

SEQ ID NO: 397372 - RNA, 19 nt, Homo sapiens
  misc_RNA (1)...(19): siRNA sense strand
guuauaaggauguaucugu

SEQ ID NO: 397373 - RNA, 19 nt, Homo sapiens
  misc_RNA (1)...(19): siRNA sense strand
ggaauauccagacugacaa

SEQ ID NO: 397374 - RNA, 19 nt, Homo sapiens
  misc_RNA (1)...(19): siRNA sense strand
ccagaaguccguggaagaa

SEQ ID NO: 397375 - RNA, 19 nt, Homo sapiens
  misc_RNA (1)...(19): siRNA sense strand
caaaacaguuaccagaaug

SEQ ID NO: 397376 - RNA, 19 nt, Homo sapiens
  misc_RNA (1)...(19): siRNA sense strand
cacacaagaagcauccuua

SEQ ID NO: 397377 - RNA, 19 nt, Homo sapiens
  misc_RNA (1)...(19): siRNA sense strand
ggcauuccauuguuauaag

SEQ ID NO: 397378 - RNA, 19 nt, Homo sapiens
  misc_RNA (1)...(19): siRNA sense strand
uaaaaccuaugacaugcua

SEQ ID NO: 397379 - RNA, 19 nt, Homo sapiens
  misc_RNA (1)...(19): siRNA sense strand
gcagauuaccagccagaug

SEQ ID NO: 397380 - RNA, 19 nt, Homo sapiens
  misc_RNA (1)...(19): siRNA sense strand
gucacuggaugccuaagaa

SEQ ID NO: 397381 - RNA, 19 nt, Homo sapiens
  misc_RNA (1)...(19): siRNA sense strand
gaaggagacuacccaaaag

SEQ ID NO: 397382 - RNA, 19 nt, Homo sapiens
  misc_RNA (1)...(19): siRNA sense strand
gagaccagccugaccaaca

SEQ ID NO: 397383 - RNA, 19 nt, Homo sapiens
  misc_RNA (1)...(19): siRNA sense strand
gaagacaaugacaacaaau

SEQ ID NO: 397384 - RNA, 19 nt, Homo sapiens
  misc_RNA (1)...(19): siRNA sense strand
gggaggagagcgcacuuga

SEQ ID NO: 397385 - RNA, 19 nt, Homo sapiens
  misc_RNA (1)...(19): siRNA sense strand
gaaacucucccugauuugg

SEQ ID NO: 397386 - RNA, 19 nt, Homo sapiens
  misc_RNA (1)...(19): siRNA sense strand
gcagaaugaaauugccaaa

SEQ ID NO: 397387 - RNA, 19 nt, Homo sapiens
  misc_RNA (1)...(19): siRNA sense strand
gacaaacucaagaaucuca

SEQ ID NO: 397388 - RNA, 19 nt, Homo sapiens
  misc_RNA (1)...(19): siRNA sense strand
gcucgaggcagaccacaug

SEQ ID NO: 397389 - RNA, 19 nt, Homo sapiens
  misc_RNA (1)...(19): siRNA sense strand
ccaaaacaguuaccagaau

SEQ ID NO: 397390 - RNA, 19 nt, Homo sapiens
  misc_RNA (1)...(19): siRNA sense strand
gaccuucucauugaaacua

SEQ ID NO: 397391 - RNA, 19 nt, Homo sapiens
  misc_RNA (1)...(19): siRNA sense strand
agaccauacagucaauuua

SEQ ID NO: 397392 - RNA, 19 nt, Homo sapiens
  misc_RNA (1)...(19): siRNA sense strand
cagcaugggcaaccucuug

SEQ ID NO: 397393 - RNA, 19 nt, Homo sapiens
  misc_RNA (1)...(19): siRNA sense strand
ccacucccuuaaagacuga

SEQ ID NO: 397394 - RNA, 19 nt, Homo sapiens
  misc_RNA (1)...(19): siRNA sense strand
gaccaaugccgacaucagu

SEQ ID NO: 397395 - RNA, 19 nt, Homo sapiens
  misc_RNA (1)...(19): siRNA sense strand
agagaagcacuuucacuga

SEQ ID NO: 397396 - RNA, 19 nt, Homo sapiens
  misc_RNA (1)...(19): siRNA sense strand
gguuugcuguggaauuugu

SEQ ID NO: 397397 - RNA, 19 nt, Homo sapiens
  misc_RNA (1)...(19): siRNA sense strand
acaaggccacggagaauug

SEQ ID NO: 397398 - RNA, 19 nt, Homo sapiens
  misc_RNA (1)...(19): siRNA sense strand
ucacugagagaagcacuuu

SEQ ID NO: 397399 - RNA, 19 nt, Homo sapiens
  misc_RNA (1)...(19): siRNA sense strand
ucacugguccauuauguca

SEQ ID NO: 397400 - RNA, 19 nt, Homo sapiens
  misc_RNA (1)...(19): siRNA sense strand
gaugugacggacucauuga

SEQ ID NO: 397401 - RNA, 19 nt, Homo sapiens
  misc_RNA (1)...(19): siRNA sense strand
cuaaugacaaacucaagaa

SEQ ID NO: 397402 - RNA, 19 nt, Homo sapiens
  misc_RNA (1)...(19): siRNA sense strand
ccauacagucaauuuaaga

SEQ ID NO: 397403 - RNA, 19 nt, Homo sapiens
  misc_RNA (1)...(19): siRNA sense strand
ugcugcagcuacuuucaua

SEQ ID NO: 397404 - RNA, 19 nt, Homo sapiens
  misc_RNA (1)...(19): siRNA sense strand
ggaaugcagacauggagau

SEQ ID NO: 397405 - RNA, 19 nt, Homo sapiens
  misc_RNA (1)...(19): siRNA sense strand
agaaguccguggaagaaag

SEQ ID NO: 397406 - RNA, 19 nt, Homo sapiens
  misc_RNA (1)...(19): siRNA sense strand
ugggcaaccucuuggagaa

SEQ ID NO: 397407 - RNA, 19 nt, Homo sapiens
  misc_RNA (1)...(19): siRNA sense strand
aaaccuaugacaugcuaaa

SEQ ID NO: 397408 - RNA, 19 nt, Homo sapiens
  misc_RNA (1)...(19): siRNA sense strand
ugaaauugccaaagaaacu

SEQ ID NO: 397409 - RNA, 19 nt, Homo sapiens
  misc_RNA (1)...(19): siRNA sense strand
cagaccauacagucaauuu

SEQ ID NO: 397410 - RNA, 19 nt, Homo sapiens
  misc_RNA (1)...(19): siRNA sense strand
uggaguggcuguggcauuc

SEQ ID NO: 397411 - RNA, 19 nt, Homo sapiens
  misc_RNA (1)...(19): siRNA sense strand
gccuaugccuccaacaaag

SEQ ID NO: 397412 - RNA, 19 nt, Homo sapiens
  misc_RNA (1)...(19): siRNA sense strand
ggaccagccuuaccuguga

SEQ ID NO: 397413 - RNA, 19 nt, Homo sapiens
  misc_RNA (1)...(19): siRNA sense strand
cacaagcucuccaacaauu

SEQ ID NO: 397414 - RNA, 19 nt, Homo sapiens
  misc_RNA (1)...(19): siRNA sense strand
gccacaagcucuccaacaa

SEQ ID NO: 397415 - RNA, 19 nt, Homo sapiens
  misc_RNA (1)...(19): siRNA sense strand
gcagaaggcgcugguguca

SEQ ID NO: 397416 - RNA, 19 nt, Homo sapiens
  misc_RNA (1)...(19): siRNA sense strand
ccacaagcucuccaacaau

SEQ ID NO: 397417 - RNA, 19 nt, Homo sapiens
  misc_RNA (1)...(19): siRNA sense strand
acaagcucuccaacaauua

SEQ ID NO: 397418 - RNA, 19 nt, Homo sapiens
  misc_RNA (1)...(19): siRNA sense strand
uagcugccacugagaagaa

SEQ ID NO: 397419 - RNA, 19 nt, Homo sapiens
  misc_RNA (1)...(19): siRNA sense strand
gcucuccaacaauuacuau

SEQ ID NO: 397420 - RNA, 19 nt, Homo sapiens
  misc_RNA (1)...(19): siRNA sense strand
caagcucuccaacaauuac

SEQ ID NO: 397421 - RNA, 19 nt, Homo sapiens
  misc_RNA (1)...(19): siRNA sense strand
gaagaaaggcuuagaauga

SEQ ID NO: 397422 - RNA, 19 nt, Homo sapiens
  misc_RNA (1)...(19): siRNA sense strand
gaaaguauaugacccuaaa

SEQ ID NO: 397423 - RNA, 19 nt, Homo sapiens
  misc_RNA (1)...(19): siRNA sense strand
gauaaacacuucagagaaa

SEQ ID NO: 397424 - RNA, 19 nt, Homo sapiens
  misc_RNA (1)...(19): siRNA sense strand
gcaaagaacuggauuuagu

SEQ ID NO: 397425 - RNA, 19 nt, Homo sapiens
  misc_RNA (1)...(19): siRNA sense strand
gaagaagagucuaaauuug

SEQ ID NO: 397426 - RNA, 19 nt, Homo sapiens
  misc_RNA (1)...(19): siRNA sense strand
ugaaugagguugauacuaa

SEQ ID NO: 397427 - RNA, 19 nt, Homo sapiens
  misc_RNA (1)...(19): siRNA sense strand
ggaagagacugauggauug

SEQ ID NO: 397428 - RNA, 19 nt, Homo sapiens
  misc_RNA (1)...(19): siRNA sense strand
ggaaacagauaaacacuuc

SEQ ID NO: 397429 - RNA, 19 nt, Homo sapiens
  misc_RNA (1)...(19): siRNA sense strand
gaaaaucacccuaaaguua

SEQ ID NO: 397430 - RNA, 19 nt, Homo sapiens
  misc_RNA (1)...(19): siRNA sense strand
guaggaagguuaagaaugu

SEQ ID NO: 397431 - RNA, 19 nt, Homo sapiens
  misc_RNA (1)...(19): siRNA sense strand
cagaugagcuucagaaaca

SEQ ID NO: 397432 - RNA, 19 nt, Homo sapiens
  misc_RNA (1)...(19): siRNA sense strand
ugaagaggaugauauggua

SEQ ID NO: 397433 - RNA, 19 nt, Homo sapiens
  misc_RNA (1)...(19): siRNA sense strand
gcaagaaguaggaagguua

SEQ ID NO: 397434 - RNA, 19 nt, Homo sapiens
  misc_RNA (1)...(19): siRNA sense strand
uagaagcccuauuuacuaa

SEQ ID NO: 397435 - RNA, 19 nt, Homo sapiens
  misc_RNA (1)...(19): siRNA sense strand
gggaacauguaaugaauga

SEQ ID NO: 397436 - RNA, 19 nt, Homo sapiens
  misc_RNA (1)...(19): siRNA sense strand
ggaccauccugcuacagua

SEQ ID NO: 397437 - RNA, 19 nt, Homo sapiens
  misc_RNA (1)...(19): siRNA sense strand
ggaauaucaucaggucaua

SEQ ID NO: 397438 - RNA, 19 nt, Homo sapiens
  misc_RNA (1)...(19): siRNA sense strand
gaauuagaagcccuauuua

SEQ ID NO: 397439 - RNA, 19 nt, Homo sapiens
  misc_RNA (1)...(19): siRNA sense strand
gaaguaggaagguuaagaa

SEQ ID NO: 397440 - RNA, 19 nt, Homo sapiens
  misc_RNA (1)...(19): siRNA sense strand
gagggaacauguaaugaau

SEQ ID NO: 397441 - RNA, 19 nt, Homo sapiens
  misc_RNA (1)...(19): siRNA sense strand
cuaaagaguuggagaaagu

SEQ ID NO: 397442 - RNA, 19 nt, Homo sapiens
  misc_RNA (1)...(19): siRNA sense strand
caaagaacuggauuuagua

SEQ ID NO: 397443 - RNA, 19 nt, Homo sapiens
  misc_RNA (1)...(19): siRNA sense strand
gaagaaggcagaugagcuu

SEQ ID NO: 397444 - RNA, 19 nt, Homo sapiens
  misc_RNA (1)...(19): siRNA sense strand
gaagaagaaaggcuuagaa

SEQ ID NO: 397445 - RNA, 19 nt, Homo sapiens
  misc_RNA (1)...(19): siRNA sense strand
gaagauagaaccaccagau

SEQ ID NO: 397446 - RNA, 19 nt, Homo sapiens
  misc_RNA (1)...(19): siRNA sense strand
gaaagcagacauagaggaa

SEQ ID NO: 397447 - RNA, 19 nt, Homo sapiens
  misc_RNA (1)...(19): siRNA sense strand
ccaccaagcucuucuaaaa

SEQ ID NO: 397448 - RNA, 19 nt, Homo sapiens
  misc_RNA (1)...(19): siRNA sense strand
agaauuagaagcccuauuu

SEQ ID NO: 397449 - RNA, 19 nt, Homo sapiens
  misc_RNA (1)...(19): siRNA sense strand
gaacaugaaaggagagaau

SEQ ID NO: 397450 - RNA, 19 nt, Homo sapiens
  misc_RNA (1)...(19): siRNA sense strand
gggaagagacugauggauu

SEQ ID NO: 397451 - RNA, 19 nt, Homo sapiens
  misc_RNA (1)...(19): siRNA sense strand
ggacaaaacuugaugaacu

SEQ ID NO: 397452 - RNA, 19 nt, Homo sapiens
  misc_RNA (1)...(19): siRNA sense strand
uaaguuggauucccuucaa

SEQ ID NO: 397453 - RNA, 19 nt, Homo sapiens
  misc_RNA (1)...(19): siRNA sense strand
gaauaucucaagcaaguga

SEQ ID NO: 397454 - RNA, 19 nt, Homo sapiens
  misc_RNA (1)...(19): siRNA sense strand
ggauucccuucaagauaua

SEQ ID NO: 397455 - RNA, 19 nt, Homo sapiens
  misc_RNA (1)...(19): siRNA sense strand
gaacuggauuuaguaaguc

SEQ ID NO: 397456 - RNA, 19 nt, Homo sapiens
  misc_RNA (1)...(19): siRNA sense strand
cucagaagcuggaauauca

SEQ ID NO: 397457 - RNA, 19 nt, Homo sapiens
  misc_RNA (1)...(19): siRNA sense strand
ggaagcaaagaucaacuaa

SEQ ID NO: 397458 - RNA, 19 nt, Homo sapiens
  misc_RNA (1)...(19): siRNA sense strand
ccugaauccugacaaguuu

SEQ ID NO: 397459 - RNA, 19 nt, Homo sapiens
  misc_RNA (1)...(19): siRNA sense strand
gagaaaagcuccagaaagc

SEQ ID NO: 397460 - RNA, 19 nt, Homo sapiens
  misc_RNA (1)...(19): siRNA sense strand
gaagcaaagaucaacuaaa

SEQ ID NO: 397461 - RNA, 19 nt, Homo sapiens
  misc_RNA (1)...(19): siRNA sense strand
gaaaagaagaagagucuaa

SEQ ID NO: 397462 - RNA, 19 nt, Homo sapiens
  misc_RNA (1)...(19): siRNA sense strand
caagacucgucaugaagaa

SEQ ID NO: 397463 - RNA, 19 nt, Homo sapiens
  misc_RNA (1)...(19): siRNA sense strand
ggcaacaagugaucuggaa

SEQ ID NO: 397464 - RNA, 19 nt, Homo sapiens
  misc_RNA (1)...(19): siRNA sense strand
uggauucccuucaagauau

SEQ ID NO: 397465 - RNA, 19 nt, Homo sapiens
  misc_RNA (1)...(19): siRNA sense strand
caguauugcuuucucuuga

SEQ ID NO: 397466 - RNA, 19 nt, Homo sapiens
  misc_RNA (1)...(19): siRNA sense strand
ggaugaacaagaauuagaa

SEQ ID NO: 397467 - RNA, 19 nt, Homo sapiens
  misc_RNA (1)...(19): siRNA sense strand
aagcaaagaacuggauuua

SEQ ID NO: 397468 - RNA, 19 nt, Homo sapiens
  misc_RNA (1)...(19): siRNA sense strand
gaaguuugagccacacauu

SEQ ID NO: 397469 - RNA, 19 nt, Homo sapiens
  misc_RNA (1)...(19): siRNA sense strand
caagaaguaggaagguuaa

SEQ ID NO: 397470 - RNA, 19 nt, Homo sapiens
  misc_RNA (1)...(19): siRNA sense strand
gauacuggacuuuauuaug

SEQ ID NO: 397471 - RNA, 19 nt, Homo sapiens
  misc_RNA (1)...(19): siRNA sense strand
uuagaagcccuauuuacua

SEQ ID NO: 397472 - RNA, 19 nt, Homo sapiens
  misc_RNA (1)...(19): siRNA sense strand
cagauacuggacuuuauua

SEQ ID NO: 397473 - RNA, 19 nt, Homo sapiens
  misc_RNA (1)...(19): siRNA sense strand
gcuggagaauugaaguuug

SEQ ID NO: 397474 - RNA, 19 nt, Homo sapiens
  misc_RNA (1)...(19): siRNA sense strand
guauugcuuucucuugauu

SEQ ID NO: 397475 - RNA, 19 nt, Homo sapiens
  misc_RNA (1)...(19): siRNA sense strand
gcaaagaucaacuaaaaga

SEQ ID NO: 397476 - RNA, 19 nt, Homo sapiens
  misc_RNA (1)...(19): siRNA sense strand
agacauagaggaaauaaag

SEQ ID NO: 397477 - RNA, 19 nt, Homo sapiens
  misc_RNA (1)...(19): siRNA sense strand
ccagaaagcagacauagag

SEQ ID NO: 397478 - RNA, 19 nt, Homo sapiens
  misc_RNA (1)...(19): siRNA sense strand
agaacuggauuuaguaagu

SEQ ID NO: 397479 - RNA, 19 nt, Homo sapiens
  misc_RNA (1)...(19): siRNA sense strand
cagauaaacacuucagaga

SEQ ID NO: 397480 - RNA, 19 nt, Homo sapiens
  misc_RNA (1)...(19): siRNA sense strand
gcagacauagaggaaauaa

SEQ ID NO: 397481 - RNA, 19 nt, Homo sapiens
  misc_RNA (1)...(19): siRNA sense strand
ggaaagugcgaagauagaa

SEQ ID NO: 397482 - RNA, 19 nt, Homo sapiens
  misc_RNA (1)...(19): siRNA sense strand
ucaaagcggcaacaaguga

SEQ ID NO: 397483 - RNA, 19 nt, Homo sapiens
  misc_RNA (1)...(19): siRNA sense strand
agaaugagggaacauguaa

SEQ ID NO: 397484 - RNA, 19 nt, Homo sapiens
  misc_RNA (1)...(19): siRNA sense strand
ggaacacuaugacaagacu

SEQ ID NO: 397485 - RNA, 19 nt, Homo sapiens
  misc_RNA (1)...(19): siRNA sense strand
ugaugaauaucucaagcaa

SEQ ID NO: 397486 - RNA, 19 nt, Homo sapiens
  misc_RNA (1)...(19): siRNA sense strand
ucacagaggaagaacuaaa

SEQ ID NO: 397487 - RNA, 19 nt, Homo sapiens
  misc_RNA (1)...(19): siRNA sense strand
ugagguugauacuaacaaa

SEQ ID NO: 397488 - RNA, 19 nt, Homo sapiens
  misc_RNA (1)...(19): siRNA sense strand
gauuggauccuaaugacuu

SEQ ID NO: 397489 - RNA, 19 nt, Homo sapiens
  misc_RNA (1)...(19): siRNA sense strand
aagcagacauagaggaaau

SEQ ID NO: 397490 - RNA, 19 nt, Homo sapiens
  misc_RNA (1)...(19): siRNA sense strand
uuaagaagaaggcagauga

SEQ ID NO: 397491 - RNA, 19 nt, Homo sapiens
  misc_RNA (1)...(19): siRNA sense strand
gaaugagguugauacuaac

SEQ ID NO: 397492 - RNA, 19 nt, Homo sapiens
  misc_RNA (1)...(19): siRNA sense strand
gaaaugaugaaggaacaug

SEQ ID NO: 397493 - RNA, 19 nt, Homo sapiens
  misc_RNA (1)...(19): siRNA sense strand
augaauaucucaagcaagu

SEQ ID NO: 397494 - RNA, 19 nt, Homo sapiens
  misc_RNA (1)...(19): siRNA sense strand
aaagagguaugggaagaga

SEQ ID NO: 397495 - RNA, 19 nt, Homo sapiens
  misc_RNA (1)...(19): siRNA sense strand
cuggagaauugaaguuuga

SEQ ID NO: 397496 - RNA, 19 nt, Homo sapiens
  misc_RNA (1)...(19): siRNA sense strand
ggaagaagaaaggcuuaga

SEQ ID NO: 397497 - RNA, 19 nt, Homo sapiens
  misc_RNA (1)...(19): siRNA sense strand
gugauggauuccuggauga

SEQ ID NO: 397498 - RNA, 19 nt, Homo sapiens
  misc_RNA (1)...(19): siRNA sense strand
aggaugauaugguagaaau

SEQ ID NO: 397499 - RNA, 19 nt, Homo sapiens
  misc_RNA (1)...(19): siRNA sense strand
ugagggaacauguaaugaa

SEQ ID NO: 397500 - RNA, 19 nt, Homo sapiens
  misc_RNA (1)...(19): siRNA sense strand
gguagaaauggaagaagaa

SEQ ID NO: 397501 - RNA, 19 nt, Homo sapiens
  misc_RNA (1)...(19): siRNA sense strand
uguggaaagugcgaagaua

SEQ ID NO: 397502 - RNA, 19 nt, Homo sapiens
  misc_RNA (1)...(19): siRNA sense strand
gcaugaaaaucacccuaaa

SEQ ID NO: 397503 - RNA, 19 nt, Homo sapiens
  misc_RNA (1)...(19): siRNA sense strand
caacaagugaucuggaaca

SEQ ID NO: 397504 - RNA, 19 nt, Homo sapiens
  misc_RNA (1)...(19): siRNA sense strand
uugaagcugugccuauuga

SEQ ID NO: 397505 - RNA, 19 nt, Homo sapiens
  misc_RNA (1)...(19): siRNA sense strand
ugguagaaauggaagaaga

SEQ ID NO: 397506 - RNA, 19 nt, Homo sapiens
  misc_RNA (1)...(19): siRNA sense strand
acaauuugaucaccuaaac

SEQ ID NO: 397507 - RNA, 19 nt, Homo sapiens
  misc_RNA (1)...(19): siRNA sense strand
ggcaagaaguaggaagguu

SEQ ID NO: 397508 - RNA, 19 nt, Homo sapiens
  misc_RNA (1)...(19): siRNA sense strand
aguuugagccacacauuua

SEQ ID NO: 397509 - RNA, 19 nt, Homo sapiens
  misc_RNA (1)...(19): siRNA sense strand
gauagaaccaccagauacu

SEQ ID NO: 397510 - RNA, 19 nt, Homo sapiens
  misc_RNA (1)...(19): siRNA sense strand
uaaaagagguaugggaaga

SEQ ID NO: 397511 - RNA, 19 nt, Homo sapiens
  misc_RNA (1)...(19): siRNA sense strand
caugaaaggagagaauauu

SEQ ID NO: 397512 - RNA, 19 nt, Homo sapiens
  misc_RNA (1)...(19): siRNA sense strand
aagauagaaccaccagaua

SEQ ID NO: 397513 - RNA, 19 nt, Homo sapiens
  misc_RNA (1)...(19): siRNA sense strand
aaucaaagcggcaacaagu

SEQ ID NO: 397514 - RNA, 19 nt, Homo sapiens
  misc_RNA (1)...(19): siRNA sense strand
gaccaccaagcucuucuaa

SEQ ID NO: 397515 - RNA, 19 nt, Homo sapiens
  misc_RNA (1)...(19): siRNA sense strand
gaugugcuggaaacagaua

SEQ ID NO: 397516 - RNA, 19 nt, Homo sapiens
  misc_RNA (1)...(19): siRNA sense strand
gaugagcuucagaaacaaa

SEQ ID NO: 397517 - RNA, 19 nt, Homo sapiens
  misc_RNA (1)...(19): siRNA sense strand
guaaugaaugagguugaua

SEQ ID NO: 397518 - RNA, 19 nt, Homo sapiens
  misc_RNA (1)...(19): siRNA sense strand
uagaaugagggaacaugua

SEQ ID NO: 397519 - RNA, 19 nt, Homo sapiens
  misc_RNA (1)...(19): siRNA sense strand
aagaaaggcuuagaaugag

SEQ ID NO: 397520 - RNA, 19 nt, Homo sapiens
  misc_RNA (1)...(19): siRNA sense strand
gacucgucaugaagaauuu

SEQ ID NO: 397521 - RNA, 19 nt, Homo sapiens
  misc_RNA (1)...(19): siRNA sense strand
gcagagaaauuacguugua

SEQ ID NO: 397522 - RNA, 19 nt, Homo sapiens
  misc_RNA (1)...(19): siRNA sense strand
ggacugaccuccacucaaa

SEQ ID NO: 397523 - RNA, 19 nt, Homo sapiens
  misc_RNA (1)...(19): siRNA sense strand
gaagauggcugaauacuac

SEQ ID NO: 397524 - RNA, 19 nt, Homo sapiens
  misc_RNA (1)...(19): siRNA sense strand
guacuuagaugauugcaaa

SEQ ID NO: 397525 - RNA, 19 nt, Homo sapiens
  misc_RNA (1)...(19): siRNA sense strand
ucacucaucucauguuaua

SEQ ID NO: 397526 - RNA, 19 nt, Homo sapiens
  misc_RNA (1)...(19): siRNA sense strand
caacaacagcucucuaaua

SEQ ID NO: 397527 - RNA, 19 nt, Homo sapiens
  misc_RNA (1)...(19): siRNA sense strand
gaaggagggucuacagguu

SEQ ID NO: 397528 - RNA, 19 nt, Homo sapiens
  misc_RNA (1)...(19): siRNA sense strand
ggacucagaucaucaccaa

SEQ ID NO: 397529 - RNA, 19 nt, Homo sapiens
  misc_RNA (1)...(19): siRNA sense strand
uacagaagauggcugaaua

SEQ ID NO: 397530 - RNA, 19 nt, Homo sapiens
  misc_RNA (1)...(19): siRNA sense strand
uuagaacccuccucuuaua

SEQ ID NO: 397531 - RNA, 19 nt, Homo sapiens
  misc_RNA (1)...(19): siRNA sense strand
caaagaacgugaucgacaa

SEQ ID NO: 397532 - RNA, 19 nt, Homo sapiens
  misc_RNA (1)...(19): siRNA sense strand
ggacagcaaugaccugcaa

SEQ ID NO: 397533 - RNA, 19 nt, Homo sapiens
  misc_RNA (1)...(19): siRNA sense strand
gaaguucgcuggucuuucg

SEQ ID NO: 397534 - RNA, 19 nt, Homo sapiens
  misc_RNA (1)...(19): siRNA sense strand
gaucuccucugcaauguug

SEQ ID NO: 397535 - RNA, 19 nt, Homo sapiens
  misc_RNA (1)...(19): siRNA sense strand
gacauuggcugcagacaug

SEQ ID NO: 397536 - RNA, 19 nt, Homo sapiens
  misc_RNA (1)...(19): siRNA sense strand
gaucaucaccaaguacuua

SEQ ID NO: 397537 - RNA, 19 nt, Homo sapiens
  misc_RNA (1)...(19): siRNA sense strand
cgaagaaguugcagaagga

SEQ ID NO: 397538 - RNA, 19 nt, Homo sapiens
  misc_RNA (1)...(19): siRNA sense strand
ggagaacguugccuuaagu

SEQ ID NO: 397539 - RNA, 19 nt, Homo sapiens
  misc_RNA (1)...(19): siRNA sense strand
cagaaucuauggacauuga

SEQ ID NO: 397540 - RNA, 19 nt, Homo sapiens
  misc_RNA (1)...(19): siRNA sense strand
acaaugagcucuucacuac

SEQ ID NO: 397541 - RNA, 19 nt, Homo sapiens
  misc_RNA (1)...(19): siRNA sense strand
uaacacaccuuaacuacag

SEQ ID NO: 397542 - RNA, 19 nt, Homo sapiens
  misc_RNA (1)...(19): siRNA sense strand
gcagguccgugcaaaguug

SEQ ID NO: 397543 - RNA, 19 nt, Homo sapiens
  misc_RNA (1)...(19): siRNA sense strand
gaacugauucgacaugaug

SEQ ID NO: 397544 - RNA, 19 nt, Homo sapiens
  misc_RNA (1)...(19): siRNA sense strand
gcucaggucucccggaaug

SEQ ID NO: 397545 - RNA, 19 nt, Homo sapiens
  misc_RNA (1)...(19): siRNA sense strand
caagugaaccagaaggaua

SEQ ID NO: 397546 - RNA, 19 nt, Homo sapiens
  misc_RNA (1)...(19): siRNA sense strand
caagauugcuggcuucgau

SEQ ID NO: 397547 - RNA, 19 nt, Homo sapiens
  misc_RNA (1)...(19): siRNA sense strand
aaacaagcgugcauacaug

SEQ ID NO: 397548 - RNA, 19 nt, Homo sapiens
  misc_RNA (1)...(19): siRNA sense strand
ggaauggacucagaucauc

SEQ ID NO: 397549 - RNA, 19 nt, Homo sapiens
  misc_RNA (1)...(19): siRNA sense strand
guuuagaacccuccucuua

SEQ ID NO: 397550 - RNA, 19 nt, Homo sapiens
  misc_RNA (1)...(19): siRNA sense strand
gcucuucacuacuguguug

SEQ ID NO: 397551 - RNA, 19 nt, Homo sapiens
  misc_RNA (1)...(19): siRNA sense strand
ccgagaagcuggccauguu

SEQ ID NO: 397552 - RNA, 19 nt, Homo sapiens
  misc_RNA (1)...(19): siRNA sense strand
gguggaauucuuuaacuua

SEQ ID NO: 397553 - RNA, 19 nt, Homo sapiens
  misc_RNA (1)...(19): siRNA sense strand
gaacugacggccuugaaug

SEQ ID NO: 397554 - RNA, 19 nt, Homo sapiens
  misc_RNA (1)...(19): siRNA sense strand
cagcagacacccaugauaa

SEQ ID NO: 397555 - RNA, 19 nt, Homo sapiens
  misc_RNA (1)...(19): siRNA sense strand
gagcagaucacgagcuuug

SEQ ID NO: 397556 - RNA, 19 nt, Homo sapiens
  misc_RNA (1)...(19): siRNA sense strand
uccagcaccuuucacauua

SEQ ID NO: 397557 - RNA, 19 nt, Homo sapiens
  misc_RNA (1)...(19): siRNA sense strand
guacuuagccaaauacaca

SEQ ID NO: 397558 - RNA, 19 nt, Homo sapiens
  misc_RNA (1)...(19): siRNA sense strand
gacggguacuucauacuuu

SEQ ID NO: 397559 - RNA, 19 nt, Homo sapiens
  misc_RNA (1)...(19): siRNA sense strand
ucaugcagcucauuugcua

SEQ ID NO: 397560 - RNA, 19 nt, Homo sapiens
  misc_RNA (1)...(19): siRNA sense strand
ucucaaggcuguguuugua

SEQ ID NO: 397561 - RNA, 19 nt, Homo sapiens
  misc_RNA (1)...(19): siRNA sense strand
gcuaaccgcuacagcuuug

SEQ ID NO: 397562 - RNA, 19 nt, Homo sapiens
  misc_RNA (1)...(19): siRNA sense strand
gaagccugauuucucauug

SEQ ID NO: 397563 - RNA, 19 nt, Homo sapiens
  misc_RNA (1)...(19): siRNA sense strand
gaagccagaugucgagaag

SEQ ID NO: 397564 - RNA, 19 nt, Homo sapiens
  misc_RNA (1)...(19): siRNA sense strand
gagaugaccaguacuuaga

SEQ ID NO: 397565 - RNA, 19 nt, Homo sapiens
  misc_RNA (1)...(19): siRNA sense strand
guacuuaugggagcaguua

SEQ ID NO: 397566 - RNA, 19 nt, Homo sapiens
  misc_RNA (1)...(19): siRNA sense strand
gcaagaagaaguccaccaa

SEQ ID NO: 397567 - RNA, 19 nt, Homo sapiens
  misc_RNA (1)...(19): siRNA sense strand
gaccaguacuuagaugauu

SEQ ID NO: 397568 - RNA, 19 nt, Homo sapiens
  misc_RNA (1)...(19): siRNA sense strand
gaagagcaugucccuauug

SEQ ID NO: 397569 - RNA, 19 nt, Homo sapiens
  misc_RNA (1)...(19): siRNA sense strand
gcaccuggguuccucuuca

SEQ ID NO: 397570 - RNA, 19 nt, Homo sapiens
  misc_RNA (1)...(19): siRNA sense strand
gcucaaaggugaagaacac

SEQ ID NO: 397571 - RNA, 19 nt, Homo sapiens
  misc_RNA (1)...(19): siRNA sense strand
gaggaugaauugcuuaaac

SEQ ID NO: 397572 - RNA, 19 nt, Homo sapiens
  misc_RNA (1)...(19): siRNA sense strand
caaaguaugcccucucuuc

SEQ ID NO: 397573 - RNA, 19 nt, Homo sapiens
  misc_RNA (1)...(19): siRNA sense strand
gaucgacacucuagagaac

SEQ ID NO: 397574 - RNA, 19 nt, Homo sapiens
  misc_RNA (1)...(19): siRNA sense strand
ucucuugacucccuuugua

SEQ ID NO: 397575 - RNA, 19 nt, Homo sapiens
  misc_RNA (1)...(19): siRNA sense strand
gaugaccugugccuacuau

SEQ ID NO: 397576 - RNA, 19 nt, Homo sapiens
  misc_RNA (1)...(19): siRNA sense strand
gggcuauacuccuuauguu

SEQ ID NO: 397577 - RNA, 19 nt, Homo sapiens
  misc_RNA (1)...(19): siRNA sense strand
gugaauaauuggcgagaug

SEQ ID NO: 397578 - RNA, 19 nt, Homo sapiens
  misc_RNA (1)...(19): siRNA sense strand
ucaacgaucuccucugcaa

SEQ ID NO: 397579 - RNA, 19 nt, Homo sapiens
  misc_RNA (1)...(19): siRNA sense strand
gcucacaccuucaccuaca

SEQ ID NO: 397580 - RNA, 19 nt, Homo sapiens
  misc_RNA (1)...(19): siRNA sense strand
agagacauguugacccuuu

SEQ ID NO: 397581 - RNA, 19 nt, Homo sapiens
  misc_RNA (1)...(19): siRNA sense strand
aacaacagcucucuaauac

SEQ ID NO: 397582 - RNA, 19 nt, Homo sapiens
  misc_RNA (1)...(19): siRNA sense strand
ccaaacagaaggaggauga

SEQ ID NO: 397583 - RNA, 19 nt, Homo sapiens
  misc_RNA (1)...(19): siRNA sense strand
acaugaaccuggcgaagaa

SEQ ID NO: 397584 - RNA, 19 nt, Homo sapiens
  misc_RNA (1)...(19): siRNA sense strand
ucuagcaucucgcaaggua

SEQ ID NO: 397585 - RNA, 19 nt, Homo sapiens
  misc_RNA (1)...(19): siRNA sense strand
cagaagagcaugucccuau

SEQ ID NO: 397586 - RNA, 19 nt, Homo sapiens
  misc_RNA (1)...(19): siRNA sense strand
guagugaacaggacucuga

SEQ ID NO: 397587 - RNA, 19 nt, Homo sapiens
  misc_RNA (1)...(19): siRNA sense strand
gcucaccacuugaccacuu

SEQ ID NO: 397588 - RNA, 19 nt, Homo sapiens
  misc_RNA (1)...(19): siRNA sense strand
gaaagggcaggaugaacaa

SEQ ID NO: 397589 - RNA, 19 nt, Homo sapiens
  misc_RNA (1)...(19): siRNA sense strand
ucgcuggucuuucgauaaa

SEQ ID NO: 397590 - RNA, 19 nt, Homo sapiens
  misc_RNA (1)...(19): siRNA sense strand
gacaugcaguccaacaaug

SEQ ID NO: 397591 - RNA, 19 nt, Homo sapiens
  misc_RNA (1)...(19): siRNA sense strand
guaggagaacguugccuua

SEQ ID NO: 397592 - RNA, 19 nt, Homo sapiens
  misc_RNA (1)...(19): siRNA sense strand
gugggcagcuacacuacua

SEQ ID NO: 397593 - RNA, 19 nt, Homo sapiens
  misc_RNA (1)...(19): siRNA sense strand
gaagagacaggcggagauu

SEQ ID NO: 397594 - RNA, 19 nt, Homo sapiens
  misc_RNA (1)...(19): siRNA sense strand
ggacggguacuucauacuu

SEQ ID NO: 397595 - RNA, 19 nt, Homo sapiens
  misc_RNA (1)...(19): siRNA sense strand
caauggcacuugugguuuc

SEQ ID NO: 397596 - RNA, 19 nt, Homo sapiens
  misc_RNA (1)...(19): siRNA sense strand
gcagcagacacccaugaua

SEQ ID NO: 397597 - RNA, 19 nt, Homo sapiens
  misc_RNA (1)...(19): siRNA sense strand
uauccuugcuuaucucuau

SEQ ID NO: 397598 - RNA, 19 nt, Homo sapiens
  misc_RNA (1)...(19): siRNA sense strand
ccugggugcuugaguguuu

SEQ ID NO: 397599 - RNA, 19 nt, Homo sapiens
  misc_RNA (1)...(19): siRNA sense strand
cagcggcacugucgacaug

SEQ ID NO: 397600 - RNA, 19 nt, Homo sapiens
  misc_RNA (1)...(19): siRNA sense strand
gacccuaguuccaguguuc

SEQ ID NO: 397601 - RNA, 19 nt, Homo sapiens
  misc_RNA (1)...(19): siRNA sense strand
uguuauaucugcucaguca

SEQ ID NO: 397602 - RNA, 19 nt, Homo sapiens
  misc_RNA (1)...(19): siRNA sense strand
gaccggcuauugcaaguca

SEQ ID NO: 397603 - RNA, 19 nt, Homo sapiens
  misc_RNA (1)...(19): siRNA sense strand
uuagugaccugcuuaugug

SEQ ID NO: 397604 - RNA, 19 nt, Homo sapiens
  misc_RNA (1)...(19): siRNA sense strand
gaucccagagugccauuaa

SEQ ID NO: 397605 - RNA, 19 nt, Homo sapiens
  misc_RNA (1)...(19): siRNA sense strand
caacuucagcagcauuauu

SEQ ID NO: 397606 - RNA, 19 nt, Homo sapiens
  misc_RNA (1)...(19): siRNA sense strand
ugcaccagauugugaauaa

SEQ ID NO: 397607 - RNA, 19 nt, Homo sapiens
  misc_RNA (1)...(19): siRNA sense strand
cagcauuauugcagagaaa

SEQ ID NO: 397608 - RNA, 19 nt, Homo sapiens
  misc_RNA (1)...(19): siRNA sense strand
gagaggaugaauugcuuaa

SEQ ID NO: 397609 - RNA, 19 nt, Homo sapiens
  misc_RNA (1)...(19): siRNA sense strand
ggagaggaugaauugcuua

SEQ ID NO: 397610 - RNA, 19 nt, Homo sapiens
  misc_RNA (1)...(19): siRNA sense strand
cgggcugccuggcucauua

SEQ ID NO: 397611 - RNA, 19 nt, Homo sapiens
  misc_RNA (1)...(19): siRNA sense strand
gcagcauuauugcagagaa

SEQ ID NO: 397612 - RNA, 19 nt, Homo sapiens
  misc_RNA (1)...(19): siRNA sense strand
uaaguaccaugacuccaau

SEQ ID NO: 397613 - RNA, 19 nt, Homo sapiens
  misc_RNA (1)...(19): siRNA sense strand
caagguagcauggaggaaa

SEQ ID NO: 397614 - RNA, 19 nt, Homo sapiens
  misc_RNA (1)...(19): siRNA sense strand
ccaagaacgucagcuucaa

SEQ ID NO: 397615 - RNA, 19 nt, Homo sapiens
  misc_RNA (1)...(19): siRNA sense strand
gugcuaacaugucugaaag

SEQ ID NO: 397616 - RNA, 19 nt, Homo sapiens
  misc_RNA (1)...(19): siRNA sense strand
agaagagcaugucccuauu

SEQ ID NO: 397617 - RNA, 19 nt, Homo sapiens
  misc_RNA (1)...(19): siRNA sense strand
gcucaauccuugccagucu

SEQ ID NO: 397618 - RNA, 19 nt, Homo sapiens
  misc_RNA (1)...(19): siRNA sense strand
ugaaugaacugaguguagu

SEQ ID NO: 397619 - RNA, 19 nt, Homo sapiens
  misc_RNA (1)...(19): siRNA sense strand
ccagggcucucagaaucua

SEQ ID NO: 397620 - RNA, 19 nt, Homo sapiens
  misc_RNA (1)...(19): siRNA sense strand
gcuggucuuucgauaaaug

SEQ ID NO: 397621 - RNA, 19 nt, Homo sapiens
  misc_RNA (1)...(19): siRNA sense strand
gaacagaugucagcaaugu

SEQ ID NO: 397622 - RNA, 19 nt, Homo sapiens
  misc_RNA (1)...(19): siRNA sense strand
gaagagaugaguuuguuua

SEQ ID NO: 397623 - RNA, 19 nt, Homo sapiens
  misc_RNA (1)...(19): siRNA sense strand
ccaaauagcucuaauucug

SEQ ID NO: 397624 - RNA, 19 nt, Homo sapiens
  misc_RNA (1)...(19): siRNA sense strand
ccaagaacauggagcaaua

SEQ ID NO: 397625 - RNA, 19 nt, Homo sapiens
  misc_RNA (1)...(19): siRNA sense strand
gaagaaugaucgaauagau

SEQ ID NO: 397626 - RNA, 19 nt, Homo sapiens
  misc_RNA (1)...(19): siRNA sense strand
ugaaagaagugguggaauu

SEQ ID NO: 397627 - RNA, 19 nt, Homo sapiens
  misc_RNA (1)...(19): siRNA sense strand
gaccagagcucacaaggau

SEQ ID NO: 397628 - RNA, 19 nt, Homo sapiens
  misc_RNA (1)...(19): siRNA sense strand
gagaacggauucccaagaa

SEQ ID NO: 397629 - RNA, 19 nt, Homo sapiens
  misc_RNA (1)...(19): siRNA sense strand
gaacauggagcaauauaau

SEQ ID NO: 397630 - RNA, 19 nt, Homo sapiens
  misc_RNA (1)...(19): siRNA sense strand
gaaagaagugguggaauuu

SEQ ID NO: 397631 - RNA, 19 nt, Homo sapiens
  misc_RNA (1)...(19): siRNA sense strand
cuaaaugcccuccaacuua

SEQ ID NO: 397632 - RNA, 19 nt, Homo sapiens
  misc_RNA (1)...(19): siRNA sense strand
gaggagcucuuggccuuua

SEQ ID NO: 397633 - RNA, 19 nt, Homo sapiens
  misc_RNA (1)...(19): siRNA sense strand
agaagugccugaagaauga

SEQ ID NO: 397634 - RNA, 19 nt, Homo sapiens
  misc_RNA (1)...(19): siRNA sense strand
uaaacaacaugcacucuga

SEQ ID NO: 397635 - RNA, 19 nt, Homo sapiens
  misc_RNA (1)...(19): siRNA sense strand
aaacagaggaugcuaauug

SEQ ID NO: 397636 - RNA, 19 nt, Homo sapiens
  misc_RNA (1)...(19): siRNA sense strand
ggaacguacugucaccuuu

SEQ ID NO: 397637 - RNA, 19 nt, Homo sapiens
  misc_RNA (1)...(19): siRNA sense strand
gaagcuaaaugcccuccaa

SEQ ID NO: 397638 - RNA, 19 nt, Homo sapiens
  misc_RNA (1)...(19): siRNA sense strand
gcaaugaagaccaugauga

SEQ ID NO: 397639 - RNA, 19 nt, Homo sapiens
  misc_RNA (1)...(19): siRNA sense strand
gaacuucuccaaugcuuau

SEQ ID NO: 397640 - RNA, 19 nt, Homo sapiens
  misc_RNA (1)...(19): siRNA sense strand
gcucuuggccuuuaaaguu

SEQ ID NO: 397641 - RNA, 19 nt, Homo sapiens
  misc_RNA (1)...(19): siRNA sense strand
gaggugugauugccuauau

SEQ ID NO: 397642 - RNA, 19 nt, Homo sapiens
  misc_RNA (1)...(19): siRNA sense strand
gaagaaugcaucugguuug

SEQ ID NO: 397643 - RNA, 19 nt, Homo sapiens
  misc_RNA (1)...(19): siRNA sense strand
ggaagaaugcaucugguuu

SEQ ID NO: 397644 - RNA, 19 nt, Homo sapiens
  misc_RNA (1)...(19): siRNA sense strand
uaaaugcccuccaacuuag

SEQ ID NO: 397645 - RNA, 19 nt, Homo sapiens
  misc_RNA (1)...(19): siRNA sense strand
ggucaugccauuuguauug

SEQ ID NO: 397646 - RNA, 19 nt, Homo sapiens
  misc_RNA (1)...(19): siRNA sense strand
gcaggaaacucucauucgu

SEQ ID NO: 397647 - RNA, 19 nt, Homo sapiens
  misc_RNA (1)...(19): siRNA sense strand
gagaugaguuuguuuacag

SEQ ID NO: 397648 - RNA, 19 nt, Homo sapiens
  misc_RNA (1)...(19): siRNA sense strand
gcaugguucuacuguguaa

SEQ ID NO: 397649 - RNA, 19 nt, Homo sapiens
  misc_RNA (1)...(19): siRNA sense strand
gcaaaggaacguacuguca

SEQ ID NO: 397650 - RNA, 19 nt, Homo sapiens
  misc_RNA (1)...(19): siRNA sense strand
gugcaacacuggaggaaga

SEQ ID NO: 397651 - RNA, 19 nt, Homo sapiens
  misc_RNA (1)...(19): siRNA sense strand
uguaugaacuucuccaaug

SEQ ID NO: 397652 - RNA, 19 nt, Homo sapiens
  misc_RNA (1)...(19): siRNA sense strand
gaguaagucuccauaugug

SEQ ID NO: 397653 - RNA, 19 nt, Homo sapiens
  misc_RNA (1)...(19): siRNA sense strand
ggagaaguauucaacaaaa

SEQ ID NO: 397654 - RNA, 19 nt, Homo sapiens
  misc_RNA (1)...(19): siRNA sense strand
caugaaaucugggaagaau

SEQ ID NO: 397655 - RNA, 19 nt, Homo sapiens
  misc_RNA (1)...(19): siRNA sense strand
caucugguuuguccaauga

SEQ ID NO: 397656 - RNA, 19 nt, Homo sapiens
  misc_RNA (1)...(19): siRNA sense strand
ccuuuaaaguucacccuua

SEQ ID NO: 397657 - RNA, 19 nt, Homo sapiens
  misc_RNA (1)...(19): siRNA sense strand
caaauagcucuaauucuga

SEQ ID NO: 397658 - RNA, 19 nt, Homo sapiens
  misc_RNA (1)...(19): siRNA sense strand
gaacggauucccaagaaca

SEQ ID NO: 397659 - RNA, 19 nt, Homo sapiens
  misc_RNA (1)...(19): siRNA sense strand
cuugaagaaugaucgaaua

SEQ ID NO: 397660 - RNA, 19 nt, Homo sapiens
  misc_RNA (1)...(19): siRNA sense strand
gagaaugaauaggaacaga

SEQ ID NO: 397661 - RNA, 19 nt, Homo sapiens
  misc_RNA (1)...(19): siRNA sense strand
aagaguaugugauagaguu

SEQ ID NO: 397662 - RNA, 19 nt, Homo sapiens
  misc_RNA (1)...(19): siRNA sense strand
caaugaagaccaugaugaa

SEQ ID NO: 397663 - RNA, 19 nt, Homo sapiens
  misc_RNA (1)...(19): siRNA sense strand
uacaagaagugccugaaga

SEQ ID NO: 397664 - RNA, 19 nt, Homo sapiens
  misc_RNA (1)...(19): siRNA sense strand
gaaauauaguguggaugau

SEQ ID NO: 397665 - RNA, 19 nt, Homo sapiens
  misc_RNA (1)...(19): siRNA sense strand
agaaauauaguguggauga

SEQ ID NO: 397666 - RNA, 19 nt, Homo sapiens
  misc_RNA (1)...(19): siRNA sense strand
gacaugaaaucugggaaga

SEQ ID NO: 397667 - RNA, 19 nt, Homo sapiens
  misc_RNA (1)...(19): siRNA sense strand
aagagaugcuguucgguuu

SEQ ID NO: 397668 - RNA, 19 nt, Homo sapiens
  misc_RNA (1)...(19): siRNA sense strand
ucagcaaugucgcuucaaa

SEQ ID NO: 397669 - RNA, 19 nt, Homo sapiens
  misc_RNA (1)...(19): siRNA sense strand
ggugaucucgccaauauug

SEQ ID NO: 397670 - RNA, 19 nt, Homo sapiens
  misc_RNA (1)...(19): siRNA sense strand
ggagaacggauucccaaga

SEQ ID NO: 397671 - RNA, 19 nt, Homo sapiens
  misc_RNA (1)...(19): siRNA sense strand
cagaggaugcuaauugaaa

SEQ ID NO: 397672 - RNA, 19 nt, Homo sapiens
  misc_RNA (1)...(19): siRNA sense strand
gaaugaauaggaacagaug

SEQ ID NO: 397673 - RNA, 19 nt, Homo sapiens
  misc_RNA (1)...(19): siRNA sense strand
gcuaaaugcccuccaacuu

SEQ ID NO: 397674 - RNA, 19 nt, Homo sapiens
  misc_RNA (1)...(19): siRNA sense strand
gaauggugaucucgccaau

SEQ ID NO: 397675 - RNA, 19 nt, Homo sapiens
  misc_RNA (1)...(19): siRNA sense strand
ucaaagaguaugugauaga

SEQ ID NO: 397676 - RNA, 19 nt, Homo sapiens
  misc_RNA (1)...(19): siRNA sense strand
gaaugcaggaggugugauu

SEQ ID NO: 397677 - RNA, 19 nt, Homo sapiens
  misc_RNA (1)...(19): siRNA sense strand
gcuguucgguuuggucgua

SEQ ID NO: 397678 - RNA, 19 nt, Homo sapiens
  misc_RNA (1)...(19): siRNA sense strand
guuggaaugucaagagaug

SEQ ID NO: 397679 - RNA, 19 nt, Homo sapiens
  misc_RNA (1)...(19): siRNA sense strand
gggaucugcuaaacucuau

SEQ ID NO: 397680 - RNA, 19 nt, Homo sapiens
  misc_RNA (1)...(19): siRNA sense strand
gaugcuaauugaaaugcaa

SEQ ID NO: 397681 - RNA, 19 nt, Homo sapiens
  misc_RNA (1)...(19): siRNA sense strand
caaagaguaugugauagag

SEQ ID NO: 397682 - RNA, 19 nt, Homo sapiens
  misc_RNA (1)...(19): siRNA sense strand
ucaacucuguggaggcuuu

SEQ ID NO: 397683 - RNA, 19 nt, Homo sapiens
  misc_RNA (1)...(19): siRNA sense strand
uaaaucaggacaugaaauc

SEQ ID NO: 397684 - RNA, 19 nt, Homo sapiens
  misc_RNA (1)...(19): siRNA sense strand
agaaugagaacaagaauag

SEQ ID NO: 397685 - RNA, 19 nt, Homo sapiens
  misc_RNA (1)...(19): siRNA sense strand
aacagaggaugcuaauuga

SEQ ID NO: 397686 - RNA, 19 nt, Homo sapiens
  misc_RNA (1)...(19): siRNA sense strand
ccucauaaaucaggacaug

SEQ ID NO: 397687 - RNA, 19 nt, Homo sapiens
  misc_RNA (1)...(19): siRNA sense strand
gugauagaguuccgauaga

SEQ ID NO: 397688 - RNA, 19 nt, Homo sapiens
  misc_RNA (1)...(19): siRNA sense strand
ccagagaggagaacggauu

SEQ ID NO: 397689 - RNA, 19 nt, Homo sapiens
  misc_RNA (1)...(19): siRNA sense strand
agaaugaucgaauagauug

SEQ ID NO: 397690 - RNA, 19 nt, Homo sapiens
  misc_RNA (1)...(19): siRNA sense strand
gugaugaagagaugaguuu

SEQ ID NO: 397691 - RNA, 19 nt, Homo sapiens
  misc_RNA (1)...(19): siRNA sense strand
gcaucugguuuguccaaug

SEQ ID NO: 397692 - RNA, 19 nt, Homo sapiens
  misc_RNA (1)...(19): siRNA sense strand
ucaaagggaggaauauaau

SEQ ID NO: 397693 - RNA, 19 nt, Homo sapiens
  misc_RNA (1)...(19): siRNA sense strand
gcaucucaauggacaguuc

SEQ ID NO: 397694 - RNA, 19 nt, Homo sapiens
  misc_RNA (1)...(19): siRNA sense strand
gcucuucuccuccaucuuc

SEQ ID NO: 397695 - RNA, 19 nt, Homo sapiens
  misc_RNA (1)...(19): siRNA sense strand
cagaaugagaacaagaaua

SEQ ID NO: 397696 - RNA, 19 nt, Homo sapiens
  misc_RNA (1)...(19): siRNA sense strand
ugaguaagucuccauaugu

SEQ ID NO: 397697 - RNA, 19 nt, Homo sapiens
  misc_RNA (1)...(19): siRNA sense strand
ggauguggcgucaggauuc

SEQ ID NO: 397698 - RNA, 19 nt, Homo sapiens
  misc_RNA (1)...(19): siRNA sense strand
guucaaagggaggaauaua

SEQ ID NO: 397699 - RNA, 19 nt, Homo sapiens
  misc_RNA (1)...(19): siRNA sense strand
guuccaucuucuccaaaua

SEQ ID NO: 397700 - RNA, 19 nt, Homo sapiens
  misc_RNA (1)...(19): siRNA sense strand
auggugaucucgccaauau

SEQ ID NO: 397701 - RNA, 19 nt, Homo sapiens
  misc_RNA (1)...(19): siRNA sense strand
gguacgguucgcaucauua

SEQ ID NO: 397702 - RNA, 19 nt, Homo sapiens
  misc_RNA (1)...(19): siRNA sense strand
caaagggaggaauauaaug

SEQ ID NO: 397703 - RNA, 19 nt, Homo sapiens
  misc_RNA (1)...(19): siRNA sense strand
ccaaugguaaucccaagaa

SEQ ID NO: 397704 - RNA, 19 nt, Homo sapiens
  misc_RNA (1)...(19): siRNA sense strand
ccucuucuguuccaucuuc

SEQ ID NO: 397705 - RNA, 19 nt, Homo sapiens
  misc_RNA (1)...(19): siRNA sense strand
gcaaaggaagaagugauug

SEQ ID NO: 397706 - RNA, 19 nt, Homo sapiens
  misc_RNA (1)...(19): siRNA sense strand
agaggaugcuaauugaaau

SEQ ID NO: 397707 - RNA, 19 nt, Homo sapiens
  misc_RNA (1)...(19): siRNA sense strand
ucggagaaguauucaacaa

SEQ ID NO: 397708 - RNA, 19 nt, Homo sapiens
  misc_RNA (1)...(19): siRNA sense strand
guacgguucgcaucauuau

SEQ ID NO: 397709 - RNA, 19 nt, Homo sapiens
  misc_RNA (1)...(19): siRNA sense strand
ugauagaguuccgauagau

SEQ ID NO: 397710 - RNA, 19 nt, Homo sapiens
  misc_RNA (1)...(19): siRNA sense strand
acacauuaguagaacauca

SEQ ID NO: 397711 - RNA, 19 nt, Homo sapiens
  misc_RNA (1)...(19): siRNA sense strand
uggcaugguucuacugugu

SEQ ID NO: 397712 - RNA, 19 nt, Homo sapiens
  misc_RNA (1)...(19): siRNA sense strand
ugaauuuagugagaagcua

SEQ ID NO: 397713 - RNA, 19 nt, Homo sapiens
  misc_RNA (1)...(19): siRNA sense strand
caaugguaaucccaagaau

SEQ ID NO: 397714 - RNA, 19 nt, Homo sapiens
  misc_RNA (1)...(19): siRNA sense strand
gauagaguuccgauagaug

SEQ ID NO: 397715 - RNA, 19 nt, Homo sapiens
  misc_RNA (1)...(19): siRNA sense strand
guaugaacuucuccaaugc

SEQ ID NO: 397716 - RNA, 19 nt, Homo sapiens
  misc_RNA (1)...(19): siRNA sense strand
gacauuguaugaacuucuc

SEQ ID NO: 397717 - RNA, 19 nt, Homo sapiens
  misc_RNA (1)...(19): siRNA sense strand
caauauugaaggcaucuug

SEQ ID NO: 397718 - RNA, 19 nt, Homo sapiens
  misc_RNA (1)...(19): siRNA sense strand
acaagaagugccugaagaa

SEQ ID NO: 397719 - RNA, 19 nt, Homo sapiens
  misc_RNA (1)...(19): siRNA sense strand
guucuacuguguaaagucu

SEQ ID NO: 397720 - RNA, 19 nt, Homo sapiens
  misc_RNA (1)...(19): siRNA sense strand
augaagagaugaguuuguu

SEQ ID NO: 397721 - RNA, 19 nt, Homo sapiens
  misc_RNA (1)...(19): siRNA sense strand
caaacgcugugacaucaua

SEQ ID NO: 397722 - RNA, 19 nt, Homo sapiens
  misc_RNA (1)...(19): siRNA sense strand
gaagaggaguuaucacuac

SEQ ID NO: 397723 - RNA, 19 nt, Homo sapiens
  misc_RNA (1)...(19): siRNA sense strand
gacaagaaaucgucaguuc

SEQ ID NO: 397724 - RNA, 19 nt, Homo sapiens
  misc_RNA (1)...(19): siRNA sense strand
uggagaagcugaacagaaa

SEQ ID NO: 397725 - RNA, 19 nt, Homo sapiens
  misc_RNA (1)...(19): siRNA sense strand
ggaagaaacacauauaaag

SEQ ID NO: 397726 - RNA, 19 nt, Homo sapiens
  misc_RNA (1)...(19): siRNA sense strand
ucaaagacuucgugauuau

SEQ ID NO: 397727 - RNA, 19 nt, Homo sapiens
  misc_RNA (1)...(19): siRNA sense strand
ggaguuaucacuaccauga

SEQ ID NO: 397728 - RNA, 19 nt, Homo sapiens
  misc_RNA (1)...(19): siRNA sense strand
gucaaagacuucgugauua

SEQ ID NO: 397729 - RNA, 19 nt, Homo sapiens
  misc_RNA (1)...(19): siRNA sense strand
ggagaucgaugaguugguu

SEQ ID NO: 397730 - RNA, 19 nt, Homo sapiens
  misc_RNA (1)...(19): siRNA sense strand
uuaaggagaucgaugaguu

SEQ ID NO: 397731 - RNA, 19 nt, Homo sapiens
  misc_RNA (1)...(19): siRNA sense strand
gaaaucgucaguucuguug

SEQ ID NO: 397732 - RNA, 19 nt, Homo sapiens
  misc_RNA (1)...(19): siRNA sense strand
ggagaggcauaacguacaa

SEQ ID NO: 397733 - RNA, 19 nt, Homo sapiens
  misc_RNA (1)...(19): siRNA sense strand
gcuggaaggcggagaauuu

SEQ ID NO: 397734 - RNA, 19 nt, Homo sapiens
  misc_RNA (1)...(19): siRNA sense strand
caauaugccuuucucuaca

SEQ ID NO: 397735 - RNA, 19 nt, Homo sapiens
  misc_RNA (1)...(19): siRNA sense strand
gcucucggcuuggaagaaa

SEQ ID NO: 397736 - RNA, 19 nt, Homo sapiens
  misc_RNA (1)...(19): siRNA sense strand
ccacuuuccaguugaauuu

SEQ ID NO: 397737 - RNA, 19 nt, Homo sapiens
  misc_RNA (1)...(19): siRNA sense strand
ugucaaagacuucgugauu

SEQ ID NO: 397738 - RNA, 19 nt, Homo sapiens
  misc_RNA (1)...(19): siRNA sense strand
cuuacaagcugacugaaga

SEQ ID NO: 397739 - RNA, 19 nt, Homo sapiens
  misc_RNA (1)...(19): siRNA sense strand
gcaagcaggaagacaagaa

SEQ ID NO: 397740 - RNA, 19 nt, Homo sapiens
  misc_RNA (1)...(19): siRNA sense strand
gagaagcugaacagaaauu

SEQ ID NO: 397741 - RNA, 19 nt, Homo sapiens
  misc_RNA (1)...(19): siRNA sense strand
ggaagaacauccgcuugag

SEQ ID NO: 397742 - RNA, 19 nt, Homo sapiens
  misc_RNA (1)...(19): siRNA sense strand
gaagaagagcaccaacugu

SEQ ID NO: 397743 - RNA, 19 nt, Homo sapiens
  misc_RNA (1)...(19): siRNA sense strand
ccaagaaggccuggaagaa

SEQ ID NO: 397744 - RNA, 19 nt, Homo sapiens
  misc_RNA (1)...(19): siRNA sense strand
ccauggaugucauugugaa

SEQ ID NO: 397745 - RNA, 19 nt, Homo sapiens
  misc_RNA (1)...(19): siRNA sense strand
agacaagaaugccauggau

SEQ ID NO: 397746 - RNA, 19 nt, Homo sapiens
  misc_RNA (1)...(19): siRNA sense strand
ggaugucagcgaccacuuu

SEQ ID NO: 397747 - RNA, 19 nt, Homo sapiens
  misc_RNA (1)...(19): siRNA sense strand
gugcuuagaggacaagaaa

SEQ ID NO: 397748 - RNA, 19 nt, Homo sapiens
  misc_RNA (1)...(19): siRNA sense strand
aagaaggccuggaagaaca

SEQ ID NO: 397749 - RNA, 19 nt, Homo sapiens
  misc_RNA (1)...(19): siRNA sense strand
agacauccguuaaggagau

SEQ ID NO: 397750 - RNA, 19 nt, Homo sapiens
  misc_RNA (1)...(19): siRNA sense strand
ccacacugcugucaaagac

SEQ ID NO: 397751 - RNA, 19 nt, Homo sapiens
  misc_RNA (1)...(19): siRNA sense strand
gaaggcggagaauuucauu

SEQ ID NO: 397752 - RNA, 19 nt, Homo sapiens
  misc_RNA (1)...(19): siRNA sense strand
ugaagaggaguuaucacua

SEQ ID NO: 397753 - RNA, 19 nt, Homo sapiens
  misc_RNA (1)...(19): siRNA sense strand
caaggagaggcauaacgua

SEQ ID NO: 397754 - RNA, 19 nt, Homo sapiens
  misc_RNA (1)...(19): siRNA sense strand
ggacaagaaaucgucaguu

SEQ ID NO: 397755 - RNA, 19 nt, Homo sapiens
  misc_RNA (1)...(19): siRNA sense strand
ggauggagacgcagaugug

SEQ ID NO: 397756 - RNA, 19 nt, Homo sapiens
  misc_RNA (1)...(19): siRNA sense strand
gauuagcucucggcuugga

SEQ ID NO: 397757 - RNA, 19 nt, Homo sapiens
  misc_RNA (1)...(19): siRNA sense strand
uuucaugggugacuucaau

SEQ ID NO: 397758 - RNA, 19 nt, Homo sapiens
  misc_RNA (1)...(19): siRNA sense strand
ccagagacauccguuaagg

SEQ ID NO: 397759 - RNA, 19 nt, Homo sapiens
  misc_RNA (1)...(19): siRNA sense strand
acacugcugucaaagacuu

SEQ ID NO: 397760 - RNA, 19 nt, Homo sapiens
  misc_RNA (1)...(19): siRNA sense strand
caucaaacgcugugacauc

SEQ ID NO: 397761 - RNA, 19 nt, Homo sapiens
  misc_RNA (1)...(19): siRNA sense strand
aaucgucaguucuguuguu

SEQ ID NO: 397762 - RNA, 19 nt, Homo sapiens
  misc_RNA (1)...(19): siRNA sense strand
gaaaagcuggugucuguga

SEQ ID NO: 397763 - RNA, 19 nt, Homo sapiens
  misc_RNA (1)...(19): siRNA sense strand
gaaaucaaggacagcaaca

SEQ ID NO: 397764 - RNA, 19 nt, Homo sapiens
  misc_RNA (1)...(19): siRNA sense strand
cgaccacuuuccaguugaa

SEQ ID NO: 397765 - RNA, 19 nt, Homo sapiens
  misc_RNA (1)...(19): siRNA sense strand
ugacaggauugugcuuaga

SEQ ID NO: 397766 - RNA, 19 nt, Homo sapiens
  misc_RNA (1)...(19): siRNA sense strand
aggcauaacguacaacuau

SEQ ID NO: 397767 - RNA, 19 nt, Homo sapiens
  misc_RNA (1)...(19): siRNA sense strand
gcuuagaggacaagaaauc

SEQ ID NO: 397768 - RNA, 19 nt, Homo sapiens
  misc_RNA (1)...(19): siRNA sense strand
uggagacgcagauguguuu

SEQ ID NO: 397769 - RNA, 19 nt, Homo sapiens
  misc_RNA (1)...(19): siRNA sense strand
guacaacuaugugauuagc

SEQ ID NO: 397770 - RNA, 19 nt, Homo sapiens
  misc_RNA (1)...(19): siRNA sense strand
acguacaacuaugugauua

SEQ ID NO: 397771 - RNA, 19 nt, Homo sapiens
  misc_RNA (1)...(19): siRNA sense strand
gaggaguuaucacuaccau

SEQ ID NO: 397772 - RNA, 19 nt, Homo sapiens
  misc_RNA (1)...(19): siRNA sense strand
ggaaggcggagaauuucau

SEQ ID NO: 397773 - RNA, 19 nt, Homo sapiens
  misc_RNA (1)...(19): siRNA sense strand
acaagaaugccauggaugu

SEQ ID NO: 397774 - RNA, 19 nt, Homo sapiens
  misc_RNA (1)...(19): siRNA sense strand
ugaagaagagcaccaacug

SEQ ID NO: 397775 - RNA, 19 nt, Homo sapiens
  misc_RNA (1)...(19): siRNA sense strand
gcagcuacguccccaagaa

SEQ ID NO: 397776 - RNA, 19 nt, Homo sapiens
  misc_RNA (1)...(19): siRNA sense strand
gaacaauaugccuuucucu

SEQ ID NO: 397777 - RNA, 19 nt, Homo sapiens
  misc_RNA (1)...(19): siRNA sense strand
uggaagaacauccgcuuga

SEQ ID NO: 397778 - RNA, 19 nt, Homo sapiens
  misc_RNA (1)...(19): siRNA sense strand
aauaugccuuucucuacaa

SEQ ID NO: 397779 - RNA, 19 nt, Homo sapiens
  misc_RNA (1)...(19): siRNA sense strand
gcgaccacuuuccaguuga

SEQ ID NO: 397780 - RNA, 19 nt, Homo sapiens
  misc_RNA (1)...(19): siRNA sense strand
aaagcaagcaggaagacaa

SEQ ID NO: 397781 - RNA, 19 nt, Homo sapiens
  misc_RNA (1)...(19): siRNA sense strand
gggaaagcaagcaggaaga

SEQ ID NO: 397782 - RNA, 19 nt, Homo sapiens
  misc_RNA (1)...(19): siRNA sense strand
caagaaggccuggaagaac

SEQ ID NO: 397783 - RNA, 19 nt, Homo sapiens
  misc_RNA (1)...(19): siRNA sense strand
ugccauggaugucauugug

SEQ ID NO: 397784 - RNA, 19 nt, Homo sapiens
  misc_RNA (1)...(19): siRNA sense strand
uaaggagaucgaugaguug

SEQ ID NO: 397785 - RNA, 19 nt, Homo sapiens
  misc_RNA (1)...(19): siRNA sense strand
uaacguacaacuaugugau

SEQ ID NO: 397786 - RNA, 19 nt, Homo sapiens
  misc_RNA (1)...(19): siRNA sense strand
aggaaaagcuggugucugu

SEQ ID NO: 397787 - RNA, 19 nt, Homo sapiens
  misc_RNA (1)...(19): siRNA sense strand
uaugacaggauugugcuua

SEQ ID NO: 397788 - RNA, 19 nt, Homo sapiens
  misc_RNA (1)...(19): siRNA sense strand
gaggaggcccuggauguca

SEQ ID NO: 397789 - RNA, 19 nt, Homo sapiens
  misc_RNA (1)...(19): siRNA sense strand
gaaagcaagcaggaagaca

SEQ ID NO: 397790 - RNA, 19 nt, Homo sapiens
  misc_RNA (1)...(19): siRNA sense strand
gaagaaaacaaagagcaaa

SEQ ID NO: 397791 - RNA, 19 nt, Homo sapiens
  misc_RNA (1)...(19): siRNA sense strand
gcggagaauuucauuuuca

SEQ ID NO: 397792 - RNA, 19 nt, Homo sapiens
  misc_RNA (1)...(19): siRNA sense strand
ucacuaccaugacuaucag

SEQ ID NO: 397793 - RNA, 19 nt, Homo sapiens
  misc_RNA (1)...(19): siRNA sense strand
acaauaugccuuucucuac

SEQ ID NO: 397794 - RNA, 19 nt, Homo sapiens
  misc_RNA (1)...(19): siRNA sense strand
aacaauaugccuuucucua

SEQ ID NO: 397795 - RNA, 19 nt, Homo sapiens
  misc_RNA (1)...(19): siRNA sense strand
caagcaggaagacaagaau

SEQ ID NO: 397796 - RNA, 19 nt, Homo sapiens
  misc_RNA (1)...(19): siRNA sense strand
gaugucagcgaccacuuuc

SEQ ID NO: 397797 - RNA, 19 nt, Homo sapiens
  misc_RNA (1)...(19): siRNA sense strand
gaggcauaacguacaacua

SEQ ID NO: 397798 - RNA, 19 nt, Homo sapiens
  misc_RNA (1)...(19): siRNA sense strand
cuuggaagaaacacauaua

SEQ ID NO: 397799 - RNA, 19 nt, Homo sapiens
  misc_RNA (1)...(19): siRNA sense strand
ucaaggagaggcauaacgu

SEQ ID NO: 397800 - RNA, 19 nt, Homo sapiens
  misc_RNA (1)...(19): siRNA sense strand
cagcgaccacuuuccaguu

SEQ ID NO: 397801 - RNA, 19 nt, Homo sapiens
  misc_RNA (1)...(19): siRNA sense strand
aagaggaggcccuggaugu

SEQ ID NO: 397802 - RNA, 19 nt, Homo sapiens
  misc_RNA (1)...(19): siRNA sense strand
ggagaagcugaacagaaau

SEQ ID NO: 397803 - RNA, 19 nt, Homo sapiens
  misc_RNA (1)...(19): siRNA sense strand
guucuguuguucccaaguc

SEQ ID NO: 397804 - RNA, 19 nt, Homo sapiens
  misc_RNA (1)...(19): siRNA sense strand
ggccuucaccaacagcaaa

SEQ ID NO: 397805 - RNA, 19 nt, Homo sapiens
  misc_RNA (1)...(19): siRNA sense strand
agaaugccauggaugucau

SEQ ID NO: 397806 - RNA, 19 nt, Homo sapiens
  misc_RNA (1)...(19): siRNA sense strand
ggaagaaaacaaagagcaa

SEQ ID NO: 397807 - RNA, 19 nt, Homo sapiens
  misc_RNA (1)...(19): siRNA sense strand
caacaggaucugccccaua

SEQ ID NO: 397808 - RNA, 19 nt, Homo sapiens
  misc_RNA (1)...(19): siRNA sense strand
aagcuggugucugugaaga

SEQ ID NO: 397809 - RNA, 19 nt, Homo sapiens
  misc_RNA (1)...(19): siRNA sense strand
agcgaccacuuuccaguug

SEQ ID NO: 397810 - RNA, 19 nt, Homo sapiens
  misc_RNA (1)...(19): siRNA sense strand
caccaacugugcauaugac

SEQ ID NO: 397811 - RNA, 19 nt, Homo sapiens
  misc_RNA (1)...(19): siRNA sense strand
aucaaacgcugugacauca

SEQ ID NO: 397812 - RNA, 19 nt, Homo sapiens
  misc_RNA (1)...(19): siRNA sense strand
caaagacuucgugauuauc

SEQ ID NO: 397813 - RNA, 19 nt, Homo sapiens
  misc_RNA (1)...(19): siRNA sense strand
gagaauagcacguuuaaua

SEQ ID NO: 397814 - RNA, 19 nt, Homo sapiens
  misc_RNA (1)...(19): siRNA sense strand
gcaaagauaugaagagaga

SEQ ID NO: 397815 - RNA, 19 nt, Homo sapiens
  misc_RNA (1)...(19): siRNA sense strand
gaacauaagauccacuuua

SEQ ID NO: 397816 - RNA, 19 nt, Homo sapiens
  misc_RNA (1)...(19): siRNA sense strand
agaaagagcugcuaauuug

SEQ ID NO: 397817 - RNA, 19 nt, Homo sapiens
  misc_RNA (1)...(19): siRNA sense strand
ggaggaaauuguuaaguuu

SEQ ID NO: 397818 - RNA, 19 nt, Homo sapiens
  misc_RNA (1)...(19): siRNA sense strand
gaagagagauuuguauauc

SEQ ID NO: 397819 - RNA, 19 nt, Homo sapiens
  misc_RNA (1)...(19): siRNA sense strand
uacaauggcugcccuaaua

SEQ ID NO: 397820 - RNA, 19 nt, Homo sapiens
  misc_RNA (1)...(19): siRNA sense strand
gaacgaaugugugcccuuu

SEQ ID NO: 397821 - RNA, 19 nt, Homo sapiens
  misc_RNA (1)...(19): siRNA sense strand
gagcaaagaugaacucaag

SEQ ID NO: 397822 - RNA, 19 nt, Homo sapiens
  misc_RNA (1)...(19): siRNA sense strand
ggagaagguugaacaagaa

SEQ ID NO: 397823 - RNA, 19 nt, Homo sapiens
  misc_RNA (1)...(19): siRNA sense strand
aagauaggcugcacuguua

SEQ ID NO: 397824 - RNA, 19 nt, Homo sapiens
  misc_RNA (1)...(19): siRNA sense strand
ggaaacaguuguaugugaa

SEQ ID NO: 397825 - RNA, 19 nt, Homo sapiens
  misc_RNA (1)...(19): siRNA sense strand
ggacaugcguguaaugaug

SEQ ID NO: 397826 - RNA, 19 nt, Homo sapiens
  misc_RNA (1)...(19): siRNA sense strand
gaacagauucggagagaaa

SEQ ID NO: 397827 - RNA, 19 nt, Homo sapiens
  misc_RNA (1)...(19): siRNA sense strand
gggaggaaauuguuaaguu

SEQ ID NO: 397828 - RNA, 19 nt, Homo sapiens
  misc_RNA (1)...(19): siRNA sense strand
gaacaauucagauccagua

SEQ ID NO: 397829 - RNA, 19 nt, Homo sapiens
  misc_RNA (1)...(19): siRNA sense strand
gcaccacccucucagauga

SEQ ID NO: 397830 - RNA, 19 nt, Homo sapiens
  misc_RNA (1)...(19): siRNA sense strand
caggaggccuucuuugaua

SEQ ID NO: 397831 - RNA, 19 nt, Homo sapiens
  misc_RNA (1)...(19): siRNA sense strand
gaagauagaacgaaugugu

SEQ ID NO: 397832 - RNA, 19 nt, Homo sapiens
  misc_RNA (1)...(19): siRNA sense strand
caacaaagaagccaaaugu

SEQ ID NO: 397833 - RNA, 19 nt, Homo sapiens
  misc_RNA (1)...(19): siRNA sense strand
gaagauaggcugcacuguu

SEQ ID NO: 397834 - RNA, 19 nt, Homo sapiens
  misc_RNA (1)...(19): siRNA sense strand
gagacugacuuugacuuua

SEQ ID NO: 397835 - RNA, 19 nt, Homo sapiens
  misc_RNA (1)...(19): siRNA sense strand
gaaguuuccuuucuuucuu

SEQ ID NO: 397836 - RNA, 19 nt, Homo sapiens
  misc_RNA (1)...(19): siRNA sense strand
gcaguucuauucauaaauc

SEQ ID NO: 397837 - RNA, 19 nt, Homo sapiens
  misc_RNA (1)...(19): siRNA sense strand
gcaaagcacaucccaggua

SEQ ID NO: 397838 - RNA, 19 nt, Homo sapiens
  misc_RNA (1)...(19): siRNA sense strand
gauacacucuuugugauuu

SEQ ID NO: 397839 - RNA, 19 nt, Homo sapiens
  misc_RNA (1)...(19): siRNA sense strand
guacaagugugaugagaau

SEQ ID NO: 397840 - RNA, 19 nt, Homo sapiens
  misc_RNA (1)...(19): siRNA sense strand
gaaaguccagugccaagua

SEQ ID NO: 397841 - RNA, 19 nt, Homo sapiens
  misc_RNA (1)...(19): siRNA sense strand
aagaugaacucaaggaauu

SEQ ID NO: 397842 - RNA, 19 nt, Homo sapiens
  misc_RNA (1)...(19): siRNA sense strand
gcaaugaccuguaccuaac

SEQ ID NO: 397843 - RNA, 19 nt, Homo sapiens
  misc_RNA (1)...(19): siRNA sense strand
gaagcuaauugaucaguuc

SEQ ID NO: 397844 - RNA, 19 nt, Homo sapiens
  misc_RNA (1)...(19): siRNA sense strand
gagaggaaacagagaauaa

SEQ ID NO: 397845 - RNA, 19 nt, Homo sapiens
  misc_RNA (1)...(19): siRNA sense strand
gcaaagaggacuacaaugg

SEQ ID NO: 397846 - RNA, 19 nt, Homo sapiens
  misc_RNA (1)...(19): siRNA sense strand
ccacggaggaggagaaaua

SEQ ID NO: 397847 - RNA, 19 nt, Homo sapiens
  misc_RNA (1)...(19): siRNA sense strand
ucacagagacugacuuuga

SEQ ID NO: 397848 - RNA, 19 nt, Homo sapiens
  misc_RNA (1)...(19): siRNA sense strand
cgagaucacuggcgaguau

SEQ ID NO: 397849 - RNA, 19 nt, Homo sapiens
  misc_RNA (1)...(19): siRNA sense strand
agacugacuuugacuuuaa

SEQ ID NO: 397850 - RNA, 19 nt, Homo sapiens
  misc_RNA (1)...(19): siRNA sense strand
gcaggugcauggcaacauu

SEQ ID NO: 397851 - RNA, 19 nt, Homo sapiens
  misc_RNA (1)...(19): siRNA sense strand
caaagaagccaaaugugaa

SEQ ID NO: 397852 - RNA, 19 nt, Homo sapiens
  misc_RNA (1)...(19): siRNA sense strand
gaauuugggugaacauaag

SEQ ID NO: 397853 - RNA, 19 nt, Homo sapiens
  misc_RNA (1)...(19): siRNA sense strand
ucacagaaguaaaggaaga

SEQ ID NO: 397854 - RNA, 19 nt, Homo sapiens
  misc_RNA (1)...(19): siRNA sense strand
ggaagaucauucacuacuu

SEQ ID NO: 397855 - RNA, 19 nt, Homo sapiens
  misc_RNA (1)...(19): siRNA sense strand
gguguggaauucuuacuuu

SEQ ID NO: 397856 - RNA, 19 nt, Homo sapiens
  misc_RNA (1)...(19): siRNA sense strand
gaauuucugcugaagauuu

SEQ ID NO: 397857 - RNA, 19 nt, Homo sapiens
  misc_RNA (1)...(19): siRNA sense strand
gagagaaaaucccaugaua

SEQ ID NO: 397858 - RNA, 19 nt, Homo sapiens
  misc_RNA (1)...(19): siRNA sense strand
ugacgcccauuccagauua

SEQ ID NO: 397859 - RNA, 19 nt, Homo sapiens
  misc_RNA (1)...(19): siRNA sense strand
gcauuuacccugcuccuuu

SEQ ID NO: 397860 - RNA, 19 nt, Homo sapiens
  misc_RNA (1)...(19): siRNA sense strand
gcagaucagugagcgguuu

SEQ ID NO: 397861 - RNA, 19 nt, Homo sapiens
  misc_RNA (1)...(19): siRNA sense strand
ggcaagagcugggaguuug

SEQ ID NO: 397862 - RNA, 19 nt, Homo sapiens
  misc_RNA (1)...(19): siRNA sense strand
gaaacaguccagauucuug

SEQ ID NO: 397863 - RNA, 19 nt, Homo sapiens
  misc_RNA (1)...(19): siRNA sense strand
gggauuuccugaugucauu

SEQ ID NO: 397864 - RNA, 19 nt, Homo sapiens
  misc_RNA (1)...(19): siRNA sense strand
gcaaauuacauucacuuga

SEQ ID NO: 397865 - RNA, 19 nt, Homo sapiens
  misc_RNA (1)...(19): siRNA sense strand
uaucaugauucccaucuuu

SEQ ID NO: 397866 - RNA, 19 nt, Homo sapiens
  misc_RNA (1)...(19): siRNA sense strand
cagaaagagcugcuaauuu

SEQ ID NO: 397867 - RNA, 19 nt, Homo sapiens
  misc_RNA (1)...(19): siRNA sense strand
ccacucagcucuccucuac

SEQ ID NO: 397868 - RNA, 19 nt, Homo sapiens
  misc_RNA (1)...(19): siRNA sense strand
ggaucuuuccugcaaauua

SEQ ID NO: 397869 - RNA, 19 nt, Homo sapiens
  misc_RNA (1)...(19): siRNA sense strand
cauuuacccugcuccuuua

SEQ ID NO: 397870 - RNA, 19 nt, Homo sapiens
  misc_RNA (1)...(19): siRNA sense strand
cagcaacucuacaagaaug

SEQ ID NO: 397871 - RNA, 19 nt, Homo sapiens
  misc_RNA (1)...(19): siRNA sense strand
cagcuacuaugacaacauu

SEQ ID NO: 397872 - RNA, 19 nt, Homo sapiens
  misc_RNA (1)...(19): siRNA sense strand
gccggaagaucauucacua

SEQ ID NO: 397873 - RNA, 19 nt, Homo sapiens
  misc_RNA (1)...(19): siRNA sense strand
cuguuaaccugaugaauuu

SEQ ID NO: 397874 - RNA, 19 nt, Homo sapiens
  misc_RNA (1)...(19): siRNA sense strand
guagugauaugcagcuuuc

SEQ ID NO: 397875 - RNA, 19 nt, Homo sapiens
  misc_RNA (1)...(19): siRNA sense strand
gaugagaauagcacguuua

SEQ ID NO: 397876 - RNA, 19 nt, Homo sapiens
  misc_RNA (1)...(19): siRNA sense strand
gcucacaagcaauauuaua

SEQ ID NO: 397877 - RNA, 19 nt, Homo sapiens
  misc_RNA (1)...(19): siRNA sense strand
gagcucauccgcuguuuga

SEQ ID NO: 397878 - RNA, 19 nt, Homo sapiens
  misc_RNA (1)...(19): siRNA sense strand
cuaccaaacucacccagaa

SEQ ID NO: 397879 - RNA, 19 nt, Homo sapiens
  misc_RNA (1)...(19): siRNA sense strand
cagcaaagauaugaagaga

SEQ ID NO: 397880 - RNA, 19 nt, Homo sapiens
  misc_RNA (1)...(19): siRNA sense strand
gggccagucucuaccauga

SEQ ID NO: 397881 - RNA, 19 nt, Homo sapiens
  misc_RNA (1)...(19): siRNA sense strand
acaaagaagccaaauguga

SEQ ID NO: 397882 - RNA, 19 nt, Homo sapiens
  misc_RNA (1)...(19): siRNA sense strand
uauauccgcuacauccaua

SEQ ID NO: 397883 - RNA, 19 nt, Homo sapiens
  misc_RNA (1)...(19): siRNA sense strand
gaaguacggaauaucauga

SEQ ID NO: 397884 - RNA, 19 nt, Homo sapiens
  misc_RNA (1)...(19): siRNA sense strand
acagaggaguuucaacaaa

SEQ ID NO: 397885 - RNA, 19 nt, Homo sapiens
  misc_RNA (1)...(19): siRNA sense strand
ggaagaggaacaauucaga

SEQ ID NO: 397886 - RNA, 19 nt, Homo sapiens
  misc_RNA (1)...(19): siRNA sense strand
gaccugugauggacacgua

SEQ ID NO: 397887 - RNA, 19 nt, Homo sapiens
  misc_RNA (1)...(19): siRNA sense strand
uccgagacaucaaguauuu

SEQ ID NO: 397888 - RNA, 19 nt, Homo sapiens
  misc_RNA (1)...(19): siRNA sense strand
gccauggucuuaucauuuc

SEQ ID NO: 397889 - RNA, 19 nt, Homo sapiens
  misc_RNA (1)...(19): siRNA sense strand
gagaaaaucccaugauauu

SEQ ID NO: 397890 - RNA, 19 nt, Homo sapiens
  misc_RNA (1)...(19): siRNA sense strand
gcaaagaugaacucaagga

SEQ ID NO: 397891 - RNA, 19 nt, Homo sapiens
  misc_RNA (1)...(19): siRNA sense strand
gaauggaagaggaacaauu

SEQ ID NO: 397892 - RNA, 19 nt, Homo sapiens
  misc_RNA (1)...(19): siRNA sense strand
gaucuuuccugcaaauuac

SEQ ID NO: 397893 - RNA, 19 nt, Homo sapiens
  misc_RNA (1)...(19): siRNA sense strand
gaaagaguguacaaaagaa

SEQ ID NO: 397894 - RNA, 19 nt, Homo sapiens
  misc_RNA (1)...(19): siRNA sense strand
ggagaaacaguccagauuc

SEQ ID NO: 397895 - RNA, 19 nt, Homo sapiens
  misc_RNA (1)...(19): siRNA sense strand
guacagaggaguuucaaca

SEQ ID NO: 397896 - RNA, 19 nt, Homo sapiens
  misc_RNA (1)...(19): siRNA sense strand
uggagaagguugaacaaga

SEQ ID NO: 397897 - RNA, 19 nt, Homo sapiens
  misc_RNA (1)...(19): siRNA sense strand
gcaagagguggcagaguuu

SEQ ID NO: 397898 - RNA, 19 nt, Homo sapiens
  misc_RNA (1)...(19): siRNA sense strand
uacagcaacucuacaagaa

SEQ ID NO: 397899 - RNA, 19 nt, Homo sapiens
  misc_RNA (1)...(19): siRNA sense strand
ggacugugccggaagauca

SEQ ID NO: 397900 - RNA, 19 nt, Homo sapiens
  misc_RNA (1)...(19): siRNA sense strand
gcccuaauauuccuucuag

SEQ ID NO: 397901 - RNA, 19 nt, Homo sapiens
  misc_RNA (1)...(19): siRNA sense strand
gaccauguaugugcuuuau

SEQ ID NO: 397902 - RNA, 19 nt, Homo sapiens
  misc_RNA (1)...(19): siRNA sense strand
uggaaacaguuguauguga

SEQ ID NO: 397903 - RNA, 19 nt, Homo sapiens
  misc_RNA (1)...(19): siRNA sense strand
caaguucauuguacaguca

SEQ ID NO: 397904 - RNA, 19 nt, Homo sapiens
  misc_RNA (1)...(19): siRNA sense strand
gcuaaguccugcauguuca

SEQ ID NO: 397905 - RNA, 19 nt, Homo sapiens
  misc_RNA (1)...(19): siRNA sense strand
uccaagugguugagaauaa

SEQ ID NO: 397906 - RNA, 19 nt, Homo sapiens
  misc_RNA (1)...(19): siRNA sense strand
ccaaggacaaggagaauga

SEQ ID NO: 397907 - RNA, 19 nt, Homo sapiens
  misc_RNA (1)...(19): siRNA sense strand
ggaaaggugacgagagcua

SEQ ID NO: 397908 - RNA, 19 nt, Homo sapiens
  misc_RNA (1)...(19): siRNA sense strand
cacaagaauuucacagaga

SEQ ID NO: 397909 - RNA, 19 nt, Homo sapiens
  misc_RNA (1)...(19): siRNA sense strand
uugaugagcuucugcaaau

SEQ ID NO: 397910 - RNA, 19 nt, Homo sapiens
  misc_RNA (1)...(19): siRNA sense strand
ggacaaaggggaaaagaaa

SEQ ID NO: 397911 - RNA, 19 nt, Homo sapiens
  misc_RNA (1)...(19): siRNA sense strand
guguggaauucuuacuuua

SEQ ID NO: 397912 - RNA, 19 nt, Homo sapiens
  misc_RNA (1)...(19): siRNA sense strand
ccucgggacuggaugguaa

SEQ ID NO: 397913 - RNA, 19 nt, Homo sapiens
  misc_RNA (1)...(19): siRNA sense strand
gagaccauauugaguauua

SEQ ID NO: 397914 - RNA, 19 nt, Homo sapiens
  misc_RNA (1)...(19): siRNA sense strand
uaacguggcuuuacagauu

SEQ ID NO: 397915 - RNA, 19 nt, Homo sapiens
  misc_RNA (1)...(19): siRNA sense strand
ccacaacccucuccuacaa

SEQ ID NO: 397916 - RNA, 19 nt, Homo sapiens
  misc_RNA (1)...(19): siRNA sense strand
ccucggagauggcacuuua

SEQ ID NO: 397917 - RNA, 19 nt, Homo sapiens
  misc_RNA (1)...(19): siRNA sense strand
gaacaacgcaugcggaauc

SEQ ID NO: 397918 - RNA, 19 nt, Homo sapiens
  misc_RNA (1)...(19): siRNA sense strand
uacaugaccuggacaaauu

SEQ ID NO: 397919 - RNA, 19 nt, Homo sapiens
  misc_RNA (1)...(19): siRNA sense strand
ccacggcaguguuuaugua

SEQ ID NO: 397920 - RNA, 19 nt, Homo sapiens
  misc_RNA (1)...(19): siRNA sense strand
cugauaaccuugcccauaa

SEQ ID NO: 397921 - RNA, 19 nt, Homo sapiens
  misc_RNA (1)...(19): siRNA sense strand
ugagaaaugucaucagaau

SEQ ID NO: 397922 - RNA, 19 nt, Homo sapiens
  misc_RNA (1)...(19): siRNA sense strand
gcaaaccaaagucaaagua

SEQ ID NO: 397923 - RNA, 19 nt, Homo sapiens
  misc_RNA (1)...(19): siRNA sense strand
gagcagagcuucgcugaac

SEQ ID NO: 397924 - RNA, 19 nt, Homo sapiens
  misc_RNA (1)...(19): siRNA sense strand
aaucagagaggccaaguua

SEQ ID NO: 397925 - RNA, 19 nt, Homo sapiens
  misc_RNA (1)...(19): siRNA sense strand
cacaaucacuugccagaga

SEQ ID NO: 397926 - RNA, 19 nt, Homo sapiens
  misc_RNA (1)...(19): siRNA sense strand
cuacaauucuggcuucaug

SEQ ID NO: 397927 - RNA, 19 nt, Homo sapiens
  misc_RNA (1)...(19): siRNA sense strand
aaggauaacccucccaaua

SEQ ID NO: 397928 - RNA, 19 nt, Homo sapiens
  misc_RNA (1)...(19): siRNA sense strand
ggacugauccagaauuuac

SEQ ID NO: 397929 - RNA, 19 nt, Homo sapiens
  misc_RNA (1)...(19): siRNA sense strand
ugccagagauccagaaguu

SEQ ID NO: 397930 - RNA, 19 nt, Homo sapiens
  misc_RNA (1)...(19): siRNA sense strand
gauggcacuuuaccagaaa

SEQ ID NO: 397931 - RNA, 19 nt, Homo sapiens
  misc_RNA (1)...(19): siRNA sense strand
caggagaccauauugagua

SEQ ID NO: 397932 - RNA, 19 nt, Homo sapiens
  misc_RNA (1)...(19): siRNA sense strand
gccaagcuccguucucuuu

SEQ ID NO: 397933 - RNA, 19 nt, Homo sapiens
  misc_RNA (1)...(19): siRNA sense strand
uggagagacugcagaugua

SEQ ID NO: 397934 - RNA, 19 nt, Homo sapiens
  misc_RNA (1)...(19): siRNA sense strand
gaccuucaguggaugagaa

SEQ ID NO: 397935 - RNA, 19 nt, Homo sapiens
  misc_RNA (1)...(19): siRNA sense strand
agacaggugugcaaaguuc

SEQ ID NO: 397936 - RNA, 19 nt, Homo sapiens
  misc_RNA (1)...(19): siRNA sense strand
guaccucugcuaucucuuu

SEQ ID NO: 397937 - RNA, 19 nt, Homo sapiens
  misc_RNA (1)...(19): siRNA sense strand
gaucccaucuacauauuac

SEQ ID NO: 397938 - RNA, 19 nt, Homo sapiens
  misc_RNA (1)...(19): siRNA sense strand
cagccaggauccacaauca

SEQ ID NO: 397939 - RNA, 19 nt, Homo sapiens
  misc_RNA (1)...(19): siRNA sense strand
aaaccaaagucaaaguauc

SEQ ID NO: 397940 - RNA, 19 nt, Homo sapiens
  misc_RNA (1)...(19): siRNA sense strand
guacaugaccuggacaaau

SEQ ID NO: 397941 - RNA, 19 nt, Homo sapiens
  misc_RNA (1)...(19): siRNA sense strand
caagcuccguucucuuuua

SEQ ID NO: 397942 - RNA, 19 nt, Homo sapiens
  misc_RNA (1)...(19): siRNA sense strand
ggccauugcugcauguaca

SEQ ID NO: 397943 - RNA, 19 nt, Homo sapiens
  misc_RNA (1)...(19): siRNA sense strand
gcucuccuccaauuuguuu

SEQ ID NO: 397944 - RNA, 19 nt, Homo sapiens
  misc_RNA (1)...(19): siRNA sense strand
gaucuacggcuacaauucu

SEQ ID NO: 397945 - RNA, 19 nt, Homo sapiens
  misc_RNA (1)...(19): siRNA sense strand
cuauaaaccucucauucuc

SEQ ID NO: 397946 - RNA, 19 nt, Homo sapiens
  misc_RNA (1)...(19): siRNA sense strand
caaguuagcaggagaccau

SEQ ID NO: 397947 - RNA, 19 nt, Homo sapiens
  misc_RNA (1)...(19): siRNA sense strand
ugggacugauccagaauuu

SEQ ID NO: 397948 - RNA, 19 nt, Homo sapiens
  misc_RNA (1)...(19): siRNA sense strand
ugagacaggugugcaaagu

SEQ ID NO: 397949 - RNA, 19 nt, Homo sapiens
  misc_RNA (1)...(19): siRNA sense strand
agauggcacuuuaccagaa

SEQ ID NO: 397950 - RNA, 19 nt, Homo sapiens
  misc_RNA (1)...(19): siRNA sense strand
gaucugggccuaccuuggu

SEQ ID NO: 397951 - RNA, 19 nt, Homo sapiens
  misc_RNA (1)...(19): siRNA sense strand
caaaccaaagucaaaguau

SEQ ID NO: 397952 - RNA, 19 nt, Homo sapiens
  misc_RNA (1)...(19): siRNA sense strand
aggauaacccucccaauau

SEQ ID NO: 397953 - RNA, 19 nt, Homo sapiens
  misc_RNA (1)...(19): siRNA sense strand
ccuacaaccuggaaaggau

SEQ ID NO: 397954 - RNA, 19 nt, Homo sapiens
  misc_RNA (1)...(19): siRNA sense strand
ugagcuaggugcugagaca

SEQ ID NO: 397955 - RNA, 19 nt, Homo sapiens
  misc_RNA (1)...(19): siRNA sense strand
gguauccgaucccaucuac

SEQ ID NO: 397956 - RNA, 19 nt, Homo sapiens
  misc_RNA (1)...(19): siRNA sense strand
ugagagagauggccaaccu

SEQ ID NO: 397957 - RNA, 19 nt, Homo sapiens
  misc_RNA (1)...(19): siRNA sense strand
cuucaucuccuucuucauu

SEQ ID NO: 397958 - RNA, 19 nt, Homo sapiens
  misc_RNA (1)...(19): siRNA sense strand
gcagauguaguccaaacug

SEQ ID NO: 397959 - RNA, 19 nt, Homo sapiens
  misc_RNA (1)...(19): siRNA sense strand
ccugauaaccuugcccaua

SEQ ID NO: 397960 - RNA, 19 nt, Homo sapiens
  misc_RNA (1)...(19): siRNA sense strand
caaugugggcuguucuuga

SEQ ID NO: 397961 - RNA, 19 nt, Homo sapiens
  misc_RNA (1)...(19): siRNA sense strand
uggaauuuaugcauguuga

SEQ ID NO: 397962 - RNA, 19 nt, Homo sapiens
  misc_RNA (1)...(19): siRNA sense strand
ccgaucccaucuacauauu

SEQ ID NO: 397963 - RNA, 19 nt, Homo sapiens
  misc_RNA (1)...(19): siRNA sense strand
gacagaccuuuacccacaa

SEQ ID NO: 397964 - RNA, 19 nt, Homo sapiens
  misc_RNA (1)...(19): siRNA sense strand
gcuacaaugugggcuguuc

SEQ ID NO: 397965 - RNA, 19 nt, Homo sapiens
  misc_RNA (1)...(19): siRNA sense strand
gcaggagaccauauugagu

SEQ ID NO: 397966 - RNA, 19 nt, Homo sapiens
  misc_RNA (1)...(19): siRNA sense strand
cuucugcgcuugcuacagu

SEQ ID NO: 397967 - RNA, 19 nt, Homo sapiens
  misc_RNA (1)...(19): siRNA sense strand
gagaaaugucaucagaaug

SEQ ID NO: 397968 - RNA, 19 nt, Homo sapiens
  misc_RNA (1)...(19): siRNA sense strand
gaccacacggcuccuauuc

SEQ ID NO: 397969 - RNA, 19 nt, Homo sapiens
  misc_RNA (1)...(19): siRNA sense strand
caacgcaugcggaaucagu

SEQ ID NO: 397970 - RNA, 19 nt, Homo sapiens
  misc_RNA (1)...(19): siRNA sense strand
uguacuggcucuccuccaa

SEQ ID NO: 397971 - RNA, 19 nt, Homo sapiens
  misc_RNA (1)...(19): siRNA sense strand
guuagcaggagaccauauu

SEQ ID NO: 397972 - RNA, 19 nt, Homo sapiens
  misc_RNA (1)...(19): siRNA sense strand
cuacaaccuggaaaggaua

SEQ ID NO: 397973 - RNA, 19 nt, Homo sapiens
  misc_RNA (1)...(19): siRNA sense strand
uugcagaaguccagguuca

SEQ ID NO: 397974 - RNA, 19 nt, Homo sapiens
  misc_RNA (1)...(19): siRNA sense strand
gagacaggugugcaaaguu

SEQ ID NO: 397975 - RNA, 19 nt, Homo sapiens
  misc_RNA (1)...(19): siRNA sense strand
gaauuuaugcauguugauc

SEQ ID NO: 397976 - RNA, 19 nt, Homo sapiens
  misc_RNA (1)...(19): siRNA sense strand
gcagagcuucgcugaacug

SEQ ID NO: 397977 - RNA, 19 nt, Homo sapiens
  misc_RNA (1)...(19): siRNA sense strand
gaaucagagaggccaaguu

SEQ ID NO: 397978 - RNA, 19 nt, Homo sapiens
  misc_RNA (1)...(19): siRNA sense strand
ucuauaaaccucucauucu

SEQ ID NO: 397979 - RNA, 19 nt, Homo sapiens
  misc_RNA (1)...(19): siRNA sense strand
uagcaggagaccauauuga

SEQ ID NO: 397980 - RNA, 19 nt, Homo sapiens
  misc_RNA (1)...(19): siRNA sense strand
aaugugggcuguucuugag

SEQ ID NO: 397981 - RNA, 19 nt, Homo sapiens
  misc_RNA (1)...(19): siRNA sense strand
uacuggcucuccuccaauu

SEQ ID NO: 397982 - RNA, 19 nt, Homo sapiens
  misc_RNA (1)...(19): siRNA sense strand
gcccauaaccaugcauuuc

SEQ ID NO: 397983 - RNA, 19 nt, Homo sapiens
  misc_RNA (1)...(19): siRNA sense strand
gggacugauccagaauuua

SEQ ID NO: 397984 - RNA, 19 nt, Homo sapiens
  misc_RNA (1)...(19): siRNA sense strand
ccagagauccagaaguuuu

SEQ ID NO: 397985 - RNA, 19 nt, Homo sapiens
  misc_RNA (1)...(19): siRNA sense strand
acaaucacuugccagagau

SEQ ID NO: 397986 - RNA, 19 nt, Homo sapiens
  misc_RNA (1)...(19): siRNA sense strand
cagguggccucuggugguu

SEQ ID NO: 397987 - RNA, 19 nt, Homo sapiens
  misc_RNA (1)...(19): siRNA sense strand
cgaucccaucuacauauua

SEQ ID NO: 397988 - RNA, 19 nt, Homo sapiens
  misc_RNA (1)...(19): siRNA sense strand
gagguggcuucuggagaga

SEQ ID NO: 397989 - RNA, 19 nt, Homo sapiens
  misc_RNA (1)...(19): siRNA sense strand
acaugaccuggacaaauua

SEQ ID NO: 397990 - RNA, 19 nt, Homo sapiens
  misc_RNA (1)...(19): siRNA sense strand
uccaggaucucacgguauc

SEQ ID NO: 397991 - RNA, 19 nt, Homo sapiens
  misc_RNA (1)...(19): siRNA sense strand
cuucuucauugcuuugaga

SEQ ID NO: 397992 - RNA, 19 nt, Homo sapiens
  misc_RNA (1)...(19): siRNA sense strand
aacguggcuuuacagauuu

SEQ ID NO: 397993 - RNA, 19 nt, Homo sapiens
  misc_RNA (1)...(19): siRNA sense strand
ggagagacugcagauguag

SEQ ID NO: 397994 - RNA, 19 nt, Homo sapiens
  misc_RNA (1)...(19): siRNA sense strand
caguaccucugcuaucucu

SEQ ID NO: 397995 - RNA, 19 nt, Homo sapiens
  misc_RNA (1)...(19): siRNA sense strand
caggauccacaaucacuug

SEQ ID NO: 397996 - RNA, 19 nt, Homo sapiens
  misc_RNA (1)...(19): siRNA sense strand
aggagaccauauugaguau

SEQ ID NO: 397997 - RNA, 19 nt, Homo sapiens
  misc_RNA (1)...(19): siRNA sense strand
gaccauauugaguauuaca

SEQ ID NO: 397998 - RNA, 19 nt, Homo sapiens
  misc_RNA (1)...(19): siRNA sense strand
ccgccaagcuccguucucu

SEQ ID NO: 397999 - RNA, 19 nt, Homo sapiens
  misc_RNA (1)...(19): siRNA sense strand
uauccgaucccaucuacau

SEQ ID NO: 398000 - RNA, 19 nt, Homo sapiens
  misc_RNA (1)...(19): siRNA sense strand
uuugcccgcugccugauuu

SEQ ID NO: 398001 - RNA, 19 nt, Homo sapiens
  misc_RNA (1)...(19): siRNA sense strand
uuacccacuucaaauaugg

SEQ ID NO: 398002 - RNA, 19 nt, Homo sapiens
  misc_RNA (1)...(19): siRNA sense strand
uaaccuugcccauaaccau

SEQ ID NO: 398003 - RNA, 19 nt, Homo sapiens
  misc_RNA (1)...(19): siRNA sense strand
caaucuucaucuccuucuu

SEQ ID NO: 398004 - RNA, 19 nt, Homo sapiens
  misc_RNA (1)...(19): siRNA sense strand
ucagagaggccaaguuagc

SEQ ID NO: 398005 - RNA, 19 nt, Homo sapiens
  misc_RNA (1)...(19): siRNA sense strand
cuggagagacugcagaugu

SEQ ID NO: 398006 - RNA, 19 nt, Homo sapiens
  misc_RNA (1)...(19): siRNA sense strand
gcaaaagcaaguccucuuc

SEQ ID NO: 398007 - RNA, 19 nt, Homo sapiens
  misc_RNA (1)...(19): siRNA sense strand
gcugcgagagcgugaacaa

SEQ ID NO: 398008 - RNA, 19 nt, Homo sapiens
  misc_RNA (1)...(19): siRNA sense strand
agaaugaugccccugauaa

SEQ ID NO: 398009 - RNA, 19 nt, Homo sapiens
  misc_RNA (1)...(19): siRNA sense strand
gcagccaggauccacaauc

SEQ ID NO: 398010 - RNA, 19 nt, Homo sapiens
  misc_RNA (1)...(19): siRNA sense strand
ggaauuuaugcauguugau

SEQ ID NO: 398011 - RNA, 19 nt, Homo sapiens
  misc_RNA (1)...(19): siRNA sense strand
ucuccggauuccagcagua

SEQ ID NO: 398012 - RNA, 19 nt, Homo sapiens
  misc_RNA (1)...(19): siRNA sense strand
ccuuuacgacagaccuuua

SEQ ID NO: 398013 - RNA, 19 nt, Homo sapiens
  misc_RNA (1)...(19): siRNA sense strand
gaaacgaaguccaaauuaa

SEQ ID NO: 398014 - RNA, 19 nt, Homo sapiens
  misc_RNA (1)...(19): siRNA sense strand
ggacugggcuaaagagaaa

SEQ ID NO: 398015 - RNA, 19 nt, Homo sapiens
  misc_RNA (1)...(19): siRNA sense strand
ucaguaagcuccauuaaug

SEQ ID NO: 398016 - RNA, 19 nt, Homo sapiens
  misc_RNA (1)...(19): siRNA sense strand
gaaguuugcuuuccacaau

SEQ ID NO: 398017 - RNA, 19 nt, Homo sapiens
  misc_RNA (1)...(19): siRNA sense strand
aaucggagcucuugaaauu

SEQ ID NO: 398018 - RNA, 19 nt, Homo sapiens
  misc_RNA (1)...(19): siRNA sense strand
acaauaagcucaacagaga

SEQ ID NO: 398019 - RNA, 19 nt, Homo sapiens
  misc_RNA (1)...(19): siRNA sense strand
gcagugggauguacaagaa

SEQ ID NO: 398020 - RNA, 19 nt, Homo sapiens
  misc_RNA (1)...(19): siRNA sense strand
cggcucaucucccaaauua

SEQ ID NO: 398021 - RNA, 19 nt, Homo sapiens
  misc_RNA (1)...(19): siRNA sense strand
ggaaacgaaguccaaauua

SEQ ID NO: 398022 - RNA, 19 nt, Homo sapiens
  misc_RNA (1)...(19): siRNA sense strand
gcucagaguucaacaaugu

SEQ ID NO: 398023 - RNA, 19 nt, Homo sapiens
  misc_RNA (1)...(19): siRNA sense strand
gaagguguuugaagauauu

SEQ ID NO: 398024 - RNA, 19 nt, Homo sapiens
  misc_RNA (1)...(19): siRNA sense strand
ggagaucgaagcucaauuu

SEQ ID NO: 398025 - RNA, 19 nt, Homo sapiens
  misc_RNA (1)...(19): siRNA sense strand
uaacauggcucugcaaauc

SEQ ID NO: 398026 - RNA, 19 nt, Homo sapiens
  misc_RNA (1)...(19): siRNA sense strand
ggaaacaauaccaugaaua

SEQ ID NO: 398027 - RNA, 19 nt, Homo sapiens
  misc_RNA (1)...(19): siRNA sense strand
uaaacaaacugacaaggau

SEQ ID NO: 398028 - RNA, 19 nt, Homo sapiens
  misc_RNA (1)...(19): siRNA sense strand
ggauuggaauucucauauu

SEQ ID NO: 398029 - RNA, 19 nt, Homo sapiens
  misc_RNA (1)...(19): siRNA sense strand
ugacaaggauaaacauuuc

SEQ ID NO: 398030 - RNA, 19 nt, Homo sapiens
  misc_RNA (1)...(19): siRNA sense strand
gaagauauuucagccaaca

SEQ ID NO: 398031 - RNA, 19 nt, Homo sapiens
  misc_RNA (1)...(19): siRNA sense strand
caucauggcucgguucuau

SEQ ID NO: 398032 - RNA, 19 nt, Homo sapiens
  misc_RNA (1)...(19): siRNA sense strand
ucacacaguuucuuugguu

SEQ ID NO: 398033 - RNA, 19 nt, Homo sapiens
  misc_RNA (1)...(19): siRNA sense strand
gugaagguguuugaagaua

SEQ ID NO: 398034 - RNA, 19 nt, Homo sapiens
  misc_RNA (1)...(19): siRNA sense strand
ucacagaccacaaccauga

SEQ ID NO: 398035 - RNA, 19 nt, Homo sapiens
  misc_RNA (1)...(19): siRNA sense strand
ggagagauggugacacuug

SEQ ID NO: 398036 - RNA, 19 nt, Homo sapiens
  misc_RNA (1)...(19): siRNA sense strand
caaaucacacaguuucuuu

SEQ ID NO: 398037 - RNA, 19 nt, Homo sapiens
  misc_RNA (1)...(19): siRNA sense strand
gcaaacagugggccgagua

SEQ ID NO: 398038 - RNA, 19 nt, Homo sapiens
  misc_RNA (1)...(19): siRNA sense strand
guaaacaaacugacaagga

SEQ ID NO: 398039 - RNA, 19 nt, Homo sapiens
  misc_RNA (1)...(19): siRNA sense strand
gguaaaggauggucuuaac

SEQ ID NO: 398040 - RNA, 19 nt, Homo sapiens
  misc_RNA (1)...(19): siRNA sense strand
uaacccauauuucauguca

SEQ ID NO: 398041 - RNA, 19 nt, Homo sapiens
  misc_RNA (1)...(19): siRNA sense strand
caaaggaaacgaaguccaa

SEQ ID NO: 398042 - RNA, 19 nt, Homo sapiens
  misc_RNA (1)...(19): siRNA sense strand
cuaaagagaaauacgauga

SEQ ID NO: 398043 - RNA, 19 nt, Homo sapiens
  misc_RNA (1)...(19): siRNA sense strand
gugggaaaguuuaugcaaa

SEQ ID NO: 398044 - RNA, 19 nt, Homo sapiens
  misc_RNA (1)...(19): siRNA sense strand
ccaauucucggagcucuua

SEQ ID NO: 398045 - RNA, 19 nt, Homo sapiens
  misc_RNA (1)...(19): siRNA sense strand
cauaaaaggcuucacaaua

SEQ ID NO: 398046 - RNA, 19 nt, Homo sapiens
  misc_RNA (1)...(19): siRNA sense strand
ggaauucacaguaaacaag

SEQ ID NO: 398047 - RNA, 19 nt, Homo sapiens
  misc_RNA (1)...(19): siRNA sense strand
ggagaaacaaagaaacaga

SEQ ID NO: 398048 - RNA, 19 nt, Homo sapiens
  misc_RNA (1)...(19): siRNA sense strand
ggaaaguucaagaccauug

SEQ ID NO: 398049 - RNA, 19 nt, Homo sapiens
  misc_RNA (1)...(19): siRNA sense strand
ggaaucaaacccugugugu

SEQ ID NO: 398050 - RNA, 19 nt, Homo sapiens
  misc_RNA (1)...(19): siRNA sense strand
ugaagguguuugaagauau

SEQ ID NO: 398051 - RNA, 19 nt, Homo sapiens
  misc_RNA (1)...(19): siRNA sense strand
cccaaugucucaaacaaau

SEQ ID NO: 398052 - RNA, 19 nt, Homo sapiens
  misc_RNA (1)...(19): siRNA sense strand
guucaacaauguggaauuc

SEQ ID NO: 398053 - RNA, 19 nt, Homo sapiens
  misc_RNA (1)...(19): siRNA sense strand
ggaaaagaguaacccauau

SEQ ID NO: 398054 - RNA, 19 nt, Homo sapiens
  misc_RNA (1)...(19): siRNA sense strand
uggcucgguucuauacuua

SEQ ID NO: 398055 - RNA, 19 nt, Homo sapiens
  misc_RNA (1)...(19): siRNA sense strand
gaaauucagcccgaucaga

SEQ ID NO: 398056 - RNA, 19 nt, Homo sapiens
  misc_RNA (1)...(19): siRNA sense strand
gaagugaagguguuugaag

SEQ ID NO: 398057 - RNA, 19 nt, Homo sapiens
  misc_RNA (1)...(19): siRNA sense strand
gcaaacaucagcagcuaca

SEQ ID NO: 398058 - RNA, 19 nt, Homo sapiens
  misc_RNA (1)...(19): siRNA sense strand
gacaagcagucaccucagu

SEQ ID NO: 398059 - RNA, 19 nt, Homo sapiens
  misc_RNA (1)...(19): siRNA sense strand
cgagggugauguuccugua

SEQ ID NO: 398060 - RNA, 19 nt, Homo sapiens
  misc_RNA (1)...(19): siRNA sense strand
uauuaaugcuggaaguuug

SEQ ID NO: 398061 - RNA, 19 nt, Homo sapiens
  misc_RNA (1)...(19): siRNA sense strand
gcucaucucccaaauuaag

SEQ ID NO: 398062 - RNA, 19 nt, Homo sapiens
  misc_RNA (1)...(19): siRNA sense strand
caacaucauugugcucauc

SEQ ID NO: 398063 - RNA, 19 nt, Homo sapiens
  misc_RNA (1)...(19): siRNA sense strand
cacaaugucaaccuaauuu

SEQ ID NO: 398064 - RNA, 19 nt, Homo sapiens
  misc_RNA (1)...(19): siRNA sense strand
acaaugagugggaaaguuu

SEQ ID NO: 398065 - RNA, 19 nt, Homo sapiens
  misc_RNA (1)...(19): siRNA sense strand
uuaacgagcucaucaccau

SEQ ID NO: 398066 - RNA, 19 nt, Homo sapiens
  misc_RNA (1)...(19): siRNA sense strand
gaauuugguagugcuuaua

SEQ ID NO: 398067 - RNA, 19 nt, Homo sapiens
  misc_RNA (1)...(19): siRNA sense strand
caagcagucaccucaguaa

SEQ ID NO: 398068 - RNA, 19 nt, Homo sapiens
  misc_RNA (1)...(19): siRNA sense strand
gaaaagaguaacccauauu

SEQ ID NO: 398069 - RNA, 19 nt, Homo sapiens
  misc_RNA (1)...(19): siRNA sense strand
gggauuggaauucucauau

SEQ ID NO: 398070 - RNA, 19 nt, Homo sapiens
  misc_RNA (1)...(19): siRNA sense strand
gcccugaagugaagguguu

SEQ ID NO: 398071 - RNA, 19 nt, Homo sapiens
  misc_RNA (1)...(19): siRNA sense strand
gcucaucaccaucacaaug

SEQ ID NO: 398072 - RNA, 19 nt, Homo sapiens
  misc_RNA (1)...(19): siRNA sense strand
aaacaaacugacaaggaua

SEQ ID NO: 398073 - RNA, 19 nt, Homo sapiens
  misc_RNA (1)...(19): siRNA sense strand
ggcccaaugucucaaacaa

SEQ ID NO: 398074 - RNA, 19 nt, Homo sapiens
  misc_RNA (1)...(19): siRNA sense strand
ggaaaucgauaaaacucuu

SEQ ID NO: 398075 - RNA, 19 nt, Homo sapiens
  misc_RNA (1)...(19): siRNA sense strand
gcagguggaaaucgauaaa

SEQ ID NO: 398076 - RNA, 19 nt, Homo sapiens
  misc_RNA (1)...(19): siRNA sense strand
caaugagugggaaaguuua

SEQ ID NO: 398077 - RNA, 19 nt, Homo sapiens
  misc_RNA (1)...(19): siRNA sense strand
aagaguaacccauauuuca

SEQ ID NO: 398078 - RNA, 19 nt, Homo sapiens
  misc_RNA (1)...(19): siRNA sense strand
gaaaguucaagaccauugu

SEQ ID NO: 398079 - RNA, 19 nt, Homo sapiens
  misc_RNA (1)...(19): siRNA sense strand
cacacaguuucuuugguua

SEQ ID NO: 398080 - RNA, 19 nt, Homo sapiens
  misc_RNA (1)...(19): siRNA sense strand
aagugaagguguuugaaga

SEQ ID NO: 398081 - RNA, 19 nt, Homo sapiens
  misc_RNA (1)...(19): siRNA sense strand
cagcugcccugaagugaag

SEQ ID NO: 398082 - RNA, 19 nt, Homo sapiens
  misc_RNA (1)...(19): siRNA sense strand
ugaauuugguagugcuuau

SEQ ID NO: 398083 - RNA, 19 nt, Homo sapiens
  misc_RNA (1)...(19): siRNA sense strand
ccacaaugucaaccuaauu

SEQ ID NO: 398084 - RNA, 19 nt, Homo sapiens
  misc_RNA (1)...(19): siRNA sense strand
gaaaaucggagcucuugaa

SEQ ID NO: 398085 - RNA, 19 nt, Homo sapiens
  misc_RNA (1)...(19): siRNA sense strand
guaaggcauuucccaagag

SEQ ID NO: 398086 - RNA, 19 nt, Homo sapiens
  misc_RNA (1)...(19): siRNA sense strand
gagaaacaaagaaacagau

SEQ ID NO: 398087 - RNA, 19 nt, Homo sapiens
  misc_RNA (1)...(19): siRNA sense strand
gaguaacccauauuucaug

SEQ ID NO: 398088 - RNA, 19 nt, Homo sapiens
  misc_RNA (1)...(19): siRNA sense strand
aaugacagcugcccugaag

SEQ ID NO: 398089 - RNA, 19 nt, Homo sapiens
  misc_RNA (1)...(19): siRNA sense strand
aaacugacaaggauaaaca

SEQ ID NO: 398090 - RNA, 19 nt, Homo sapiens
  misc_RNA (1)...(19): siRNA sense strand
agggugauguuccuguaua

SEQ ID NO: 398091 - RNA, 19 nt, Homo sapiens
  misc_RNA (1)...(19): siRNA sense strand
cuacacaauuggacaagca

SEQ ID NO: 398092 - RNA, 19 nt, Homo sapiens
  misc_RNA (1)...(19): siRNA sense strand
cacaaugagugggaaaguu

SEQ ID NO: 398093 - RNA, 19 nt, Homo sapiens
  misc_RNA (1)...(19): siRNA sense strand
gauguaaacaaacugacaa

SEQ ID NO: 398094 - RNA, 19 nt, Homo sapiens
  misc_RNA (1)...(19): siRNA sense strand
caacaucauggguaaagug

SEQ ID NO: 398095 - RNA, 19 nt, Homo sapiens
  misc_RNA (1)...(19): siRNA sense strand
guggagaucaguuugaaga

SEQ ID NO: 398096 - RNA, 19 nt, Homo sapiens
  misc_RNA (1)...(19): siRNA sense strand
gcagucaccucaguaagcu

SEQ ID NO: 398097 - RNA, 19 nt, Homo sapiens
  misc_RNA (1)...(19): siRNA sense strand
gagcucaucaccaucacaa

SEQ ID NO: 398098 - RNA, 19 nt, Homo sapiens
  misc_RNA (1)...(19): siRNA sense strand
gcuguacccucucauugca

SEQ ID NO: 398099 - RNA, 19 nt, Homo sapiens
  misc_RNA (1)...(19): siRNA sense strand
gauuuaggcaucggaguaa

SEQ ID NO: 398100 - RNA, 19 nt, Homo sapiens
  misc_RNA (1)...(19): siRNA sense strand
aguaaggcauuucccaaga

SEQ ID NO: 398101 - RNA, 19 nt, Homo sapiens
  misc_RNA (1)...(19): siRNA sense strand
gcuacaaugccagcacaua

SEQ ID NO: 398102 - RNA, 19 nt, Homo sapiens
  misc_RNA (1)...(19): siRNA sense strand
ggccgaguacauucuauuu

SEQ ID NO: 398103 - RNA, 19 nt, Homo sapiens
  misc_RNA (1)...(19): siRNA sense strand
gcucgguucuauacuuaca

SEQ ID NO: 398104 - RNA, 19 nt, Homo sapiens
  misc_RNA (1)...(19): siRNA sense strand
caaauuaagaugguuacga

SEQ ID NO: 398105 - RNA, 19 nt, Homo sapiens
  misc_RNA (1)...(19): siRNA sense strand
ccaauucacagaaacagau

SEQ ID NO: 398106 - RNA, 19 nt, Homo sapiens
  misc_RNA (1)...(19): siRNA sense strand
gccacaaugucaaccuaau

SEQ ID NO: 398107 - RNA, 19 nt, Homo sapiens
  misc_RNA (1)...(19): siRNA sense strand
guacuucacaaauuucauc

SEQ ID NO: 398108 - RNA, 19 nt, Homo sapiens
  misc_RNA (1)...(19): siRNA sense strand
gggugauguuccuguauau

SEQ ID NO: 398109 - RNA, 19 nt, Homo sapiens
  misc_RNA (1)...(19): siRNA sense strand
uaacugacgacuucaagca

SEQ ID NO: 398110 - RNA, 19 nt, Homo sapiens
  misc_RNA (1)...(19): siRNA sense strand
ccgaguacauucuauuugc

SEQ ID NO: 398111 - RNA, 19 nt, Homo sapiens
  misc_RNA (1)...(19): siRNA sense strand
acucguggcugggaaaguu

SEQ ID NO: 398112 - RNA, 19 nt, Homo sapiens
  misc_RNA (1)...(19): siRNA sense strand
caaugucaaccuaauuuca

SEQ ID NO: 398113 - RNA, 19 nt, Homo sapiens
  misc_RNA (1)...(19): siRNA sense strand
gaacaaggcgauuaggaaa

SEQ ID NO: 398114 - RNA, 19 nt, Homo sapiens
  misc_RNA (1)...(19): siRNA sense strand
ggauagggauggccacauu

SEQ ID NO: 398115 - RNA, 19 nt, Homo sapiens
  misc_RNA (1)...(19): siRNA sense strand
aaacuuacccugagaauga

SEQ ID NO: 398116 - RNA, 19 nt, Homo sapiens
  misc_RNA (1)...(19): siRNA sense strand
ccaaagagaucgucuacag

SEQ ID NO: 398117 - RNA, 19 nt, Homo sapiens
  misc_RNA (1)...(19): siRNA sense strand
gaagacagccaagcauuuc

SEQ ID NO: 398118 - RNA, 19 nt, Homo sapiens
  misc_RNA (1)...(19): siRNA sense strand
gagcaacacguacacaaug

SEQ ID NO: 398119 - RNA, 19 nt, Homo sapiens
  misc_RNA (1)...(19): siRNA sense strand
ugacagaacaaggcgauua

SEQ ID NO: 398120 - RNA, 19 nt, Homo sapiens
  misc_RNA (1)...(19): siRNA sense strand
gagaagacagccaagcauu

SEQ ID NO: 398121 - RNA, 19 nt, Homo sapiens
  misc_RNA (1)...(19): siRNA sense strand
acauuaagcucacggacuu

SEQ ID NO: 398122 - RNA, 19 nt, Homo sapiens
  misc_RNA (1)...(19): siRNA sense strand
ugagaagucuguccugaag

SEQ ID NO: 398123 - RNA, 19 nt, Homo sapiens
  misc_RNA (1)...(19): siRNA sense strand
agaaacugcucgugguuga

SEQ ID NO: 398124 - RNA, 19 nt, Homo sapiens
  misc_RNA (1)...(19): siRNA sense strand
gauagggauggccacauua

SEQ ID NO: 398125 - RNA, 19 nt, Homo sapiens
  misc_RNA (1)...(19): siRNA sense strand
gacaacccguuuggcauuu

SEQ ID NO: 398126 - RNA, 19 nt, Homo sapiens
  misc_RNA (1)...(19): siRNA sense strand
cuuccaacuucgaaacuua

SEQ ID NO: 398127 - RNA, 19 nt, Homo sapiens
  misc_RNA (1)...(19): siRNA sense strand
guaaaagaccucauuaaga

SEQ ID NO: 398128 - RNA, 19 nt, Homo sapiens
  misc_RNA (1)...(19): siRNA sense strand
cggcgacacuuccaacuuc

SEQ ID NO: 398129 - RNA, 19 nt, Homo sapiens
  misc_RNA (1)...(19): siRNA sense strand
gcucgugguugacagaaca

SEQ ID NO: 398130 - RNA, 19 nt, Homo sapiens
  misc_RNA (1)...(19): siRNA sense strand
uaccugcacuccaaagaga

SEQ ID NO: 398131 - RNA, 19 nt, Homo sapiens
  misc_RNA (1)...(19): siRNA sense strand
ugacaacccguuuggcauu

SEQ ID NO: 398132 - RNA, 19 nt, Homo sapiens
  misc_RNA (1)...(19): siRNA sense strand
ggagcaacacguacacaau

SEQ ID NO: 398133 - RNA, 19 nt, Homo sapiens
  misc_RNA (1)...(19): siRNA sense strand
caacccguuuggcauuuau

SEQ ID NO: 398134 - RNA, 19 nt, Homo sapiens
  misc_RNA (1)...(19): siRNA sense strand
agaagacagccaagcauuu

SEQ ID NO: 398135 - RNA, 19 nt, Homo sapiens
  misc_RNA (1)...(19): siRNA sense strand
acaaggcgauuaggaaaca

SEQ ID NO: 398136 - RNA, 19 nt, Homo sapiens
  misc_RNA (1)...(19): siRNA sense strand
gauuaggaaacaugaagaa

SEQ ID NO: 398137 - RNA, 19 nt, Homo sapiens
  misc_RNA (1)...(19): siRNA sense strand
gaaacuuacccugagaaug

SEQ ID NO: 398138 - RNA, 19 nt, Homo sapiens
  misc_RNA (1)...(19): siRNA sense strand
caacacguacacaaugaga

SEQ ID NO: 398139 - RNA, 19 nt, Homo sapiens
  misc_RNA (1)...(19): siRNA sense strand
agaacaaggcgauuaggaa

SEQ ID NO: 398140 - RNA, 19 nt, Homo sapiens
  misc_RNA (1)...(19): siRNA sense strand
acaacccguuuggcauuua

SEQ ID NO: 398141 - RNA, 19 nt, Homo sapiens
  misc_RNA (1)...(19): siRNA sense strand
uaagaaacugcucgugguu

SEQ ID NO: 398142 - RNA, 19 nt, Homo sapiens
  misc_RNA (1)...(19): siRNA sense strand
ggagaagacagccaagcau

SEQ ID NO: 398143 - RNA, 19 nt, Homo sapiens
  misc_RNA (1)...(19): siRNA sense strand
guuuggcauuuaucagaaa

SEQ ID NO: 398144 - RNA, 19 nt, Homo sapiens
  misc_RNA (1)...(19): siRNA sense strand
gaagcuguuccgcagagaa

SEQ ID NO: 398145 - RNA, 19 nt, Homo sapiens
  misc_RNA (1)...(19): siRNA sense strand
agcaacacguacacaauga

SEQ ID NO: 398146 - RNA, 19 nt, Homo sapiens
  misc_RNA (1)...(19): siRNA sense strand
gacagaacaaggcgauuag

SEQ ID NO: 398147 - RNA, 19 nt, Homo sapiens
  misc_RNA (1)...(19): siRNA sense strand
ccgcagaaggauuuagaaa

SEQ ID NO: 398148 - RNA, 19 nt, Homo sapiens
  misc_RNA (1)...(19): siRNA sense strand
ccgaagucauucagagcaa

SEQ ID NO: 398149 - RNA, 19 nt, Homo sapiens
  misc_RNA (1)...(19): siRNA sense strand
guacagccugcaggacuuu

SEQ ID NO: 398150 - RNA, 19 nt, Homo sapiens
  misc_RNA (1)...(19): siRNA sense strand
cagaacaaggcgauuagga

SEQ ID NO: 398151 - RNA, 19 nt, Homo sapiens
  misc_RNA (1)...(19): siRNA sense strand
cguuuggcauuuaucagaa

SEQ ID NO: 398152 - RNA, 19 nt, Homo sapiens
  misc_RNA (1)...(19): siRNA sense strand
gcgauuaggaaacaugaag

SEQ ID NO: 398153 - RNA, 19 nt, Homo sapiens
  misc_RNA (1)...(19): siRNA sense strand
aaagcaggagcaacacgua

SEQ ID NO: 398154 - RNA, 19 nt, Homo sapiens
  misc_RNA (1)...(19): siRNA sense strand
cgacacuuccaacuucgaa

SEQ ID NO: 398155 - RNA, 19 nt, Homo sapiens
  misc_RNA (1)...(19): siRNA sense strand
ggacuugaagccagagaac

SEQ ID NO: 398156 - RNA, 19 nt, Homo sapiens
  misc_RNA (1)...(19): siRNA sense strand
gggcgaaugaugugaagca

SEQ ID NO: 398157 - RNA, 19 nt, Homo sapiens
  misc_RNA (1)...(19): siRNA sense strand
gccuaaagcaggagcaaca

SEQ ID NO: 398158 - RNA, 19 nt, Homo sapiens
  misc_RNA (1)...(19): siRNA sense strand
ccacggggcucuucuacuc

SEQ ID NO: 398159 - RNA, 19 nt, Homo sapiens
  misc_RNA (1)...(19): siRNA sense strand
auagggauggccacauuaa

SEQ ID NO: 398160 - RNA, 19 nt, Homo sapiens
  misc_RNA (1)...(19): siRNA sense strand
gaucgucuacagggacuug

SEQ ID NO: 398161 - RNA, 19 nt, Homo sapiens
  misc_RNA (1)...(19): siRNA sense strand
cgaaacuuacccugagaau

SEQ ID NO: 398162 - RNA, 19 nt, Homo sapiens
  misc_RNA (1)...(19): siRNA sense strand
gcccucggcauccugauau

SEQ ID NO: 398163 - RNA, 19 nt, Homo sapiens
  misc_RNA (1)...(19): siRNA sense strand
ggcccucggcauccugaua

SEQ ID NO: 398164 - RNA, 19 nt, Homo sapiens
  misc_RNA (1)...(19): siRNA sense strand
aagcuguuccgcagagaaa

SEQ ID NO: 398165 - RNA, 19 nt, Homo sapiens
  misc_RNA (1)...(19): siRNA sense strand
gaaggauggugcugacuuu

SEQ ID NO: 398166 - RNA, 19 nt, Homo sapiens
  misc_RNA (1)...(19): siRNA sense strand
gaaagaugauaaugguguu

SEQ ID NO: 398167 - RNA, 19 nt, Homo sapiens
  misc_RNA (1)...(19): siRNA sense strand
gcaagccucugcacucaau

SEQ ID NO: 398168 - RNA, 19 nt, Homo sapiens
  misc_RNA (1)...(19): siRNA sense strand
ccagaaagaugauaauggu

SEQ ID NO: 398169 - RNA, 19 nt, Homo sapiens
  misc_RNA (1)...(19): siRNA sense strand
gcgcuuaccuucuccuaug

SEQ ID NO: 398170 - RNA, 19 nt, Homo sapiens
  misc_RNA (1)...(19): siRNA sense strand
uguggaaccugaaauauug

SEQ ID NO: 398171 - RNA, 19 nt, Homo sapiens
  misc_RNA (1)...(19): siRNA sense strand
ccucaaacguugucaguau

SEQ ID NO: 398172 - RNA, 19 nt, Homo sapiens
  misc_RNA (1)...(19): siRNA sense strand
ggucuuggcugcuguguac

SEQ ID NO: 398173 - RNA, 19 nt, Homo sapiens
  misc_RNA (1)...(19): siRNA sense strand
gcacagucacucuacauug

SEQ ID NO: 398174 - RNA, 19 nt, Homo sapiens
  misc_RNA (1)...(19): siRNA sense strand
gaagaagaggcaucauuca

SEQ ID NO: 398175 - RNA, 19 nt, Homo sapiens
  misc_RNA (1)...(19): siRNA sense strand
ggccaugccugucccauca

SEQ ID NO: 398176 - RNA, 19 nt, Homo sapiens
  misc_RNA (1)...(19): siRNA sense strand
ggagaaaccaccacucaag

SEQ ID NO: 398177 - RNA, 19 nt, Homo sapiens
  misc_RNA (1)...(19): siRNA sense strand
ccugaaauauugccugaug

SEQ ID NO: 398178 - RNA, 19 nt, Homo sapiens
  misc_RNA (1)...(19): siRNA sense strand
ugagugaccaucauguaua

SEQ ID NO: 398179 - RNA, 19 nt, Homo sapiens
  misc_RNA (1)...(19): siRNA sense strand
gucaguauguuacagagaa

SEQ ID NO: 398180 - RNA, 19 nt, Homo sapiens
  misc_RNA (1)...(19): siRNA sense strand
gcgaagaagaggcaucauu

SEQ ID NO: 398181 - RNA, 19 nt, Homo sapiens
  misc_RNA (1)...(19): siRNA sense strand
cgaagaagaggcaucauuc

SEQ ID NO: 398182 - RNA, 19 nt, Homo sapiens
  misc_RNA (1)...(19): siRNA sense strand
agaagaaggaguugucuga

SEQ ID NO: 398183 - RNA, 19 nt, Homo sapiens
  misc_RNA (1)...(19): siRNA sense strand
ugaaggcaguggagaagau

SEQ ID NO: 398184 - RNA, 19 nt, Homo sapiens
  misc_RNA (1)...(19): siRNA sense strand
gacauugcccugcggauug

SEQ ID NO: 398185 - RNA, 19 nt, Homo sapiens
  misc_RNA (1)...(19): siRNA sense strand
aaacguugucaguauguua

SEQ ID NO: 398186 - RNA, 19 nt, Homo sapiens
  misc_RNA (1)...(19): siRNA sense strand
ucagaacgcugugcccaau

SEQ ID NO: 398187 - RNA, 19 nt, Homo sapiens
  misc_RNA (1)...(19): siRNA sense strand
caagcgggcugaggugaau

SEQ ID NO: 398188 - RNA, 19 nt, Homo sapiens
  misc_RNA (1)...(19): siRNA sense strand
gagugaccaucauguauac

SEQ ID NO: 398189 - RNA, 19 nt, Homo sapiens
  misc_RNA (1)...(19): siRNA sense strand
ccacugaggaguucaucaa

SEQ ID NO: 398190 - RNA, 19 nt, Homo sapiens
  misc_RNA (1)...(19): siRNA sense strand
gaccacgaccucaaacguu

SEQ ID NO: 398191 - RNA, 19 nt, Homo sapiens
  misc_RNA (1)...(19): siRNA sense strand
caaccucaaugccaucaac

SEQ ID NO: 398192 - RNA, 19 nt, Homo sapiens
  misc_RNA (1)...(19): siRNA sense strand
gcagcacagucacucuaca

SEQ ID NO: 398193 - RNA, 19 nt, Homo sapiens
  misc_RNA (1)...(19): siRNA sense strand
gagcgaagaagaggcauca

SEQ ID NO: 398194 - RNA, 19 nt, Homo sapiens
  misc_RNA (1)...(19): siRNA sense strand
ugccaaccaugccuacuga

SEQ ID NO: 398195 - RNA, 19 nt, Homo sapiens
  misc_RNA (1)...(19): siRNA sense strand
ccucugcacuugccauucu

SEQ ID NO: 398196 - RNA, 19 nt, Homo sapiens
  misc_RNA (1)...(19): siRNA sense strand
guaugaaggcaguggagaa

SEQ ID NO: 398197 - RNA, 19 nt, Homo sapiens
  misc_RNA (1)...(19): siRNA sense strand
caaacguugucaguauguu

SEQ ID NO: 398198 - RNA, 19 nt, Homo sapiens
  misc_RNA (1)...(19): siRNA sense strand
cauugugccuauuguggaa

SEQ ID NO: 398199 - RNA, 19 nt, Homo sapiens
  misc_RNA (1)...(19): siRNA sense strand
gaaaaucagugagcguaca

SEQ ID NO: 398200 - RNA, 19 nt, Homo sapiens
  misc_RNA (1)...(19): siRNA sense strand
cagcagcacagucacucua

SEQ ID NO: 398201 - RNA, 19 nt, Homo sapiens
  misc_RNA (1)...(19): siRNA sense strand
ugaaauauugccugaugga

SEQ ID NO: 398202 - RNA, 19 nt, Homo sapiens
  misc_RNA (1)...(19): siRNA sense strand
aagaagaggcaucauucaa

SEQ ID NO: 398203 - RNA, 19 nt, Homo sapiens
  misc_RNA (1)...(19): siRNA sense strand
cacagucacucuacauugc

SEQ ID NO: 398204 - RNA, 19 nt, Homo sapiens
  misc_RNA (1)...(19): siRNA sense strand
gagacccucuaccagaaag

SEQ ID NO: 398205 - RNA, 19 nt, Homo sapiens
  misc_RNA (1)...(19): siRNA sense strand
ugacauugcccugcggauu

SEQ ID NO: 398206 - RNA, 19 nt, Homo sapiens
  misc_RNA (1)...(19): siRNA sense strand
gaaggcaguggagaagaug

SEQ ID NO: 398207 - RNA, 19 nt, Homo sapiens
  misc_RNA (1)...(19): siRNA sense strand
augagacccucuaccagaa

SEQ ID NO: 398208 - RNA, 19 nt, Homo sapiens
  misc_RNA (1)...(19): siRNA sense strand
ccugagugaccaucaugua

SEQ ID NO: 398209 - RNA, 19 nt, Homo sapiens
  misc_RNA (1)...(19): siRNA sense strand
uguacaaggcccugaguga

SEQ ID NO: 398210 - RNA, 19 nt, Homo sapiens
  misc_RNA (1)...(19): siRNA sense strand
cguacacccucugcacuug

SEQ ID NO: 398211 - RNA, 19 nt, Homo sapiens
  misc_RNA (1)...(19): siRNA sense strand
agaacgcugugcccaauac

SEQ ID NO: 398212 - RNA, 19 nt, Homo sapiens
  misc_RNA (1)...(19): siRNA sense strand
gcugugcccaauacaagaa

SEQ ID NO: 398213 - RNA, 19 nt, Homo sapiens
  misc_RNA (1)...(19): siRNA sense strand
gggcugccacugaggaguu

SEQ ID NO: 398214 - RNA, 19 nt, Homo sapiens
  misc_RNA (1)...(19): siRNA sense strand
gcauucuggcugcggauga

SEQ ID NO: 398215 - RNA, 19 nt, Homo sapiens
  misc_RNA (1)...(19): siRNA sense strand
cagaacgcugugcccaaua

SEQ ID NO: 398216 - RNA, 19 nt, Homo sapiens
  misc_RNA (1)...(19): siRNA sense strand
gugcauuggaggcgucauu

SEQ ID NO: 398217 - RNA, 19 nt, Homo sapiens
  misc_RNA (1)...(19): siRNA sense strand
gaccucaaacguugucagu

SEQ ID NO: 398218 - RNA, 19 nt, Homo sapiens
  misc_RNA (1)...(19): siRNA sense strand
gcguacacccucugcacuu

SEQ ID NO: 398219 - RNA, 19 nt, Homo sapiens
  misc_RNA (1)...(19): siRNA sense strand
cucaaacguugucaguaug

SEQ ID NO: 398220 - RNA, 19 nt, Homo sapiens
  misc_RNA (1)...(19): siRNA sense strand
agaagaggcaucauucaac

SEQ ID NO: 398221 - RNA, 19 nt, Homo sapiens
  misc_RNA (1)...(19): siRNA sense strand
ucaaacguugucaguaugu

SEQ ID NO: 398222 - RNA, 19 nt, Homo sapiens
  misc_RNA (1)...(19): siRNA sense strand
ccugggcgcuuaccuucuc

SEQ ID NO: 398223 - RNA, 19 nt, Homo sapiens
  misc_RNA (1)...(19): siRNA sense strand
caacagugauuucaacuuu

SEQ ID NO: 398224 - RNA, 19 nt, Homo sapiens
  misc_RNA (1)...(19): siRNA sense strand
ggaaccagcucucucuaua

SEQ ID NO: 398225 - RNA, 19 nt, Homo sapiens
  misc_RNA (1)...(19): siRNA sense strand
gaggacagcucccgcauuu

SEQ ID NO: 398226 - RNA, 19 nt, Homo sapiens
  misc_RNA (1)...(19): siRNA sense strand
ggacaucccugaagaucaa

SEQ ID NO: 398227 - RNA, 19 nt, Homo sapiens
  misc_RNA (1)...(19): siRNA sense strand
gcacacagauaaaccgaaa

SEQ ID NO: 398228 - RNA, 19 nt, Homo sapiens
  misc_RNA (1)...(19): siRNA sense strand
gaucauaaaucucuuugug

SEQ ID NO: 398229 - RNA, 19 nt, Homo sapiens
  misc_RNA (1)...(19): siRNA sense strand
gcacauugcucuggacauu

SEQ ID NO: 398230 - RNA, 19 nt, Homo sapiens
  misc_RNA (1)...(19): siRNA sense strand
ggacagacuuccagauuca

SEQ ID NO: 398231 - RNA, 19 nt, Homo sapiens
  misc_RNA (1)...(19): siRNA sense strand
ugccguagcugguuuaaua

SEQ ID NO: 398232 - RNA, 19 nt, Homo sapiens
  misc_RNA (1)...(19): siRNA sense strand
gaacguguuucuugccauu

SEQ ID NO: 398233 - RNA, 19 nt, Homo sapiens
  misc_RNA (1)...(19): siRNA sense strand
ggaagcggaugaaacagaa

SEQ ID NO: 398234 - RNA, 19 nt, Homo sapiens
  misc_RNA (1)...(19): siRNA sense strand
gaaaaggacuuggaaacua

SEQ ID NO: 398235 - RNA, 19 nt, Homo sapiens
  misc_RNA (1)...(19): siRNA sense strand
ggaaacaucaugauuguca

SEQ ID NO: 398236 - RNA, 19 nt, Homo sapiens
  misc_RNA (1)...(19): siRNA sense strand
gaagaaaccagcacagcaa

SEQ ID NO: 398237 - RNA, 19 nt, Homo sapiens
  misc_RNA (1)...(19): siRNA sense strand
ccaagaacccgcaucagua

SEQ ID NO: 398238 - RNA, 19 nt, Homo sapiens
  misc_RNA (1)...(19): siRNA sense strand
gugcaucuauuucaucauu

SEQ ID NO: 398239 - RNA, 19 nt, Homo sapiens
  misc_RNA (1)...(19): siRNA sense strand
ccgaagagcuggacaugga

SEQ ID NO: 398240 - RNA, 19 nt, Homo sapiens
  misc_RNA (1)...(19): siRNA sense strand
aacagaagcugcuagauga

SEQ ID NO: 398241 - RNA, 19 nt, Homo sapiens
  misc_RNA (1)...(19): siRNA sense strand
ucacuggccucuucacuau

SEQ ID NO: 398242 - RNA, 19 nt, Homo sapiens
  misc_RNA (1)...(19): siRNA sense strand
ucacagagcucagagauac

SEQ ID NO: 398243 - RNA, 19 nt, Homo sapiens
  misc_RNA (1)...(19): siRNA sense strand
caagguggcucuucaggau

SEQ ID NO: 398244 - RNA, 19 nt, Homo sapiens
  misc_RNA (1)...(19): siRNA sense strand
ucacugaagucaauaaugg

SEQ ID NO: 398245 - RNA, 19 nt, Homo sapiens
  misc_RNA (1)...(19): siRNA sense strand
caucaugucuucaccaauc

SEQ ID NO: 398246 - RNA, 19 nt, Homo sapiens
  misc_RNA (1)...(19): siRNA sense strand
ccacacuucugcaauuuau

SEQ ID NO: 398247 - RNA, 19 nt, Homo sapiens
  misc_RNA (1)...(19): siRNA sense strand
ccaagggacucaagcaugu

SEQ ID NO: 398248 - RNA, 19 nt, Homo sapiens
  misc_RNA (1)...(19): siRNA sense strand
gagauucuacuaaagauga

SEQ ID NO: 398249 - RNA, 19 nt, Homo sapiens
  misc_RNA (1)...(19): siRNA sense strand
ucaccacacuucugcaauu

SEQ ID NO: 398250 - RNA, 19 nt, Homo sapiens
  misc_RNA (1)...(19): siRNA sense strand
ggaccgaugugcucuacug

SEQ ID NO: 398251 - RNA, 19 nt, Homo sapiens
  misc_RNA (1)...(19): siRNA sense strand
gggcaguugugaggauuua

SEQ ID NO: 398252 - RNA, 19 nt, Homo sapiens
  misc_RNA (1)...(19): siRNA sense strand
ggucuucacuggccucuuc

SEQ ID NO: 398253 - RNA, 19 nt, Homo sapiens
  misc_RNA (1)...(19): siRNA sense strand
gaagagcaaugagaaggau

SEQ ID NO: 398254 - RNA, 19 nt, Homo sapiens
  misc_RNA (1)...(19): siRNA sense strand
caucauuuaugccaucauu

SEQ ID NO: 398255 - RNA, 19 nt, Homo sapiens
  misc_RNA (1)...(19): siRNA sense strand
gaacucugcugccuuugag

SEQ ID NO: 398256 - RNA, 19 nt, Homo sapiens
  misc_RNA (1)...(19): siRNA sense strand
ccaggaggcuucgauguga

SEQ ID NO: 398257 - RNA, 19 nt, Homo sapiens
  misc_RNA (1)...(19): siRNA sense strand
ucacccagauccaggagua

SEQ ID NO: 398258 - RNA, 19 nt, Homo sapiens
  misc_RNA (1)...(19): siRNA sense strand
ccaggaguaugccaacaaa

SEQ ID NO: 398259 - RNA, 19 nt, Homo sapiens
  misc_RNA (1)...(19): siRNA sense strand
gaaauucagggcccaauag

SEQ ID NO: 398260 - RNA, 19 nt, Homo sapiens
  misc_RNA (1)...(19): siRNA sense strand
ggacuuggaaacuaacaaa

SEQ ID NO: 398261 - RNA, 19 nt, Homo sapiens
  misc_RNA (1)...(19): siRNA sense strand
ggacaacuuugauuaucuc

SEQ ID NO: 398262 - RNA, 19 nt, Homo sapiens
  misc_RNA (1)...(19): siRNA sense strand
ggagagagagaaagcgaaa

SEQ ID NO: 398263 - RNA, 19 nt, Homo sapiens
  misc_RNA (1)...(19): siRNA sense strand
gaacacguuugacgcucuu

SEQ ID NO: 398264 - RNA, 19 nt, Homo sapiens
  misc_RNA (1)...(19): siRNA sense strand
acugugagcuggacaagaa

SEQ ID NO: 398265 - RNA, 19 nt, Homo sapiens
  misc_RNA (1)...(19): siRNA sense strand
acaaggccaucgaugcaua

SEQ ID NO: 398266 - RNA, 19 nt, Homo sapiens
  misc_RNA (1)...(19): siRNA sense strand
uggcaucccugcucaauuc

SEQ ID NO: 398267 - RNA, 19 nt, Homo sapiens
  misc_RNA (1)...(19): siRNA sense strand
aaacagaagcugcuagaug

SEQ ID NO: 398268 - RNA, 19 nt, Homo sapiens
  misc_RNA (1)...(19): siRNA sense strand
aagaggaucuggucugaau

SEQ ID NO: 398269 - RNA, 19 nt, Homo sapiens
  misc_RNA (1)...(19): siRNA sense strand
ggaagaagaggaagaagag

SEQ ID NO: 398270 - RNA, 19 nt, Homo sapiens
  misc_RNA (1)...(19): siRNA sense strand
ggaagaagaggaagaagag

SEQ ID NO: 398271 - RNA, 19 nt, Homo sapiens
  misc_RNA (1)...(19): siRNA sense strand
ugaaauccaucgcauccuu

SEQ ID NO: 398272 - RNA, 19 nt, Homo sapiens
  misc_RNA (1)...(19): siRNA sense strand
cuacugggcugugcuguug

SEQ ID NO: 398273 - RNA, 19 nt, Homo sapiens
  misc_RNA (1)...(19): siRNA sense strand
ucaagaggaucuggucuga

SEQ ID NO: 398274 - RNA, 19 nt, Homo sapiens
  misc_RNA (1)...(19): siRNA sense strand
ggugugauccugagucuga

SEQ ID NO: 398275 - RNA, 19 nt, Homo sapiens
  misc_RNA (1)...(19): siRNA sense strand
caggauggcacacagauaa

SEQ ID NO: 398276 - RNA, 19 nt, Homo sapiens
  misc_RNA (1)...(19): siRNA sense strand
gaagcaccuuugacacguu

SEQ ID NO: 398277 - RNA, 19 nt, Homo sapiens
  misc_RNA (1)...(19): siRNA sense strand
caaccgcuuugacugcuuu

SEQ ID NO: 398278 - RNA, 19 nt, Homo sapiens
  misc_RNA (1)...(19): siRNA sense strand
ggccugcacugcuauacaa

SEQ ID NO: 398279 - RNA, 19 nt, Homo sapiens
  misc_RNA (1)...(19): siRNA sense strand
gggacagacuuccagauuc

SEQ ID NO: 398280 - RNA, 19 nt, Homo sapiens
  misc_RNA (1)...(19): siRNA sense strand
gaucuggucugaauaugac

SEQ ID NO: 398281 - RNA, 19 nt, Homo sapiens
  misc_RNA (1)...(19): siRNA sense strand
gcauuuccauuaccuucuu

SEQ ID NO: 398282 - RNA, 19 nt, Homo sapiens
  misc_RNA (1)...(19): siRNA sense strand
caagaacccgcaucaguau

SEQ ID NO: 398283 - RNA, 19 nt, Homo sapiens
  misc_RNA (1)...(19): siRNA sense strand
gaauguuggugugcaucua

SEQ ID NO: 398284 - RNA, 19 nt, Homo sapiens
  misc_RNA (1)...(19): siRNA sense strand
gaagggauccgcacauugc

SEQ ID NO: 398285 - RNA, 19 nt, Homo sapiens
  misc_RNA (1)...(19): siRNA sense strand
uggucaagcuucucaguaa

SEQ ID NO: 398286 - RNA, 19 nt, Homo sapiens
  misc_RNA (1)...(19): siRNA sense strand
guagcugguuuaauauguu

SEQ ID NO: 398287 - RNA, 19 nt, Homo sapiens
  misc_RNA (1)...(19): siRNA sense strand
ugugaacucugcugccuuu

SEQ ID NO: 398288 - RNA, 19 nt, Homo sapiens
  misc_RNA (1)...(19): siRNA sense strand
ccaggacuauuuccgcaaa

SEQ ID NO: 398289 - RNA, 19 nt, Homo sapiens
  misc_RNA (1)...(19): siRNA sense strand
gcagguggaguacguauuc

SEQ ID NO: 398290 - RNA, 19 nt, Homo sapiens
  misc_RNA (1)...(19): siRNA sense strand
gugaagggauccgcacauu

SEQ ID NO: 398291 - RNA, 19 nt, Homo sapiens
  misc_RNA (1)...(19): siRNA sense strand
uggccgagcugaccaauag

SEQ ID NO: 398292 - RNA, 19 nt, Homo sapiens
  misc_RNA (1)...(19): siRNA sense strand
ggaggaagaagaggaagaa

SEQ ID NO: 398293 - RNA, 19 nt, Homo sapiens
  misc_RNA (1)...(19): siRNA sense strand
cagauucacucuccuuugg

SEQ ID NO: 398294 - RNA, 19 nt, Homo sapiens
  misc_RNA (1)...(19): siRNA sense strand
gacaagaaccagcgucaau

SEQ ID NO: 398295 - RNA, 19 nt, Homo sapiens
  misc_RNA (1)...(19): siRNA sense strand
ggucaacagugauuucaac

SEQ ID NO: 398296 - RNA, 19 nt, Homo sapiens
  misc_RNA (1)...(19): siRNA sense strand
gcuggaaccuacucgacuu

SEQ ID NO: 398297 - RNA, 19 nt, Homo sapiens
  misc_RNA (1)...(19): siRNA sense strand
ggacuugggagacgagaug

SEQ ID NO: 398298 - RNA, 19 nt, Homo sapiens
  misc_RNA (1)...(19): siRNA sense strand
gaggaucuggucugaauau

SEQ ID NO: 398299 - RNA, 19 nt, Homo sapiens
  misc_RNA (1)...(19): siRNA sense strand
ucauggacaacuuugauua

SEQ ID NO: 398300 - RNA, 19 nt, Homo sapiens
  misc_RNA (1)...(19): siRNA sense strand
cagauaaaccgaaacaaca

SEQ ID NO: 398301 - RNA, 19 nt, Homo sapiens
  misc_RNA (1)...(19): siRNA sense strand
aagcauuacuucacugaug

SEQ ID NO: 398302 - RNA, 19 nt, Homo sapiens
  misc_RNA (1)...(19): siRNA sense strand
gaucucaguguucuucauu

SEQ ID NO: 398303 - RNA, 19 nt, Homo sapiens
  misc_RNA (1)...(19): siRNA sense strand
gggagaagagcaaugagaa

SEQ ID NO: 398304 - RNA, 19 nt, Homo sapiens
  misc_RNA (1)...(19): siRNA sense strand
ucaccaacuuugacaacuu

SEQ ID NO: 398305 - RNA, 19 nt, Homo sapiens
  misc_RNA (1)...(19): siRNA sense strand
aaaaggacuuggaaacuaa

SEQ ID NO: 398306 - RNA, 19 nt, Homo sapiens
  misc_RNA (1)...(19): siRNA sense strand
gaacaugccccucaacuca

SEQ ID NO: 398307 - RNA, 19 nt, Homo sapiens
  misc_RNA (1)...(19): siRNA sense strand
uuucgccucuuccgaguua

SEQ ID NO: 398308 - RNA, 19 nt, Homo sapiens
  misc_RNA (1)...(19): siRNA sense strand
ccuucaagcccaagcauua

SEQ ID NO: 398309 - RNA, 19 nt, Homo sapiens
  misc_RNA (1)...(19): siRNA sense strand
agacugcucccuucaacua

SEQ ID NO: 398310 - RNA, 19 nt, Homo sapiens
  misc_RNA (1)...(19): siRNA sense strand
ugacaccgguuccaugaca

SEQ ID NO: 398311 - RNA, 19 nt, Homo sapiens
  misc_RNA (1)...(19): siRNA sense strand
gaaccuacucgacuucauc

SEQ ID NO: 398312 - RNA, 19 nt, Homo sapiens
  misc_RNA (1)...(19): siRNA sense strand
gaaccagcucucucuauag

SEQ ID NO: 398313 - RNA, 19 nt, Homo sapiens
  misc_RNA (1)...(19): siRNA sense strand
cuucaucuaugccgucauu

SEQ ID NO: 398314 - RNA, 19 nt, Homo sapiens
  misc_RNA (1)...(19): siRNA sense strand
ggauauugccgucacugaa

SEQ ID NO: 398315 - RNA, 19 nt, Homo sapiens
  misc_RNA (1)...(19): siRNA sense strand
gaacugcccuggguguacu

SEQ ID NO: 398316 - RNA, 19 nt, Homo sapiens
  misc_RNA (1)...(19): siRNA sense strand
gugcucaauuccaucauga

SEQ ID NO: 398317 - RNA, 19 nt, Homo sapiens
  misc_RNA (1)...(19): siRNA sense strand
ggaggcaucaccaacuuug

SEQ ID NO: 398318 - RNA, 19 nt, Homo sapiens
  misc_RNA (1)...(19): siRNA sense strand
caccacacuucugcaauuu

SEQ ID NO: 398319 - RNA, 19 nt, Homo sapiens
  misc_RNA (1)...(19): siRNA sense strand
ucggaaacaucaugauugu

SEQ ID NO: 398320 - RNA, 19 nt, Homo sapiens
  misc_RNA (1)...(19): siRNA sense strand
gggagaagcagcagaugga

SEQ ID NO: 398321 - RNA, 19 nt, Homo sapiens
  misc_RNA (1)...(19): siRNA sense strand
gcaagaugaggaugaggaa

SEQ ID NO: 398322 - RNA, 19 nt, Homo sapiens
  misc_RNA (1)...(19): siRNA sense strand
cgaaauucagggcccaaua

SEQ ID NO: 398323 - RNA, 19 nt, Homo sapiens
  misc_RNA (1)...(19): siRNA sense strand
aaacaaagaucuagccaau

SEQ ID NO: 398324 - RNA, 19 nt, Homo sapiens
  misc_RNA (1)...(19): siRNA sense strand
acaaagaucuagccaauca

SEQ ID NO: 398325 - RNA, 19 nt, Homo sapiens
  misc_RNA (1)...(19): siRNA sense strand
gagaagugguuauaucgaa

SEQ ID NO: 398326 - RNA, 19 nt, Homo sapiens
  misc_RNA (1)...(19): siRNA sense strand
ggaagugccugguacugaa

SEQ ID NO: 398327 - RNA, 19 nt, Homo sapiens
  misc_RNA (1)...(19): siRNA sense strand
ccaaagguguggagauuga

SEQ ID NO: 398328 - RNA, 19 nt, Homo sapiens
  misc_RNA (1)...(19): siRNA sense strand
caacuguccugcucuuuga

SEQ ID NO: 398329 - RNA, 19 nt, Homo sapiens
  misc_RNA (1)...(19): siRNA sense strand
gaccuuauuuaucagcuua

SEQ ID NO: 398330 - RNA, 19 nt, Homo sapiens
  misc_RNA (1)...(19): siRNA sense strand
guaugcagcuuaaaguuga

SEQ ID NO: 398331 - RNA, 19 nt, Homo sapiens
  misc_RNA (1)...(19): siRNA sense strand
ucaauugucuuacucauca

SEQ ID NO: 398332 - RNA, 19 nt, Homo sapiens
  misc_RNA (1)...(19): siRNA sense strand
gagaauggcagucgugaaa

SEQ ID NO: 398333 - RNA, 19 nt, Homo sapiens
  misc_RNA (1)...(19): siRNA sense strand
uuaucaagcuccuuacaua

SEQ ID NO: 398334 - RNA, 19 nt, Homo sapiens
  misc_RNA (1)...(19): siRNA sense strand
gaaagaaggcccaggaagu

SEQ ID NO: 398335 - RNA, 19 nt, Homo sapiens
  misc_RNA (1)...(19): siRNA sense strand
gaagaaagaaggaaaggau

SEQ ID NO: 398336 - RNA, 19 nt, Homo sapiens
  misc_RNA (1)...(19): siRNA sense strand
gaaggaggcucuguauaag

SEQ ID NO: 398337 - RNA, 19 nt, Homo sapiens
  misc_RNA (1)...(19): siRNA sense strand
agaaggaggcucuguauaa

SEQ ID NO: 398338 - RNA, 19 nt, Homo sapiens
  misc_RNA (1)...(19): siRNA sense strand
caacuggaguguacccaaa

SEQ ID NO: 398339 - RNA, 19 nt, Homo sapiens
  misc_RNA (1)...(19): siRNA sense strand
ccuauaaugugaaugauug

SEQ ID NO: 398340 - RNA, 19 nt, Homo sapiens
  misc_RNA (1)...(19): siRNA sense strand
gaaggcccaggaaguauua

SEQ ID NO: 398341 - RNA, 19 nt, Homo sapiens
  misc_RNA (1)...(19): siRNA sense strand
acaaguggcugcuucgaaa

SEQ ID NO: 398342 - RNA, 19 nt, Homo sapiens
  misc_RNA (1)...(19): siRNA sense strand
gcaaugacuccuucuagaa

SEQ ID NO: 398343 - RNA, 19 nt, Homo sapiens
  misc_RNA (1)...(19): siRNA sense strand
gaacuccucuacagaugug

SEQ ID NO: 398344 - RNA, 19 nt, Homo sapiens
  misc_RNA (1)...(19): siRNA sense strand
gaagucagcauccgguauu

SEQ ID NO: 398345 - RNA, 19 nt, Homo sapiens
  misc_RNA (1)...(19): siRNA sense strand
aaagagaagugguuauauc

SEQ ID NO: 398346 - RNA, 19 nt, Homo sapiens
  misc_RNA (1)...(19): siRNA sense strand
gagauggaccuaucagauu

SEQ ID NO: 398347 - RNA, 19 nt, Homo sapiens
  misc_RNA (1)...(19): siRNA sense strand
gaaagaaggaaaggauaaa

SEQ ID NO: 398348 - RNA, 19 nt, Homo sapiens
  misc_RNA (1)...(19): siRNA sense strand
agacagagcuggcaaacag

SEQ ID NO: 398349 - RNA, 19 nt, Homo sapiens
  misc_RNA (1)...(19): siRNA sense strand
aguggcagcuccaguaaua

SEQ ID NO: 398350 - RNA, 19 nt, Homo sapiens
  misc_RNA (1)...(19): siRNA sense strand
gcccaaagguguggagauu

SEQ ID NO: 398351 - RNA, 19 nt, Homo sapiens
  misc_RNA (1)...(19): siRNA sense strand
gaaagaagaugggcaaccu

SEQ ID NO: 398352 - RNA, 19 nt, Homo sapiens
  misc_RNA (1)...(19): siRNA sense strand
ggcaaugacuccuucuaga

SEQ ID NO: 398353 - RNA, 19 nt, Homo sapiens
  misc_RNA (1)...(19): siRNA sense strand
gagaagagaggcuguaucu

SEQ ID NO: 398354 - RNA, 19 nt, Homo sapiens
  misc_RNA (1)...(19): siRNA sense strand
aaagaaggcccaggaagua

SEQ ID NO: 398355 - RNA, 19 nt, Homo sapiens
  misc_RNA (1)...(19): siRNA sense strand
agaaggaagucccaaggaa

SEQ ID NO: 398356 - RNA, 19 nt, Homo sapiens
  misc_RNA (1)...(19): siRNA sense strand
aagcucagauucacaguug

SEQ ID NO: 398357 - RNA, 19 nt, Homo sapiens
  misc_RNA (1)...(19): siRNA sense strand
gcuuaaaguugauaaagag

SEQ ID NO: 398358 - RNA, 19 nt, Homo sapiens
  misc_RNA (1)...(19): siRNA sense strand
gagaaggaggcucuguaua

SEQ ID NO: 398359 - RNA, 19 nt, Homo sapiens
  misc_RNA (1)...(19): siRNA sense strand
ggacuuggagcuugcuauu

SEQ ID NO: 398360 - RNA, 19 nt, Homo sapiens
  misc_RNA (1)...(19): siRNA sense strand
ucaaauuccugagcacuug

SEQ ID NO: 398361 - RNA, 19 nt, Homo sapiens
  misc_RNA (1)...(19): siRNA sense strand
cauaagccgucaccuggaa

SEQ ID NO: 398362 - RNA, 19 nt, Homo sapiens
  misc_RNA (1)...(19): siRNA sense strand
cagcagcucuacucguuau

SEQ ID NO: 398363 - RNA, 19 nt, Homo sapiens
  misc_RNA (1)...(19): siRNA sense strand
gcugauuccuuccaaguca

SEQ ID NO: 398364 - RNA, 19 nt, Homo sapiens
  misc_RNA (1)...(19): siRNA sense strand
cuuugaagcugacacaauu

SEQ ID NO: 398365 - RNA, 19 nt, Homo sapiens
  misc_RNA (1)...(19): siRNA sense strand
ccugcaauuucuucaauaa

SEQ ID NO: 398366 - RNA, 19 nt, Homo sapiens
  misc_RNA (1)...(19): siRNA sense strand
cagauucacaguugcauaa

SEQ ID NO: 398367 - RNA, 19 nt, Homo sapiens
  misc_RNA (1)...(19): siRNA sense strand
uauuguagcugucccuuuc

SEQ ID NO: 398368 - RNA, 19 nt, Homo sapiens
  misc_RNA (1)...(19): siRNA sense strand
agaaagaaggaaaggauaa

SEQ ID NO: 398369 - RNA, 19 nt, Homo sapiens
  misc_RNA (1)...(19): siRNA sense strand
gguuggagaucaagagcuu

SEQ ID NO: 398370 - RNA, 19 nt, Homo sapiens
  misc_RNA (1)...(19): siRNA sense strand
caccuggaaugucuuagaa

SEQ ID NO: 398371 - RNA, 19 nt, Homo sapiens
  misc_RNA (1)...(19): siRNA sense strand
aggauuggcuuguccagaa

SEQ ID NO: 398372 - RNA, 19 nt, Homo sapiens
  misc_RNA (1)...(19): siRNA sense strand
aaucugaagugccugaaug

SEQ ID NO: 398373 - RNA, 19 nt, Homo sapiens
  misc_RNA (1)...(19): siRNA sense strand
agauggaccuaucagauug

SEQ ID NO: 398374 - RNA, 19 nt, Homo sapiens
  misc_RNA (1)...(19): siRNA sense strand
gccagaccaucaccacauu

SEQ ID NO: 398375 - RNA, 19 nt, Homo sapiens
  misc_RNA (1)...(19): siRNA sense strand
ggucaaagcucagauucac

SEQ ID NO: 398376 - RNA, 19 nt, Homo sapiens
  misc_RNA (1)...(19): siRNA sense strand
ggaaaagguuggagaucaa

SEQ ID NO: 398377 - RNA, 19 nt, Homo sapiens
  misc_RNA (1)...(19): siRNA sense strand
gugagaaguuuaagcucuu

SEQ ID NO: 398378 - RNA, 19 nt, Homo sapiens
  misc_RNA (1)...(19): siRNA sense strand
gugaaugauuggcuuguca

SEQ ID NO: 398379 - RNA, 19 nt, Homo sapiens
  misc_RNA (1)...(19): siRNA sense strand
cagaguggcagcuccagua

SEQ ID NO: 398380 - RNA, 19 nt, Homo sapiens
  misc_RNA (1)...(19): siRNA sense strand
uaacagccauuccacuacu

SEQ ID NO: 398381 - RNA, 19 nt, Homo sapiens
  misc_RNA (1)...(19): siRNA sense strand
cuaguucuuucuccauuga

SEQ ID NO: 398382 - RNA, 19 nt, Homo sapiens
  misc_RNA (1)...(19): siRNA sense strand
gggcaaccucagccaguua

SEQ ID NO: 398383 - RNA, 19 nt, Homo sapiens
  misc_RNA (1)...(19): siRNA sense strand
aagaugagauggaccuauc

SEQ ID NO: 398384 - RNA, 19 nt, Homo sapiens
  misc_RNA (1)...(19): siRNA sense strand
aagcagaccuuggagaaca

SEQ ID NO: 398385 - RNA, 19 nt, Homo sapiens
  misc_RNA (1)...(19): siRNA sense strand
caaugacuccuucuagaau

SEQ ID NO: 398386 - RNA, 19 nt, Homo sapiens
  misc_RNA (1)...(19): siRNA sense strand
cagagugugugugugauga

SEQ ID NO: 398387 - RNA, 19 nt, Homo sapiens
  misc_RNA (1)...(19): siRNA sense strand
ggaccuuauuuaucagcuu

SEQ ID NO: 398388 - RNA, 19 nt, Homo sapiens
  misc_RNA (1)...(19): siRNA sense strand
gccugcaauuucuucaaua

SEQ ID NO: 398389 - RNA, 19 nt, Homo sapiens
  misc_RNA (1)...(19): siRNA sense strand
ggccaguucaauugucuua

SEQ ID NO: 398390 - RNA, 19 nt, Homo sapiens
  misc_RNA (1)...(19): siRNA sense strand
gugguuaucaagcuccuua

SEQ ID NO: 398391 - RNA, 19 nt, Homo sapiens
  misc_RNA (1)...(19): siRNA sense strand
uuacuuaauucaccucuac

SEQ ID NO: 398392 - RNA, 19 nt, Homo sapiens
  misc_RNA (1)...(19): siRNA sense strand
cuguauaaguggcuucuga

SEQ ID NO: 398393 - RNA, 19 nt, Homo sapiens
  misc_RNA (1)...(19): siRNA sense strand
uguaacagccauuccacua

SEQ ID NO: 398394 - RNA, 19 nt, Homo sapiens
  misc_RNA (1)...(19): siRNA sense strand
aaugacuccuucuagaauu

SEQ ID NO: 398395 - RNA, 19 nt, Homo sapiens
  misc_RNA (1)...(19): siRNA sense strand
ccaaugagcccugcacaag

SEQ ID NO: 398396 - RNA, 19 nt, Homo sapiens
  misc_RNA (1)...(19): siRNA sense strand
ucaagagcuuccugaucaa

SEQ ID NO: 398397 - RNA, 19 nt, Homo sapiens
  misc_RNA (1)...(19): siRNA sense strand
aggaggcucuguauaagug

SEQ ID NO: 398398 - RNA, 19 nt, Homo sapiens
  misc_RNA (1)...(19): siRNA sense strand
gugccugaaugaccacuug

SEQ ID NO: 398399 - RNA, 19 nt, Homo sapiens
  misc_RNA (1)...(19): siRNA sense strand
uuaaagaggagacacuuca

SEQ ID NO: 398400 - RNA, 19 nt, Homo sapiens
  misc_RNA (1)...(19): siRNA sense strand
ugugaucucuuugccugua

SEQ ID NO: 398401 - RNA, 19 nt, Homo sapiens
  misc_RNA (1)...(19): siRNA sense strand
gacaaguggcugcuucgaa

SEQ ID NO: 398402 - RNA, 19 nt, Homo sapiens
  misc_RNA (1)...(19): siRNA sense strand
uuuaaaagccccaugaaua

SEQ ID NO: 398403 - RNA, 19 nt, Homo sapiens
  misc_RNA (1)...(19): siRNA sense strand
cugagaagcauaaagauuc

SEQ ID NO: 398404 - RNA, 19 nt, Homo sapiens
  misc_RNA (1)...(19): siRNA sense strand
ucaggacccauguaaggua

SEQ ID NO: 398405 - RNA, 19 nt, Homo sapiens
  misc_RNA (1)...(19): siRNA sense strand
cucagcagcucuacucguu

SEQ ID NO: 398406 - RNA, 19 nt, Homo sapiens
  misc_RNA (1)...(19): siRNA sense strand
ugauaaagagaagugguua

SEQ ID NO: 398407 - RNA, 19 nt, Homo sapiens
  misc_RNA (1)...(19): siRNA sense strand
aagaaagaaggaaaggaua

SEQ ID NO: 398408 - RNA, 19 nt, Homo sapiens
  misc_RNA (1)...(19): siRNA sense strand
ugagaaggaggcucuguau

SEQ ID NO: 398409 - RNA, 19 nt, Homo sapiens
  misc_RNA (1)...(19): siRNA sense strand
gugagaaggaggcucugua

SEQ ID NO: 398410 - RNA, 19 nt, Homo sapiens
  misc_RNA (1)...(19): siRNA sense strand
cagcaugguuacagaggau

SEQ ID NO: 398411 - RNA, 19 nt, Homo sapiens
  misc_RNA (1)...(19): siRNA sense strand
gucagcauccgguauugua

SEQ ID NO: 398412 - RNA, 19 nt, Homo sapiens
  misc_RNA (1)...(19): siRNA sense strand
cugggcaguuugacccuua

SEQ ID NO: 398413 - RNA, 19 nt, Homo sapiens
  misc_RNA (1)...(19): siRNA sense strand
ccaguucaauugucuuacu

SEQ ID NO: 398414 - RNA, 19 nt, Homo sapiens
  misc_RNA (1)...(19): siRNA sense strand
gcagcucuacucguuauug

SEQ ID NO: 398415 - RNA, 19 nt, Homo sapiens
  misc_RNA (1)...(19): siRNA sense strand
cugaacagcaaauuaaaga

SEQ ID NO: 398416 - RNA, 19 nt, Homo sapiens
  misc_RNA (1)...(19): siRNA sense strand
caucaggacccauguaagg

SEQ ID NO: 398417 - RNA, 19 nt, Homo sapiens
  misc_RNA (1)...(19): siRNA sense strand
ccuaucagauuggcuagug

SEQ ID NO: 398418 - RNA, 19 nt, Homo sapiens
  misc_RNA (1)...(19): siRNA sense strand
gcuaguucagcaaauauug

SEQ ID NO: 398419 - RNA, 19 nt, Homo sapiens
  misc_RNA (1)...(19): siRNA sense strand
gaagcugacacaauuacuc

SEQ ID NO: 398420 - RNA, 19 nt, Homo sapiens
  misc_RNA (1)...(19): siRNA sense strand
gaauggcagucgugaaacc

SEQ ID NO: 398421 - RNA, 19 nt, Homo sapiens
  misc_RNA (1)...(19): siRNA sense strand
cacaagcuuugcagagugu

SEQ ID NO: 398422 - RNA, 19 nt, Homo sapiens
  misc_RNA (1)...(19): siRNA sense strand
gugaaaccagugagaaguu

SEQ ID NO: 398423 - RNA, 19 nt, Homo sapiens
  misc_RNA (1)...(19): siRNA sense strand
gcaaagaaaugaugucuca

SEQ ID NO: 398424 - RNA, 19 nt, Homo sapiens
  misc_RNA (1)...(19): siRNA sense strand
gaaaugaugucucaagcau

SEQ ID NO: 398425 - RNA, 19 nt, Homo sapiens
  misc_RNA (1)...(19): siRNA sense strand
gcagaaagaggaugugaaa

SEQ ID NO: 398426 - RNA, 19 nt, Homo sapiens
  misc_RNA (1)...(19): siRNA sense strand
gugaaaccauaucaaguua

SEQ ID NO: 398427 - RNA, 19 nt, Homo sapiens
  misc_RNA (1)...(19): siRNA sense strand
ggagauggcugggaauuca

SEQ ID NO: 398428 - RNA, 19 nt, Homo sapiens
  misc_RNA (1)...(19): siRNA sense strand
cagaaugacuacuuugcua

SEQ ID NO: 398429 - RNA, 19 nt, Homo sapiens
  misc_RNA (1)...(19): siRNA sense strand
gugcugaccucaauaagga

SEQ ID NO: 398430 - RNA, 19 nt, Homo sapiens
  misc_RNA (1)...(19): siRNA sense strand
gcaguuucuucuggaauua

SEQ ID NO: 398431 - RNA, 19 nt, Homo sapiens
  misc_RNA (1)...(19): siRNA sense strand
gaaagaggaugugaaacca

SEQ ID NO: 398432 - RNA, 19 nt, Homo sapiens
  misc_RNA (1)...(19): siRNA sense strand
uggaauuacucacugauaa

SEQ ID NO: 398433 - RNA, 19 nt, Homo sapiens
  misc_RNA (1)...(19): siRNA sense strand
aagaggaugugaaaccaua

SEQ ID NO: 398434 - RNA, 19 nt, Homo sapiens
  misc_RNA (1)...(19): siRNA sense strand
gauaaauccugucagucuu

SEQ ID NO: 398435 - RNA, 19 nt, Homo sapiens
  misc_RNA (1)...(19): siRNA sense strand
gaugugggcugugaaugaa

SEQ ID NO: 398436 - RNA, 19 nt, Homo sapiens
  misc_RNA (1)...(19): siRNA sense strand
ggaccgugcugaccucaau

SEQ ID NO: 398437 - RNA, 19 nt, Homo sapiens
  misc_RNA (1)...(19): siRNA sense strand
ggaauuacucacugauaaa

SEQ ID NO: 398438 - RNA, 19 nt, Homo sapiens
  misc_RNA (1)...(19): siRNA sense strand
ccugaaagguguagacuuc

SEQ ID NO: 398439 - RNA, 19 nt, Homo sapiens
  misc_RNA (1)...(19): siRNA sense strand
acagacaccuugcagaaug

SEQ ID NO: 398440 - RNA, 19 nt, Homo sapiens
  misc_RNA (1)...(19): siRNA sense strand
caacccagccuauccagaa

SEQ ID NO: 398441 - RNA, 19 nt, Homo sapiens
  misc_RNA (1)...(19): siRNA sense strand
ggcaguuucuucuggaauu

SEQ ID NO: 398442 - RNA, 19 nt, Homo sapiens
  misc_RNA (1)...(19): siRNA sense strand
gauauggaaugugcagaug

SEQ ID NO: 398443 - RNA, 19 nt, Homo sapiens
  misc_RNA (1)...(19): siRNA sense strand
auagagagcuacgauaguu

SEQ ID NO: 398444 - RNA, 19 nt, Homo sapiens
  misc_RNA (1)...(19): siRNA sense strand
gcauagagagcuacgauag

SEQ ID NO: 398445 - RNA, 19 nt, Homo sapiens
  misc_RNA (1)...(19): siRNA sense strand
cggauuacuucauuagcua

SEQ ID NO: 398446 - RNA, 19 nt, Homo sapiens
  misc_RNA (1)...(19): siRNA sense strand
uagagauccugcagaaaga

SEQ ID NO: 398447 - RNA, 19 nt, Homo sapiens
  misc_RNA (1)...(19): siRNA sense strand
gaaguucuguaugaaugga

SEQ ID NO: 398448 - RNA, 19 nt, Homo sapiens
  misc_RNA (1)...(19): siRNA sense strand
gagcuccucucccucaagu

SEQ ID NO: 398449 - RNA, 19 nt, Homo sapiens
  misc_RNA (1)...(19): siRNA sense strand
ggagcagccagucaucuuu

SEQ ID NO: 398450 - RNA, 19 nt, Homo sapiens
  misc_RNA (1)...(19): siRNA sense strand
gagcuacgauaguugugau

SEQ ID NO: 398451 - RNA, 19 nt, Homo sapiens
  misc_RNA (1)...(19): siRNA sense strand
gagcaugcccaguguguuc

SEQ ID NO: 398452 - RNA, 19 nt, Homo sapiens
  misc_RNA (1)...(19): siRNA sense strand
ucaaguaugagaaugacua

SEQ ID NO: 398453 - RNA, 19 nt, Homo sapiens
  misc_RNA (1)...(19): siRNA sense strand
agacagacaccuugcagaa

SEQ ID NO: 398454 - RNA, 19 nt, Homo sapiens
  misc_RNA (1)...(19): siRNA sense strand
uauccagaaucccgcuaua

SEQ ID NO: 398455 - RNA, 19 nt, Homo sapiens
  misc_RNA (1)...(19): siRNA sense strand
gcugggaauucaaacuuuc

SEQ ID NO: 398456 - RNA, 19 nt, Homo sapiens
  misc_RNA (1)...(19): siRNA sense strand
ccaagcagcaaagaaauga

SEQ ID NO: 398457 - RNA, 19 nt, Homo sapiens
  misc_RNA (1)...(19): siRNA sense strand
ggcugggaauucaaacuuu

SEQ ID NO: 398458 - RNA, 19 nt, Homo sapiens
  misc_RNA (1)...(19): siRNA sense strand
cagacaccuugcagaauga

SEQ ID NO: 398459 - RNA, 19 nt, Homo sapiens
  misc_RNA (1)...(19): siRNA sense strand
gaugugaaaccauaucaag

SEQ ID NO: 398460 - RNA, 19 nt, Homo sapiens
  misc_RNA (1)...(19): siRNA sense strand
uaccucggauuacuucauu

SEQ ID NO: 398461 - RNA, 19 nt, Homo sapiens
  misc_RNA (1)...(19): siRNA sense strand
ugugaaaccauaucaaguu

SEQ ID NO: 398462 - RNA, 19 nt, Homo sapiens
  misc_RNA (1)...(19): siRNA sense strand
ggccaggacucuuuugaaa

SEQ ID NO: 398463 - RNA, 19 nt, Homo sapiens
  misc_RNA (1)...(19): siRNA sense strand
gaucucaagccgacucuca

SEQ ID NO: 398464 - RNA, 19 nt, Homo sapiens
  misc_RNA (1)...(19): siRNA sense strand
acgcuacuauuacgacaaa

SEQ ID NO: 398465 - RNA, 19 nt, Homo sapiens
  misc_RNA (1)...(19): siRNA sense strand
uucauuagcuaugguauug

SEQ ID NO: 398466 - RNA, 19 nt, Homo sapiens
  misc_RNA (1)...(19): siRNA sense strand
caucuuaugggaacaucua

SEQ ID NO: 398467 - RNA, 19 nt, Homo sapiens
  misc_RNA (1)...(19): siRNA sense strand
cuagagauccugcagaaag

SEQ ID NO: 398468 - RNA, 19 nt, Homo sapiens
  misc_RNA (1)...(19): siRNA sense strand
gaugaauuaugagaaacug

SEQ ID NO: 398469 - RNA, 19 nt, Homo sapiens
  misc_RNA (1)...(19): siRNA sense strand
ugaugugggcugugaauga

SEQ ID NO: 398470 - RNA, 19 nt, Homo sapiens
  misc_RNA (1)...(19): siRNA sense strand
ugauaaauccugucagucu

SEQ ID NO: 398471 - RNA, 19 nt, Homo sapiens
  misc_RNA (1)...(19): siRNA sense strand
gcuccucucccucaaguau

SEQ ID NO: 398472 - RNA, 19 nt, Homo sapiens
  misc_RNA (1)...(19): siRNA sense strand
ggauauggaaugugcagau

SEQ ID NO: 398473 - RNA, 19 nt, Homo sapiens
  misc_RNA (1)...(19): siRNA sense strand
gaaugacuacuuugcuauc

SEQ ID NO: 398474 - RNA, 19 nt, Homo sapiens
  misc_RNA (1)...(19): siRNA sense strand
ugugggcugugaaugaauu

SEQ ID NO: 398475 - RNA, 19 nt, Homo sapiens
  misc_RNA (1)...(19): siRNA sense strand
gcagcguguucccuccuau

SEQ ID NO: 398476 - RNA, 19 nt, Homo sapiens
  misc_RNA (1)...(19): siRNA sense strand
gagcagccagucaucuuuc

SEQ ID NO: 398477 - RNA, 19 nt, Homo sapiens
  misc_RNA (1)...(19): siRNA sense strand
aaagaaaugaugucucaag

SEQ ID NO: 398478 - RNA, 19 nt, Homo sapiens
  misc_RNA (1)...(19): siRNA sense strand
gccagaugccgacgaguga

SEQ ID NO: 398479 - RNA, 19 nt, Homo sapiens
  misc_RNA (1)...(19): siRNA sense strand
guucgggacugggugaugu

SEQ ID NO: 398480 - RNA, 19 nt, Homo sapiens
  misc_RNA (1)...(19): siRNA sense strand
cguguucccuccuaugaca

SEQ ID NO: 398481 - RNA, 19 nt, Homo sapiens
  misc_RNA (1)...(19): siRNA sense strand
uauggaaugugcagauguc

SEQ ID NO: 398482 - RNA, 19 nt, Homo sapiens
  misc_RNA (1)...(19): siRNA sense strand
aaacaucauccacaagaca

SEQ ID NO: 398483 - RNA, 19 nt, Homo sapiens
  misc_RNA (1)...(19): siRNA sense strand
ugaaagguguagacuucca

SEQ ID NO: 398484 - RNA, 19 nt, Homo sapiens
  misc_RNA (1)...(19): siRNA sense strand
ccuaagaugaauuaugaga

SEQ ID NO: 398485 - RNA, 19 nt, Homo sapiens
  misc_RNA (1)...(19): siRNA sense strand
uugaaagcauagagagcua

SEQ ID NO: 398486 - RNA, 19 nt, Homo sapiens
  misc_RNA (1)...(19): siRNA sense strand
cuugcagaaugacuacuuu

SEQ ID NO: 398487 - RNA, 19 nt, Homo sapiens
  misc_RNA (1)...(19): siRNA sense strand
ucagagcccagcuucauca

SEQ ID NO: 398488 - RNA, 19 nt, Homo sapiens
  misc_RNA (1)...(19): siRNA sense strand
gcuauaccucggauuacuu

SEQ ID NO: 398489 - RNA, 19 nt, Homo sapiens
  misc_RNA (1)...(19): siRNA sense strand
acuccaagcagcaaagaaa

SEQ ID NO: 398490 - RNA, 19 nt, Homo sapiens
  misc_RNA (1)...(19): siRNA sense strand
ucaaguuaauggagucaac

SEQ ID NO: 398491 - RNA, 19 nt, Homo sapiens
  misc_RNA (1)...(19): siRNA sense strand
auaaauccugucagucuuu

SEQ ID NO: 398492 - RNA, 19 nt, Homo sapiens
  misc_RNA (1)...(19): siRNA sense strand
ucacugauaaauccuguca

SEQ ID NO: 398493 - RNA, 19 nt, Homo sapiens
  misc_RNA (1)...(19): siRNA sense strand
gcagaaugacuacuuugcu

SEQ ID NO: 398494 - RNA, 19 nt, Homo sapiens
  misc_RNA (1)...(19): siRNA sense strand
cauuagcuaugguauugag

SEQ ID NO: 398495 - RNA, 19 nt, Homo sapiens
  misc_RNA (1)...(19): siRNA sense strand
gggaauucaaacuuucuga

SEQ ID NO: 398496 - RNA, 19 nt, Homo sapiens
  misc_RNA (1)...(19): siRNA sense strand
gacagacaccuugcagaau

SEQ ID NO: 398497 - RNA, 19 nt, Homo sapiens
  misc_RNA (1)...(19): siRNA sense strand
ggaugugaaaccauaucaa

SEQ ID NO: 398498 - RNA, 19 nt, Homo sapiens
  misc_RNA (1)...(19): siRNA sense strand
ggccuacgcuacuauuacg

SEQ ID NO: 398499 - RNA, 19 nt, Homo sapiens
  misc_RNA (1)...(19): siRNA sense strand
caccaucggaguucucaga

SEQ ID NO: 398500 - RNA, 19 nt, Homo sapiens
  misc_RNA (1)...(19): siRNA sense strand
gccguggccuacgcuacua

SEQ ID NO: 398501 - RNA, 19 nt, Homo sapiens
  misc_RNA (1)...(19): siRNA sense strand
cacaggcaguggaccaauc

SEQ ID NO: 398502 - RNA, 19 nt, Homo sapiens
  misc_RNA (1)...(19): siRNA sense strand
aagcuacuuucagugguuu

SEQ ID NO: 398503 - RNA, 19 nt, Homo sapiens
  misc_RNA (1)...(19): siRNA sense strand
cccgcuauaccucggauua

SEQ ID NO: 398504 - RNA, 19 nt, Homo sapiens
  misc_RNA (1)...(19): siRNA sense strand
aaugacuacuuugcuauca

SEQ ID NO: 398505 - RNA, 19 nt, Homo sapiens
  misc_RNA (1)...(19): siRNA sense strand
agaaugacuacuuugcuau

SEQ ID NO: 398506 - RNA, 19 nt, Homo sapiens
  misc_RNA (1)...(19): siRNA sense strand
ucucaagcauuaaaagcua

SEQ ID NO: 398507 - RNA, 19 nt, Homo sapiens
  misc_RNA (1)...(19): siRNA sense strand
ggagucaacccagccuauc

SEQ ID NO: 398508 - RNA, 19 nt, Homo sapiens
  misc_RNA (1)...(19): siRNA sense strand
ugggugaugugggcuguga

SEQ ID NO: 398509 - RNA, 19 nt, Homo sapiens
  misc_RNA (1)...(19): siRNA sense strand
ggauuacuucauuagcuau

SEQ ID NO: 398510 - RNA, 19 nt, Homo sapiens
  misc_RNA (1)...(19): siRNA sense strand
ggacaucuuaugggaacau

SEQ ID NO: 398511 - RNA, 19 nt, Homo sapiens
  misc_RNA (1)...(19): siRNA sense strand
acaccuugcagaaugacua

SEQ ID NO: 398512 - RNA, 19 nt, Homo sapiens
  misc_RNA (1)...(19): siRNA sense strand
ggacaaauguucagcacua

SEQ ID NO: 398513 - RNA, 19 nt, Homo sapiens
  misc_RNA (1)...(19): siRNA sense strand
gaagaggacuuucagcaaa

SEQ ID NO: 398514 - RNA, 19 nt, Homo sapiens
  misc_RNA (1)...(19): siRNA sense strand
ccacaggccuccuuugaua

SEQ ID NO: 398515 - RNA, 19 nt, Homo sapiens
  misc_RNA (1)...(19): siRNA sense strand
gaacuuggaugucagcuau

SEQ ID NO: 398516 - RNA, 19 nt, Homo sapiens
  misc_RNA (1)...(19): siRNA sense strand
uagcauaucuucuaacuug

SEQ ID NO: 398517 - RNA, 19 nt, Homo sapiens
  misc_RNA (1)...(19): siRNA sense strand
gcucugaucuggaaaguga

SEQ ID NO: 398518 - RNA, 19 nt, Homo sapiens
  misc_RNA (1)...(19): siRNA sense strand
gaaucuggcuucaauaaau

SEQ ID NO: 398519 - RNA, 19 nt, Homo sapiens
  misc_RNA (1)...(19): siRNA sense strand
gaagagaggcccuuugaga

SEQ ID NO: 398520 - RNA, 19 nt, Homo sapiens
  misc_RNA (1)...(19): siRNA sense strand
caaagacuguggacaaaug

SEQ ID NO: 398521 - RNA, 19 nt, Homo sapiens
  misc_RNA (1)...(19): siRNA sense strand
guagugaccuugaugaugu

SEQ ID NO: 398522 - RNA, 19 nt, Homo sapiens
  misc_RNA (1)...(19): siRNA sense strand
gauaaaacguccaugguua

SEQ ID NO: 398523 - RNA, 19 nt, Homo sapiens
  misc_RNA (1)...(19): siRNA sense strand
uaaggaaugugaccaaguu

SEQ ID NO: 398524 - RNA, 19 nt, Homo sapiens
  misc_RNA (1)...(19): siRNA sense strand
aaagugacauugaaaguga

SEQ ID NO: 398525 - RNA, 19 nt, Homo sapiens
  misc_RNA (1)...(19): siRNA sense strand
ugacagaucauuuagcaua

SEQ ID NO: 398526 - RNA, 19 nt, Homo sapiens
  misc_RNA (1)...(19): siRNA sense strand
aaacguccaugguuaauau

SEQ ID NO: 398527 - RNA, 19 nt, Homo sapiens
  misc_RNA (1)...(19): siRNA sense strand
uaaaggcuauugcuucuau

SEQ ID NO: 398528 - RNA, 19 nt, Homo sapiens
  misc_RNA (1)...(19): siRNA sense strand
ggaugaagacuaugauauu

SEQ ID NO: 398529 - RNA, 19 nt, Homo sapiens
  misc_RNA (1)...(19): siRNA sense strand
gaacccaaaucaagugcaa

SEQ ID NO: 398530 - RNA, 19 nt, Homo sapiens
  misc_RNA (1)...(19): siRNA sense strand
auaaggcacuucacagaua

SEQ ID NO: 398531 - RNA, 19 nt, Homo sapiens
  misc_RNA (1)...(19): siRNA sense strand
caugacacauccucagaua

SEQ ID NO: 398532 - RNA, 19 nt, Homo sapiens
  misc_RNA (1)...(19): siRNA sense strand
guuaaaggacuaucaagua

SEQ ID NO: 398533 - RNA, 19 nt, Homo sapiens
  misc_RNA (1)...(19): siRNA sense strand
gaacgccagcuauggauaa

SEQ ID NO: 398534 - RNA, 19 nt, Homo sapiens
  misc_RNA (1)...(19): siRNA sense strand
gaugagguguuguuagaug

SEQ ID NO: 398535 - RNA, 19 nt, Homo sapiens
  misc_RNA (1)...(19): siRNA sense strand
gcagugaccuggaaacaac

SEQ ID NO: 398536 - RNA, 19 nt, Homo sapiens
  misc_RNA (1)...(19): siRNA sense strand
aaacacaugcugucacaua

SEQ ID NO: 398537 - RNA, 19 nt, Homo sapiens
  misc_RNA (1)...(19): siRNA sense strand
ggagaugaguugcaagaca

SEQ ID NO: 398538 - RNA, 19 nt, Homo sapiens
  misc_RNA (1)...(19): siRNA sense strand
ggaaagcacuaugaaugug

SEQ ID NO: 398539 - RNA, 19 nt, Homo sapiens
  misc_RNA (1)...(19): siRNA sense strand
ccaaugcccugccagagaa

SEQ ID NO: 398540 - RNA, 19 nt, Homo sapiens
  misc_RNA (1)...(19): siRNA sense strand
gaccagcucuuugaaucua

SEQ ID NO: 398541 - RNA, 19 nt, Homo sapiens
  misc_RNA (1)...(19): siRNA sense strand
gcacuacgucuuccuuaaa

SEQ ID NO: 398542 - RNA, 19 nt, Homo sapiens
  misc_RNA (1)...(19): siRNA sense strand
gguauaaagaggaagaaua

SEQ ID NO: 398543 - RNA, 19 nt, Homo sapiens
  misc_RNA (1)...(19): siRNA sense strand
gaggaugacuaugaagaaa

SEQ ID NO: 398544 - RNA, 19 nt, Homo sapiens
  misc_RNA (1)...(19): siRNA sense strand
gaaaggaaccagugacaag

SEQ ID NO: 398545 - RNA, 19 nt, Homo sapiens
  misc_RNA (1)...(19): siRNA sense strand
gaagcaacgucgaaucaag

SEQ ID NO: 398546 - RNA, 19 nt, Homo sapiens
  misc_RNA (1)...(19): siRNA sense strand
gaucagagaacuuggaugu

SEQ ID NO: 398547 - RNA, 19 nt, Homo sapiens
  misc_RNA (1)...(19): siRNA sense strand
guacugaacagacaaacaa

SEQ ID NO: 398548 - RNA, 19 nt, Homo sapiens
  misc_RNA (1)...(19): siRNA sense strand
gaaccagugacaaguaauu

SEQ ID NO: 398549 - RNA, 19 nt, Homo sapiens
  misc_RNA (1)...(19): siRNA sense strand
gagagcagccuuacagaug

SEQ ID NO: 398550 - RNA, 19 nt, Homo sapiens
  misc_RNA (1)...(19): siRNA sense strand
aaaguaagcccucuucaga

SEQ ID NO: 398551 - RNA, 19 nt, Homo sapiens
  misc_RNA (1)...(19): siRNA sense strand
aagaugagguguuguuaga

SEQ ID NO: 398552 - RNA, 19 nt, Homo sapiens
  misc_RNA (1)...(19): siRNA sense strand
ucagagaacuuggauguca

SEQ ID NO: 398553 - RNA, 19 nt, Homo sapiens
  misc_RNA (1)...(19): siRNA sense strand
ccuuugaucucaccacuaa

SEQ ID NO: 398554 - RNA, 19 nt, Homo sapiens
  misc_RNA (1)...(19): siRNA sense strand
ggucuuaccuuuccaacag

SEQ ID NO: 398555 - RNA, 19 nt, Homo sapiens
  misc_RNA (1)...(19): siRNA sense strand
gagaugaguugcaagacau

SEQ ID NO: 398556 - RNA, 19 nt, Homo sapiens
  misc_RNA (1)...(19): siRNA sense strand
ccacuaagcgaaaggauga

SEQ ID NO: 398557 - RNA, 19 nt, Homo sapiens
  misc_RNA (1)...(19): siRNA sense strand
gaaagcacuaugaauguga

SEQ ID NO: 398558 - RNA, 19 nt, Homo sapiens
  misc_RNA (1)...(19): siRNA sense strand
ugaggaggaugaagacuau

SEQ ID NO: 398559 - RNA, 19 nt, Homo sapiens
  misc_RNA (1)...(19): siRNA sense strand
uaaagaaacaugagaaugg

SEQ ID NO: 398560 - RNA, 19 nt, Homo sapiens
  misc_RNA (1)...(19): siRNA sense strand
caacaaaccaauuuagaca

SEQ ID NO: 398561 - RNA, 19 nt, Homo sapiens
  misc_RNA (1)...(19): siRNA sense strand
ccaacugccugaucagaga

SEQ ID NO: 398562 - RNA, 19 nt, Homo sapiens
  misc_RNA (1)...(19): siRNA sense strand
gaugcuuacuucacagaaa

SEQ ID NO: 398563 - RNA, 19 nt, Homo sapiens
  misc_RNA (1)...(19): siRNA sense strand
agacagacaccuaaagaaa

SEQ ID NO: 398564 - RNA, 19 nt, Homo sapiens
  misc_RNA (1)...(19): siRNA sense strand
cagauacuguggcaagauu

SEQ ID NO: 398565 - RNA, 19 nt, Homo sapiens
  misc_RNA (1)...(19): siRNA sense strand
gaagagagggaauacaagu

SEQ ID NO: 398566 - RNA, 19 nt, Homo sapiens
  misc_RNA (1)...(19): siRNA sense strand
gaaagugacauugaaagug

SEQ ID NO: 398567 - RNA, 19 nt, Homo sapiens
  misc_RNA (1)...(19): siRNA sense strand
ugaaggcacuaucuaaaca

SEQ ID NO: 398568 - RNA, 19 nt, Homo sapiens
  misc_RNA (1)...(19): siRNA sense strand
ccugcuaguucuccuguua

SEQ ID NO: 398569 - RNA, 19 nt, Homo sapiens
  misc_RNA (1)...(19): siRNA sense strand
gcaacaucgucgccucauu

SEQ ID NO: 398570 - RNA, 19 nt, Homo sapiens
  misc_RNA (1)...(19): siRNA sense strand
cagacuugcuggaugauga

SEQ ID NO: 398571 - RNA, 19 nt, Homo sapiens
  misc_RNA (1)...(19): siRNA sense strand
caggugcgauucuggauga

SEQ ID NO: 398572 - RNA, 19 nt, Homo sapiens
  misc_RNA (1)...(19): siRNA sense strand
caucgucgccucauucuga

SEQ ID NO: 398573 - RNA, 19 nt, Homo sapiens
  misc_RNA (1)...(19): siRNA sense strand
gaauacaagugugaucagu

SEQ ID NO: 398574 - RNA, 19 nt, Homo sapiens
  misc_RNA (1)...(19): siRNA sense strand
ggaggaugacuaugaagaa

SEQ ID NO: 398575 - RNA, 19 nt, Homo sapiens
  misc_RNA (1)...(19): siRNA sense strand
gcuggaugaugaagaaguu

SEQ ID NO: 398576 - RNA, 19 nt, Homo sapiens
  misc_RNA (1)...(19): siRNA sense strand
acaaaccaauuuagacaga

SEQ ID NO: 398577 - RNA, 19 nt, Homo sapiens
  misc_RNA (1)...(19): siRNA sense strand
gacagaucauuuagcauau

SEQ ID NO: 398578 - RNA, 19 nt, Homo sapiens
  misc_RNA (1)...(19): siRNA sense strand
gauagagacuugagaucgu

SEQ ID NO: 398579 - RNA, 19 nt, Homo sapiens
  misc_RNA (1)...(19): siRNA sense strand
gaaagaauacagcaaucau

SEQ ID NO: 398580 - RNA, 19 nt, Homo sapiens
  misc_RNA (1)...(19): siRNA sense strand
uagcguuccuggucuguuu

SEQ ID NO: 398581 - RNA, 19 nt, Homo sapiens
  misc_RNA (1)...(19): siRNA sense strand
gcuccuggauuuucuuuua

SEQ ID NO: 398582 - RNA, 19 nt, Homo sapiens
  misc_RNA (1)...(19): siRNA sense strand
caaaucaagugcaaagacu

SEQ ID NO: 398583 - RNA, 19 nt, Homo sapiens
  misc_RNA (1)...(19): siRNA sense strand
ccaaggcauuuaacuggaa

SEQ ID NO: 398584 - RNA, 19 nt, Homo sapiens
  misc_RNA (1)...(19): siRNA sense strand
ugacccacuugaagcuuua

SEQ ID NO: 398585 - RNA, 19 nt, Homo sapiens
  misc_RNA (1)...(19): siRNA sense strand
ggaaaguacaggugcgauu

SEQ ID NO: 398586 - RNA, 19 nt, Homo sapiens
  misc_RNA (1)...(19): siRNA sense strand
caacaucgucgccucauuc

SEQ ID NO: 398587 - RNA, 19 nt, Homo sapiens
  misc_RNA (1)...(19): siRNA sense strand
ggaaagugacauugaaagu

SEQ ID NO: 398588 - RNA, 19 nt, Homo sapiens
  misc_RNA (1)...(19): siRNA sense strand
gcugagcugucuucuuuua

SEQ ID NO: 398589 - RNA, 19 nt, Homo sapiens
  misc_RNA (1)...(19): siRNA sense strand
gaucauauaaggcacuuca

SEQ ID NO: 398590 - RNA, 19 nt, Homo sapiens
  misc_RNA (1)...(19): siRNA sense strand
augaagaaguugaagauga

SEQ ID NO: 398591 - RNA, 19 nt, Homo sapiens
  misc_RNA (1)...(19): siRNA sense strand
auacagcaaucauuccauu

SEQ ID NO: 398592 - RNA, 19 nt, Homo sapiens
  misc_RNA (1)...(19): siRNA sense strand
gacuugagaucguuaccuu

SEQ ID NO: 398593 - RNA, 19 nt, Homo sapiens
  misc_RNA (1)...(19): siRNA sense strand
ugaagaaguugaagaugag

SEQ ID NO: 398594 - RNA, 19 nt, Homo sapiens
  misc_RNA (1)...(19): siRNA sense strand
gaaaguacaggugcgauuc

SEQ ID NO: 398595 - RNA, 19 nt, Homo sapiens
  misc_RNA (1)...(19): siRNA sense strand
acagacaccuaaagaaaca

SEQ ID NO: 398596 - RNA, 19 nt, Homo sapiens
  misc_RNA (1)...(19): siRNA sense strand
guggaaagcacuaugaaug

SEQ ID NO: 398597 - RNA, 19 nt, Homo sapiens
  misc_RNA (1)...(19): siRNA sense strand
gaggaugaagacuaugaua

SEQ ID NO: 398598 - RNA, 19 nt, Homo sapiens
  misc_RNA (1)...(19): siRNA sense strand
aaagagaagccauuuaagu

SEQ ID NO: 398599 - RNA, 19 nt, Homo sapiens
  misc_RNA (1)...(19): siRNA sense strand
uauaaaggcuauugcuucu

SEQ ID NO: 398600 - RNA, 19 nt, Homo sapiens
  misc_RNA (1)...(19): siRNA sense strand
ugugaggucugccauaaau

SEQ ID NO: 398601 - RNA, 19 nt, Homo sapiens
  misc_RNA (1)...(19): siRNA sense strand
agaaacacaugcugucaca

SEQ ID NO: 398602 - RNA, 19 nt, Homo sapiens
  misc_RNA (1)...(19): siRNA sense strand
gaacuagcagaucaccaaa

SEQ ID NO: 398603 - RNA, 19 nt, Homo sapiens
  misc_RNA (1)...(19): siRNA sense strand
caauuuagacagacaccua

SEQ ID NO: 398604 - RNA, 19 nt, Homo sapiens
  misc_RNA (1)...(19): siRNA sense strand
gaaaauggaaccccaauca

SEQ ID NO: 398605 - RNA, 19 nt, Homo sapiens
  misc_RNA (1)...(19): siRNA sense strand
uuaaaggacuaucaaguac

SEQ ID NO: 398606 - RNA, 19 nt, Homo sapiens
  misc_RNA (1)...(19): siRNA sense strand
cuacgucuuccuuaaauaa

SEQ ID NO: 398607 - RNA, 19 nt, Homo sapiens
  misc_RNA (1)...(19): siRNA sense strand
ugagaucguuaccuuugaa

SEQ ID NO: 398608 - RNA, 19 nt, Homo sapiens
  misc_RNA (1)...(19): siRNA sense strand
gugaccagcucuuugaauc

SEQ ID NO: 398609 - RNA, 19 nt, Homo sapiens
  misc_RNA (1)...(19): siRNA sense strand
gaagaugagguguuguuag

SEQ ID NO: 398610 - RNA, 19 nt, Homo sapiens
  misc_RNA (1)...(19): siRNA sense strand
gcaacauccacaauaaaga

SEQ ID NO: 398611 - RNA, 19 nt, Homo sapiens
  misc_RNA (1)...(19): siRNA sense strand
guucgcaacauccacaaua

SEQ ID NO: 398612 - RNA, 19 nt, Homo sapiens
  misc_RNA (1)...(19): siRNA sense strand
uccaagagcuucagcauag

SEQ ID NO: 398613 - RNA, 19 nt, Homo sapiens
  misc_RNA (1)...(19): siRNA sense strand
uuucaacgcuucccugaug

SEQ ID NO: 398614 - RNA, 19 nt, Homo sapiens
  misc_RNA (1)...(19): siRNA sense strand
ccgaagagcuccgacaagu

SEQ ID NO: 398615 - RNA, 19 nt, Homo sapiens
  misc_RNA (1)...(19): siRNA sense strand
ucaacggcaucuaccaguu

SEQ ID NO: 398616 - RNA, 19 nt, Homo sapiens
  misc_RNA (1)...(19): siRNA sense strand
gaacagcauccgccacaac

SEQ ID NO: 398617 - RNA, 19 nt, Homo sapiens
  misc_RNA (1)...(19): siRNA sense strand
gccuggacauguuugagaa

SEQ ID NO: 398618 - RNA, 19 nt, Homo sapiens
  misc_RNA (1)...(19): siRNA sense strand
gccacaaccucucgcucaa

SEQ ID NO: 398619 - RNA, 19 nt, Homo sapiens
  misc_RNA (1)...(19): siRNA sense strand
caacggcaucuaccaguuc

SEQ ID NO: 398620 - RNA, 19 nt, Homo sapiens
  misc_RNA (1)...(19): siRNA sense strand
ccaagagcuucagcauaga

SEQ ID NO: 398621 - RNA, 19 nt, Homo sapiens
  misc_RNA (1)...(19): siRNA sense strand
ucccgcagcucuccgaaga

SEQ ID NO: 398622 - RNA, 19 nt, Homo sapiens
  misc_RNA (1)...(19): siRNA sense strand
guccaagagcuucagcaua

SEQ ID NO: 398623 - RNA, 19 nt, Homo sapiens
  misc_RNA (1)...(19): siRNA sense strand
cgcccaugcuguaucugua

SEQ ID NO: 398624 - RNA, 19 nt, Homo sapiens
  misc_RNA (1)...(19): siRNA sense strand
ucuguacggucccgagaga

SEQ ID NO: 398625 - RNA, 19 nt, Homo sapiens
  misc_RNA (1)...(19): siRNA sense strand
agaagccucccuacagcua

SEQ ID NO: 398626 - RNA, 19 nt, Homo sapiens
  misc_RNA (1)...(19): siRNA sense strand
caucuaccaguucaucaug

SEQ ID NO: 398627 - RNA, 19 nt, Homo sapiens
  misc_RNA (1)...(19): siRNA sense strand
gcaucuaccaguucaucau

SEQ ID NO: 398628 - RNA, 19 nt, Homo sapiens
  misc_RNA (1)...(19): siRNA sense strand
cgacacgguacuccacuuc

SEQ ID NO: 398629 - RNA, 19 nt, Homo sapiens
  misc_RNA (1)...(19): siRNA sense strand
gcaaaggcacuaagaaguu

SEQ ID NO: 398630 - RNA, 19 nt, Homo sapiens
  misc_RNA (1)...(19): siRNA sense strand
guccagagcugacaacaga

SEQ ID NO: 398631 - RNA, 19 nt, Homo sapiens
  misc_RNA (1)...(19): siRNA sense strand
gaagagcagcggcagcaaa

SEQ ID NO: 398632 - RNA, 19 nt, Homo sapiens
  misc_RNA (1)...(19): siRNA sense strand
caaaggcacuaagaaguuc

SEQ ID NO: 398633 - RNA, 19 nt, Homo sapiens
  misc_RNA (1)...(19): siRNA sense strand
ucaaucaguucgaggagaa

SEQ ID NO: 398634 - RNA, 19 nt, Homo sapiens
  misc_RNA (1)...(19): siRNA sense strand
aagagacacugccuuccua

SEQ ID NO: 398635 - RNA, 19 nt, Homo sapiens
  misc_RNA (1)...(19): siRNA sense strand
gauccggucugccuugaag

SEQ ID NO: 398636 - RNA, 19 nt, Homo sapiens
  misc_RNA (1)...(19): siRNA sense strand
cggagaaggugucaaagca

SEQ ID NO: 398637 - RNA, 19 nt, Homo sapiens
  misc_RNA (1)...(19): siRNA sense strand
agaaaucccuccacuccau

SEQ ID NO: 398638 - RNA, 19 nt, Homo sapiens
  misc_RNA (1)...(19): siRNA sense strand
caagggcuaucagcuucua

SEQ ID NO: 398639 - RNA, 19 nt, Homo sapiens
  misc_RNA (1)...(19): siRNA sense strand
gacgaggccuuucccaucu

SEQ ID NO: 398640 - RNA, 19 nt, Homo sapiens
  misc_RNA (1)...(19): siRNA sense strand
gcagcaaaggcacuaagaa

SEQ ID NO: 398641 - RNA, 19 nt, Homo sapiens
  misc_RNA (1)...(19): siRNA sense strand
ccaaugugguggacugcuu

SEQ ID NO: 398642 - RNA, 19 nt, Homo sapiens
  misc_RNA (1)...(19): siRNA sense strand
gaaaucccuccacuccauu

SEQ ID NO: 398643 - RNA, 19 nt, Homo sapiens
  misc_RNA (1)...(19): siRNA sense strand
ggacccugcugaggaccua

SEQ ID NO: 398644 - RNA, 19 nt, Homo sapiens
  misc_RNA (1)...(19): siRNA sense strand
cagacgaucuaaccguaug

SEQ ID NO: 398645 - RNA, 19 nt, Homo sapiens
  misc_RNA (1)...(19): siRNA sense strand
ccaagccuuucaaucaguu

SEQ ID NO: 398646 - RNA, 19 nt, Homo sapiens
  misc_RNA (1)...(19): siRNA sense strand
ccacggaggagcaggagaa

SEQ ID NO: 398647 - RNA, 19 nt, Homo sapiens
  misc_RNA (1)...(19): siRNA sense strand
ggagaaggugucaaagcaa

SEQ ID NO: 398648 - RNA, 19 nt, Homo sapiens
  misc_RNA (1)...(19): siRNA sense strand
gcgagaacgucugcuacga

SEQ ID NO: 398649 - RNA, 19 nt, Homo sapiens
  misc_RNA (1)...(19): siRNA sense strand
ggaccuacaucugccacau

SEQ ID NO: 398650 - RNA, 19 nt, Homo sapiens
  misc_RNA (1)...(19): siRNA sense strand
cagcaaaggcacuaagaag

SEQ ID NO: 398651 - RNA, 19 nt, Homo sapiens
  misc_RNA (1)...(19): siRNA sense strand
cugccaagccuuucaauca

SEQ ID NO: 398652 - RNA, 19 nt, Homo sapiens
  misc_RNA (1)...(19): siRNA sense strand
gccaagccuuucaaucagu

SEQ ID NO: 398653 - RNA, 19 nt, Homo sapiens
  misc_RNA (1)...(19): siRNA sense strand
gggauccggucugccuuga

SEQ ID NO: 398654 - RNA, 19 nt, Homo sapiens
  misc_RNA (1)...(19): siRNA sense strand
gaccagggcagcgucaaga

SEQ ID NO: 398655 - RNA, 19 nt, Homo sapiens
  misc_RNA (1)...(19): siRNA sense strand
gagcugacaacagaugaug

SEQ ID NO: 398656 - RNA, 19 nt, Homo sapiens
  misc_RNA (1)...(19): siRNA sense strand
ggagaaaaccaucuucauc

SEQ ID NO: 398657 - RNA, 19 nt, Homo sapiens
  misc_RNA (1)...(19): siRNA sense strand
cuacaucugccacaucauc

SEQ ID NO: 398658 - RNA, 19 nt, Homo sapiens
  misc_RNA (1)...(19): siRNA sense strand
gaagaagagaaaaucguuu

SEQ ID NO: 398659 - RNA, 19 nt, Homo sapiens
  misc_RNA (1)...(19): siRNA sense strand
cagggcagcgucaagaaga

SEQ ID NO: 398660 - RNA, 19 nt, Homo sapiens
  misc_RNA (1)...(19): siRNA sense strand
ccagagcugacaacagaug

SEQ ID NO: 398661 - RNA, 19 nt, Homo sapiens
  misc_RNA (1)...(19): siRNA sense strand
gcugcgagaacgucugcua

SEQ ID NO: 398662 - RNA, 19 nt, Homo sapiens
  misc_RNA (1)...(19): siRNA sense strand
agucggagaaggugucaaa

SEQ ID NO: 398663 - RNA, 19 nt, Homo sapiens
  misc_RNA (1)...(19): siRNA sense strand
gggcuaucagcuucuagaa

SEQ ID NO: 398664 - RNA, 19 nt, Homo sapiens
  misc_RNA (1)...(19): siRNA sense strand
cggaggagcaggagaaggu

SEQ ID NO: 398665 - RNA, 19 nt, Homo sapiens
  misc_RNA (1)...(19): siRNA sense strand
uuucccaucucccacauuc

SEQ ID NO: 398666 - RNA, 19 nt, Homo sapiens
  misc_RNA (1)...(19): siRNA sense strand
ugaccgagguugggauggu

SEQ ID NO: 398667 - RNA, 19 nt, Homo sapiens
  misc_RNA (1)...(19): siRNA sense strand
ggcagcaaaggcacuaaga

SEQ ID NO: 398668 - RNA, 19 nt, Homo sapiens
  misc_RNA (1)...(19): siRNA sense strand
gcacagccaugaaguauaa

SEQ ID NO: 398669 - RNA, 19 nt, Homo sapiens
  misc_RNA (1)...(19): siRNA sense strand
gagaaagucuucaaagugu

SEQ ID NO: 398670 - RNA, 19 nt, Homo sapiens
  misc_RNA (1)...(19): siRNA sense strand
caaugaagcuucuuacaug

SEQ ID NO: 398671 - RNA, 19 nt, Homo sapiens
  misc_RNA (1)...(19): siRNA sense strand
caaaggaacuggaagacuu

SEQ ID NO: 398672 - RNA, 19 nt, Homo sapiens
  misc_RNA (1)...(19): siRNA sense strand
gagagaaacauuaugguua

SEQ ID NO: 398673 - RNA, 19 nt, Homo sapiens
  misc_RNA (1)...(19): siRNA sense strand
cccaagaacuauacugaua

SEQ ID NO: 398674 - RNA, 19 nt, Homo sapiens
  misc_RNA (1)...(19): siRNA sense strand
gagaagcaguugaccaaau

SEQ ID NO: 398675 - RNA, 19 nt, Homo sapiens
  misc_RNA (1)...(19): siRNA sense strand
gcaaagcccuaugaaggaa

SEQ ID NO: 398676 - RNA, 19 nt, Homo sapiens
  misc_RNA (1)...(19): siRNA sense strand
uggcuucucugaugacaua

SEQ ID NO: 398677 - RNA, 19 nt, Homo sapiens
  misc_RNA (1)...(19): siRNA sense strand
ugaaagggauucuaacuac

SEQ ID NO: 398678 - RNA, 19 nt, Homo sapiens
  misc_RNA (1)...(19): siRNA sense strand
ccagaucucuacuugaaug

SEQ ID NO: 398679 - RNA, 19 nt, Homo sapiens
  misc_RNA (1)...(19): siRNA sense strand
gcaagggagguauccguua

SEQ ID NO: 398680 - RNA, 19 nt, Homo sapiens
  misc_RNA (1)...(19): siRNA sense strand
ggagagaaacauuaugguu

SEQ ID NO: 398681 - RNA, 19 nt, Homo sapiens
  misc_RNA (1)...(19): siRNA sense strand
gaggagugacaguaucuua

SEQ ID NO: 398682 - RNA, 19 nt, Homo sapiens
  misc_RNA (1)...(19): siRNA sense strand
ggacgcaucucugcuacug

SEQ ID NO: 398683 - RNA, 19 nt, Homo sapiens
  misc_RNA (1)...(19): siRNA sense strand
gaguguagaugaaguaaaa

SEQ ID NO: 398684 - RNA, 19 nt, Homo sapiens
  misc_RNA (1)...(19): siRNA sense strand
ggaggccgacugugacaua

SEQ ID NO: 398685 - RNA, 19 nt, Homo sapiens
  misc_RNA (1)...(19): siRNA sense strand
guucagggauuugguaaug

SEQ ID NO: 398686 - RNA, 19 nt, Homo sapiens
  misc_RNA (1)...(19): siRNA sense strand
ccaagaacuauacugauaa

SEQ ID NO: 398687 - RNA, 19 nt, Homo sapiens
  misc_RNA (1)...(19): siRNA sense strand
gcacuaugauauuaaugca

SEQ ID NO: 398688 - RNA, 19 nt, Homo sapiens
  misc_RNA (1)...(19): siRNA sense strand
uuacagcacugaugugagu

SEQ ID NO: 398689 - RNA, 19 nt, Homo sapiens
  misc_RNA (1)...(19): siRNA sense strand
caacgcacccagagucaaa

SEQ ID NO: 398690 - RNA, 19 nt, Homo sapiens
  misc_RNA (1)...(19): siRNA sense strand
cagaugguauugacccaaa

SEQ ID NO: 398691 - RNA, 19 nt, Homo sapiens
  misc_RNA (1)...(19): siRNA sense strand
caagaucauugcugaaggu

SEQ ID NO: 398692 - RNA, 19 nt, Homo sapiens
  misc_RNA (1)...(19): siRNA sense strand
ggauaucgggugcaucuga

SEQ ID NO: 398693 - RNA, 19 nt, Homo sapiens
  misc_RNA (1)...(19): siRNA sense strand
caaggagguucaccaugga

SEQ ID NO: 398694 - RNA, 19 nt, Homo sapiens
  misc_RNA (1)...(19): siRNA sense strand
uaagaucaaucccaagaac

SEQ ID NO: 398695 - RNA, 19 nt, Homo sapiens
  misc_RNA (1)...(19): siRNA sense strand
ugagaaagucuucaaagug

SEQ ID NO: 398696 - RNA, 19 nt, Homo sapiens
  misc_RNA (1)...(19): siRNA sense strand
uaaaucaugucagcuaugg

SEQ ID NO: 398697 - RNA, 19 nt, Homo sapiens
  misc_RNA (1)...(19): siRNA sense strand
gcaaccaugugcugagucu

SEQ ID NO: 398698 - RNA, 19 nt, Homo sapiens
  misc_RNA (1)...(19): siRNA sense strand
caagggagguauccguuac

SEQ ID NO: 398699 - RNA, 19 nt, Homo sapiens
  misc_RNA (1)...(19): siRNA sense strand
uuccagaucucuacuugaa

SEQ ID NO: 398700 - RNA, 19 nt, Homo sapiens
  misc_RNA (1)...(19): siRNA sense strand
agaagcaguugaccaaauc

SEQ ID NO: 398701 - RNA, 19 nt, Homo sapiens
  misc_RNA (1)...(19): siRNA sense strand
acaccaggguuuggagaua

SEQ ID NO: 398702 - RNA, 19 nt, Homo sapiens
  misc_RNA (1)...(19): siRNA sense strand
ggaaugacaccaggguuug

SEQ ID NO: 398703 - RNA, 19 nt, Homo sapiens
  misc_RNA (1)...(19): siRNA sense strand
cuggaucgcugauaccuau

SEQ ID NO: 398704 - RNA, 19 nt, Homo sapiens
  misc_RNA (1)...(19): siRNA sense strand
gaaagcaugguggaacuau

SEQ ID NO: 398705 - RNA, 19 nt, Homo sapiens
  misc_RNA (1)...(19): siRNA sense strand
gcugaagaaucuaaaucau

SEQ ID NO: 398706 - RNA, 19 nt, Homo sapiens
  misc_RNA (1)...(19): siRNA sense strand
uccagaagcugacaagauc

SEQ ID NO: 398707 - RNA, 19 nt, Homo sapiens
  misc_RNA (1)...(19): siRNA sense strand
ggccuacacucuaugagau

SEQ ID NO: 398708 - RNA, 19 nt, Homo sapiens
  misc_RNA (1)...(19): siRNA sense strand
caccaggguuuggagauaa

SEQ ID NO: 398709 - RNA, 19 nt, Homo sapiens
  misc_RNA (1)...(19): siRNA sense strand
auacaagugugcagugguu

SEQ ID NO: 398710 - RNA, 19 nt, Homo sapiens
  misc_RNA (1)...(19): siRNA sense strand
agaaagucuucaaagugua

SEQ ID NO: 398711 - RNA, 19 nt, Homo sapiens
  misc_RNA (1)...(19): siRNA sense strand
uaaagcugguguuaagauc

SEQ ID NO: 398712 - RNA, 19 nt, Homo sapiens
  misc_RNA (1)...(19): siRNA sense strand
aaugaagcuucuuacauga

SEQ ID NO: 398713 - RNA, 19 nt, Homo sapiens
  misc_RNA (1)...(19): siRNA sense strand
ggcaaagcccuaugaagga

SEQ ID NO: 398714 - RNA, 19 nt, Homo sapiens
  misc_RNA (1)...(19): siRNA sense strand
guuaagaucaaucccaaga

SEQ ID NO: 398715 - RNA, 19 nt, Homo sapiens
  misc_RNA (1)...(19): siRNA sense strand
gaaacauuaugguuauucc

SEQ ID NO: 398716 - RNA, 19 nt, Homo sapiens
  misc_RNA (1)...(19): siRNA sense strand
gccaacaacuccagaagcu

SEQ ID NO: 398717 - RNA, 19 nt, Homo sapiens
  misc_RNA (1)...(19): siRNA sense strand
gaauccagaugguauugac

SEQ ID NO: 398718 - RNA, 19 nt, Homo sapiens
  misc_RNA (1)...(19): siRNA sense strand
ccaaggcaaagcccuauga

SEQ ID NO: 398719 - RNA, 19 nt, Homo sapiens
  misc_RNA (1)...(19): siRNA sense strand
gacuucaaauugcaacaug

SEQ ID NO: 398720 - RNA, 19 nt, Homo sapiens
  misc_RNA (1)...(19): siRNA sense strand
ucaaugaagcuucuuacau

SEQ ID NO: 398721 - RNA, 19 nt, Homo sapiens
  misc_RNA (1)...(19): siRNA sense strand
gcgcacagccaugaaguau

SEQ ID NO: 398722 - RNA, 19 nt, Homo sapiens
  misc_RNA (1)...(19): siRNA sense strand
gugagaagcaguugaccaa

SEQ ID NO: 398723 - RNA, 19 nt, Homo sapiens
  misc_RNA (1)...(19): siRNA sense strand
ucagggauuugguaaugug

SEQ ID NO: 398724 - RNA, 19 nt, Homo sapiens
  misc_RNA (1)...(19): siRNA sense strand
uugaguggcugaagaaucu

SEQ ID NO: 398725 - RNA, 19 nt, Homo sapiens
  misc_RNA (1)...(19): siRNA sense strand
gaaagucuucaaaguguac

SEQ ID NO: 398726 - RNA, 19 nt, Homo sapiens
  misc_RNA (1)...(19): siRNA sense strand
ugaugugaguguagaugaa

SEQ ID NO: 398727 - RNA, 19 nt, Homo sapiens
  misc_RNA (1)...(19): siRNA sense strand
ugaaguauaaccugggauu

SEQ ID NO: 398728 - RNA, 19 nt, Homo sapiens
  misc_RNA (1)...(19): siRNA sense strand
ugucagcuauggccguuug

SEQ ID NO: 398729 - RNA, 19 nt, Homo sapiens
  misc_RNA (1)...(19): siRNA sense strand
ucuucaaaguguacaauga

SEQ ID NO: 398730 - RNA, 19 nt, Homo sapiens
  misc_RNA (1)...(19): siRNA sense strand
gaaguauaaccugggauug

SEQ ID NO: 398731 - RNA, 19 nt, Homo sapiens
  misc_RNA (1)...(19): siRNA sense strand
aaagcaugguggaacuauu

SEQ ID NO: 398732 - RNA, 19 nt, Homo sapiens
  misc_RNA (1)...(19): siRNA sense strand
gaucaaucccaagaacuau

SEQ ID NO: 398733 - RNA, 19 nt, Homo sapiens
  misc_RNA (1)...(19): siRNA sense strand
gcuuuggcuucucugauga

SEQ ID NO: 398734 - RNA, 19 nt, Homo sapiens
  misc_RNA (1)...(19): siRNA sense strand
ugcuaaagcugguguuaag

SEQ ID NO: 398735 - RNA, 19 nt, Homo sapiens
  misc_RNA (1)...(19): siRNA sense strand
ugagaacagcugccuaugu

SEQ ID NO: 398736 - RNA, 19 nt, Homo sapiens
  misc_RNA (1)...(19): siRNA sense strand
ucuaaaucaugucagcuau

SEQ ID NO: 398737 - RNA, 19 nt, Homo sapiens
  misc_RNA (1)...(19): siRNA sense strand
uauuccagaucucuacuug

SEQ ID NO: 398738 - RNA, 19 nt, Homo sapiens
  misc_RNA (1)...(19): siRNA sense strand
agaucaaucccaagaacua

SEQ ID NO: 398739 - RNA, 19 nt, Homo sapiens
  misc_RNA (1)...(19): siRNA sense strand
aagcugguguuaagaucaa

SEQ ID NO: 398740 - RNA, 19 nt, Homo sapiens
  misc_RNA (1)...(19): siRNA sense strand
agucaaagccaagaucauu

SEQ ID NO: 398741 - RNA, 19 nt, Homo sapiens
  misc_RNA (1)...(19): siRNA sense strand
gggccuacacucuaugaga

SEQ ID NO: 398742 - RNA, 19 nt, Homo sapiens
  misc_RNA (1)...(19): siRNA sense strand
cauggacgcaucucugcua

SEQ ID NO: 398743 - RNA, 19 nt, Homo sapiens
  misc_RNA (1)...(19): siRNA sense strand
gaugggaguauauggaauc

SEQ ID NO: 398744 - RNA, 19 nt, Homo sapiens
  misc_RNA (1)...(19): siRNA sense strand
ggccgacugugacauacug

SEQ ID NO: 398745 - RNA, 19 nt, Homo sapiens
  misc_RNA (1)...(19): siRNA sense strand
ggaauccagaugguauuga

SEQ ID NO: 398746 - RNA, 19 nt, Homo sapiens
  misc_RNA (1)...(19): siRNA sense strand
aguauaaccugggauugga

SEQ ID NO: 398747 - RNA, 19 nt, Homo sapiens
  misc_RNA (1)...(19): siRNA sense strand
gaugguggagggcuucuuc

SEQ ID NO: 398748 - RNA, 19 nt, Homo sapiens
  misc_RNA (1)...(19): siRNA sense strand
gugcuaaagcugguguuaa

SEQ ID NO: 398749 - RNA, 19 nt, Homo sapiens
  misc_RNA (1)...(19): siRNA sense strand
caaggcaaagcccuaugaa

SEQ ID NO: 398750 - RNA, 19 nt, Homo sapiens
  misc_RNA (1)...(19): siRNA sense strand
uccaugggauugaaaauuu

SEQ ID NO: 398751 - RNA, 19 nt, Homo sapiens
  misc_RNA (1)...(19): siRNA sense strand
ggugcuaaagcugguguua

SEQ ID NO: 398752 - RNA, 19 nt, Homo sapiens
  misc_RNA (1)...(19): siRNA sense strand
cuaaagcugguguuaagau

SEQ ID NO: 398753 - RNA, 19 nt, Homo sapiens
  misc_RNA (1)...(19): siRNA sense strand
uaaauguauugcuguuggu

SEQ ID NO: 398754 - RNA, 19 nt, Homo sapiens
  misc_RNA (1)...(19): siRNA sense strand
ugagucugaugggaguaua

SEQ ID NO: 398755 - RNA, 19 nt, Homo sapiens
  misc_RNA (1)...(19): siRNA sense strand
gacaggauaucgggugcau

SEQ ID NO: 398756 - RNA, 19 nt, Homo sapiens
  misc_RNA (1)...(19): siRNA sense strand
uaacuaccacuugcucaug

SEQ ID NO: 398757 - RNA, 19 nt, Homo sapiens
  misc_RNA (1)...(19): siRNA sense strand
gcuauggccguuugaccuu

SEQ ID NO: 398758 - RNA, 19 nt, Homo sapiens
  misc_RNA (1)...(19): siRNA sense strand
ggcugaagaaucuaaauca

SEQ ID NO: 398759 - RNA, 19 nt, Homo sapiens
  misc_RNA (1)...(19): siRNA sense strand
gcuggaggagugacaguau

SEQ ID NO: 398760 - RNA, 19 nt, Homo sapiens
  misc_RNA (1)...(19): siRNA sense strand
caucaagcccugcaaccau

SEQ ID NO: 398761 - RNA, 19 nt, Homo sapiens
  misc_RNA (1)...(19): siRNA sense strand
cugaagaaucuaaaucaug

SEQ ID NO: 398762 - RNA, 19 nt, Homo sapiens
  misc_RNA (1)...(19): siRNA sense strand
gccuacacucuaugagaua

SEQ ID NO: 398763 - RNA, 19 nt, Homo sapiens
  misc_RNA (1)...(19): siRNA sense strand
ccugagaacagcugccuau

SEQ ID NO: 398764 - RNA, 19 nt, Homo sapiens
  misc_RNA (1)...(19): siRNA sense strand
ggauuggaccugagaacag

SEQ ID NO: 398765 - RNA, 19 nt, Homo sapiens
  misc_RNA (1)...(19): siRNA sense strand
caggauaucgggugcaucu

SEQ ID NO: 398766 - RNA, 19 nt, Homo sapiens
  misc_RNA (1)...(19): siRNA sense strand
cauuaugguuauuccagau

SEQ ID NO: 398767 - RNA, 19 nt, Homo sapiens
  misc_RNA (1)...(19): siRNA sense strand
ucaaauaugaaagggauuc

SEQ ID NO: 398768 - RNA, 19 nt, Homo sapiens
  misc_RNA (1)...(19): siRNA sense strand
gagaagacgugaaacagua

SEQ ID NO: 398769 - RNA, 19 nt, Homo sapiens
  misc_RNA (1)...(19): siRNA sense strand
caacgacucugccaaauac

SEQ ID NO: 398770 - RNA, 19 nt, Homo sapiens
  misc_RNA (1)...(19): siRNA sense strand
gaaacccacuucacauuca

SEQ ID NO: 398771 - RNA, 19 nt, Homo sapiens
  misc_RNA (1)...(19): siRNA sense strand
gcgagaagaucaagaaguc

SEQ ID NO: 398772 - RNA, 19 nt, Homo sapiens
  misc_RNA (1)...(19): siRNA sense strand
gcaagaaguggauccauug

SEQ ID NO: 398773 - RNA, 19 nt, Homo sapiens
  misc_RNA (1)...(19): siRNA sense strand
ccaaagacgugaaauuacu

SEQ ID NO: 398774 - RNA, 19 nt, Homo sapiens
  misc_RNA (1)...(19): siRNA sense strand
gagcaaggcgauugagaaa

SEQ ID NO: 398775 - RNA, 19 nt, Homo sapiens
  misc_RNA (1)...(19): siRNA sense strand
cgccaaagacgugaaauua

SEQ ID NO: 398776 - RNA, 19 nt, Homo sapiens
  misc_RNA (1)...(19): siRNA sense strand
ggacgucacggccaucauu

SEQ ID NO: 398777 - RNA, 19 nt, Homo sapiens
  misc_RNA (1)...(19): siRNA sense strand
gaucugaacgcaagaagug

SEQ ID NO: 398778 - RNA, 19 nt, Homo sapiens
  misc_RNA (1)...(19): siRNA sense strand
caaaaccacuggcaucgua

SEQ ID NO: 398779 - RNA, 19 nt, Homo sapiens
  misc_RNA (1)...(19): siRNA sense strand
ggagcaaggcgauugagaa

SEQ ID NO: 398780 - RNA, 19 nt, Homo sapiens
  misc_RNA (1)...(19): siRNA sense strand
caucgaauauggugauaag

SEQ ID NO: 398781 - RNA, 19 nt, Homo sapiens
  misc_RNA (1)...(19): siRNA sense strand
aacaaguucuucaucgaua

SEQ ID NO: 398782 - RNA, 19 nt, Homo sapiens
  misc_RNA (1)...(19): siRNA sense strand
cuacauccaagcacaauuu

SEQ ID NO: 398783 - RNA, 19 nt, Homo sapiens
  misc_RNA (1)...(19): siRNA sense strand
agaaguggauccauugcuu

SEQ ID NO: 398784 - RNA, 19 nt, Homo sapiens
  misc_RNA (1)...(19): siRNA sense strand
ucaacgacucugccaaaua

SEQ ID NO: 398785 - RNA, 19 nt, Homo sapiens
  misc_RNA (1)...(19): siRNA sense strand
ccacagacacgaauaacau

SEQ ID NO: 398786 - RNA, 19 nt, Homo sapiens
  misc_RNA (1)...(19): siRNA sense strand
ucaagaaccuccacuucag

SEQ ID NO: 398787 - RNA, 19 nt, Homo sapiens
  misc_RNA (1)...(19): siRNA sense strand
cgcaagaaguggauccauu

SEQ ID NO: 398788 - RNA, 19 nt, Homo sapiens
  misc_RNA (1)...(19): siRNA sense strand
ggagaagacgugaaacagu

SEQ ID NO: 398789 - RNA, 19 nt, Homo sapiens
  misc_RNA (1)...(19): siRNA sense strand
gaucaagaagucaccuuug

SEQ ID NO: 398790 - RNA, 19 nt, Homo sapiens
  misc_RNA (1)...(19): siRNA sense strand
gaaaggcugacgccaagau

SEQ ID NO: 398791 - RNA, 19 nt, Homo sapiens
  misc_RNA (1)...(19): siRNA sense strand
cauccaagcacaauuugaa

SEQ ID NO: 398792 - RNA, 19 nt, Homo sapiens
  misc_RNA (1)...(19): siRNA sense strand
gagcugcuuucugccauga

SEQ ID NO: 398793 - RNA, 19 nt, Homo sapiens
  misc_RNA (1)...(19): siRNA sense strand
uagaaacccacuucacauu

SEQ ID NO: 398794 - RNA, 19 nt, Homo sapiens
  misc_RNA (1)...(19): siRNA sense strand
uaacaacaaguucuucauc

SEQ ID NO: 398795 - RNA, 19 nt, Homo sapiens
  misc_RNA (1)...(19): siRNA sense strand
caacaaguucuucaucgau

SEQ ID NO: 398796 - RNA, 19 nt, Homo sapiens
  misc_RNA (1)...(19): siRNA sense strand
acgccaagaugguguguga

SEQ ID NO: 398797 - RNA, 19 nt, Homo sapiens
  misc_RNA (1)...(19): siRNA sense strand
gcucggggcuggagaauca

SEQ ID NO: 398798 - RNA, 19 nt, Homo sapiens
  misc_RNA (1)...(19): siRNA sense strand
gcaccauugugaagcagau

SEQ ID NO: 398799 - RNA, 19 nt, Homo sapiens
  misc_RNA (1)...(19): siRNA sense strand
ccaucugcuuuccugaaua

SEQ ID NO: 398800 - RNA, 19 nt, Homo sapiens
  misc_RNA (1)...(19): siRNA sense strand
guagaaacccacuucacau

SEQ ID NO: 398801 - RNA, 19 nt, Homo sapiens
  misc_RNA (1)...(19): siRNA sense strand
ggacagccuggaucggauu

SEQ ID NO: 398802 - RNA, 19 nt, Homo sapiens
  misc_RNA (1)...(19): siRNA sense strand
gcucuucgacuccaucugu

SEQ ID NO: 398803 - RNA, 19 nt, Homo sapiens
  misc_RNA (1)...(19): siRNA sense strand
gagcggagcaaggcgauug

SEQ ID NO: 398804 - RNA, 19 nt, Homo sapiens
  misc_RNA (1)...(19): siRNA sense strand
ccaagauggugugugaugu

SEQ ID NO: 398805 - RNA, 19 nt, Homo sapiens
  misc_RNA (1)...(19): siRNA sense strand
caucugcuuuccugaauac

SEQ ID NO: 398806 - RNA, 19 nt, Homo sapiens
  misc_RNA (1)...(19): siRNA sense strand
acaacaaguucuucaucga

SEQ ID NO: 398807 - RNA, 19 nt, Homo sapiens
  misc_RNA (1)...(19): siRNA sense strand
ccacuggcaucguagaaac

SEQ ID NO: 398808 - RNA, 19 nt, Homo sapiens
  misc_RNA (1)...(19): siRNA sense strand
caucgauaccuccaucauu

SEQ ID NO: 398809 - RNA, 19 nt, Homo sapiens
  misc_RNA (1)...(19): siRNA sense strand
aagcacaauuugaaagcaa

SEQ ID NO: 398810 - RNA, 19 nt, Homo sapiens
  misc_RNA (1)...(19): siRNA sense strand
gaccaucugcuuuccugaa

SEQ ID NO: 398811 - RNA, 19 nt, Homo sapiens
  misc_RNA (1)...(19): siRNA sense strand
acacuuugggcaucgaaua

SEQ ID NO: 398812 - RNA, 19 nt, Homo sapiens
  misc_RNA (1)...(19): siRNA sense strand
cguagaaacccacuucaca

SEQ ID NO: 398813 - RNA, 19 nt, Homo sapiens
  misc_RNA (1)...(19): siRNA sense strand
ucaccgacaucaucauugc

SEQ ID NO: 398814 - RNA, 19 nt, Homo sapiens
  misc_RNA (1)...(19): siRNA sense strand
gccaagauggugugugaug

SEQ ID NO: 398815 - RNA, 19 nt, Homo sapiens
  misc_RNA (1)...(19): siRNA sense strand
caucaucauugccaacaac

SEQ ID NO: 398816 - RNA, 19 nt, Homo sapiens
  misc_RNA (1)...(19): siRNA sense strand
aaaccgcucacccaacaaa

SEQ ID NO: 398817 - RNA, 19 nt, Homo sapiens
  misc_RNA (1)...(19): siRNA sense strand
aaacccacuucacauucaa

SEQ ID NO: 398818 - RNA, 19 nt, Homo sapiens
  misc_RNA (1)...(19): siRNA sense strand
gcugcuuucugccaugaug

SEQ ID NO: 398819 - RNA, 19 nt, Homo sapiens
  misc_RNA (1)...(19): siRNA sense strand
caagauggugugugaugug

SEQ ID NO: 398820 - RNA, 19 nt, Homo sapiens
  misc_RNA (1)...(19): siRNA sense strand
caagcacaauuugaaagca

SEQ ID NO: 398821 - RNA, 19 nt, Homo sapiens
  misc_RNA (1)...(19): siRNA sense strand
ggcaucgaauauggugaua

SEQ ID NO: 398822 - RNA, 19 nt, Homo sapiens
  misc_RNA (1)...(19): siRNA sense strand
gaauacacaggccccaaua

SEQ ID NO: 398823 - RNA, 19 nt, Homo sapiens
  misc_RNA (1)...(19): siRNA sense strand
gacuccaucuguaacaaca

SEQ ID NO: 398824 - RNA, 19 nt, Homo sapiens
  misc_RNA (1)...(19): siRNA sense strand
ucgaauauggugauaagga

SEQ ID NO: 398825 - RNA, 19 nt, Homo sapiens
  misc_RNA (1)...(19): siRNA sense strand
aaagcaccauugugaagca

SEQ ID NO: 398826 - RNA, 19 nt, Homo sapiens
  misc_RNA (1)...(19): siRNA sense strand
gggcugcggcuuguacuga

SEQ ID NO: 398827 - RNA, 19 nt, Homo sapiens
  misc_RNA (1)...(19): siRNA sense strand
agacgcagccgccuacauc

SEQ ID NO: 398828 - RNA, 19 nt, Homo sapiens
  misc_RNA (1)...(19): siRNA sense strand
aucgauaccuccaucauuc

SEQ ID NO: 398829 - RNA, 19 nt, Homo sapiens
  misc_RNA (1)...(19): siRNA sense strand
caucguagaaacccacuuc

SEQ ID NO: 398830 - RNA, 19 nt, Homo sapiens
  misc_RNA (1)...(19): siRNA sense strand
gccaaagacgugaaauuac

SEQ ID NO: 398831 - RNA, 19 nt, Homo sapiens
  misc_RNA (1)...(19): siRNA sense strand
gacgucacggccaucauuu

SEQ ID NO: 398832 - RNA, 19 nt, Homo sapiens
  misc_RNA (1)...(19): siRNA sense strand
agaaacccacuucacauuc

SEQ ID NO: 398833 - RNA, 19 nt, Homo sapiens
  misc_RNA (1)...(19): siRNA sense strand
gggcaucgaauauggugau

SEQ ID NO: 398834 - RNA, 19 nt, Homo sapiens
  misc_RNA (1)...(19): siRNA sense strand
ccacuucacauucaagaac

SEQ ID NO: 398835 - RNA, 19 nt, Homo sapiens
  misc_RNA (1)...(19): siRNA sense strand
gggcgacucaggaauccaa

SEQ ID NO: 398836 - RNA, 19 nt, Homo sapiens
  misc_RNA (1)...(19): siRNA sense strand
gugccacagacacgaauaa

SEQ ID NO: 398837 - RNA, 19 nt, Homo sapiens
  misc_RNA (1)...(19): siRNA sense strand
ccgcucacccaacaaagaa

SEQ ID NO: 398838 - RNA, 19 nt, Homo sapiens
  misc_RNA (1)...(19): siRNA sense strand
gugaagcagaugaagauca

SEQ ID NO: 398839 - RNA, 19 nt, Homo sapiens
  misc_RNA (1)...(19): siRNA sense strand
acucaacgacucugccaaa

SEQ ID NO: 398840 - RNA, 19 nt, Homo sapiens
  misc_RNA (1)...(19): siRNA sense strand
guaacaacaaguucuucau

SEQ ID NO: 398841 - RNA, 19 nt, Homo sapiens
  misc_RNA (1)...(19): siRNA sense strand
cacccaacaaagaaauaua

SEQ ID NO: 398842 - RNA, 19 nt, Homo sapiens
  misc_RNA (1)...(19): siRNA sense strand
ccgccaaagacgugaaauu

SEQ ID NO: 398843 - RNA, 19 nt, Homo sapiens
  misc_RNA (1)...(19): siRNA sense strand
cgucaccgacaucaucauu

SEQ ID NO: 398844 - RNA, 19 nt, Homo sapiens
  misc_RNA (1)...(19): siRNA sense strand
gcucacccaacaaagaaau

SEQ ID NO: 398845 - RNA, 19 nt, Homo sapiens
  misc_RNA (1)...(19): siRNA sense strand
gcaucgaauauggugauaa

SEQ ID NO: 398846 - RNA, 19 nt, Homo sapiens
  misc_RNA (1)...(19): siRNA sense strand
acgagucucucaugcucuu

SEQ ID NO: 398847 - RNA, 19 nt, Homo sapiens
  misc_RNA (1)...(19): siRNA sense strand
cugcuuuccugaauacaca

SEQ ID NO: 398848 - RNA, 19 nt, Homo sapiens
  misc_RNA (1)...(19): siRNA sense strand
ccgacuaccagcccacuga

SEQ ID NO: 398849 - RNA, 19 nt, Homo sapiens
  misc_RNA (1)...(19): siRNA sense strand
ccaggcagcugcagacuug

SEQ ID NO: 398850 - RNA, 19 nt, Homo sapiens
  misc_RNA (1)...(19): siRNA sense strand
gcagaaugcucaacaugac

SEQ ID NO: 398851 - RNA, 19 nt, Homo sapiens
  misc_RNA (1)...(19): siRNA sense strand
gaagaaagugguucaacag

SEQ ID NO: 398852 - RNA, 19 nt, Homo sapiens
  misc_RNA (1)...(19): siRNA sense strand
ggaguaucuucaaguacaa

SEQ ID NO: 398853 - RNA, 19 nt, Homo sapiens
  misc_RNA (1)...(19): siRNA sense strand
uggaguaucuucaaguaca

SEQ ID NO: 398854 - RNA, 19 nt, Homo sapiens
  misc_RNA (1)...(19): siRNA sense strand
acuggaguaucuucaagua

SEQ ID NO: 398855 - RNA, 19 nt, Homo sapiens
  misc_RNA (1)...(19): siRNA sense strand
cugcagacuugaaacaguu

SEQ ID NO: 398856 - RNA, 19 nt, Homo sapiens
  misc_RNA (1)...(19): siRNA sense strand
gcugcagacuugaaacagu

SEQ ID NO: 398857 - RNA, 19 nt, Homo sapiens
  misc_RNA (1)...(19): siRNA sense strand
ugacuggaguaucuucaag

SEQ ID NO: 398858 - RNA, 19 nt, Homo sapiens
  misc_RNA (1)...(19): siRNA sense strand
aaguacaaaucccuucaga

SEQ ID NO: 398859 - RNA, 19 nt, Homo sapiens
  misc_RNA (1)...(19): siRNA sense strand
cgucgccgcuaugaagaaa

SEQ ID NO: 398860 - RNA, 19 nt, Homo sapiens
  misc_RNA (1)...(19): siRNA sense strand
ugcagaaugcucaacauga

SEQ ID NO: 398861 - RNA, 19 nt, Homo sapiens
  misc_RNA (1)...(19): siRNA sense strand
caaauguugugaagaagua

SEQ ID NO: 398862 - RNA, 19 nt, Homo sapiens
  misc_RNA (1)...(19): siRNA sense strand
caaaggaggcugugugauu

SEQ ID NO: 398863 - RNA, 19 nt, Homo sapiens
  misc_RNA (1)...(19): siRNA sense strand
gugaagaaguaagagauua

SEQ ID NO: 398864 - RNA, 19 nt, Homo sapiens
  misc_RNA (1)...(19): siRNA sense strand
aaaggaggcugugugauuu

SEQ ID NO: 398865 - RNA, 19 nt, Homo sapiens
  misc_RNA (1)...(19): siRNA sense strand
gaggcugugugauuucaua

SEQ ID NO: 398866 - RNA, 19 nt, Homo sapiens
  misc_RNA (1)...(19): siRNA sense strand
aaagaaugcuaguuuccaa

SEQ ID NO: 398867 - RNA, 19 nt, Homo sapiens
  misc_RNA (1)...(19): siRNA sense strand
gaaugcuaguuuccaaaug

SEQ ID NO: 398868 - RNA, 19 nt, Homo sapiens
  misc_RNA (1)...(19): siRNA sense strand
uggcgaggauccacuggua

SEQ ID NO: 398869 - RNA, 19 nt, Homo sapiens
  misc_RNA (1)...(19): siRNA sense strand
aauugaagauggaaguuga

SEQ ID NO: 398870 - RNA, 19 nt, Homo sapiens
  misc_RNA (1)...(19): siRNA sense strand
uuccaaauguugugaagaa

SEQ ID NO: 398871 - RNA, 19 nt, Homo sapiens
  misc_RNA (1)...(19): siRNA sense strand
gcgaggauccacugguaaa

SEQ ID NO: 398872 - RNA, 19 nt, Homo sapiens
  misc_RNA (1)...(19): siRNA sense strand
agaacgaucuggcgaggau

SEQ ID NO: 398873 - RNA, 19 nt, Homo sapiens
  misc_RNA (1)...(19): siRNA sense strand
gaaaaggacaaauugaaga

SEQ ID NO: 398874 - RNA, 19 nt, Homo sapiens
  misc_RNA (1)...(19): siRNA sense strand
uaagagauuacguugaaga

SEQ ID NO: 398875 - RNA, 19 nt, Homo sapiens
  misc_RNA (1)...(19): siRNA sense strand
cuggaaagaaugcuaguuu

SEQ ID NO: 398876 - RNA, 19 nt, Homo sapiens
  misc_RNA (1)...(19): siRNA sense strand
aaugcuaguuuccaaaugu

SEQ ID NO: 398877 - RNA, 19 nt, Homo sapiens
  misc_RNA (1)...(19): siRNA sense strand
ggacaaauugaagauggaa

SEQ ID NO: 398878 - RNA, 19 nt, Homo sapiens
  misc_RNA (1)...(19): siRNA sense strand
gggcaucccagaggacaaa

SEQ ID NO: 398879 - RNA, 19 nt, Homo sapiens
  misc_RNA (1)...(19): siRNA sense strand
ugacagaaaaggacaaauu

SEQ ID NO: 398880 - RNA, 19 nt, Homo sapiens
  misc_RNA (1)...(19): siRNA sense strand
caaauugaagauggaaguu

SEQ ID NO: 398881 - RNA, 19 nt, Homo sapiens
  misc_RNA (1)...(19): siRNA sense strand
gcucaagaaagaagugaca

SEQ ID NO: 398882 - RNA, 19 nt, Homo sapiens
  misc_RNA (1)...(19): siRNA sense strand
cagaaaaggacaaauugaa

SEQ ID NO: 398883 - RNA, 19 nt, Homo sapiens
  misc_RNA (1)...(19): siRNA sense strand
ccaaauguugugaagaagu

SEQ ID NO: 398884 - RNA, 19 nt, Homo sapiens
  misc_RNA (1)...(19): siRNA sense strand
gacagaaaaggacaaauug

SEQ ID NO: 398885 - RNA, 19 nt, Homo sapiens
  misc_RNA (1)...(19): siRNA sense strand
gaccagcucaagaaagaag

SEQ ID NO: 398886 - RNA, 19 nt, Homo sapiens
  misc_RNA (1)...(19): siRNA sense strand
agaaugcuaguuuccaaau

SEQ ID NO: 398887 - RNA, 19 nt, Homo sapiens
  misc_RNA (1)...(19): siRNA sense strand
uugaggaccugacagaaaa

SEQ ID NO: 398888 - RNA, 19 nt, Homo sapiens
  misc_RNA (1)...(19): siRNA sense strand
caagagagaugcugaaacu

SEQ ID NO: 398889 - RNA, 19 nt, Homo sapiens
  misc_RNA (1)...(19): siRNA sense strand
gaaaucgcaugccgucuca

SEQ ID NO: 398890 - RNA, 19 nt, Homo sapiens
  misc_RNA (1)...(19): siRNA sense strand
gggaaccacuggccauuug

SEQ ID NO: 398891 - RNA, 19 nt, Homo sapiens
  misc_RNA (1)...(19): siRNA sense strand
ccuucuaccuucuggauuu

SEQ ID NO: 398892 - RNA, 19 nt, Homo sapiens
  misc_RNA (1)...(19): siRNA sense strand
ucaccacggucaccugcua

SEQ ID NO: 398893 - RNA, 19 nt, Homo sapiens
  misc_RNA (1)...(19): siRNA sense strand
aagcaugaauggccuugaa

SEQ ID NO: 398894 - RNA, 19 nt, Homo sapiens
  misc_RNA (1)...(19): siRNA sense strand
ccauagugcuggccaucuu

SEQ ID NO: 398895 - RNA, 19 nt, Homo sapiens
  misc_RNA (1)...(19): siRNA sense strand
ucuucuaccucaacaugua

SEQ ID NO: 398896 - RNA, 19 nt, Homo sapiens
  misc_RNA (1)...(19): siRNA sense strand
caucagcgccgaccguuuc

SEQ ID NO: 398897 - RNA, 19 nt, Homo sapiens
  misc_RNA (1)...(19): siRNA sense strand
agaagcgccucaagaccaa

SEQ ID NO: 398898 - RNA, 19 nt, Homo sapiens
  misc_RNA (1)...(19): siRNA sense strand
agacgccacuggagaacau

SEQ ID NO: 398899 - RNA, 19 nt, Homo sapiens
  misc_RNA (1)...(19): siRNA sense strand
ucaccggcuuccucuucua

SEQ ID NO: 398900 - RNA, 19 nt, Homo sapiens
  misc_RNA (1)...(19): siRNA sense strand
ggcaauacccuggcucugu

SEQ ID NO: 398901 - RNA, 19 nt, Homo sapiens
  misc_RNA (1)...(19): siRNA sense strand
gcuguucgccuccuucuac

SEQ ID NO: 398902 - RNA, 19 nt, Homo sapiens
  misc_RNA (1)...(19): siRNA sense strand
guggagaagcgccucaaga

SEQ ID NO: 398903 - RNA, 19 nt, Homo sapiens
  misc_RNA (1)...(19): siRNA sense strand
ggucugaucaccaacuucu

SEQ ID NO: 398904 - RNA, 19 nt, Homo sapiens
  misc_RNA (1)...(19): siRNA sense strand
gcgcaugaucgccauagug

SEQ ID NO: 398905 - RNA, 19 nt, Homo sapiens
  misc_RNA (1)...(19): siRNA sense strand
gcaugaauggccuugaagu

SEQ ID NO: 398906 - RNA, 19 nt, Homo sapiens
  misc_RNA (1)...(19): siRNA sense strand
ccaaggcagugcgcaugau

SEQ ID NO: 398907 - RNA, 19 nt, Homo sapiens
  misc_RNA (1)...(19): siRNA sense strand
caugaauggccuugaagug

SEQ ID NO: 398908 - RNA, 19 nt, Homo sapiens
  misc_RNA (1)...(19): siRNA sense strand
cacagaccgugcagaccaa

SEQ ID NO: 398909 - RNA, 19 nt, Homo sapiens
  misc_RNA (1)...(19): siRNA sense strand
caggucugaucaccaacuu

SEQ ID NO: 398910 - RNA, 19 nt, Homo sapiens
  misc_RNA (1)...(19): siRNA sense strand
gcaucagcgccgaccguuu

SEQ ID NO: 398911 - RNA, 19 nt, Homo sapiens
  misc_RNA (1)...(19): siRNA sense strand
gccuucaccuucccguuca

SEQ ID NO: 398912 - RNA, 19 nt, Homo sapiens
  misc_RNA (1)...(19): siRNA sense strand
ccugcuaccugcugaucau

SEQ ID NO: 398913 - RNA, 19 nt, Homo sapiens
  misc_RNA (1)...(19): siRNA sense strand
gccacgcccugugcaacuu

SEQ ID NO: 398914 - RNA, 19 nt, Homo sapiens
  misc_RNA (1)...(19): siRNA sense strand
gaugauuccuucaaguaua

SEQ ID NO: 398915 - RNA, 19 nt, Homo sapiens
  misc_RNA (1)...(19): siRNA sense strand
ggaaagauuugcaaagauc

SEQ ID NO: 398916 - RNA, 19 nt, Homo sapiens
  misc_RNA (1)...(19): siRNA sense strand
gcaaugcuacugccaauaa

SEQ ID NO: 398917 - RNA, 19 nt, Homo sapiens
  misc_RNA (1)...(19): siRNA sense strand
ggaagugagugaucaaaca

SEQ ID NO: 398918 - RNA, 19 nt, Homo sapiens
  misc_RNA (1)...(19): siRNA sense strand
gaauggagucccuguuuaa

SEQ ID NO: 398919 - RNA, 19 nt, Homo sapiens
  misc_RNA (1)...(19): siRNA sense strand
gaacugcauuccuuaccaa

SEQ ID NO: 398920 - RNA, 19 nt, Homo sapiens
  misc_RNA (1)...(19): siRNA sense strand
cuacaacucuguccucuuc

SEQ ID NO: 398921 - RNA, 19 nt, Homo sapiens
  misc_RNA (1)...(19): siRNA sense strand
agaauggagucccuguuua

SEQ ID NO: 398922 - RNA, 19 nt, Homo sapiens
  misc_RNA (1)...(19): siRNA sense strand
gaagugagacugcuauuuu

SEQ ID NO: 398923 - RNA, 19 nt, Homo sapiens
  misc_RNA (1)...(19): siRNA sense strand
gcuacucugucucaaauug

SEQ ID NO: 398924 - RNA, 19 nt, Homo sapiens
  misc_RNA (1)...(19): siRNA sense strand
ccacuaaugucaacaaugc

SEQ ID NO: 398925 - RNA, 19 nt, Homo sapiens
  misc_RNA (1)...(19): siRNA sense strand
gacagaagauucauugacu

SEQ ID NO: 398926 - RNA, 19 nt, Homo sapiens
  misc_RNA (1)...(19): siRNA sense strand
gaaacaccuuugaccacaa

SEQ ID NO: 398927 - RNA, 19 nt, Homo sapiens
  misc_RNA (1)...(19): siRNA sense strand
gaaugucucuugcucuucu

SEQ ID NO: 398928 - RNA, 19 nt, Homo sapiens
  misc_RNA (1)...(19): siRNA sense strand
guauuaguguggaucguuu

SEQ ID NO: 398929 - RNA, 19 nt, Homo sapiens
  misc_RNA (1)...(19): siRNA sense strand
gaggaauucugccauugug

SEQ ID NO: 398930 - RNA, 19 nt, Homo sapiens
  misc_RNA (1)...(19): siRNA sense strand
caaucuagcugucucugau

SEQ ID NO: 398931 - RNA, 19 nt, Homo sapiens
  misc_RNA (1)...(19): siRNA sense strand
guauucaucuugggucuga

SEQ ID NO: 398932 - RNA, 19 nt, Homo sapiens
  misc_RNA (1)...(19): siRNA sense strand
gaagugagugaucaaacaa

SEQ ID NO: 398933 - RNA, 19 nt, Homo sapiens
  misc_RNA (1)...(19): siRNA sense strand
auacuugcauuguugauga

SEQ ID NO: 398934 - RNA, 19 nt, Homo sapiens
  misc_RNA (1)...(19): siRNA sense strand
cagaauggagucccuguuu

SEQ ID NO: 398935 - RNA, 19 nt, Homo sapiens
  misc_RNA (1)...(19): siRNA sense strand
guuguuggguuuaucauuc

SEQ ID NO: 398936 - RNA, 19 nt, Homo sapiens
  misc_RNA (1)...(19): siRNA sense strand
ggguuuaucauuccucuaa

SEQ ID NO: 398937 - RNA, 19 nt, Homo sapiens
  misc_RNA (1)...(19): siRNA sense strand
caaauaaugguggugaauu

SEQ ID NO: 398938 - RNA, 19 nt, Homo sapiens
  misc_RNA (1)...(19): siRNA sense strand
caaagaucauguacccaau

SEQ ID NO: 398939 - RNA, 19 nt, Homo sapiens
  misc_RNA (1)...(19): siRNA sense strand
uauugaaguuguuggguuu

SEQ ID NO: 398940 - RNA, 19 nt, Homo sapiens
  misc_RNA (1)...(19): siRNA sense strand
gaaguuguuggguuuauca

SEQ ID NO: 398941 - RNA, 19 nt, Homo sapiens
  misc_RNA (1)...(19): siRNA sense strand
cuacaucaaugcccacauc

SEQ ID NO: 398942 - RNA, 19 nt, Homo sapiens
  misc_RNA (1)...(19): siRNA sense strand
ccucuaauauugaaugucu

SEQ ID NO: 398943 - RNA, 19 nt, Homo sapiens
  misc_RNA (1)...(19): siRNA sense strand
ggugacagaagauucauug

SEQ ID NO: 398944 - RNA, 19 nt, Homo sapiens
  misc_RNA (1)...(19): siRNA sense strand
caucaaugcccacaucaga

SEQ ID NO: 398945 - RNA, 19 nt, Homo sapiens
  misc_RNA (1)...(19): siRNA sense strand
uauuucagccucuuuguuu

SEQ ID NO: 398946 - RNA, 19 nt, Homo sapiens
  misc_RNA (1)...(19): siRNA sense strand
uaggaggaauucugccauu

SEQ ID NO: 398947 - RNA, 19 nt, Homo sapiens
  misc_RNA (1)...(19): siRNA sense strand
ggaggaauucugccauugu

SEQ ID NO: 398948 - RNA, 19 nt, Homo sapiens
  misc_RNA (1)...(19): siRNA sense strand
uuggaaagauuugcaaaga

SEQ ID NO: 398949 - RNA, 19 nt, Homo sapiens
  misc_RNA (1)...(19): siRNA sense strand
gcucccaagcuauuacuaa

SEQ ID NO: 398950 - RNA, 19 nt, Homo sapiens
  misc_RNA (1)...(19): siRNA sense strand
guacauauggcagucuuug

SEQ ID NO: 398951 - RNA, 19 nt, Homo sapiens
  misc_RNA (1)...(19): siRNA sense strand
gugaauuaaugcuagaauc

SEQ ID NO: 398952 - RNA, 19 nt, Homo sapiens
  misc_RNA (1)...(19): siRNA sense strand
ugagugaucaaacaacaaa

SEQ ID NO: 398953 - RNA, 19 nt, Homo sapiens
  misc_RNA (1)...(19): siRNA sense strand
gaaagauuugcaaagauca

SEQ ID NO: 398954 - RNA, 19 nt, Homo sapiens
  misc_RNA (1)...(19): siRNA sense strand
ucuauuacuucacccuuga

SEQ ID NO: 398955 - RNA, 19 nt, Homo sapiens
  misc_RNA (1)...(19): siRNA sense strand
gcaaccaccaccugcuuug

SEQ ID NO: 398956 - RNA, 19 nt, Homo sapiens
  misc_RNA (1)...(19): siRNA sense strand
uuucucaccuguauuagug

SEQ ID NO: 398957 - RNA, 19 nt, Homo sapiens
  misc_RNA (1)...(19): siRNA sense strand
acucuguccucuucuugua

SEQ ID NO: 398958 - RNA, 19 nt, Homo sapiens
  misc_RNA (1)...(19): siRNA sense strand
cugcuacucugucucaaau

SEQ ID NO: 398959 - RNA, 19 nt, Homo sapiens
  misc_RNA (1)...(19): siRNA sense strand
ggaagacuuauuuauccaa

SEQ ID NO: 398960 - RNA, 19 nt, Homo sapiens
  misc_RNA (1)...(19): siRNA sense strand
ucaaguauaaucucaaugg

SEQ ID NO: 398961 - RNA, 19 nt, Homo sapiens
  misc_RNA (1)...(19): siRNA sense strand
acagaagauucauugacuu

SEQ ID NO: 398962 - RNA, 19 nt, Homo sapiens
  misc_RNA (1)...(19): siRNA sense strand
caaugcuacugccaauaau

SEQ ID NO: 398963 - RNA, 19 nt, Homo sapiens
  misc_RNA (1)...(19): siRNA sense strand
caaguauaaucucaauggu

SEQ ID NO: 398964 - RNA, 19 nt, Homo sapiens
  misc_RNA (1)...(19): siRNA sense strand
gacuuccaauuccaagauu

SEQ ID NO: 398965 - RNA, 19 nt, Homo sapiens
  misc_RNA (1)...(19): siRNA sense strand
uggaaagauuugcaaagau

SEQ ID NO: 398966 - RNA, 19 nt, Homo sapiens
  misc_RNA (1)...(19): siRNA sense strand
cuggugcgcucccaagcua

SEQ ID NO: 398967 - RNA, 19 nt, Homo sapiens
  misc_RNA (1)...(19): siRNA sense strand
aagaucauguacccaauca

SEQ ID NO: 398968 - RNA, 19 nt, Homo sapiens
  misc_RNA (1)...(19): siRNA sense strand
gauuugcaaagaucaugua

SEQ ID NO: 398969 - RNA, 19 nt, Homo sapiens
  misc_RNA (1)...(19): siRNA sense strand
gcaugaaaaugagaaguga

SEQ ID NO: 398970 - RNA, 19 nt, Homo sapiens
  misc_RNA (1)...(19): siRNA sense strand
ccaauuccaagauucaaau

SEQ ID NO: 398971 - RNA, 19 nt, Homo sapiens
  misc_RNA (1)...(19): siRNA sense strand
gagaagugagacugcuauu

SEQ ID NO: 398972 - RNA, 19 nt, Homo sapiens
  misc_RNA (1)...(19): siRNA sense strand
aagaggaagugagugauca

SEQ ID NO: 398973 - RNA, 19 nt, Homo sapiens
  misc_RNA (1)...(19): siRNA sense strand
ucaaugcccacaucagaau

SEQ ID NO: 398974 - RNA, 19 nt, Homo sapiens
  misc_RNA (1)...(19): siRNA sense strand
uugaaugucucuugcucuu

SEQ ID NO: 398975 - RNA, 19 nt, Homo sapiens
  misc_RNA (1)...(19): siRNA sense strand
gaucguuuccuggccauug

SEQ ID NO: 398976 - RNA, 19 nt, Homo sapiens
  misc_RNA (1)...(19): siRNA sense strand
gaauucugccauugugugu

SEQ ID NO: 398977 - RNA, 19 nt, Homo sapiens
  misc_RNA (1)...(19): siRNA sense strand
caagaggaagugagugauc

SEQ ID NO: 398978 - RNA, 19 nt, Homo sapiens
  misc_RNA (1)...(19): siRNA sense strand
cacaaagccuucccuucca

SEQ ID NO: 398979 - RNA, 19 nt, Homo sapiens
  misc_RNA (1)...(19): siRNA sense strand
cuacugccaauaauacuug

SEQ ID NO: 398980 - RNA, 19 nt, Homo sapiens
  misc_RNA (1)...(19): siRNA sense strand
uugacccuuucaucuauua

SEQ ID NO: 398981 - RNA, 19 nt, Homo sapiens
  misc_RNA (1)...(19): siRNA sense strand
caacucuguccucuucuug

SEQ ID NO: 398982 - RNA, 19 nt, Homo sapiens
  misc_RNA (1)...(19): siRNA sense strand
ugcaagaucucuggaacug

SEQ ID NO: 398983 - RNA, 19 nt, Homo sapiens
  misc_RNA (1)...(19): siRNA sense strand
gaggaagugagugaucaaa

SEQ ID NO: 398984 - RNA, 19 nt, Homo sapiens
  misc_RNA (1)...(19): siRNA sense strand
guauuucagccucuuuguu

SEQ ID NO: 398985 - RNA, 19 nt, Homo sapiens
  misc_RNA (1)...(19): siRNA sense strand
acucugaacuguuguuuug

SEQ ID NO: 398986 - RNA, 19 nt, Homo sapiens
  misc_RNA (1)...(19): siRNA sense strand
acaacucuguccucuucuu

SEQ ID NO: 398987 - RNA, 19 nt, Homo sapiens
  misc_RNA (1)...(19): siRNA sense strand
gacacccucugcaagaucu

SEQ ID NO: 398988 - RNA, 19 nt, Homo sapiens
  misc_RNA (1)...(19): siRNA sense strand
aagauucauugacuuccaa

SEQ ID NO: 398989 - RNA, 19 nt, Homo sapiens
  misc_RNA (1)...(19): siRNA sense strand
agaagugagacugcuauuu

SEQ ID NO: 398990 - RNA, 19 nt, Homo sapiens
  misc_RNA (1)...(19): siRNA sense strand
uauggcagucuuuguggua

SEQ ID NO: 398991 - RNA, 19 nt, Homo sapiens
  misc_RNA (1)...(19): siRNA sense strand
ucucaauggugcugucuac

SEQ ID NO: 398992 - RNA, 19 nt, Homo sapiens
  misc_RNA (1)...(19): siRNA sense strand
cugcauuccuuaccaacau

SEQ ID NO: 398993 - RNA, 19 nt, Homo sapiens
  misc_RNA (1)...(19): siRNA sense strand
caaccaccaccugcuuuga

SEQ ID NO: 398994 - RNA, 19 nt, Homo sapiens
  misc_RNA (1)...(19): siRNA sense strand
gaauuaaugcuagaaucca

SEQ ID NO: 398995 - RNA, 19 nt, Homo sapiens
  misc_RNA (1)...(19): siRNA sense strand
guggugaauuaaugcuaga

SEQ ID NO: 398996 - RNA, 19 nt, Homo sapiens
  misc_RNA (1)...(19): siRNA sense strand
uggagucccuguuuaagac

SEQ ID NO: 398997 - RNA, 19 nt, Homo sapiens
  misc_RNA (1)...(19): siRNA sense strand
caguacauauggcagucuu

SEQ ID NO: 398998 - RNA, 19 nt, Homo sapiens
  misc_RNA (1)...(19): siRNA sense strand
cuggaagacuuauuuaucc

SEQ ID NO: 398999 - RNA, 19 nt, Homo sapiens
  misc_RNA (1)...(19): siRNA sense strand
caccacuaaugucaacaau

SEQ ID NO: 399000 - RNA, 19 nt, Homo sapiens
  misc_RNA (1)...(19): siRNA sense strand
aaugaucacaguacauaug

SEQ ID NO: 399001 - RNA, 19 nt, Homo sapiens
  misc_RNA (1)...(19): siRNA sense strand
ucuggaagacuuauuuauc

SEQ ID NO: 399002 - RNA, 19 nt, Homo sapiens
  misc_RNA (1)...(19): siRNA sense strand
ccaaucuagcugucucuga

SEQ ID NO: 399003 - RNA, 19 nt, Homo sapiens
  misc_RNA (1)...(19): siRNA sense strand
ugaugauuccuucaaguau

SEQ ID NO: 399004 - RNA, 19 nt, Homo sapiens
  misc_RNA (1)...(19): siRNA sense strand
ugacuuccaauuccaagau

SEQ ID NO: 399005 - RNA, 19 nt, Homo sapiens
  misc_RNA (1)...(19): siRNA sense strand
gugacacccucugcaagau

SEQ ID NO: 399006 - RNA, 19 nt, Homo sapiens
  misc_RNA (1)...(19): siRNA sense strand
aacaaauaaugguggugaa

SEQ ID NO: 399007 - RNA, 19 nt, Homo sapiens
  misc_RNA (1)...(19): siRNA sense strand
ccuuucaucuauuacuuca

SEQ ID NO: 399008 - RNA, 19 nt, Homo sapiens
  misc_RNA (1)...(19): siRNA sense strand
gguuuaucauuccucuaau

SEQ ID NO: 399009 - RNA, 19 nt, Homo sapiens
  misc_RNA (1)...(19): siRNA sense strand
aaugcuacugccaauaaua

SEQ ID NO: 399010 - RNA, 19 nt, Homo sapiens
  misc_RNA (1)...(19): siRNA sense strand
ugacagaagauucauugac

SEQ ID NO: 399011 - RNA, 19 nt, Homo sapiens
  misc_RNA (1)...(19): siRNA sense strand
gauaaccaacagugucucu

SEQ ID NO: 399012 - RNA, 19 nt, Homo sapiens
  misc_RNA (1)...(19): siRNA sense strand
uaaccaacagugucucucu

SEQ ID NO: 399013 - RNA, 19 nt, Homo sapiens
  misc_RNA (1)...(19): siRNA sense strand
acauauggcagucuuugug

SEQ ID NO: 399014 - RNA, 19 nt, Homo sapiens
  misc_RNA (1)...(19): siRNA sense strand
ggaaagaauuguauacaga

SEQ ID NO: 399015 - RNA, 19 nt, Homo sapiens
  misc_RNA (1)...(19): siRNA sense strand
agaaauaccuccagauguu

SEQ ID NO: 399016 - RNA, 19 nt, Homo sapiens
  misc_RNA (1)...(19): siRNA sense strand
guacuagaguugcccauaa

SEQ ID NO: 399017 - RNA, 19 nt, Homo sapiens
  misc_RNA (1)...(19): siRNA sense strand
gaauguagauugggacuga

SEQ ID NO: 399018 - RNA, 19 nt, Homo sapiens
  misc_RNA (1)...(19): siRNA sense strand
ggacuuggcugucugaucu

SEQ ID NO: 399019 - RNA, 19 nt, Homo sapiens
  misc_RNA (1)...(19): siRNA sense strand
gaggaaaggugaagcuaug

SEQ ID NO: 399020 - RNA, 19 nt, Homo sapiens
  misc_RNA (1)...(19): siRNA sense strand
caccugaaguugucaauaa

SEQ ID NO: 399021 - RNA, 19 nt, Homo sapiens
  misc_RNA (1)...(19): siRNA sense strand
gaucaaagaaucaagaaug

SEQ ID NO: 399022 - RNA, 19 nt, Homo sapiens
  misc_RNA (1)...(19): siRNA sense strand
gcaguucugugauaccaaa

SEQ ID NO: 399023 - RNA, 19 nt, Homo sapiens
  misc_RNA (1)...(19): siRNA sense strand
gaacacauuuagacauuac

SEQ ID NO: 399024 - RNA, 19 nt, Homo sapiens
  misc_RNA (1)...(19): siRNA sense strand
ggacagaggguucgaggaa

SEQ ID NO: 399025 - RNA, 19 nt, Homo sapiens
  misc_RNA (1)...(19): siRNA sense strand
gggaaccauuugaagaaua

SEQ ID NO: 399026 - RNA, 19 nt, Homo sapiens
  misc_RNA (1)...(19): siRNA sense strand
ggaggucgaucaaagaauc

SEQ ID NO: 399027 - RNA, 19 nt, Homo sapiens
  misc_RNA (1)...(19): siRNA sense strand
uaaagaggcacauugaauu

SEQ ID NO: 399028 - RNA, 19 nt, Homo sapiens
  misc_RNA (1)...(19): siRNA sense strand
ggauguuacucaccaagaa

SEQ ID NO: 399029 - RNA, 19 nt, Homo sapiens
  misc_RNA (1)...(19): siRNA sense strand
caauggaaauggcuggaaa

SEQ ID NO: 399030 - RNA, 19 nt, Homo sapiens
  misc_RNA (1)...(19): siRNA sense strand
gaugaggaccgaagugauu

SEQ ID NO: 399031 - RNA, 19 nt, Homo sapiens
  misc_RNA (1)...(19): siRNA sense strand
aauaugaaguugccgauga

SEQ ID NO: 399032 - RNA, 19 nt, Homo sapiens
  misc_RNA (1)...(19): siRNA sense strand
gggaggaggucgaucaaag

SEQ ID NO: 399033 - RNA, 19 nt, Homo sapiens
  misc_RNA (1)...(19): siRNA sense strand
ucaggaggcuggaggcaaa

SEQ ID NO: 399034 - RNA, 19 nt, Homo sapiens
  misc_RNA (1)...(19): siRNA sense strand
gcagagagccguuuucuau

SEQ ID NO: 399035 - RNA, 19 nt, Homo sapiens
  misc_RNA (1)...(19): siRNA sense strand
ccaacucgcugcugcugaa

SEQ ID NO: 399036 - RNA, 19 nt, Homo sapiens
  misc_RNA (1)...(19): siRNA sense strand
ggaaccauuugaagaauac

SEQ ID NO: 399037 - RNA, 19 nt, Homo sapiens
  misc_RNA (1)...(19): siRNA sense strand
gugaagcuauggcucuaaa

SEQ ID NO: 399038 - RNA, 19 nt, Homo sapiens
  misc_RNA (1)...(19): siRNA sense strand
agacuucuaugcucgguuu

SEQ ID NO: 399039 - RNA, 19 nt, Homo sapiens
  misc_RNA (1)...(19): siRNA sense strand
gaagcuauggcucuaaaug

SEQ ID NO: 399040 - RNA, 19 nt, Homo sapiens
  misc_RNA (1)...(19): siRNA sense strand
gauuauagcagucuuugug

SEQ ID NO: 399041 - RNA, 19 nt, Homo sapiens
  misc_RNA (1)...(19): siRNA sense strand
gggacauucuccauucaaa

SEQ ID NO: 399042 - RNA, 19 nt, Homo sapiens
  misc_RNA (1)...(19): siRNA sense strand
gcccauaacuaccuaagag

SEQ ID NO: 399043 - RNA, 19 nt, Homo sapiens
  misc_RNA (1)...(19): siRNA sense strand
ggagaaagugcaaaguaga

SEQ ID NO: 399044 - RNA, 19 nt, Homo sapiens
  misc_RNA (1)...(19): siRNA sense strand
ucagggacauucuccauuc

SEQ ID NO: 399045 - RNA, 19 nt, Homo sapiens
  misc_RNA (1)...(19): siRNA sense strand
ugucugaucuaugaaauga

SEQ ID NO: 399046 - RNA, 19 nt, Homo sapiens
  misc_RNA (1)...(19): siRNA sense strand
cuacauggcaccugaaguu

SEQ ID NO: 399047 - RNA, 19 nt, Homo sapiens
  misc_RNA (1)...(19): siRNA sense strand
gggaaagaauuguauacag

SEQ ID NO: 399048 - RNA, 19 nt, Homo sapiens
  misc_RNA (1)...(19): siRNA sense strand
gauaccaaacccacucuaa

SEQ ID NO: 399049 - RNA, 19 nt, Homo sapiens
  misc_RNA (1)...(19): siRNA sense strand
uggaugcaguggcagaaua

SEQ ID NO: 399050 - RNA, 19 nt, Homo sapiens
  misc_RNA (1)...(19): siRNA sense strand
agaaugauaccgaggagua

SEQ ID NO: 399051 - RNA, 19 nt, Homo sapiens
  misc_RNA (1)...(19): siRNA sense strand
ggaggaggucgaucaaaga

SEQ ID NO: 399052 - RNA, 19 nt, Homo sapiens
  misc_RNA (1)...(19): siRNA sense strand
ccaaagaugccuugugcuu

SEQ ID NO: 399053 - RNA, 19 nt, Homo sapiens
  misc_RNA (1)...(19): siRNA sense strand
ccagaaauaccuccagaug

SEQ ID NO: 399054 - RNA, 19 nt, Homo sapiens
  misc_RNA (1)...(19): siRNA sense strand
aaaucuaucugcaggaugu

SEQ ID NO: 399055 - RNA, 19 nt, Homo sapiens
  misc_RNA (1)...(19): siRNA sense strand
acaaagagaaagucaaaug

SEQ ID NO: 399056 - RNA, 19 nt, Homo sapiens
  misc_RNA (1)...(19): siRNA sense strand
uuacagagggaaagaauug

SEQ ID NO: 399057 - RNA, 19 nt, Homo sapiens
  misc_RNA (1)...(19): siRNA sense strand
gaaagugcaaaguagauuc

SEQ ID NO: 399058 - RNA, 19 nt, Homo sapiens
  misc_RNA (1)...(19): siRNA sense strand
ugaggaauguacuagaguu

SEQ ID NO: 399059 - RNA, 19 nt, Homo sapiens
  misc_RNA (1)...(19): siRNA sense strand
gaaauaccuccagauguug

SEQ ID NO: 399060 - RNA, 19 nt, Homo sapiens
  misc_RNA (1)...(19): siRNA sense strand
ggaaaggcaacccguaaca

SEQ ID NO: 399061 - RNA, 19 nt, Homo sapiens
  misc_RNA (1)...(19): siRNA sense strand
cugaaguugucaauaauga

SEQ ID NO: 399062 - RNA, 19 nt, Homo sapiens
  misc_RNA (1)...(19): siRNA sense strand
caaagaacacauuuagaca

SEQ ID NO: 399063 - RNA, 19 nt, Homo sapiens
  misc_RNA (1)...(19): siRNA sense strand
gaaaggcaacccguaacaa

SEQ ID NO: 399064 - RNA, 19 nt, Homo sapiens
  misc_RNA (1)...(19): siRNA sense strand
cuaaagaggcacauugaau

SEQ ID NO: 399065 - RNA, 19 nt, Homo sapiens
  misc_RNA (1)...(19): siRNA sense strand
gaagauuuacagagggaaa

SEQ ID NO: 399066 - RNA, 19 nt, Homo sapiens
  misc_RNA (1)...(19): siRNA sense strand
aaaggcaacccguaacaaa

SEQ ID NO: 399067 - RNA, 19 nt, Homo sapiens
  misc_RNA (1)...(19): siRNA sense strand
gcacauugaauucuuggau

SEQ ID NO: 399068 - RNA, 19 nt, Homo sapiens
  misc_RNA (1)...(19): siRNA sense strand
ggacacauccggauuucag

SEQ ID NO: 399069 - RNA, 19 nt, Homo sapiens
  misc_RNA (1)...(19): siRNA sense strand
gaggcacauugaauucuug

SEQ ID NO: 399070 - RNA, 19 nt, Homo sapiens
  misc_RNA (1)...(19): siRNA sense strand
cagaggaugccaaaucuau

SEQ ID NO: 399071 - RNA, 19 nt, Homo sapiens
  misc_RNA (1)...(19): siRNA sense strand
ggaaguggaacccaagcaa

SEQ ID NO: 399072 - RNA, 19 nt, Homo sapiens
  misc_RNA (1)...(19): siRNA sense strand
ccaaaucuaucugcaggau

SEQ ID NO: 399073 - RNA, 19 nt, Homo sapiens
  misc_RNA (1)...(19): siRNA sense strand
ggaggagaacccuuccaaa

SEQ ID NO: 399074 - RNA, 19 nt, Homo sapiens
  misc_RNA (1)...(19): siRNA sense strand
gaaguggaacccaagcaau

SEQ ID NO: 399075 - RNA, 19 nt, Homo sapiens
  misc_RNA (1)...(19): siRNA sense strand
gaggaggucgaucaaagaa

SEQ ID NO: 399076 - RNA, 19 nt, Homo sapiens
  misc_RNA (1)...(19): siRNA sense strand
gagaaagugcaaaguagau

SEQ ID NO: 399077 - RNA, 19 nt, Homo sapiens
  misc_RNA (1)...(19): siRNA sense strand
gaauaaagaagaggaaagg

SEQ ID NO: 399078 - RNA, 19 nt, Homo sapiens
  misc_RNA (1)...(19): siRNA sense strand
uuacagaguucuaggaaaa

SEQ ID NO: 399079 - RNA, 19 nt, Homo sapiens
  misc_RNA (1)...(19): siRNA sense strand
uggagaaagugcaaaguag

SEQ ID NO: 399080 - RNA, 19 nt, Homo sapiens
  misc_RNA (1)...(19): siRNA sense strand
gacaagcaaccgauaggaa

SEQ ID NO: 399081 - RNA, 19 nt, Homo sapiens
  misc_RNA (1)...(19): siRNA sense strand
acagaggguucgaggaaga

SEQ ID NO: 399082 - RNA, 19 nt, Homo sapiens
  misc_RNA (1)...(19): siRNA sense strand
gaggagaacccuuccaaaa

SEQ ID NO: 399083 - RNA, 19 nt, Homo sapiens
  misc_RNA (1)...(19): siRNA sense strand
gcaccugaaguugucaaua

SEQ ID NO: 399084 - RNA, 19 nt, Homo sapiens
  misc_RNA (1)...(19): siRNA sense strand
gcaaucccggcuuugauga

SEQ ID NO: 399085 - RNA, 19 nt, Homo sapiens
  misc_RNA (1)...(19): siRNA sense strand
caaagagaaagucaaaugg

SEQ ID NO: 399086 - RNA, 19 nt, Homo sapiens
  misc_RNA (1)...(19): siRNA sense strand
ccaagaaagcucauauuuu

SEQ ID NO: 399087 - RNA, 19 nt, Homo sapiens
  misc_RNA (1)...(19): siRNA sense strand
ggacaccgcagaugaagac

SEQ ID NO: 399088 - RNA, 19 nt, Homo sapiens
  misc_RNA (1)...(19): siRNA sense strand
ucaaggacaucaacuucag

SEQ ID NO: 399089 - RNA, 19 nt, Homo sapiens
  misc_RNA (1)...(19): siRNA sense strand
ggcaacccguaacaaagaa

SEQ ID NO: 399090 - RNA, 19 nt, Homo sapiens
  misc_RNA (1)...(19): siRNA sense strand
cagauguugugacagaaug

SEQ ID NO: 399091 - RNA, 19 nt, Homo sapiens
  misc_RNA (1)...(19): siRNA sense strand
gaggaagaguuggaacagu

SEQ ID NO: 399092 - RNA, 19 nt, Homo sapiens
  misc_RNA (1)...(19): siRNA sense strand
cuccagauguugugacaga

SEQ ID NO: 399093 - RNA, 19 nt, Homo sapiens
  misc_RNA (1)...(19): siRNA sense strand
acaaagaacacauuuagac

SEQ ID NO: 399094 - RNA, 19 nt, Homo sapiens
  misc_RNA (1)...(19): siRNA sense strand
cuauggcucuaaaugagaa

SEQ ID NO: 399095 - RNA, 19 nt, Homo sapiens
  misc_RNA (1)...(19): siRNA sense strand
gcaggauguuacucaccaa

SEQ ID NO: 399096 - RNA, 19 nt, Homo sapiens
  misc_RNA (1)...(19): siRNA sense strand
ggaugcaguggcagaauau

SEQ ID NO: 399097 - RNA, 19 nt, Homo sapiens
  misc_RNA (1)...(19): siRNA sense strand
cuugaagccugagaauauu

SEQ ID NO: 399098 - RNA, 19 nt, Homo sapiens
  misc_RNA (1)...(19): siRNA sense strand
cagaaauaccuccagaugu

SEQ ID NO: 399099 - RNA, 19 nt, Homo sapiens
  misc_RNA (1)...(19): siRNA sense strand
ccucaugccguuuacugua

SEQ ID NO: 399100 - RNA, 19 nt, Homo sapiens
  misc_RNA (1)...(19): siRNA sense strand
gcugucugaucuaugaaau

SEQ ID NO: 399101 - RNA, 19 nt, Homo sapiens
  misc_RNA (1)...(19): siRNA sense strand
uaguuuagccuacgcuuau

SEQ ID NO: 399102 - RNA, 19 nt, Homo sapiens
  misc_RNA (1)...(19): siRNA sense strand
aaagaggcacauugaauuc

SEQ ID NO: 399103 - RNA, 19 nt, Homo sapiens
  misc_RNA (1)...(19): siRNA sense strand
accaagaaagcucauauuu

SEQ ID NO: 399104 - RNA, 19 nt, Homo sapiens
  misc_RNA (1)...(19): siRNA sense strand
agaggcacauugaauucuu

SEQ ID NO: 399105 - RNA, 19 nt, Homo sapiens
  misc_RNA (1)...(19): siRNA sense strand
guucaaggacaucaacuuc

SEQ ID NO: 399106 - RNA, 19 nt, Homo sapiens
  misc_RNA (1)...(19): siRNA sense strand
gauuucagaccucgguuug

SEQ ID NO: 399107 - RNA, 19 nt, Homo sapiens
  misc_RNA (1)...(19): siRNA sense strand
acuugaagccugagaauau

SEQ ID NO: 399108 - RNA, 19 nt, Homo sapiens
  misc_RNA (1)...(19): siRNA sense strand
caagugcgagccacaggaa

SEQ ID NO: 399109 - RNA, 19 nt, Homo sapiens
  misc_RNA (1)...(19): siRNA sense strand
gaagaggaaaggugaagcu

SEQ ID NO: 399110 - RNA, 19 nt, Homo sapiens
  misc_RNA (1)...(19): siRNA sense strand
cauggcaccugaaguuguc

SEQ ID NO: 399111 - RNA, 19 nt, Homo sapiens
  misc_RNA (1)...(19): siRNA sense strand
ggauuucagaccucgguuu

SEQ ID NO: 399112 - RNA, 19 nt, Homo sapiens
  misc_RNA (1)...(19): siRNA sense strand
caagcaaccgauaggaaga

SEQ ID NO: 399113 - RNA, 19 nt, Homo sapiens
  misc_RNA (1)...(19): siRNA sense strand
gaggaugccaaaucuaucu

SEQ ID NO: 399114 - RNA, 19 nt, Homo sapiens
  misc_RNA (1)...(19): siRNA sense strand
ggaaagaauuguauacaga

SEQ ID NO: 399115 - RNA, 19 nt, Homo sapiens
  misc_RNA (1)...(19): siRNA sense strand
agaaauaccuccagauguu

SEQ ID NO: 399116 - RNA, 19 nt, Homo sapiens
  misc_RNA (1)...(19): siRNA sense strand
guacuagaguugcccauaa

SEQ ID NO: 399117 - RNA, 19 nt, Homo sapiens
  misc_RNA (1)...(19): siRNA sense strand
gaauguagauugggacuga

SEQ ID NO: 399118 - RNA, 19 nt, Homo sapiens
  misc_RNA (1)...(19): siRNA sense strand
ggacuuggcugucugaucu

SEQ ID NO: 399119 - RNA, 19 nt, Homo sapiens
  misc_RNA (1)...(19): siRNA sense strand
gaggaaaggugaagcuaug

SEQ ID NO: 399120 - RNA, 19 nt, Homo sapiens
  misc_RNA (1)...(19): siRNA sense strand
caccugaaguugucaauaa

SEQ ID NO: 399121 - RNA, 19 nt, Homo sapiens
  misc_RNA (1)...(19): siRNA sense strand
gaucaaagaaucaagaaug

SEQ ID NO: 399122 - RNA, 19 nt, Homo sapiens
  misc_RNA (1)...(19): siRNA sense strand
gcaguucugugauaccaaa

SEQ ID NO: 399123 - RNA, 19 nt, Homo sapiens
  misc_RNA (1)...(19): siRNA sense strand
gaacacauuuagacauuac

SEQ ID NO: 399124 - RNA, 19 nt, Homo sapiens
  misc_RNA (1)...(19): siRNA sense strand
ggacagaggguucgaggaa

SEQ ID NO: 399125 - RNA, 19 nt, Homo sapiens
  misc_RNA (1)...(19): siRNA sense strand
gggaaccauuugaagaaua

SEQ ID NO: 399126 - RNA, 19 nt, Homo sapiens
  misc_RNA (1)...(19): siRNA sense strand
ggaggucgaucaaagaauc

SEQ ID NO: 399127 - RNA, 19 nt, Homo sapiens
  misc_RNA (1)...(19): siRNA sense strand
uaaagaggcacauugaauu

SEQ ID NO: 399128 - RNA, 19 nt, Homo sapiens
  misc_RNA (1)...(19): siRNA sense strand
ggauguuacucaccaagaa

SEQ ID NO: 399129 - RNA, 19 nt, Homo sapiens
  misc_RNA (1)...(19): siRNA sense strand
caauggaaauggcuggaaa

SEQ ID NO: 399130 - RNA, 19 nt, Homo sapiens
  misc_RNA (1)...(19): siRNA sense strand
gaugaggaccgaagugauu

SEQ ID NO: 399131 - RNA, 19 nt, Homo sapiens
  misc_RNA (1)...(19): siRNA sense strand
aauaugaaguugccgauga

SEQ ID NO: 399132 - RNA, 19 nt, Homo sapiens
  misc_RNA (1)...(19): siRNA sense strand
gggaggaggucgaucaaag

SEQ ID NO: 399133 - RNA, 19 nt, Homo sapiens
  misc_RNA (1)...(19): siRNA sense strand
ucaggaggcuggaggcaaa

SEQ ID NO: 399134 - RNA, 19 nt, Homo sapiens
  misc_RNA (1)...(19): siRNA sense strand
gcagagagccguuuucuau

SEQ ID NO: 399135 - RNA, 19 nt, Homo sapiens
  misc_RNA (1)...(19): siRNA sense strand
ccaacucgcugcugcugaa

SEQ ID NO: 399136 - RNA, 19 nt, Homo sapiens
  misc_RNA (1)...(19): siRNA sense strand
ggaaccauuugaagaauac

SEQ ID NO: 399137 - RNA, 19 nt, Homo sapiens
  misc_RNA (1)...(19): siRNA sense strand
gugaagcuauggcucuaaa

SEQ ID NO: 399138 - RNA, 19 nt, Homo sapiens
  misc_RNA (1)...(19): siRNA sense strand
agacuucuaugcucgguuu

SEQ ID NO: 399139 - RNA, 19 nt, Homo sapiens
  misc_RNA (1)...(19): siRNA sense strand
gaagcuauggcucuaaaug

SEQ ID NO: 399140 - RNA, 19 nt, Homo sapiens
  misc_RNA (1)...(19): siRNA sense strand
gauuauagcagucuuugug

SEQ ID NO: 399141 - RNA, 19 nt, Homo sapiens
  misc_RNA (1)...(19): siRNA sense strand
gggacauucuccauucaaa

SEQ ID NO: 399142 - RNA, 19 nt, Homo sapiens
  misc_RNA (1)...(19): siRNA sense strand
gcccauaacuaccuaagag

SEQ ID NO: 399143 - RNA, 19 nt, Homo sapiens
  misc_RNA (1)...(19): siRNA sense strand
ggagaaagugcaaaguaga

SEQ ID NO: 399144 - RNA, 19 nt, Homo sapiens
  misc_RNA (1)...(19): siRNA sense strand
ucagggacauucuccauuc

SEQ ID NO: 399145 - RNA, 19 nt, Homo sapiens
  misc_RNA (1)...(19): siRNA sense strand
ugucugaucuaugaaauga

SEQ ID NO: 399146 - RNA, 19 nt, Homo sapiens
  misc_RNA (1)...(19): siRNA sense strand
cuacauggcaccugaaguu

SEQ ID NO: 399147 - RNA, 19 nt, Homo sapiens
  misc_RNA (1)...(19): siRNA sense strand
gggaaagaauuguauacag

SEQ ID NO: 399148 - RNA, 19 nt, Homo sapiens
  misc_RNA (1)...(19): siRNA sense strand
gauaccaaacccacucuaa

SEQ ID NO: 399149 - RNA, 19 nt, Homo sapiens
  misc_RNA (1)...(19): siRNA sense strand
uggaugcaguggcagaaua

SEQ ID NO: 399150 - RNA, 19 nt, Homo sapiens
  misc_RNA (1)...(19): siRNA sense strand
agaaugauaccgaggagua

SEQ ID NO: 399151 - RNA, 19 nt, Homo sapiens
  misc_RNA (1)...(19): siRNA sense strand
ggaggaggucgaucaaaga

SEQ ID NO: 399152 - RNA, 19 nt, Homo sapiens
  misc_RNA (1)...(19): siRNA sense strand
ccaaagaugccuugugcuu

SEQ ID NO: 399153 - RNA, 19 nt, Homo sapiens
  misc_RNA (1)...(19): siRNA sense strand
ccagaaauaccuccagaug

SEQ ID NO: 399154 - RNA, 19 nt, Homo sapiens
  misc_RNA (1)...(19): siRNA sense strand
aaaucuaucugcaggaugu

SEQ ID NO: 399155 - RNA, 19 nt, Homo sapiens
  misc_RNA (1)...(19): siRNA sense strand
acaaagagaaagucaaaug

SEQ ID NO: 399156 - RNA, 19 nt, Homo sapiens
  misc_RNA (1)...(19): siRNA sense strand
uuacagagggaaagaauug

SEQ ID NO: 399157 - RNA, 19 nt, Homo sapiens
  misc_RNA (1)...(19): siRNA sense strand
gaaagugcaaaguagauuc

SEQ ID NO: 399158 - RNA, 19 nt, Homo sapiens
  misc_RNA (1)...(19): siRNA sense strand
ugaggaauguacuagaguu

SEQ ID NO: 399159 - RNA, 19 nt, Homo sapiens
  misc_RNA (1)...(19): siRNA sense strand
gaaauaccuccagauguug

SEQ ID NO: 399160 - RNA, 19 nt, Homo sapiens
  misc_RNA (1)...(19): siRNA sense strand
ggaaaggcaacccguaaca

SEQ ID NO: 399161 - RNA, 19 nt, Homo sapiens
  misc_RNA (1)...(19): siRNA sense strand
cugaaguugucaauaauga

SEQ ID NO: 399162 - RNA, 19 nt, Homo sapiens
  misc_RNA (1)...(19): siRNA sense strand
caaagaacacauuuagaca

SEQ ID NO: 399163 - RNA, 19 nt, Homo sapiens
  misc_RNA (1)...(19): siRNA sense strand
gaaaggcaacccguaacaa

SEQ ID NO: 399164 - RNA, 19 nt, Homo sapiens
  misc_RNA (1)...(19): siRNA sense strand
cuaaagaggcacauugaau

SEQ ID NO: 399165 - RNA, 19 nt, Homo sapiens
  misc_RNA (1)...(19): siRNA sense strand
gaagauuuacagagggaaa

SEQ ID NO: 399166 - RNA, 19 nt, Homo sapiens
  misc_RNA (1)...(19): siRNA sense strand
aaaggcaacccguaacaaa

SEQ ID NO: 399167 - RNA, 19 nt, Homo sapiens
  misc_RNA (1)...(19): siRNA sense strand
gcacauugaauucuuggau

SEQ ID NO: 399168 - RNA, 19 nt, Homo sapiens
  misc_RNA (1)...(19): siRNA sense strand
ggacacauccggauuucag

SEQ ID NO: 399169 - RNA, 19 nt, Homo sapiens
  misc_RNA (1)...(19): siRNA sense strand
gaggcacauugaauucuug

SEQ ID NO: 399170 - RNA, 19 nt, Homo sapiens
  misc_RNA (1)...(19): siRNA sense strand
cagaggaugccaaaucuau

SEQ ID NO: 399171 - RNA, 19 nt, Homo sapiens
  misc_RNA (1)...(19): siRNA sense strand
ggaaguggaacccaagcaa

SEQ ID NO: 399172 - RNA, 19 nt, Homo sapiens
  misc_RNA (1)...(19): siRNA sense strand
ccaaaucuaucugcaggau

SEQ ID NO: 399173 - RNA, 19 nt, Homo sapiens
  misc_RNA (1)...(19): siRNA sense strand
ggaggagaacccuuccaaa

SEQ ID NO: 399174 - RNA, 19 nt, Homo sapiens
  misc_RNA (1)...(19): siRNA sense strand
gaaguggaacccaagcaau

SEQ ID NO: 399175 - RNA, 19 nt, Homo sapiens
  misc_RNA (1)...(19): siRNA sense strand
gaggaggucgaucaaagaa

SEQ ID NO: 399176 - RNA, 19 nt, Homo sapiens
  misc_RNA (1)...(19): siRNA sense strand
gagaaagugcaaaguagau

SEQ ID NO: 399177 - RNA, 19 nt, Homo sapiens
  misc_RNA (1)...(19): siRNA sense strand
gaauaaagaagaggaaagg

SEQ ID NO: 399178 - RNA, 19 nt, Homo sapiens
  misc_RNA (1)...(19): siRNA sense strand
uuacagaguucuaggaaaa

SEQ ID NO: 399179 - RNA, 19 nt, Homo sapiens
  misc_RNA (1)...(19): siRNA sense strand
uggagaaagugcaaaguag

SEQ ID NO: 399180 - RNA, 19 nt, Homo sapiens
  misc_RNA (1)...(19): siRNA sense strand
gacaagcaaccgauaggaa

SEQ ID NO: 399181 - RNA, 19 nt, Homo sapiens
  misc_RNA (1)...(19): siRNA sense strand
acagaggguucgaggaaga

SEQ ID NO: 399182 - RNA, 19 nt, Homo sapiens
  misc_RNA (1)...(19): siRNA sense strand
gaggagaacccuuccaaaa

SEQ ID NO: 399183 - RNA, 19 nt, Homo sapiens
  misc_RNA (1)...(19): siRNA sense strand
gcaccugaaguugucaaua

SEQ ID NO: 399184 - RNA, 19 nt, Homo sapiens
  misc_RNA (1)...(19): siRNA sense strand
gcaaucccggcuuugauga

SEQ ID NO: 399185 - RNA, 19 nt, Homo sapiens
  misc_RNA (1)...(19): siRNA sense strand
caaagagaaagucaaaugg

SEQ ID NO: 399186 - RNA, 19 nt, Homo sapiens
  misc_RNA (1)...(19): siRNA sense strand
ccaagaaagcucauauuuu

SEQ ID NO: 399187 - RNA, 19 nt, Homo sapiens
  misc_RNA (1)...(19): siRNA sense strand
ggacaccgcagaugaagac

SEQ ID NO: 399188 - RNA, 19 nt, Homo sapiens
  misc_RNA (1)...(19): siRNA sense strand
ucaaggacaucaacuucag

SEQ ID NO: 399189 - RNA, 19 nt, Homo sapiens
  misc_RNA (1)...(19): siRNA sense strand
ggcaacccguaacaaagaa

SEQ ID NO: 399190 - RNA, 19 nt, Homo sapiens
  misc_RNA (1)...(19): siRNA sense strand
cagauguugugacagaaug

SEQ ID NO: 399191 - RNA, 19 nt, Homo sapiens
  misc_RNA (1)...(19): siRNA sense strand
gaggaagaguuggaacagu

SEQ ID NO: 399192 - RNA, 19 nt, Homo sapiens
  misc_RNA (1)...(19): siRNA sense strand
cuccagauguugugacaga

SEQ ID NO: 399193 - RNA, 19 nt, Homo sapiens
  misc_RNA (1)...(19): siRNA sense strand
acaaagaacacauuuagac

SEQ ID NO: 399194 - RNA, 19 nt, Homo sapiens
  misc_RNA (1)...(19): siRNA sense strand
cuauggcucuaaaugagaa

SEQ ID NO: 399195 - RNA, 19 nt, Homo sapiens
  misc_RNA (1)...(19): siRNA sense strand
gcaggauguuacucaccaa

SEQ ID NO: 399196 - RNA, 19 nt, Homo sapiens
  misc_RNA (1)...(19): siRNA sense strand
ggaugcaguggcagaauau

SEQ ID NO: 399197 - RNA, 19 nt, Homo sapiens
  misc_RNA (1)...(19): siRNA sense strand
cuugaagccugagaauauu

SEQ ID NO: 399198 - RNA, 19 nt, Homo sapiens
  misc_RNA (1)...(19): siRNA sense strand
cagaaauaccuccagaugu

SEQ ID NO: 399199 - RNA, 19 nt, Homo sapiens
  misc_RNA (1)...(19): siRNA sense strand
ccucaugccguuuacugua

SEQ ID NO: 399200 - RNA, 19 nt, Homo sapiens
  misc_RNA (1)...(19): siRNA sense strand
gcugucugaucuaugaaau

SEQ ID NO: 399201 - RNA, 19 nt, Homo sapiens
  misc_RNA (1)...(19): siRNA sense strand
uaguuuagccuacgcuuau

SEQ ID NO: 399202 - RNA, 19 nt, Homo sapiens
  misc_RNA (1)...(19): siRNA sense strand
aaagaggcacauugaauuc

SEQ ID NO: 399203 - RNA, 19 nt, Homo sapiens
  misc_RNA (1)...(19): siRNA sense strand
accaagaaagcucauauuu

SEQ ID NO: 399204 - RNA, 19 nt, Homo sapiens
  misc_RNA (1)...(19): siRNA sense strand
agaggcacauugaauucuu

SEQ ID NO: 399205 - RNA, 19 nt, Homo sapiens
  misc_RNA (1)...(19): siRNA sense strand
guucaaggacaucaacuuc

SEQ ID NO: 399206 - RNA, 19 nt, Homo sapiens
  misc_RNA (1)...(19): siRNA sense strand
gauuucagaccucgguuug

SEQ ID NO: 399207 - RNA, 19 nt, Homo sapiens
  misc_RNA (1)...(19): siRNA sense strand
acuugaagccugagaauau

SEQ ID NO: 399208 - RNA, 19 nt, Homo sapiens
  misc_RNA (1)...(19): siRNA sense strand
caagugcgagccacaggaa

SEQ ID NO: 399209 - RNA, 19 nt, Homo sapiens
  misc_RNA (1)...(19): siRNA sense strand
gaagaggaaaggugaagcu

SEQ ID NO: 399210 - RNA, 19 nt, Homo sapiens
  misc_RNA (1)...(19): siRNA sense strand
cauggcaccugaaguuguc

SEQ ID NO: 399211 - RNA, 19 nt, Homo sapiens
  misc_RNA (1)...(19): siRNA sense strand
ggauuucagaccucgguuu

SEQ ID NO: 399212 - RNA, 19 nt, Homo sapiens
  misc_RNA (1)...(19): siRNA sense strand
caagcaaccgauaggaaga

SEQ ID NO: 399213 - RNA, 19 nt, Homo sapiens
  misc_RNA (1)...(19): siRNA sense strand
gaggaugccaaaucuaucu

SEQ ID NO: 399214 - RNA, 19 nt, Homo sapiens
  misc_RNA (1)...(19): siRNA sense strand
agaagugccucagauaaua

SEQ ID NO: 399215 - RNA, 19 nt, Homo sapiens
  misc_RNA (1)...(19): siRNA sense strand
uaguaaagguguacaguga

SEQ ID NO: 399216 - RNA, 19 nt, Homo sapiens
  misc_RNA (1)...(19): siRNA sense strand
ugcagaaagugaagcauua

SEQ ID NO: 399217 - RNA, 19 nt, Homo sapiens
  misc_RNA (1)...(19): siRNA sense strand
ccaacaagcuucgaaaugg

SEQ ID NO: 399218 - RNA, 19 nt, Homo sapiens
  misc_RNA (1)...(19): siRNA sense strand
gggugcagcuguacaagaa

SEQ ID NO: 399219 - RNA, 19 nt, Homo sapiens
  misc_RNA (1)...(19): siRNA sense strand
gcgccgaucuggccucuau

SEQ ID NO: 399220 - RNA, 19 nt, Homo sapiens
  misc_RNA (1)...(19): siRNA sense strand
gaucuggccucuauuacuc

SEQ ID NO: 399221 - RNA, 19 nt, Homo sapiens
  misc_RNA (1)...(19): siRNA sense strand
gagaagugccucagauaau

SEQ ID NO: 399222 - RNA, 19 nt, Homo sapiens
  misc_RNA (1)...(19): siRNA sense strand
ggacuucucuggccaugcu

SEQ ID NO: 399223 - RNA, 19 nt, Homo sapiens
  misc_RNA (1)...(19): siRNA sense strand
gugcagcuguacaagaauu

SEQ ID NO: 399224 - RNA, 19 nt, Homo sapiens
  misc_RNA (1)...(19): siRNA sense strand
gaacgaguccaacguguac

SEQ ID NO: 399225 - RNA, 19 nt, Homo sapiens
  misc_RNA (1)...(19): siRNA sense strand
ccaccaagggcaccucuaa

SEQ ID NO: 399226 - RNA, 19 nt, Homo sapiens
  misc_RNA (1)...(19): siRNA sense strand
acacugguauaucccauga

SEQ ID NO: 399227 - RNA, 19 nt, Homo sapiens
  misc_RNA (1)...(19): siRNA sense strand
gccgaucuggccucuauua

SEQ ID NO: 399228 - RNA, 19 nt, Homo sapiens
  misc_RNA (1)...(19): siRNA sense strand
ggacggaagcuuuggaaac

SEQ ID NO: 399229 - RNA, 19 nt, Homo sapiens
  misc_RNA (1)...(19): siRNA sense strand
ggaggaagaagacaaacca

SEQ ID NO: 399230 - RNA, 19 nt, Homo sapiens
  misc_RNA (1)...(19): siRNA sense strand
gcagaaagugaagcauuau

SEQ ID NO: 399231 - RNA, 19 nt, Homo sapiens
  misc_RNA (1)...(19): siRNA sense strand
gacggaagcuuuggaaacg

SEQ ID NO: 399232 - RNA, 19 nt, Homo sapiens
  misc_RNA (1)...(19): siRNA sense strand
gaaagugaagcauuaucuc

SEQ ID NO: 399233 - RNA, 19 nt, Homo sapiens
  misc_RNA (1)...(19): siRNA sense strand
auccagaacuuccugaaug

SEQ ID NO: 399234 - RNA, 19 nt, Homo sapiens
  misc_RNA (1)...(19): siRNA sense strand
caagggcaccucuaaggau

SEQ ID NO: 399235 - RNA, 19 nt, Homo sapiens
  misc_RNA (1)...(19): siRNA sense strand
ugaacgaguccaacgugua

SEQ ID NO: 399236 - RNA, 19 nt, Homo sapiens
  misc_RNA (1)...(19): siRNA sense strand
gaagaccucauccagaacu

SEQ ID NO: 399237 - RNA, 19 nt, Homo sapiens
  misc_RNA (1)...(19): siRNA sense strand
cgaggcaccugcaguacgu

SEQ ID NO: 399238 - RNA, 19 nt, Homo sapiens
  misc_RNA (1)...(19): siRNA sense strand
ccaagggcaccucuaagga

SEQ ID NO: 399239 - RNA, 19 nt, Homo sapiens
  misc_RNA (1)...(19): siRNA sense strand
aaagugaagcauuaucuca

SEQ ID NO: 399240 - RNA, 19 nt, Homo sapiens
  misc_RNA (1)...(19): siRNA sense strand
gaagugccucagauaauac

SEQ ID NO: 399241 - RNA, 19 nt, Homo sapiens
  misc_RNA (1)...(19): siRNA sense strand
ucuacgggaugcccacuga

SEQ ID NO: 399242 - RNA, 19 nt, Homo sapiens
  misc_RNA (1)...(19): siRNA sense strand
guacguggcagaugugaac

SEQ ID NO: 399243 - RNA, 19 nt, Homo sapiens
  misc_RNA (1)...(19): siRNA sense strand
guucaggacggaagcuuug

SEQ ID NO: 399244 - RNA, 19 nt, Homo sapiens
  misc_RNA (1)...(19): siRNA sense strand
gcacccaacucugguucca

SEQ ID NO: 399245 - RNA, 19 nt, Homo sapiens
  misc_RNA (1)...(19): siRNA sense strand
gcucgccacgugugugaaa

SEQ ID NO: 399246 - RNA, 19 nt, Homo sapiens
  misc_RNA (1)...(19): siRNA sense strand
gagauagccgcuucgucuu

SEQ ID NO: 399247 - RNA, 19 nt, Homo sapiens
  misc_RNA (1)...(19): siRNA sense strand
ggaucugucuccaccucau

SEQ ID NO: 399248 - RNA, 19 nt, Homo sapiens
  misc_RNA (1)...(19): siRNA sense strand
gcuuuguccucucuuugug

SEQ ID NO: 399249 - RNA, 19 nt, Homo sapiens
  misc_RNA (1)...(19): siRNA sense strand
ccacugacuucgguuucug

SEQ ID NO: 399250 - RNA, 19 nt, Homo sapiens
  misc_RNA (1)...(19): siRNA sense strand
gccagacccgcuucacuga

SEQ ID NO: 399251 - RNA, 19 nt, Homo sapiens
  misc_RNA (1)...(19): siRNA sense strand
ugcaguacguggcagaugu

SEQ ID NO: 399252 - RNA, 19 nt, Homo sapiens
  misc_RNA (1)...(19): siRNA sense strand
cugcauccaucuuguuugg

SEQ ID NO: 399253 - RNA, 19 nt, Homo sapiens
  misc_RNA (1)...(19): siRNA sense strand
ccuuccgccucuucaagua

SEQ ID NO: 399254 - RNA, 19 nt, Homo sapiens
  misc_RNA (1)...(19): siRNA sense strand
gaugcacacacugguauau

SEQ ID NO: 399255 - RNA, 19 nt, Homo sapiens
  misc_RNA (1)...(19): siRNA sense strand
agugaagcauuaucucauc

SEQ ID NO: 399256 - RNA, 19 nt, Homo sapiens
  misc_RNA (1)...(19): siRNA sense strand
gcaguacguggcagaugug

SEQ ID NO: 399257 - RNA, 19 nt, Homo sapiens
  misc_RNA (1)...(19): siRNA sense strand
agaaagugaagcauuaucu

SEQ ID NO: 399258 - RNA, 19 nt, Homo sapiens
  misc_RNA (1)...(19): siRNA sense strand
cccaacaagcuucgaaaug

SEQ ID NO: 399259 - RNA, 19 nt, Homo sapiens
  misc_RNA (1)...(19): siRNA sense strand
gacuucgguuucuguguca

SEQ ID NO: 399260 - RNA, 19 nt, Homo sapiens
  misc_RNA (1)...(19): siRNA sense strand
ccaccucccuccccucuau

SEQ ID NO: 399261 - RNA, 19 nt, Homo sapiens
  misc_RNA (1)...(19): siRNA sense strand
cugcagaaagugaagcauu

SEQ ID NO: 399262 - RNA, 19 nt, Homo sapiens
  misc_RNA (1)...(19): siRNA sense strand
ccagggcuuuguccucucu

SEQ ID NO: 399263 - RNA, 19 nt, Homo sapiens
  misc_RNA (1)...(19): siRNA sense strand
gacagcagggcuugguaga

SEQ ID NO: 399264 - RNA, 19 nt, Homo sapiens
  misc_RNA (1)...(19): siRNA sense strand
ggcacagucucgccaucug

SEQ ID NO: 399265 - RNA, 19 nt, Homo sapiens
  misc_RNA (1)...(19): siRNA sense strand
uagcagcucuccggaagac

SEQ ID NO: 399266 - RNA, 19 nt, Homo sapiens
  misc_RNA (1)...(19): siRNA sense strand
acugguauaucccaugaag

SEQ ID NO: 399267 - RNA, 19 nt, Homo sapiens
  misc_RNA (1)...(19): siRNA sense strand
caucugcauccaucuuguu

SEQ ID NO: 399268 - RNA, 19 nt, Homo sapiens
  misc_RNA (1)...(19): siRNA sense strand
gcccaacaagcuucgaaau

SEQ ID NO: 399269 - RNA, 19 nt, Homo sapiens
  misc_RNA (1)...(19): siRNA sense strand
uggcagcuuuccugagauc

SEQ ID NO: 399270 - RNA, 19 nt, Homo sapiens
  misc_RNA (1)...(19): siRNA sense strand
ccaaacggcuugaauguua

SEQ ID NO: 399271 - RNA, 19 nt, Homo sapiens
  misc_RNA (1)...(19): siRNA sense strand
gcaaucagcugacuaaguu

SEQ ID NO: 399272 - RNA, 19 nt, Homo sapiens
  misc_RNA (1)...(19): siRNA sense strand
caaaggagcugacaucuuc

SEQ ID NO: 399273 - RNA, 19 nt, Homo sapiens
  misc_RNA (1)...(19): siRNA sense strand
gagaaagccugauguaguu

SEQ ID NO: 399274 - RNA, 19 nt, Homo sapiens
  misc_RNA (1)...(19): siRNA sense strand
gaacuaacaucaccaccaa

SEQ ID NO: 399275 - RNA, 19 nt, Homo sapiens
  misc_RNA (1)...(19): siRNA sense strand
gaacauaugcugaagagaa

SEQ ID NO: 399276 - RNA, 19 nt, Homo sapiens
  misc_RNA (1)...(19): siRNA sense strand
gcagugauguggaagauga

SEQ ID NO: 399277 - RNA, 19 nt, Homo sapiens
  misc_RNA (1)...(19): siRNA sense strand
gcugauauuuggaucuuua

SEQ ID NO: 399278 - RNA, 19 nt, Homo sapiens
  misc_RNA (1)...(19): siRNA sense strand
gaaagggaucgguuaaaua

SEQ ID NO: 399279 - RNA, 19 nt, Homo sapiens
  misc_RNA (1)...(19): siRNA sense strand
gaagagaaagccugaugua

SEQ ID NO: 399280 - RNA, 19 nt, Homo sapiens
  misc_RNA (1)...(19): siRNA sense strand
ggaggcaucuauacuguga

SEQ ID NO: 399281 - RNA, 19 nt, Homo sapiens
  misc_RNA (1)...(19): siRNA sense strand
ggaauuggacugauccuuu

SEQ ID NO: 399282 - RNA, 19 nt, Homo sapiens
  misc_RNA (1)...(19): siRNA sense strand
aauagaagcugaacauaug

SEQ ID NO: 399283 - RNA, 19 nt, Homo sapiens
  misc_RNA (1)...(19): siRNA sense strand
cgacagaaggauuuaaaua

SEQ ID NO: 399284 - RNA, 19 nt, Homo sapiens
  misc_RNA (1)...(19): siRNA sense strand
gaauuggacugauccuuuc

SEQ ID NO: 399285 - RNA, 19 nt, Homo sapiens
  misc_RNA (1)...(19): siRNA sense strand
ggagauacuuaggcagaua

SEQ ID NO: 399286 - RNA, 19 nt, Homo sapiens
  misc_RNA (1)...(19): siRNA sense strand
gaagugaccaauaaaguug

SEQ ID NO: 399287 - RNA, 19 nt, Homo sapiens
  misc_RNA (1)...(19): siRNA sense strand
gaagagcaguggacgcaau

SEQ ID NO: 399288 - RNA, 19 nt, Homo sapiens
  misc_RNA (1)...(19): siRNA sense strand
ggaagugaccaauaaaguu

SEQ ID NO: 399289 - RNA, 19 nt, Homo sapiens
  misc_RNA (1)...(19): siRNA sense strand
gagcugacaucuuccuaga

SEQ ID NO: 399290 - RNA, 19 nt, Homo sapiens
  misc_RNA (1)...(19): siRNA sense strand
gcaguggacgcaaugaaua

SEQ ID NO: 399291 - RNA, 19 nt, Homo sapiens
  misc_RNA (1)...(19): siRNA sense strand
gcugacaucuuccuagaau

SEQ ID NO: 399292 - RNA, 19 nt, Homo sapiens
  misc_RNA (1)...(19): siRNA sense strand
ugacuaaguuucucuaugg

SEQ ID NO: 399293 - RNA, 19 nt, Homo sapiens
  misc_RNA (1)...(19): siRNA sense strand
gaaauaacagcaauagaag

SEQ ID NO: 399294 - RNA, 19 nt, Homo sapiens
  misc_RNA (1)...(19): siRNA sense strand
gaaaacagcugugggaugu

SEQ ID NO: 399295 - RNA, 19 nt, Homo sapiens
  misc_RNA (1)...(19): siRNA sense strand
ugaaagggaucgguuaaau

SEQ ID NO: 399296 - RNA, 19 nt, Homo sapiens
  misc_RNA (1)...(19): siRNA sense strand
uaaaagaggugacagauca

SEQ ID NO: 399297 - RNA, 19 nt, Homo sapiens
  misc_RNA (1)...(19): siRNA sense strand
gcacguggcugauccuacu

SEQ ID NO: 399298 - RNA, 19 nt, Homo sapiens
  misc_RNA (1)...(19): siRNA sense strand
ggagcgagcuuccguucau

SEQ ID NO: 399299 - RNA, 19 nt, Homo sapiens
  misc_RNA (1)...(19): siRNA sense strand
acaaccaucuugauaaguu

SEQ ID NO: 399300 - RNA, 19 nt, Homo sapiens
  misc_RNA (1)...(19): siRNA sense strand
ucaugcagaugguaaauau

SEQ ID NO: 399301 - RNA, 19 nt, Homo sapiens
  misc_RNA (1)...(19): siRNA sense strand
caaacggcuugaauguuaa

SEQ ID NO: 399302 - RNA, 19 nt, Homo sapiens
  misc_RNA (1)...(19): siRNA sense strand
caauagaagcugaacauau

SEQ ID NO: 399303 - RNA, 19 nt, Homo sapiens
  misc_RNA (1)...(19): siRNA sense strand
cauggacuaugaagaguuu

SEQ ID NO: 399304 - RNA, 19 nt, Homo sapiens
  misc_RNA (1)...(19): siRNA sense strand
gaaguugcuugggaaguga

SEQ ID NO: 399305 - RNA, 19 nt, Homo sapiens
  misc_RNA (1)...(19): siRNA sense strand
ccagacaccugacauuaag

SEQ ID NO: 399306 - RNA, 19 nt, Homo sapiens
  misc_RNA (1)...(19): siRNA sense strand
caaccaucuugauaaguuu

SEQ ID NO: 399307 - RNA, 19 nt, Homo sapiens
  misc_RNA (1)...(19): siRNA sense strand
aaagggaucgguuaaauau

SEQ ID NO: 399308 - RNA, 19 nt, Homo sapiens
  misc_RNA (1)...(19): siRNA sense strand
aagaugaaguggaggauga

SEQ ID NO: 399309 - RNA, 19 nt, Homo sapiens
  misc_RNA (1)...(19): siRNA sense strand
gcaauagaagcugaacaua

SEQ ID NO: 399310 - RNA, 19 nt, Homo sapiens
  misc_RNA (1)...(19): siRNA sense strand
cuaaguuucucuauggauu

SEQ ID NO: 399311 - RNA, 19 nt, Homo sapiens
  misc_RNA (1)...(19): siRNA sense strand
caacucagcgacagucauu

SEQ ID NO: 399312 - RNA, 19 nt, Homo sapiens
  misc_RNA (1)...(19): siRNA sense strand
guacaaggccagaauccaa

SEQ ID NO: 399313 - RNA, 19 nt, Homo sapiens
  misc_RNA (1)...(19): siRNA sense strand
ggugacagaucaugcagau

SEQ ID NO: 399314 - RNA, 19 nt, Homo sapiens
  misc_RNA (1)...(19): siRNA sense strand
guuagagguugucaucuug

SEQ ID NO: 399315 - RNA, 19 nt, Homo sapiens
  misc_RNA (1)...(19): siRNA sense strand
cggcuugaauguuaagaaa

SEQ ID NO: 399316 - RNA, 19 nt, Homo sapiens
  misc_RNA (1)...(19): siRNA sense strand
uggcugauccuacugcuua

SEQ ID NO: 399317 - RNA, 19 nt, Homo sapiens
  misc_RNA (1)...(19): siRNA sense strand
ucagagcagugauguggaa

SEQ ID NO: 399318 - RNA, 19 nt, Homo sapiens
  misc_RNA (1)...(19): siRNA sense strand
gcagagcuuuuccagauaa

SEQ ID NO: 399319 - RNA, 19 nt, Homo sapiens
  misc_RNA (1)...(19): siRNA sense strand
aaaugaugcugucagaaga

SEQ ID NO: 399320 - RNA, 19 nt, Homo sapiens
  misc_RNA (1)...(19): siRNA sense strand
aaagcugcauggugaauau

SEQ ID NO: 399321 - RNA, 19 nt, Homo sapiens
  misc_RNA (1)...(19): siRNA sense strand
gagcagugauguggaagau

SEQ ID NO: 399322 - RNA, 19 nt, Homo sapiens
  misc_RNA (1)...(19): siRNA sense strand
gccagacaccugacauuaa

SEQ ID NO: 399323 - RNA, 19 nt, Homo sapiens
  misc_RNA (1)...(19): siRNA sense strand
ucauugcgcucacguguuc

SEQ ID NO: 399324 - RNA, 19 nt, Homo sapiens
  misc_RNA (1)...(19): siRNA sense strand
cuacaaccaucuugauaag

SEQ ID NO: 399325 - RNA, 19 nt, Homo sapiens
  misc_RNA (1)...(19): siRNA sense strand
uuacugcucuuugaaguug

SEQ ID NO: 399326 - RNA, 19 nt, Homo sapiens
  misc_RNA (1)...(19): siRNA sense strand
aacauaugcugaagagaaa

SEQ ID NO: 399327 - RNA, 19 nt, Homo sapiens
  misc_RNA (1)...(19): siRNA sense strand
aaacaaaggagcugacauc

SEQ ID NO: 399328 - RNA, 19 nt, Homo sapiens
  misc_RNA (1)...(19): siRNA sense strand
gagauacgaugaggaagag

SEQ ID NO: 399329 - RNA, 19 nt, Homo sapiens
  misc_RNA (1)...(19): siRNA sense strand
gagaaauuccugaccugaa

SEQ ID NO: 399330 - RNA, 19 nt, Homo sapiens
  misc_RNA (1)...(19): siRNA sense strand
auacugugauucagacaaa

SEQ ID NO: 399331 - RNA, 19 nt, Homo sapiens
  misc_RNA (1)...(19): siRNA sense strand
agggaucgguuaaauauca

SEQ ID NO: 399332 - RNA, 19 nt, Homo sapiens
  misc_RNA (1)...(19): siRNA sense strand
ucccaggccuuccucagua

SEQ ID NO: 399333 - RNA, 19 nt, Homo sapiens
  misc_RNA (1)...(19): siRNA sense strand
uaaaugaugcugucagaag

SEQ ID NO: 399334 - RNA, 19 nt, Homo sapiens
  misc_RNA (1)...(19): siRNA sense strand
ugagagauacgaugaggaa

SEQ ID NO: 399335 - RNA, 19 nt, Homo sapiens
  misc_RNA (1)...(19): siRNA sense strand
uguaaaugaugcugucaga

SEQ ID NO: 399336 - RNA, 19 nt, Homo sapiens
  misc_RNA (1)...(19): siRNA sense strand
ccagcugaaugcacuguga

SEQ ID NO: 399337 - RNA, 19 nt, Homo sapiens
  misc_RNA (1)...(19): siRNA sense strand
caacaaccgcacagauaga

SEQ ID NO: 399338 - RNA, 19 nt, Homo sapiens
  misc_RNA (1)...(19): siRNA sense strand
ugaaguugcuugggaagug

SEQ ID NO: 399339 - RNA, 19 nt, Homo sapiens
  misc_RNA (1)...(19): siRNA sense strand
caucucgacuuugaucuug

SEQ ID NO: 399340 - RNA, 19 nt, Homo sapiens
  misc_RNA (1)...(19): siRNA sense strand
caacguggaaacccugaaa

SEQ ID NO: 399341 - RNA, 19 nt, Homo sapiens
  misc_RNA (1)...(19): siRNA sense strand
gcugaaagggaucgguuaa

SEQ ID NO: 399342 - RNA, 19 nt, Homo sapiens
  misc_RNA (1)...(19): siRNA sense strand
gcacagauagagucaaggu

SEQ ID NO: 399343 - RNA, 19 nt, Homo sapiens
  misc_RNA (1)...(19): siRNA sense strand
ucugauagguccauauuuu

SEQ ID NO: 399344 - RNA, 19 nt, Homo sapiens
  misc_RNA (1)...(19): siRNA sense strand
aaaguuggaggcaucuaua

SEQ ID NO: 399345 - RNA, 19 nt, Homo sapiens
  misc_RNA (1)...(19): siRNA sense strand
gagcgagcuuccguucauu

SEQ ID NO: 399346 - RNA, 19 nt, Homo sapiens
  misc_RNA (1)...(19): siRNA sense strand
gaccgagaagccaaugaua

SEQ ID NO: 399347 - RNA, 19 nt, Homo sapiens
  misc_RNA (1)...(19): siRNA sense strand
uaugaagacucagguggaa

SEQ ID NO: 399348 - RNA, 19 nt, Homo sapiens
  misc_RNA (1)...(19): siRNA sense strand
ggaguuacugcucuuugaa

SEQ ID NO: 399349 - RNA, 19 nt, Homo sapiens
  misc_RNA (1)...(19): siRNA sense strand
cagaggaacagaacugaga

SEQ ID NO: 399350 - RNA, 19 nt, Homo sapiens
  misc_RNA (1)...(19): siRNA sense strand
ggauuggacuuuucaacaa

SEQ ID NO: 399351 - RNA, 19 nt, Homo sapiens
  misc_RNA (1)...(19): siRNA sense strand
gaaggaaaaguuuggaaaa

SEQ ID NO: 399352 - RNA, 19 nt, Homo sapiens
  misc_RNA (1)...(19): siRNA sense strand
gaauccuuauccaggcuaa

SEQ ID NO: 399353 - RNA, 19 nt, Homo sapiens
  misc_RNA (1)...(19): siRNA sense strand
agagaaagccugauguagu

SEQ ID NO: 399354 - RNA, 19 nt, Homo sapiens
  misc_RNA (1)...(19): siRNA sense strand
gugugaaccuguaaaugau

SEQ ID NO: 399355 - RNA, 19 nt, Homo sapiens
  misc_RNA (1)...(19): siRNA sense strand
agugugaaccuguaaauga

SEQ ID NO: 399356 - RNA, 19 nt, Homo sapiens
  misc_RNA (1)...(19): siRNA sense strand
gauagagucaaggugauuu

SEQ ID NO: 399357 - RNA, 19 nt, Homo sapiens
  misc_RNA (1)...(19): siRNA sense strand
cgcacaacaugauugauga

SEQ ID NO: 399358 - RNA, 19 nt, Homo sapiens
  misc_RNA (1)...(19): siRNA sense strand
cauuaugccugccaagaca

SEQ ID NO: 399359 - RNA, 19 nt, Homo sapiens
  misc_RNA (1)...(19): siRNA sense strand
cuacacuacuugggaggua

SEQ ID NO: 399360 - RNA, 19 nt, Homo sapiens
  misc_RNA (1)...(19): siRNA sense strand
gcagugucggcauuccuua

SEQ ID NO: 399361 - RNA, 19 nt, Homo sapiens
  misc_RNA (1)...(19): siRNA sense strand
ggaagauggcugauagaag

SEQ ID NO: 399362 - RNA, 19 nt, Homo sapiens
  misc_RNA (1)...(19): siRNA sense strand
ccgagaagccaaugauaug

SEQ ID NO: 399363 - RNA, 19 nt, Homo sapiens
  misc_RNA (1)...(19): siRNA sense strand
gggaagugaccaauaaagu

SEQ ID NO: 399364 - RNA, 19 nt, Homo sapiens
  misc_RNA (1)...(19): siRNA sense strand
gcaucuauacugugauuca

SEQ ID NO: 399365 - RNA, 19 nt, Homo sapiens
  misc_RNA (1)...(19): siRNA sense strand
uguuagagguugucaucuu

SEQ ID NO: 399366 - RNA, 19 nt, Homo sapiens
  misc_RNA (1)...(19): siRNA sense strand
gggaaaggcagauuuacca

SEQ ID NO: 399367 - RNA, 19 nt, Homo sapiens
  misc_RNA (1)...(19): siRNA sense strand
gaagaguuuguuagagguu

SEQ ID NO: 399368 - RNA, 19 nt, Homo sapiens
  misc_RNA (1)...(19): siRNA sense strand
ggaagaggaggcugaaagg

SEQ ID NO: 399369 - RNA, 19 nt, Homo sapiens
  misc_RNA (1)...(19): siRNA sense strand
gauacuuaggcagauauua

SEQ ID NO: 399370 - RNA, 19 nt, Homo sapiens
  misc_RNA (1)...(19): siRNA sense strand
gcacagaagucauauggaa

SEQ ID NO: 399371 - RNA, 19 nt, Homo sapiens
  misc_RNA (1)...(19): siRNA sense strand
ggacagaauuucacuccaa

SEQ ID NO: 399372 - RNA, 19 nt, Homo sapiens
  misc_RNA (1)...(19): siRNA sense strand
gaacuuacaggacagaauu

SEQ ID NO: 399373 - RNA, 19 nt, Homo sapiens
  misc_RNA (1)...(19): siRNA sense strand
ggacaaacagucaaacuug

SEQ ID NO: 399374 - RNA, 19 nt, Homo sapiens
  misc_RNA (1)...(19): siRNA sense strand
guagagagccuucaguuga

SEQ ID NO: 399375 - RNA, 19 nt, Homo sapiens
  misc_RNA (1)...(19): siRNA sense strand
gaucaaacaguacuuauuc

SEQ ID NO: 399376 - RNA, 19 nt, Homo sapiens
  misc_RNA (1)...(19): siRNA sense strand
gcauggcacucccaagauu

SEQ ID NO: 399377 - RNA, 19 nt, Homo sapiens
  misc_RNA (1)...(19): siRNA sense strand
ggaaauagugaccaagaaa

SEQ ID NO: 399378 - RNA, 19 nt, Homo sapiens
  misc_RNA (1)...(19): siRNA sense strand
cucccaagauugauaauua

SEQ ID NO: 399379 - RNA, 19 nt, Homo sapiens
  misc_RNA (1)...(19): siRNA sense strand
ugucacaacuccauaaaug

SEQ ID NO: 399380 - RNA, 19 nt, Homo sapiens
  misc_RNA (1)...(19): siRNA sense strand
uguagaagcugaaacuaug

SEQ ID NO: 399381 - RNA, 19 nt, Homo sapiens
  misc_RNA (1)...(19): siRNA sense strand
uaacuuugguccgaaauga

SEQ ID NO: 399382 - RNA, 19 nt, Homo sapiens
  misc_RNA (1)...(19): siRNA sense strand
gacagaauuucacuccaaa

SEQ ID NO: 399383 - RNA, 19 nt, Homo sapiens
  misc_RNA (1)...(19): siRNA sense strand
caaagguggcucuguuuaa

SEQ ID NO: 399384 - RNA, 19 nt, Homo sapiens
  misc_RNA (1)...(19): siRNA sense strand
cagcuaaacuuggaaggaa

SEQ ID NO: 399385 - RNA, 19 nt, Homo sapiens
  misc_RNA (1)...(19): siRNA sense strand
gaaauagugaccaagaaau

SEQ ID NO: 399386 - RNA, 19 nt, Homo sapiens
  misc_RNA (1)...(19): siRNA sense strand
caagaaaugcagcagcuaa

SEQ ID NO: 399387 - RNA, 19 nt, Homo sapiens
  misc_RNA (1)...(19): siRNA sense strand
cauguugucuguaaagaug

SEQ ID NO: 399388 - RNA, 19 nt, Homo sapiens
  misc_RNA (1)...(19): siRNA sense strand
guacagguguggagagagu

SEQ ID NO: 399389 - RNA, 19 nt, Homo sapiens
  misc_RNA (1)...(19): siRNA sense strand
caacagugaugacauuggu

SEQ ID NO: 399390 - RNA, 19 nt, Homo sapiens
  misc_RNA (1)...(19): siRNA sense strand
ccagauacuugcauguaga

SEQ ID NO: 399391 - RNA, 19 nt, Homo sapiens
  misc_RNA (1)...(19): siRNA sense strand
aaagucaucuccaaaccuu

SEQ ID NO: 399392 - RNA, 19 nt, Homo sapiens
  misc_RNA (1)...(19): siRNA sense strand
uaaggcagaguauacauuu

SEQ ID NO: 399393 - RNA, 19 nt, Homo sapiens
  misc_RNA (1)...(19): siRNA sense strand
gcacaaauucaaccagugu

SEQ ID NO: 399394 - RNA, 19 nt, Homo sapiens
  misc_RNA (1)...(19): siRNA sense strand
ggaucaaacaguacuuauu

SEQ ID NO: 399395 - RNA, 19 nt, Homo sapiens
  misc_RNA (1)...(19): siRNA sense strand
gcacucccaagauugauaa

SEQ ID NO: 399396 - RNA, 19 nt, Homo sapiens
  misc_RNA (1)...(19): siRNA sense strand
aaagguggcucuguuuaau

SEQ ID NO: 399397 - RNA, 19 nt, Homo sapiens
  misc_RNA (1)...(19): siRNA sense strand
uggcaacagugaugacauu

SEQ ID NO: 399398 - RNA, 19 nt, Homo sapiens
  misc_RNA (1)...(19): siRNA sense strand
uaagcagaccgcauuauug

SEQ ID NO: 399399 - RNA, 19 nt, Homo sapiens
  misc_RNA (1)...(19): siRNA sense strand
caaccagugucacaucauc

SEQ ID NO: 399400 - RNA, 19 nt, Homo sapiens
  misc_RNA (1)...(19): siRNA sense strand
ucucuuggaugaugaugaa

SEQ ID NO: 399401 - RNA, 19 nt, Homo sapiens
  misc_RNA (1)...(19): siRNA sense strand
gguccgaaaugauggaauc

SEQ ID NO: 399402 - RNA, 19 nt, Homo sapiens
  misc_RNA (1)...(19): siRNA sense strand
guacuuauucuucaugcaa

SEQ ID NO: 399403 - RNA, 19 nt, Homo sapiens
  misc_RNA (1)...(19): siRNA sense strand
caaacaguacuuauucuuc

SEQ ID NO: 399404 - RNA, 19 nt, Homo sapiens
  misc_RNA (1)...(19): siRNA sense strand
acaaagguggcucuguuua

SEQ ID NO: 399405 - RNA, 19 nt, Homo sapiens
  misc_RNA (1)...(19): siRNA sense strand
ugaaucagaaggagaagaa

SEQ ID NO: 399406 - RNA, 19 nt, Homo sapiens
  misc_RNA (1)...(19): siRNA sense strand
ccaccagccuuaccuuuac

SEQ ID NO: 399407 - RNA, 19 nt, Homo sapiens
  misc_RNA (1)...(19): siRNA sense strand
gcagaccgcauuauuggau

SEQ ID NO: 399408 - RNA, 19 nt, Homo sapiens
  misc_RNA (1)...(19): siRNA sense strand
gaacuauugcacagccaaa

SEQ ID NO: 399409 - RNA, 19 nt, Homo sapiens
  misc_RNA (1)...(19): siRNA sense strand
ggauaaaagucaucuccaa

SEQ ID NO: 399410 - RNA, 19 nt, Homo sapiens
  misc_RNA (1)...(19): siRNA sense strand
cgagggaaguuacacaaac

SEQ ID NO: 399411 - RNA, 19 nt, Homo sapiens
  misc_RNA (1)...(19): siRNA sense strand
uuaggaaaguugauaagca

SEQ ID NO: 399412 - RNA, 19 nt, Homo sapiens
  misc_RNA (1)...(19): siRNA sense strand
gaaaugcagcagcuaaacu

SEQ ID NO: 399413 - RNA, 19 nt, Homo sapiens
  misc_RNA (1)...(19): siRNA sense strand
gcgaggggaucaaacagua

SEQ ID NO: 399414 - RNA, 19 nt, Homo sapiens
  misc_RNA (1)...(19): siRNA sense strand
aaagaagcagucauugaaa

SEQ ID NO: 399415 - RNA, 19 nt, Homo sapiens
  misc_RNA (1)...(19): siRNA sense strand
cuguaaagauguucuaugg

SEQ ID NO: 399416 - RNA, 19 nt, Homo sapiens
  misc_RNA (1)...(19): siRNA sense strand
acaaacgccagcacaaauu

SEQ ID NO: 399417 - RNA, 19 nt, Homo sapiens
  misc_RNA (1)...(19): siRNA sense strand
auacuugcauguagaagga

SEQ ID NO: 399418 - RNA, 19 nt, Homo sapiens
  misc_RNA (1)...(19): siRNA sense strand
cuacgaucccagacaguua

SEQ ID NO: 399419 - RNA, 19 nt, Homo sapiens
  misc_RNA (1)...(19): siRNA sense strand
cacuucauguugucuguaa

SEQ ID NO: 399420 - RNA, 19 nt, Homo sapiens
  misc_RNA (1)...(19): siRNA sense strand
gcauguagaaggagguaau

SEQ ID NO: 399421 - RNA, 19 nt, Homo sapiens
  misc_RNA (1)...(19): siRNA sense strand
caaacagcgagggaaguua

SEQ ID NO: 399422 - RNA, 19 nt, Homo sapiens
  misc_RNA (1)...(19): siRNA sense strand
ccuaacgaaucaaacacaa

SEQ ID NO: 399423 - RNA, 19 nt, Homo sapiens
  misc_RNA (1)...(19): siRNA sense strand
agacaguuaguaccagaua

SEQ ID NO: 399424 - RNA, 19 nt, Homo sapiens
  misc_RNA (1)...(19): siRNA sense strand
acacaaacgccagcacaaa

SEQ ID NO: 399425 - RNA, 19 nt, Homo sapiens
  misc_RNA (1)...(19): siRNA sense strand
gggaaugggcccuguccuu

SEQ ID NO: 399426 - RNA, 19 nt, Homo sapiens
  misc_RNA (1)...(19): siRNA sense strand
gaaccaaauaaagagauga

SEQ ID NO: 399427 - RNA, 19 nt, Homo sapiens
  misc_RNA (1)...(19): siRNA sense strand
gaaggaaagaacuauugca

SEQ ID NO: 399428 - RNA, 19 nt, Homo sapiens
  misc_RNA (1)...(19): siRNA sense strand
aggaaauagugaccaagaa

SEQ ID NO: 399429 - RNA, 19 nt, Homo sapiens
  misc_RNA (1)...(19): siRNA sense strand
gagggaaguuacacaaacg

SEQ ID NO: 399430 - RNA, 19 nt, Homo sapiens
  misc_RNA (1)...(19): siRNA sense strand
ggauguagaagcugaaacu

SEQ ID NO: 399431 - RNA, 19 nt, Homo sapiens
  misc_RNA (1)...(19): siRNA sense strand
gaauucacaguccgagaug

SEQ ID NO: 399432 - RNA, 19 nt, Homo sapiens
  misc_RNA (1)...(19): siRNA sense strand
aaauagugaccaagaaaug

SEQ ID NO: 399433 - RNA, 19 nt, Homo sapiens
  misc_RNA (1)...(19): siRNA sense strand
gugaugacauugguguguu

SEQ ID NO: 399434 - RNA, 19 nt, Homo sapiens
  misc_RNA (1)...(19): siRNA sense strand
gcgagggaaguuacacaaa

SEQ ID NO: 399435 - RNA, 19 nt, Homo sapiens
  misc_RNA (1)...(19): siRNA sense strand
caaacgccagcacaaauuc

SEQ ID NO: 399436 - RNA, 19 nt, Homo sapiens
  misc_RNA (1)...(19): siRNA sense strand
aaaagaagcagucauugaa

SEQ ID NO: 399437 - RNA, 19 nt, Homo sapiens
  misc_RNA (1)...(19): siRNA sense strand
uaacgaaucaaacacaaac

SEQ ID NO: 399438 - RNA, 19 nt, Homo sapiens
  misc_RNA (1)...(19): siRNA sense strand
caaauuuacgagugugguu

SEQ ID NO: 399439 - RNA, 19 nt, Homo sapiens
  misc_RNA (1)...(19): siRNA sense strand
agaaccaaauaaagagaug

SEQ ID NO: 399440 - RNA, 19 nt, Homo sapiens
  misc_RNA (1)...(19): siRNA sense strand
agaaggagaagaauucaca

SEQ ID NO: 399441 - RNA, 19 nt, Homo sapiens
  misc_RNA (1)...(19): siRNA sense strand
caaauggaacgcgaugguu

SEQ ID NO: 399442 - RNA, 19 nt, Homo sapiens
  misc_RNA (1)...(19): siRNA sense strand
cacaaacgccagcacaaau

SEQ ID NO: 399443 - RNA, 19 nt, Homo sapiens
  misc_RNA (1)...(19): siRNA sense strand
caguaacuuugguccgaaa

SEQ ID NO: 399444 - RNA, 19 nt, Homo sapiens
  misc_RNA (1)...(19): siRNA sense strand
gcagcuaaacuuggaagga

SEQ ID NO: 399445 - RNA, 19 nt, Homo sapiens
  misc_RNA (1)...(19): siRNA sense strand
acagaagucauauggaaau

SEQ ID NO: 399446 - RNA, 19 nt, Homo sapiens
  misc_RNA (1)...(19): siRNA sense strand
cagaagucauauggaaaug

SEQ ID NO: 399447 - RNA, 19 nt, Homo sapiens
  misc_RNA (1)...(19): siRNA sense strand
aaaugcagcagcuaaacuu

SEQ ID NO: 399448 - RNA, 19 nt, Homo sapiens
  misc_RNA (1)...(19): siRNA sense strand
caaacagucaaacuugugu

SEQ ID NO: 399449 - RNA, 19 nt, Homo sapiens
  misc_RNA (1)...(19): siRNA sense strand
uaccagauacuugcaugua

SEQ ID NO: 399450 - RNA, 19 nt, Homo sapiens
  misc_RNA (1)...(19): siRNA sense strand
gauaaaagucaucuccaaa

SEQ ID NO: 399451 - RNA, 19 nt, Homo sapiens
  misc_RNA (1)...(19): siRNA sense strand
uggaaggaaagaacuauug

SEQ ID NO: 399452 - RNA, 19 nt, Homo sapiens
  misc_RNA (1)...(19): siRNA sense strand
ggaaggaaagaacuauugc

SEQ ID NO: 399453 - RNA, 19 nt, Homo sapiens
  misc_RNA (1)...(19): siRNA sense strand
uaggaaauagugaccaaga

SEQ ID NO: 399454 - RNA, 19 nt, Homo sapiens
  misc_RNA (1)...(19): siRNA sense strand
uccaccagccuuaccuuua

SEQ ID NO: 399455 - RNA, 19 nt, Homo sapiens
  misc_RNA (1)...(19): siRNA sense strand
ugauaagcagaccgcauua

SEQ ID NO: 399456 - RNA, 19 nt, Homo sapiens
  misc_RNA (1)...(19): siRNA sense strand
aaucagaaggagaagaauu

SEQ ID NO: 399457 - RNA, 19 nt, Homo sapiens
  misc_RNA (1)...(19): siRNA sense strand
gcacuucauguugucugua

SEQ ID NO: 399458 - RNA, 19 nt, Homo sapiens
  misc_RNA (1)...(19): siRNA sense strand
uagaagcugaaacuaugua

SEQ ID NO: 399459 - RNA, 19 nt, Homo sapiens
  misc_RNA (1)...(19): siRNA sense strand
gauguagaagcugaaacua

SEQ ID NO: 399460 - RNA, 19 nt, Homo sapiens
  misc_RNA (1)...(19): siRNA sense strand
aagaagcagucauugaaaa

SEQ ID NO: 399461 - RNA, 19 nt, Homo sapiens
  misc_RNA (1)...(19): siRNA sense strand
aagaaaugcagcagcuaaa

SEQ ID NO: 399462 - RNA, 19 nt, Homo sapiens
  misc_RNA (1)...(19): siRNA sense strand
gcccaccuccuuguguaua

SEQ ID NO: 399463 - RNA, 19 nt, Homo sapiens
  misc_RNA (1)...(19): siRNA sense strand
acaaacagcgagggaaguu

SEQ ID NO: 399464 - RNA, 19 nt, Homo sapiens
  misc_RNA (1)...(19): siRNA sense strand
gggaucaaacaguacuuau

SEQ ID NO: 399465 - RNA, 19 nt, Homo sapiens
  misc_RNA (1)...(19): siRNA sense strand
ccaagauugauaauuagga

SEQ ID NO: 399466 - RNA, 19 nt, Homo sapiens
  misc_RNA (1)...(19): siRNA sense strand
uggcauggcacucccaaga

SEQ ID NO: 399467 - RNA, 19 nt, Homo sapiens
  misc_RNA (1)...(19): siRNA sense strand
uugauaagcagaccgcauu

SEQ ID NO: 399468 - RNA, 19 nt, Homo sapiens
  misc_RNA (1)...(19): siRNA sense strand
ugcagcagcuaaacuugga

SEQ ID NO: 399469 - RNA, 19 nt, Homo sapiens
  misc_RNA (1)...(19): siRNA sense strand
aagcagaccgcauuauugg

SEQ ID NO: 399470 - RNA, 19 nt, Homo sapiens
  misc_RNA (1)...(19): siRNA sense strand
gcacagaagucauauggaa

SEQ ID NO: 399471 - RNA, 19 nt, Homo sapiens
  misc_RNA (1)...(19): siRNA sense strand
gggaagcuaugcgaaauua

SEQ ID NO: 399472 - RNA, 19 nt, Homo sapiens
  misc_RNA (1)...(19): siRNA sense strand
ggacagaauuucacuccaa

SEQ ID NO: 399473 - RNA, 19 nt, Homo sapiens
  misc_RNA (1)...(19): siRNA sense strand
gaacuuacaggacagaauu

SEQ ID NO: 399474 - RNA, 19 nt, Homo sapiens
  misc_RNA (1)...(19): siRNA sense strand
ggacaaacagucaaacuug

SEQ ID NO: 399475 - RNA, 19 nt, Homo sapiens
  misc_RNA (1)...(19): siRNA sense strand
guagagagccuucaguuga

SEQ ID NO: 399476 - RNA, 19 nt, Homo sapiens
  misc_RNA (1)...(19): siRNA sense strand
gaucaaacaguacuuauuc

SEQ ID NO: 399477 - RNA, 19 nt, Homo sapiens
  misc_RNA (1)...(19): siRNA sense strand
gcauggcacucccaagauu

SEQ ID NO: 399478 - RNA, 19 nt, Homo sapiens
  misc_RNA (1)...(19): siRNA sense strand
gaagcuaugcgaaauuauu

SEQ ID NO: 399479 - RNA, 19 nt, Homo sapiens
  misc_RNA (1)...(19): siRNA sense strand
ggaaauagugaccaagaaa

SEQ ID NO: 399480 - RNA, 19 nt, Homo sapiens
  misc_RNA (1)...(19): siRNA sense strand
cucccaagauugauaauua

SEQ ID NO: 399481 - RNA, 19 nt, Homo sapiens
  misc_RNA (1)...(19): siRNA sense strand
ugucacaacuccauaaaug

SEQ ID NO: 399482 - RNA, 19 nt, Homo sapiens
  misc_RNA (1)...(19): siRNA sense strand
uguagaagcugaaacuaug

SEQ ID NO: 399483 - RNA, 19 nt, Homo sapiens
  misc_RNA (1)...(19): siRNA sense strand
uaacuuugguccgaaauga

SEQ ID NO: 399484 - RNA, 19 nt, Homo sapiens
  misc_RNA (1)...(19): siRNA sense strand
gacagaauuucacuccaaa

SEQ ID NO: 399485 - RNA, 19 nt, Homo sapiens
  misc_RNA (1)...(19): siRNA sense strand
caaagguggcucuguuuaa

SEQ ID NO: 399486 - RNA, 19 nt, Homo sapiens
  misc_RNA (1)...(19): siRNA sense strand
cagcuaaacuuggaaggaa

SEQ ID NO: 399487 - RNA, 19 nt, Homo sapiens
  misc_RNA (1)...(19): siRNA sense strand
gaaauagugaccaagaaau

SEQ ID NO: 399488 - RNA, 19 nt, Homo sapiens
  misc_RNA (1)...(19): siRNA sense strand
caagaaaugcagcagcuaa

SEQ ID NO: 399489 - RNA, 19 nt, Homo sapiens
  misc_RNA (1)...(19): siRNA sense strand
cauguugucuguaaagaug

SEQ ID NO: 399490 - RNA, 19 nt, Homo sapiens
  misc_RNA (1)...(19): siRNA sense strand
guacagguguggagagagu

SEQ ID NO: 399491 - RNA, 19 nt, Homo sapiens
  misc_RNA (1)...(19): siRNA sense strand
caacagugaugacauuggu

SEQ ID NO: 399492 - RNA, 19 nt, Homo sapiens
  misc_RNA (1)...(19): siRNA sense strand
ccagauacuugcauguaga

SEQ ID NO: 399493 - RNA, 19 nt, Homo sapiens
  misc_RNA (1)...(19): siRNA sense strand
aaagucaucuccaaaccuu

SEQ ID NO: 399494 - RNA, 19 nt, Homo sapiens
  misc_RNA (1)...(19): siRNA sense strand
uaaggcagaguauacauuu

SEQ ID NO: 399495 - RNA, 19 nt, Homo sapiens
  misc_RNA (1)...(19): siRNA sense strand
gcacaaauucaaccagugu

SEQ ID NO: 399496 - RNA, 19 nt, Homo sapiens
  misc_RNA (1)...(19): siRNA sense strand
ggaucaaacaguacuuauu

SEQ ID NO: 399497 - RNA, 19 nt, Homo sapiens
  misc_RNA (1)...(19): siRNA sense strand
ccaccuaaacgacuuacua

SEQ ID NO: 399498 - RNA, 19 nt, Homo sapiens
  misc_RNA (1)...(19): siRNA sense strand
gcacucccaagauugauaa

SEQ ID NO: 399499 - RNA, 19 nt, Homo sapiens
  misc_RNA (1)...(19): siRNA sense strand
aaagguggcucuguuuaau

SEQ ID NO: 399500 - RNA, 19 nt, Homo sapiens
  misc_RNA (1)...(19): siRNA sense strand
uggcaacagugaugacauu

SEQ ID NO: 399501 - RNA, 19 nt, Homo sapiens
  misc_RNA (1)...(19): siRNA sense strand
uaagcagaccgcauuauug

SEQ ID NO: 399502 - RNA, 19 nt, Homo sapiens
  misc_RNA (1)...(19): siRNA sense strand
caaccagugucacaucauc

SEQ ID NO: 399503 - RNA, 19 nt, Homo sapiens
  misc_RNA (1)...(19): siRNA sense strand
ucucuuggaugaugaugaa

SEQ ID NO: 399504 - RNA, 19 nt, Homo sapiens
  misc_RNA (1)...(19): siRNA sense strand
gguccgaaaugauggaauc

SEQ ID NO: 399505 - RNA, 19 nt, Homo sapiens
  misc_RNA (1)...(19): siRNA sense strand
guacuuauucuucaugcaa

SEQ ID NO: 399506 - RNA, 19 nt, Homo sapiens
  misc_RNA (1)...(19): siRNA sense strand
caaacaguacuuauucuuc

SEQ ID NO: 399507 - RNA, 19 nt, Homo sapiens
  misc_RNA (1)...(19): siRNA sense strand
acaaagguggcucuguuua

SEQ ID NO: 399508 - RNA, 19 nt, Homo sapiens
  misc_RNA (1)...(19): siRNA sense strand
ugaaucagaaggagaagaa

SEQ ID NO: 399509 - RNA, 19 nt, Homo sapiens
  misc_RNA (1)...(19): siRNA sense strand
ccaccagccuuaccuuuac

SEQ ID NO: 399510 - RNA, 19 nt, Homo sapiens
  misc_RNA (1)...(19): siRNA sense strand
gcagaccgcauuauuggau

SEQ ID NO: 399511 - RNA, 19 nt, Homo sapiens
  misc_RNA (1)...(19): siRNA sense strand
gaacuauugcacagccaaa

SEQ ID NO: 399512 - RNA, 19 nt, Homo sapiens
  misc_RNA (1)...(19): siRNA sense strand
ggauaaaagucaucuccaa

SEQ ID NO: 399513 - RNA, 19 nt, Homo sapiens
  misc_RNA (1)...(19): siRNA sense strand
cgagggaaguuacacaaac

SEQ ID NO: 399514 - RNA, 19 nt, Homo sapiens
  misc_RNA (1)...(19): siRNA sense strand
uuaggaaaguugauaagca

SEQ ID NO: 399515 - RNA, 19 nt, Homo sapiens
  misc_RNA (1)...(19): siRNA sense strand
gaaaugcagcagcuaaacu

SEQ ID NO: 399516 - RNA, 19 nt, Homo sapiens
  misc_RNA (1)...(19): siRNA sense strand
gcgaggggaucaaacagua

SEQ ID NO: 399517 - RNA, 19 nt, Homo sapiens
  misc_RNA (1)...(19): siRNA sense strand
aaagaagcagucauugaaa

SEQ ID NO: 399518 - RNA, 19 nt, Homo sapiens
  misc_RNA (1)...(19): siRNA sense strand
cuguaaagauguucuaugg

SEQ ID NO: 399519 - RNA, 19 nt, Homo sapiens
  misc_RNA (1)...(19): siRNA sense strand
acaaacgccagcacaaauu

SEQ ID NO: 399520 - RNA, 19 nt, Homo sapiens
  misc_RNA (1)...(19): siRNA sense strand
auacuugcauguagaagga

SEQ ID NO: 399521 - RNA, 19 nt, Homo sapiens
  misc_RNA (1)...(19): siRNA sense strand
cuacgaucccagacaguua

SEQ ID NO: 399522 - RNA, 19 nt, Homo sapiens
  misc_RNA (1)...(19): siRNA sense strand
cacuucauguugucuguaa

SEQ ID NO: 399523 - RNA, 19 nt, Homo sapiens
  misc_RNA (1)...(19): siRNA sense strand
uagggaagcuaugcgaaau

SEQ ID NO: 399524 - RNA, 19 nt, Homo sapiens
  misc_RNA (1)...(19): siRNA sense strand
caaacagcgagggaaguua

SEQ ID NO: 399525 - RNA, 19 nt, Homo sapiens
  misc_RNA (1)...(19): siRNA sense strand
ccuaacgaaucaaacacaa

SEQ ID NO: 399526 - RNA, 19 nt, Homo sapiens
  misc_RNA (1)...(19): siRNA sense strand
ugagcggccuccaccuaaa

SEQ ID NO: 399527 - RNA, 19 nt, Homo sapiens
  misc_RNA (1)...(19): siRNA sense strand
gcauguagaaggagguaau

SEQ ID NO: 399528 - RNA, 19 nt, Homo sapiens
  misc_RNA (1)...(19): siRNA sense strand
agacaguuaguaccagaua

SEQ ID NO: 399529 - RNA, 19 nt, Homo sapiens
  misc_RNA (1)...(19): siRNA sense strand
acacaaacgccagcacaaa

SEQ ID NO: 399530 - RNA, 19 nt, Homo sapiens
  misc_RNA (1)...(19): siRNA sense strand
gggaaugggcccuguccuu

SEQ ID NO: 399531 - RNA, 19 nt, Homo sapiens
  misc_RNA (1)...(19): siRNA sense strand
gaaccaaauaaagagauga

SEQ ID NO: 399532 - RNA, 19 nt, Homo sapiens
  misc_RNA (1)...(19): siRNA sense strand
aggaaauagugaccaagaa

SEQ ID NO: 399533 - RNA, 19 nt, Homo sapiens
  misc_RNA (1)...(19): siRNA sense strand
gagggaaguuacacaaacg

SEQ ID NO: 399534 - RNA, 19 nt, Homo sapiens
  misc_RNA (1)...(19): siRNA sense strand
ggauguagaagcugaaacu

SEQ ID NO: 399535 - RNA, 19 nt, Homo sapiens
  misc_RNA (1)...(19): siRNA sense strand
gaauucacaguccgagaug

SEQ ID NO: 399536 - RNA, 19 nt, Homo sapiens
  misc_RNA (1)...(19): siRNA sense strand
gugaugacauugguguguu

SEQ ID NO: 399537 - RNA, 19 nt, Homo sapiens
  misc_RNA (1)...(19): siRNA sense strand
gaaggaaagaacuauugca

SEQ ID NO: 399538 - RNA, 19 nt, Homo sapiens
  misc_RNA (1)...(19): siRNA sense strand
aaauagugaccaagaaaug

SEQ ID NO: 399539 - RNA, 19 nt, Homo sapiens
  misc_RNA (1)...(19): siRNA sense strand
gcgagggaaguuacacaaa

SEQ ID NO: 399540 - RNA, 19 nt, Homo sapiens
  misc_RNA (1)...(19): siRNA sense strand
caaacgccagcacaaauuc

SEQ ID NO: 399541 - RNA, 19 nt, Homo sapiens
  misc_RNA (1)...(19): siRNA sense strand
gugagcggccuccaccuaa

SEQ ID NO: 399542 - RNA, 19 nt, Homo sapiens
  misc_RNA (1)...(19): siRNA sense strand
uaacgaaucaaacacaaac

SEQ ID NO: 399543 - RNA, 19 nt, Homo sapiens
  misc_RNA (1)...(19): siRNA sense strand
caaauuuacgagugugguu

SEQ ID NO: 399544 - RNA, 19 nt, Homo sapiens
  misc_RNA (1)...(19): siRNA sense strand
agaaccaaauaaagagaug

SEQ ID NO: 399545 - RNA, 19 nt, Homo sapiens
  misc_RNA (1)...(19): siRNA sense strand
agaaggagaagaauucaca

SEQ ID NO: 399546 - RNA, 19 nt, Homo sapiens
  misc_RNA (1)...(19): siRNA sense strand
aaaagaagcagucauugaa

SEQ ID NO: 399547 - RNA, 19 nt, Homo sapiens
  misc_RNA (1)...(19): siRNA sense strand
gcagcuaaacuuggaagga

SEQ ID NO: 399548 - RNA, 19 nt, Homo sapiens
  misc_RNA (1)...(19): siRNA sense strand
caaauggaacgcgaugguu

SEQ ID NO: 399549 - RNA, 19 nt, Homo sapiens
  misc_RNA (1)...(19): siRNA sense strand
cacaaacgccagcacaaau

SEQ ID NO: 399550 - RNA, 19 nt, Homo sapiens
  misc_RNA (1)...(19): siRNA sense strand
acagaagucauauggaaau

SEQ ID NO: 399551 - RNA, 19 nt, Homo sapiens
  misc_RNA (1)...(19): siRNA sense strand
caguaacuuugguccgaaa

SEQ ID NO: 399552 - RNA, 19 nt, Homo sapiens
  misc_RNA (1)...(19): siRNA sense strand
uggaaggaaagaacuauug

SEQ ID NO: 399553 - RNA, 19 nt, Homo sapiens
  misc_RNA (1)...(19): siRNA sense strand
cagaagucauauggaaaug

SEQ ID NO: 399554 - RNA, 19 nt, Homo sapiens
  misc_RNA (1)...(19): siRNA sense strand
caaacagucaaacuugugu

SEQ ID NO: 399555 - RNA, 19 nt, Homo sapiens
  misc_RNA (1)...(19): siRNA sense strand
uaccagauacuugcaugua

SEQ ID NO: 399556 - RNA, 19 nt, Homo sapiens
  misc_RNA (1)...(19): siRNA sense strand
gauaaaagucaucuccaaa

SEQ ID NO: 399557 - RNA, 19 nt, Homo sapiens
  misc_RNA (1)...(19): siRNA sense strand
ggaaggaaagaacuauugc

SEQ ID NO: 399558 - RNA, 19 nt, Homo sapiens
  misc_RNA (1)...(19): siRNA sense strand
aaaugcagcagcuaaacuu

SEQ ID NO: 399559 - RNA, 19 nt, Homo sapiens
  misc_RNA (1)...(19): siRNA sense strand
aaucagaaggagaagaauu

SEQ ID NO: 399560 - RNA, 19 nt, Homo sapiens
  misc_RNA (1)...(19): siRNA sense strand
uccaccagccuuaccuuua

SEQ ID NO: 399561 - RNA, 19 nt, Homo sapiens
  misc_RNA (1)...(19): siRNA sense strand
ugauaagcagaccgcauua

SEQ ID NO: 399562 - RNA, 19 nt, Homo sapiens
  misc_RNA (1)...(19): siRNA sense strand
uaggaaauagugaccaaga

SEQ ID NO: 399563 - RNA, 19 nt, Homo sapiens
  misc_RNA (1)...(19): siRNA sense strand
cuagggaagcuaugcgaaa

SEQ ID NO: 399564 - RNA, 19 nt, Homo sapiens
  misc_RNA (1)...(19): siRNA sense strand
gcacuucauguugucugua

SEQ ID NO: 399565 - RNA, 19 nt, Homo sapiens
  misc_RNA (1)...(19): siRNA sense strand
uagaagcugaaacuaugua

SEQ ID NO: 399566 - RNA, 19 nt, Homo sapiens
  misc_RNA (1)...(19): siRNA sense strand
gauguagaagcugaaacua

SEQ ID NO: 399567 - RNA, 19 nt, Homo sapiens
  misc_RNA (1)...(19): siRNA sense strand
aagaagcagucauugaaaa

SEQ ID NO: 399568 - RNA, 19 nt, Homo sapiens
  misc_RNA (1)...(19): siRNA sense strand
aagaaaugcagcagcuaaa

SEQ ID NO: 399569 - RNA, 19 nt, Homo sapiens
  misc_RNA (1)...(19): siRNA sense strand
acaaacagcgagggaaguu

SEQ ID NO: 399570 - RNA, 19 nt, Homo sapiens
  misc_RNA (1)...(19): siRNA sense strand
gaugaugaaugacaugauu

SEQ ID NO: 399571 - RNA, 19 nt, Homo sapiens
  misc_RNA (1)...(19): siRNA sense strand
ugaaugacaugauuggaaa

SEQ ID NO: 399572 - RNA, 19 nt, Homo sapiens
  misc_RNA (1)...(19): siRNA sense strand
ucagguggcuuuggauaua

SEQ ID NO: 399573 - RNA, 19 nt, Homo sapiens
  misc_RNA (1)...(19): siRNA sense strand
gcuauucaccgucagcaua

SEQ ID NO: 399574 - RNA, 19 nt, Homo sapiens
  misc_RNA (1)...(19): siRNA sense strand
ggacauguuugggaugaug

SEQ ID NO: 399575 - RNA, 19 nt, Homo sapiens
  misc_RNA (1)...(19): siRNA sense strand
caugacagcuggaggcaau

SEQ ID NO: 399576 - RNA, 19 nt, Homo sapiens
  misc_RNA (1)...(19): siRNA sense strand
ggaggacuguucgggauuc

SEQ ID NO: 399577 - RNA, 19 nt, Homo sapiens
  misc_RNA (1)...(19): siRNA sense strand
uguuugggaugaugaauga

SEQ ID NO: 399578 - RNA, 19 nt, Homo sapiens
  misc_RNA (1)...(19): siRNA sense strand
gagugaggccgcagcguuu

SEQ ID NO: 399579 - RNA, 19 nt, Homo sapiens
  misc_RNA (1)...(19): siRNA sense strand
ugccagaccuucucaucuu

SEQ ID NO: 399580 - RNA, 19 nt, Homo sapiens
  misc_RNA (1)...(19): siRNA sense strand
ggacuguucgggauucaga

SEQ ID NO: 399581 - RNA, 19 nt, Homo sapiens
  misc_RNA (1)...(19): siRNA sense strand
gauggaucccuuugcuauu

SEQ ID NO: 399582 - RNA, 19 nt, Homo sapiens
  misc_RNA (1)...(19): siRNA sense strand
cccaaggucuaccaagaga

SEQ ID NO: 399583 - RNA, 19 nt, Homo sapiens
  misc_RNA (1)...(19): siRNA sense strand
guugucagguggcuuugga

SEQ ID NO: 399584 - RNA, 19 nt, Homo sapiens
  misc_RNA (1)...(19): siRNA sense strand
ggacguggagccugaggau

SEQ ID NO: 399585 - RNA, 19 nt, Homo sapiens
  misc_RNA (1)...(19): siRNA sense strand
ugauggaucccuuugcuau

SEQ ID NO: 399586 - RNA, 19 nt, Homo sapiens
  misc_RNA (1)...(19): siRNA sense strand
gggaaugucgggugguuuc

SEQ ID NO: 399587 - RNA, 19 nt, Homo sapiens
  misc_RNA (1)...(19): siRNA sense strand
gccagaccuucucaucuuc

SEQ ID NO: 399588 - RNA, 19 nt, Homo sapiens
  misc_RNA (1)...(19): siRNA sense strand
gaggagcggcaggacuaua

SEQ ID NO: 399589 - RNA, 19 nt, Homo sapiens
  misc_RNA (1)...(19): siRNA sense strand
gucaucuccuacuccaaua

SEQ ID NO: 399590 - RNA, 19 nt, Homo sapiens
  misc_RNA (1)...(19): siRNA sense strand
gcaauugccagaccuucuc

SEQ ID NO: 399591 - RNA, 19 nt, Homo sapiens
  misc_RNA (1)...(19): siRNA sense strand
gccugaggaucccauguuc

SEQ ID NO: 399592 - RNA, 19 nt, Homo sapiens
  misc_RNA (1)...(19): siRNA sense strand
ccacugucaucuccuacuc

SEQ ID NO: 399593 - RNA, 19 nt, Homo sapiens
  misc_RNA (1)...(19): siRNA sense strand
gagacacggaggacuguuc

SEQ ID NO: 399594 - RNA, 19 nt, Homo sapiens
  misc_RNA (1)...(19): siRNA sense strand
gagcggcaggacuauauca

SEQ ID NO: 399595 - RNA, 19 nt, Homo sapiens
  misc_RNA (1)...(19): siRNA sense strand
aaugucgggugguuucaug

SEQ ID NO: 399596 - RNA, 19 nt, Homo sapiens
  misc_RNA (1)...(19): siRNA sense strand
uauaucaaccuggaugaga

SEQ ID NO: 399597 - RNA, 19 nt, Homo sapiens
  misc_RNA (1)...(19): siRNA sense strand
uauguugucagguggcuuu

SEQ ID NO: 399598 - RNA, 19 nt, Homo sapiens
  misc_RNA (1)...(19): siRNA sense strand
ugucaucuccuacuccaau

SEQ ID NO: 399599 - RNA, 19 nt, Homo sapiens
  misc_RNA (1)...(19): siRNA sense strand
ugucagguggcuuuggaua

SEQ ID NO: 399600 - RNA, 19 nt, Homo sapiens
  misc_RNA (1)...(19): siRNA sense strand
aggaggagcggcaggacua

SEQ ID NO: 399601 - RNA, 19 nt, Homo sapiens
  misc_RNA (1)...(19): siRNA sense strand
gggaugaugaaugacauga

SEQ ID NO: 399602 - RNA, 19 nt, Homo sapiens
  misc_RNA (1)...(19): siRNA sense strand
cuuccacugucaucuccua

SEQ ID NO: 399603 - RNA, 19 nt, Homo sapiens
  misc_RNA (1)...(19): siRNA sense strand
auggaucccuuugcuauuc

SEQ ID NO: 399604 - RNA, 19 nt, Homo sapiens
  misc_RNA (1)...(19): siRNA sense strand
gaggacuguucgggauuca

SEQ ID NO: 399605 - RNA, 19 nt, Homo sapiens
  misc_RNA (1)...(19): siRNA sense strand
gaacaaaucuucugcaugu

SEQ ID NO: 399606 - RNA, 19 nt, Homo sapiens
  misc_RNA (1)...(19): siRNA sense strand
gaaaacaaguuccagauua

SEQ ID NO: 399607 - RNA, 19 nt, Homo sapiens
  misc_RNA (1)...(19): siRNA sense strand
ccagagaacuuguauuuga

SEQ ID NO: 399608 - RNA, 19 nt, Homo sapiens
  misc_RNA (1)...(19): siRNA sense strand
gaaagacaguggcuacaaa

SEQ ID NO: 399609 - RNA, 19 nt, Homo sapiens
  misc_RNA (1)...(19): siRNA sense strand
aaacuuaucugcagagguu

SEQ ID NO: 399610 - RNA, 19 nt, Homo sapiens
  misc_RNA (1)...(19): siRNA sense strand
gacaguggcuacaaaguuu

SEQ ID NO: 399611 - RNA, 19 nt, Homo sapiens
  misc_RNA (1)...(19): siRNA sense strand
ugacuaacauucaagauug

SEQ ID NO: 399612 - RNA, 19 nt, Homo sapiens
  misc_RNA (1)...(19): siRNA sense strand
uaacggaagugucagaaga

SEQ ID NO: 399613 - RNA, 19 nt, Homo sapiens
  misc_RNA (1)...(19): siRNA sense strand
gcaagugacuaacauucaa

SEQ ID NO: 399614 - RNA, 19 nt, Homo sapiens
  misc_RNA (1)...(19): siRNA sense strand
guagaagccuuugauaaug

SEQ ID NO: 399615 - RNA, 19 nt, Homo sapiens
  misc_RNA (1)...(19): siRNA sense strand
aaacuuuccucaccuauug

SEQ ID NO: 399616 - RNA, 19 nt, Homo sapiens
  misc_RNA (1)...(19): siRNA sense strand
gagguugucucacucaaga

SEQ ID NO: 399617 - RNA, 19 nt, Homo sapiens
  misc_RNA (1)...(19): siRNA sense strand
agaaagaugcuauguauug

SEQ ID NO: 399618 - RNA, 19 nt, Homo sapiens
  misc_RNA (1)...(19): siRNA sense strand
gagcaggcgucucuugaug

SEQ ID NO: 399619 - RNA, 19 nt, Homo sapiens
  misc_RNA (1)...(19): siRNA sense strand
caagauuggucucucaaau

SEQ ID NO: 399620 - RNA, 19 nt, Homo sapiens
  misc_RNA (1)...(19): siRNA sense strand
gaagaaaacgccacuuuaa

SEQ ID NO: 399621 - RNA, 19 nt, Homo sapiens
  misc_RNA (1)...(19): siRNA sense strand
gcaagagccgauggaauua

SEQ ID NO: 399622 - RNA, 19 nt, Homo sapiens
  misc_RNA (1)...(19): siRNA sense strand
uagaagccuuugauaauga

SEQ ID NO: 399623 - RNA, 19 nt, Homo sapiens
  misc_RNA (1)...(19): siRNA sense strand
cuauugacaugacaucuaa

SEQ ID NO: 399624 - RNA, 19 nt, Homo sapiens
  misc_RNA (1)...(19): siRNA sense strand
gaaagaugcuauguauugg

SEQ ID NO: 399625 - RNA, 19 nt, Homo sapiens
  misc_RNA (1)...(19): siRNA sense strand
gcaugcaacugugguuaaa

SEQ ID NO: 399626 - RNA, 19 nt, Homo sapiens
  misc_RNA (1)...(19): siRNA sense strand
gaacgucggaaacugauga

SEQ ID NO: 399627 - RNA, 19 nt, Homo sapiens
  misc_RNA (1)...(19): siRNA sense strand
uuaauuagcuccacagcau

SEQ ID NO: 399628 - RNA, 19 nt, Homo sapiens
  misc_RNA (1)...(19): siRNA sense strand
ccaaagccaugcagaucaa

SEQ ID NO: 399629 - RNA, 19 nt, Homo sapiens
  misc_RNA (1)...(19): siRNA sense strand
gcuguguacuuucaagauu

SEQ ID NO: 399630 - RNA, 19 nt, Homo sapiens
  misc_RNA (1)...(19): siRNA sense strand
cagagaacuuguauuugaa

SEQ ID NO: 399631 - RNA, 19 nt, Homo sapiens
  misc_RNA (1)...(19): siRNA sense strand
gguuaaaguuccagaagug

SEQ ID NO: 399632 - RNA, 19 nt, Homo sapiens
  misc_RNA (1)...(19): siRNA sense strand
cagggaagcugcagaaguc

SEQ ID NO: 399633 - RNA, 19 nt, Homo sapiens
  misc_RNA (1)...(19): siRNA sense strand
gguccuuaauucugcuuua

SEQ ID NO: 399634 - RNA, 19 nt, Homo sapiens
  misc_RNA (1)...(19): siRNA sense strand
ucaaguaguuguauuucug

SEQ ID NO: 399635 - RNA, 19 nt, Homo sapiens
  misc_RNA (1)...(19): siRNA sense strand
ggacgugcuucucagugaa

SEQ ID NO: 399636 - RNA, 19 nt, Homo sapiens
  misc_RNA (1)...(19): siRNA sense strand
acaagaugaugguccuuaa

SEQ ID NO: 399637 - RNA, 19 nt, Homo sapiens
  misc_RNA (1)...(19): siRNA sense strand
gaaacucaguaauucuaca

SEQ ID NO: 399638 - RNA, 19 nt, Homo sapiens
  misc_RNA (1)...(19): siRNA sense strand
gaggaaacgggaauucauu

SEQ ID NO: 399639 - RNA, 19 nt, Homo sapiens
  misc_RNA (1)...(19): siRNA sense strand
uaaugaagcugccaaaaga

SEQ ID NO: 399640 - RNA, 19 nt, Homo sapiens
  misc_RNA (1)...(19): siRNA sense strand
gagaugaccgaggcucuua

SEQ ID NO: 399641 - RNA, 19 nt, Homo sapiens
  misc_RNA (1)...(19): siRNA sense strand
guagcaauguggacaagau

SEQ ID NO: 399642 - RNA, 19 nt, Homo sapiens
  misc_RNA (1)...(19): siRNA sense strand
gaugcuauguauugggaaa

SEQ ID NO: 399643 - RNA, 19 nt, Homo sapiens
  misc_RNA (1)...(19): siRNA sense strand
auuaaacacucuccacaaa

SEQ ID NO: 399644 - RNA, 19 nt, Homo sapiens
  misc_RNA (1)...(19): siRNA sense strand
caaguaugguacauucuuc

SEQ ID NO: 399645 - RNA, 19 nt, Homo sapiens
  misc_RNA (1)...(19): siRNA sense strand
gcugagcugcuuucacuaa

SEQ ID NO: 399646 - RNA, 19 nt, Homo sapiens
  misc_RNA (1)...(19): siRNA sense strand
gacaagaugaugguccuua

SEQ ID NO: 399647 - RNA, 19 nt, Homo sapiens
  misc_RNA (1)...(19): siRNA sense strand
caagggagccaagagauga

SEQ ID NO: 399648 - RNA, 19 nt, Homo sapiens
  misc_RNA (1)...(19): siRNA sense strand
ggaauuagagagcuacaca

SEQ ID NO: 399649 - RNA, 19 nt, Homo sapiens
  misc_RNA (1)...(19): siRNA sense strand
gagaagcgucgacugaaug

SEQ ID NO: 399650 - RNA, 19 nt, Homo sapiens
  misc_RNA (1)...(19): siRNA sense strand
aaagcucgcuguccgaugu

SEQ ID NO: 399651 - RNA, 19 nt, Homo sapiens
  misc_RNA (1)...(19): siRNA sense strand
ugaaugaccugguuuuaga

SEQ ID NO: 399652 - RNA, 19 nt, Homo sapiens
  misc_RNA (1)...(19): siRNA sense strand
ucggagcacuggcaucaaa

SEQ ID NO: 399653 - RNA, 19 nt, Homo sapiens
  misc_RNA (1)...(19): siRNA sense strand
ucagaaguguccucaguag

SEQ ID NO: 399654 - RNA, 19 nt, Homo sapiens
  misc_RNA (1)...(19): siRNA sense strand
ugagaagcgucgacugaau

SEQ ID NO: 399655 - RNA, 19 nt, Homo sapiens
  misc_RNA (1)...(19): siRNA sense strand
uuacacagcguccaucuau

SEQ ID NO: 399656 - RNA, 19 nt, Homo sapiens
  misc_RNA (1)...(19): siRNA sense strand
agaaguguccucaguagaa

SEQ ID NO: 399657 - RNA, 19 nt, Homo sapiens
  misc_RNA (1)...(19): siRNA sense strand
gcuguccgauguuucagaa

SEQ ID NO: 399658 - RNA, 19 nt, Homo sapiens
  misc_RNA (1)...(19): siRNA sense strand
uaaacacucuccacaaagc

SEQ ID NO: 399659 - RNA, 19 nt, Homo sapiens
  misc_RNA (1)...(19): siRNA sense strand
ccaugcagaucaaaguaga

SEQ ID NO: 399660 - RNA, 19 nt, Homo sapiens
  misc_RNA (1)...(19): siRNA sense strand
cuguguacuuucaagauua

SEQ ID NO: 399661 - RNA, 19 nt, Homo sapiens
  misc_RNA (1)...(19): siRNA sense strand
ucagaagacuccacaacag

SEQ ID NO: 399662 - RNA, 19 nt, Homo sapiens
  misc_RNA (1)...(19): siRNA sense strand
caagagauucagaaacuca

SEQ ID NO: 399663 - RNA, 19 nt, Homo sapiens
  misc_RNA (1)...(19): siRNA sense strand
auucuucucuuacuccuuu

SEQ ID NO: 399664 - RNA, 19 nt, Homo sapiens
  misc_RNA (1)...(19): siRNA sense strand
uaauugcacugggagaaga

SEQ ID NO: 399665 - RNA, 19 nt, Homo sapiens
  misc_RNA (1)...(19): siRNA sense strand
gugacuaacauucaagauu

SEQ ID NO: 399666 - RNA, 19 nt, Homo sapiens
  misc_RNA (1)...(19): siRNA sense strand
uaaaagacauuucgaacuc

SEQ ID NO: 399667 - RNA, 19 nt, Homo sapiens
  misc_RNA (1)...(19): siRNA sense strand
aguagaagccuuugauaau

SEQ ID NO: 399668 - RNA, 19 nt, Homo sapiens
  misc_RNA (1)...(19): siRNA sense strand
agcaagagccgauggaauu

SEQ ID NO: 399669 - RNA, 19 nt, Homo sapiens
  misc_RNA (1)...(19): siRNA sense strand
ggugucaaguaguuguauu

SEQ ID NO: 399670 - RNA, 19 nt, Homo sapiens
  misc_RNA (1)...(19): siRNA sense strand
ucgauggugucaaguaguu

SEQ ID NO: 399671 - RNA, 19 nt, Homo sapiens
  misc_RNA (1)...(19): siRNA sense strand
gagauucagaaacucagua

SEQ ID NO: 399672 - RNA, 19 nt, Homo sapiens
  misc_RNA (1)...(19): siRNA sense strand
ggaggaaacgggaauucau

SEQ ID NO: 399673 - RNA, 19 nt, Homo sapiens
  misc_RNA (1)...(19): siRNA sense strand
acccagagaacuuguauuu

SEQ ID NO: 399674 - RNA, 19 nt, Homo sapiens
  misc_RNA (1)...(19): siRNA sense strand
guacauucuucucuuacuc

SEQ ID NO: 399675 - RNA, 19 nt, Homo sapiens
  misc_RNA (1)...(19): siRNA sense strand
gaaguguccucaguagaac

SEQ ID NO: 399676 - RNA, 19 nt, Homo sapiens
  misc_RNA (1)...(19): siRNA sense strand
ccaaauccaaugugaguuc

SEQ ID NO: 399677 - RNA, 19 nt, Homo sapiens
  misc_RNA (1)...(19): siRNA sense strand
caaauccaaugugaguuca

SEQ ID NO: 399678 - RNA, 19 nt, Homo sapiens
  misc_RNA (1)...(19): siRNA sense strand
agacaguggcuacaaaguu

SEQ ID NO: 399679 - RNA, 19 nt, Homo sapiens
  misc_RNA (1)...(19): siRNA sense strand
ccacacaagcuccggauca

SEQ ID NO: 399680 - RNA, 19 nt, Homo sapiens
  misc_RNA (1)...(19): siRNA sense strand
cauccauucuccaguugaa

SEQ ID NO: 399681 - RNA, 19 nt, Homo sapiens
  misc_RNA (1)...(19): siRNA sense strand
gagaagaaaacgccacuuu

SEQ ID NO: 399682 - RNA, 19 nt, Homo sapiens
  misc_RNA (1)...(19): siRNA sense strand
caaccaaucucugcuucag

SEQ ID NO: 399683 - RNA, 19 nt, Homo sapiens
  misc_RNA (1)...(19): siRNA sense strand
ccaaguaugguacauucuu

SEQ ID NO: 399684 - RNA, 19 nt, Homo sapiens
  misc_RNA (1)...(19): siRNA sense strand
aaguagaagccuuugauaa

SEQ ID NO: 399685 - RNA, 19 nt, Homo sapiens
  misc_RNA (1)...(19): siRNA sense strand
acacagcguccaucuauca

SEQ ID NO: 399686 - RNA, 19 nt, Homo sapiens
  misc_RNA (1)...(19): siRNA sense strand
aagaugaugguccuuaauu

SEQ ID NO: 399687 - RNA, 19 nt, Homo sapiens
  misc_RNA (1)...(19): siRNA sense strand
guaguuguauuucugucau

SEQ ID NO: 399688 - RNA, 19 nt, Homo sapiens
  misc_RNA (1)...(19): siRNA sense strand
cucaagagauucagaaacu

SEQ ID NO: 399689 - RNA, 19 nt, Homo sapiens
  misc_RNA (1)...(19): siRNA sense strand
gcagaaguccugaaaacaa

SEQ ID NO: 399690 - RNA, 19 nt, Homo sapiens
  misc_RNA (1)...(19): siRNA sense strand
uaugguacauucuucucuu

SEQ ID NO: 399691 - RNA, 19 nt, Homo sapiens
  misc_RNA (1)...(19): siRNA sense strand
cgauggaauuagagagcua

SEQ ID NO: 399692 - RNA, 19 nt, Homo sapiens
  misc_RNA (1)...(19): siRNA sense strand
gaugaugguccuuaauucu

SEQ ID NO: 399693 - RNA, 19 nt, Homo sapiens
  misc_RNA (1)...(19): siRNA sense strand
uggaguuguugaaaugaaa

SEQ ID NO: 399694 - RNA, 19 nt, Homo sapiens
  misc_RNA (1)...(19): siRNA sense strand
aagagccgauggaauuaga

SEQ ID NO: 399695 - RNA, 19 nt, Homo sapiens
  misc_RNA (1)...(19): siRNA sense strand
agaaaacgccacuuuaaaa

SEQ ID NO: 399696 - RNA, 19 nt, Homo sapiens
  misc_RNA (1)...(19): siRNA sense strand
agaugaugguccuuaauuc

SEQ ID NO: 399697 - RNA, 19 nt, Homo sapiens
  misc_RNA (1)...(19): siRNA sense strand
gaauuagagagcuacacaa

SEQ ID NO: 399698 - RNA, 19 nt, Homo sapiens
  misc_RNA (1)...(19): siRNA sense strand
agaagccuuugauaaugaa

SEQ ID NO: 399699 - RNA, 19 nt, Homo sapiens
  misc_RNA (1)...(19): siRNA sense strand
uaaaguuccagaagugaau

SEQ ID NO: 399700 - RNA, 19 nt, Homo sapiens
  misc_RNA (1)...(19): siRNA sense strand
uucagaaacucaguaauuc

SEQ ID NO: 399701 - RNA, 19 nt, Homo sapiens
  misc_RNA (1)...(19): siRNA sense strand
cugcagagguugucucacu

SEQ ID NO: 399702 - RNA, 19 nt, Homo sapiens
  misc_RNA (1)...(19): siRNA sense strand
cacacaagcuccggaucaa

SEQ ID NO: 399703 - RNA, 19 nt, Homo sapiens
  misc_RNA (1)...(19): siRNA sense strand
gcaauguggacaagaugau

SEQ ID NO: 399704 - RNA, 19 nt, Homo sapiens
  misc_RNA (1)...(19): siRNA sense strand
gcagagguugucucacuca

SEQ ID NO: 399705 - RNA, 19 nt, Homo sapiens
  misc_RNA (1)...(19): siRNA sense strand
aaaggugucugaagaauga

SEQ ID NO: 399706 - RNA, 19 nt, Homo sapiens
  misc_RNA (1)...(19): siRNA sense strand
caacacagguggcgucauc

SEQ ID NO: 399707 - RNA, 19 nt, Homo sapiens
  misc_RNA (1)...(19): siRNA sense strand
caacaugcauuccgagaag

SEQ ID NO: 399708 - RNA, 19 nt, Homo sapiens
  misc_RNA (1)...(19): siRNA sense strand
cugaaucccucuauaguga

SEQ ID NO: 399709 - RNA, 19 nt, Homo sapiens
  misc_RNA (1)...(19): siRNA sense strand
gaccaagucacccugcuua

SEQ ID NO: 399710 - RNA, 19 nt, Homo sapiens
  misc_RNA (1)...(19): siRNA sense strand
ccaugaaccuggccaacaa

SEQ ID NO: 399711 - RNA, 19 nt, Homo sapiens
  misc_RNA (1)...(19): siRNA sense strand
ccgagaagcugcuguccuu

SEQ ID NO: 399712 - RNA, 19 nt, Homo sapiens
  misc_RNA (1)...(19): siRNA sense strand
gcucgggcauggagaauuc

SEQ ID NO: 399713 - RNA, 19 nt, Homo sapiens
  misc_RNA (1)...(19): siRNA sense strand
ucaccaagcugcugcucaa

SEQ ID NO: 399714 - RNA, 19 nt, Homo sapiens
  misc_RNA (1)...(19): siRNA sense strand
cagcucaccuggcaacuuc

SEQ ID NO: 399715 - RNA, 19 nt, Homo sapiens
  misc_RNA (1)...(19): siRNA sense strand
caacuucaaugccaaccau

SEQ ID NO: 399716 - RNA, 19 nt, Homo sapiens
  misc_RNA (1)...(19): siRNA sense strand
caggagaucugggaggauu

SEQ ID NO: 399717 - RNA, 19 nt, Homo sapiens
  misc_RNA (1)...(19): siRNA sense strand
cagggcaacucaaagaaug

SEQ ID NO: 399718 - RNA, 19 nt, Homo sapiens
  misc_RNA (1)...(19): siRNA sense strand
ggcaugguguuacugugua

SEQ ID NO: 399719 - RNA, 19 nt, Homo sapiens
  misc_RNA (1)...(19): siRNA sense strand
gcgcuuugcuucguuguuc

SEQ ID NO: 399720 - RNA, 19 nt, Homo sapiens
  misc_RNA (1)...(19): siRNA sense strand
agacccggcucgcuccuuu

SEQ ID NO: 399721 - RNA, 19 nt, Homo sapiens
  misc_RNA (1)...(19): siRNA sense strand
gggcucuggugcugaagaa

SEQ ID NO: 399722 - RNA, 19 nt, Homo sapiens
  misc_RNA (1)...(19): siRNA sense strand
uaacgaggcccuaaauggu

SEQ ID NO: 399723 - RNA, 19 nt, Homo sapiens
  misc_RNA (1)...(19): siRNA sense strand
gaggacagcagccgagugu

SEQ ID NO: 399724 - RNA, 19 nt, Homo sapiens
  misc_RNA (1)...(19): siRNA sense strand
gcagggcaacucaaagaau

SEQ ID NO: 399725 - RNA, 19 nt, Homo sapiens
  misc_RNA (1)...(19): siRNA sense strand
caacaucaccaagcugaau

SEQ ID NO: 399726 - RNA, 19 nt, Homo sapiens
  misc_RNA (1)...(19): siRNA sense strand
gaacggugcaggagaucug

SEQ ID NO: 399727 - RNA, 19 nt, Homo sapiens
  misc_RNA (1)...(19): siRNA sense strand
gcagaacauccaguacaaa

SEQ ID NO: 399728 - RNA, 19 nt, Homo sapiens
  misc_RNA (1)...(19): siRNA sense strand
ccacccagccugagugaug

SEQ ID NO: 399729 - RNA, 19 nt, Homo sapiens
  misc_RNA (1)...(19): siRNA sense strand
cugcuggcauguccuauga

SEQ ID NO: 399730 - RNA, 19 nt, Homo sapiens
  misc_RNA (1)...(19): siRNA sense strand
gcggaugcuugcugagaug

SEQ ID NO: 399731 - RNA, 19 nt, Homo sapiens
  misc_RNA (1)...(19): siRNA sense strand
gaaucccucuauagugaca

SEQ ID NO: 399732 - RNA, 19 nt, Homo sapiens
  misc_RNA (1)...(19): siRNA sense strand
gugaaggaccagacaguga

SEQ ID NO: 399733 - RNA, 19 nt, Homo sapiens
  misc_RNA (1)...(19): siRNA sense strand
caagagcaccagcaacauc

SEQ ID NO: 399734 - RNA, 19 nt, Homo sapiens
  misc_RNA (1)...(19): siRNA sense strand
ccacaucgcugggaaaauc

SEQ ID NO: 399735 - RNA, 19 nt, Homo sapiens
  misc_RNA (1)...(19): siRNA sense strand
ccagcaaugucgcuucaag

SEQ ID NO: 399736 - RNA, 19 nt, Homo sapiens
  misc_RNA (1)...(19): siRNA sense strand
caagucacccugcuuaagg

SEQ ID NO: 399737 - RNA, 19 nt, Homo sapiens
  misc_RNA (1)...(19): siRNA sense strand
ccaaugacaacaacaccuu

SEQ ID NO: 399738 - RNA, 19 nt, Homo sapiens
  misc_RNA (1)...(19): siRNA sense strand
ucagugccauguucgacuu

SEQ ID NO: 399739 - RNA, 19 nt, Homo sapiens
  misc_RNA (1)...(19): siRNA sense strand
agacagugauguuccuaag

SEQ ID NO: 399740 - RNA, 19 nt, Homo sapiens
  misc_RNA (1)...(19): siRNA sense strand
gggcuuccgugaccuuucu

SEQ ID NO: 399741 - RNA, 19 nt, Homo sapiens
  misc_RNA (1)...(19): siRNA sense strand
uacaaaaggugucugaaga

SEQ ID NO: 399742 - RNA, 19 nt, Homo sapiens
  misc_RNA (1)...(19): siRNA sense strand
ggcgaacggugcaggagau

SEQ ID NO: 399743 - RNA, 19 nt, Homo sapiens
  misc_RNA (1)...(19): siRNA sense strand
ugaauggcaugguguuacu

SEQ ID NO: 399744 - RNA, 19 nt, Homo sapiens
  misc_RNA (1)...(19): siRNA sense strand
ucaagaagugucucucugu

SEQ ID NO: 399745 - RNA, 19 nt, Homo sapiens
  misc_RNA (1)...(19): siRNA sense strand
cagcagaacauccaguaca

SEQ ID NO: 399746 - RNA, 19 nt, Homo sapiens
  misc_RNA (1)...(19): siRNA sense strand
gcugaauggcaugguguua

SEQ ID NO: 399747 - RNA, 19 nt, Homo sapiens
  misc_RNA (1)...(19): siRNA sense strand
gaaggaccagacagugaug

SEQ ID NO: 399748 - RNA, 19 nt, Homo sapiens
  misc_RNA (1)...(19): siRNA sense strand
caaaaggugucugaagaau

SEQ ID NO: 399749 - RNA, 19 nt, Homo sapiens
  misc_RNA (1)...(19): siRNA sense strand
aucgagagaucuucaccua

SEQ ID NO: 399750 - RNA, 19 nt, Homo sapiens
  misc_RNA (1)...(19): siRNA sense strand
cggcagggcaacucaaaga

SEQ ID NO: 399751 - RNA, 19 nt, Homo sapiens
  misc_RNA (1)...(19): siRNA sense strand
agcagaacauccaguacaa

SEQ ID NO: 399752 - RNA, 19 nt, Homo sapiens
  misc_RNA (1)...(19): siRNA sense strand
gaugacggcuccccuucuu

SEQ ID NO: 399753 - RNA, 19 nt, Homo sapiens
  misc_RNA (1)...(19): siRNA sense strand
ucaacucccuggcgcuuac

SEQ ID NO: 399754 - RNA, 19 nt, Homo sapiens
  misc_RNA (1)...(19): siRNA sense strand
ggaccagacagugauguuc

SEQ ID NO: 399755 - RNA, 19 nt, Homo sapiens
  misc_RNA (1)...(19): siRNA sense strand
ccagcaacaucaccaagcu

SEQ ID NO: 399756 - RNA, 19 nt, Homo sapiens
  misc_RNA (1)...(19): siRNA sense strand
caacgugaaggaccagaca

SEQ ID NO: 399757 - RNA, 19 nt, Homo sapiens
  misc_RNA (1)...(19): siRNA sense strand
ugcgggaggugguagaguu

SEQ ID NO: 399758 - RNA, 19 nt, Homo sapiens
  misc_RNA (1)...(19): siRNA sense strand
ggagaucugggaggauuuc

SEQ ID NO: 399759 - RNA, 19 nt, Homo sapiens
  misc_RNA (1)...(19): siRNA sense strand
ucauaacgaggcccuaaau

SEQ ID NO: 399760 - RNA, 19 nt, Homo sapiens
  misc_RNA (1)...(19): siRNA sense strand
cacccagccugagugauga

SEQ ID NO: 399761 - RNA, 19 nt, Homo sapiens
  misc_RNA (1)...(19): siRNA sense strand
ugaaggaccagacagugau

SEQ ID NO: 399762 - RNA, 19 nt, Homo sapiens
  misc_RNA (1)...(19): siRNA sense strand
gcccugaaucccucuauag

SEQ ID NO: 399763 - RNA, 19 nt, Homo sapiens
  misc_RNA (1)...(19): siRNA sense strand
gcgggaggugguagaguuu

SEQ ID NO: 399764 - RNA, 19 nt, Homo sapiens
  misc_RNA (1)...(19): siRNA sense strand
gcuggcauguccuaugaac

SEQ ID NO: 399765 - RNA, 19 nt, Homo sapiens
  misc_RNA (1)...(19): siRNA sense strand
gcaagagcaccagcaacau

SEQ ID NO: 399766 - RNA, 19 nt, Homo sapiens
  misc_RNA (1)...(19): siRNA sense strand
gcagcucaccuggcaacuu

SEQ ID NO: 399767 - RNA, 19 nt, Homo sapiens
  misc_RNA (1)...(19): siRNA sense strand
gagaugcagagugccauga

SEQ ID NO: 399768 - RNA, 19 nt, Homo sapiens
  misc_RNA (1)...(19): siRNA sense strand
cagcaaugucgcuucaaga

SEQ ID NO: 399769 - RNA, 19 nt, Homo sapiens
  misc_RNA (1)...(19): siRNA sense strand
gucugaagaaugagaauug

SEQ ID NO: 399770 - RNA, 19 nt, Homo sapiens
  misc_RNA (1)...(19): siRNA sense strand
ggacuccaacaacaacaca

SEQ ID NO: 399771 - RNA, 19 nt, Homo sapiens
  misc_RNA (1)...(19): siRNA sense strand
gcaacaucaccaagcugaa

SEQ ID NO: 399772 - RNA, 19 nt, Homo sapiens
  misc_RNA (1)...(19): siRNA sense strand
gcaccagcaacaucaccaa

SEQ ID NO: 399773 - RNA, 19 nt, Homo sapiens
  misc_RNA (1)...(19): siRNA sense strand
gaacauccaguacaaaagg

SEQ ID NO: 399774 - RNA, 19 nt, Homo sapiens
  misc_RNA (1)...(19): siRNA sense strand
cauaacgaggcccuaaaug

SEQ ID NO: 399775 - RNA, 19 nt, Homo sapiens
  misc_RNA (1)...(19): siRNA sense strand
gaugcagagugccaugaac

SEQ ID NO: 399776 - RNA, 19 nt, Homo sapiens
  misc_RNA (1)...(19): siRNA sense strand
gggcaacucaaagaauguu

SEQ ID NO: 399777 - RNA, 19 nt, Homo sapiens
  misc_RNA (1)...(19): siRNA sense strand
ggcgucaucaccuacauug

SEQ ID NO: 399778 - RNA, 19 nt, Homo sapiens
  misc_RNA (1)...(19): siRNA sense strand
ucaccuacgcccaugacaa

SEQ ID NO: 399779 - RNA, 19 nt, Homo sapiens
  misc_RNA (1)...(19): siRNA sense strand
cgucauaacgaggcccuaa

SEQ ID NO: 399780 - RNA, 19 nt, Homo sapiens
  misc_RNA (1)...(19): siRNA sense strand
ucaccuggcaacuucaaug

SEQ ID NO: 399781 - RNA, 19 nt, Homo sapiens
  misc_RNA (1)...(19): siRNA sense strand
caccuacgcccaugacaag

SEQ ID NO: 399782 - RNA, 19 nt, Homo sapiens
  misc_RNA (1)...(19): siRNA sense strand
ccuccuccuccuucuauaa

SEQ ID NO: 399783 - RNA, 19 nt, Homo sapiens
  misc_RNA (1)...(19): siRNA sense strand
ccaagucacccugcuuaag

SEQ ID NO: 399784 - RNA, 19 nt, Homo sapiens
  misc_RNA (1)...(19): siRNA sense strand
gcccagaacuucacacugu

SEQ ID NO: 399785 - RNA, 19 nt, Homo sapiens
  misc_RNA (1)...(19): siRNA sense strand
ggauggcccuguccaaguu

SEQ ID NO: 399786 - RNA, 19 nt, Homo sapiens
  misc_RNA (1)...(19): siRNA sense strand
gaaaccggcugugggaugu

SEQ ID NO: 399787 - RNA, 19 nt, Homo sapiens
  misc_RNA (1)...(19): siRNA sense strand
gaaagcaaccgccaacucu

SEQ ID NO: 399788 - RNA, 19 nt, Homo sapiens
  misc_RNA (1)...(19): siRNA sense strand
gaucguggucuauguggua

SEQ ID NO: 399789 - RNA, 19 nt, Homo sapiens
  misc_RNA (1)...(19): siRNA sense strand
gugaccaacuuccuuguga

SEQ ID NO: 399790 - RNA, 19 nt, Homo sapiens
  misc_RNA (1)...(19): siRNA sense strand
ggauagagaagcccauuuc

SEQ ID NO: 399791 - RNA, 19 nt, Homo sapiens
  misc_RNA (1)...(19): siRNA sense strand
gcacccugcucaagcucua

SEQ ID NO: 399792 - RNA, 19 nt, Homo sapiens
  misc_RNA (1)...(19): siRNA sense strand
caucaucaccaaacucaaa

SEQ ID NO: 399793 - RNA, 19 nt, Homo sapiens
  misc_RNA (1)...(19): siRNA sense strand
auuauaagacggagaagua

SEQ ID NO: 399794 - RNA, 19 nt, Homo sapiens
  misc_RNA (1)...(19): siRNA sense strand
ccugugagaucuggaguug

SEQ ID NO: 399795 - RNA, 19 nt, Homo sapiens
  misc_RNA (1)...(19): siRNA sense strand
acagucaccuucagcaagu

SEQ ID NO: 399796 - RNA, 19 nt, Homo sapiens
  misc_RNA (1)...(19): siRNA sense strand
ugugagaucuggaguuggu

SEQ ID NO: 399797 - RNA, 19 nt, Homo sapiens
  misc_RNA (1)...(19): siRNA sense strand
cuacugcuguauguggaua

SEQ ID NO: 399798 - RNA, 19 nt, Homo sapiens
  misc_RNA (1)...(19): siRNA sense strand
gccagugugugguguucaa

SEQ ID NO: 399799 - RNA, 19 nt, Homo sapiens
  misc_RNA (1)...(19): siRNA sense strand
uuuaagcacugccgcuaug

SEQ ID NO: 399800 - RNA, 19 nt, Homo sapiens
  misc_RNA (1)...(19): siRNA sense strand
gcacugccgcuaugaacca

SEQ ID NO: 399801 - RNA, 19 nt, Homo sapiens
  misc_RNA (1)...(19): siRNA sense strand
guugcuggguggcucugua

SEQ ID NO: 399802 - RNA, 19 nt, Homo sapiens
  misc_RNA (1)...(19): siRNA sense strand
gaaccccaguuuuccauca

SEQ ID NO: 399803 - RNA, 19 nt, Homo sapiens
  misc_RNA (1)...(19): siRNA sense strand
aguaugugaugaccaggaa

SEQ ID NO: 399804 - RNA, 19 nt, Homo sapiens
  misc_RNA (1)...(19): siRNA sense strand
gggcuucuggauuauaaga

SEQ ID NO: 399805 - RNA, 19 nt, Homo sapiens
  misc_RNA (1)...(19): siRNA sense strand
gcucaagcucuauggaauc

SEQ ID NO: 399806 - RNA, 19 nt, Homo sapiens
  misc_RNA (1)...(19): siRNA sense strand
agaguucacugggauugug

SEQ ID NO: 399807 - RNA, 19 nt, Homo sapiens
  misc_RNA (1)...(19): siRNA sense strand
cgaaagcaaccgccaacuc

SEQ ID NO: 399808 - RNA, 19 nt, Homo sapiens
  misc_RNA (1)...(19): siRNA sense strand
ccuuccagcugcaggagaa

SEQ ID NO: 399809 - RNA, 19 nt, Homo sapiens
  misc_RNA (1)...(19): siRNA sense strand
ggguuuccgucacucagau

SEQ ID NO: 399810 - RNA, 19 nt, Homo sapiens
  misc_RNA (1)...(19): siRNA sense strand
gaccugcuacugcuguaug

SEQ ID NO: 399811 - RNA, 19 nt, Homo sapiens
  misc_RNA (1)...(19): siRNA sense strand
cccagaacuucacacuguu

SEQ ID NO: 399812 - RNA, 19 nt, Homo sapiens
  misc_RNA (1)...(19): siRNA sense strand
acggagaaguaugugauga

SEQ ID NO: 399813 - RNA, 19 nt, Homo sapiens
  misc_RNA (1)...(19): siRNA sense strand
auaagacggagaaguaugu

SEQ ID NO: 399814 - RNA, 19 nt, Homo sapiens
  misc_RNA (1)...(19): siRNA sense strand
gugaccugcuacugcugua

SEQ ID NO: 399815 - RNA, 19 nt, Homo sapiens
  misc_RNA (1)...(19): siRNA sense strand
gcugggagucagacacaga

SEQ ID NO: 399816 - RNA, 19 nt, Homo sapiens
  misc_RNA (1)...(19): siRNA sense strand
uggauuauaagacggagaa

SEQ ID NO: 399817 - RNA, 19 nt, Homo sapiens
  misc_RNA (1)...(19): siRNA sense strand
agacggagaaguaugugau

SEQ ID NO: 399818 - RNA, 19 nt, Homo sapiens
  misc_RNA (1)...(19): siRNA sense strand
uaagcacugccgcuaugaa

SEQ ID NO: 399819 - RNA, 19 nt, Homo sapiens
  misc_RNA (1)...(19): siRNA sense strand
ugugggauguggccgacuu

SEQ ID NO: 399820 - RNA, 19 nt, Homo sapiens
  misc_RNA (1)...(19): siRNA sense strand
gaacuacacugcgagcuuu

SEQ ID NO: 399821 - RNA, 19 nt, Homo sapiens
  misc_RNA (1)...(19): siRNA sense strand
gacauuagccgaccagaaa

SEQ ID NO: 399822 - RNA, 19 nt, Homo sapiens
  misc_RNA (1)...(19): siRNA sense strand
ggacugaccuggccacacu

SEQ ID NO: 399823 - RNA, 19 nt, Homo sapiens
  misc_RNA (1)...(19): siRNA sense strand
acacaaggaucgagccaaa

SEQ ID NO: 399824 - RNA, 19 nt, Homo sapiens
  misc_RNA (1)...(19): siRNA sense strand
ugagggagcuguccaagca

SEQ ID NO: 399825 - RNA, 19 nt, Homo sapiens
  misc_RNA (1)...(19): siRNA sense strand
ggaaugagggcgagauaca

SEQ ID NO: 399826 - RNA, 19 nt, Homo sapiens
  misc_RNA (1)...(19): siRNA sense strand
gcucaucugcuucgacauu

SEQ ID NO: 399827 - RNA, 19 nt, Homo sapiens
  misc_RNA (1)...(19): siRNA sense strand
ucagggaugucuuccaugu

SEQ ID NO: 399828 - RNA, 19 nt, Homo sapiens
  misc_RNA (1)...(19): siRNA sense strand
ccaccguguuugagaacua

SEQ ID NO: 399829 - RNA, 19 nt, Homo sapiens
  misc_RNA (1)...(19): siRNA sense strand
acacuucagguuccucuua

SEQ ID NO: 399830 - RNA, 19 nt, Homo sapiens
  misc_RNA (1)...(19): siRNA sense strand
ccucuggccuauccugauu

SEQ ID NO: 399831 - RNA, 19 nt, Homo sapiens
  misc_RNA (1)...(19): siRNA sense strand
gcagaggcuuaucccuguu

SEQ ID NO: 399832 - RNA, 19 nt, Homo sapiens
  misc_RNA (1)...(19): siRNA sense strand
gcaaggagagacucaagag

SEQ ID NO: 399833 - RNA, 19 nt, Homo sapiens
  misc_RNA (1)...(19): siRNA sense strand
gcuuaucccuguuacacau

SEQ ID NO: 399834 - RNA, 19 nt, Homo sapiens
  misc_RNA (1)...(19): siRNA sense strand
gcgauccgcucagcuguca

SEQ ID NO: 399835 - RNA, 19 nt, Homo sapiens
  misc_RNA (1)...(19): siRNA sense strand
caacaugugggacacuuca

SEQ ID NO: 399836 - RNA, 19 nt, Homo sapiens
  misc_RNA (1)...(19): siRNA sense strand
ucagguuccucuuacuaug

SEQ ID NO: 399837 - RNA, 19 nt, Homo sapiens
  misc_RNA (1)...(19): siRNA sense strand
cgucagggaugucuuccau

SEQ ID NO: 399838 - RNA, 19 nt, Homo sapiens
  misc_RNA (1)...(19): siRNA sense strand
cagaggcuuaucccuguua

SEQ ID NO: 399839 - RNA, 19 nt, Homo sapiens
  misc_RNA (1)...(19): siRNA sense strand
uggccuauccugauucuga

SEQ ID NO: 399840 - RNA, 19 nt, Homo sapiens
  misc_RNA (1)...(19): siRNA sense strand
cgacauuagccgaccagaa

SEQ ID NO: 399841 - RNA, 19 nt, Homo sapiens
  misc_RNA (1)...(19): siRNA sense strand
caagaguucugccccaaug

SEQ ID NO: 399842 - RNA, 19 nt, Homo sapiens
  misc_RNA (1)...(19): siRNA sense strand
cucaucugcuucgacauua

SEQ ID NO: 399843 - RNA, 19 nt, Homo sapiens
  misc_RNA (1)...(19): siRNA sense strand
cagguuccucuuacuauga

SEQ ID NO: 399844 - RNA, 19 nt, Homo sapiens
  misc_RNA (1)...(19): siRNA sense strand
ggccuauccugauucugau

SEQ ID NO: 399845 - RNA, 19 nt, Homo sapiens
  misc_RNA (1)...(19): siRNA sense strand
ccucuuacuaugauaaugu

SEQ ID NO: 399846 - RNA, 19 nt, Homo sapiens
  misc_RNA (1)...(19): siRNA sense strand
aagcugcaaccucauguga

SEQ ID NO: 399847 - RNA, 19 nt, Homo sapiens
  misc_RNA (1)...(19): siRNA sense strand
gaaguggcaaggagagacu

SEQ ID NO: 399848 - RNA, 19 nt, Homo sapiens
  misc_RNA (1)...(19): siRNA sense strand
acgccuaucccgggaguua

SEQ ID NO: 399849 - RNA, 19 nt, Homo sapiens
  misc_RNA (1)...(19): siRNA sense strand
ggcaaggagagacucaaga

SEQ ID NO: 399850 - RNA, 19 nt, Homo sapiens
  misc_RNA (1)...(19): siRNA sense strand
cuucagguuccucuuacua

SEQ ID NO: 399851 - RNA, 19 nt, Homo sapiens
  misc_RNA (1)...(19): siRNA sense strand
gggcuguguccuauguuga

SEQ ID NO: 399852 - RNA, 19 nt, Homo sapiens
  misc_RNA (1)...(19): siRNA sense strand
gaagaaaccagagucauuu

SEQ ID NO: 399853 - RNA, 19 nt, Homo sapiens
  misc_RNA (1)...(19): siRNA sense strand
gaagagaucccaguucuga

SEQ ID NO: 399854 - RNA, 19 nt, Homo sapiens
  misc_RNA (1)...(19): siRNA sense strand
gcucaguucuugauucgua

SEQ ID NO: 399855 - RNA, 19 nt, Homo sapiens
  misc_RNA (1)...(19): siRNA sense strand
gggcugaaauugccaagaa

SEQ ID NO: 399856 - RNA, 19 nt, Homo sapiens
  misc_RNA (1)...(19): siRNA sense strand
ugaggaagauucugaguug

SEQ ID NO: 399857 - RNA, 19 nt, Homo sapiens
  misc_RNA (1)...(19): siRNA sense strand
ccagggaugucauaguuaa

SEQ ID NO: 399858 - RNA, 19 nt, Homo sapiens
  misc_RNA (1)...(19): siRNA sense strand
gagcaaaacuugauucuuc

SEQ ID NO: 399859 - RNA, 19 nt, Homo sapiens
  misc_RNA (1)...(19): siRNA sense strand
ggaagauucugaguuguug

SEQ ID NO: 399860 - RNA, 19 nt, Homo sapiens
  misc_RNA (1)...(19): siRNA sense strand
gaccagaucugucacaaaa

SEQ ID NO: 399861 - RNA, 19 nt, Homo sapiens
  misc_RNA (1)...(19): siRNA sense strand
gauacgaaaugaugugcuu

SEQ ID NO: 399862 - RNA, 19 nt, Homo sapiens
  misc_RNA (1)...(19): siRNA sense strand
gguggacacugaggauaua

SEQ ID NO: 399863 - RNA, 19 nt, Homo sapiens
  misc_RNA (1)...(19): siRNA sense strand
ucaauucgaugcugugugu

SEQ ID NO: 399864 - RNA, 19 nt, Homo sapiens
  misc_RNA (1)...(19): siRNA sense strand
gaaauugccaagaaucuca

SEQ ID NO: 399865 - RNA, 19 nt, Homo sapiens
  misc_RNA (1)...(19): siRNA sense strand
acagguaacuccagaagau

SEQ ID NO: 399866 - RNA, 19 nt, Homo sapiens
  misc_RNA (1)...(19): siRNA sense strand
ggagcucaguucuugauuc

SEQ ID NO: 399867 - RNA, 19 nt, Homo sapiens
  misc_RNA (1)...(19): siRNA sense strand
aaacuugauucuucugaga

SEQ ID NO: 399868 - RNA, 19 nt, Homo sapiens
  misc_RNA (1)...(19): siRNA sense strand
uaaaguuccguacagauaa

SEQ ID NO: 399869 - RNA, 19 nt, Homo sapiens
  misc_RNA (1)...(19): siRNA sense strand
uuaaaguuccguacagaua

SEQ ID NO: 399870 - RNA, 19 nt, Homo sapiens
  misc_RNA (1)...(19): siRNA sense strand
ggaggaggcggcacaguau

SEQ ID NO: 399871 - RNA, 19 nt, Homo sapiens
  misc_RNA (1)...(19): siRNA sense strand
caacaacuucuucuucuuc

SEQ ID NO: 399872 - RNA, 19 nt, Homo sapiens
  misc_RNA (1)...(19): siRNA sense strand
gaacagguaacuccagaag

SEQ ID NO: 399873 - RNA, 19 nt, Homo sapiens
  misc_RNA (1)...(19): siRNA sense strand
uaccauggauacacauuug

SEQ ID NO: 399874 - RNA, 19 nt, Homo sapiens
  misc_RNA (1)...(19): siRNA sense strand
aaaguuccguacagauaaa

SEQ ID NO: 399875 - RNA, 19 nt, Homo sapiens
  misc_RNA (1)...(19): siRNA sense strand
agaagaaaccagagucauu

SEQ ID NO: 399876 - RNA, 19 nt, Homo sapiens
  misc_RNA (1)...(19): siRNA sense strand
caaaguuagccaaggagua

SEQ ID NO: 399877 - RNA, 19 nt, Homo sapiens
  misc_RNA (1)...(19): siRNA sense strand
agagaucccaguucugaua

SEQ ID NO: 399878 - RNA, 19 nt, Homo sapiens
  misc_RNA (1)...(19): siRNA sense strand
caucuuggcaggagugaaa

SEQ ID NO: 399879 - RNA, 19 nt, Homo sapiens
  misc_RNA (1)...(19): siRNA sense strand
guggucuucugcccuguua

SEQ ID NO: 399880 - RNA, 19 nt, Homo sapiens
  misc_RNA (1)...(19): siRNA sense strand
ucacaacaacuucuucuuc

SEQ ID NO: 399881 - RNA, 19 nt, Homo sapiens
  misc_RNA (1)...(19): siRNA sense strand
ggauacacauuugccaauc

SEQ ID NO: 399882 - RNA, 19 nt, Homo sapiens
  misc_RNA (1)...(19): siRNA sense strand
cgacuacuuucuccuucaa

SEQ ID NO: 399883 - RNA, 19 nt, Homo sapiens
  misc_RNA (1)...(19): siRNA sense strand
auacacauuugccaaucua

SEQ ID NO: 399884 - RNA, 19 nt, Homo sapiens
  misc_RNA (1)...(19): siRNA sense strand
ugaaaggacugaccaugcu

SEQ ID NO: 399885 - RNA, 19 nt, Homo sapiens
  misc_RNA (1)...(19): siRNA sense strand
cacaacaacuucuucuucu

SEQ ID NO: 399886 - RNA, 19 nt, Homo sapiens
  misc_RNA (1)...(19): siRNA sense strand
gauacacauuugccaaucu

SEQ ID NO: 399887 - RNA, 19 nt, Homo sapiens
  misc_RNA (1)...(19): siRNA sense strand
gaugucauaguuaaaguug

SEQ ID NO: 399888 - RNA, 19 nt, Homo sapiens
  misc_RNA (1)...(19): siRNA sense strand
gagcucaguucuugauucg

SEQ ID NO: 399889 - RNA, 19 nt, Homo sapiens
  misc_RNA (1)...(19): siRNA sense strand
acacugaggauauagagaa

SEQ ID NO: 399890 - RNA, 19 nt, Homo sapiens
  misc_RNA (1)...(19): siRNA sense strand
cauaugaggaagauucuga

SEQ ID NO: 399891 - RNA, 19 nt, Homo sapiens
  misc_RNA (1)...(19): siRNA sense strand
uucaagugcucuuaaaguu

SEQ ID NO: 399892 - RNA, 19 nt, Homo sapiens
  misc_RNA (1)...(19): siRNA sense strand
cugaggauauagagaagaa

SEQ ID NO: 399893 - RNA, 19 nt, Homo sapiens
  misc_RNA (1)...(19): siRNA sense strand
ccaguucugauacauauga

SEQ ID NO: 399894 - RNA, 19 nt, Homo sapiens
  misc_RNA (1)...(19): siRNA sense strand
ggucuucugcccuguuaaa

SEQ ID NO: 399895 - RNA, 19 nt, Homo sapiens
  misc_RNA (1)...(19): siRNA sense strand
uaggagagcaugaguuugu

SEQ ID NO: 399896 - RNA, 19 nt, Homo sapiens
  misc_RNA (1)...(19): siRNA sense strand
cuccagggaugucauaguu

SEQ ID NO: 399897 - RNA, 19 nt, Homo sapiens
  misc_RNA (1)...(19): siRNA sense strand
ucuaggagagcaugaguuu

SEQ ID NO: 399898 - RNA, 19 nt, Homo sapiens
  misc_RNA (1)...(19): siRNA sense strand
ucccggagcucaguucuug

SEQ ID NO: 399899 - RNA, 19 nt, Homo sapiens
  misc_RNA (1)...(19): siRNA sense strand
gaagguggacacugaggau

SEQ ID NO: 399900 - RNA, 19 nt, Homo sapiens
  misc_RNA (1)...(19): siRNA sense strand
ucccaguucugauacauau

SEQ ID NO: 399901 - RNA, 19 nt, Homo sapiens
  misc_RNA (1)...(19): siRNA sense strand
gaugcugugugucugacuu

SEQ ID NO: 399902 - RNA, 19 nt, Homo sapiens
  misc_RNA (1)...(19): siRNA sense strand
gcacgaccuccgacuacuu

SEQ ID NO: 399903 - RNA, 19 nt, Homo sapiens
  misc_RNA (1)...(19): siRNA sense strand
acaacaacuucuucuucuu

SEQ ID NO: 399904 - RNA, 19 nt, Homo sapiens
  misc_RNA (1)...(19): siRNA sense strand
gaagaucccggagcucagu

SEQ ID NO: 399905 - RNA, 19 nt, Homo sapiens
  misc_RNA (1)...(19): siRNA sense strand
aggaagagaucccaguucu

SEQ ID NO: 399906 - RNA, 19 nt, Homo sapiens
  misc_RNA (1)...(19): siRNA sense strand
guacagauaaaggaagaga

SEQ ID NO: 399907 - RNA, 19 nt, Homo sapiens
  misc_RNA (1)...(19): siRNA sense strand
caaguucuuuacaggagau

SEQ ID NO: 399908 - RNA, 19 nt, Homo sapiens
  misc_RNA (1)...(19): siRNA sense strand
gggaugucauaguuaaagu

SEQ ID NO: 399909 - RNA, 19 nt, Homo sapiens
  misc_RNA (1)...(19): siRNA sense strand
caacuucuucuucuucgau

SEQ ID NO: 399910 - RNA, 19 nt, Homo sapiens
  misc_RNA (1)...(19): siRNA sense strand
ggaugucauaguuaaaguu

SEQ ID NO: 399911 - RNA, 19 nt, Homo sapiens
  misc_RNA (1)...(19): siRNA sense strand
gaggaagauucugaguugu

SEQ ID NO: 399912 - RNA, 19 nt, Homo sapiens
  misc_RNA (1)...(19): siRNA sense strand
auacauaugaggaagauuc

SEQ ID NO: 399913 - RNA, 19 nt, Homo sapiens
  misc_RNA (1)...(19): siRNA sense strand
ccguacagauaaaggaaga

SEQ ID NO: 399914 - RNA, 19 nt, Homo sapiens
  misc_RNA (1)...(19): siRNA sense strand
uaguuaaaguugaccagau

SEQ ID NO: 399915 - RNA, 19 nt, Homo sapiens
  misc_RNA (1)...(19): siRNA sense strand
ugauacauaugaggaagau

SEQ ID NO: 399916 - RNA, 19 nt, Homo sapiens
  misc_RNA (1)...(19): siRNA sense strand
aaaguuagccaaggaguag

SEQ ID NO: 399917 - RNA, 19 nt, Homo sapiens
  misc_RNA (1)...(19): siRNA sense strand
ugccaaaguuagccaagga

SEQ ID NO: 399918 - RNA, 19 nt, Homo sapiens
  misc_RNA (1)...(19): siRNA sense strand
acuaaaguugccaaaguua

SEQ ID NO: 399919 - RNA, 19 nt, Homo sapiens
  misc_RNA (1)...(19): siRNA sense strand
gagagcaugaguuuguaga

SEQ ID NO: 399920 - RNA, 19 nt, Homo sapiens
  misc_RNA (1)...(19): siRNA sense strand
ggacacugaggauauagag

SEQ ID NO: 399921 - RNA, 19 nt, Homo sapiens
  misc_RNA (1)...(19): siRNA sense strand
gaucccaguucugauacau

SEQ ID NO: 399922 - RNA, 19 nt, Homo sapiens
  misc_RNA (1)...(19): siRNA sense strand
gacugaccaugcuggauca

SEQ ID NO: 399923 - RNA, 19 nt, Homo sapiens
  misc_RNA (1)...(19): siRNA sense strand
cacgaccuccgacuacuuu

SEQ ID NO: 399924 - RNA, 19 nt, Homo sapiens
  misc_RNA (1)...(19): siRNA sense strand
aaaggaagagaucccaguu

SEQ ID NO: 399925 - RNA, 19 nt, Homo sapiens
  misc_RNA (1)...(19): siRNA sense strand
aggaggaggcggcacagua

SEQ ID NO: 399926 - RNA, 19 nt, Homo sapiens
  misc_RNA (1)...(19): siRNA sense strand
ggacccuccucacaacaac

SEQ ID NO: 399927 - RNA, 19 nt, Homo sapiens
  misc_RNA (1)...(19): siRNA sense strand
gaaaggacuuggggcugaa

SEQ ID NO: 399928 - RNA, 19 nt, Homo sapiens
  misc_RNA (1)...(19): siRNA sense strand
ucaagugcucuuaaaguuc

SEQ ID NO: 399929 - RNA, 19 nt, Homo sapiens
  misc_RNA (1)...(19): siRNA sense strand
ggagcagugagaaagcaaa

SEQ ID NO: 399930 - RNA, 19 nt, Homo sapiens
  misc_RNA (1)...(19): siRNA sense strand
ggaagagaucccaguucug

SEQ ID NO: 399931 - RNA, 19 nt, Homo sapiens
  misc_RNA (1)...(19): siRNA sense strand
gagaagaaaccagagucau

SEQ ID NO: 399932 - RNA, 19 nt, Homo sapiens
  misc_RNA (1)...(19): siRNA sense strand
ggcugaaauugccaagaau

SEQ ID NO: 399933 - RNA, 19 nt, Homo sapiens
  misc_RNA (1)...(19): siRNA sense strand
ugaguuguugcuccagaua

SEQ ID NO: 399934 - RNA, 19 nt, Homo sapiens
  misc_RNA (1)...(19): siRNA sense strand
acagauaaaggaagagauc

SEQ ID NO: 399935 - RNA, 19 nt, Homo sapiens
  misc_RNA (1)...(19): siRNA sense strand
aguuaaaguugaccagauc

SEQ ID NO: 399936 - RNA, 19 nt, Homo sapiens
  misc_RNA (1)...(19): siRNA sense strand
uauuaguccugaccugcuu

SEQ ID NO: 399937 - RNA, 19 nt, Homo sapiens
  misc_RNA (1)...(19): siRNA sense strand
ccagauacgaaaugaugug

SEQ ID NO: 399938 - RNA, 19 nt, Homo sapiens
  misc_RNA (1)...(19): siRNA sense strand
ucuuaaaguuccguacaga

SEQ ID NO: 399939 - RNA, 19 nt, Homo sapiens
  misc_RNA (1)...(19): siRNA sense strand
gcucuuaaaguuccguaca

SEQ ID NO: 399940 - RNA, 19 nt, Homo sapiens
  misc_RNA (1)...(19): siRNA sense strand
aggagagcaugaguuugua

SEQ ID NO: 399941 - RNA, 19 nt, Homo sapiens
  misc_RNA (1)...(19): siRNA sense strand
uaaaguugaccagaucugu

SEQ ID NO: 399942 - RNA, 19 nt, Homo sapiens
  misc_RNA (1)...(19): siRNA sense strand
augugaagguggacacuga

SEQ ID NO: 399943 - RNA, 19 nt, Homo sapiens
  misc_RNA (1)...(19): siRNA sense strand
gcugaaauugccaagaauc

SEQ ID NO: 399944 - RNA, 19 nt, Homo sapiens
  misc_RNA (1)...(19): siRNA sense strand
cuaccauggauacacauuu

SEQ ID NO: 399945 - RNA, 19 nt, Homo sapiens
  misc_RNA (1)...(19): siRNA sense strand
uggcuaccauggauacaca

SEQ ID NO: 399946 - RNA, 19 nt, Homo sapiens
  misc_RNA (1)...(19): siRNA sense strand
gaggauauagagaagaaac

SEQ ID NO: 399947 - RNA, 19 nt, Homo sapiens
  misc_RNA (1)...(19): siRNA sense strand
gcuggaucacgaacaggua

SEQ ID NO: 399948 - RNA, 19 nt, Homo sapiens
  misc_RNA (1)...(19): siRNA sense strand
ggagagcaugaguuuguag

SEQ ID NO: 399949 - RNA, 19 nt, Homo sapiens
  misc_RNA (1)...(19): siRNA sense strand
ccucucgggugcuucuugu

SEQ ID NO: 399950 - RNA, 19 nt, Homo sapiens
  misc_RNA (1)...(19): siRNA sense strand
ccgacuacuuucuccuuca

SEQ ID NO: 399951 - RNA, 19 nt, Homo sapiens
  misc_RNA (1)...(19): siRNA sense strand
gaccaugcuggaucacgaa

SEQ ID NO: 399952 - RNA, 19 nt, Homo sapiens
  misc_RNA (1)...(19): siRNA sense strand
gaaaggacguugaauuuga

SEQ ID NO: 399953 - RNA, 19 nt, Homo sapiens
  misc_RNA (1)...(19): siRNA sense strand
gcaaagaggucacguauag

SEQ ID NO: 399954 - RNA, 19 nt, Homo sapiens
  misc_RNA (1)...(19): siRNA sense strand
ggacugggcugaaguacaa

SEQ ID NO: 399955 - RNA, 19 nt, Homo sapiens
  misc_RNA (1)...(19): siRNA sense strand
ggaagaagaugcugaucaa

SEQ ID NO: 399956 - RNA, 19 nt, Homo sapiens
  misc_RNA (1)...(19): siRNA sense strand
gaacaauccuaauaucuuc

SEQ ID NO: 399957 - RNA, 19 nt, Homo sapiens
  misc_RNA (1)...(19): siRNA sense strand
gaaauuagaugagaaagag

SEQ ID NO: 399958 - RNA, 19 nt, Homo sapiens
  misc_RNA (1)...(19): siRNA sense strand
ugacagagcugacccugaa

SEQ ID NO: 399959 - RNA, 19 nt, Homo sapiens
  misc_RNA (1)...(19): siRNA sense strand
uaacagagcugcccgaaac

SEQ ID NO: 399960 - RNA, 19 nt, Homo sapiens
  misc_RNA (1)...(19): siRNA sense strand
gaacauuauuccugcuauu

SEQ ID NO: 399961 - RNA, 19 nt, Homo sapiens
  misc_RNA (1)...(19): siRNA sense strand
ggacuauacuuuauugauc

SEQ ID NO: 399962 - RNA, 19 nt, Homo sapiens
  misc_RNA (1)...(19): siRNA sense strand
aaagaaacauguuggaaga

SEQ ID NO: 399963 - RNA, 19 nt, Homo sapiens
  misc_RNA (1)...(19): siRNA sense strand
agaaguaucuccugacaga

SEQ ID NO: 399964 - RNA, 19 nt, Homo sapiens
  misc_RNA (1)...(19): siRNA sense strand
gaagagagaagccgcaaga

SEQ ID NO: 399965 - RNA, 19 nt, Homo sapiens
  misc_RNA (1)...(19): siRNA sense strand
gcugcgagcuccucaagaa

SEQ ID NO: 399966 - RNA, 19 nt, Homo sapiens
  misc_RNA (1)...(19): siRNA sense strand
caaccaaacccaagaaaga

SEQ ID NO: 399967 - RNA, 19 nt, Homo sapiens
  misc_RNA (1)...(19): siRNA sense strand
ggaaugggcuaaaucaacu

SEQ ID NO: 399968 - RNA, 19 nt, Homo sapiens
  misc_RNA (1)...(19): siRNA sense strand
ugauugaucuggauacuau

SEQ ID NO: 399969 - RNA, 19 nt, Homo sapiens
  misc_RNA (1)...(19): siRNA sense strand
ggaacaauccuaauaucuu

SEQ ID NO: 399970 - RNA, 19 nt, Homo sapiens
  misc_RNA (1)...(19): siRNA sense strand
caccagauguccaaauuga

SEQ ID NO: 399971 - RNA, 19 nt, Homo sapiens
  misc_RNA (1)...(19): siRNA sense strand
ucagguaucuguugacaau

SEQ ID NO: 399972 - RNA, 19 nt, Homo sapiens
  misc_RNA (1)...(19): siRNA sense strand
agaagaugcugaucaagaa

SEQ ID NO: 399973 - RNA, 19 nt, Homo sapiens
  misc_RNA (1)...(19): siRNA sense strand
gcaaaccucaggaugcaua

SEQ ID NO: 399974 - RNA, 19 nt, Homo sapiens
  misc_RNA (1)...(19): siRNA sense strand
aggaagagcuugaugaugu

SEQ ID NO: 399975 - RNA, 19 nt, Homo sapiens
  misc_RNA (1)...(19): siRNA sense strand
gaaacauguuggaagauca

SEQ ID NO: 399976 - RNA, 19 nt, Homo sapiens
  misc_RNA (1)...(19): siRNA sense strand
ugaagauggugacauuaaa

SEQ ID NO: 399977 - RNA, 19 nt, Homo sapiens
  misc_RNA (1)...(19): siRNA sense strand
caaacaagcugaagaugcu

SEQ ID NO: 399978 - RNA, 19 nt, Homo sapiens
  misc_RNA (1)...(19): siRNA sense strand
gaccagugcagaacaauuu

SEQ ID NO: 399979 - RNA, 19 nt, Homo sapiens
  misc_RNA (1)...(19): siRNA sense strand
ucaugaacccugacuauaa

SEQ ID NO: 399980 - RNA, 19 nt, Homo sapiens
  misc_RNA (1)...(19): siRNA sense strand
caagaaguaucuccugaca

SEQ ID NO: 399981 - RNA, 19 nt, Homo sapiens
  misc_RNA (1)...(19): siRNA sense strand
caugaacccugacuauaau

SEQ ID NO: 399982 - RNA, 19 nt, Homo sapiens
  misc_RNA (1)...(19): siRNA sense strand
ggaaaggacguugaauuug

SEQ ID NO: 399983 - RNA, 19 nt, Homo sapiens
  misc_RNA (1)...(19): siRNA sense strand
gacaagauagugaaagaaa

SEQ ID NO: 399984 - RNA, 19 nt, Homo sapiens
  misc_RNA (1)...(19): siRNA sense strand
guaugaauaugaagaguag

SEQ ID NO: 399985 - RNA, 19 nt, Homo sapiens
  misc_RNA (1)...(19): siRNA sense strand
caucagaucaacagaauga

SEQ ID NO: 399986 - RNA, 19 nt, Homo sapiens
  misc_RNA (1)...(19): siRNA sense strand
ugucauagcauuagauuga

SEQ ID NO: 399987 - RNA, 19 nt, Homo sapiens
  misc_RNA (1)...(19): siRNA sense strand
ccaggacuauacuuuauug

SEQ ID NO: 399988 - RNA, 19 nt, Homo sapiens
  misc_RNA (1)...(19): siRNA sense strand
caaaguacuuguucaacca

SEQ ID NO: 399989 - RNA, 19 nt, Homo sapiens
  misc_RNA (1)...(19): siRNA sense strand
gcaagaggaaauuagauga

SEQ ID NO: 399990 - RNA, 19 nt, Homo sapiens
  misc_RNA (1)...(19): siRNA sense strand
caagaaguugucagaauuu

SEQ ID NO: 399991 - RNA, 19 nt, Homo sapiens
  misc_RNA (1)...(19): siRNA sense strand
gagaguucauuuagcagaa

SEQ ID NO: 399992 - RNA, 19 nt, Homo sapiens
  misc_RNA (1)...(19): siRNA sense strand
uaagcaaccucaacagaca

SEQ ID NO: 399993 - RNA, 19 nt, Homo sapiens
  misc_RNA (1)...(19): siRNA sense strand
gaaggaagagcuugaugau

SEQ ID NO: 399994 - RNA, 19 nt, Homo sapiens
  misc_RNA (1)...(19): siRNA sense strand
ggaaauuagaugagaaaga

SEQ ID NO: 399995 - RNA, 19 nt, Homo sapiens
  misc_RNA (1)...(19): siRNA sense strand
gagagacggaagcuaauaa

SEQ ID NO: 399996 - RNA, 19 nt, Homo sapiens
  misc_RNA (1)...(19): siRNA sense strand
cagcugauguuccucuuau

SEQ ID NO: 399997 - RNA, 19 nt, Homo sapiens
  misc_RNA (1)...(19): siRNA sense strand
gacaucagguaucuguuga

SEQ ID NO: 399998 - RNA, 19 nt, Homo sapiens
  misc_RNA (1)...(19): siRNA sense strand
gaaguugucagaauuugga

SEQ ID NO: 399999 - RNA, 19 nt, Homo sapiens
  misc_RNA (1)...(19): siRNA sense strand
uaacacaccuucagaaccu

SEQ ID NO: 400000 - RNA, 19 nt, Homo sapiens
  misc_RNA (1)...(19): siRNA sense strand
ggagagacggaagcuaaua

SEQ ID NO: 400001 - RNA, 19 nt, Homo sapiens
  misc_RNA (1)...(19): siRNA sense strand
gauggugacauuaaacgua

SEQ ID NO: 400002 - RNA, 19 nt, Homo sapiens
  misc_RNA (1)...(19): siRNA sense strand
ccgaaaccauguuaauaga

SEQ ID NO: 400003 - RNA, 19 nt, Homo sapiens
  misc_RNA (1)...(19): siRNA sense strand
ggacguugaauuugaaguu

SEQ ID NO: 400004 - RNA, 19 nt, Homo sapiens
  misc_RNA (1)...(19): siRNA sense strand
aaaggacguugaauuugaa

SEQ ID NO: 400005 - RNA, 19 nt, Homo sapiens
  misc_RNA (1)...(19): siRNA sense strand
ucaacauccuucauaguga

SEQ ID NO: 400006 - RNA, 19 nt, Homo sapiens
  misc_RNA (1)...(19): siRNA sense strand
gggcugaaguacaaaguca

SEQ ID NO: 400007 - RNA, 19 nt, Homo sapiens
  misc_RNA (1)...(19): siRNA sense strand
cccgaaagcuaauaucguu

SEQ ID NO: 400008 - RNA, 19 nt, Homo sapiens
  misc_RNA (1)...(19): siRNA sense strand
uuggaaggauugaagauuu

SEQ ID NO: 400009 - RNA, 19 nt, Homo sapiens
  misc_RNA (1)...(19): siRNA sense strand
aaacguauuucuacuaagg

SEQ ID NO: 400010 - RNA, 19 nt, Homo sapiens
  misc_RNA (1)...(19): siRNA sense strand
cuucagaaccuauacauug

SEQ ID NO: 400011 - RNA, 19 nt, Homo sapiens
  misc_RNA (1)...(19): siRNA sense strand
guauagaacagaaggaaga

SEQ ID NO: 400012 - RNA, 19 nt, Homo sapiens
  misc_RNA (1)...(19): siRNA sense strand
gaggaaauuagaugagaaa

SEQ ID NO: 400013 - RNA, 19 nt, Homo sapiens
  misc_RNA (1)...(19): siRNA sense strand
aguaauugcuggguugaua

SEQ ID NO: 400014 - RNA, 19 nt, Homo sapiens
  misc_RNA (1)...(19): siRNA sense strand
gguuaugaaugcuuuagau

SEQ ID NO: 400015 - RNA, 19 nt, Homo sapiens
  misc_RNA (1)...(19): siRNA sense strand
ggaagagcuugaugauguc

SEQ ID NO: 400016 - RNA, 19 nt, Homo sapiens
  misc_RNA (1)...(19): siRNA sense strand
aggaaaggacguugaauuu

SEQ ID NO: 400017 - RNA, 19 nt, Homo sapiens
  misc_RNA (1)...(19): siRNA sense strand
gugaagaccuaggaaagga

SEQ ID NO: 400018 - RNA, 19 nt, Homo sapiens
  misc_RNA (1)...(19): siRNA sense strand
aagacaagauagugaaaga

SEQ ID NO: 400019 - RNA, 19 nt, Homo sapiens
  misc_RNA (1)...(19): siRNA sense strand
guucucaccuuacaagaca

SEQ ID NO: 400020 - RNA, 19 nt, Homo sapiens
  misc_RNA (1)...(19): siRNA sense strand
gauaguauuggaaggauug

SEQ ID NO: 400021 - RNA, 19 nt, Homo sapiens
  misc_RNA (1)...(19): siRNA sense strand
ccagcagguucuagaugua

SEQ ID NO: 400022 - RNA, 19 nt, Homo sapiens
  misc_RNA (1)...(19): siRNA sense strand
gcccgaaaccauguuaaua

SEQ ID NO: 400023 - RNA, 19 nt, Homo sapiens
  misc_RNA (1)...(19): siRNA sense strand
aaagaggucacguauagaa

SEQ ID NO: 400024 - RNA, 19 nt, Homo sapiens
  misc_RNA (1)...(19): siRNA sense strand
gcugagcucauaugggaua

SEQ ID NO: 400025 - RNA, 19 nt, Homo sapiens
  misc_RNA (1)...(19): siRNA sense strand
gaagcugccugggaaccaa

SEQ ID NO: 400026 - RNA, 19 nt, Homo sapiens
  misc_RNA (1)...(19): siRNA sense strand
caucgagacuuugagaguu

SEQ ID NO: 400027 - RNA, 19 nt, Homo sapiens
  misc_RNA (1)...(19): siRNA sense strand
agacggaagcuaauaauca

SEQ ID NO: 400028 - RNA, 19 nt, Homo sapiens
  misc_RNA (1)...(19): siRNA sense strand
ggucacguauagaacagaa

SEQ ID NO: 400029 - RNA, 19 nt, Homo sapiens
  misc_RNA (1)...(19): siRNA sense strand
aaaguguacugcaguuuua

SEQ ID NO: 400030 - RNA, 19 nt, Homo sapiens
  misc_RNA (1)...(19): siRNA sense strand
uaaggaaugggcuaaauca

SEQ ID NO: 400031 - RNA, 19 nt, Homo sapiens
  misc_RNA (1)...(19): siRNA sense strand
cuaaaucaacuggauauga

SEQ ID NO: 400032 - RNA, 19 nt, Homo sapiens
  misc_RNA (1)...(19): siRNA sense strand
ccuauacauugcaucguuu

SEQ ID NO: 400033 - RNA, 19 nt, Homo sapiens
  misc_RNA (1)...(19): siRNA sense strand
gacguugaauuugaaguug

SEQ ID NO: 400034 - RNA, 19 nt, Homo sapiens
  misc_RNA (1)...(19): siRNA sense strand
uaggaaaggacguugaauu

SEQ ID NO: 400035 - RNA, 19 nt, Homo sapiens
  misc_RNA (1)...(19): siRNA sense strand
ugacuguucucaccuuaca

SEQ ID NO: 400036 - RNA, 19 nt, Homo sapiens
  misc_RNA (1)...(19): siRNA sense strand
gaaaguguacugcaguuuu

SEQ ID NO: 400037 - RNA, 19 nt, Homo sapiens
  misc_RNA (1)...(19): siRNA sense strand
gagcaucgagacuuugaga

SEQ ID NO: 400038 - RNA, 19 nt, Homo sapiens
  misc_RNA (1)...(19): siRNA sense strand
gggaagaagaugcugauca

SEQ ID NO: 400039 - RNA, 19 nt, Homo sapiens
  misc_RNA (1)...(19): siRNA sense strand
caucaugaacccugacuau

SEQ ID NO: 400040 - RNA, 19 nt, Homo sapiens
  misc_RNA (1)...(19): siRNA sense strand
gaugucauagcauuagauu

SEQ ID NO: 400041 - RNA, 19 nt, Homo sapiens
  misc_RNA (1)...(19): siRNA sense strand
ggaaaguguacugcaguuu

SEQ ID NO: 400042 - RNA, 19 nt, Homo sapiens
  misc_RNA (1)...(19): siRNA sense strand
caaccucaacagacaguuu

SEQ ID NO: 400043 - RNA, 19 nt, Homo sapiens
  misc_RNA (1)...(19): siRNA sense strand
caccuuacaagacaagaua

SEQ ID NO: 400044 - RNA, 19 nt, Homo sapiens
  misc_RNA (1)...(19): siRNA sense strand
gcggcugaauguccauaaa

SEQ ID NO: 400045 - RNA, 19 nt, Homo sapiens
  misc_RNA (1)...(19): siRNA sense strand
gcacagguugccaaggaaa

SEQ ID NO: 400046 - RNA, 19 nt, Homo sapiens
  misc_RNA (1)...(19): siRNA sense strand
ucaaagagcaucgagacuu

SEQ ID NO: 400047 - RNA, 19 nt, Homo sapiens
  misc_RNA (1)...(19): siRNA sense strand
gaaagaccagcagguucua

SEQ ID NO: 400048 - RNA, 19 nt, Homo sapiens
  misc_RNA (1)...(19): siRNA sense strand
gauguuccucuuauugaaa

SEQ ID NO: 400049 - RNA, 19 nt, Homo sapiens
  misc_RNA (1)...(19): siRNA sense strand
gcugauguuccucuuauug

SEQ ID NO: 400050 - RNA, 19 nt, Homo sapiens
  misc_RNA (1)...(19): siRNA sense strand
gcagcugauguuccucuua

SEQ ID NO: 400051 - RNA, 19 nt, Homo sapiens
  misc_RNA (1)...(19): siRNA sense strand
gauguaagcaaccucaaca

SEQ ID NO: 400052 - RNA, 19 nt, Homo sapiens
  misc_RNA (1)...(19): siRNA sense strand
gaaaccagcucgaauauau

SEQ ID NO: 400053 - RNA, 19 nt, Homo sapiens
  misc_RNA (1)...(19): siRNA sense strand
ggaaagaaguuaugcuugu

SEQ ID NO: 400054 - RNA, 19 nt, Homo sapiens
  misc_RNA (1)...(19): siRNA sense strand
gaagaaacaccuccuuauu

SEQ ID NO: 400055 - RNA, 19 nt, Homo sapiens
  misc_RNA (1)...(19): siRNA sense strand
gaaagaaguuaugcuuguu

SEQ ID NO: 400056 - RNA, 19 nt, Homo sapiens
  misc_RNA (1)...(19): siRNA sense strand
ucaaagaagugggaagaaa

SEQ ID NO: 400057 - RNA, 19 nt, Homo sapiens
  misc_RNA (1)...(19): siRNA sense strand
ggucugucaucuccuauaa

SEQ ID NO: 400058 - RNA, 19 nt, Homo sapiens
  misc_RNA (1)...(19): siRNA sense strand
ugagaugauugacaaauug

SEQ ID NO: 400059 - RNA, 19 nt, Homo sapiens
  misc_RNA (1)...(19): siRNA sense strand
gauaucaccaggagacuaa

SEQ ID NO: 400060 - RNA, 19 nt, Homo sapiens
  misc_RNA (1)...(19): siRNA sense strand
ggagaugcgucagucauug

SEQ ID NO: 400061 - RNA, 19 nt, Homo sapiens
  misc_RNA (1)...(19): siRNA sense strand
cgaaauauggcaacuuuga

SEQ ID NO: 400062 - RNA, 19 nt, Homo sapiens
  misc_RNA (1)...(19): siRNA sense strand
gcuccaucaucuuuaauaa

SEQ ID NO: 400063 - RNA, 19 nt, Homo sapiens
  misc_RNA (1)...(19): siRNA sense strand
agucauugcccuugaauua

SEQ ID NO: 400064 - RNA, 19 nt, Homo sapiens
  misc_RNA (1)...(19): siRNA sense strand
gccaagcugucaucacaaa

SEQ ID NO: 400065 - RNA, 19 nt, Homo sapiens
  misc_RNA (1)...(19): siRNA sense strand
ggauucaaguucgaaauau

SEQ ID NO: 400066 - RNA, 19 nt, Homo sapiens
  misc_RNA (1)...(19): siRNA sense strand
gaaauauggcaacuuugaa

SEQ ID NO: 400067 - RNA, 19 nt, Homo sapiens
  misc_RNA (1)...(19): siRNA sense strand
agaaacaccuccuuauugg

SEQ ID NO: 400068 - RNA, 19 nt, Homo sapiens
  misc_RNA (1)...(19): siRNA sense strand
gaaguuaugcuuguuggaa

SEQ ID NO: 400069 - RNA, 19 nt, Homo sapiens
  misc_RNA (1)...(19): siRNA sense strand
gcuauucauuccuccauug

SEQ ID NO: 400070 - RNA, 19 nt, Homo sapiens
  misc_RNA (1)...(19): siRNA sense strand
ggacaaugccagcaagaau

SEQ ID NO: 400071 - RNA, 19 nt, Homo sapiens
  misc_RNA (1)...(19): siRNA sense strand
gagcagagugccaggauga

SEQ ID NO: 400072 - RNA, 19 nt, Homo sapiens
  misc_RNA (1)...(19): siRNA sense strand
aagaaacaccuccuuauug

SEQ ID NO: 400073 - RNA, 19 nt, Homo sapiens
  misc_RNA (1)...(19): siRNA sense strand
gaaggcuccaucaucuuua

SEQ ID NO: 400074 - RNA, 19 nt, Homo sapiens
  misc_RNA (1)...(19): siRNA sense strand
gcaauggauucaaguucga

SEQ ID NO: 400075 - RNA, 19 nt, Homo sapiens
  misc_RNA (1)...(19): siRNA sense strand
gauucaaguucgaaauaug

SEQ ID NO: 400076 - RNA, 19 nt, Homo sapiens
  misc_RNA (1)...(19): siRNA sense strand
ucagaggcauacuuuauag

SEQ ID NO: 400077 - RNA, 19 nt, Homo sapiens
  misc_RNA (1)...(19): siRNA sense strand
gaaugcuucugagaugauu

SEQ ID NO: 400078 - RNA, 19 nt, Homo sapiens
  misc_RNA (1)...(19): siRNA sense strand
ugaaggcuccaucaucuuu

SEQ ID NO: 400079 - RNA, 19 nt, Homo sapiens
  misc_RNA (1)...(19): siRNA sense strand
ucugucaucuccuauaaga

SEQ ID NO: 400080 - RNA, 19 nt, Homo sapiens
  misc_RNA (1)...(19): siRNA sense strand
aagaagaaacaccuccuua

SEQ ID NO: 400081 - RNA, 19 nt, Homo sapiens
  misc_RNA (1)...(19): siRNA sense strand
cuucugagaugauugacaa

SEQ ID NO: 400082 - RNA, 19 nt, Homo sapiens
  misc_RNA (1)...(19): siRNA sense strand
ggauaugaauuugaugaag

SEQ ID NO: 400083 - RNA, 19 nt, Homo sapiens
  misc_RNA (1)...(19): siRNA sense strand
ucaggucugucaucuccua

SEQ ID NO: 400084 - RNA, 19 nt, Homo sapiens
  misc_RNA (1)...(19): siRNA sense strand
cugagaugauugacaaauu

SEQ ID NO: 400085 - RNA, 19 nt, Homo sapiens
  misc_RNA (1)...(19): siRNA sense strand
cgagguugcuacacuaaca

SEQ ID NO: 400086 - RNA, 19 nt, Homo sapiens
  misc_RNA (1)...(19): siRNA sense strand
ugacagccauggacaaugc

SEQ ID NO: 400087 - RNA, 19 nt, Homo sapiens
  misc_RNA (1)...(19): siRNA sense strand
uggccaacaucaucuacua

SEQ ID NO: 400088 - RNA, 19 nt, Homo sapiens
  misc_RNA (1)...(19): siRNA sense strand
ggacucauucugaccaguu

SEQ ID NO: 400089 - RNA, 19 nt, Homo sapiens
  misc_RNA (1)...(19): siRNA sense strand
uucgaaauauggcaacuuu

SEQ ID NO: 400090 - RNA, 19 nt, Homo sapiens
  misc_RNA (1)...(19): siRNA sense strand
caaauugacauugacauuc

SEQ ID NO: 400091 - RNA, 19 nt, Homo sapiens
  misc_RNA (1)...(19): siRNA sense strand
gacaaugccagcaagaaug

SEQ ID NO: 400092 - RNA, 19 nt, Homo sapiens
  misc_RNA (1)...(19): siRNA sense strand
aaucagaggcauacuuuau

SEQ ID NO: 400093 - RNA, 19 nt, Homo sapiens
  misc_RNA (1)...(19): siRNA sense strand
gagaugauugacaaauuga

SEQ ID NO: 400094 - RNA, 19 nt, Homo sapiens
  misc_RNA (1)...(19): siRNA sense strand
caaagaagugggaagaaag

SEQ ID NO: 400095 - RNA, 19 nt, Homo sapiens
  misc_RNA (1)...(19): siRNA sense strand
aauacaaucuggccaacau

SEQ ID NO: 400096 - RNA, 19 nt, Homo sapiens
  misc_RNA (1)...(19): siRNA sense strand
uauauggauugggaucuuu

SEQ ID NO: 400097 - RNA, 19 nt, Homo sapiens
  misc_RNA (1)...(19): siRNA sense strand
caacaucaucuacuacucu

SEQ ID NO: 400098 - RNA, 19 nt, Homo sapiens
  misc_RNA (1)...(19): siRNA sense strand
gacucauucugaccaguuu

SEQ ID NO: 400099 - RNA, 19 nt, Homo sapiens
  misc_RNA (1)...(19): siRNA sense strand
agaagaaacaccuccuuau

SEQ ID NO: 400100 - RNA, 19 nt, Homo sapiens
  misc_RNA (1)...(19): siRNA sense strand
aagcgagguugcuacacua

SEQ ID NO: 400101 - RNA, 19 nt, Homo sapiens
  misc_RNA (1)...(19): siRNA sense strand
ugaaaccagcucgaauaua

SEQ ID NO: 400102 - RNA, 19 nt, Homo sapiens
  misc_RNA (1)...(19): siRNA sense strand
uggauucaaguucgaaaua

SEQ ID NO: 400103 - RNA, 19 nt, Homo sapiens
  misc_RNA (1)...(19): siRNA sense strand
cugaaggaguccaccacua

SEQ ID NO: 400104 - RNA, 19 nt, Homo sapiens
  misc_RNA (1)...(19): siRNA sense strand
gcagcugggaaagaaguua

SEQ ID NO: 400105 - RNA, 19 nt, Homo sapiens
  misc_RNA (1)...(19): siRNA sense strand
gaugacagccauggacaau

SEQ ID NO: 400106 - RNA, 19 nt, Homo sapiens
  misc_RNA (1)...(19): siRNA sense strand
ugaaggaguccaccacuag

SEQ ID NO: 400107 - RNA, 19 nt, Homo sapiens
  misc_RNA (1)...(19): siRNA sense strand
aaggcuccaucaucuuuaa

SEQ ID NO: 400108 - RNA, 19 nt, Homo sapiens
  misc_RNA (1)...(19): siRNA sense strand
aaagcgagguugcuacacu

SEQ ID NO: 400109 - RNA, 19 nt, Homo sapiens
  misc_RNA (1)...(19): siRNA sense strand
gaaggaguccaccacuagu

SEQ ID NO: 400110 - RNA, 19 nt, Homo sapiens
  misc_RNA (1)...(19): siRNA sense strand
ggccugaagacaagaagaa

SEQ ID NO: 400111 - RNA, 19 nt, Homo sapiens
  misc_RNA (1)...(19): siRNA sense strand
cgucagucauugcccuuga

SEQ ID NO: 400112 - RNA, 19 nt, Homo sapiens
  misc_RNA (1)...(19): siRNA sense strand
cgaggacuguguggugcua

SEQ ID NO: 400113 - RNA, 19 nt, Homo sapiens
  misc_RNA (1)...(19): siRNA sense strand
cagcucgaauauauggauu

SEQ ID NO: 400114 - RNA, 19 nt, Homo sapiens
  misc_RNA (1)...(19): siRNA sense strand
caagaagaaacaccuccuu

SEQ ID NO: 400115 - RNA, 19 nt, Homo sapiens
  misc_RNA (1)...(19): siRNA sense strand
gcucgaauauauggauugg

SEQ ID NO: 400116 - RNA, 19 nt, Homo sapiens
  misc_RNA (1)...(19): siRNA sense strand
auucauuccuccauugcua

SEQ ID NO: 400117 - RNA, 19 nt, Homo sapiens
  misc_RNA (1)...(19): siRNA sense strand
aaagaaguuaugcuuguug

SEQ ID NO: 400118 - RNA, 19 nt, Homo sapiens
  misc_RNA (1)...(19): siRNA sense strand
gaugauugacaaauugaca

SEQ ID NO: 400119 - RNA, 19 nt, Homo sapiens
  misc_RNA (1)...(19): siRNA sense strand
uaaauucaggucugucauc

SEQ ID NO: 400120 - RNA, 19 nt, Homo sapiens
  misc_RNA (1)...(19): siRNA sense strand
ucauugcccuugaauuacu

SEQ ID NO: 400121 - RNA, 19 nt, Homo sapiens
  misc_RNA (1)...(19): siRNA sense strand
gcugcaaaauuaccaagaa

SEQ ID NO: 400122 - RNA, 19 nt, Homo sapiens
  misc_RNA (1)...(19): siRNA sense strand
cugacgugcugcaaaauua

SEQ ID NO: 400123 - RNA, 19 nt, Homo sapiens
  misc_RNA (1)...(19): siRNA sense strand
gaaacaccuccuuauuggu

SEQ ID NO: 400124 - RNA, 19 nt, Homo sapiens
  misc_RNA (1)...(19): siRNA sense strand
ggcuccaucaucuuuaaua

SEQ ID NO: 400125 - RNA, 19 nt, Homo sapiens
  misc_RNA (1)...(19): siRNA sense strand
uuuauaggacucauucuga

SEQ ID NO: 400126 - RNA, 19 nt, Homo sapiens
  misc_RNA (1)...(19): siRNA sense strand
uguuggaauuggugacaaa

SEQ ID NO: 400127 - RNA, 19 nt, Homo sapiens
  misc_RNA (1)...(19): siRNA sense strand
cuccauugcuaaacagaug

SEQ ID NO: 400128 - RNA, 19 nt, Homo sapiens
  misc_RNA (1)...(19): siRNA sense strand
aaaaucagaggcauacuuu

SEQ ID NO: 400129 - RNA, 19 nt, Homo sapiens
  misc_RNA (1)...(19): siRNA sense strand
ucacaaaagaguugauuga

SEQ ID NO: 400130 - RNA, 19 nt, Homo sapiens
  misc_RNA (1)...(19): siRNA sense strand
ggaugacagccauggacaa

SEQ ID NO: 400131 - RNA, 19 nt, Homo sapiens
  misc_RNA (1)...(19): siRNA sense strand
gaugcugacgugcugcaaa

SEQ ID NO: 400132 - RNA, 19 nt, Homo sapiens
  misc_RNA (1)...(19): siRNA sense strand
aagcccaucuuuucccuua

SEQ ID NO: 400133 - RNA, 19 nt, Homo sapiens
  misc_RNA (1)...(19): siRNA sense strand
cauugcccuugaauuacua

SEQ ID NO: 400134 - RNA, 19 nt, Homo sapiens
  misc_RNA (1)...(19): siRNA sense strand
ucugguggcauucaaagaa

SEQ ID NO: 400135 - RNA, 19 nt, Homo sapiens
  misc_RNA (1)...(19): siRNA sense strand
uuauugguguguccucaga

SEQ ID NO: 400136 - RNA, 19 nt, Homo sapiens
  misc_RNA (1)...(19): siRNA sense strand
gaaaagcgagguugcuaca

SEQ ID NO: 400137 - RNA, 19 nt, Homo sapiens
  misc_RNA (1)...(19): siRNA sense strand
cagccgcaauggauucaag

SEQ ID NO: 400138 - RNA, 19 nt, Homo sapiens
  misc_RNA (1)...(19): siRNA sense strand
ccaacaucaucuacuacuc

SEQ ID NO: 400139 - RNA, 19 nt, Homo sapiens
  misc_RNA (1)...(19): siRNA sense strand
gcaaaauuaccaagaauac

SEQ ID NO: 400140 - RNA, 19 nt, Homo sapiens
  misc_RNA (1)...(19): siRNA sense strand
cagcaugaguaucuaugac

SEQ ID NO: 400141 - RNA, 19 nt, Homo sapiens
  misc_RNA (1)...(19): siRNA sense strand
gucagucauugcccuugaa

SEQ ID NO: 400142 - RNA, 19 nt, Homo sapiens
  misc_RNA (1)...(19): siRNA sense strand
agaggcauacuuuauagga

SEQ ID NO: 400143 - RNA, 19 nt, Homo sapiens
  misc_RNA (1)...(19): siRNA sense strand
aaguuaugcuuguuggaau

SEQ ID NO: 400144 - RNA, 19 nt, Homo sapiens
  misc_RNA (1)...(19): siRNA sense strand
ugacaaauugacauugaca

SEQ ID NO: 400145 - RNA, 19 nt, Homo sapiens
  misc_RNA (1)...(19): siRNA sense strand
gcagagugccaggaugaca

SEQ ID NO: 400146 - RNA, 19 nt, Homo sapiens
  misc_RNA (1)...(19): siRNA sense strand
gaauacaaucuggccaaca

SEQ ID NO: 400147 - RNA, 19 nt, Homo sapiens
  misc_RNA (1)...(19): siRNA sense strand
aaauucaggucugucaucu

SEQ ID NO: 400148 - RNA, 19 nt, Homo sapiens
  misc_RNA (1)...(19): siRNA sense strand
aaaucagaggcauacuuua

SEQ ID NO: 400149 - RNA, 19 nt, Homo sapiens
  misc_RNA (1)...(19): siRNA sense strand
ugggaaagaaguuaugcuu

SEQ ID NO: 400150 - RNA, 19 nt, Homo sapiens
  misc_RNA (1)...(19): siRNA sense strand
aucagaggcauacuuuaua

SEQ ID NO: 400151 - RNA, 19 nt, Homo sapiens
  misc_RNA (1)...(19): siRNA sense strand
aguuaugcuuguuggaauu

SEQ ID NO: 400152 - RNA, 19 nt, Homo sapiens
  misc_RNA (1)...(19): siRNA sense strand
gaacagcgcuucacugaga

SEQ ID NO: 400153 - RNA, 19 nt, Homo sapiens
  misc_RNA (1)...(19): siRNA sense strand
gaguguggcuacaaguuua

SEQ ID NO: 400154 - RNA, 19 nt, Homo sapiens
  misc_RNA (1)...(19): siRNA sense strand
ggagaaacccuuugagugu

SEQ ID NO: 400155 - RNA, 19 nt, Homo sapiens
  misc_RNA (1)...(19): siRNA sense strand
ccaaaugugggaaguguua

SEQ ID NO: 400156 - RNA, 19 nt, Homo sapiens
  misc_RNA (1)...(19): siRNA sense strand
ggagaugcccuacaagugu

SEQ ID NO: 400157 - RNA, 19 nt, Homo sapiens
  misc_RNA (1)...(19): siRNA sense strand
aggaggaagucaaauguaa

SEQ ID NO: 400158 - RNA, 19 nt, Homo sapiens
  misc_RNA (1)...(19): siRNA sense strand
gagaugcccuacaaguguu

SEQ ID NO: 400159 - RNA, 19 nt, Homo sapiens
  misc_RNA (1)...(19): siRNA sense strand
uggcuucgcugagaucuuu

SEQ ID NO: 400160 - RNA, 19 nt, Homo sapiens
  misc_RNA (1)...(19): siRNA sense strand
ggauggcgauuacaugucu

SEQ ID NO: 400161 - RNA, 19 nt, Homo sapiens
  misc_RNA (1)...(19): siRNA sense strand
ugagaucuuuggccucuug

SEQ ID NO: 400162 - RNA, 19 nt, Homo sapiens
  misc_RNA (1)...(19): siRNA sense strand
gaucuuuggccucuuguug

SEQ ID NO: 400163 - RNA, 19 nt, Homo sapiens
  misc_RNA (1)...(19): siRNA sense strand
gggaaguggugguucaagu

SEQ ID NO: 400164 - RNA, 19 nt, Homo sapiens
  misc_RNA (1)...(19): siRNA sense strand
gagcaugaagcccggaauu

SEQ ID NO: 400165 - RNA, 19 nt, Homo sapiens
  misc_RNA (1)...(19): siRNA sense strand
ggaagaagaggaaguuucg

SEQ ID NO: 400166 - RNA, 19 nt, Homo sapiens
  misc_RNA (1)...(19): siRNA sense strand
gagcccagaggcagucaua

SEQ ID NO: 400167 - RNA, 19 nt, Homo sapiens
  misc_RNA (1)...(19): siRNA sense strand
agucaaauguaauccgaaa

SEQ ID NO: 400168 - RNA, 19 nt, Homo sapiens
  misc_RNA (1)...(19): siRNA sense strand
guccacaacaggaaacaua

SEQ ID NO: 400169 - RNA, 19 nt, Homo sapiens
  misc_RNA (1)...(19): siRNA sense strand
gaaugagaggccacacgua

SEQ ID NO: 400170 - RNA, 19 nt, Homo sapiens
  misc_RNA (1)...(19): siRNA sense strand
ggaaguggugguucaagug

SEQ ID NO: 400171 - RNA, 19 nt, Homo sapiens
  misc_RNA (1)...(19): siRNA sense strand
gcacacacacgggugagaa

SEQ ID NO: 400172 - RNA, 19 nt, Homo sapiens
  misc_RNA (1)...(19): siRNA sense strand
ggugagaagcuguuugugu

SEQ ID NO: 400173 - RNA, 19 nt, Homo sapiens
  misc_RNA (1)...(19): siRNA sense strand
ugcaggagcucaacaagca

SEQ ID NO: 400174 - RNA, 19 nt, Homo sapiens
  misc_RNA (1)...(19): siRNA sense strand
gaaacccgaggacugcaaa

SEQ ID NO: 400175 - RNA, 19 nt, Homo sapiens
  misc_RNA (1)...(19): siRNA sense strand
cgaguguggcuacaaguuu

SEQ ID NO: 400176 - RNA, 19 nt, Homo sapiens
  misc_RNA (1)...(19): siRNA sense strand
gaggaagucaaauguaauc

SEQ ID NO: 400177 - RNA, 19 nt, Homo sapiens
  misc_RNA (1)...(19): siRNA sense strand
ggaggaagucaaauguaau

SEQ ID NO: 400178 - RNA, 19 nt, Homo sapiens
  misc_RNA (1)...(19): siRNA sense strand
aaaaguuccucagcaaaua

SEQ ID NO: 400179 - RNA, 19 nt, Homo sapiens
  misc_RNA (1)...(19): siRNA sense strand
gaucaucgaggacgagaag

SEQ ID NO: 400180 - RNA, 19 nt, Homo sapiens
  misc_RNA (1)...(19): siRNA sense strand
gcccuucaguugcgaguuc

SEQ ID NO: 400181 - RNA, 19 nt, Homo sapiens
  misc_RNA (1)...(19): siRNA sense strand
gggagaugcccuacaagug

SEQ ID NO: 400182 - RNA, 19 nt, Homo sapiens
  misc_RNA (1)...(19): siRNA sense strand
aaaggccaaucucaacaug

SEQ ID NO: 400183 - RNA, 19 nt, Homo sapiens
  misc_RNA (1)...(19): siRNA sense strand
gcagagccacaugaucaaa

SEQ ID NO: 400184 - RNA, 19 nt, Homo sapiens
  misc_RNA (1)...(19): siRNA sense strand
ucaaagccguggagcaacu

SEQ ID NO: 400185 - RNA, 19 nt, Homo sapiens
  misc_RNA (1)...(19): siRNA sense strand
gaaacauacuggggagaaa

SEQ ID NO: 400186 - RNA, 19 nt, Homo sapiens
  misc_RNA (1)...(19): siRNA sense strand
gcaugaaccgcucggaaca

SEQ ID NO: 400187 - RNA, 19 nt, Homo sapiens
  misc_RNA (1)...(19): siRNA sense strand
cggcaggcuuggaagaaga

SEQ ID NO: 400188 - RNA, 19 nt, Homo sapiens
  misc_RNA (1)...(19): siRNA sense strand
ugagaggccacacguaugu

SEQ ID NO: 400189 - RNA, 19 nt, Homo sapiens
  misc_RNA (1)...(19): siRNA sense strand
gccaagcacaggaaugaga

SEQ ID NO: 400190 - RNA, 19 nt, Homo sapiens
  misc_RNA (1)...(19): siRNA sense strand
agaagcuguuuguguguga

SEQ ID NO: 400191 - RNA, 19 nt, Homo sapiens
  misc_RNA (1)...(19): siRNA sense strand
caggaggaagucaaaugua

SEQ ID NO: 400192 - RNA, 19 nt, Homo sapiens
  misc_RNA (1)...(19): siRNA sense strand
ccaggaggaagucaaaugu

SEQ ID NO: 400193 - RNA, 19 nt, Homo sapiens
  misc_RNA (1)...(19): siRNA sense strand
gcugagaacagaaaaggua

SEQ ID NO: 400194 - RNA, 19 nt, Homo sapiens
  misc_RNA (1)...(19): siRNA sense strand
aaugagaggccacacguau

SEQ ID NO: 400195 - RNA, 19 nt, Homo sapiens
  misc_RNA (1)...(19): siRNA sense strand
ccucagcaaauauuaucua

SEQ ID NO: 400196 - RNA, 19 nt, Homo sapiens
  misc_RNA (1)...(19): siRNA sense strand
gggagaagggccaguacug

SEQ ID NO: 400197 - RNA, 19 nt, Homo sapiens
  misc_RNA (1)...(19): siRNA sense strand
gggugcacauggugucuca

SEQ ID NO: 400198 - RNA, 19 nt, Homo sapiens
  misc_RNA (1)...(19): siRNA sense strand
uugcagagccacaugauca

SEQ ID NO: 400199 - RNA, 19 nt, Homo sapiens
  misc_RNA (1)...(19): siRNA sense strand
ggacuugcagagccacaug

SEQ ID NO: 400200 - RNA, 19 nt, Homo sapiens
  misc_RNA (1)...(19): siRNA sense strand
gcaugaagcccggaauugc

SEQ ID NO: 400201 - RNA, 19 nt, Homo sapiens
  misc_RNA (1)...(19): siRNA sense strand
gaagcccggaauugcauga

SEQ ID NO: 400202 - RNA, 19 nt, Homo sapiens
  misc_RNA (1)...(19): siRNA sense strand
gagacauuccgccgaagga

SEQ ID NO: 400203 - RNA, 19 nt, Homo sapiens
  misc_RNA (1)...(19): siRNA sense strand
cagcaguucaugcagaaga

SEQ ID NO: 400204 - RNA, 19 nt, Homo sapiens
  misc_RNA (1)...(19): siRNA sense strand
cccagcaguucaugcagaa

SEQ ID NO: 400205 - RNA, 19 nt, Homo sapiens
  misc_RNA (1)...(19): siRNA sense strand
gccacaugaucaaacuuca

SEQ ID NO: 400206 - RNA, 19 nt, Homo sapiens
  misc_RNA (1)...(19): siRNA sense strand
ucaacaagcagcgggagaa

SEQ ID NO: 400207 - RNA, 19 nt, Homo sapiens
  misc_RNA (1)...(19): siRNA sense strand
gcccagaggcagucauagu

SEQ ID NO: 400208 - RNA, 19 nt, Homo sapiens
  misc_RNA (1)...(19): siRNA sense strand
gcaccgaguguggcuacaa

SEQ ID NO: 400209 - RNA, 19 nt, Homo sapiens
  misc_RNA (1)...(19): siRNA sense strand
aaaguuccucagcaaauau

SEQ ID NO: 400210 - RNA, 19 nt, Homo sapiens
  misc_RNA (1)...(19): siRNA sense strand
cuucaaagccguggagcaa

SEQ ID NO: 400211 - RNA, 19 nt, Homo sapiens
  misc_RNA (1)...(19): siRNA sense strand
cgaggacucugggucuagu

SEQ ID NO: 400212 - RNA, 19 nt, Homo sapiens
  misc_RNA (1)...(19): siRNA sense strand
gcaguaaugagugggaagu

SEQ ID NO: 400213 - RNA, 19 nt, Homo sapiens
  misc_RNA (1)...(19): siRNA sense strand
gcucggcggaggucauugu

SEQ ID NO: 400214 - RNA, 19 nt, Homo sapiens
  misc_RNA (1)...(19): siRNA sense strand
ucaguugcgaguucuguga

SEQ ID NO: 400215 - RNA, 19 nt, Homo sapiens
  misc_RNA (1)...(19): siRNA sense strand
aggccaaucucaacaugca

SEQ ID NO: 400216 - RNA, 19 nt, Homo sapiens
  misc_RNA (1)...(19): siRNA sense strand
guggugagaagcuguuugu

SEQ ID NO: 400217 - RNA, 19 nt, Homo sapiens
  misc_RNA (1)...(19): siRNA sense strand
gaaugccccacaugucaua

SEQ ID NO: 400218 - RNA, 19 nt, Homo sapiens
  misc_RNA (1)...(19): siRNA sense strand
ugguucaaguggaggauga

SEQ ID NO: 400219 - RNA, 19 nt, Homo sapiens
  misc_RNA (1)...(19): siRNA sense strand
ugaacagccacgucaagga

SEQ ID NO: 400220 - RNA, 19 nt, Homo sapiens
  misc_RNA (1)...(19): siRNA sense strand
caccgaguguggcuacaag

SEQ ID NO: 400221 - RNA, 19 nt, Homo sapiens
  misc_RNA (1)...(19): siRNA sense strand
caugaagcccggaauugca

SEQ ID NO: 400222 - RNA, 19 nt, Homo sapiens
  misc_RNA (1)...(19): siRNA sense strand
gaacccagccuccuugaaa

SEQ ID NO: 400223 - RNA, 19 nt, Homo sapiens
  misc_RNA (1)...(19): siRNA sense strand
caagagaccuguuaucaac

SEQ ID NO: 400224 - RNA, 19 nt, Homo sapiens
  misc_RNA (1)...(19): siRNA sense strand
ugaagaauguguuccuaaa

SEQ ID NO: 400225 - RNA, 19 nt, Homo sapiens
  misc_RNA (1)...(19): siRNA sense strand
gaaaacaaauccaggacua

SEQ ID NO: 400226 - RNA, 19 nt, Homo sapiens
  misc_RNA (1)...(19): siRNA sense strand
ugaagaauguuaccuguca

SEQ ID NO: 400227 - RNA, 19 nt, Homo sapiens
  misc_RNA (1)...(19): siRNA sense strand
gguggaagcugccucaucu

SEQ ID NO: 400228 - RNA, 19 nt, Homo sapiens
  misc_RNA (1)...(19): siRNA sense strand
gaagaauguuaccugucaa

SEQ ID NO: 400229 - RNA, 19 nt, Homo sapiens
  misc_RNA (1)...(19): siRNA sense strand
ggagaacugcgaagaggaa

SEQ ID NO: 400230 - RNA, 19 nt, Homo sapiens
  misc_RNA (1)...(19): siRNA sense strand
ucagauaccugugaagaag

SEQ ID NO: 400231 - RNA, 19 nt, Homo sapiens
  misc_RNA (1)...(19): siRNA sense strand
ggaccugccuggagaugca

SEQ ID NO: 400232 - RNA, 19 nt, Homo sapiens
  misc_RNA (1)...(19): siRNA sense strand
ggugaagaauguguuccua

SEQ ID NO: 400233 - RNA, 19 nt, Homo sapiens
  misc_RNA (1)...(19): siRNA sense strand
ggugaccgcucugcaucua

SEQ ID NO: 400234 - RNA, 19 nt, Homo sapiens
  misc_RNA (1)...(19): siRNA sense strand
aagcagaccuccccaagua

SEQ ID NO: 400235 - RNA, 19 nt, Homo sapiens
  misc_RNA (1)...(19): siRNA sense strand
ggacugcaaugcuuuaccu

SEQ ID NO: 400236 - RNA, 19 nt, Homo sapiens
  misc_RNA (1)...(19): siRNA sense strand
gcacacuacaggagacuga

SEQ ID NO: 400237 - RNA, 19 nt, Homo sapiens
  misc_RNA (1)...(19): siRNA sense strand
caagucagcagccaagaug

SEQ ID NO: 400238 - RNA, 19 nt, Homo sapiens
  misc_RNA (1)...(19): siRNA sense strand
ccuuggaccugaagaaugu

SEQ ID NO: 400239 - RNA, 19 nt, Homo sapiens
  misc_RNA (1)...(19): siRNA sense strand
ccagauggacuaccgaaga

SEQ ID NO: 400240 - RNA, 19 nt, Homo sapiens
  misc_RNA (1)...(19): siRNA sense strand
ccaagagaccuguuaucaa

SEQ ID NO: 400241 - RNA, 19 nt, Homo sapiens
  misc_RNA (1)...(19): siRNA sense strand
cagauggacuaccgaagau

SEQ ID NO: 400242 - RNA, 19 nt, Homo sapiens
  misc_RNA (1)...(19): siRNA sense strand
ccagagaucccaagaacuc

SEQ ID NO: 400243 - RNA, 19 nt, Homo sapiens
  misc_RNA (1)...(19): siRNA sense strand
gauggacuaccgaagauug

SEQ ID NO: 400244 - RNA, 19 nt, Homo sapiens
  misc_RNA (1)...(19): siRNA sense strand
gaauguuaccugucaaugg

SEQ ID NO: 400245 - RNA, 19 nt, Homo sapiens
  misc_RNA (1)...(19): siRNA sense strand
gugaagaauguguuccuaa

SEQ ID NO: 400246 - RNA, 19 nt, Homo sapiens
  misc_RNA (1)...(19): siRNA sense strand
guccuaggccaguaccuua

SEQ ID NO: 400247 - RNA, 19 nt, Homo sapiens
  misc_RNA (1)...(19): siRNA sense strand
ugacagcauuauucacauc

SEQ ID NO: 400248 - RNA, 19 nt, Homo sapiens
  misc_RNA (1)...(19): siRNA sense strand
gugggcaucuggaauugga

SEQ ID NO: 400249 - RNA, 19 nt, Homo sapiens
  misc_RNA (1)...(19): siRNA sense strand
gaagaauguguuccuaaac

SEQ ID NO: 400250 - RNA, 19 nt, Homo sapiens
  misc_RNA (1)...(19): siRNA sense strand
ucacuugcuucugggauga

SEQ ID NO: 400251 - RNA, 19 nt, Homo sapiens
  misc_RNA (1)...(19): siRNA sense strand
gaacugcgaagaggaagag

SEQ ID NO: 400252 - RNA, 19 nt, Homo sapiens
  misc_RNA (1)...(19): siRNA sense strand
ugccaaccauuccuaccua

SEQ ID NO: 400253 - RNA, 19 nt, Homo sapiens
  misc_RNA (1)...(19): siRNA sense strand
gcacuuggacugcaaugcu

SEQ ID NO: 400254 - RNA, 19 nt, Homo sapiens
  misc_RNA (1)...(19): siRNA sense strand
gcccaaggccacagucuca

SEQ ID NO: 400255 - RNA, 19 nt, Homo sapiens
  misc_RNA (1)...(19): siRNA sense strand
cagcauuauucacauccuu

SEQ ID NO: 400256 - RNA, 19 nt, Homo sapiens
  misc_RNA (1)...(19): siRNA sense strand
ugaccgcucugcaucuagu

SEQ ID NO: 400257 - RNA, 19 nt, Homo sapiens
  misc_RNA (1)...(19): siRNA sense strand
cagcccaagagaccuguua

SEQ ID NO: 400258 - RNA, 19 nt, Homo sapiens
  misc_RNA (1)...(19): siRNA sense strand
aaacaaauccaggacuaca

SEQ ID NO: 400259 - RNA, 19 nt, Homo sapiens
  misc_RNA (1)...(19): siRNA sense strand
cuaccuaccacuaagcuau

SEQ ID NO: 400260 - RNA, 19 nt, Homo sapiens
  misc_RNA (1)...(19): siRNA sense strand
acaaauccaggacuacaga

SEQ ID NO: 400261 - RNA, 19 nt, Homo sapiens
  misc_RNA (1)...(19): siRNA sense strand
cagagccccugaaguguuu

SEQ ID NO: 400262 - RNA, 19 nt, Homo sapiens
  misc_RNA (1)...(19): siRNA sense strand
ucuccuugcuggcaucaga

SEQ ID NO: 400263 - RNA, 19 nt, Homo sapiens
  misc_RNA (1)...(19): siRNA sense strand
cccaagagaccuguuauca

SEQ ID NO: 400264 - RNA, 19 nt, Homo sapiens
  misc_RNA (1)...(19): siRNA sense strand
cagcugauugccacagaaa

SEQ ID NO: 400265 - RNA, 19 nt, Homo sapiens
  misc_RNA (1)...(19): siRNA sense strand
cgauacgugugccaguuuc

SEQ ID NO: 400266 - RNA, 19 nt, Homo sapiens
  misc_RNA (1)...(19): siRNA sense strand
ggaacccagccuccuugaa

SEQ ID NO: 400267 - RNA, 19 nt, Homo sapiens
  misc_RNA (1)...(19): siRNA sense strand
agauaccugugaagaagug

SEQ ID NO: 400268 - RNA, 19 nt, Homo sapiens
  misc_RNA (1)...(19): siRNA sense strand
cugcgaagaggaagagaaa

SEQ ID NO: 400269 - RNA, 19 nt, Homo sapiens
  misc_RNA (1)...(19): siRNA sense strand
ccacccacauugccaacca

SEQ ID NO: 400270 - RNA, 19 nt, Homo sapiens
  misc_RNA (1)...(19): siRNA sense strand
cagugggcaucuggaauug

SEQ ID NO: 400271 - RNA, 19 nt, Homo sapiens
  misc_RNA (1)...(19): siRNA sense strand
cgaucucgcuaccguuuac

SEQ ID NO: 400272 - RNA, 19 nt, Homo sapiens
  misc_RNA (1)...(19): siRNA sense strand
agaauguguuccuaaacca

SEQ ID NO: 400273 - RNA, 19 nt, Homo sapiens
  misc_RNA (1)...(19): siRNA sense strand
ccaaggccacagucucaga

SEQ ID NO: 400274 - RNA, 19 nt, Homo sapiens
  misc_RNA (1)...(19): siRNA sense strand
agagaccuguuaucaacuc

SEQ ID NO: 400275 - RNA, 19 nt, Homo sapiens
  misc_RNA (1)...(19): siRNA sense strand
cacuuggacugcaaugcuu

SEQ ID NO: 400276 - RNA, 19 nt, Homo sapiens
  misc_RNA (1)...(19): siRNA sense strand
uaaaccagacucggacuca

SEQ ID NO: 400277 - RNA, 19 nt, Homo sapiens
  misc_RNA (1)...(19): siRNA sense strand
aagaauguguuccuaaacc

SEQ ID NO: 400278 - RNA, 19 nt, Homo sapiens
  misc_RNA (1)...(19): siRNA sense strand
ccgauacgugugccaguuu

SEQ ID NO: 400279 - RNA, 19 nt, Homo sapiens
  misc_RNA (1)...(19): siRNA sense strand
agucucagauaccugugaa

SEQ ID NO: 400280 - RNA, 19 nt, Homo sapiens
  misc_RNA (1)...(19): siRNA sense strand
gcuuuaccuuggaccugaa

SEQ ID NO: 400281 - RNA, 19 nt, Homo sapiens
  misc_RNA (1)...(19): siRNA sense strand
aacccagccuccuugaaau

SEQ ID NO: 400282 - RNA, 19 nt, Homo sapiens
  misc_RNA (1)...(19): siRNA sense strand
ucucagauaccugugaaga

SEQ ID NO: 400283 - RNA, 19 nt, Homo sapiens
  misc_RNA (1)...(19): siRNA sense strand
gcauuauucacauccuugu

SEQ ID NO: 400284 - RNA, 19 nt, Homo sapiens
  misc_RNA (1)...(19): siRNA sense strand
ccaagucagcagccaagau

SEQ ID NO: 400285 - RNA, 19 nt, Homo sapiens
  misc_RNA (1)...(19): siRNA sense strand
gaacuacgccuccaucaua

SEQ ID NO: 400286 - RNA, 19 nt, Homo sapiens
  misc_RNA (1)...(19): siRNA sense strand
gaggacaucuggaagaaau

SEQ ID NO: 400287 - RNA, 19 nt, Homo sapiens
  misc_RNA (1)...(19): siRNA sense strand
gcgaggacaucuggaagaa

SEQ ID NO: 400288 - RNA, 19 nt, Homo sapiens
  misc_RNA (1)...(19): siRNA sense strand
ggcauuggcucuucucaag

SEQ ID NO: 400289 - RNA, 19 nt, Homo sapiens
  misc_RNA (1)...(19): siRNA sense strand
ggucaggcauuggcucuuc

SEQ ID NO: 400290 - RNA, 19 nt, Homo sapiens
  misc_RNA (1)...(19): siRNA sense strand
gcacuauuucuacgacuau

SEQ ID NO: 400291 - RNA, 19 nt, Homo sapiens
  misc_RNA (1)...(19): siRNA sense strand
acucguaccagcacuauuu

SEQ ID NO: 400292 - RNA, 19 nt, Homo sapiens
  misc_RNA (1)...(19): siRNA sense strand
ggacaucuggaagaaauuc

SEQ ID NO: 400293 - RNA, 19 nt, Homo sapiens
  misc_RNA (1)...(19): siRNA sense strand
ggaacuacgccuccaucau

SEQ ID NO: 400294 - RNA, 19 nt, Homo sapiens
  misc_RNA (1)...(19): siRNA sense strand
cguaccagcacuauuucua

SEQ ID NO: 400295 - RNA, 19 nt, Homo sapiens
  misc_RNA (1)...(19): siRNA sense strand
guaccagcacuauuucuac

SEQ ID NO: 400296 - RNA, 19 nt, Homo sapiens
  misc_RNA (1)...(19): siRNA sense strand
ccaagcgacucggguaagg

SEQ ID NO: 400297 - RNA, 19 nt, Homo sapiens
  misc_RNA (1)...(19): siRNA sense strand
gcccaagcgacucggguaa

SEQ ID NO: 400298 - RNA, 19 nt, Homo sapiens
  misc_RNA (1)...(19): siRNA sense strand
caucuccgccucucuuugg

SEQ ID NO: 400299 - RNA, 19 nt, Homo sapiens
  misc_RNA (1)...(19): siRNA sense strand
cauuggcucuucucaagcu

SEQ ID NO: 400300 - RNA, 19 nt, Homo sapiens
  misc_RNA (1)...(19): siRNA sense strand
ggccaucuccgccucucuu

SEQ ID NO: 400301 - RNA, 19 nt, Homo sapiens
  misc_RNA (1)...(19): siRNA sense strand
gcacuaacauccaauauuu

SEQ ID NO: 400302 - RNA, 19 nt, Homo sapiens
  misc_RNA (1)...(19): siRNA sense strand
guacugaugcugucauuua

SEQ ID NO: 400303 - RNA, 19 nt, Homo sapiens
  misc_RNA (1)...(19): siRNA sense strand
ggugaaagaugcauaugaa

SEQ ID NO: 400304 - RNA, 19 nt, Homo sapiens
  misc_RNA (1)...(19): siRNA sense strand
gaaauagacacaaugaugu

SEQ ID NO: 400305 - RNA, 19 nt, Homo sapiens
  misc_RNA (1)...(19): siRNA sense strand
gguuaugguuugccaauuu

SEQ ID NO: 400306 - RNA, 19 nt, Homo sapiens
  misc_RNA (1)...(19): siRNA sense strand
cacaaggagugauugaaua

SEQ ID NO: 400307 - RNA, 19 nt, Homo sapiens
  misc_RNA (1)...(19): siRNA sense strand
gggcuacccugcuguuaaa

SEQ ID NO: 400308 - RNA, 19 nt, Homo sapiens
  misc_RNA (1)...(19): siRNA sense strand
gaaagaugcauaugaaaca

SEQ ID NO: 400309 - RNA, 19 nt, Homo sapiens
  misc_RNA (1)...(19): siRNA sense strand
ccucacaucuguuucauau

SEQ ID NO: 400310 - RNA, 19 nt, Homo sapiens
  misc_RNA (1)...(19): siRNA sense strand
ggagagauaaugcauguga

SEQ ID NO: 400311 - RNA, 19 nt, Homo sapiens
  misc_RNA (1)...(19): siRNA sense strand
aaggagaucugaaacugua

SEQ ID NO: 400312 - RNA, 19 nt, Homo sapiens
  misc_RNA (1)...(19): siRNA sense strand
gcuggaaguugaagaauuc

SEQ ID NO: 400313 - RNA, 19 nt, Homo sapiens
  misc_RNA (1)...(19): siRNA sense strand
guugguauaugcagaguuu

SEQ ID NO: 400314 - RNA, 19 nt, Homo sapiens
  misc_RNA (1)...(19): siRNA sense strand
ggucuuggauaacuuucua

SEQ ID NO: 400315 - RNA, 19 nt, Homo sapiens
  misc_RNA (1)...(19): siRNA sense strand
gcacaaggagugauugaau

SEQ ID NO: 400316 - RNA, 19 nt, Homo sapiens
  misc_RNA (1)...(19): siRNA sense strand
cugaugcugucauuuauuu

SEQ ID NO: 400317 - RNA, 19 nt, Homo sapiens
  misc_RNA (1)...(19): siRNA sense strand
guucagaguugguauaugc

SEQ ID NO: 400318 - RNA, 19 nt, Homo sapiens
  misc_RNA (1)...(19): siRNA sense strand
ucacaucuguuucauaugc

SEQ ID NO: 400319 - RNA, 19 nt, Homo sapiens
  misc_RNA (1)...(19): siRNA sense strand
agaaauagacacaaugaug

SEQ ID NO: 400320 - RNA, 19 nt, Homo sapiens
  misc_RNA (1)...(19): siRNA sense strand
ucaaggagaucugaaacug

SEQ ID NO: 400321 - RNA, 19 nt, Homo sapiens
  misc_RNA (1)...(19): siRNA sense strand
uaagaucagugaccuaggu

SEQ ID NO: 400322 - RNA, 19 nt, Homo sapiens
  misc_RNA (1)...(19): siRNA sense strand
cuaauccuguucauccuaa

SEQ ID NO: 400323 - RNA, 19 nt, Homo sapiens
  misc_RNA (1)...(19): siRNA sense strand
uuaaaacccucguuacuuu

SEQ ID NO: 400324 - RNA, 19 nt, Homo sapiens
  misc_RNA (1)...(19): siRNA sense strand
ccacaggucuuggauaacu

SEQ ID NO: 400325 - RNA, 19 nt, Homo sapiens
  misc_RNA (1)...(19): siRNA sense strand
ucaaugagagcgacaguug

SEQ ID NO: 400326 - RNA, 19 nt, Homo sapiens
  misc_RNA (1)...(19): siRNA sense strand
guaucgaucccaccuguaa

SEQ ID NO: 400327 - RNA, 19 nt, Homo sapiens
  misc_RNA (1)...(19): siRNA sense strand
uuaaucuucugccggauaa

SEQ ID NO: 400328 - RNA, 19 nt, Homo sapiens
  misc_RNA (1)...(19): siRNA sense strand
ucaaacaauuccuggacuu

SEQ ID NO: 400329 - RNA, 19 nt, Homo sapiens
  misc_RNA (1)...(19): siRNA sense strand
ugaacucuaugaagacaga

SEQ ID NO: 400330 - RNA, 19 nt, Homo sapiens
  misc_RNA (1)...(19): siRNA sense strand
ucagaaauagacacaauga

SEQ ID NO: 400331 - RNA, 19 nt, Homo sapiens
  misc_RNA (1)...(19): siRNA sense strand
cuauucaggugguuuaugu

SEQ ID NO: 400332 - RNA, 19 nt, Homo sapiens
  misc_RNA (1)...(19): siRNA sense strand
uggcggauguggugaaaga

SEQ ID NO: 400333 - RNA, 19 nt, Homo sapiens
  misc_RNA (1)...(19): siRNA sense strand
cgggagagauaaugcaugu

SEQ ID NO: 400334 - RNA, 19 nt, Homo sapiens
  misc_RNA (1)...(19): siRNA sense strand
ggagcaaucccagcaguga

SEQ ID NO: 400335 - RNA, 19 nt, Homo sapiens
  misc_RNA (1)...(19): siRNA sense strand
ccaagaugcugugugaaca

SEQ ID NO: 400336 - RNA, 19 nt, Homo sapiens
  misc_RNA (1)...(19): siRNA sense strand
gaugcugucauuuauuuga

SEQ ID NO: 400337 - RNA, 19 nt, Homo sapiens
  misc_RNA (1)...(19): siRNA sense strand
guaaagaagacuuauccau

SEQ ID NO: 400338 - RNA, 19 nt, Homo sapiens
  misc_RNA (1)...(19): siRNA sense strand
cuaaacacauaggaaguau

SEQ ID NO: 400339 - RNA, 19 nt, Homo sapiens
  misc_RNA (1)...(19): siRNA sense strand
gauaaugcaugugagaaaa

SEQ ID NO: 400340 - RNA, 19 nt, Homo sapiens
  misc_RNA (1)...(19): siRNA sense strand
gaaggaguggguacugaug

SEQ ID NO: 400341 - RNA, 19 nt, Homo sapiens
  misc_RNA (1)...(19): siRNA sense strand
uuggauaacuuucuacaag

SEQ ID NO: 400342 - RNA, 19 nt, Homo sapiens
  misc_RNA (1)...(19): siRNA sense strand
ggagaaguuuggguuugau

SEQ ID NO: 400343 - RNA, 19 nt, Homo sapiens
  misc_RNA (1)...(19): siRNA sense strand
gcggcuggcuaacacaaug

SEQ ID NO: 400344 - RNA, 19 nt, Homo sapiens
  misc_RNA (1)...(19): siRNA sense strand
uuugagagacuuccaguuu

SEQ ID NO: 400345 - RNA, 19 nt, Homo sapiens
  misc_RNA (1)...(19): siRNA sense strand
gguuugauccuuucauuag

SEQ ID NO: 400346 - RNA, 19 nt, Homo sapiens
  misc_RNA (1)...(19): siRNA sense strand
caaggagaaguuuggguuu

SEQ ID NO: 400347 - RNA, 19 nt, Homo sapiens
  misc_RNA (1)...(19): siRNA sense strand
aaggagugauugaauacaa

SEQ ID NO: 400348 - RNA, 19 nt, Homo sapiens
  misc_RNA (1)...(19): siRNA sense strand
agucagaaauagacacaau

SEQ ID NO: 400349 - RNA, 19 nt, Homo sapiens
  misc_RNA (1)...(19): siRNA sense strand
ggagaucugaaacuguauu

SEQ ID NO: 400350 - RNA, 19 nt, Homo sapiens
  misc_RNA (1)...(19): siRNA sense strand
guuaugguuugccaauuuc

SEQ ID NO: 400351 - RNA, 19 nt, Homo sapiens
  misc_RNA (1)...(19): siRNA sense strand
ggacuucgggagagauaau

SEQ ID NO: 400352 - RNA, 19 nt, Homo sapiens
  misc_RNA (1)...(19): siRNA sense strand
gaauacaaggagaaguuug

SEQ ID NO: 400353 - RNA, 19 nt, Homo sapiens
  misc_RNA (1)...(19): siRNA sense strand
ucagugggauugguucaga

SEQ ID NO: 400354 - RNA, 19 nt, Homo sapiens
  misc_RNA (1)...(19): siRNA sense strand
ggguuugauccuuucauua

SEQ ID NO: 400355 - RNA, 19 nt, Homo sapiens
  misc_RNA (1)...(19): siRNA sense strand
guuaaucuucugccggaua

SEQ ID NO: 400356 - RNA, 19 nt, Homo sapiens
  misc_RNA (1)...(19): siRNA sense strand
ggguacugaugcugucauu

SEQ ID NO: 400357 - RNA, 19 nt, Homo sapiens
  misc_RNA (1)...(19): siRNA sense strand
gaucugaaacuguauucca

SEQ ID NO: 400358 - RNA, 19 nt, Homo sapiens
  misc_RNA (1)...(19): siRNA sense strand
ugccaaagcgccagacaaa

SEQ ID NO: 400359 - RNA, 19 nt, Homo sapiens
  misc_RNA (1)...(19): siRNA sense strand
caaguucugauuaaaguca

SEQ ID NO: 400360 - RNA, 19 nt, Homo sapiens
  misc_RNA (1)...(19): siRNA sense strand
ugggauugguucagaguug

SEQ ID NO: 400361 - RNA, 19 nt, Homo sapiens
  misc_RNA (1)...(19): siRNA sense strand
ccagggaugcuucaaaaua

SEQ ID NO: 400362 - RNA, 19 nt, Homo sapiens
  misc_RNA (1)...(19): siRNA sense strand
cagcacacacuucuguuug

SEQ ID NO: 400363 - RNA, 19 nt, Homo sapiens
  misc_RNA (1)...(19): siRNA sense strand
gagauaaugcaugugagaa

SEQ ID NO: 400364 - RNA, 19 nt, Homo sapiens
  misc_RNA (1)...(19): siRNA sense strand
ugaugugguuccuacaaug

SEQ ID NO: 400365 - RNA, 19 nt, Homo sapiens
  misc_RNA (1)...(19): siRNA sense strand
ggaaggaguggguacugau

SEQ ID NO: 400366 - RNA, 19 nt, Homo sapiens
  misc_RNA (1)...(19): siRNA sense strand
uaacacaaugagagaaguu

SEQ ID NO: 400367 - RNA, 19 nt, Homo sapiens
  misc_RNA (1)...(19): siRNA sense strand
gccaauuucccgucuguau

SEQ ID NO: 400368 - RNA, 19 nt, Homo sapiens
  misc_RNA (1)...(19): siRNA sense strand
uggauuugguuaugguuug

SEQ ID NO: 400369 - RNA, 19 nt, Homo sapiens
  misc_RNA (1)...(19): siRNA sense strand
cgucgccgcucuccaucaa

SEQ ID NO: 400370 - RNA, 19 nt, Homo sapiens
  misc_RNA (1)...(19): siRNA sense strand
auaccaaccgcaucucuuu

SEQ ID NO: 400371 - RNA, 19 nt, Homo sapiens
  misc_RNA (1)...(19): siRNA sense strand
gauccuuucauuagcacua

SEQ ID NO: 400372 - RNA, 19 nt, Homo sapiens
  misc_RNA (1)...(19): siRNA sense strand
uggguuugauccuuucauu

SEQ ID NO: 400373 - RNA, 19 nt, Homo sapiens
  misc_RNA (1)...(19): siRNA sense strand
aaggagaaguuuggguuug

SEQ ID NO: 400374 - RNA, 19 nt, Homo sapiens
  misc_RNA (1)...(19): siRNA sense strand
aggagaaguuuggguuuga

SEQ ID NO: 400375 - RNA, 19 nt, Homo sapiens
  misc_RNA (1)...(19): siRNA sense strand
uaccagagcugccccuuug

SEQ ID NO: 400376 - RNA, 19 nt, Homo sapiens
  misc_RNA (1)...(19): siRNA sense strand
cauaugcuauuugaguugu

SEQ ID NO: 400377 - RNA, 19 nt, Homo sapiens
  misc_RNA (1)...(19): siRNA sense strand
ccuguaacguggcggaugu

SEQ ID NO: 400378 - RNA, 19 nt, Homo sapiens
  misc_RNA (1)...(19): siRNA sense strand
ucuuuccgcaugcuuauua

SEQ ID NO: 400379 - RNA, 19 nt, Homo sapiens
  misc_RNA (1)...(19): siRNA sense strand
cuacaaguucugauuaaag

SEQ ID NO: 400380 - RNA, 19 nt, Homo sapiens
  misc_RNA (1)...(19): siRNA sense strand
gagcaaucccagcagugaa

SEQ ID NO: 400381 - RNA, 19 nt, Homo sapiens
  misc_RNA (1)...(19): siRNA sense strand
uacugaugcugucauuuau

SEQ ID NO: 400382 - RNA, 19 nt, Homo sapiens
  misc_RNA (1)...(19): siRNA sense strand
uggaaggaguggguacuga

SEQ ID NO: 400383 - RNA, 19 nt, Homo sapiens
  misc_RNA (1)...(19): siRNA sense strand
ugaaagaugcauaugaaac

SEQ ID NO: 400384 - RNA, 19 nt, Homo sapiens
  misc_RNA (1)...(19): siRNA sense strand
gugaaagaugcauaugaaa

SEQ ID NO: 400385 - RNA, 19 nt, Homo sapiens
  misc_RNA (1)...(19): siRNA sense strand
ucagcacacacuucuguuu

SEQ ID NO: 400386 - RNA, 19 nt, Homo sapiens
  misc_RNA (1)...(19): siRNA sense strand
ugaauacaaggagaaguuu

SEQ ID NO: 400387 - RNA, 19 nt, Homo sapiens
  misc_RNA (1)...(19): siRNA sense strand
uaagagcccugaggaucca

SEQ ID NO: 400388 - RNA, 19 nt, Homo sapiens
  misc_RNA (1)...(19): siRNA sense strand
ccaauuucccgucuguaug

SEQ ID NO: 400389 - RNA, 19 nt, Homo sapiens
  misc_RNA (1)...(19): siRNA sense strand
aaugagagcgacaguugaa

SEQ ID NO: 400390 - RNA, 19 nt, Homo sapiens
  misc_RNA (1)...(19): siRNA sense strand
agauaaugcaugugagaaa

SEQ ID NO: 400391 - RNA, 19 nt, Homo sapiens
  misc_RNA (1)...(19): siRNA sense strand
cauaugaaacagccaagau

SEQ ID NO: 400392 - RNA, 19 nt, Homo sapiens
  misc_RNA (1)...(19): siRNA sense strand
gggugacacuaauccuguu

SEQ ID NO: 400393 - RNA, 19 nt, Homo sapiens
  misc_RNA (1)...(19): siRNA sense strand
acacauaggaaguaucgau

SEQ ID NO: 400394 - RNA, 19 nt, Homo sapiens
  misc_RNA (1)...(19): siRNA sense strand
caaggagaucugaaacugu

SEQ ID NO: 400395 - RNA, 19 nt, Homo sapiens
  misc_RNA (1)...(19): siRNA sense strand
caaugagagcgacaguuga

SEQ ID NO: 400396 - RNA, 19 nt, Homo sapiens
  misc_RNA (1)...(19): siRNA sense strand
acacaaugagagaaguuaa

SEQ ID NO: 400397 - RNA, 19 nt, Homo sapiens
  misc_RNA (1)...(19): siRNA sense strand
guugaacucuaugaagaca

SEQ ID NO: 400398 - RNA, 19 nt, Homo sapiens
  misc_RNA (1)...(19): siRNA sense strand
gcuaacacaaugagagaag

SEQ ID NO: 400399 - RNA, 19 nt, Homo sapiens
  misc_RNA (1)...(19): siRNA sense strand
aaacacauaggaaguaucg

SEQ ID NO: 400400 - RNA, 19 nt, Homo sapiens
  misc_RNA (1)...(19): siRNA sense strand
caaacaauuccuggacuuc

SEQ ID NO: 400401 - RNA, 19 nt, Homo sapiens
  misc_RNA (1)...(19): siRNA sense strand
ggacgagcauggcuacauc

SEQ ID NO: 400402 - RNA, 19 nt, Homo sapiens
  misc_RNA (1)...(19): siRNA sense strand
ggaguggucgcagugguua

SEQ ID NO: 400403 - RNA, 19 nt, Homo sapiens
  misc_RNA (1)...(19): siRNA sense strand
gagaucaccaucccaguca

SEQ ID NO: 400404 - RNA, 19 nt, Homo sapiens
  misc_RNA (1)...(19): siRNA sense strand
ugagacugccgccaaguaa

SEQ ID NO: 400405 - RNA, 19 nt, Homo sapiens
  misc_RNA (1)...(19): siRNA sense strand
gcgugucccuggaugucaa

SEQ ID NO: 400406 - RNA, 19 nt, Homo sapiens
  misc_RNA (1)...(19): siRNA sense strand
ccacgcaguccaacgagau

SEQ ID NO: 400407 - RNA, 19 nt, Homo sapiens
  misc_RNA (1)...(19): siRNA sense strand
gaaagaagcucuggaaaga

SEQ ID NO: 400408 - RNA, 19 nt, Homo sapiens
  misc_RNA (1)...(19): siRNA sense strand
gagaugagauucaggguua

SEQ ID NO: 400409 - RNA, 19 nt, Homo sapiens
  misc_RNA (1)...(19): siRNA sense strand
ggaaacacguuaagaguaa

SEQ ID NO: 400410 - RNA, 19 nt, Homo sapiens
  misc_RNA (1)...(19): siRNA sense strand
gagggaagauguacuauuu

SEQ ID NO: 400411 - RNA, 19 nt, Homo sapiens
  misc_RNA (1)...(19): siRNA sense strand
gaaagaaucugaugaaagg

SEQ ID NO: 400412 - RNA, 19 nt, Homo sapiens
  misc_RNA (1)...(19): siRNA sense strand
gcaggacccuucagcauua

SEQ ID NO: 400413 - RNA, 19 nt, Homo sapiens
  misc_RNA (1)...(19): siRNA sense strand
gaugaaagguuuaguaaug

SEQ ID NO: 400414 - RNA, 19 nt, Homo sapiens
  misc_RNA (1)...(19): siRNA sense strand
gaaagucgcugagcaaaga

SEQ ID NO: 400415 - RNA, 19 nt, Homo sapiens
  misc_RNA (1)...(19): siRNA sense strand
gcaaauggcuccagucaca

SEQ ID NO: 400416 - RNA, 19 nt, Homo sapiens
  misc_RNA (1)...(19): siRNA sense strand
ccaaauagcccaauuaaug

SEQ ID NO: 400417 - RNA, 19 nt, Homo sapiens
  misc_RNA (1)...(19): siRNA sense strand
gauuuaagcuccagcagua

SEQ ID NO: 400418 - RNA, 19 nt, Homo sapiens
  misc_RNA (1)...(19): siRNA sense strand
ccagauggcuaccuauaua

SEQ ID NO: 400419 - RNA, 19 nt, Homo sapiens
  misc_RNA (1)...(19): siRNA sense strand
aaacaaagaucccaagaug

SEQ ID NO: 400420 - RNA, 19 nt, Homo sapiens
  misc_RNA (1)...(19): siRNA sense strand
gaaauucgagcguuguuua

SEQ ID NO: 400421 - RNA, 19 nt, Homo sapiens
  misc_RNA (1)...(19): siRNA sense strand
gaugaugaauugcgacaua

SEQ ID NO: 400422 - RNA, 19 nt, Homo sapiens
  misc_RNA (1)...(19): siRNA sense strand
gcuaggcucucuauucaua

SEQ ID NO: 400423 - RNA, 19 nt, Homo sapiens
  misc_RNA (1)...(19): siRNA sense strand
gaagaacagugaccuccua

SEQ ID NO: 400424 - RNA, 19 nt, Homo sapiens
  misc_RNA (1)...(19): siRNA sense strand
gaacauggaugacacaaac

SEQ ID NO: 400425 - RNA, 19 nt, Homo sapiens
  misc_RNA (1)...(19): siRNA sense strand
gcacauaugccacucgaua

SEQ ID NO: 400426 - RNA, 19 nt, Homo sapiens
  misc_RNA (1)...(19): siRNA sense strand
cugaacagcucacuaauuu

SEQ ID NO: 400427 - RNA, 19 nt, Homo sapiens
  misc_RNA (1)...(19): siRNA sense strand
gaacuaucccuucgacaua

SEQ ID NO: 400428 - RNA, 19 nt, Homo sapiens
  misc_RNA (1)...(19): siRNA sense strand
ggaaucggauccaaauuug

SEQ ID NO: 400429 - RNA, 19 nt, Homo sapiens
  misc_RNA (1)...(19): siRNA sense strand
gagaagcucugaauaucuu

SEQ ID NO: 400430 - RNA, 19 nt, Homo sapiens
  misc_RNA (1)...(19): siRNA sense strand
ggauauagccgaaaggauu

SEQ ID NO: 400431 - RNA, 19 nt, Homo sapiens
  misc_RNA (1)...(19): siRNA sense strand
gacauuaccuugaauaugg

SEQ ID NO: 400432 - RNA, 19 nt, Homo sapiens
  misc_RNA (1)...(19): siRNA sense strand
caaauucccugcuguaaag

SEQ ID NO: 400433 - RNA, 19 nt, Homo sapiens
  misc_RNA (1)...(19): siRNA sense strand
ggaacugugucagagauua

SEQ ID NO: 400434 - RNA, 19 nt, Homo sapiens
  misc_RNA (1)...(19): siRNA sense strand
ggaaguaaaugauaugcau

SEQ ID NO: 400435 - RNA, 19 nt, Homo sapiens
  misc_RNA (1)...(19): siRNA sense strand
gcaaagaccgggaaguauu

SEQ ID NO: 400436 - RNA, 19 nt, Homo sapiens
  misc_RNA (1)...(19): siRNA sense strand
ccaguuaccuuggagauaa

SEQ ID NO: 400437 - RNA, 19 nt, Homo sapiens
  misc_RNA (1)...(19): siRNA sense strand
gcaccuugauaaagaagua

SEQ ID NO: 400438 - RNA, 19 nt, Homo sapiens
  misc_RNA (1)...(19): siRNA sense strand
ccugggagcuuuguucuua

SEQ ID NO: 400439 - RNA, 19 nt, Homo sapiens
  misc_RNA (1)...(19): siRNA sense strand
ucaaccagcuuauguguga

SEQ ID NO: 400440 - RNA, 19 nt, Homo sapiens
  misc_RNA (1)...(19): siRNA sense strand
gcuauuggguuuccacuga

SEQ ID NO: 400441 - RNA, 19 nt, Homo sapiens
  misc_RNA (1)...(19): siRNA sense strand
gaaguaggaagguguauga

SEQ ID NO: 400442 - RNA, 19 nt, Homo sapiens
  misc_RNA (1)...(19): siRNA sense strand
gaacaacgaacucggcaaa

SEQ ID NO: 400443 - RNA, 19 nt, Homo sapiens
  misc_RNA (1)...(19): siRNA sense strand
gagcaaagaccgggaagua

SEQ ID NO: 400444 - RNA, 19 nt, Homo sapiens
  misc_RNA (1)...(19): siRNA sense strand
gcuaaguucuuccauucua

SEQ ID NO: 400445 - RNA, 19 nt, Homo sapiens
  misc_RNA (1)...(19): siRNA sense strand
ucacuccucuggaucguua

SEQ ID NO: 400446 - RNA, 19 nt, Homo sapiens
  misc_RNA (1)...(19): siRNA sense strand
ugccagagcugcugaauau

SEQ ID NO: 400447 - RNA, 19 nt, Homo sapiens
  misc_RNA (1)...(19): siRNA sense strand
uguuagaacugcaagaaua

SEQ ID NO: 400448 - RNA, 19 nt, Homo sapiens
  misc_RNA (1)...(19): siRNA sense strand
guacauuauuugacuggua

SEQ ID NO: 400449 - RNA, 19 nt, Homo sapiens
  misc_RNA (1)...(19): siRNA sense strand
ucucuuggcuugcaaauug

SEQ ID NO: 400450 - RNA, 19 nt, Homo sapiens
  misc_RNA (1)...(19): siRNA sense strand
gugagaguauggacaauuu

SEQ ID NO: 400451 - RNA, 19 nt, Homo sapiens
  misc_RNA (1)...(19): siRNA sense strand
cgacauagugacauuguua

SEQ ID NO: 400452 - RNA, 19 nt, Homo sapiens
  misc_RNA (1)...(19): siRNA sense strand
acucagagccgacuuauaa

SEQ ID NO: 400453 - RNA, 19 nt, Homo sapiens
  misc_RNA (1)...(19): siRNA sense strand
ugaaauacuuguuccaguu

SEQ ID NO: 400454 - RNA, 19 nt, Homo sapiens
  misc_RNA (1)...(19): siRNA sense strand
acaaagagcagaacccaua

SEQ ID NO: 400455 - RNA, 19 nt, Homo sapiens
  misc_RNA (1)...(19): siRNA sense strand
caacagcgagauuauuuaa

SEQ ID NO: 400456 - RNA, 19 nt, Homo sapiens
  misc_RNA (1)...(19): siRNA sense strand
ggaaaccucccacagauga

SEQ ID NO: 400457 - RNA, 19 nt, Homo sapiens
  misc_RNA (1)...(19): siRNA sense strand
ggacaugccucugaacauc

SEQ ID NO: 400458 - RNA, 19 nt, Homo sapiens
  misc_RNA (1)...(19): siRNA sense strand
caagauggcucgaguugca

SEQ ID NO: 400459 - RNA, 19 nt, Homo sapiens
  misc_RNA (1)...(19): siRNA sense strand
ucaaugagcucccuuucug

SEQ ID NO: 400460 - RNA, 19 nt, Homo sapiens
  misc_RNA (1)...(19): siRNA sense strand
gagucaagauacagcaaua

SEQ ID NO: 400461 - RNA, 19 nt, Homo sapiens
  misc_RNA (1)...(19): siRNA sense strand
gauguacuauuuggcuuua

SEQ ID NO: 400462 - RNA, 19 nt, Homo sapiens
  misc_RNA (1)...(19): siRNA sense strand
gaacaacagcgagauuauu

SEQ ID NO: 400463 - RNA, 19 nt, Homo sapiens
  misc_RNA (1)...(19): siRNA sense strand
gaauacagaccaagaacaa

SEQ ID NO: 400464 - RNA, 19 nt, Homo sapiens
  misc_RNA (1)...(19): siRNA sense strand
gaacggagccggcaucaac

SEQ ID NO: 400465 - RNA, 19 nt, Homo sapiens
  misc_RNA (1)...(19): siRNA sense strand
ggaagccagugcagucauu

SEQ ID NO: 400466 - RNA, 19 nt, Homo sapiens
  misc_RNA (1)...(19): siRNA sense strand
gggaaucggauccaaauuu

SEQ ID NO: 400467 - RNA, 19 nt, Homo sapiens
  misc_RNA (1)...(19): siRNA sense strand
gaaccucauuccuuuaaca

SEQ ID NO: 400468 - RNA, 19 nt, Homo sapiens
  misc_RNA (1)...(19): siRNA sense strand
gaggaugaaucacaugaau

SEQ ID NO: 400469 - RNA, 19 nt, Homo sapiens
  misc_RNA (1)...(19): siRNA sense strand
cugaaauccuggaguaaua

SEQ ID NO: 400470 - RNA, 19 nt, Homo sapiens
  misc_RNA (1)...(19): siRNA sense strand
gaaguaggauugagcaaaa

SEQ ID NO: 400471 - RNA, 19 nt, Homo sapiens
  misc_RNA (1)...(19): siRNA sense strand
gaaaggauugcucagguuu

SEQ ID NO: 400472 - RNA, 19 nt, Homo sapiens
  misc_RNA (1)...(19): siRNA sense strand
gcagacuacuggcacauau

SEQ ID NO: 400473 - RNA, 19 nt, Homo sapiens
  misc_RNA (1)...(19): siRNA sense strand
caaccugaauaucucuaua

SEQ ID NO: 400474 - RNA, 19 nt, Homo sapiens
  misc_RNA (1)...(19): siRNA sense strand
caacagagagauuuaugaa

SEQ ID NO: 400475 - RNA, 19 nt, Homo sapiens
  misc_RNA (1)...(19): siRNA sense strand
ggagacaacuauguuacuu

SEQ ID NO: 400476 - RNA, 19 nt, Homo sapiens
  misc_RNA (1)...(19): siRNA sense strand
gacgggaccucgccauuga

SEQ ID NO: 400477 - RNA, 19 nt, Homo sapiens
  misc_RNA (1)...(19): siRNA sense strand
gaacugagugaccuaaaga

SEQ ID NO: 400478 - RNA, 19 nt, Homo sapiens
  misc_RNA (1)...(19): siRNA sense strand
gagaaaagcuugagaaacu

SEQ ID NO: 400479 - RNA, 19 nt, Homo sapiens
  misc_RNA (1)...(19): siRNA sense strand
cuacaacuacuucgaauuu

SEQ ID NO: 400480 - RNA, 19 nt, Homo sapiens
  misc_RNA (1)...(19): siRNA sense strand
guaaauguucccugccuua

SEQ ID NO: 400481 - RNA, 19 nt, Homo sapiens
  misc_RNA (1)...(19): siRNA sense strand
gaaugcagcgacagcuuua

SEQ ID NO: 400482 - RNA, 19 nt, Homo sapiens
  misc_RNA (1)...(19): siRNA sense strand
gcacucagaccuaaucaug

SEQ ID NO: 400483 - RNA, 19 nt, Homo sapiens
  misc_RNA (1)...(19): siRNA sense strand
ugauaggcauguccuuaua

SEQ ID NO: 400484 - RNA, 19 nt, Homo sapiens
  misc_RNA (1)...(19): siRNA sense strand
agacaacuauguuacuuug

SEQ ID NO: 400485 - RNA, 19 nt, Homo sapiens
  misc_RNA (1)...(19): siRNA sense strand
guacauguccuuucucugu

SEQ ID NO: 400486 - RNA, 19 nt, Homo sapiens
  misc_RNA (1)...(19): siRNA sense strand
ggacuuccacuucgauauu

SEQ ID NO: 400487 - RNA, 19 nt, Homo sapiens
  misc_RNA (1)...(19): siRNA sense strand
aaucaguucuguaaggaua

SEQ ID NO: 400488 - RNA, 19 nt, Homo sapiens
  misc_RNA (1)...(19): siRNA sense strand
ggaaguauucucuauggaa

SEQ ID NO: 400489 - RNA, 19 nt, Homo sapiens
  misc_RNA (1)...(19): siRNA sense strand
gaacaagaaacgccgagaa

SEQ ID NO: 400490 - RNA, 19 nt, Homo sapiens
  misc_RNA (1)...(19): siRNA sense strand
gaaagaagaccagagaaca

SEQ ID NO: 400491 - RNA, 19 nt, Homo sapiens
  misc_RNA (1)...(19): siRNA sense strand
gaucacagaguccuuaguu

SEQ ID NO: 400492 - RNA, 19 nt, Homo sapiens
  misc_RNA (1)...(19): siRNA sense strand
ugaaucacaugaauacaga

SEQ ID NO: 400493 - RNA, 19 nt, Homo sapiens
  misc_RNA (1)...(19): siRNA sense strand
gaugcuuccuugccugaua

SEQ ID NO: 400494 - RNA, 19 nt, Homo sapiens
  misc_RNA (1)...(19): siRNA sense strand
gaacgcaagauucguauca

SEQ ID NO: 400495 - RNA, 19 nt, Homo sapiens
  misc_RNA (1)...(19): siRNA sense strand
gaaaagccauugacgaaau

SEQ ID NO: 400496 - RNA, 19 nt, Homo sapiens
  misc_RNA (1)...(19): siRNA sense strand
cagcuaaguucuuccauuc

SEQ ID NO: 400497 - RNA, 19 nt, Homo sapiens
  misc_RNA (1)...(19): siRNA sense strand
guaugaugcugacuaaugu

SEQ ID NO: 400498 - RNA, 19 nt, Homo sapiens
  misc_RNA (1)...(19): siRNA sense strand
gguguaugaugcugacuaa

SEQ ID NO: 400499 - RNA, 19 nt, Homo sapiens
  misc_RNA (1)...(19): siRNA sense strand
caaagaaccggaagacaug

SEQ ID NO: 400500 - RNA, 19 nt, Homo sapiens
  misc_RNA (1)...(19): siRNA sense strand
ggacagacggguacuuaug

SEQ ID NO: 400501 - RNA, 19 nt, Homo sapiens
  misc_RNA (1)...(19): siRNA sense strand
auaaauggcuugacaacau

SEQ ID NO: 400502 - RNA, 19 nt, Homo sapiens
  misc_RNA (1)...(19): siRNA sense strand
gaacggcgagacuuguuaa

SEQ ID NO: 400503 - RNA, 19 nt, Homo sapiens
  misc_RNA (1)...(19): siRNA sense strand
gagcagcaguuuagagucu

SEQ ID NO: 400504 - RNA, 19 nt, Homo sapiens
  misc_RNA (1)...(19): siRNA sense strand
ggaagcaguucugaugaug

SEQ ID NO: 400505 - RNA, 19 nt, Homo sapiens
  misc_RNA (1)...(19): siRNA sense strand
uaaagaaacaccugaagga

SEQ ID NO: 400506 - RNA, 19 nt, Homo sapiens
  misc_RNA (1)...(19): siRNA sense strand
ggaacugagugaccuaaag

SEQ ID NO: 400507 - RNA, 19 nt, Homo sapiens
  misc_RNA (1)...(19): siRNA sense strand
gaaggaggaucugguguuu

SEQ ID NO: 400508 - RNA, 19 nt, Homo sapiens
  misc_RNA (1)...(19): siRNA sense strand
ucaagaugcugccagauaa

SEQ ID NO: 400509 - RNA, 19 nt, Homo sapiens
  misc_RNA (1)...(19): siRNA sense strand
ugacagggaucaagcauga

SEQ ID NO: 400510 - RNA, 19 nt, Homo sapiens
  misc_RNA (1)...(19): siRNA sense strand
gauaaggacugccgcuaug

SEQ ID NO: 400511 - RNA, 19 nt, Homo sapiens
  misc_RNA (1)...(19): siRNA sense strand
gaucaagcaugaauugcaa

SEQ ID NO: 400512 - RNA, 19 nt, Homo sapiens
  misc_RNA (1)...(19): siRNA sense strand
aggaggaucugguguuuau

SEQ ID NO: 400513 - RNA, 19 nt, Homo sapiens
  misc_RNA (1)...(19): siRNA sense strand
ccaaggacgccaucaagaa

SEQ ID NO: 400514 - RNA, 19 nt, Homo sapiens
  misc_RNA (1)...(19): siRNA sense strand
gucaagaugcugccagaua

SEQ ID NO: 400515 - RNA, 19 nt, Homo sapiens
  misc_RNA (1)...(19): siRNA sense strand
gaucugguguuuaucuucu

SEQ ID NO: 400516 - RNA, 19 nt, Homo sapiens
  misc_RNA (1)...(19): siRNA sense strand
ccaaggagagcaagaagga

SEQ ID NO: 400517 - RNA, 19 nt, Homo sapiens
  misc_RNA (1)...(19): siRNA sense strand
ugagugaggacaagaagaa

SEQ ID NO: 400518 - RNA, 19 nt, Homo sapiens
  misc_RNA (1)...(19): siRNA sense strand
ggacaagaagaacaucauc

SEQ ID NO: 400519 - RNA, 19 nt, Homo sapiens
  misc_RNA (1)...(19): siRNA sense strand
ggagggcaagccuuuguga

SEQ ID NO: 400520 - RNA, 19 nt, Homo sapiens
  misc_RNA (1)...(19): siRNA sense strand
ucaucaagguguucaacga

SEQ ID NO: 400521 - RNA, 19 nt, Homo sapiens
  misc_RNA (1)...(19): siRNA sense strand
caaccuaugagaccaagga

SEQ ID NO: 400522 - RNA, 19 nt, Homo sapiens
  misc_RNA (1)...(19): siRNA sense strand
gggccagacugucgacgau

SEQ ID NO: 400523 - RNA, 19 nt, Homo sapiens
  misc_RNA (1)...(19): siRNA sense strand
ccucuaugaugcaaccuau

SEQ ID NO: 400524 - RNA, 19 nt, Homo sapiens
  misc_RNA (1)...(19): siRNA sense strand
caaggacgccaucaagaag

SEQ ID NO: 400525 - RNA, 19 nt, Homo sapiens
  misc_RNA (1)...(19): siRNA sense strand
ggaucaagcaugaauugca

SEQ ID NO: 400526 - RNA, 19 nt, Homo sapiens
  misc_RNA (1)...(19): siRNA sense strand
ucuaugaugcaaccuauga

SEQ ID NO: 400527 - RNA, 19 nt, Homo sapiens
  misc_RNA (1)...(19): siRNA sense strand
gaggaucugguguuuaucu

SEQ ID NO: 400528 - RNA, 19 nt, Homo sapiens
  misc_RNA (1)...(19): siRNA sense strand
gacaugaaggugcguaagu

SEQ ID NO: 400529 - RNA, 19 nt, Homo sapiens
  misc_RNA (1)...(19): siRNA sense strand
gcuacgaggaggucaagga

SEQ ID NO: 400530 - RNA, 19 nt, Homo sapiens
  misc_RNA (1)...(19): siRNA sense strand
cgccagaggaggugaagaa

SEQ ID NO: 400531 - RNA, 19 nt, Homo sapiens
  misc_RNA (1)...(19): siRNA sense strand
agaaggaggaucugguguu

SEQ ID NO: 400532 - RNA, 19 nt, Homo sapiens
  misc_RNA (1)...(19): siRNA sense strand
gaggacaagaagaacauca

SEQ ID NO: 400533 - RNA, 19 nt, Homo sapiens
  misc_RNA (1)...(19): siRNA sense strand
gccgcuaugcccucuauga

SEQ ID NO: 400534 - RNA, 19 nt, Homo sapiens
  misc_RNA (1)...(19): siRNA sense strand
gaggugaagaagcgcaaga

SEQ ID NO: 400535 - RNA, 19 nt, Homo sapiens
  misc_RNA (1)...(19): siRNA sense strand
ucaagguguucaacgacau

SEQ ID NO: 400536 - RNA, 19 nt, Homo sapiens
  misc_RNA (1)...(19): siRNA sense strand
acaugaaggugcguaaguc

SEQ ID NO: 400537 - RNA, 19 nt, Homo sapiens
  misc_RNA (1)...(19): siRNA sense strand
aggacgccaucaagaagaa

SEQ ID NO: 400538 - RNA, 19 nt, Homo sapiens
  misc_RNA (1)...(19): siRNA sense strand
gcuccaaggacgccaucaa

SEQ ID NO: 400539 - RNA, 19 nt, Homo sapiens
  misc_RNA (1)...(19): siRNA sense strand
agauaaggacugccgcuau

SEQ ID NO: 400540 - RNA, 19 nt, Homo sapiens
  misc_RNA (1)...(19): siRNA sense strand
gcaagaauguguaaacaau

SEQ ID NO: 400541 - RNA, 19 nt, Homo sapiens
  misc_RNA (1)...(19): siRNA sense strand
ugagagaaauggagucaaa

SEQ ID NO: 400542 - RNA, 19 nt, Homo sapiens
  misc_RNA (1)...(19): siRNA sense strand
ggaggaaacucgcagauac

SEQ ID NO: 400543 - RNA, 19 nt, Homo sapiens
  misc_RNA (1)...(19): siRNA sense strand
gauuuaaacuggcagagaa

SEQ ID NO: 400544 - RNA, 19 nt, Homo sapiens
  misc_RNA (1)...(19): siRNA sense strand
gcagauaccgaccuacuaa

SEQ ID NO: 400545 - RNA, 19 nt, Homo sapiens
  misc_RNA (1)...(19): siRNA sense strand
ggaucuaaauugagagaaa

SEQ ID NO: 400546 - RNA, 19 nt, Homo sapiens
  misc_RNA (1)...(19): siRNA sense strand
uggaugcgcugccguauuu

SEQ ID NO: 400547 - RNA, 19 nt, Homo sapiens
  misc_RNA (1)...(19): siRNA sense strand
ggguaucccuggucaguaa

SEQ ID NO: 400548 - RNA, 19 nt, Homo sapiens
  misc_RNA (1)...(19): siRNA sense strand
gaaacugacauaaugagaa

SEQ ID NO: 400549 - RNA, 19 nt, Homo sapiens
  misc_RNA (1)...(19): siRNA sense strand
uguaaugccuggaaaguau

SEQ ID NO: 400550 - RNA, 19 nt, Homo sapiens
  misc_RNA (1)...(19): siRNA sense strand
ggauuauucugccuuugaa

SEQ ID NO: 400551 - RNA, 19 nt, Homo sapiens
  misc_RNA (1)...(19): siRNA sense strand
gagauugaacggacuauug

SEQ ID NO: 400552 - RNA, 19 nt, Homo sapiens
  misc_RNA (1)...(19): siRNA sense strand
gcaucaagcaguuagaauu

SEQ ID NO: 400553 - RNA, 19 nt, Homo sapiens
  misc_RNA (1)...(19): siRNA sense strand
gagaaauggagucaaauug

SEQ ID NO: 400554 - RNA, 19 nt, Homo sapiens
  misc_RNA (1)...(19): siRNA sense strand
acucacagcuggaucuaaa

SEQ ID NO: 400555 - RNA, 19 nt, Homo sapiens
  misc_RNA (1)...(19): siRNA sense strand
ggacuauuguucagcuaga

SEQ ID NO: 400556 - RNA, 19 nt, Homo sapiens
  misc_RNA (1)...(19): siRNA sense strand
caaauuaagcagcaacaug

SEQ ID NO: 400557 - RNA, 19 nt, Homo sapiens
  misc_RNA (1)...(19): siRNA sense strand
ccuggaaaguauacaauga

SEQ ID NO: 400558 - RNA, 19 nt, Homo sapiens
  misc_RNA (1)...(19): siRNA sense strand
agaaagaacaugcaacuca

SEQ ID NO: 400559 - RNA, 19 nt, Homo sapiens
  misc_RNA (1)...(19): siRNA sense strand
acagcuggaucuaaauuga

SEQ ID NO: 400560 - RNA, 19 nt, Homo sapiens
  misc_RNA (1)...(19): siRNA sense strand
gaaacgauaugagcuucca

SEQ ID NO: 400561 - RNA, 19 nt, Homo sapiens
  misc_RNA (1)...(19): siRNA sense strand
caucaagcaguuagaauug

SEQ ID NO: 400562 - RNA, 19 nt, Homo sapiens
  misc_RNA (1)...(19): siRNA sense strand
acaauucuauggcccaguu

SEQ ID NO: 400563 - RNA, 19 nt, Homo sapiens
  misc_RNA (1)...(19): siRNA sense strand
cuuugaaacugacauaaug

SEQ ID NO: 400564 - RNA, 19 nt, Homo sapiens
  misc_RNA (1)...(19): siRNA sense strand
guuagagcaucaagcaguu

SEQ ID NO: 400565 - RNA, 19 nt, Homo sapiens
  misc_RNA (1)...(19): siRNA sense strand
gauaccgaccuacuaagaa

SEQ ID NO: 400566 - RNA, 19 nt, Homo sapiens
  misc_RNA (1)...(19): siRNA sense strand
ggagaggcaaacaaagaaa

SEQ ID NO: 400567 - RNA, 19 nt, Homo sapiens
  misc_RNA (1)...(19): siRNA sense strand
gagaaucuggaacuaaugu

SEQ ID NO: 400568 - RNA, 19 nt, Homo sapiens
  misc_RNA (1)...(19): siRNA sense strand
gcagagaaagaacaugcaa

SEQ ID NO: 400569 - RNA, 19 nt, Homo sapiens
  misc_RNA (1)...(19): siRNA sense strand
guaaugccuggaaaguaua

SEQ ID NO: 400570 - RNA, 19 nt, Homo sapiens
  misc_RNA (1)...(19): siRNA sense strand
gcaguuagaauugagaauc

SEQ ID NO: 400571 - RNA, 19 nt, Homo sapiens
  misc_RNA (1)...(19): siRNA sense strand
uugagaaucuggaacuaau

SEQ ID NO: 400572 - RNA, 19 nt, Homo sapiens
  misc_RNA (1)...(19): siRNA sense strand
gaauugagaaucuggaacu

SEQ ID NO: 400573 - RNA, 19 nt, Homo sapiens
  misc_RNA (1)...(19): siRNA sense strand
gagcaucaagcaguuagaa

SEQ ID NO: 400574 - RNA, 19 nt, Homo sapiens
  misc_RNA (1)...(19): siRNA sense strand
ucacagcuggaucuaaauu

SEQ ID NO: 400575 - RNA, 19 nt, Homo sapiens
  misc_RNA (1)...(19): siRNA sense strand
uaaacuggcagagaaagaa

SEQ ID NO: 400576 - RNA, 19 nt, Homo sapiens
  misc_RNA (1)...(19): siRNA sense strand
gaaucuggaacuaauguca

SEQ ID NO: 400577 - RNA, 19 nt, Homo sapiens
  misc_RNA (1)...(19): siRNA sense strand
agagaaauggagucaaauu

SEQ ID NO: 400578 - RNA, 19 nt, Homo sapiens
  misc_RNA (1)...(19): siRNA sense strand
aagacuggcugcucgacaa

SEQ ID NO: 400579 - RNA, 19 nt, Homo sapiens
  misc_RNA (1)...(19): siRNA sense strand
ugucacagcauggauguaa

SEQ ID NO: 400580 - RNA, 19 nt, Homo sapiens
  misc_RNA (1)...(19): siRNA sense strand
gcucgacaaccaauugaau

SEQ ID NO: 400581 - RNA, 19 nt, Homo sapiens
  misc_RNA (1)...(19): siRNA sense strand
gcauggcaagaauguguaa

SEQ ID NO: 400582 - RNA, 19 nt, Homo sapiens
  misc_RNA (1)...(19): siRNA sense strand
gaauugcucaguaugaaac

SEQ ID NO: 400583 - RNA, 19 nt, Homo sapiens
  misc_RNA (1)...(19): siRNA sense strand
ccaguuagagcaucaagca

SEQ ID NO: 400584 - RNA, 19 nt, Homo sapiens
  misc_RNA (1)...(19): siRNA sense strand
aaacauccggcaagacuuc

SEQ ID NO: 400585 - RNA, 19 nt, Homo sapiens
  misc_RNA (1)...(19): siRNA sense strand
uugaauugcucaguaugaa

SEQ ID NO: 400586 - RNA, 19 nt, Homo sapiens
  misc_RNA (1)...(19): siRNA sense strand
caguuagaauugagaaucu

SEQ ID NO: 400587 - RNA, 19 nt, Homo sapiens
  misc_RNA (1)...(19): siRNA sense strand
ggcaagaauguguaaacaa

SEQ ID NO: 400588 - RNA, 19 nt, Homo sapiens
  misc_RNA (1)...(19): siRNA sense strand
cggauuauucugccuuuga

SEQ ID NO: 400589 - RNA, 19 nt, Homo sapiens
  misc_RNA (1)...(19): siRNA sense strand
gaaaacauccggcaagacu

SEQ ID NO: 400590 - RNA, 19 nt, Homo sapiens
  misc_RNA (1)...(19): siRNA sense strand
ggagucaaauuggguaucc

SEQ ID NO: 400591 - RNA, 19 nt, Homo sapiens
  misc_RNA (1)...(19): siRNA sense strand
ucacagcauggauguaaug

SEQ ID NO: 400592 - RNA, 19 nt, Homo sapiens
  misc_RNA (1)...(19): siRNA sense strand
uggcaagaauguguaaaca

SEQ ID NO: 400593 - RNA, 19 nt, Homo sapiens
  misc_RNA (1)...(19): siRNA sense strand
agaaauggagucaaauugg

SEQ ID NO: 400594 - RNA, 19 nt, Homo sapiens
  misc_RNA (1)...(19): siRNA sense strand
gcaacucacagcuggaucu

SEQ ID NO: 400595 - RNA, 19 nt, Homo sapiens
  misc_RNA (1)...(19): siRNA sense strand
gauguaaugccuggaaagu

SEQ ID NO: 400596 - RNA, 19 nt, Homo sapiens
  misc_RNA (1)...(19): siRNA sense strand
uuugguggcuggagagguu

SEQ ID NO: 400597 - RNA, 19 nt, Homo sapiens
  misc_RNA (1)...(19): siRNA sense strand
ugauugaacacgcacagaa

SEQ ID NO: 400598 - RNA, 19 nt, Homo sapiens
  misc_RNA (1)...(19): siRNA sense strand
caacauggagaggcaaaca

SEQ ID NO: 400599 - RNA, 19 nt, Homo sapiens
  misc_RNA (1)...(19): siRNA sense strand
gacuauuguucagcuagaa

SEQ ID NO: 400600 - RNA, 19 nt, Homo sapiens
  misc_RNA (1)...(19): siRNA sense strand
ugaauugcucaguaugaaa

SEQ ID NO: 400601 - RNA, 19 nt, Homo sapiens
  misc_RNA (1)...(19): siRNA sense strand
acauggagaggcaaacaaa

SEQ ID NO: 400602 - RNA, 19 nt, Homo sapiens
  misc_RNA (1)...(19): siRNA sense strand
caacucacagcuggaucua

SEQ ID NO: 400603 - RNA, 19 nt, Homo sapiens
  misc_RNA (1)...(19): siRNA sense strand
gcugcucgacaaccaauug

SEQ ID NO: 400604 - RNA, 19 nt, Homo sapiens
  misc_RNA (1)...(19): siRNA sense strand
ugaaacugacauaaugaga

SEQ ID NO: 400605 - RNA, 19 nt, Homo sapiens
  misc_RNA (1)...(19): siRNA sense strand
acucgcagauaccgaccua

SEQ ID NO: 400606 - RNA, 19 nt, Homo sapiens
  misc_RNA (1)...(19): siRNA sense strand
cuaagaacuaccugagcua

SEQ ID NO: 400607 - RNA, 19 nt, Homo sapiens
  misc_RNA (1)...(19): siRNA sense strand
gauugaacacgcacagaag

SEQ ID NO: 400608 - RNA, 19 nt, Homo sapiens
  misc_RNA (1)...(19): siRNA sense strand
uaugaaacgauaugagcuu

SEQ ID NO: 400609 - RNA, 19 nt, Homo sapiens
  misc_RNA (1)...(19): siRNA sense strand
uggagaggcaaacaaagaa

SEQ ID NO: 400610 - RNA, 19 nt, Homo sapiens
  misc_RNA (1)...(19): siRNA sense strand
gagagaaauggagucaaau

SEQ ID NO: 400611 - RNA, 19 nt, Homo sapiens
  misc_RNA (1)...(19): siRNA sense strand
agauaccgaccuacuaaga

SEQ ID NO: 400612 - RNA, 19 nt, Homo sapiens
  misc_RNA (1)...(19): siRNA sense strand
uggauguaaugccuggaaa

SEQ ID NO: 400613 - RNA, 19 nt, Homo sapiens
  misc_RNA (1)...(19): siRNA sense strand
ggaacuaaugucacagcau

SEQ ID NO: 400614 - RNA, 19 nt, Homo sapiens
  misc_RNA (1)...(19): siRNA sense strand
gauugaacggacuauuguu

SEQ ID NO: 400615 - RNA, 19 nt, Homo sapiens
  misc_RNA (1)...(19): siRNA sense strand
agauugaacggacuauugu

SEQ ID NO: 400616 - RNA, 19 nt, Homo sapiens
  misc_RNA (1)...(19): siRNA sense strand
agagaaagaacaugcaacu

SEQ ID NO: 400617 - RNA, 19 nt, Homo sapiens
  misc_RNA (1)...(19): siRNA sense strand
gaggaggaaacucgcagau

SEQ ID NO: 400618 - RNA, 19 nt, Homo sapiens
  misc_RNA (1)...(19): siRNA sense strand
aauugagaaucuggaacua

SEQ ID NO: 400619 - RNA, 19 nt, Homo sapiens
  misc_RNA (1)...(19): siRNA sense strand
gagagaagcuccuagaaca

SEQ ID NO: 400620 - RNA, 19 nt, Homo sapiens
  misc_RNA (1)...(19): siRNA sense strand
gaacagagaugagcaggau

SEQ ID NO: 400621 - RNA, 19 nt, Homo sapiens
  misc_RNA (1)...(19): siRNA sense strand
gaagagaucugugccaaca

SEQ ID NO: 400622 - RNA, 19 nt, Homo sapiens
  misc_RNA (1)...(19): siRNA sense strand
cgaaagguguucccuguuu

SEQ ID NO: 400623 - RNA, 19 nt, Homo sapiens
  misc_RNA (1)...(19): siRNA sense strand
ucaaggagaucuucauguu

SEQ ID NO: 400624 - RNA, 19 nt, Homo sapiens
  misc_RNA (1)...(19): siRNA sense strand
ggaaucugcugaucuuguu

SEQ ID NO: 400625 - RNA, 19 nt, Homo sapiens
  misc_RNA (1)...(19): siRNA sense strand
caagguagauuguuugaag

SEQ ID NO: 400626 - RNA, 19 nt, Homo sapiens
  misc_RNA (1)...(19): siRNA sense strand
gggcuaggcuuguucaauc

SEQ ID NO: 400627 - RNA, 19 nt, Homo sapiens
  misc_RNA (1)...(19): siRNA sense strand
ugacacaccuggcauuauc

SEQ ID NO: 400628 - RNA, 19 nt, Homo sapiens
  misc_RNA (1)...(19): siRNA sense strand
gcagggaagucaacacucu

SEQ ID NO: 400629 - RNA, 19 nt, Homo sapiens
  misc_RNA (1)...(19): siRNA sense strand
cuaaagcaauaccuucuga

SEQ ID NO: 400630 - RNA, 19 nt, Homo sapiens
  misc_RNA (1)...(19): siRNA sense strand
ccaggaaggugcauacuac

SEQ ID NO: 400631 - RNA, 19 nt, Homo sapiens
  misc_RNA (1)...(19): siRNA sense strand
cauggaaucugcugaucuu

SEQ ID NO: 400632 - RNA, 19 nt, Homo sapiens
  misc_RNA (1)...(19): siRNA sense strand
gaaggagacccaggugauu

SEQ ID NO: 400633 - RNA, 19 nt, Homo sapiens
  misc_RNA (1)...(19): siRNA sense strand
agagaucugugccaacauu

SEQ ID NO: 400634 - RNA, 19 nt, Homo sapiens
  misc_RNA (1)...(19): siRNA sense strand
ggagcucucuuuguuggaa

SEQ ID NO: 400635 - RNA, 19 nt, Homo sapiens
  misc_RNA (1)...(19): siRNA sense strand
aaggagaucuucauguugu

SEQ ID NO: 400636 - RNA, 19 nt, Homo sapiens
  misc_RNA (1)...(19): siRNA sense strand
gcucugcccuggaccacuu

SEQ ID NO: 400637 - RNA, 19 nt, Homo sapiens
  misc_RNA (1)...(19): siRNA sense strand
ggcauuaucaguccuggua

SEQ ID NO: 400638 - RNA, 19 nt, Homo sapiens
  misc_RNA (1)...(19): siRNA sense strand
gacauccgccucucuguga

SEQ ID NO: 400639 - RNA, 19 nt, Homo sapiens
  misc_RNA (1)...(19): siRNA sense strand
cauuaucaguccugguaaa

SEQ ID NO: 400640 - RNA, 19 nt, Homo sapiens
  misc_RNA (1)...(19): siRNA sense strand
cccaggaggugccuuacaa

SEQ ID NO: 400641 - RNA, 19 nt, Homo sapiens
  misc_RNA (1)...(19): siRNA sense strand
uagauuguuugaagcagaa

SEQ ID NO: 400642 - RNA, 19 nt, Homo sapiens
  misc_RNA (1)...(19): siRNA sense strand
agcaauaccuucugacaca

SEQ ID NO: 400643 - RNA, 19 nt, Homo sapiens
  misc_RNA (1)...(19): siRNA sense strand
gagaucugugccaacauua

SEQ ID NO: 400644 - RNA, 19 nt, Homo sapiens
  misc_RNA (1)...(19): siRNA sense strand
caaggagaucuucauguug

SEQ ID NO: 400645 - RNA, 19 nt, Homo sapiens
  misc_RNA (1)...(19): siRNA sense strand
guaaacagaagaggcauca

SEQ ID NO: 400646 - RNA, 19 nt, Homo sapiens
  misc_RNA (1)...(19): siRNA sense strand
ggaagucaacacucuccaa

SEQ ID NO: 400647 - RNA, 19 nt, Homo sapiens
  misc_RNA (1)...(19): siRNA sense strand
cugugaagcuccucaagug

SEQ ID NO: 400648 - RNA, 19 nt, Homo sapiens
  misc_RNA (1)...(19): siRNA sense strand
cuaguguccuggucaugaa

SEQ ID NO: 400649 - RNA, 19 nt, Homo sapiens
  misc_RNA (1)...(19): siRNA sense strand
gaucugugccaacauuauc

SEQ ID NO: 400650 - RNA, 19 nt, Homo sapiens
  misc_RNA (1)...(19): siRNA sense strand
uaugugaaacuccugauug

SEQ ID NO: 400651 - RNA, 19 nt, Homo sapiens
  misc_RNA (1)...(19): siRNA sense strand
gcaguuaaggacccaaaca

SEQ ID NO: 400652 - RNA, 19 nt, Homo sapiens
  misc_RNA (1)...(19): siRNA sense strand
uaucaguccugguaaacag

SEQ ID NO: 400653 - RNA, 19 nt, Homo sapiens
  misc_RNA (1)...(19): siRNA sense strand
gaccaaguacucccagauc

SEQ ID NO: 400654 - RNA, 19 nt, Homo sapiens
  misc_RNA (1)...(19): siRNA sense strand
agucaacacucuccaacca

SEQ ID NO: 400655 - RNA, 19 nt, Homo sapiens
  misc_RNA (1)...(19): siRNA sense strand
gggagcugguuauccaaca

SEQ ID NO: 400656 - RNA, 19 nt, Homo sapiens
  misc_RNA (1)...(19): siRNA sense strand
ccagacaccagaagagauc

SEQ ID NO: 400657 - RNA, 19 nt, Homo sapiens
  misc_RNA (1)...(19): siRNA sense strand
cugaagguguggucaaugg

SEQ ID NO: 400658 - RNA, 19 nt, Homo sapiens
  misc_RNA (1)...(19): siRNA sense strand
ucacggcagcccucacuga

SEQ ID NO: 400659 - RNA, 19 nt, Homo sapiens
  misc_RNA (1)...(19): siRNA sense strand
ggaccacuuccucggauuc

SEQ ID NO: 400660 - RNA, 19 nt, Homo sapiens
  misc_RNA (1)...(19): siRNA sense strand
cgagagaagcuccuagaac

SEQ ID NO: 400661 - RNA, 19 nt, Homo sapiens
  misc_RNA (1)...(19): siRNA sense strand
acccugauaugccugagaa

SEQ ID NO: 400662 - RNA, 19 nt, Homo sapiens
  misc_RNA (1)...(19): siRNA sense strand
ucucucagcccgacaguuc

SEQ ID NO: 400663 - RNA, 19 nt, Homo sapiens
  misc_RNA (1)...(19): siRNA sense strand
ggacccaaacacacaaucu

SEQ ID NO: 400664 - RNA, 19 nt, Homo sapiens
  misc_RNA (1)...(19): siRNA sense strand
ucaugaacaagguagauug

SEQ ID NO: 400665 - RNA, 19 nt, Homo sapiens
  misc_RNA (1)...(19): siRNA sense strand
accuggagcucucuuuguu

SEQ ID NO: 400666 - RNA, 19 nt, Homo sapiens
  misc_RNA (1)...(19): siRNA sense strand
cccaggugauucuacuuga

SEQ ID NO: 400667 - RNA, 19 nt, Homo sapiens
  misc_RNA (1)...(19): siRNA sense strand
gcauuaucaguccugguaa

SEQ ID NO: 400668 - RNA, 19 nt, Homo sapiens
  misc_RNA (1)...(19): siRNA sense strand
gagcugguuauccaacaga

SEQ ID NO: 400669 - RNA, 19 nt, Homo sapiens
  misc_RNA (1)...(19): siRNA sense strand
caacauuauccgagagaag

SEQ ID NO: 400670 - RNA, 19 nt, Homo sapiens
  misc_RNA (1)...(19): siRNA sense strand
cugauaugccugagaauuc

SEQ ID NO: 400671 - RNA, 19 nt, Homo sapiens
  misc_RNA (1)...(19): siRNA sense strand
uuaaggacccaaacacaca

SEQ ID NO: 400672 - RNA, 19 nt, Homo sapiens
  misc_RNA (1)...(19): siRNA sense strand
ccugauaugccugagaauu

SEQ ID NO: 400673 - RNA, 19 nt, Homo sapiens
  misc_RNA (1)...(19): siRNA sense strand
caggaggugccuuacaaug

SEQ ID NO: 400674 - RNA, 19 nt, Homo sapiens
  misc_RNA (1)...(19): siRNA sense strand
ccaacauuauccgagagaa

SEQ ID NO: 400675 - RNA, 19 nt, Homo sapiens
  misc_RNA (1)...(19): siRNA sense strand
agaaggagacccaggugau

SEQ ID NO: 400676 - RNA, 19 nt, Homo sapiens
  misc_RNA (1)...(19): siRNA sense strand
ggagcugguuauccaacag

SEQ ID NO: 400677 - RNA, 19 nt, Homo sapiens
  misc_RNA (1)...(19): siRNA sense strand
gcauggaaucugcugaucu

SEQ ID NO: 400678 - RNA, 19 nt, Homo sapiens
  misc_RNA (1)...(19): siRNA sense strand
acagagaugagcaggaugu

SEQ ID NO: 400679 - RNA, 19 nt, Homo sapiens
  misc_RNA (1)...(19): siRNA sense strand
aaagcaauaccuucugaca

SEQ ID NO: 400680 - RNA, 19 nt, Homo sapiens
  misc_RNA (1)...(19): siRNA sense strand
gaucuuguugugguucuug

SEQ ID NO: 400681 - RNA, 19 nt, Homo sapiens
  misc_RNA (1)...(19): siRNA sense strand
ggagaucuucauguuguca

SEQ ID NO: 400682 - RNA, 19 nt, Homo sapiens
  misc_RNA (1)...(19): siRNA sense strand
ccuaguguccuggucauga

SEQ ID NO: 400683 - RNA, 19 nt, Homo sapiens
  misc_RNA (1)...(19): siRNA sense strand
ggagacccaggugauucua

SEQ ID NO: 400684 - RNA, 19 nt, Homo sapiens
  misc_RNA (1)...(19): siRNA sense strand
gacccaaacacacaaucug

SEQ ID NO: 400685 - RNA, 19 nt, Homo sapiens
  misc_RNA (1)...(19): siRNA sense strand
gaagguacccaaagggaaa

SEQ ID NO: 400686 - RNA, 19 nt, Homo sapiens
  misc_RNA (1)...(19): siRNA sense strand
gaauaacccugcagaaaau

SEQ ID NO: 400687 - RNA, 19 nt, Homo sapiens
  misc_RNA (1)...(19): siRNA sense strand
gagagaagguacccaaagg

SEQ ID NO: 400688 - RNA, 19 nt, Homo sapiens
  misc_RNA (1)...(19): siRNA sense strand
gggaauaacccugcagaaa

SEQ ID NO: 400689 - RNA, 19 nt, Homo sapiens
  misc_RNA (1)...(19): siRNA sense strand
ggaauaacccugcagaaaa

SEQ ID NO: 400690 - RNA, 19 nt, Homo sapiens
  misc_RNA (1)...(19): siRNA sense strand
aaacagaccaggcacagaa

SEQ ID NO: 400691 - RNA, 19 nt, Homo sapiens
  misc_RNA (1)...(19): siRNA sense strand
ggagagaagguacccaaag

SEQ ID NO: 400692 - RNA, 19 nt, Homo sapiens
  misc_RNA (1)...(19): siRNA sense strand
ccgcgagguugucugcuaa

SEQ ID NO: 400693 - RNA, 19 nt, Homo sapiens
  misc_RNA (1)...(19): siRNA sense strand
agccagagcccaagccuaa

SEQ ID NO: 400694 - RNA, 19 nt, Homo sapiens
  misc_RNA (1)...(19): siRNA sense strand
caaagaagggagagaaggu

SEQ ID NO: 400695 - RNA, 19 nt, Homo sapiens
  misc_RNA (1)...(19): siRNA sense strand
uaaaccugcuccuccaaag

SEQ ID NO: 400696 - RNA, 19 nt, Homo sapiens
  misc_RNA (1)...(19): siRNA sense strand
aaagaagggagagaaggua

SEQ ID NO: 400697 - RNA, 19 nt, Homo sapiens
  misc_RNA (1)...(19): siRNA sense strand
gaaaauggagaugccaaaa

SEQ ID NO: 400698 - RNA, 19 nt, Homo sapiens
  misc_RNA (1)...(19): siRNA sense strand
ugcuggagaugccaaguga

SEQ ID NO: 400699 - RNA, 19 nt, Homo sapiens
  misc_RNA (1)...(19): siRNA sense strand
gaagauccgcgagguuguc

SEQ ID NO: 400700 - RNA, 19 nt, Homo sapiens
  misc_RNA (1)...(19): siRNA sense strand
aaauggagaugccaaaaca

SEQ ID NO: 400701 - RNA, 19 nt, Homo sapiens
  misc_RNA (1)...(19): siRNA sense strand
cuaaaccugcuccuccaaa

SEQ ID NO: 400702 - RNA, 19 nt, Homo sapiens
  misc_RNA (1)...(19): siRNA sense strand
gggagagaagguacccaaa

SEQ ID NO: 400703 - RNA, 19 nt, Homo sapiens
  misc_RNA (1)...(19): siRNA sense strand
aaaaggccccugcaaagaa

SEQ ID NO: 400704 - RNA, 19 nt, Homo sapiens
  misc_RNA (1)...(19): siRNA sense strand
uccgcgagguugucugcua

SEQ ID NO: 400705 - RNA, 19 nt, Homo sapiens
  misc_RNA (1)...(19): siRNA sense strand
cuacaaggcugccaaguuc

SEQ ID NO: 400706 - RNA, 19 nt, Homo sapiens
  misc_RNA (1)...(19): siRNA sense strand
gaaggacucugccaaacag

SEQ ID NO: 400707 - RNA, 19 nt, Homo sapiens
  misc_RNA (1)...(19): siRNA sense strand
caacagcgccuucaagaac

SEQ ID NO: 400708 - RNA, 19 nt, Homo sapiens
  misc_RNA (1)...(19): siRNA sense strand
gcaagugcgucuccaacgu

SEQ ID NO: 400709 - RNA, 19 nt, Homo sapiens
  misc_RNA (1)...(19): siRNA sense strand
caauagcgucucacccaua

SEQ ID NO: 400710 - RNA, 19 nt, Homo sapiens
  misc_RNA (1)...(19): siRNA sense strand
ggugaaggacucugccaaa

SEQ ID NO: 400711 - RNA, 19 nt, Homo sapiens
  misc_RNA (1)...(19): siRNA sense strand
aauagcgucucacccauau

SEQ ID NO: 400712 - RNA, 19 nt, Homo sapiens
  misc_RNA (1)...(19): siRNA sense strand
cuauacggcuuucaacaag

SEQ ID NO: 400713 - RNA, 19 nt, Homo sapiens
  misc_RNA (1)...(19): siRNA sense strand
ucacgcgccacauggaaua

SEQ ID NO: 400714 - RNA, 19 nt, Homo sapiens
  misc_RNA (1)...(19): siRNA sense strand
auacggcuuucaacaagaa

SEQ ID NO: 400715 - RNA, 19 nt, Homo sapiens
  misc_RNA (1)...(19): siRNA sense strand
uacuccaacuccuucuuua

SEQ ID NO: 400716 - RNA, 19 nt, Homo sapiens
  misc_RNA (1)...(19): siRNA sense strand
ccgaagcuguggaggugaa

SEQ ID NO: 400717 - RNA, 19 nt, Homo sapiens
  misc_RNA (1)...(19): siRNA sense strand
guguggugcucuucgugua

SEQ ID NO: 400718 - RNA, 19 nt, Homo sapiens
  misc_RNA (1)...(19): siRNA sense strand
cuacuccaacuccuucuuu

SEQ ID NO: 400719 - RNA, 19 nt, Homo sapiens
  misc_RNA (1)...(19): siRNA sense strand
uacaacagcgccuucaaga

SEQ ID NO: 400720 - RNA, 19 nt, Homo sapiens
  misc_RNA (1)...(19): siRNA sense strand
caaccacagccucggcaaa

SEQ ID NO: 400721 - RNA, 19 nt, Homo sapiens
  misc_RNA (1)...(19): siRNA sense strand
cagcgaggagugccaggua

SEQ ID NO: 400722 - RNA, 19 nt, Homo sapiens
  misc_RNA (1)...(19): siRNA sense strand
ugaaggacucugccaaaca

SEQ ID NO: 400723 - RNA, 19 nt, Homo sapiens
  misc_RNA (1)...(19): siRNA sense strand
acacguggcgggagcagaa

SEQ ID NO: 400724 - RNA, 19 nt, Homo sapiens
  misc_RNA (1)...(19): siRNA sense strand
ucuacaaggcugccaaguu

SEQ ID NO: 400725 - RNA, 19 nt, Homo sapiens
  misc_RNA (1)...(19): siRNA sense strand
uauacggcuuucaacaaga

SEQ ID NO: 400726 - RNA, 19 nt, Homo sapiens
  misc_RNA (1)...(19): siRNA sense strand
ucuauacggcuuucaacaa

SEQ ID NO: 400727 - RNA, 19 nt, Homo sapiens
  misc_RNA (1)...(19): siRNA sense strand
gugaaggacucugccaaac

SEQ ID NO: 400728 - RNA, 19 nt, Homo sapiens
  misc_RNA (1)...(19): siRNA sense strand
ccauggccgucucggaugu

SEQ ID NO: 400729 - RNA, 19 nt, Homo sapiens
  misc_RNA (1)...(19): siRNA sense strand
ggucuucggagugcuuauu

SEQ ID NO: 400730 - RNA, 19 nt, Homo sapiens
  misc_RNA (1)...(19): siRNA sense strand
gcuccaggaagaccaauag

SEQ ID NO: 400731 - RNA, 19 nt, Homo sapiens
  misc_RNA (1)...(19): siRNA sense strand
cauccucauuggcguguuc

SEQ ID NO: 400732 - RNA, 19 nt, Homo sapiens
  misc_RNA (1)...(19): siRNA sense strand
cauggugggcauccucauu

SEQ ID NO: 400733 - RNA, 19 nt, Homo sapiens
  misc_RNA (1)...(19): siRNA sense strand
acaacagcgccuucaagaa

SEQ ID NO: 400734 - RNA, 19 nt, Homo sapiens
  misc_RNA (1)...(19): siRNA sense strand
cuacaacagcgccuucaag

SEQ ID NO: 400735 - RNA, 19 nt, Homo sapiens
  misc_RNA (1)...(19): siRNA sense strand
caucacgcgccacauggaa

SEQ ID NO: 400736 - RNA, 19 nt, Homo sapiens
  misc_RNA (1)...(19): siRNA sense strand
acucuccgcugucaucucu

SEQ ID NO: 400737 - RNA, 19 nt, Homo sapiens
  misc_RNA (1)...(19): siRNA sense strand
caacauuccugauaucuug

SEQ ID NO: 400738 - RNA, 19 nt, Homo sapiens
  misc_RNA (1)...(19): siRNA sense strand
gaacggagguggcgaugug

SEQ ID NO: 400739 - RNA, 19 nt, Homo sapiens
  misc_RNA (1)...(19): siRNA sense strand
ggaagugccuaagucuuua

SEQ ID NO: 400740 - RNA, 19 nt, Homo sapiens
  misc_RNA (1)...(19): siRNA sense strand
gcucugcucugaucaccuu

SEQ ID NO: 400741 - RNA, 19 nt, Homo sapiens
  misc_RNA (1)...(19): siRNA sense strand
caaagacaaggucccauuu

SEQ ID NO: 400742 - RNA, 19 nt, Homo sapiens
  misc_RNA (1)...(19): siRNA sense strand
cggaagugccuaagucuuu

SEQ ID NO: 400743 - RNA, 19 nt, Homo sapiens
  misc_RNA (1)...(19): siRNA sense strand
gagcaggccagacucaaga

SEQ ID NO: 400744 - RNA, 19 nt, Homo sapiens
  misc_RNA (1)...(19): siRNA sense strand
gcucaacauuccugauauc

SEQ ID NO: 400745 - RNA, 19 nt, Homo sapiens
  misc_RNA (1)...(19): siRNA sense strand
caagcuagagaucuucuuu

SEQ ID NO: 400746 - RNA, 19 nt, Homo sapiens
  misc_RNA (1)...(19): siRNA sense strand
ccaaagacaaggucccauu

SEQ ID NO: 400747 - RNA, 19 nt, Homo sapiens
  misc_RNA (1)...(19): siRNA sense strand
gugcucaacauuccugaua

SEQ ID NO: 400748 - RNA, 19 nt, Homo sapiens
  misc_RNA (1)...(19): siRNA sense strand
aggaggagcugcuggacaa

SEQ ID NO: 400749 - RNA, 19 nt, Homo sapiens
  misc_RNA (1)...(19): siRNA sense strand
guacuggugcucaacauuc

SEQ ID NO: 400750 - RNA, 19 nt, Homo sapiens
  misc_RNA (1)...(19): siRNA sense strand
gucuuuaguuuccaauuug

SEQ ID NO: 400751 - RNA, 19 nt, Homo sapiens
  misc_RNA (1)...(19): siRNA sense strand
gcagcaagucccucugaga

SEQ ID NO: 400752 - RNA, 19 nt, Homo sapiens
  misc_RNA (1)...(19): siRNA sense strand
gcucagcgucugugccaaa

SEQ ID NO: 400753 - RNA, 19 nt, Homo sapiens
  misc_RNA (1)...(19): siRNA sense strand
gaugguguccagccaguug

SEQ ID NO: 400754 - RNA, 19 nt, Homo sapiens
  misc_RNA (1)...(19): siRNA sense strand
uggacaagcuagagaucuu

SEQ ID NO: 400755 - RNA, 19 nt, Homo sapiens
  misc_RNA (1)...(19): siRNA sense strand
gggcagcaagucccucuga

SEQ ID NO: 400756 - RNA, 19 nt, Homo sapiens
  misc_RNA (1)...(19): siRNA sense strand
gcucgguacuggugcucaa

SEQ ID NO: 400757 - RNA, 19 nt, Homo sapiens
  misc_RNA (1)...(19): siRNA sense strand
gaucaggucgcagccaguu

SEQ ID NO: 400758 - RNA, 19 nt, Homo sapiens
  misc_RNA (1)...(19): siRNA sense strand
ggguguuggucacuggauu

SEQ ID NO: 400759 - RNA, 19 nt, Homo sapiens
  misc_RNA (1)...(19): siRNA sense strand
ccaaaucggccaguucaca

SEQ ID NO: 400760 - RNA, 19 nt, Homo sapiens
  misc_RNA (1)...(19): siRNA sense strand
gguguuggucacuggauuu

SEQ ID NO: 400761 - RNA, 19 nt, Homo sapiens
  misc_RNA (1)...(19): siRNA sense strand
ggacaagcuagagaucuuc

SEQ ID NO: 400762 - RNA, 19 nt, Homo sapiens
  misc_RNA (1)...(19): siRNA sense strand
cagcgucugugccaaaucg

SEQ ID NO: 400763 - RNA, 19 nt, Homo sapiens
  misc_RNA (1)...(19): siRNA sense strand
ggagcaggccagacucaag

SEQ ID NO: 400764 - RNA, 19 nt, Homo sapiens
  misc_RNA (1)...(19): siRNA sense strand
ggagcacacgaucaacaug

SEQ ID NO: 400765 - RNA, 19 nt, Homo sapiens
  misc_RNA (1)...(19): siRNA sense strand
gaggagcaggccagacuca

SEQ ID NO: 400766 - RNA, 19 nt, Homo sapiens
  misc_RNA (1)...(19): siRNA sense strand
ccuuggagcugcccauggu

SEQ ID NO: 400767 - RNA, 19 nt, Homo sapiens
  misc_RNA (1)...(19): siRNA sense strand
caggccagacucaagauga

SEQ ID NO: 400768 - RNA, 19 nt, Homo sapiens
  misc_RNA (1)...(19): siRNA sense strand
gguacuggugcucaacauu

SEQ ID NO: 400769 - RNA, 19 nt, Homo sapiens
  misc_RNA (1)...(19): siRNA sense strand
cugcucugaucaccuuuga

SEQ ID NO: 400770 - RNA, 19 nt, Homo sapiens
  misc_RNA (1)...(19): siRNA sense strand
ucaacauuccugauaucuu

SEQ ID NO: 400771 - RNA, 19 nt, Homo sapiens
  misc_RNA (1)...(19): siRNA sense strand
cagcagggccuagcagucu

SEQ ID NO: 400772 - RNA, 19 nt, Homo sapiens
  misc_RNA (1)...(19): siRNA sense strand
ggacagacaugacuuugga

SEQ ID NO: 400773 - RNA, 19 nt, Homo sapiens
  misc_RNA (1)...(19): siRNA sense strand
ucaacaaacuugcaagaaa

SEQ ID NO: 400774 - RNA, 19 nt, Homo sapiens
  misc_RNA (1)...(19): siRNA sense strand
gagcagaaaucaugagauc

SEQ ID NO: 400775 - RNA, 19 nt, Homo sapiens
  misc_RNA (1)...(19): siRNA sense strand
caacaaacuugcaagaaag

SEQ ID NO: 400776 - RNA, 19 nt, Homo sapiens
  misc_RNA (1)...(19): siRNA sense strand
gcacaaaugagcagaaucu

SEQ ID NO: 400777 - RNA, 19 nt, Homo sapiens
  misc_RNA (1)...(19): siRNA sense strand
gauuaaggaggaaggaaua

SEQ ID NO: 400778 - RNA, 19 nt, Homo sapiens
  misc_RNA (1)...(19): siRNA sense strand
gcagcugaaugacuuggaa

SEQ ID NO: 400779 - RNA, 19 nt, Homo sapiens
  misc_RNA (1)...(19): siRNA sense strand
agacaugacuuuggauuuc

SEQ ID NO: 400780 - RNA, 19 nt, Homo sapiens
  misc_RNA (1)...(19): siRNA sense strand
gaagaaauacagcccuugu

SEQ ID NO: 400781 - RNA, 19 nt, Homo sapiens
  misc_RNA (1)...(19): siRNA sense strand
gauaacaggaggaccuuga

SEQ ID NO: 400782 - RNA, 19 nt, Homo sapiens
  misc_RNA (1)...(19): siRNA sense strand
gcccuuugcuuuacugaug

SEQ ID NO: 400783 - RNA, 19 nt, Homo sapiens
  misc_RNA (1)...(19): siRNA sense strand
gcagaucuucaaccucuuu

SEQ ID NO: 400784 - RNA, 19 nt, Homo sapiens
  misc_RNA (1)...(19): siRNA sense strand
gaagaaucacucucuaucu

SEQ ID NO: 400785 - RNA, 19 nt, Homo sapiens
  misc_RNA (1)...(19): siRNA sense strand
gugcucagcugcaagucaa

SEQ ID NO: 400786 - RNA, 19 nt, Homo sapiens
  misc_RNA (1)...(19): siRNA sense strand
aagaaucacucucuaucug

SEQ ID NO: 400787 - RNA, 19 nt, Homo sapiens
  misc_RNA (1)...(19): siRNA sense strand
ugucagagcagaaaucaug

SEQ ID NO: 400788 - RNA, 19 nt, Homo sapiens
  misc_RNA (1)...(19): siRNA sense strand
gauggacagacaugacuuu

SEQ ID NO: 400789 - RNA, 19 nt, Homo sapiens
  misc_RNA (1)...(19): siRNA sense strand
gaggagagggugggagaaa

SEQ ID NO: 400790 - RNA, 19 nt, Homo sapiens
  misc_RNA (1)...(19): siRNA sense strand
caaacuugcaagaaagauu

SEQ ID NO: 400791 - RNA, 19 nt, Homo sapiens
  misc_RNA (1)...(19): siRNA sense strand
cgaagaaucacucucuauc

SEQ ID NO: 400792 - RNA, 19 nt, Homo sapiens
  misc_RNA (1)...(19): siRNA sense strand
ugacagagaagaaauacag

SEQ ID NO: 400793 - RNA, 19 nt, Homo sapiens
  misc_RNA (1)...(19): siRNA sense strand
ggccucgcccuuugcuuua

SEQ ID NO: 400794 - RNA, 19 nt, Homo sapiens
  misc_RNA (1)...(19): siRNA sense strand
cagacaugacuuuggauuu

SEQ ID NO: 400795 - RNA, 19 nt, Homo sapiens
  misc_RNA (1)...(19): siRNA sense strand
ccaucucuguccuccauga

SEQ ID NO: 400796 - RNA, 19 nt, Homo sapiens
  misc_RNA (1)...(19): siRNA sense strand
gagaaacuccccugaugaa

SEQ ID NO: 400797 - RNA, 19 nt, Homo sapiens
  misc_RNA (1)...(19): siRNA sense strand
gcugcucucugggcuguga

SEQ ID NO: 400798 - RNA, 19 nt, Homo sapiens
  misc_RNA (1)...(19): siRNA sense strand
gaaacuccccugaugaaug

SEQ ID NO: 400799 - RNA, 19 nt, Homo sapiens
  misc_RNA (1)...(19): siRNA sense strand
ggaccuccuagacaaauuc

SEQ ID NO: 400800 - RNA, 19 nt, Homo sapiens
  misc_RNA (1)...(19): siRNA sense strand
gagacccacagccuggaua

SEQ ID NO: 400801 - RNA, 19 nt, Homo sapiens
  misc_RNA (1)...(19): siRNA sense strand
uaucaacaaacuugcaaga

SEQ ID NO: 400802 - RNA, 19 nt, Homo sapiens
  misc_RNA (1)...(19): siRNA sense strand
gagguugucagagcagaaa

SEQ ID NO: 400803 - RNA, 19 nt, Homo sapiens
  misc_RNA (1)...(19): siRNA sense strand
agaaucacucucuaucuga

SEQ ID NO: 400804 - RNA, 19 nt, Homo sapiens
  misc_RNA (1)...(19): siRNA sense strand
uaacaggaggaccuugaug

SEQ ID NO: 400805 - RNA, 19 nt, Homo sapiens
  misc_RNA (1)...(19): siRNA sense strand
cuuggaagccugugugaug

SEQ ID NO: 400806 - RNA, 19 nt, Homo sapiens
  misc_RNA (1)...(19): siRNA sense strand
ucuccuuccuccugucuga

SEQ ID NO: 400807 - RNA, 19 nt, Homo sapiens
  misc_RNA (1)...(19): siRNA sense strand
gacuccaucuuggcuguga

SEQ ID NO: 400808 - RNA, 19 nt, Homo sapiens
  misc_RNA (1)...(19): siRNA sense strand
ggagagggugggagaaacu

SEQ ID NO: 400809 - RNA, 19 nt, Homo sapiens
  misc_RNA (1)...(19): siRNA sense strand
uggcacaaaugagcagaau

SEQ ID NO: 400810 - RNA, 19 nt, Homo sapiens
  misc_RNA (1)...(19): siRNA sense strand
ccgaagaaucacucucuau

SEQ ID NO: 400811 - RNA, 19 nt, Homo sapiens
  misc_RNA (1)...(19): siRNA sense strand
acagacaugacuuuggauu

SEQ ID NO: 400812 - RNA, 19 nt, Homo sapiens
  misc_RNA (1)...(19): siRNA sense strand
cagagcagaaaucaugaga

SEQ ID NO: 400813 - RNA, 19 nt, Homo sapiens
  misc_RNA (1)...(19): siRNA sense strand
uccgaagaaucacucucua

SEQ ID NO: 400814 - RNA, 19 nt, Homo sapiens
  misc_RNA (1)...(19): siRNA sense strand
caaauucugcaccgaacuc

SEQ ID NO: 400815 - RNA, 19 nt, Homo sapiens
  misc_RNA (1)...(19): siRNA sense strand
ucaaccucuuuaccacaaa

SEQ ID NO: 400816 - RNA, 19 nt, Homo sapiens
  misc_RNA (1)...(19): siRNA sense strand
cagaucuucaaccucuuua

SEQ ID NO: 400817 - RNA, 19 nt, Homo sapiens
  misc_RNA (1)...(19): siRNA sense strand
ggagguugucagagcagaa

SEQ ID NO: 400818 - RNA, 19 nt, Homo sapiens
  misc_RNA (1)...(19): siRNA sense strand
caacauaucuugcuacgaa

SEQ ID NO: 400819 - RNA, 19 nt, Homo sapiens
  misc_RNA (1)...(19): siRNA sense strand
auagaggccugauuaaaua

SEQ ID NO: 400820 - RNA, 19 nt, Homo sapiens
  misc_RNA (1)...(19): siRNA sense strand
aaauauagaggccugauua

SEQ ID NO: 400821 - RNA, 19 nt, Homo sapiens
  misc_RNA (1)...(19): siRNA sense strand
caacucagcccaucuuaga

SEQ ID NO: 400822 - RNA, 19 nt, Homo sapiens
  misc_RNA (1)...(19): siRNA sense strand
gcacgaggccuguugucua

SEQ ID NO: 400823 - RNA, 19 nt, Homo sapiens
  misc_RNA (1)...(19): siRNA sense strand
uuaaauacaccgacaguaa

SEQ ID NO: 400824 - RNA, 19 nt, Homo sapiens
  misc_RNA (1)...(19): siRNA sense strand
uaaauacaccgacaguaaa

SEQ ID NO: 400825 - RNA, 19 nt, Homo sapiens
  misc_RNA (1)...(19): siRNA sense strand
ggauuucaaugucacucua

SEQ ID NO: 400826 - RNA, 19 nt, Homo sapiens
  misc_RNA (1)...(19): siRNA sense strand
gaagcaacuccauuucauu

SEQ ID NO: 400827 - RNA, 19 nt, Homo sapiens
  misc_RNA (1)...(19): siRNA sense strand
cauuacagauagaagagua

SEQ ID NO: 400828 - RNA, 19 nt, Homo sapiens
  misc_RNA (1)...(19): siRNA sense strand
guuauuauguccauuacug

SEQ ID NO: 400829 - RNA, 19 nt, Homo sapiens
  misc_RNA (1)...(19): siRNA sense strand
ccaauggauuucaauguca

SEQ ID NO: 400830 - RNA, 19 nt, Homo sapiens
  misc_RNA (1)...(19): siRNA sense strand
gcacaacugcuuuggaaca

SEQ ID NO: 400831 - RNA, 19 nt, Homo sapiens
  misc_RNA (1)...(19): siRNA sense strand
gacaaugccuugguuucaa

SEQ ID NO: 400832 - RNA, 19 nt, Homo sapiens
  misc_RNA (1)...(19): siRNA sense strand
gaaauauagaggccugauu

SEQ ID NO: 400833 - RNA, 19 nt, Homo sapiens
  misc_RNA (1)...(19): siRNA sense strand
ccaguggcccugagcaaua

SEQ ID NO: 400834 - RNA, 19 nt, Homo sapiens
  misc_RNA (1)...(19): siRNA sense strand
uauagaggccugauuaaau

SEQ ID NO: 400835 - RNA, 19 nt, Homo sapiens
  misc_RNA (1)...(19): siRNA sense strand
ccaagcaucccauuacaga

SEQ ID NO: 400836 - RNA, 19 nt, Homo sapiens
  misc_RNA (1)...(19): siRNA sense strand
ggacagcucaccaaaggau

SEQ ID NO: 400837 - RNA, 19 nt, Homo sapiens
  misc_RNA (1)...(19): siRNA sense strand
gaucacagcaacagagugu

SEQ ID NO: 400838 - RNA, 19 nt, Homo sapiens
  misc_RNA (1)...(19): siRNA sense strand
aagcaucccauuacagaua

SEQ ID NO: 400839 - RNA, 19 nt, Homo sapiens
  misc_RNA (1)...(19): siRNA sense strand
aggcacaacugcuuuggaa

SEQ ID NO: 400840 - RNA, 19 nt, Homo sapiens
  misc_RNA (1)...(19): siRNA sense strand
gauguucuccaaacgcuuu

SEQ ID NO: 400841 - RNA, 19 nt, Homo sapiens
  misc_RNA (1)...(19): siRNA sense strand
ucagcaggcuucccaaugg

SEQ ID NO: 400842 - RNA, 19 nt, Homo sapiens
  misc_RNA (1)...(19): siRNA sense strand
agaagcaacuccauuucau

SEQ ID NO: 400843 - RNA, 19 nt, Homo sapiens
  misc_RNA (1)...(19): siRNA sense strand
ccuccagaguguacuguuu

SEQ ID NO: 400844 - RNA, 19 nt, Homo sapiens
  misc_RNA (1)...(19): siRNA sense strand
aaggacagcucaccaaagg

SEQ ID NO: 400845 - RNA, 19 nt, Homo sapiens
  misc_RNA (1)...(19): siRNA sense strand
gcaacagagugugacuuca

SEQ ID NO: 400846 - RNA, 19 nt, Homo sapiens
  misc_RNA (1)...(19): siRNA sense strand
gaaggcucccucaucauca

SEQ ID NO: 400847 - RNA, 19 nt, Homo sapiens
  misc_RNA (1)...(19): siRNA sense strand
gcauuuaagcaacauaucu

SEQ ID NO: 400848 - RNA, 19 nt, Homo sapiens
  misc_RNA (1)...(19): siRNA sense strand
ccauuucauuggauaacuu

SEQ ID NO: 400849 - RNA, 19 nt, Homo sapiens
  misc_RNA (1)...(19): siRNA sense strand
cagaagcaacuccauuuca

SEQ ID NO: 400850 - RNA, 19 nt, Homo sapiens
  misc_RNA (1)...(19): siRNA sense strand
aagcaacuccauuucauug

SEQ ID NO: 400851 - RNA, 19 nt, Homo sapiens
  misc_RNA (1)...(19): siRNA sense strand
guucacggccgacaucaug

SEQ ID NO: 400852 - RNA, 19 nt, Homo sapiens
  misc_RNA (1)...(19): siRNA sense strand
caccaagcaucccauuaca

SEQ ID NO: 400853 - RNA, 19 nt, Homo sapiens
  misc_RNA (1)...(19): siRNA sense strand
uuucaacacuaucggaaug

SEQ ID NO: 400854 - RNA, 19 nt, Homo sapiens
  misc_RNA (1)...(19): siRNA sense strand
cccaauggauuucaauguc

SEQ ID NO: 400855 - RNA, 19 nt, Homo sapiens
  misc_RNA (1)...(19): siRNA sense strand
ccaccaagcaucccauuac

SEQ ID NO: 400856 - RNA, 19 nt, Homo sapiens
  misc_RNA (1)...(19): siRNA sense strand
cagguucuccucucccuuu

SEQ ID NO: 400857 - RNA, 19 nt, Homo sapiens
  misc_RNA (1)...(19): siRNA sense strand
cagcaggcuucccaaugga

SEQ ID NO: 400858 - RNA, 19 nt, Homo sapiens
  misc_RNA (1)...(19): siRNA sense strand
gacaaggacagcucaccaa

SEQ ID NO: 400859 - RNA, 19 nt, Homo sapiens
  misc_RNA (1)...(19): siRNA sense strand
caacacuaucggaauguga

SEQ ID NO: 400860 - RNA, 19 nt, Homo sapiens
  misc_RNA (1)...(19): siRNA sense strand
ugacaaugccuugguuuca

SEQ ID NO: 400861 - RNA, 19 nt, Homo sapiens
  misc_RNA (1)...(19): siRNA sense strand
gggugacaaugccuugguu

SEQ ID NO: 400862 - RNA, 19 nt, Homo sapiens
  misc_RNA (1)...(19): siRNA sense strand
ccucagcacccgaagauuc

SEQ ID NO: 400863 - RNA, 19 nt, Homo sapiens
  misc_RNA (1)...(19): siRNA sense strand
cacaacugcuuuggaacaa

SEQ ID NO: 400864 - RNA, 19 nt, Homo sapiens
  misc_RNA (1)...(19): siRNA sense strand
cacgaggccuguugucuac

SEQ ID NO: 400865 - RNA, 19 nt, Homo sapiens
  misc_RNA (1)...(19): siRNA sense strand
gcaggcuucccaauggauu

SEQ ID NO: 400866 - RNA, 19 nt, Homo sapiens
  misc_RNA (1)...(19): siRNA sense strand
ggaaaaggagcaagaagau

SEQ ID NO: 400867 - RNA, 19 nt, Homo sapiens
  misc_RNA (1)...(19): siRNA sense strand
gggcauuuaagcaacauau

SEQ ID NO: 400868 - RNA, 19 nt, Homo sapiens
  misc_RNA (1)...(19): siRNA sense strand
cugauuaaauacugguuuc

SEQ ID NO: 400869 - RNA, 19 nt, Homo sapiens
  misc_RNA (1)...(19): siRNA sense strand
ugccuugguuucaacacua

SEQ ID NO: 400870 - RNA, 19 nt, Homo sapiens
  misc_RNA (1)...(19): siRNA sense strand
aauauagaggccugauuaa

SEQ ID NO: 400871 - RNA, 19 nt, Homo sapiens
  misc_RNA (1)...(19): siRNA sense strand
cuccagaguguacuguuua

SEQ ID NO: 400872 - RNA, 19 nt, Homo sapiens
  misc_RNA (1)...(19): siRNA sense strand
uuaaaacccuccagagugu

SEQ ID NO: 400873 - RNA, 19 nt, Homo sapiens
  misc_RNA (1)...(19): siRNA sense strand
ggugaauuguacacagauc

SEQ ID NO: 400874 - RNA, 19 nt, Homo sapiens
  misc_RNA (1)...(19): siRNA sense strand
acaaggacagcucaccaaa

SEQ ID NO: 400875 - RNA, 19 nt, Homo sapiens
  misc_RNA (1)...(19): siRNA sense strand
aaauacaccgacaguaaau

SEQ ID NO: 400876 - RNA, 19 nt, Homo sapiens
  misc_RNA (1)...(19): siRNA sense strand
gaggccugauuaaauacug

SEQ ID NO: 400877 - RNA, 19 nt, Homo sapiens
  misc_RNA (1)...(19): siRNA sense strand
agaaggcucccucaucauc

SEQ ID NO: 400878 - RNA, 19 nt, Homo sapiens
  misc_RNA (1)...(19): siRNA sense strand
cagcaagucauccugaucu

SEQ ID NO: 400879 - RNA, 19 nt, Homo sapiens
  misc_RNA (1)...(19): siRNA sense strand
ggugacaaugccuugguuu

SEQ ID NO: 400880 - RNA, 19 nt, Homo sapiens
  misc_RNA (1)...(19): siRNA sense strand
caaggacagcucaccaaag

SEQ ID NO: 400881 - RNA, 19 nt, Homo sapiens
  misc_RNA (1)...(19): siRNA sense strand
uuccugguccugaaauaua

SEQ ID NO: 400882 - RNA, 19 nt, Homo sapiens
  misc_RNA (1)...(19): siRNA sense strand
gaauccaacaggucaaagg

SEQ ID NO: 400883 - RNA, 19 nt, Homo sapiens
  misc_RNA (1)...(19): siRNA sense strand
ucagaagcaacuccauuuc

SEQ ID NO: 400884 - RNA, 19 nt, Homo sapiens
  misc_RNA (1)...(19): siRNA sense strand
auauagaggccugauuaaa

SEQ ID NO: 400885 - RNA, 19 nt, Homo sapiens
  misc_RNA (1)...(19): siRNA sense strand
uuuagagucgggcauuuaa

SEQ ID NO: 400886 - RNA, 19 nt, Homo sapiens
  misc_RNA (1)...(19): siRNA sense strand
gccuugguuucaacacuau

SEQ ID NO: 400887 - RNA, 19 nt, Homo sapiens
  misc_RNA (1)...(19): siRNA sense strand
caguggcccugagcaauag

SEQ ID NO: 400888 - RNA, 19 nt, Homo sapiens
  misc_RNA (1)...(19): siRNA sense strand
ucaacacuaucggaaugug

SEQ ID NO: 400889 - RNA, 19 nt, Homo sapiens
  misc_RNA (1)...(19): siRNA sense strand
uucagaagcaacuccauuu

SEQ ID NO: 400890 - RNA, 19 nt, Homo sapiens
  misc_RNA (1)...(19): siRNA sense strand
acaaugccuugguuucaac

SEQ ID NO: 400891 - RNA, 19 nt, Homo sapiens
  misc_RNA (1)...(19): siRNA sense strand
aaaggagcaagaagauguu

SEQ ID NO: 400892 - RNA, 19 nt, Homo sapiens
  misc_RNA (1)...(19): siRNA sense strand
gacucuguguccauuaucu

SEQ ID NO: 400893 - RNA, 19 nt, Homo sapiens
  misc_RNA (1)...(19): siRNA sense strand
uaaauacugguuucacacu

SEQ ID NO: 400894 - RNA, 19 nt, Homo sapiens
  misc_RNA (1)...(19): siRNA sense strand
cuuuagagucgggcauuua

SEQ ID NO: 400895 - RNA, 19 nt, Homo sapiens
  misc_RNA (1)...(19): siRNA sense strand
ccuuugacaucgcugauac

SEQ ID NO: 400896 - RNA, 19 nt, Homo sapiens
  misc_RNA (1)...(19): siRNA sense strand
gagaaggcucccucaucau

SEQ ID NO: 400897 - RNA, 19 nt, Homo sapiens
  misc_RNA (1)...(19): siRNA sense strand
guacagagcaucaugaaga

SEQ ID NO: 400898 - RNA, 19 nt, Homo sapiens
  misc_RNA (1)...(19): siRNA sense strand
caaaguacaggaagaaauu

SEQ ID NO: 400899 - RNA, 19 nt, Homo sapiens
  misc_RNA (1)...(19): siRNA sense strand
gcacaguccucacuuucau

SEQ ID NO: 400900 - RNA, 19 nt, Homo sapiens
  misc_RNA (1)...(19): siRNA sense strand
gaaauugcaaccucuagug

SEQ ID NO: 400901 - RNA, 19 nt, Homo sapiens
  misc_RNA (1)...(19): siRNA sense strand
ggaccuugcugaguauugu

SEQ ID NO: 400902 - RNA, 19 nt, Homo sapiens
  misc_RNA (1)...(19): siRNA sense strand
agacuacuguggacauuau

SEQ ID NO: 400903 - RNA, 19 nt, Homo sapiens
  misc_RNA (1)...(19): siRNA sense strand
gcagaaauugcaaccucua

SEQ ID NO: 400904 - RNA, 19 nt, Homo sapiens
  misc_RNA (1)...(19): siRNA sense strand
gcaggucuauuccuuaucc

SEQ ID NO: 400905 - RNA, 19 nt, Homo sapiens
  misc_RNA (1)...(19): siRNA sense strand
uuaugcaucugccuacaaa

SEQ ID NO: 400906 - RNA, 19 nt, Homo sapiens
  misc_RNA (1)...(19): siRNA sense strand
gccagaaggccauagacua

SEQ ID NO: 400907 - RNA, 19 nt, Homo sapiens
  misc_RNA (1)...(19): siRNA sense strand
uacagagcaucaugaagaa

SEQ ID NO: 400908 - RNA, 19 nt, Homo sapiens
  misc_RNA (1)...(19): siRNA sense strand
caucugugcugucuucucu

SEQ ID NO: 400909 - RNA, 19 nt, Homo sapiens
  misc_RNA (1)...(19): siRNA sense strand
ugaguauugugguggcuuu

SEQ ID NO: 400910 - RNA, 19 nt, Homo sapiens
  misc_RNA (1)...(19): siRNA sense strand
gcacaagcagaaauugcaa

SEQ ID NO: 400911 - RNA, 19 nt, Homo sapiens
  misc_RNA (1)...(19): siRNA sense strand
ugacaaaguacaggaagaa

SEQ ID NO: 400912 - RNA, 19 nt, Homo sapiens
  misc_RNA (1)...(19): siRNA sense strand
caaugucugugggcuguug

SEQ ID NO: 400913 - RNA, 19 nt, Homo sapiens
  misc_RNA (1)...(19): siRNA sense strand
gugacaaaguacaggaaga

SEQ ID NO: 400914 - RNA, 19 nt, Homo sapiens
  misc_RNA (1)...(19): siRNA sense strand
ccagaaggccauagacuac

SEQ ID NO: 400915 - RNA, 19 nt, Homo sapiens
  misc_RNA (1)...(19): siRNA sense strand
ugucuucucugcacaagca

SEQ ID NO: 400916 - RNA, 19 nt, Homo sapiens
  misc_RNA (1)...(19): siRNA sense strand
gcucgaugcucuggaccuu

SEQ ID NO: 400917 - RNA, 19 nt, Homo sapiens
  misc_RNA (1)...(19): siRNA sense strand
agaaaagcaucuucaaugu

SEQ ID NO: 400918 - RNA, 19 nt, Homo sapiens
  misc_RNA (1)...(19): siRNA sense strand
uugcaggucuauuccuuau

SEQ ID NO: 400919 - RNA, 19 nt, Homo sapiens
  misc_RNA (1)...(19): siRNA sense strand
uuucaucugugcugucuuc

SEQ ID NO: 400920 - RNA, 19 nt, Homo sapiens
  misc_RNA (1)...(19): siRNA sense strand
ugcaaccucuagugacaaa

SEQ ID NO: 400921 - RNA, 19 nt, Homo sapiens
  misc_RNA (1)...(19): siRNA sense strand
aaaagcaucuucaaugucu

SEQ ID NO: 400922 - RNA, 19 nt, Homo sapiens
  misc_RNA (1)...(19): siRNA sense strand
gacaaaguacaggaagaaa

SEQ ID NO: 400923 - RNA, 19 nt, Homo sapiens
  misc_RNA (1)...(19): siRNA sense strand
gggcacaguccucacuuuc

SEQ ID NO: 400924 - RNA, 19 nt, Homo sapiens
  misc_RNA (1)...(19): siRNA sense strand
cucuggaccuugcugagua

SEQ ID NO: 400925 - RNA, 19 nt, Homo sapiens
  misc_RNA (1)...(19): siRNA sense strand
aaauugcaaccucuaguga

SEQ ID NO: 400926 - RNA, 19 nt, Homo sapiens
  misc_RNA (1)...(19): siRNA sense strand
acaaaguacaggaagaaau

SEQ ID NO: 400927 - RNA, 19 nt, Homo sapiens
  misc_RNA (1)...(19): siRNA sense strand
guacaggaagaaauugaag

SEQ ID NO: 400928 - RNA, 19 nt, Homo sapiens
  misc_RNA (1)...(19): siRNA sense strand
agaaggccauagacuacug

SEQ ID NO: 400929 - RNA, 19 nt, Homo sapiens
  misc_RNA (1)...(19): siRNA sense strand
caaccucuagugacaaagu

SEQ ID NO: 400930 - RNA, 19 nt, Homo sapiens
  misc_RNA (1)...(19): siRNA sense strand
cgagcucauugccuucaug

SEQ ID NO: 400931 - RNA, 19 nt, Homo sapiens
  misc_RNA (1)...(19): siRNA sense strand
aguccucacuuucaucugu

SEQ ID NO: 400932 - RNA, 19 nt, Homo sapiens
  misc_RNA (1)...(19): siRNA sense strand
aaccucuagugacaaagua

SEQ ID NO: 400933 - RNA, 19 nt, Homo sapiens
  misc_RNA (1)...(19): siRNA sense strand
aauugcaggucuauuccuu

SEQ ID NO: 400934 - RNA, 19 nt, Homo sapiens
  misc_RNA (1)...(19): siRNA sense strand
caaggaauugcaggucuau

SEQ ID NO: 400935 - RNA, 19 nt, Homo sapiens
  misc_RNA (1)...(19): siRNA sense strand
gaaaagcaucuucaauguc

SEQ ID NO: 400936 - RNA, 19 nt, Homo sapiens
  misc_RNA (1)...(19): siRNA sense strand
gaaggccauagacuacugu

SEQ ID NO: 400937 - RNA, 19 nt, Homo sapiens
  misc_RNA (1)...(19): siRNA sense strand
ugugggcuguugcaaggaa

SEQ ID NO: 400938 - RNA, 19 nt, Homo sapiens
  misc_RNA (1)...(19): siRNA sense strand
ggcacaguccucacuuuca

SEQ ID NO: 400939 - RNA, 19 nt, Homo sapiens
  misc_RNA (1)...(19): siRNA sense strand
caaugugccuuaacaagaa

SEQ ID NO: 400940 - RNA, 19 nt, Homo sapiens
  misc_RNA (1)...(19): siRNA sense strand
gaaacucucugcagaacag

SEQ ID NO: 400941 - RNA, 19 nt, Homo sapiens
  misc_RNA (1)...(19): siRNA sense strand
caagaaggguuugaucauc

SEQ ID NO: 400942 - RNA, 19 nt, Homo sapiens
  misc_RNA (1)...(19): siRNA sense strand
uacagagccuugauggaua

SEQ ID NO: 400943 - RNA, 19 nt, Homo sapiens
  misc_RNA (1)...(19): siRNA sense strand
ccaaugcuccaccugcuua

SEQ ID NO: 400944 - RNA, 19 nt, Homo sapiens
  misc_RNA (1)...(19): siRNA sense strand
acaagaagaugcccacaag

SEQ ID NO: 400945 - RNA, 19 nt, Homo sapiens
  misc_RNA (1)...(19): siRNA sense strand
guagaagacgaaauggaua

SEQ ID NO: 400946 - RNA, 19 nt, Homo sapiens
  misc_RNA (1)...(19): siRNA sense strand
acagagccuugauggauaa

SEQ ID NO: 400947 - RNA, 19 nt, Homo sapiens
  misc_RNA (1)...(19): siRNA sense strand
ggauaaaagucuucauguu

SEQ ID NO: 400948 - RNA, 19 nt, Homo sapiens
  misc_RNA (1)...(19): siRNA sense strand
gauaaaagucuucauguug

SEQ ID NO: 400949 - RNA, 19 nt, Homo sapiens
  misc_RNA (1)...(19): siRNA sense strand
gaacagucaccaccaccuu

SEQ ID NO: 400950 - RNA, 19 nt, Homo sapiens
  misc_RNA (1)...(19): siRNA sense strand
gcucaucggcuguugguau

SEQ ID NO: 400951 - RNA, 19 nt, Homo sapiens
  misc_RNA (1)...(19): siRNA sense strand
ucaaugugccuuaacaaga

SEQ ID NO: 400952 - RNA, 19 nt, Homo sapiens
  misc_RNA (1)...(19): siRNA sense strand
aagaagaugcccacaagaa

SEQ ID NO: 400953 - RNA, 19 nt, Homo sapiens
  misc_RNA (1)...(19): siRNA sense strand
caagagaagaugcucacuu

SEQ ID NO: 400954 - RNA, 19 nt, Homo sapiens
  misc_RNA (1)...(19): siRNA sense strand
aagacgaaauggauacaga

SEQ ID NO: 400955 - RNA, 19 nt, Homo sapiens
  misc_RNA (1)...(19): siRNA sense strand
cagcaaagugucucuucaa

SEQ ID NO: 400956 - RNA, 19 nt, Homo sapiens
  misc_RNA (1)...(19): siRNA sense strand
auacagagccuugauggau

SEQ ID NO: 400957 - RNA, 19 nt, Homo sapiens
  misc_RNA (1)...(19): siRNA sense strand
acagcaaagugucucuuca

SEQ ID NO: 400958 - RNA, 19 nt, Homo sapiens
  misc_RNA (1)...(19): siRNA sense strand
ccacaagaaggguuugauc

SEQ ID NO: 400959 - RNA, 19 nt, Homo sapiens
  misc_RNA (1)...(19): siRNA sense strand
caagaagaugcccacaaga

SEQ ID NO: 400960 - RNA, 19 nt, Homo sapiens
  misc_RNA (1)...(19): siRNA sense strand
cacaagaaggguuugauca

SEQ ID NO: 400961 - RNA, 19 nt, Homo sapiens
  misc_RNA (1)...(19): siRNA sense strand
caucggcuguugguauugu

SEQ ID NO: 400962 - RNA, 19 nt, Homo sapiens
  misc_RNA (1)...(19): siRNA sense strand
gaucaucgggacagcaaag

SEQ ID NO: 400963 - RNA, 19 nt, Homo sapiens
  misc_RNA (1)...(19): siRNA sense strand
uauuguagaagacgaaaug

SEQ ID NO: 400964 - RNA, 19 nt, Homo sapiens
  misc_RNA (1)...(19): siRNA sense strand
uguagaagacgaaauggau

SEQ ID NO: 400965 - RNA, 19 nt, Homo sapiens
  misc_RNA (1)...(19): siRNA sense strand
cucaucggcuguugguauu

SEQ ID NO: 400966 - RNA, 19 nt, Homo sapiens
  misc_RNA (1)...(19): siRNA sense strand
gauacagagccuugaugga

SEQ ID NO: 400967 - RNA, 19 nt, Homo sapiens
  misc_RNA (1)...(19): siRNA sense strand
gcucacuucaucuaugguu

SEQ ID NO: 400968 - RNA, 19 nt, Homo sapiens
  misc_RNA (1)...(19): siRNA sense strand
gggcacggccacucuuaca

SEQ ID NO: 400969 - RNA, 19 nt, Homo sapiens
  misc_RNA (1)...(19): siRNA sense strand
cauguuggcacucaaugug

SEQ ID NO: 400970 - RNA, 19 nt, Homo sapiens
  misc_RNA (1)...(19): siRNA sense strand
aacagucaccaccaccuua

SEQ ID NO: 400971 - RNA, 19 nt, Homo sapiens
  misc_RNA (1)...(19): siRNA sense strand
caucgggacagcaaagugu

SEQ ID NO: 400972 - RNA, 19 nt, Homo sapiens
  misc_RNA (1)...(19): siRNA sense strand
acaagaaggguuugaucau

SEQ ID NO: 400973 - RNA, 19 nt, Homo sapiens
  misc_RNA (1)...(19): siRNA sense strand
ggcuguugguauuguagaa

SEQ ID NO: 400974 - RNA, 19 nt, Homo sapiens
  misc_RNA (1)...(19): siRNA sense strand
gauccugggagucuuacug

SEQ ID NO: 400975 - RNA, 19 nt, Homo sapiens
  misc_RNA (1)...(19): siRNA sense strand
agaagaugcccacaagaag

SEQ ID NO: 400976 - RNA, 19 nt, Homo sapiens
  misc_RNA (1)...(19): siRNA sense strand
ccaccaccuuauucaccuu

SEQ ID NO: 400977 - RNA, 19 nt, Homo sapiens
  misc_RNA (1)...(19): siRNA sense strand
gaaagaauuuguccaacuu

SEQ ID NO: 400978 - RNA, 19 nt, Homo sapiens
  misc_RNA (1)...(19): siRNA sense strand
ggaacucgauuuauauuug

SEQ ID NO: 400979 - RNA, 19 nt, Homo sapiens
  misc_RNA (1)...(19): siRNA sense strand
ggaaaguucuucauacuac

SEQ ID NO: 400980 - RNA, 19 nt, Homo sapiens
  misc_RNA (1)...(19): siRNA sense strand
caacuugucugcccugaug

SEQ ID NO: 400981 - RNA, 19 nt, Homo sapiens
  misc_RNA (1)...(19): siRNA sense strand
caagugacgcugacauuaa

SEQ ID NO: 400982 - RNA, 19 nt, Homo sapiens
  misc_RNA (1)...(19): siRNA sense strand
ucacugagcuaguaagagu

SEQ ID NO: 400983 - RNA, 19 nt, Homo sapiens
  misc_RNA (1)...(19): siRNA sense strand
gaacucgauuuauauuugg

SEQ ID NO: 400984 - RNA, 19 nt, Homo sapiens
  misc_RNA (1)...(19): siRNA sense strand
caaagcgccucaagucugu

SEQ ID NO: 400985 - RNA, 19 nt, Homo sapiens
  misc_RNA (1)...(19): siRNA sense strand
caaccacacugaagaaguc

SEQ ID NO: 400986 - RNA, 19 nt, Homo sapiens
  misc_RNA (1)...(19): siRNA sense strand
gcaacaccaucgacucuuc

SEQ ID NO: 400987 - RNA, 19 nt, Homo sapiens
  misc_RNA (1)...(19): siRNA sense strand
ucaagucuguggaggauga

SEQ ID NO: 400988 - RNA, 19 nt, Homo sapiens
  misc_RNA (1)...(19): siRNA sense strand
ggcaagaugcgaagaauug

SEQ ID NO: 400989 - RNA, 19 nt, Homo sapiens
  misc_RNA (1)...(19): siRNA sense strand
cgugaaggaugaauugcua

SEQ ID NO: 400990 - RNA, 19 nt, Homo sapiens
  misc_RNA (1)...(19): siRNA sense strand
aggagacgcugaaagaauu

SEQ ID NO: 400991 - RNA, 19 nt, Homo sapiens
  misc_RNA (1)...(19): siRNA sense strand
ccacaaagcgccucaaguc

SEQ ID NO: 400992 - RNA, 19 nt, Homo sapiens
  misc_RNA (1)...(19): siRNA sense strand
caaaguugcggaaagauau

SEQ ID NO: 400993 - RNA, 19 nt, Homo sapiens
  misc_RNA (1)...(19): siRNA sense strand
ggaaugccaucuccaacca

SEQ ID NO: 400994 - RNA, 19 nt, Homo sapiens
  misc_RNA (1)...(19): siRNA sense strand
gaaaguucuucauacuaca

SEQ ID NO: 400995 - RNA, 19 nt, Homo sapiens
  misc_RNA (1)...(19): siRNA sense strand
aaccagaggucaagcagaa

SEQ ID NO: 400996 - RNA, 19 nt, Homo sapiens
  misc_RNA (1)...(19): siRNA sense strand
ucaccgaccugucauuaca

SEQ ID NO: 400997 - RNA, 19 nt, Homo sapiens
  misc_RNA (1)...(19): siRNA sense strand
gcaaugaggaggucuuuac

SEQ ID NO: 400998 - RNA, 19 nt, Homo sapiens
  misc_RNA (1)...(19): siRNA sense strand
ccaagugacgcugacauua

SEQ ID NO: 400999 - RNA, 19 nt, Homo sapiens
  misc_RNA (1)...(19): siRNA sense strand
caccaucgacucuucauuu

SEQ ID NO: 401000 - RNA, 19 nt, Homo sapiens
  misc_RNA (1)...(19): siRNA sense strand
agagagccgugaaggauga

SEQ ID NO: 401001 - RNA, 19 nt, Homo sapiens
  misc_RNA (1)...(19): siRNA sense strand
gcaaggugcacaacccauu

SEQ ID NO: 401002 - RNA, 19 nt, Homo sapiens
  misc_RNA (1)...(19): siRNA sense strand
ugaaagaauuuguccaacu

SEQ ID NO: 401003 - RNA, 19 nt, Homo sapiens
  misc_RNA (1)...(19): siRNA sense strand
ucaaguggauggcaugaag

SEQ ID NO: 401004 - RNA, 19 nt, Homo sapiens
  misc_RNA (1)...(19): siRNA sense strand
caucucgacuucuggcaaa

SEQ ID NO: 401005 - RNA, 19 nt, Homo sapiens
  misc_RNA (1)...(19): siRNA sense strand
ggaaguggcagucagucaa

SEQ ID NO: 401006 - RNA, 19 nt, Homo sapiens
  misc_RNA (1)...(19): siRNA sense strand
gaugaauugcuaagugaaa

SEQ ID NO: 401007 - RNA, 19 nt, Homo sapiens
  misc_RNA (1)...(19): siRNA sense strand
ucucagauuuggaaaguuc

SEQ ID NO: 401008 - RNA, 19 nt, Homo sapiens
  misc_RNA (1)...(19): siRNA sense strand
gcaggaacuggcccaaauu

SEQ ID NO: 401009 - RNA, 19 nt, Homo sapiens
  misc_RNA (1)...(19): siRNA sense strand
ccgaauaucgagaggauuu

SEQ ID NO: 401010 - RNA, 19 nt, Homo sapiens
  misc_RNA (1)...(19): siRNA sense strand
aaagauauccgacccgaau

SEQ ID NO: 401011 - RNA, 19 nt, Homo sapiens
  misc_RNA (1)...(19): siRNA sense strand
aaaccuccauguuguguuc

SEQ ID NO: 401012 - RNA, 19 nt, Homo sapiens
  misc_RNA (1)...(19): siRNA sense strand
gcugaaagaauuuguccaa

SEQ ID NO: 401013 - RNA, 19 nt, Homo sapiens
  misc_RNA (1)...(19): siRNA sense strand
caucaccgaccugucauua

SEQ ID NO: 401014 - RNA, 19 nt, Homo sapiens
  misc_RNA (1)...(19): siRNA sense strand
gcagcagauucaagucaau

SEQ ID NO: 401015 - RNA, 19 nt, Homo sapiens
  misc_RNA (1)...(19): siRNA sense strand
gcgagcgccuuguaaaguc

SEQ ID NO: 401016 - RNA, 19 nt, Homo sapiens
  misc_RNA (1)...(19): siRNA sense strand
aggaugaauugcuaaguga

SEQ ID NO: 401017 - RNA, 19 nt, Homo sapiens
  misc_RNA (1)...(19): siRNA sense strand
aaggaugaauugcuaagug

SEQ ID NO: 401018 - RNA, 19 nt, Homo sapiens
  misc_RNA (1)...(19): siRNA sense strand
cagcaucaccgaccuguca

SEQ ID NO: 401019 - RNA, 19 nt, Homo sapiens
  misc_RNA (1)...(19): siRNA sense strand
gguuggaccuuguuauggu

SEQ ID NO: 401020 - RNA, 19 nt, Homo sapiens
  misc_RNA (1)...(19): siRNA sense strand
cauguuguguucuuuccaa

SEQ ID NO: 401021 - RNA, 19 nt, Homo sapiens
  misc_RNA (1)...(19): siRNA sense strand
gagcaaugaggaggucuuu

SEQ ID NO: 401022 - RNA, 19 nt, Homo sapiens
  misc_RNA (1)...(19): siRNA sense strand
caggaacuggcccaaauuu

SEQ ID NO: 401023 - RNA, 19 nt, Homo sapiens
  misc_RNA (1)...(19): siRNA sense strand
gcaagaugcgaagaauuga

SEQ ID NO: 401024 - RNA, 19 nt, Homo sapiens
  misc_RNA (1)...(19): siRNA sense strand
gaagaagucggagaagucu

SEQ ID NO: 401025 - RNA, 19 nt, Homo sapiens
  misc_RNA (1)...(19): siRNA sense strand
gaauuuguccaacuugucu

SEQ ID NO: 401026 - RNA, 19 nt, Homo sapiens
  misc_RNA (1)...(19): siRNA sense strand
ggagacgcugaaagaauuu

SEQ ID NO: 401027 - RNA, 19 nt, Homo sapiens
  misc_RNA (1)...(19): siRNA sense strand
gcaugcagcagauucaagu

SEQ ID NO: 401028 - RNA, 19 nt, Homo sapiens
  misc_RNA (1)...(19): siRNA sense strand
ugcaggaacuggcccaaau

SEQ ID NO: 401029 - RNA, 19 nt, Homo sapiens
  misc_RNA (1)...(19): siRNA sense strand
ggaccuuguuauggugauu

SEQ ID NO: 401030 - RNA, 19 nt, Homo sapiens
  misc_RNA (1)...(19): siRNA sense strand
cgacaucacccauuaucca

SEQ ID NO: 401031 - RNA, 19 nt, Homo sapiens
  misc_RNA (1)...(19): siRNA sense strand
uucccgacaucacccauua

SEQ ID NO: 401032 - RNA, 19 nt, Homo sapiens
  misc_RNA (1)...(19): siRNA sense strand
accaauagcugcaggaacu

SEQ ID NO: 401033 - RNA, 19 nt, Homo sapiens
  misc_RNA (1)...(19): siRNA sense strand
ucaagucaaucugaaaguc

SEQ ID NO: 401034 - RNA, 19 nt, Homo sapiens
  misc_RNA (1)...(19): siRNA sense strand
uguuaaggaacucgauuua

SEQ ID NO: 401035 - RNA, 19 nt, Homo sapiens
  misc_RNA (1)...(19): siRNA sense strand
cgagaggauuuuguucuua

SEQ ID NO: 401036 - RNA, 19 nt, Homo sapiens
  misc_RNA (1)...(19): siRNA sense strand
ccaaccacgucaacagaag

SEQ ID NO: 401037 - RNA, 19 nt, Homo sapiens
  misc_RNA (1)...(19): siRNA sense strand
caggagacgcugaaagaau

SEQ ID NO: 401038 - RNA, 19 nt, Homo sapiens
  misc_RNA (1)...(19): siRNA sense strand
ugaagaagucggagaaguc

SEQ ID NO: 401039 - RNA, 19 nt, Homo sapiens
  misc_RNA (1)...(19): siRNA sense strand
cuaguaagagugucacaga

SEQ ID NO: 401040 - RNA, 19 nt, Homo sapiens
  misc_RNA (1)...(19): siRNA sense strand
cgauuuauauuuggcauac

SEQ ID NO: 401041 - RNA, 19 nt, Homo sapiens
  misc_RNA (1)...(19): siRNA sense strand
gccaagugacgcugacauu

SEQ ID NO: 401042 - RNA, 19 nt, Homo sapiens
  misc_RNA (1)...(19): siRNA sense strand
gaaaagcguaugucaaaag

SEQ ID NO: 401043 - RNA, 19 nt, Homo sapiens
  misc_RNA (1)...(19): siRNA sense strand
gaaguggcagucagucaag

SEQ ID NO: 401044 - RNA, 19 nt, Homo sapiens
  misc_RNA (1)...(19): siRNA sense strand
ucuacgagcuccacaaagc

SEQ ID NO: 401045 - RNA, 19 nt, Homo sapiens
  misc_RNA (1)...(19): siRNA sense strand
uggaaaguucuucauacua

SEQ ID NO: 401046 - RNA, 19 nt, Homo sapiens
  misc_RNA (1)...(19): siRNA sense strand
ccaggaaugccaucuccaa

SEQ ID NO: 401047 - RNA, 19 nt, Homo sapiens
  misc_RNA (1)...(19): siRNA sense strand
ggcagucagucaaguggau

SEQ ID NO: 401048 - RNA, 19 nt, Homo sapiens
  misc_RNA (1)...(19): siRNA sense strand
gaaaggcaagaugcgaaga

SEQ ID NO: 401049 - RNA, 19 nt, Homo sapiens
  misc_RNA (1)...(19): siRNA sense strand
gccugggccuuacuucuca

SEQ ID NO: 401050 - RNA, 19 nt, Homo sapiens
  misc_RNA (1)...(19): siRNA sense strand
guuaaggaacucgauuuau

SEQ ID NO: 401051 - RNA, 19 nt, Homo sapiens
  misc_RNA (1)...(19): siRNA sense strand
aagaauuuguccaacuugu

SEQ ID NO: 401052 - RNA, 19 nt, Homo sapiens
  misc_RNA (1)...(19): siRNA sense strand
ugaaguggagccaggaaug

SEQ ID NO: 401053 - RNA, 19 nt, Homo sapiens
  misc_RNA (1)...(19): siRNA sense strand
gaaggaugaauugcuaagu

SEQ ID NO: 401054 - RNA, 19 nt, Homo sapiens
  misc_RNA (1)...(19): siRNA sense strand
ucucucagauuuggaaagu

SEQ ID NO: 401055 - RNA, 19 nt, Homo sapiens
  misc_RNA (1)...(19): siRNA sense strand
aaaagcguaugucaaaaga

SEQ ID NO: 401056 - RNA, 19 nt, Homo sapiens
  misc_RNA (1)...(19): siRNA sense strand
ggaugaauugcuaagugaa

SEQ ID NO: 401057 - RNA, 19 nt, Homo sapiens
  misc_RNA (1)...(19): siRNA sense strand
aagugacgcugacauuaag

SEQ ID NO: 401058 - RNA, 19 nt, Homo sapiens
  misc_RNA (1)...(19): siRNA sense strand
agagagagccgugaaggau

SEQ ID NO: 401059 - RNA, 19 nt, Homo sapiens
  misc_RNA (1)...(19): siRNA sense strand
caacaccaucgacucuuca

SEQ ID NO: 401060 - RNA, 19 nt, Homo sapiens
  misc_RNA (1)...(19): siRNA sense strand
gagccgugaaggaugaauu

SEQ ID NO: 401061 - RNA, 19 nt, Homo sapiens
  misc_RNA (1)...(19): siRNA sense strand
aaaggcaagaugcgaagaa

SEQ ID NO: 401062 - RNA, 19 nt, Homo sapiens
  misc_RNA (1)...(19): siRNA sense strand
ucggagaagucugguuuca

SEQ ID NO: 401063 - RNA, 19 nt, Homo sapiens
  misc_RNA (1)...(19): siRNA sense strand
gugggcaucucgacuucug

SEQ ID NO: 401064 - RNA, 19 nt, Homo sapiens
  misc_RNA (1)...(19): siRNA sense strand
acauagggguuucuguuaa

SEQ ID NO: 401065 - RNA, 19 nt, Homo sapiens
  misc_RNA (1)...(19): siRNA sense strand
ccucuacgagcuccacaaa

SEQ ID NO: 401066 - RNA, 19 nt, Homo sapiens
  misc_RNA (1)...(19): siRNA sense strand
caaggugcacaacccauuc

SEQ ID NO: 401067 - RNA, 19 nt, Homo sapiens
  misc_RNA (1)...(19): siRNA sense strand
ucucacccaggaugaauuu

SEQ ID NO: 401068 - RNA, 19 nt, Homo sapiens
  misc_RNA (1)...(19): siRNA sense strand
ggugaggagccauuuuaua

SEQ ID NO: 401069 - RNA, 19 nt, Homo sapiens
  misc_RNA (1)...(19): siRNA sense strand
agucggagaagucugguuu

SEQ ID NO: 401070 - RNA, 19 nt, Homo sapiens
  misc_RNA (1)...(19): siRNA sense strand
gaaguggagccaggaaugc

SEQ ID NO: 401071 - RNA, 19 nt, Homo sapiens
  misc_RNA (1)...(19): siRNA sense strand
gagaggauuuuguucuuac

SEQ ID NO: 401072 - RNA, 19 nt, Homo sapiens
  misc_RNA (1)...(19): siRNA sense strand
cugaagaagucggagaagu

SEQ ID NO: 401073 - RNA, 19 nt, Homo sapiens
  misc_RNA (1)...(19): siRNA sense strand
uuuggaaaguucuucauac

SEQ ID NO: 401074 - RNA, 19 nt, Homo sapiens
  misc_RNA (1)...(19): siRNA sense strand
ggauuuuguucuuacaguu

SEQ ID NO: 401075 - RNA, 19 nt, Homo sapiens
  misc_RNA (1)...(19): siRNA sense strand
ccugguaccugggauaaaa

SEQ ID NO: 401076 - RNA, 19 nt, Homo sapiens
  misc_RNA (1)...(19): siRNA sense strand
ugcagcagauucaagucaa

SEQ ID NO: 401077 - RNA, 19 nt, Homo sapiens
  misc_RNA (1)...(19): siRNA sense strand
ucaaggagcuggaccucua

SEQ ID NO: 401078 - RNA, 19 nt, Homo sapiens
  misc_RNA (1)...(19): siRNA sense strand
ggacagggaugggcucuga

SEQ ID NO: 401079 - RNA, 19 nt, Homo sapiens
  misc_RNA (1)...(19): siRNA sense strand
ucacugagcucauccaagu

SEQ ID NO: 401080 - RNA, 19 nt, Homo sapiens
  misc_RNA (1)...(19): siRNA sense strand
agacagagauggacaaguc

SEQ ID NO: 401081 - RNA, 19 nt, Homo sapiens
  misc_RNA (1)...(19): siRNA sense strand
gaacaggacccaacuucuc

SEQ ID NO: 401082 - RNA, 19 nt, Homo sapiens
  misc_RNA (1)...(19): siRNA sense strand
ggagcaagcggcacaaauc

SEQ ID NO: 401083 - RNA, 19 nt, Homo sapiens
  misc_RNA (1)...(19): siRNA sense strand
gagcaucaccggcaagaag

SEQ ID NO: 401084 - RNA, 19 nt, Homo sapiens
  misc_RNA (1)...(19): siRNA sense strand
ggacaagucaccauucaac

SEQ ID NO: 401085 - RNA, 19 nt, Homo sapiens
  misc_RNA (1)...(19): siRNA sense strand
gcacuggccucagaagaac

SEQ ID NO: 401086 - RNA, 19 nt, Homo sapiens
  misc_RNA (1)...(19): siRNA sense strand
gcgagaagcccgaggucaa

SEQ ID NO: 401087 - RNA, 19 nt, Homo sapiens
  misc_RNA (1)...(19): siRNA sense strand
ugagcgagaugcagagcaa

SEQ ID NO: 401088 - RNA, 19 nt, Homo sapiens
  misc_RNA (1)...(19): siRNA sense strand
agaagcggaugucgaagga

SEQ ID NO: 401089 - RNA, 19 nt, Homo sapiens
  misc_RNA (1)...(19): siRNA sense strand
gaggacagcaagcccauca

SEQ ID NO: 401090 - RNA, 19 nt, Homo sapiens
  misc_RNA (1)...(19): siRNA sense strand
ugaagaagacagagaugga

SEQ ID NO: 401091 - RNA, 19 nt, Homo sapiens
  misc_RNA (1)...(19): siRNA sense strand
gcucugcauuucccuacga

SEQ ID NO: 401092 - RNA, 19 nt, Homo sapiens
  misc_RNA (1)...(19): siRNA sense strand
cagcgucacugagcucauc

SEQ ID NO: 401093 - RNA, 19 nt, Homo sapiens
  misc_RNA (1)...(19): siRNA sense strand
uggccaagcugcgcaagga

SEQ ID NO: 401094 - RNA, 19 nt, Homo sapiens
  misc_RNA (1)...(19): siRNA sense strand
ggaacaggacccaacuucu

SEQ ID NO: 401095 - RNA, 19 nt, Homo sapiens
  misc_RNA (1)...(19): siRNA sense strand
ggucauggucauccuguuc

SEQ ID NO: 401096 - RNA, 19 nt, Homo sapiens
  misc_RNA (1)...(19): siRNA sense strand
gcaacuggacggaggacau

SEQ ID NO: 401097 - RNA, 19 nt, Homo sapiens
  misc_RNA (1)...(19): siRNA sense strand
cccaggacccgcucaaaga

SEQ ID NO: 401098 - RNA, 19 nt, Homo sapiens
  misc_RNA (1)...(19): siRNA sense strand
caacuggacggaggacaug

SEQ ID NO: 401099 - RNA, 19 nt, Homo sapiens
  misc_RNA (1)...(19): siRNA sense strand
aagcgcaaguacuucaaga

SEQ ID NO: 401100 - RNA, 19 nt, Homo sapiens
  misc_RNA (1)...(19): siRNA sense strand
gaagacagagauggacaag

SEQ ID NO: 401101 - RNA, 19 nt, Homo sapiens
  misc_RNA (1)...(19): siRNA sense strand
acgagaagcggaugucgaa

SEQ ID NO: 401102 - RNA, 19 nt, Homo sapiens
  misc_RNA (1)...(19): siRNA sense strand
cuacccaccucaucucaac

SEQ ID NO: 401103 - RNA, 19 nt, Homo sapiens
  misc_RNA (1)...(19): siRNA sense strand
gggagcaagcggcacaaau

SEQ ID NO: 401104 - RNA, 19 nt, Homo sapiens
  misc_RNA (1)...(19): siRNA sense strand
gagcaagcggcacaaaucg

SEQ ID NO: 401105 - RNA, 19 nt, Homo sapiens
  misc_RNA (1)...(19): siRNA sense strand
gacaagucaccauucaaca

SEQ ID NO: 401106 - RNA, 19 nt, Homo sapiens
  misc_RNA (1)...(19): siRNA sense strand
ccaggacccgcucaaagau

SEQ ID NO: 401107 - RNA, 19 nt, Homo sapiens
  misc_RNA (1)...(19): siRNA sense strand
cgggcucgauggaggaaga

SEQ ID NO: 401108 - RNA, 19 nt, Homo sapiens
  misc_RNA (1)...(19): siRNA sense strand
guccuccgcucugcauuuc

SEQ ID NO: 401109 - RNA, 19 nt, Homo sapiens
  misc_RNA (1)...(19): siRNA sense strand
gaugaguuccacccguuca

SEQ ID NO: 401110 - RNA, 19 nt, Homo sapiens
  misc_RNA (1)...(19): siRNA sense strand
ccgaaaggaugaagaguua

SEQ ID NO: 401111 - RNA, 19 nt, Homo sapiens
  misc_RNA (1)...(19): siRNA sense strand
gaaccaagcagcaggauug

SEQ ID NO: 401112 - RNA, 19 nt, Homo sapiens
  misc_RNA (1)...(19): siRNA sense strand
uaaugcagaugcugaagaa

SEQ ID NO: 401113 - RNA, 19 nt, Homo sapiens
  misc_RNA (1)...(19): siRNA sense strand
gaaaggaugaagaguuaga

SEQ ID NO: 401114 - RNA, 19 nt, Homo sapiens
  misc_RNA (1)...(19): siRNA sense strand
gaucauugccgaggacuau

SEQ ID NO: 401115 - RNA, 19 nt, Homo sapiens
  misc_RNA (1)...(19): siRNA sense strand
caagguagacagagagaga

SEQ ID NO: 401116 - RNA, 19 nt, Homo sapiens
  misc_RNA (1)...(19): siRNA sense strand
ggaccgcagccaugagaaa

SEQ ID NO: 401117 - RNA, 19 nt, Homo sapiens
  misc_RNA (1)...(19): siRNA sense strand
gcguggcuaugacaaggua

SEQ ID NO: 401118 - RNA, 19 nt, Homo sapiens
  misc_RNA (1)...(19): siRNA sense strand
ccugcgggcucccuuacua

SEQ ID NO: 401119 - RNA, 19 nt, Homo sapiens
  misc_RNA (1)...(19): siRNA sense strand
ccauggacccuagcucaua

SEQ ID NO: 401120 - RNA, 19 nt, Homo sapiens
  misc_RNA (1)...(19): siRNA sense strand
ccgcagccaugagaaacua

SEQ ID NO: 401121 - RNA, 19 nt, Homo sapiens
  misc_RNA (1)...(19): siRNA sense strand
aagaagcucagaagcagua

SEQ ID NO: 401122 - RNA, 19 nt, Homo sapiens
  misc_RNA (1)...(19): siRNA sense strand
cgaggacuaugacgaugau

SEQ ID NO: 401123 - RNA, 19 nt, Homo sapiens
  misc_RNA (1)...(19): siRNA sense strand
cagaagcaguaaugcagau

SEQ ID NO: 401124 - RNA, 19 nt, Homo sapiens
  misc_RNA (1)...(19): siRNA sense strand
gcagacacagaccuuguau

SEQ ID NO: 401125 - RNA, 19 nt, Homo sapiens
  misc_RNA (1)...(19): siRNA sense strand
cuacuggaaugcagacaca

SEQ ID NO: 401126 - RNA, 19 nt, Homo sapiens
  misc_RNA (1)...(19): siRNA sense strand
guaaugcagaugcugaaga

SEQ ID NO: 401127 - RNA, 19 nt, Homo sapiens
  misc_RNA (1)...(19): siRNA sense strand
gaaugcagacacagaccuu

SEQ ID NO: 401128 - RNA, 19 nt, Homo sapiens
  misc_RNA (1)...(19): siRNA sense strand
gccgaaaggaugaagaguu

SEQ ID NO: 401129 - RNA, 19 nt, Homo sapiens
  misc_RNA (1)...(19): siRNA sense strand
ccaaaucggccaagaagcu

SEQ ID NO: 401130 - RNA, 19 nt, Homo sapiens
  misc_RNA (1)...(19): siRNA sense strand
acgaugauccuguggacua

SEQ ID NO: 401131 - RNA, 19 nt, Homo sapiens
  misc_RNA (1)...(19): siRNA sense strand
gccaagaagcucagaagca

SEQ ID NO: 401132 - RNA, 19 nt, Homo sapiens
  misc_RNA (1)...(19): siRNA sense strand
gcucagaagcaguaaugca

SEQ ID NO: 401133 - RNA, 19 nt, Homo sapiens
  misc_RNA (1)...(19): siRNA sense strand
ccagaggaagagaucauug

SEQ ID NO: 401134 - RNA, 19 nt, Homo sapiens
  misc_RNA (1)...(19): siRNA sense strand
cauggacccuagcucauac

SEQ ID NO: 401135 - RNA, 19 nt, Homo sapiens
  misc_RNA (1)...(19): siRNA sense strand
ggaucgagagcguggcuau

SEQ ID NO: 401136 - RNA, 19 nt, Homo sapiens
  misc_RNA (1)...(19): siRNA sense strand
caagagcaagaaggcagua

SEQ ID NO: 401137 - RNA, 19 nt, Homo sapiens
  misc_RNA (1)...(19): siRNA sense strand
aagcucagaagcaguaaug

SEQ ID NO: 401138 - RNA, 19 nt, Homo sapiens
  misc_RNA (1)...(19): siRNA sense strand
ccgggaagagggcaaagaa

SEQ ID NO: 401139 - RNA, 19 nt, Homo sapiens
  misc_RNA (1)...(19): siRNA sense strand
gacaagguagacagagaga

SEQ ID NO: 401140 - RNA, 19 nt, Homo sapiens
  misc_RNA (1)...(19): siRNA sense strand
ggaccggagccaugacaag

SEQ ID NO: 401141 - RNA, 19 nt, Homo sapiens
  misc_RNA (1)...(19): siRNA sense strand
agacacagaccuuguaucc

SEQ ID NO: 401142 - RNA, 19 nt, Homo sapiens
  misc_RNA (1)...(19): siRNA sense strand
gagcaagaaggcaguaagc

SEQ ID NO: 401143 - RNA, 19 nt, Homo sapiens
  misc_RNA (1)...(19): siRNA sense strand
gaccggagccaugacaagu

SEQ ID NO: 401144 - RNA, 19 nt, Homo sapiens
  misc_RNA (1)...(19): siRNA sense strand
uaccaaaucggccaagaag

SEQ ID NO: 401145 - RNA, 19 nt, Homo sapiens
  misc_RNA (1)...(19): siRNA sense strand
ggcaguaagccgaaaggau

SEQ ID NO: 401146 - RNA, 19 nt, Homo sapiens
  misc_RNA (1)...(19): siRNA sense strand
gaccccaacuccgugguua

SEQ ID NO: 401147 - RNA, 19 nt, Homo sapiens
  misc_RNA (1)...(19): siRNA sense strand
gaaggcaguaagccgaaag

SEQ ID NO: 401148 - RNA, 19 nt, Homo sapiens
  misc_RNA (1)...(19): siRNA sense strand
agaaggcaguaagccgaaa

SEQ ID NO: 401149 - RNA, 19 nt, Homo sapiens
  misc_RNA (1)...(19): siRNA sense strand
ggacaggggccaugacaag

SEQ ID NO: 401150 - RNA, 19 nt, Homo sapiens
  misc_RNA (1)...(19): siRNA sense strand
uuaccaaaucggccaagaa

SEQ ID NO: 401151 - RNA, 19 nt, Homo sapiens
  misc_RNA (1)...(19): siRNA sense strand
gaacagcuauggaaugguu

SEQ ID NO: 401152 - RNA, 19 nt, Homo sapiens
  misc_RNA (1)...(19): siRNA sense strand
uagaagaccucguggauuc

SEQ ID NO: 401153 - RNA, 19 nt, Homo sapiens
  misc_RNA (1)...(19): siRNA sense strand
gcuauggaaugguuaaaga

SEQ ID NO: 401154 - RNA, 19 nt, Homo sapiens
  misc_RNA (1)...(19): siRNA sense strand
caaagaagcuccgucuaca

SEQ ID NO: 401155 - RNA, 19 nt, Homo sapiens
  misc_RNA (1)...(19): siRNA sense strand
gagcugaccuucuccuaca

SEQ ID NO: 401156 - RNA, 19 nt, Homo sapiens
  misc_RNA (1)...(19): siRNA sense strand
cgauagcacggaccaauua

SEQ ID NO: 401157 - RNA, 19 nt, Homo sapiens
  misc_RNA (1)...(19): siRNA sense strand
gcaaagaagcuccgucuac

SEQ ID NO: 401158 - RNA, 19 nt, Homo sapiens
  misc_RNA (1)...(19): siRNA sense strand
ggaacgacgacucugauuu

SEQ ID NO: 401159 - RNA, 19 nt, Homo sapiens
  misc_RNA (1)...(19): siRNA sense strand
ccaagaacccaacagauug

SEQ ID NO: 401160 - RNA, 19 nt, Homo sapiens
  misc_RNA (1)...(19): siRNA sense strand
gaacgacgacucugauuuu

SEQ ID NO: 401161 - RNA, 19 nt, Homo sapiens
  misc_RNA (1)...(19): siRNA sense strand
aggcucagaucgaccaaua

SEQ ID NO: 401162 - RNA, 19 nt, Homo sapiens
  misc_RNA (1)...(19): siRNA sense strand
gggagugauuggucuauuc

SEQ ID NO: 401163 - RNA, 19 nt, Homo sapiens
  misc_RNA (1)...(19): siRNA sense strand
ggucuucgcccacugcaaa

SEQ ID NO: 401164 - RNA, 19 nt, Homo sapiens
  misc_RNA (1)...(19): siRNA sense strand
gagccacgccuucuaggaa

SEQ ID NO: 401165 - RNA, 19 nt, Homo sapiens
  misc_RNA (1)...(19): siRNA sense strand
uacaagacgguuccaauuu

SEQ ID NO: 401166 - RNA, 19 nt, Homo sapiens
  misc_RNA (1)...(19): siRNA sense strand
cccaagaacccaacagauu

SEQ ID NO: 401167 - RNA, 19 nt, Homo sapiens
  misc_RNA (1)...(19): siRNA sense strand
gcucagaucgaccaauaug

SEQ ID NO: 401168 - RNA, 19 nt, Homo sapiens
  misc_RNA (1)...(19): siRNA sense strand
gggagcagacggaacguuu

SEQ ID NO: 401169 - RNA, 19 nt, Homo sapiens
  misc_RNA (1)...(19): siRNA sense strand
gaccuacgacuccgacuug

SEQ ID NO: 401170 - RNA, 19 nt, Homo sapiens
  misc_RNA (1)...(19): siRNA sense strand
ugagccacaucaaagcuaa

SEQ ID NO: 401171 - RNA, 19 nt, Homo sapiens
  misc_RNA (1)...(19): siRNA sense strand
ccaucucucucaggguuua

SEQ ID NO: 401172 - RNA, 19 nt, Homo sapiens
  misc_RNA (1)...(19): siRNA sense strand
uuacaagacgguuccaauu

SEQ ID NO: 401173 - RNA, 19 nt, Homo sapiens
  misc_RNA (1)...(19): siRNA sense strand
ggauggagccaacccuuuc

SEQ ID NO: 401174 - RNA, 19 nt, Homo sapiens
  misc_RNA (1)...(19): siRNA sense strand
ggacagugccucgauagca

SEQ ID NO: 401175 - RNA, 19 nt, Homo sapiens
  misc_RNA (1)...(19): siRNA sense strand
caaagccaaagccgaauga

SEQ ID NO: 401176 - RNA, 19 nt, Homo sapiens
  misc_RNA (1)...(19): siRNA sense strand
gguagaagaccucguggau

SEQ ID NO: 401177 - RNA, 19 nt, Homo sapiens
  misc_RNA (1)...(19): siRNA sense strand
ucucaggguuuaccgcaaa

SEQ ID NO: 401178 - RNA, 19 nt, Homo sapiens
  misc_RNA (1)...(19): siRNA sense strand
acaagacgguuccaauuuu

SEQ ID NO: 401179 - RNA, 19 nt, Homo sapiens
  misc_RNA (1)...(19): siRNA sense strand
ucuccuacaucgccuuuga

SEQ ID NO: 401180 - RNA, 19 nt, Homo sapiens
  misc_RNA (1)...(19): siRNA sense strand
ggagugauuggucuauuca

SEQ ID NO: 401181 - RNA, 19 nt, Homo sapiens
  misc_RNA (1)...(19): siRNA sense strand
caagcuggcccuccucuuc

SEQ ID NO: 401182 - RNA, 19 nt, Homo sapiens
  misc_RNA (1)...(19): siRNA sense strand
guagaagaccucguggauu

SEQ ID NO: 401183 - RNA, 19 nt, Homo sapiens
  misc_RNA (1)...(19): siRNA sense strand
uagcacggaccaauuagaa

SEQ ID NO: 401184 - RNA, 19 nt, Homo sapiens
  misc_RNA (1)...(19): siRNA sense strand
gagggaacgacgacucuga

SEQ ID NO: 401185 - RNA, 19 nt, Homo sapiens
  misc_RNA (1)...(19): siRNA sense strand
ggaagaacuggaccuacga

SEQ ID NO: 401186 - RNA, 19 nt, Homo sapiens
  misc_RNA (1)...(19): siRNA sense strand
ugguuugacucuucucauu

SEQ ID NO: 401187 - RNA, 19 nt, Homo sapiens
  misc_RNA (1)...(19): siRNA sense strand
uggcggaccugcuguacug

SEQ ID NO: 401188 - RNA, 19 nt, Homo sapiens
  misc_RNA (1)...(19): siRNA sense strand
guuaaagacaucauugcuu

SEQ ID NO: 401189 - RNA, 19 nt, Homo sapiens
  misc_RNA (1)...(19): siRNA sense strand
gcuaagauccgagcuaaaa

SEQ ID NO: 401190 - RNA, 19 nt, Homo sapiens
  misc_RNA (1)...(19): siRNA sense strand
ucagaucgaccaauaugug

SEQ ID NO: 401191 - RNA, 19 nt, Homo sapiens
  misc_RNA (1)...(19): siRNA sense strand
gagcagacggaacguuugu

SEQ ID NO: 401192 - RNA, 19 nt, Homo sapiens
  misc_RNA (1)...(19): siRNA sense strand
gggauggagccaacccuuu

SEQ ID NO: 401193 - RNA, 19 nt, Homo sapiens
  misc_RNA (1)...(19): siRNA sense strand
caagacgguuccaauuuug

SEQ ID NO: 401194 - RNA, 19 nt, Homo sapiens
  misc_RNA (1)...(19): siRNA sense strand
ccacaucaaagcuaagauc

SEQ ID NO: 401195 - RNA, 19 nt, Homo sapiens
  misc_RNA (1)...(19): siRNA sense strand
ggagcagacggaacguuug

SEQ ID NO: 401196 - RNA, 19 nt, Homo sapiens
  misc_RNA (1)...(19): siRNA sense strand
ccucguggauucccucaag

SEQ ID NO: 401197 - RNA, 19 nt, Homo sapiens
  misc_RNA (1)...(19): siRNA sense strand
ggaccuacgacuccgacuu

SEQ ID NO: 401198 - RNA, 19 nt, Homo sapiens
  misc_RNA (1)...(19): siRNA sense strand
cuucgugggugccaucuuc

SEQ ID NO: 401199 - RNA, 19 nt, Homo sapiens
  misc_RNA (1)...(19): siRNA sense strand
ggucuucacaggccugaug

SEQ ID NO: 401200 - RNA, 19 nt, Homo sapiens
  misc_RNA (1)...(19): siRNA sense strand
gcccuccucuucuacaucu

SEQ ID NO: 401201 - RNA, 19 nt, Homo sapiens
  misc_RNA (1)...(19): siRNA sense strand
ucuaggaacagcuauggaa

SEQ ID NO: 401202 - RNA, 19 nt, Homo sapiens
  misc_RNA (1)...(19): siRNA sense strand
guuugacucuucucauucu

SEQ ID NO: 401203 - RNA, 19 nt, Homo sapiens
  misc_RNA (1)...(19): siRNA sense strand
gagccgauauggggaguaa

SEQ ID NO: 401204 - RNA, 19 nt, Homo sapiens
  misc_RNA (1)...(19): siRNA sense strand
gggaacgacgacucugauu

SEQ ID NO: 401205 - RNA, 19 nt, Homo sapiens
  misc_RNA (1)...(19): siRNA sense strand
uggaaugguuaaagacauc

SEQ ID NO: 401206 - RNA, 19 nt, Homo sapiens
  misc_RNA (1)...(19): siRNA sense strand
ccaucccgaucgcgagauu

SEQ ID NO: 401207 - RNA, 19 nt, Homo sapiens
  misc_RNA (1)...(19): siRNA sense strand
caacuccugauuccacaga

SEQ ID NO: 401208 - RNA, 19 nt, Homo sapiens
  misc_RNA (1)...(19): siRNA sense strand
ggagcgagagccaguaagg

SEQ ID NO: 401209 - RNA, 19 nt, Homo sapiens
  misc_RNA (1)...(19): siRNA sense strand
aggaacagcuauggaaugg

SEQ ID NO: 401210 - RNA, 19 nt, Homo sapiens
  misc_RNA (1)...(19): siRNA sense strand
ggagccacgccuucuagga

SEQ ID NO: 401211 - RNA, 19 nt, Homo sapiens
  misc_RNA (1)...(19): siRNA sense strand
ccaaucaguugagccacau

SEQ ID NO: 401212 - RNA, 19 nt, Homo sapiens
  misc_RNA (1)...(19): siRNA sense strand
cgacgacucugauuuucga

SEQ ID NO: 401213 - RNA, 19 nt, Homo sapiens
  misc_RNA (1)...(19): siRNA sense strand
cgaagagccauugcuggaa

SEQ ID NO: 401214 - RNA, 19 nt, Homo sapiens
  misc_RNA (1)...(19): siRNA sense strand
ccaaagccaaagccgaaug

SEQ ID NO: 401215 - RNA, 19 nt, Homo sapiens
  misc_RNA (1)...(19): siRNA sense strand
uaggaacagcuauggaaug

SEQ ID NO: 401216 - RNA, 19 nt, Homo sapiens
  misc_RNA (1)...(19): siRNA sense strand
cgccuuugaugguguagug

SEQ ID NO: 401217 - RNA, 19 nt, Homo sapiens
  misc_RNA (1)...(19): siRNA sense strand
cggaccugcuguacuggaa

SEQ ID NO: 401218 - RNA, 19 nt, Homo sapiens
  misc_RNA (1)...(19): siRNA sense strand
gauagcacggaccaauuag

SEQ ID NO: 401219 - RNA, 19 nt, Homo sapiens
  misc_RNA (1)...(19): siRNA sense strand
gguuugacucuucucauuc

SEQ ID NO: 401220 - RNA, 19 nt, Homo sapiens
  misc_RNA (1)...(19): siRNA sense strand
guacuucacugcuacauuc

SEQ ID NO: 401221 - RNA, 19 nt, Homo sapiens
  misc_RNA (1)...(19): siRNA sense strand
ggagguguguuccuuauuc

SEQ ID NO: 401222 - RNA, 19 nt, Homo sapiens
  misc_RNA (1)...(19): siRNA sense strand
ggaaagaucguguacuuca

SEQ ID NO: 401223 - RNA, 19 nt, Homo sapiens
  misc_RNA (1)...(19): siRNA sense strand
cgggaaagaucguguacuu

SEQ ID NO: 401224 - RNA, 19 nt, Homo sapiens
  misc_RNA (1)...(19): siRNA sense strand
ggacgacauugccuguaug

SEQ ID NO: 401225 - RNA, 19 nt, Homo sapiens
  misc_RNA (1)...(19): siRNA sense strand
gguggagagugucauguga

SEQ ID NO: 401226 - RNA, 19 nt, Homo sapiens
  misc_RNA (1)...(19): siRNA sense strand
ucuauuaccuggucaaguc

SEQ ID NO: 401227 - RNA, 19 nt, Homo sapiens
  misc_RNA (1)...(19): siRNA sense strand
gcggagguguguuccuuau

SEQ ID NO: 401228 - RNA, 19 nt, Homo sapiens
  misc_RNA (1)...(19): siRNA sense strand
cgacauugccuguaugauc

SEQ ID NO: 401229 - RNA, 19 nt, Homo sapiens
  misc_RNA (1)...(19): siRNA sense strand
caacaacaacugcuacaag

SEQ ID NO: 401230 - RNA, 19 nt, Homo sapiens
  misc_RNA (1)...(19): siRNA sense strand
gcugggugcuggucuacuu

SEQ ID NO: 401231 - RNA, 19 nt, Homo sapiens
  misc_RNA (1)...(19): siRNA sense strand
caacaccuacuacaucaug

SEQ ID NO: 401232 - RNA, 19 nt, Homo sapiens
  misc_RNA (1)...(19): siRNA sense strand
gcaugggcaucuucaucuu

SEQ ID NO: 401233 - RNA, 19 nt, Homo sapiens
  misc_RNA (1)...(19): siRNA sense strand
caugaagacugugccaaug

SEQ ID NO: 401234 - RNA, 19 nt, Homo sapiens
  misc_RNA (1)...(19): siRNA sense strand
gagcugaccgcuucaugga

SEQ ID NO: 401235 - RNA, 19 nt, Homo sapiens
  misc_RNA (1)...(19): siRNA sense strand
ccucagguguggauagaug

SEQ ID NO: 401236 - RNA, 19 nt, Homo sapiens
  misc_RNA (1)...(19): siRNA sense strand
cgaagaagagcgccgagaa

SEQ ID NO: 401237 - RNA, 19 nt, Homo sapiens
  misc_RNA (1)...(19): siRNA sense strand
ggacccagauuuucuuuuc

SEQ ID NO: 401238 - RNA, 19 nt, Homo sapiens
  misc_RNA (1)...(19): siRNA sense strand
uacaaccgcuucaacaaca

SEQ ID NO: 401239 - RNA, 19 nt, Homo sapiens
  misc_RNA (1)...(19): siRNA sense strand
gagcagggcgugcacaucu

SEQ ID NO: 401240 - RNA, 19 nt, Homo sapiens
  misc_RNA (1)...(19): siRNA sense strand
ggagaucuuccgccaugaa

SEQ ID NO: 401241 - RNA, 19 nt, Homo sapiens
  misc_RNA (1)...(19): siRNA sense strand
gaaagaucguguacuucac

SEQ ID NO: 401242 - RNA, 19 nt, Homo sapiens
  misc_RNA (1)...(19): siRNA sense strand
ccauggugaucgucuucua

SEQ ID NO: 401243 - RNA, 19 nt, Homo sapiens
  misc_RNA (1)...(19): siRNA sense strand
gaagaagagcgccgagaac

SEQ ID NO: 401244 - RNA, 19 nt, Homo sapiens
  misc_RNA (1)...(19): siRNA sense strand
gcuacaaccgcuucaacaa

SEQ ID NO: 401245 - RNA, 19 nt, Homo sapiens
  misc_RNA (1)...(19): siRNA sense strand
cauccuggcucucaucaac

SEQ ID NO: 401246 - RNA, 19 nt, Homo sapiens
  misc_RNA (1)...(19): siRNA sense strand
cuacuuccguuuccaaagg

SEQ ID NO: 401247 - RNA, 19 nt, Homo sapiens
  misc_RNA (1)...(19): siRNA sense strand
uggacgacauugccuguau

SEQ ID NO: 401248 - RNA, 19 nt, Homo sapiens
  misc_RNA (1)...(19): siRNA sense strand
cuacaaggacgccaucauc

SEQ ID NO: 401249 - RNA, 19 nt, Homo sapiens
  misc_RNA (1)...(19): siRNA sense strand
gagcucaggacgcagaugu

SEQ ID NO: 401250 - RNA, 19 nt, Homo sapiens
  misc_RNA (1)...(19): siRNA sense strand
ugcaacaccuacuacauca

SEQ ID NO: 401251 - RNA, 19 nt, Homo sapiens
  misc_RNA (1)...(19): siRNA sense strand
caaauccacgggaaagauc

SEQ ID NO: 401252 - RNA, 19 nt, Homo sapiens
  misc_RNA (1)...(19): siRNA sense strand
guacgucuuccagcuguuu

SEQ ID NO: 401253 - RNA, 19 nt, Homo sapiens
  misc_RNA (1)...(19): siRNA sense strand
acugggaggugacccuuug

SEQ ID NO: 401254 - RNA, 19 nt, Homo sapiens
  misc_RNA (1)...(19): siRNA sense strand
ucuuccagcuguuugacua

SEQ ID NO: 401255 - RNA, 19 nt, Homo sapiens
  misc_RNA (1)...(19): siRNA sense strand
ggcaucauuuacuaucuca

SEQ ID NO: 401256 - RNA, 19 nt, Homo sapiens
  misc_RNA (1)...(19): siRNA sense strand
acgagccgcuggucuacaa

SEQ ID NO: 401257 - RNA, 19 nt, Homo sapiens
  misc_RNA (1)...(19): siRNA sense strand
ucuucaacguuguguacua

SEQ ID NO: 401258 - RNA, 19 nt, Homo sapiens
  misc_RNA (1)...(19): siRNA sense strand
gacgacauugccuguauga

SEQ ID NO: 401259 - RNA, 19 nt, Homo sapiens
  misc_RNA (1)...(19): siRNA sense strand
ccaugaagacugugccaau

SEQ ID NO: 401260 - RNA, 19 nt, Homo sapiens
  misc_RNA (1)...(19): siRNA sense strand
ccgcuggucuacaacaaca

SEQ ID NO: 401261 - RNA, 19 nt, Homo sapiens
  misc_RNA (1)...(19): siRNA sense strand
ggacgcgccagauggacuu

SEQ ID NO: 401262 - RNA, 19 nt, Homo sapiens
  misc_RNA (1)...(19): siRNA sense strand
cggcggagguguguuccuu

SEQ ID NO: 401263 - RNA, 19 nt, Homo sapiens
  misc_RNA (1)...(19): siRNA sense strand
ggucaaauccacgggaaag

SEQ ID NO: 401264 - RNA, 19 nt, Homo sapiens
  misc_RNA (1)...(19): siRNA sense strand
ucaucgaucucuccauggu

SEQ ID NO: 401265 - RNA, 19 nt, Homo sapiens
  misc_RNA (1)...(19): siRNA sense strand
ugacugauggcgggaugua

SEQ ID NO: 401266 - RNA, 19 nt, Homo sapiens
  misc_RNA (1)...(19): siRNA sense strand
cgacagccaguuuguaggu

SEQ ID NO: 401267 - RNA, 19 nt, Homo sapiens
  misc_RNA (1)...(19): siRNA sense strand
gcucaggacgcagauguca

SEQ ID NO: 401268 - RNA, 19 nt, Homo sapiens
  misc_RNA (1)...(19): siRNA sense strand
ucaacguuguguacuacga

SEQ ID NO: 401269 - RNA, 19 nt, Homo sapiens
  misc_RNA (1)...(19): siRNA sense strand
caucuucaucuucaacguu

SEQ ID NO: 401270 - RNA, 19 nt, Homo sapiens
  misc_RNA (1)...(19): siRNA sense strand
guugugcccucugcuuugu

SEQ ID NO: 401271 - RNA, 19 nt, Homo sapiens
  misc_RNA (1)...(19): siRNA sense strand
ucaaauccacgggaaagau

SEQ ID NO: 401272 - RNA, 19 nt, Homo sapiens
  misc_RNA (1)...(19): siRNA sense strand
uaccuggucaaguccuuua

SEQ ID NO: 401273 - RNA, 19 nt, Homo sapiens
  misc_RNA (1)...(19): siRNA sense strand
aaauggugcugguccuucu

SEQ ID NO: 401274 - RNA, 19 nt, Homo sapiens
  misc_RNA (1)...(19): siRNA sense strand
caucauuuacuaucucaag

SEQ ID NO: 401275 - RNA, 19 nt, Homo sapiens
  misc_RNA (1)...(19): siRNA sense strand
ggaggaauccccauuuucu

SEQ ID NO: 401276 - RNA, 19 nt, Homo sapiens
  misc_RNA (1)...(19): siRNA sense strand
ccgagaacggcaucuauag

SEQ ID NO: 401277 - RNA, 19 nt, Homo sapiens
  misc_RNA (1)...(19): siRNA sense strand
cugcaacaccuacuacauc

SEQ ID NO: 401278 - RNA, 19 nt, Homo sapiens
  misc_RNA (1)...(19): siRNA sense strand
caucuucaacguuguguac

SEQ ID NO: 401279 - RNA, 19 nt, Homo sapiens
  misc_RNA (1)...(19): siRNA sense strand
ggucucgacagccaguuug

SEQ ID NO: 401280 - RNA, 19 nt, Homo sapiens
  misc_RNA (1)...(19): siRNA sense strand
cagugggaccagcuucuuu

SEQ ID NO: 401281 - RNA, 19 nt, Homo sapiens
  misc_RNA (1)...(19): siRNA sense strand
ggcggagguguguuccuua

SEQ ID NO: 401282 - RNA, 19 nt, Homo sapiens
  misc_RNA (1)...(19): siRNA sense strand
gaagacaacugugcugaug

SEQ ID NO: 401283 - RNA, 19 nt, Homo sapiens
  misc_RNA (1)...(19): siRNA sense strand
caacaaauucugccuauug

SEQ ID NO: 401284 - RNA, 19 nt, Homo sapiens
  misc_RNA (1)...(19): siRNA sense strand
gcacuugucucugcugugu

SEQ ID NO: 401285 - RNA, 19 nt, Homo sapiens
  misc_RNA (1)...(19): siRNA sense strand
cagcugcgcucuacucaug

SEQ ID NO: 401286 - RNA, 19 nt, Homo sapiens
  misc_RNA (1)...(19): siRNA sense strand
gggagaagcugagcaaucu

SEQ ID NO: 401287 - RNA, 19 nt, Homo sapiens
  misc_RNA (1)...(19): siRNA sense strand
cugagagccuccucgauua

SEQ ID NO: 401288 - RNA, 19 nt, Homo sapiens
  misc_RNA (1)...(19): siRNA sense strand
gcugagagccuccucgauu

SEQ ID NO: 401289 - RNA, 19 nt, Homo sapiens
  misc_RNA (1)...(19): siRNA sense strand
gaagggagaagcugagcaa

SEQ ID NO: 401290 - RNA, 19 nt, Homo sapiens
  misc_RNA (1)...(19): siRNA sense strand
gggccuaguucuugcuuug

SEQ ID NO: 401291 - RNA, 19 nt, Homo sapiens
  misc_RNA (1)...(19): siRNA sense strand
gaacagcugcgcucuacuc

SEQ ID NO: 401292 - RNA, 19 nt, Homo sapiens
  misc_RNA (1)...(19): siRNA sense strand
aacaaauucugccuauuga

SEQ ID NO: 401293 - RNA, 19 nt, Homo sapiens
  misc_RNA (1)...(19): siRNA sense strand
ucaagggccucuucuacca

SEQ ID NO: 401294 - RNA, 19 nt, Homo sapiens
  misc_RNA (1)...(19): siRNA sense strand
caucugagccaaucuagca

SEQ ID NO: 401295 - RNA, 19 nt, Homo sapiens
  misc_RNA (1)...(19): siRNA sense strand
ccucaucucccucuuccua

SEQ ID NO: 401296 - RNA, 19 nt, Homo sapiens
  misc_RNA (1)...(19): siRNA sense strand
cuccagcccuucccuuauu

SEQ ID NO: 401297 - RNA, 19 nt, Homo sapiens
  misc_RNA (1)...(19): siRNA sense strand
gugagcaccucuucaucug

SEQ ID NO: 401298 - RNA, 19 nt, Homo sapiens
  misc_RNA (1)...(19): siRNA sense strand
gcaccacugccucugauca

SEQ ID NO: 401299 - RNA, 19 nt, Homo sapiens
  misc_RNA (1)...(19): siRNA sense strand
ccacugaugaugaagacaa

SEQ ID NO: 401300 - RNA, 19 nt, Homo sapiens
  misc_RNA (1)...(19): siRNA sense strand
gaaugugggcgcugcaagu

SEQ ID NO: 401301 - RNA, 19 nt, Homo sapiens
  misc_RNA (1)...(19): siRNA sense strand
ucaacaaauucugccuauu

SEQ ID NO: 401302 - RNA, 19 nt, Homo sapiens
  misc_RNA (1)...(19): siRNA sense strand
agacaacugugcugaugag

SEQ ID NO: 401303 - RNA, 19 nt, Homo sapiens
  misc_RNA (1)...(19): siRNA sense strand
gauuauggcacuugucucu

SEQ ID NO: 401304 - RNA, 19 nt, Homo sapiens
  misc_RNA (1)...(19): siRNA sense strand
caaauucugccuauugaac

SEQ ID NO: 401305 - RNA, 19 nt, Homo sapiens
  misc_RNA (1)...(19): siRNA sense strand
gcaagaggcacaccaacac

SEQ ID NO: 401306 - RNA, 19 nt, Homo sapiens
  misc_RNA (1)...(19): siRNA sense strand
ccagcucaaugucccauag

SEQ ID NO: 401307 - RNA, 19 nt, Homo sapiens
  misc_RNA (1)...(19): siRNA sense strand
uaccacugcuccacugaug

SEQ ID NO: 401308 - RNA, 19 nt, Homo sapiens
  misc_RNA (1)...(19): siRNA sense strand
gcucuuggccagcauuaca

SEQ ID NO: 401309 - RNA, 19 nt, Homo sapiens
  misc_RNA (1)...(19): siRNA sense strand
gcaaccagcgcugccuuug

SEQ ID NO: 401310 - RNA, 19 nt, Homo sapiens
  misc_RNA (1)...(19): siRNA sense strand
ggugacagaugauuuucaa

SEQ ID NO: 401311 - RNA, 19 nt, Homo sapiens
  misc_RNA (1)...(19): siRNA sense strand
gcucuacucaugcuagcaa

SEQ ID NO: 401312 - RNA, 19 nt, Homo sapiens
  misc_RNA (1)...(19): siRNA sense strand
uagcaaugacuacguggaa

SEQ ID NO: 401313 - RNA, 19 nt, Homo sapiens
  misc_RNA (1)...(19): siRNA sense strand
cagcaucugagccaaucua

SEQ ID NO: 401314 - RNA, 19 nt, Homo sapiens
  misc_RNA (1)...(19): siRNA sense strand
uggcuaccaugccuacuuc

SEQ ID NO: 401315 - RNA, 19 nt, Homo sapiens
  misc_RNA (1)...(19): siRNA sense strand
cugcuccacugaugaugaa

SEQ ID NO: 401316 - RNA, 19 nt, Homo sapiens
  misc_RNA (1)...(19): siRNA sense strand
augcugcggugacagauga

SEQ ID NO: 401317 - RNA, 19 nt, Homo sapiens
  misc_RNA (1)...(19): siRNA sense strand
uagcaccacugccucugau

SEQ ID NO: 401318 - RNA, 19 nt, Homo sapiens
  misc_RNA (1)...(19): siRNA sense strand
cuucaucugugaggaaugu

SEQ ID NO: 401319 - RNA, 19 nt, Homo sapiens
  misc_RNA (1)...(19): siRNA sense strand
gacagaugauuuucaacaa

SEQ ID NO: 401320 - RNA, 19 nt, Homo sapiens
  misc_RNA (1)...(19): siRNA sense strand
caaacccacaagucugauu

SEQ ID NO: 401321 - RNA, 19 nt, Homo sapiens
  misc_RNA (1)...(19): siRNA sense strand
gagagccuccucgauuaug

SEQ ID NO: 401322 - RNA, 19 nt, Homo sapiens
  misc_RNA (1)...(19): siRNA sense strand
uucaacaaauucugccuau

SEQ ID NO: 401323 - RNA, 19 nt, Homo sapiens
  misc_RNA (1)...(19): siRNA sense strand
ccacugcuccacugaugau

SEQ ID NO: 401324 - RNA, 19 nt, Homo sapiens
  misc_RNA (1)...(19): siRNA sense strand
aaacccacaagucugauug

SEQ ID NO: 401325 - RNA, 19 nt, Homo sapiens
  misc_RNA (1)...(19): siRNA sense strand
ugagagccuccucgauuau

SEQ ID NO: 401326 - RNA, 19 nt, Homo sapiens
  misc_RNA (1)...(19): siRNA sense strand
uugaacagcugcgcucuac

SEQ ID NO: 401327 - RNA, 19 nt, Homo sapiens
  misc_RNA (1)...(19): siRNA sense strand
cuagugagcaccucuucau

SEQ ID NO: 401328 - RNA, 19 nt, Homo sapiens
  misc_RNA (1)...(19): siRNA sense strand
cauuacacccucaccuuca

SEQ ID NO: 401329 - RNA, 19 nt, Homo sapiens
  misc_RNA (1)...(19): siRNA sense strand
gcucuugugggccuaguuc

SEQ ID NO: 401330 - RNA, 19 nt, Homo sapiens
  misc_RNA (1)...(19): siRNA sense strand
ugcaaacccacaagucuga

SEQ ID NO: 401331 - RNA, 19 nt, Homo sapiens
  misc_RNA (1)...(19): siRNA sense strand
caaaggcgcugucauguuu

SEQ ID NO: 401332 - RNA, 19 nt, Homo sapiens
  misc_RNA (1)...(19): siRNA sense strand
gaacaaaacugcagagaaa

SEQ ID NO: 401333 - RNA, 19 nt, Homo sapiens
  misc_RNA (1)...(19): siRNA sense strand
gaacccaccuaaauguuga

SEQ ID NO: 401334 - RNA, 19 nt, Homo sapiens
  misc_RNA (1)...(19): siRNA sense strand
ucaaugagcugcaguugga

SEQ ID NO: 401335 - RNA, 19 nt, Homo sapiens
  misc_RNA (1)...(19): siRNA sense strand
caccagaccugcccaauga

SEQ ID NO: 401336 - RNA, 19 nt, Homo sapiens
  misc_RNA (1)...(19): siRNA sense strand
gaagugagcaagcuaaaug

SEQ ID NO: 401337 - RNA, 19 nt, Homo sapiens
  misc_RNA (1)...(19): siRNA sense strand
ccaaacagauccaaaugug

SEQ ID NO: 401338 - RNA, 19 nt, Homo sapiens
  misc_RNA (1)...(19): siRNA sense strand
ccaagaagcuaccaaacug

SEQ ID NO: 401339 - RNA, 19 nt, Homo sapiens
  misc_RNA (1)...(19): siRNA sense strand
gauaaggagucacaucugu

SEQ ID NO: 401340 - RNA, 19 nt, Homo sapiens
  misc_RNA (1)...(19): siRNA sense strand
ggaaagaauggaaaugauu

SEQ ID NO: 401341 - RNA, 19 nt, Homo sapiens
  misc_RNA (1)...(19): siRNA sense strand
gaagaacccaccuaaaugu

SEQ ID NO: 401342 - RNA, 19 nt, Homo sapiens
  misc_RNA (1)...(19): siRNA sense strand
gaaacacaguggcagaugu

SEQ ID NO: 401343 - RNA, 19 nt, Homo sapiens
  misc_RNA (1)...(19): siRNA sense strand
uagaagcacuuaugucaau

SEQ ID NO: 401344 - RNA, 19 nt, Homo sapiens
  misc_RNA (1)...(19): siRNA sense strand
gaagaagaacccaccuaaa

SEQ ID NO: 401345 - RNA, 19 nt, Homo sapiens
  misc_RNA (1)...(19): siRNA sense strand
gcaguuggaagucugauuu

SEQ ID NO: 401346 - RNA, 19 nt, Homo sapiens
  misc_RNA (1)...(19): siRNA sense strand
gaaauacguugaaaacaga

SEQ ID NO: 401347 - RNA, 19 nt, Homo sapiens
  misc_RNA (1)...(19): siRNA sense strand
gaggaaagaauggaaauga

SEQ ID NO: 401348 - RNA, 19 nt, Homo sapiens
  misc_RNA (1)...(19): siRNA sense strand
ucucaagugucaaaucuga

SEQ ID NO: 401349 - RNA, 19 nt, Homo sapiens
  misc_RNA (1)...(19): siRNA sense strand
ccacacgggugagaagaaa

SEQ ID NO: 401350 - RNA, 19 nt, Homo sapiens
  misc_RNA (1)...(19): siRNA sense strand
uggcagauguugaugagaa

SEQ ID NO: 401351 - RNA, 19 nt, Homo sapiens
  misc_RNA (1)...(19): siRNA sense strand
ucaagucacucucagauac

SEQ ID NO: 401352 - RNA, 19 nt, Homo sapiens
  misc_RNA (1)...(19): siRNA sense strand
caugaggagugaccauuug

SEQ ID NO: 401353 - RNA, 19 nt, Homo sapiens
  misc_RNA (1)...(19): siRNA sense strand
aagaagaacccaccuaaau

SEQ ID NO: 401354 - RNA, 19 nt, Homo sapiens
  misc_RNA (1)...(19): siRNA sense strand
ggagugaccauuugaccaa

SEQ ID NO: 401355 - RNA, 19 nt, Homo sapiens
  misc_RNA (1)...(19): siRNA sense strand
caaaagagaguauguauuc

SEQ ID NO: 401356 - RNA, 19 nt, Homo sapiens
  misc_RNA (1)...(19): siRNA sense strand
uuacaccaguaucugauuu

SEQ ID NO: 401357 - RNA, 19 nt, Homo sapiens
  misc_RNA (1)...(19): siRNA sense strand
ucaacuaucagaacaauuc

SEQ ID NO: 401358 - RNA, 19 nt, Homo sapiens
  misc_RNA (1)...(19): siRNA sense strand
agaagaagaacccaccuaa

SEQ ID NO: 401359 - RNA, 19 nt, Homo sapiens
  misc_RNA (1)...(19): siRNA sense strand
gaagcacuuaugucaauga

SEQ ID NO: 401360 - RNA, 19 nt, Homo sapiens
  misc_RNA (1)...(19): siRNA sense strand
aaaagucacuccucagauu

SEQ ID NO: 401361 - RNA, 19 nt, Homo sapiens
  misc_RNA (1)...(19): siRNA sense strand
agaagaacccaccuaaaug

SEQ ID NO: 401362 - RNA, 19 nt, Homo sapiens
  misc_RNA (1)...(19): siRNA sense strand
cagccagcauccucaacua

SEQ ID NO: 401363 - RNA, 19 nt, Homo sapiens
  misc_RNA (1)...(19): siRNA sense strand
ggcaagacauacuuuaaaa

SEQ ID NO: 401364 - RNA, 19 nt, Homo sapiens
  misc_RNA (1)...(19): siRNA sense strand
ccagcauccucaacuauca

SEQ ID NO: 401365 - RNA, 19 nt, Homo sapiens
  misc_RNA (1)...(19): siRNA sense strand
accaguaucugauuuguca

SEQ ID NO: 401366 - RNA, 19 nt, Homo sapiens
  misc_RNA (1)...(19): siRNA sense strand
caucaaggauaaggaguca

SEQ ID NO: 401367 - RNA, 19 nt, Homo sapiens
  misc_RNA (1)...(19): siRNA sense strand
ccaaaggcgcugucauguu

SEQ ID NO: 401368 - RNA, 19 nt, Homo sapiens
  misc_RNA (1)...(19): siRNA sense strand
ggcagauguugaugagaaa

SEQ ID NO: 401369 - RNA, 19 nt, Homo sapiens
  misc_RNA (1)...(19): siRNA sense strand
gaaaagagcccaguaucug

SEQ ID NO: 401370 - RNA, 19 nt, Homo sapiens
  misc_RNA (1)...(19): siRNA sense strand
ugagcaagcuaaaugacau

SEQ ID NO: 401371 - RNA, 19 nt, Homo sapiens
  misc_RNA (1)...(19): siRNA sense strand
caaacagauccaaauguga

SEQ ID NO: 401372 - RNA, 19 nt, Homo sapiens
  misc_RNA (1)...(19): siRNA sense strand
ugaacccucucaaguguca

SEQ ID NO: 401373 - RNA, 19 nt, Homo sapiens
  misc_RNA (1)...(19): siRNA sense strand
uguagaagcacuuauguca

SEQ ID NO: 401374 - RNA, 19 nt, Homo sapiens
  misc_RNA (1)...(19): siRNA sense strand
gauccaaaugugagagaaa

SEQ ID NO: 401375 - RNA, 19 nt, Homo sapiens
  misc_RNA (1)...(19): siRNA sense strand
acaagugugauucgucaua

SEQ ID NO: 401376 - RNA, 19 nt, Homo sapiens
  misc_RNA (1)...(19): siRNA sense strand
gcucaggcaacaaguguga

SEQ ID NO: 401377 - RNA, 19 nt, Homo sapiens
  misc_RNA (1)...(19): siRNA sense strand
gaagcuguagaagcacuua

SEQ ID NO: 401378 - RNA, 19 nt, Homo sapiens
  misc_RNA (1)...(19): siRNA sense strand
uggcaagacauacuuuaaa

SEQ ID NO: 401379 - RNA, 19 nt, Homo sapiens
  misc_RNA (1)...(19): siRNA sense strand
gaagaaaagagcccaguau

SEQ ID NO: 401380 - RNA, 19 nt, Homo sapiens
  misc_RNA (1)...(19): siRNA sense strand
ucacauugccgcaccuuuc

SEQ ID NO: 401381 - RNA, 19 nt, Homo sapiens
  misc_RNA (1)...(19): siRNA sense strand
caaacuggcagauggaagu

SEQ ID NO: 401382 - RNA, 19 nt, Homo sapiens
  misc_RNA (1)...(19): siRNA sense strand
cuggaaagguugugaaagg

SEQ ID NO: 401383 - RNA, 19 nt, Homo sapiens
  misc_RNA (1)...(19): siRNA sense strand
ccucucaagugucaaaucu

SEQ ID NO: 401384 - RNA, 19 nt, Homo sapiens
  misc_RNA (1)...(19): siRNA sense strand
caucuacuguacacuucaa

SEQ ID NO: 401385 - RNA, 19 nt, Homo sapiens
  misc_RNA (1)...(19): siRNA sense strand
guagaagcacuuaugucaa

SEQ ID NO: 401386 - RNA, 19 nt, Homo sapiens
  misc_RNA (1)...(19): siRNA sense strand
ucaccaaacagauccaaau

SEQ ID NO: 401387 - RNA, 19 nt, Homo sapiens
  misc_RNA (1)...(19): siRNA sense strand
ccucaacuaucagaacaau

SEQ ID NO: 401388 - RNA, 19 nt, Homo sapiens
  misc_RNA (1)...(19): siRNA sense strand
ccaaagcucaggcaacaag

SEQ ID NO: 401389 - RNA, 19 nt, Homo sapiens
  misc_RNA (1)...(19): siRNA sense strand
gcacacaaguccccaaagg

SEQ ID NO: 401390 - RNA, 19 nt, Homo sapiens
  misc_RNA (1)...(19): siRNA sense strand
ggaagugagcaagcuaaau

SEQ ID NO: 401391 - RNA, 19 nt, Homo sapiens
  misc_RNA (1)...(19): siRNA sense strand
guggcaagacauacuuuaa

SEQ ID NO: 401392 - RNA, 19 nt, Homo sapiens
  misc_RNA (1)...(19): siRNA sense strand
gcaaaagucacuccucaga

SEQ ID NO: 401393 - RNA, 19 nt, Homo sapiens
  misc_RNA (1)...(19): siRNA sense strand
gccaucuacuguacacuuc

SEQ ID NO: 401394 - RNA, 19 nt, Homo sapiens
  misc_RNA (1)...(19): siRNA sense strand
uaaggagucacaucuguag

SEQ ID NO: 401395 - RNA, 19 nt, Homo sapiens
  misc_RNA (1)...(19): siRNA sense strand
gagcugcaguuggaagucu

SEQ ID NO: 401396 - RNA, 19 nt, Homo sapiens
  misc_RNA (1)...(19): siRNA sense strand
gcaagaaagaacauaccau

SEQ ID NO: 401397 - RNA, 19 nt, Homo sapiens
  misc_RNA (1)...(19): siRNA sense strand
caagugugauucgucauac

SEQ ID NO: 401398 - RNA, 19 nt, Homo sapiens
  misc_RNA (1)...(19): siRNA sense strand
ccagaccugcccaaugaaa

SEQ ID NO: 401399 - RNA, 19 nt, Homo sapiens
  misc_RNA (1)...(19): siRNA sense strand
aggaaagaauggaaaugau

SEQ ID NO: 401400 - RNA, 19 nt, Homo sapiens
  misc_RNA (1)...(19): siRNA sense strand
ucauacaaucccagcauuu

SEQ ID NO: 401401 - RNA, 19 nt, Homo sapiens
  misc_RNA (1)...(19): siRNA sense strand
gauggaagugagcaagcua

SEQ ID NO: 401402 - RNA, 19 nt, Homo sapiens
  misc_RNA (1)...(19): siRNA sense strand
acacgggugagaagaaauu

SEQ ID NO: 401403 - RNA, 19 nt, Homo sapiens
  misc_RNA (1)...(19): siRNA sense strand
accagacucucucccauug

SEQ ID NO: 401404 - RNA, 19 nt, Homo sapiens
  misc_RNA (1)...(19): siRNA sense strand
ggaggaaagaauggaaaug

SEQ ID NO: 401405 - RNA, 19 nt, Homo sapiens
  misc_RNA (1)...(19): siRNA sense strand
ggaagucugauuuuaagaa

SEQ ID NO: 401406 - RNA, 19 nt, Homo sapiens
  misc_RNA (1)...(19): siRNA sense strand
gccaagaagcuaccaaacu

SEQ ID NO: 401407 - RNA, 19 nt, Homo sapiens
  misc_RNA (1)...(19): siRNA sense strand
ucaugaggagugaccauuu

SEQ ID NO: 401408 - RNA, 19 nt, Homo sapiens
  misc_RNA (1)...(19): siRNA sense strand
uggaaagguugugaaagga

SEQ ID NO: 401409 - RNA, 19 nt, Homo sapiens
  misc_RNA (1)...(19): siRNA sense strand
ggauaaggagucacaucug

SEQ ID NO: 401410 - RNA, 19 nt, Homo sapiens
  misc_RNA (1)...(19): siRNA sense strand
ccaccagaccugcccaaug

SEQ ID NO: 401411 - RNA, 19 nt, Homo sapiens
  misc_RNA (1)...(19): siRNA sense strand
ucaagugucaaaucugaug

SEQ ID NO: 401412 - RNA, 19 nt, Homo sapiens
  misc_RNA (1)...(19): siRNA sense strand
cagccaagaagcuaccaaa

SEQ ID NO: 401413 - RNA, 19 nt, Homo sapiens
  misc_RNA (1)...(19): siRNA sense strand
gaauggcaccagacucucu

SEQ ID NO: 401414 - RNA, 19 nt, Homo sapiens
  misc_RNA (1)...(19): siRNA sense strand
gagaaacacaguggcagau

SEQ ID NO: 401415 - RNA, 19 nt, Homo sapiens
  misc_RNA (1)...(19): siRNA sense strand
acucucagauacugccaaa

SEQ ID NO: 401416 - RNA, 19 nt, Homo sapiens
  misc_RNA (1)...(19): siRNA sense strand
gggaacaccugauuuucau

SEQ ID NO: 401417 - RNA, 19 nt, Homo sapiens
  misc_RNA (1)...(19): siRNA sense strand
gugccgcugugucaccaaa

SEQ ID NO: 401418 - RNA, 19 nt, Homo sapiens
  misc_RNA (1)...(19): siRNA sense strand
caccuuacaguccuucuga

SEQ ID NO: 401419 - RNA, 19 nt, Homo sapiens
  misc_RNA (1)...(19): siRNA sense strand
gcaccagcgccaucuacug

SEQ ID NO: 401420 - RNA, 19 nt, Homo sapiens
  misc_RNA (1)...(19): siRNA sense strand
ucaaggauaaggagucaca

SEQ ID NO: 401421 - RNA, 19 nt, Homo sapiens
  misc_RNA (1)...(19): siRNA sense strand
ggaacaaaacugcagagaa

SEQ ID NO: 401422 - RNA, 19 nt, Homo sapiens
  misc_RNA (1)...(19): siRNA sense strand
gcggaggaaagaauggaaa

SEQ ID NO: 401423 - RNA, 19 nt, Homo sapiens
  misc_RNA (1)...(19): siRNA sense strand
caccaaacagauccaaaug

SEQ ID NO: 401424 - RNA, 19 nt, Homo sapiens
  misc_RNA (1)...(19): siRNA sense strand
uagaagaagaacccaccua

SEQ ID NO: 401425 - RNA, 19 nt, Homo sapiens
  misc_RNA (1)...(19): siRNA sense strand
caccagcgccaucuacugu

SEQ ID NO: 401426 - RNA, 19 nt, Homo sapiens
  misc_RNA (1)...(19): siRNA sense strand
ggaagaaaagagcccagua

SEQ ID NO: 401427 - RNA, 19 nt, Homo sapiens
  misc_RNA (1)...(19): siRNA sense strand
uuuaaaaguucccaucuga

SEQ ID NO: 401428 - RNA, 19 nt, Homo sapiens
  misc_RNA (1)...(19): siRNA sense strand
ucacuccucagauugauuc

SEQ ID NO: 401429 - RNA, 19 nt, Homo sapiens
  misc_RNA (1)...(19): siRNA sense strand
aaagucacuccucagauug

SEQ ID NO: 401430 - RNA, 19 nt, Homo sapiens
  misc_RNA (1)...(19): siRNA sense strand
agaacccaccuaaauguug

SEQ ID NO: 401431 - RNA, 19 nt, Homo sapiens
  misc_RNA (1)...(19): siRNA sense strand
gaagaaagauggagauaug

SEQ ID NO: 401432 - RNA, 19 nt, Homo sapiens
  misc_RNA (1)...(19): siRNA sense strand
gaacagaaguagaaagaaa

SEQ ID NO: 401433 - RNA, 19 nt, Homo sapiens
  misc_RNA (1)...(19): siRNA sense strand
gcaaagacauucuguuaug

SEQ ID NO: 401434 - RNA, 19 nt, Homo sapiens
  misc_RNA (1)...(19): siRNA sense strand
agacguggaugauaaauua

SEQ ID NO: 401435 - RNA, 19 nt, Homo sapiens
  misc_RNA (1)...(19): siRNA sense strand
ggacagaacccgcagauuu

SEQ ID NO: 401436 - RNA, 19 nt, Homo sapiens
  misc_RNA (1)...(19): siRNA sense strand
gagagcagaugauccuuua

SEQ ID NO: 401437 - RNA, 19 nt, Homo sapiens
  misc_RNA (1)...(19): siRNA sense strand
ggacaagucucucagcuau

SEQ ID NO: 401438 - RNA, 19 nt, Homo sapiens
  misc_RNA (1)...(19): siRNA sense strand
gagaggaacucaaagaaga

SEQ ID NO: 401439 - RNA, 19 nt, Homo sapiens
  misc_RNA (1)...(19): siRNA sense strand
ggaggaagcuauggaaauu

SEQ ID NO: 401440 - RNA, 19 nt, Homo sapiens
  misc_RNA (1)...(19): siRNA sense strand
gagaagaguuggaacagaa

SEQ ID NO: 401441 - RNA, 19 nt, Homo sapiens
  misc_RNA (1)...(19): siRNA sense strand
gauaucagcuuagacaauu

SEQ ID NO: 401442 - RNA, 19 nt, Homo sapiens
  misc_RNA (1)...(19): siRNA sense strand
acaaacagcuggagaagaa

SEQ ID NO: 401443 - RNA, 19 nt, Homo sapiens
  misc_RNA (1)...(19): siRNA sense strand
guacgaaugugauguguug

SEQ ID NO: 401444 - RNA, 19 nt, Homo sapiens
  misc_RNA (1)...(19): siRNA sense strand
uaaagaaggugauaucauc

SEQ ID NO: 401445 - RNA, 19 nt, Homo sapiens
  misc_RNA (1)...(19): siRNA sense strand
gggcaaagacauucuguua

SEQ ID NO: 401446 - RNA, 19 nt, Homo sapiens
  misc_RNA (1)...(19): siRNA sense strand
gaaggacggaguacuaaua

SEQ ID NO: 401447 - RNA, 19 nt, Homo sapiens
  misc_RNA (1)...(19): siRNA sense strand
gaagucaguuggauucaga

SEQ ID NO: 401448 - RNA, 19 nt, Homo sapiens
  misc_RNA (1)...(19): siRNA sense strand
ggucagaggucccuuguuc

SEQ ID NO: 401449 - RNA, 19 nt, Homo sapiens
  misc_RNA (1)...(19): siRNA sense strand
gcuauauccuugaagauuu

SEQ ID NO: 401450 - RNA, 19 nt, Homo sapiens
  misc_RNA (1)...(19): siRNA sense strand
ccaaccagcuccagaacua

SEQ ID NO: 401451 - RNA, 19 nt, Homo sapiens
  misc_RNA (1)...(19): siRNA sense strand
gaagauguuuguauugauc

SEQ ID NO: 401452 - RNA, 19 nt, Homo sapiens
  misc_RNA (1)...(19): siRNA sense strand
ugacagaugugcuagaaga

SEQ ID NO: 401453 - RNA, 19 nt, Homo sapiens
  misc_RNA (1)...(19): siRNA sense strand
cauaugaaguggacaaaga

SEQ ID NO: 401454 - RNA, 19 nt, Homo sapiens
  misc_RNA (1)...(19): siRNA sense strand
ggagacccaugaucccaua

SEQ ID NO: 401455 - RNA, 19 nt, Homo sapiens
  misc_RNA (1)...(19): siRNA sense strand
gaaaguggacugcagauuc

SEQ ID NO: 401456 - RNA, 19 nt, Homo sapiens
  misc_RNA (1)...(19): siRNA sense strand
ggucugagguggaagaaau

SEQ ID NO: 401457 - RNA, 19 nt, Homo sapiens
  misc_RNA (1)...(19): siRNA sense strand
gcacaagaacuuauggaaa

SEQ ID NO: 401458 - RNA, 19 nt, Homo sapiens
  misc_RNA (1)...(19): siRNA sense strand
gaguugauguuucuuguga

SEQ ID NO: 401459 - RNA, 19 nt, Homo sapiens
  misc_RNA (1)...(19): siRNA sense strand
ggacuccaguguugucauu

SEQ ID NO: 401460 - RNA, 19 nt, Homo sapiens
  misc_RNA (1)...(19): siRNA sense strand
gaagguggguguucuuugg

SEQ ID NO: 401461 - RNA, 19 nt, Homo sapiens
  misc_RNA (1)...(19): siRNA sense strand
ccacaagccucaacaccaa

SEQ ID NO: 401462 - RNA, 19 nt, Homo sapiens
  misc_RNA (1)...(19): siRNA sense strand
ccagugaugucaugucuga

SEQ ID NO: 401463 - RNA, 19 nt, Homo sapiens
  misc_RNA (1)...(19): siRNA sense strand
cagaagauguuuguauuga

SEQ ID NO: 401464 - RNA, 19 nt, Homo sapiens
  misc_RNA (1)...(19): siRNA sense strand
caagaagggagacaagaua

SEQ ID NO: 401465 - RNA, 19 nt, Homo sapiens
  misc_RNA (1)...(19): siRNA sense strand
gaugauccuuuaagacuug

SEQ ID NO: 401466 - RNA, 19 nt, Homo sapiens
  misc_RNA (1)...(19): siRNA sense strand
ugaaggagaucugaaauca

SEQ ID NO: 401467 - RNA, 19 nt, Homo sapiens
  misc_RNA (1)...(19): siRNA sense strand
gaaaccagugugauuagua

SEQ ID NO: 401468 - RNA, 19 nt, Homo sapiens
  misc_RNA (1)...(19): siRNA sense strand
gaacagaaggagaaagaga

SEQ ID NO: 401469 - RNA, 19 nt, Homo sapiens
  misc_RNA (1)...(19): siRNA sense strand
ucagaggacuccaguguug

SEQ ID NO: 401470 - RNA, 19 nt, Homo sapiens
  misc_RNA (1)...(19): siRNA sense strand
ucacagaauugaugaagau

SEQ ID NO: 401471 - RNA, 19 nt, Homo sapiens
  misc_RNA (1)...(19): siRNA sense strand
caaagaaagugguauaagc

SEQ ID NO: 401472 - RNA, 19 nt, Homo sapiens
  misc_RNA (1)...(19): siRNA sense strand
uagaggacauuucaccuaa

SEQ ID NO: 401473 - RNA, 19 nt, Homo sapiens
  misc_RNA (1)...(19): siRNA sense strand
gagaagaagaguuugauau

SEQ ID NO: 401474 - RNA, 19 nt, Homo sapiens
  misc_RNA (1)...(19): siRNA sense strand
gauaucaucccaccauuga

SEQ ID NO: 401475 - RNA, 19 nt, Homo sapiens
  misc_RNA (1)...(19): siRNA sense strand
gauacagagucgcuccaua

SEQ ID NO: 401476 - RNA, 19 nt, Homo sapiens
  misc_RNA (1)...(19): siRNA sense strand
cacaagaacuuauggaaag

SEQ ID NO: 401477 - RNA, 19 nt, Homo sapiens
  misc_RNA (1)...(19): siRNA sense strand
gaacuaccguaauuaucug

SEQ ID NO: 401478 - RNA, 19 nt, Homo sapiens
  misc_RNA (1)...(19): siRNA sense strand
gaagaagaguuugauaugc

SEQ ID NO: 401479 - RNA, 19 nt, Homo sapiens
  misc_RNA (1)...(19): siRNA sense strand
gcaguuccgucaccagcua

SEQ ID NO: 401480 - RNA, 19 nt, Homo sapiens
  misc_RNA (1)...(19): siRNA sense strand
gcaaguugaugcuuucuac

SEQ ID NO: 401481 - RNA, 19 nt, Homo sapiens
  misc_RNA (1)...(19): siRNA sense strand
gaucuugggcuaucuuuga

SEQ ID NO: 401482 - RNA, 19 nt, Homo sapiens
  misc_RNA (1)...(19): siRNA sense strand
gaacgaggagacgguaaua

SEQ ID NO: 401483 - RNA, 19 nt, Homo sapiens
  misc_RNA (1)...(19): siRNA sense strand
ggcagcagauaucagcuua

SEQ ID NO: 401484 - RNA, 19 nt, Homo sapiens
  misc_RNA (1)...(19): siRNA sense strand
gaagcaguaacaccucuua

SEQ ID NO: 401485 - RNA, 19 nt, Homo sapiens
  misc_RNA (1)...(19): siRNA sense strand
gagcugggaaguauaaauu

SEQ ID NO: 401486 - RNA, 19 nt, Homo sapiens
  misc_RNA (1)...(19): siRNA sense strand
ggacauuucaccuaacuug

SEQ ID NO: 401487 - RNA, 19 nt, Homo sapiens
  misc_RNA (1)...(19): siRNA sense strand
caaaugaugggaagaaaga

SEQ ID NO: 401488 - RNA, 19 nt, Homo sapiens
  misc_RNA (1)...(19): siRNA sense strand
ugagacaccuugugaaagu

SEQ ID NO: 401489 - RNA, 19 nt, Homo sapiens
  misc_RNA (1)...(19): siRNA sense strand
gcagauaucagcuuagaca

SEQ ID NO: 401490 - RNA, 19 nt, Homo sapiens
  misc_RNA (1)...(19): siRNA sense strand
gagaggcaauggugacaga

SEQ ID NO: 401491 - RNA, 19 nt, Homo sapiens
  misc_RNA (1)...(19): siRNA sense strand
gauacuccuugccugauaa

SEQ ID NO: 401492 - RNA, 19 nt, Homo sapiens
  misc_RNA (1)...(19): siRNA sense strand
ggagaagaguuggaacaga

SEQ ID NO: 401493 - RNA, 19 nt, Homo sapiens
  misc_RNA (1)...(19): siRNA sense strand
guggagaagugcucagauu

SEQ ID NO: 401494 - RNA, 19 nt, Homo sapiens
  misc_RNA (1)...(19): siRNA sense strand
acaggaagcuugggaagaa

SEQ ID NO: 401495 - RNA, 19 nt, Homo sapiens
  misc_RNA (1)...(19): siRNA sense strand
cagaagcuauggaaguuga

SEQ ID NO: 401496 - RNA, 19 nt, Homo sapiens
  misc_RNA (1)...(19): siRNA sense strand
gagccaggauguugaggaa

SEQ ID NO: 401497 - RNA, 19 nt, Homo sapiens
  misc_RNA (1)...(19): siRNA sense strand
caaagaaaauccuguguug

SEQ ID NO: 401498 - RNA, 19 nt, Homo sapiens
  misc_RNA (1)...(19): siRNA sense strand
ucaaugaagcccaguguaa

SEQ ID NO: 401499 - RNA, 19 nt, Homo sapiens
  misc_RNA (1)...(19): siRNA sense strand
ggagaagaagaguuugaua

SEQ ID NO: 401500 - RNA, 19 nt, Homo sapiens
  misc_RNA (1)...(19): siRNA sense strand
aguaaggccuugauugaaa

SEQ ID NO: 401501 - RNA, 19 nt, Homo sapiens
  misc_RNA (1)...(19): siRNA sense strand
ugugaaaguucuagugaaa

SEQ ID NO: 401502 - RNA, 19 nt, Homo sapiens
  misc_RNA (1)...(19): siRNA sense strand
gagauugaaccaaagaauu

SEQ ID NO: 401503 - RNA, 19 nt, Homo sapiens
  misc_RNA (1)...(19): siRNA sense strand
caacgaagauauccccaua

SEQ ID NO: 401504 - RNA, 19 nt, Homo sapiens
  misc_RNA (1)...(19): siRNA sense strand
gagcagcuacaaucaguaa

SEQ ID NO: 401505 - RNA, 19 nt, Homo sapiens
  misc_RNA (1)...(19): siRNA sense strand
ggacaaagagcagcuacaa

SEQ ID NO: 401506 - RNA, 19 nt, Homo sapiens
  misc_RNA (1)...(19): siRNA sense strand
guaaggauguacauguugu

SEQ ID NO: 401507 - RNA, 19 nt, Homo sapiens
  misc_RNA (1)...(19): siRNA sense strand
cguagugacucuccagaaa

SEQ ID NO: 401508 - RNA, 19 nt, Homo sapiens
  misc_RNA (1)...(19): siRNA sense strand
ggauggaacagaaguagaa

SEQ ID NO: 401509 - RNA, 19 nt, Homo sapiens
  misc_RNA (1)...(19): siRNA sense strand
ggucagaggacaugccuuu

SEQ ID NO: 401510 - RNA, 19 nt, Homo sapiens
  misc_RNA (1)...(19): siRNA sense strand
aaaguggacugcagauuca

SEQ ID NO: 401511 - RNA, 19 nt, Homo sapiens
  misc_RNA (1)...(19): siRNA sense strand
aaagcaagaugccacaguu

SEQ ID NO: 401512 - RNA, 19 nt, Homo sapiens
  misc_RNA (1)...(19): siRNA sense strand
gaaaggcccagccaaaaua

SEQ ID NO: 401513 - RNA, 19 nt, Homo sapiens
  misc_RNA (1)...(19): siRNA sense strand
ggugacagaugugcuagaa

SEQ ID NO: 401514 - RNA, 19 nt, Homo sapiens
  misc_RNA (1)...(19): siRNA sense strand
aaagaaugcucagaagcua

SEQ ID NO: 401515 - RNA, 19 nt, Homo sapiens
  misc_RNA (1)...(19): siRNA sense strand
ucaguuggauucagauuuc

SEQ ID NO: 401516 - RNA, 19 nt, Homo sapiens
  misc_RNA (1)...(19): siRNA sense strand
aggaagcuauggaaauuaa

SEQ ID NO: 401517 - RNA, 19 nt, Homo sapiens
  misc_RNA (1)...(19): siRNA sense strand
gaaagagaaggaagaagau

SEQ ID NO: 401518 - RNA, 19 nt, Homo sapiens
  misc_RNA (1)...(19): siRNA sense strand
aaagaaggacggaguacua

SEQ ID NO: 401519 - RNA, 19 nt, Homo sapiens
  misc_RNA (1)...(19): siRNA sense strand
gaaguugaaaccaguguga

SEQ ID NO: 401520 - RNA, 19 nt, Homo sapiens
  misc_RNA (1)...(19): siRNA sense strand
caaggguugugucuucaaa

SEQ ID NO: 401521 - RNA, 19 nt, Homo sapiens
  misc_RNA (1)...(19): siRNA sense strand
gcagaagauguuuguauug

SEQ ID NO: 401522 - RNA, 19 nt, Homo sapiens
  misc_RNA (1)...(19): siRNA sense strand
gaugguugcucuacuccuu

SEQ ID NO: 401523 - RNA, 19 nt, Homo sapiens
  misc_RNA (1)...(19): siRNA sense strand
gaacaguccaacgaagaua

SEQ ID NO: 401524 - RNA, 19 nt, Homo sapiens
  misc_RNA (1)...(19): siRNA sense strand
guaauaguggguucaauga

SEQ ID NO: 401525 - RNA, 19 nt, Homo sapiens
  misc_RNA (1)...(19): siRNA sense strand
cagcagauaucagcuuaga

SEQ ID NO: 401526 - RNA, 19 nt, Homo sapiens
  misc_RNA (1)...(19): siRNA sense strand
gcaaggaaacagacugaga

SEQ ID NO: 401527 - RNA, 19 nt, Homo sapiens
  misc_RNA (1)...(19): siRNA sense strand
aaaccagugugauuaguau

SEQ ID NO: 401528 - RNA, 19 nt, Homo sapiens
  misc_RNA (1)...(19): siRNA sense strand
acacacagauugaggauac

SEQ ID NO: 401529 - RNA, 19 nt, Homo sapiens
  misc_RNA (1)...(19): siRNA sense strand
ugaagaagaggaggaauuu

SEQ ID NO: 401530 - RNA, 19 nt, Homo sapiens
  misc_RNA (1)...(19): siRNA sense strand
caacaagcaguauacagaa

SEQ ID NO: 401531 - RNA, 19 nt, Homo sapiens
  misc_RNA (1)...(19): siRNA sense strand
gcagagaacuuccagaaag

SEQ ID NO: 401532 - RNA, 19 nt, Homo sapiens
  misc_RNA (1)...(19): siRNA sense strand
caacaccaaucuucucuuu

SEQ ID NO: 401533 - RNA, 19 nt, Homo sapiens
  misc_RNA (1)...(19): siRNA sense strand
ccaagaagaucgaccugua

SEQ ID NO: 401534 - RNA, 19 nt, Homo sapiens
  misc_RNA (1)...(19): siRNA sense strand
gagaauguguucauggaaa

SEQ ID NO: 401535 - RNA, 19 nt, Homo sapiens
  misc_RNA (1)...(19): siRNA sense strand
gcaacaagaugaucaugau

SEQ ID NO: 401536 - RNA, 19 nt, Homo sapiens
  misc_RNA (1)...(19): siRNA sense strand
gaugagagguacauagaug

SEQ ID NO: 401537 - RNA, 19 nt, Homo sapiens
  misc_RNA (1)...(19): siRNA sense strand
gagauggacugcgagguua

SEQ ID NO: 401538 - RNA, 19 nt, Homo sapiens
  misc_RNA (1)...(19): siRNA sense strand
ggacagaggcccuggagaa

SEQ ID NO: 401539 - RNA, 19 nt, Homo sapiens
  misc_RNA (1)...(19): siRNA sense strand
gagagcagcugcgucauga

SEQ ID NO: 401540 - RNA, 19 nt, Homo sapiens
  misc_RNA (1)...(19): siRNA sense strand
guacauagaugaggugaca

SEQ ID NO: 401541 - RNA, 19 nt, Homo sapiens
  misc_RNA (1)...(19): siRNA sense strand
acaagaagguguucaagga

SEQ ID NO: 401542 - RNA, 19 nt, Homo sapiens
  misc_RNA (1)...(19): siRNA sense strand
agaacaaggucaacuauuc

SEQ ID NO: 401543 - RNA, 19 nt, Homo sapiens
  misc_RNA (1)...(19): siRNA sense strand
cgaaggagacccugguaua

SEQ ID NO: 401544 - RNA, 19 nt, Homo sapiens
  misc_RNA (1)...(19): siRNA sense strand
caacaaaggcuacuauuuu

SEQ ID NO: 401545 - RNA, 19 nt, Homo sapiens
  misc_RNA (1)...(19): siRNA sense strand
gaacaaggucaacuauuca

SEQ ID NO: 401546 - RNA, 19 nt, Homo sapiens
  misc_RNA (1)...(19): siRNA sense strand
ugaaacagacccaguacua

SEQ ID NO: 401547 - RNA, 19 nt, Homo sapiens
  misc_RNA (1)...(19): siRNA sense strand
gaagacaucguguacuaug

SEQ ID NO: 401548 - RNA, 19 nt, Homo sapiens
  misc_RNA (1)...(19): siRNA sense strand
gguuaacaaugaggacuua

SEQ ID NO: 401549 - RNA, 19 nt, Homo sapiens
  misc_RNA (1)...(19): siRNA sense strand
gcugaggacuggacagaga

SEQ ID NO: 401550 - RNA, 19 nt, Homo sapiens
  misc_RNA (1)...(19): siRNA sense strand
ccaaagacauggucaucau

SEQ ID NO: 401551 - RNA, 19 nt, Homo sapiens
  misc_RNA (1)...(19): siRNA sense strand
gaaggagacccugguauau

SEQ ID NO: 401552 - RNA, 19 nt, Homo sapiens
  misc_RNA (1)...(19): siRNA sense strand
gacccaaacuucaagaaca

SEQ ID NO: 401553 - RNA, 19 nt, Homo sapiens
  misc_RNA (1)...(19): siRNA sense strand
uuauugagcucauggagaa

SEQ ID NO: 401554 - RNA, 19 nt, Homo sapiens
  misc_RNA (1)...(19): siRNA sense strand
aggaagacaucguguacua

SEQ ID NO: 401555 - RNA, 19 nt, Homo sapiens
  misc_RNA (1)...(19): siRNA sense strand
acaccaaucuucucuuugu

SEQ ID NO: 401556 - RNA, 19 nt, Homo sapiens
  misc_RNA (1)...(19): siRNA sense strand
uacaaaggcuccacuguca

SEQ ID NO: 401557 - RNA, 19 nt, Homo sapiens
  misc_RNA (1)...(19): siRNA sense strand
cugcagaacuccaacauca

SEQ ID NO: 401558 - RNA, 19 nt, Homo sapiens
  misc_RNA (1)...(19): siRNA sense strand
cagaggcccuggagaaugu

SEQ ID NO: 401559 - RNA, 19 nt, Homo sapiens
  misc_RNA (1)...(19): siRNA sense strand
gagcagcugcgucaugaaa

SEQ ID NO: 401560 - RNA, 19 nt, Homo sapiens
  misc_RNA (1)...(19): siRNA sense strand
gcauugacguggcucugaa

SEQ ID NO: 401561 - RNA, 19 nt, Homo sapiens
  misc_RNA (1)...(19): siRNA sense strand
caacacacaggaauaucua

SEQ ID NO: 401562 - RNA, 19 nt, Homo sapiens
  misc_RNA (1)...(19): siRNA sense strand
ccaacaaaggcuacuauuu

SEQ ID NO: 401563 - RNA, 19 nt, Homo sapiens
  misc_RNA (1)...(19): siRNA sense strand
gaugaugacuaugugaaug

SEQ ID NO: 401564 - RNA, 19 nt, Homo sapiens
  misc_RNA (1)...(19): siRNA sense strand
uacaauaacuccuucuaca

SEQ ID NO: 401565 - RNA, 19 nt, Homo sapiens
  misc_RNA (1)...(19): siRNA sense strand
ucacaccgcugcaguggau

SEQ ID NO: 401566 - RNA, 19 nt, Homo sapiens
  misc_RNA (1)...(19): siRNA sense strand
caacaccgaguuccugaaa

SEQ ID NO: 401567 - RNA, 19 nt, Homo sapiens
  misc_RNA (1)...(19): siRNA sense strand
gcuauguguuugccauuga

SEQ ID NO: 401568 - RNA, 19 nt, Homo sapiens
  misc_RNA (1)...(19): siRNA sense strand
ggacugcgagguuaacaau

SEQ ID NO: 401569 - RNA, 19 nt, Homo sapiens
  misc_RNA (1)...(19): siRNA sense strand
acaagaugaucaugauguu

SEQ ID NO: 401570 - RNA, 19 nt, Homo sapiens
  misc_RNA (1)...(19): siRNA sense strand
gcagcugcgucaugaaaca

SEQ ID NO: 401571 - RNA, 19 nt, Homo sapiens
  misc_RNA (1)...(19): siRNA sense strand
cgcuggagcuggagaauga

SEQ ID NO: 401572 - RNA, 19 nt, Homo sapiens
  misc_RNA (1)...(19): siRNA sense strand
ucaagaacaaggucaacua

SEQ ID NO: 401573 - RNA, 19 nt, Homo sapiens
  misc_RNA (1)...(19): siRNA sense strand
cgacagaagauaccucaga

SEQ ID NO: 401574 - RNA, 19 nt, Homo sapiens
  misc_RNA (1)...(19): siRNA sense strand
gcacaucugcuucgacuac

SEQ ID NO: 401575 - RNA, 19 nt, Homo sapiens
  misc_RNA (1)...(19): siRNA sense strand
gcgcagagacugaccaaca

SEQ ID NO: 401576 - RNA, 19 nt, Homo sapiens
  misc_RNA (1)...(19): siRNA sense strand
accaggaucucaacacgua

SEQ ID NO: 401577 - RNA, 19 nt, Homo sapiens
  misc_RNA (1)...(19): siRNA sense strand
acacaggaauaucuagaug

SEQ ID NO: 401578 - RNA, 19 nt, Homo sapiens
  misc_RNA (1)...(19): siRNA sense strand
caagaacaaggucaacuau

SEQ ID NO: 401579 - RNA, 19 nt, Homo sapiens
  misc_RNA (1)...(19): siRNA sense strand
aggaauaucuagauguguu

SEQ ID NO: 401580 - RNA, 19 nt, Homo sapiens
  misc_RNA (1)...(19): siRNA sense strand
cuacggacaucuacaaagg

SEQ ID NO: 401581 - RNA, 19 nt, Homo sapiens
  misc_RNA (1)...(19): siRNA sense strand
ccaaugugcgcaacaagaa

SEQ ID NO: 401582 - RNA, 19 nt, Homo sapiens
  misc_RNA (1)...(19): siRNA sense strand
acaggaauaucuagaugug

SEQ ID NO: 401583 - RNA, 19 nt, Homo sapiens
  misc_RNA (1)...(19): siRNA sense strand
gcaucaacacacaggaaua

SEQ ID NO: 401584 - RNA, 19 nt, Homo sapiens
  misc_RNA (1)...(19): siRNA sense strand
gaaguacaauuggccaaac

SEQ ID NO: 401585 - RNA, 19 nt, Homo sapiens
  misc_RNA (1)...(19): siRNA sense strand
acugcgagguuaacaauga

SEQ ID NO: 401586 - RNA, 19 nt, Homo sapiens
  misc_RNA (1)...(19): siRNA sense strand
gcgucaagcuggaccuaga

SEQ ID NO: 401587 - RNA, 19 nt, Homo sapiens
  misc_RNA (1)...(19): siRNA sense strand
cagcagcuccgugagauuu

SEQ ID NO: 401588 - RNA, 19 nt, Homo sapiens
  misc_RNA (1)...(19): siRNA sense strand
gguaaacgccuccuacaac

SEQ ID NO: 401589 - RNA, 19 nt, Homo sapiens
  misc_RNA (1)...(19): siRNA sense strand
ucagaacguuggucaaguc

SEQ ID NO: 401590 - RNA, 19 nt, Homo sapiens
  misc_RNA (1)...(19): siRNA sense strand
gaugugaguggcaguguga

SEQ ID NO: 401591 - RNA, 19 nt, Homo sapiens
  misc_RNA (1)...(19): siRNA sense strand
acaagcagaucagaacguu

SEQ ID NO: 401592 - RNA, 19 nt, Homo sapiens
  misc_RNA (1)...(19): siRNA sense strand
caagaagguguucaaggaa

SEQ ID NO: 401593 - RNA, 19 nt, Homo sapiens
  misc_RNA (1)...(19): siRNA sense strand
ggaggaagacaucguguac

SEQ ID NO: 401594 - RNA, 19 nt, Homo sapiens
  misc_RNA (1)...(19): siRNA sense strand
augcggagcuagaggauga

SEQ ID NO: 401595 - RNA, 19 nt, Homo sapiens
  misc_RNA (1)...(19): siRNA sense strand
gaucagaacguuggucaag

SEQ ID NO: 401596 - RNA, 19 nt, Homo sapiens
  misc_RNA (1)...(19): siRNA sense strand
gcaacaagggccacaagca

SEQ ID NO: 401597 - RNA, 19 nt, Homo sapiens
  misc_RNA (1)...(19): siRNA sense strand
uggagaauguguucaugga

SEQ ID NO: 401598 - RNA, 19 nt, Homo sapiens
  misc_RNA (1)...(19): siRNA sense strand
ucaugaaacagacccagua

SEQ ID NO: 401599 - RNA, 19 nt, Homo sapiens
  misc_RNA (1)...(19): siRNA sense strand
gcuagaggaugagaacaag

SEQ ID NO: 401600 - RNA, 19 nt, Homo sapiens
  misc_RNA (1)...(19): siRNA sense strand
ggacugggguuggugguaa

SEQ ID NO: 401601 - RNA, 19 nt, Homo sapiens
  misc_RNA (1)...(19): siRNA sense strand
caucaacacacaggaauau

SEQ ID NO: 401602 - RNA, 19 nt, Homo sapiens
  misc_RNA (1)...(19): siRNA sense strand
ggacgucuuugagaaguac

SEQ ID NO: 401603 - RNA, 19 nt, Homo sapiens
  misc_RNA (1)...(19): siRNA sense strand
gcugucugaugaugacuau

SEQ ID NO: 401604 - RNA, 19 nt, Homo sapiens
  misc_RNA (1)...(19): siRNA sense strand
cgucggagcaugauugaug

SEQ ID NO: 401605 - RNA, 19 nt, Homo sapiens
  misc_RNA (1)...(19): siRNA sense strand
gaaacagacccaguacuac

SEQ ID NO: 401606 - RNA, 19 nt, Homo sapiens
  misc_RNA (1)...(19): siRNA sense strand
ugcuggcacucuacaauaa

SEQ ID NO: 401607 - RNA, 19 nt, Homo sapiens
  misc_RNA (1)...(19): siRNA sense strand
ggagggaccaggaucucaa

SEQ ID NO: 401608 - RNA, 19 nt, Homo sapiens
  misc_RNA (1)...(19): siRNA sense strand
caaaggcuccacugucauc

SEQ ID NO: 401609 - RNA, 19 nt, Homo sapiens
  misc_RNA (1)...(19): siRNA sense strand
caaugaggacuuacucugu

SEQ ID NO: 401610 - RNA, 19 nt, Homo sapiens
  misc_RNA (1)...(19): siRNA sense strand
ugagauggacugcgagguu

SEQ ID NO: 401611 - RNA, 19 nt, Homo sapiens
  misc_RNA (1)...(19): siRNA sense strand
uccgugagauuuacaagga

SEQ ID NO: 401612 - RNA, 19 nt, Homo sapiens
  misc_RNA (1)...(19): siRNA sense strand
caugauugauggcaacaag

SEQ ID NO: 401613 - RNA, 19 nt, Homo sapiens
  misc_RNA (1)...(19): siRNA sense strand
ggagaauguguucauggaa

SEQ ID NO: 401614 - RNA, 19 nt, Homo sapiens
  misc_RNA (1)...(19): siRNA sense strand
ggaauaucuagauguguug

SEQ ID NO: 401615 - RNA, 19 nt, Homo sapiens
  misc_RNA (1)...(19): siRNA sense strand
ggaagacaucguguacuau

SEQ ID NO: 401616 - RNA, 19 nt, Homo sapiens
  misc_RNA (1)...(19): siRNA sense strand
gaaggacacguuuucauug

SEQ ID NO: 401617 - RNA, 19 nt, Homo sapiens
  misc_RNA (1)...(19): siRNA sense strand
caacguguaugaggaugca

SEQ ID NO: 401618 - RNA, 19 nt, Homo sapiens
  misc_RNA (1)...(19): siRNA sense strand
gcagaacuccaacaucacu

SEQ ID NO: 401619 - RNA, 19 nt, Homo sapiens
  misc_RNA (1)...(19): siRNA sense strand
gcccaccguugcagauuuc

SEQ ID NO: 401620 - RNA, 19 nt, Homo sapiens
  misc_RNA (1)...(19): siRNA sense strand
ugucaaaccagaaccauca

SEQ ID NO: 401621 - RNA, 19 nt, Homo sapiens
  misc_RNA (1)...(19): siRNA sense strand
ccacgguuaugucuucaag

SEQ ID NO: 401622 - RNA, 19 nt, Homo sapiens
  misc_RNA (1)...(19): siRNA sense strand
ccagcagcuuugagucuga

SEQ ID NO: 401623 - RNA, 19 nt, Homo sapiens
  misc_RNA (1)...(19): siRNA sense strand
uccugcaggucaaguauuu

SEQ ID NO: 401624 - RNA, 19 nt, Homo sapiens
  misc_RNA (1)...(19): siRNA sense strand
gaugagaacaaggaagaga

SEQ ID NO: 401625 - RNA, 19 nt, Homo sapiens
  misc_RNA (1)...(19): siRNA sense strand
gccaacggcuauguguuug

SEQ ID NO: 401626 - RNA, 19 nt, Homo sapiens
  misc_RNA (1)...(19): siRNA sense strand
caucgaggacccaaacuuc

SEQ ID NO: 401627 - RNA, 19 nt, Homo sapiens
  misc_RNA (1)...(19): siRNA sense strand
ggagcagugugagcuagug

SEQ ID NO: 401628 - RNA, 19 nt, Homo sapiens
  misc_RNA (1)...(19): siRNA sense strand
cuauaaggagcacuaacua

SEQ ID NO: 401629 - RNA, 19 nt, Homo sapiens
  misc_RNA (1)...(19): siRNA sense strand
caaggucaacuauucauac

SEQ ID NO: 401630 - RNA, 19 nt, Homo sapiens
  misc_RNA (1)...(19): siRNA sense strand
cuacaacgcgacagaagau

SEQ ID NO: 401631 - RNA, 19 nt, Homo sapiens
  misc_RNA (1)...(19): siRNA sense strand
gaauggagauggagaagua

SEQ ID NO: 401632 - RNA, 19 nt, Homo sapiens
  misc_RNA (1)...(19): siRNA sense strand
gaaauugccuucaagaugu

SEQ ID NO: 401633 - RNA, 19 nt, Homo sapiens
  misc_RNA (1)...(19): siRNA sense strand
ggacuucgcuuuacccaaa

SEQ ID NO: 401634 - RNA, 19 nt, Homo sapiens
  misc_RNA (1)...(19): siRNA sense strand
gagcugaucugaagggaaa

SEQ ID NO: 401635 - RNA, 19 nt, Homo sapiens
  misc_RNA (1)...(19): siRNA sense strand
gagcaucucuugauaaagu

SEQ ID NO: 401636 - RNA, 19 nt, Homo sapiens
  misc_RNA (1)...(19): siRNA sense strand
ggaagaauuugaacagguu

SEQ ID NO: 401637 - RNA, 19 nt, Homo sapiens
  misc_RNA (1)...(19): siRNA sense strand
gaaaagugauggaauauga

SEQ ID NO: 401638 - RNA, 19 nt, Homo sapiens
  misc_RNA (1)...(19): siRNA sense strand
gaacucacuuucugcuuug

SEQ ID NO: 401639 - RNA, 19 nt, Homo sapiens
  misc_RNA (1)...(19): siRNA sense strand
gaacuucuuuacuuuccua

SEQ ID NO: 401640 - RNA, 19 nt, Homo sapiens
  misc_RNA (1)...(19): siRNA sense strand
gaauuuguuuccaucauga

SEQ ID NO: 401641 - RNA, 19 nt, Homo sapiens
  misc_RNA (1)...(19): siRNA sense strand
gaacugagcaauaaggaau

SEQ ID NO: 401642 - RNA, 19 nt, Homo sapiens
  misc_RNA (1)...(19): siRNA sense strand
gacaaaaucuuccgauauu

SEQ ID NO: 401643 - RNA, 19 nt, Homo sapiens
  misc_RNA (1)...(19): siRNA sense strand
ugaacucacuuucugcuuu

SEQ ID NO: 401644 - RNA, 19 nt, Homo sapiens
  misc_RNA (1)...(19): siRNA sense strand
guucagcccucacaaccua

SEQ ID NO: 401645 - RNA, 19 nt, Homo sapiens
  misc_RNA (1)...(19): siRNA sense strand
gcuggagcaucucuugaua

SEQ ID NO: 401646 - RNA, 19 nt, Homo sapiens
  misc_RNA (1)...(19): siRNA sense strand
ccacagagaucguccaacu

SEQ ID NO: 401647 - RNA, 19 nt, Homo sapiens
  misc_RNA (1)...(19): siRNA sense strand
gcaguuugguggcaugcua

SEQ ID NO: 401648 - RNA, 19 nt, Homo sapiens
  misc_RNA (1)...(19): siRNA sense strand
aaagugacaucggugauaa

SEQ ID NO: 401649 - RNA, 19 nt, Homo sapiens
  misc_RNA (1)...(19): siRNA sense strand
ggugauaaagggaagaaua

SEQ ID NO: 401650 - RNA, 19 nt, Homo sapiens
  misc_RNA (1)...(19): siRNA sense strand
gaucacagcccauccagau

SEQ ID NO: 401651 - RNA, 19 nt, Homo sapiens
  misc_RNA (1)...(19): siRNA sense strand
gggucuggaucaauauaua

SEQ ID NO: 401652 - RNA, 19 nt, Homo sapiens
  misc_RNA (1)...(19): siRNA sense strand
gugauaaagggaagaauaa

SEQ ID NO: 401653 - RNA, 19 nt, Homo sapiens
  misc_RNA (1)...(19): siRNA sense strand
gcaauaaggaauuuguuuc

SEQ ID NO: 401654 - RNA, 19 nt, Homo sapiens
  misc_RNA (1)...(19): siRNA sense strand
uggagcaucucuugauaaa

SEQ ID NO: 401655 - RNA, 19 nt, Homo sapiens
  misc_RNA (1)...(19): siRNA sense strand
agaaguagauauggaagaa

SEQ ID NO: 401656 - RNA, 19 nt, Homo sapiens
  misc_RNA (1)...(19): siRNA sense strand
gaagcagaaguguuuauga

SEQ ID NO: 401657 - RNA, 19 nt, Homo sapiens
  misc_RNA (1)...(19): siRNA sense strand
guggaaaugugcacaggaa

SEQ ID NO: 401658 - RNA, 19 nt, Homo sapiens
  misc_RNA (1)...(19): siRNA sense strand
agggaaagcugacaaucaa

SEQ ID NO: 401659 - RNA, 19 nt, Homo sapiens
  misc_RNA (1)...(19): siRNA sense strand
ccauauggcuggagcaucu

SEQ ID NO: 401660 - RNA, 19 nt, Homo sapiens
  misc_RNA (1)...(19): siRNA sense strand
ggaaagacagagaaaauuu

SEQ ID NO: 401661 - RNA, 19 nt, Homo sapiens
  misc_RNA (1)...(19): siRNA sense strand
acagaaaagugauggaaua

SEQ ID NO: 401662 - RNA, 19 nt, Homo sapiens
  misc_RNA (1)...(19): siRNA sense strand
ggagauggagaaguagaua

SEQ ID NO: 401663 - RNA, 19 nt, Homo sapiens
  misc_RNA (1)...(19): siRNA sense strand
ugaugaaggcaguauauuu

SEQ ID NO: 401664 - RNA, 19 nt, Homo sapiens
  misc_RNA (1)...(19): siRNA sense strand
gggagcaucugcaguaacu

SEQ ID NO: 401665 - RNA, 19 nt, Homo sapiens
  misc_RNA (1)...(19): siRNA sense strand
gaugggagaauuacugaga

SEQ ID NO: 401666 - RNA, 19 nt, Homo sapiens
  misc_RNA (1)...(19): siRNA sense strand
gacuaaugaugguggcuuu

SEQ ID NO: 401667 - RNA, 19 nt, Homo sapiens
  misc_RNA (1)...(19): siRNA sense strand
guacuggucuuuuguggaa

SEQ ID NO: 401668 - RNA, 19 nt, Homo sapiens
  misc_RNA (1)...(19): siRNA sense strand
cgucugaacucacuuucug

SEQ ID NO: 401669 - RNA, 19 nt, Homo sapiens
  misc_RNA (1)...(19): siRNA sense strand
gauaaagggaagaauaaag

SEQ ID NO: 401670 - RNA, 19 nt, Homo sapiens
  misc_RNA (1)...(19): siRNA sense strand
gugauggaauaugagaaua

SEQ ID NO: 401671 - RNA, 19 nt, Homo sapiens
  misc_RNA (1)...(19): siRNA sense strand
aggaaagggucugacauuu

SEQ ID NO: 401672 - RNA, 19 nt, Homo sapiens
  misc_RNA (1)...(19): siRNA sense strand
agaggcagcucaagaagca

SEQ ID NO: 401673 - RNA, 19 nt, Homo sapiens
  misc_RNA (1)...(19): siRNA sense strand
uggagaaugugggcucaua

SEQ ID NO: 401674 - RNA, 19 nt, Homo sapiens
  misc_RNA (1)...(19): siRNA sense strand
gaugaaggcaguauauuuu

SEQ ID NO: 401675 - RNA, 19 nt, Homo sapiens
  misc_RNA (1)...(19): siRNA sense strand
ggucuggaucaauauauaa

SEQ ID NO: 401676 - RNA, 19 nt, Homo sapiens
  misc_RNA (1)...(19): siRNA sense strand
ccuugaaagucaucaguga

SEQ ID NO: 401677 - RNA, 19 nt, Homo sapiens
  misc_RNA (1)...(19): siRNA sense strand
ccaggacaguggcuaaagu

SEQ ID NO: 401678 - RNA, 19 nt, Homo sapiens
  misc_RNA (1)...(19): siRNA sense strand
aaugugggcucauauccuu

SEQ ID NO: 401679 - RNA, 19 nt, Homo sapiens
  misc_RNA (1)...(19): siRNA sense strand
ggaauaugagaauaggauu

SEQ ID NO: 401680 - RNA, 19 nt, Homo sapiens
  misc_RNA (1)...(19): siRNA sense strand
ggguuucacucgccucaug

SEQ ID NO: 401681 - RNA, 19 nt, Homo sapiens
  misc_RNA (1)...(19): siRNA sense strand
gcagcaugauguucugaag

SEQ ID NO: 401682 - RNA, 19 nt, Homo sapiens
  misc_RNA (1)...(19): siRNA sense strand
ugcagaaucuccaccaugu

SEQ ID NO: 401683 - RNA, 19 nt, Homo sapiens
  misc_RNA (1)...(19): siRNA sense strand
gauguuugauuugaaugga

SEQ ID NO: 401684 - RNA, 19 nt, Homo sapiens
  misc_RNA (1)...(19): siRNA sense strand
gauggaauaugagaauagg

SEQ ID NO: 401685 - RNA, 19 nt, Homo sapiens
  misc_RNA (1)...(19): siRNA sense strand
ggaaacugccugggacuuc

SEQ ID NO: 401686 - RNA, 19 nt, Homo sapiens
  misc_RNA (1)...(19): siRNA sense strand
gagcaauaaggaauuuguu

SEQ ID NO: 401687 - RNA, 19 nt, Homo sapiens
  misc_RNA (1)...(19): siRNA sense strand
guaaacugcagcaugaugu

SEQ ID NO: 401688 - RNA, 19 nt, Homo sapiens
  misc_RNA (1)...(19): siRNA sense strand
gcugaugaaggcaguauau

SEQ ID NO: 401689 - RNA, 19 nt, Homo sapiens
  misc_RNA (1)...(19): siRNA sense strand
acuugggucuggaucaaua

SEQ ID NO: 401690 - RNA, 19 nt, Homo sapiens
  misc_RNA (1)...(19): siRNA sense strand
ccacuccucagagaaauuu

SEQ ID NO: 401691 - RNA, 19 nt, Homo sapiens
  misc_RNA (1)...(19): siRNA sense strand
cagauccggcgaagacuaa

SEQ ID NO: 401692 - RNA, 19 nt, Homo sapiens
  misc_RNA (1)...(19): siRNA sense strand
ucucagaccacguguguga

SEQ ID NO: 401693 - RNA, 19 nt, Homo sapiens
  misc_RNA (1)...(19): siRNA sense strand
ccugggagcaucugcagua

SEQ ID NO: 401694 - RNA, 19 nt, Homo sapiens
  misc_RNA (1)...(19): siRNA sense strand
gaaggaaagggucugacau

SEQ ID NO: 401695 - RNA, 19 nt, Homo sapiens
  misc_RNA (1)...(19): siRNA sense strand
gagaaguagauauggaaga

SEQ ID NO: 401696 - RNA, 19 nt, Homo sapiens
  misc_RNA (1)...(19): siRNA sense strand
agcguaaacugcagcauga

SEQ ID NO: 401697 - RNA, 19 nt, Homo sapiens
  misc_RNA (1)...(19): siRNA sense strand
ggagaaugugggcucauau

SEQ ID NO: 401698 - RNA, 19 nt, Homo sapiens
  misc_RNA (1)...(19): siRNA sense strand
gaaaugugcacaggaaacu

SEQ ID NO: 401699 - RNA, 19 nt, Homo sapiens
  misc_RNA (1)...(19): siRNA sense strand
uucugaagcuugaguuuga

SEQ ID NO: 401700 - RNA, 19 nt, Homo sapiens
  misc_RNA (1)...(19): siRNA sense strand
gagaaugugggcucauauc

SEQ ID NO: 401701 - RNA, 19 nt, Homo sapiens
  misc_RNA (1)...(19): siRNA sense strand
gcucucagaccacgugugu

SEQ ID NO: 401702 - RNA, 19 nt, Homo sapiens
  misc_RNA (1)...(19): siRNA sense strand
aaggaaagggucugacauu

SEQ ID NO: 401703 - RNA, 19 nt, Homo sapiens
  misc_RNA (1)...(19): siRNA sense strand
ggaaagcugacaaucaaaa

SEQ ID NO: 401704 - RNA, 19 nt, Homo sapiens
  misc_RNA (1)...(19): siRNA sense strand
guagauauggaagaauuug

SEQ ID NO: 401705 - RNA, 19 nt, Homo sapiens
  misc_RNA (1)...(19): siRNA sense strand
cagacaaaaucuuccgaua

SEQ ID NO: 401706 - RNA, 19 nt, Homo sapiens
  misc_RNA (1)...(19): siRNA sense strand
ggaaaugugcacaggaaac

SEQ ID NO: 401707 - RNA, 19 nt, Homo sapiens
  misc_RNA (1)...(19): siRNA sense strand
aagggaagaauaaagauga

SEQ ID NO: 401708 - RNA, 19 nt, Homo sapiens
  misc_RNA (1)...(19): siRNA sense strand
cagaaucuccaccaugugu

SEQ ID NO: 401709 - RNA, 19 nt, Homo sapiens
  misc_RNA (1)...(19): siRNA sense strand
gaagggaaagcugacaauc

SEQ ID NO: 401710 - RNA, 19 nt, Homo sapiens
  misc_RNA (1)...(19): siRNA sense strand
uuacacccuuggagaaugu

SEQ ID NO: 401711 - RNA, 19 nt, Homo sapiens
  misc_RNA (1)...(19): siRNA sense strand
aagcagaaguguuuaugac

SEQ ID NO: 401712 - RNA, 19 nt, Homo sapiens
  misc_RNA (1)...(19): siRNA sense strand
aaauugccuucaagauguu

SEQ ID NO: 401713 - RNA, 19 nt, Homo sapiens
  misc_RNA (1)...(19): siRNA sense strand
gagauggagaaguagauau

SEQ ID NO: 401714 - RNA, 19 nt, Homo sapiens
  misc_RNA (1)...(19): siRNA sense strand
uggugaagcagaaguguuu

SEQ ID NO: 401715 - RNA, 19 nt, Homo sapiens
  misc_RNA (1)...(19): siRNA sense strand
ggaaaagcccaaagacaug

SEQ ID NO: 401716 - RNA, 19 nt, Homo sapiens
  misc_RNA (1)...(19): siRNA sense strand
gguaugcgccacagagauc

SEQ ID NO: 401717 - RNA, 19 nt, Homo sapiens
  misc_RNA (1)...(19): siRNA sense strand
ugauuugaauggagaugga

SEQ ID NO: 401718 - RNA, 19 nt, Homo sapiens
  misc_RNA (1)...(19): siRNA sense strand
ccucacaacuguucuuucc

SEQ ID NO: 401719 - RNA, 19 nt, Homo sapiens
  misc_RNA (1)...(19): siRNA sense strand
acacuugggucuggaucaa

SEQ ID NO: 401720 - RNA, 19 nt, Homo sapiens
  misc_RNA (1)...(19): siRNA sense strand
ugugguguuugcacucuuu

SEQ ID NO: 401721 - RNA, 19 nt, Homo sapiens
  misc_RNA (1)...(19): siRNA sense strand
gcucauauccuuuucagau

SEQ ID NO: 401722 - RNA, 19 nt, Homo sapiens
  misc_RNA (1)...(19): siRNA sense strand
ccaaagacauggguuucac

SEQ ID NO: 401723 - RNA, 19 nt, Homo sapiens
  misc_RNA (1)...(19): siRNA sense strand
acugagcaauaaggaauuu

SEQ ID NO: 401724 - RNA, 19 nt, Homo sapiens
  misc_RNA (1)...(19): siRNA sense strand
gauguggacacugcauuga

SEQ ID NO: 401725 - RNA, 19 nt, Homo sapiens
  misc_RNA (1)...(19): siRNA sense strand
gaaucuccaccauguguag

SEQ ID NO: 401726 - RNA, 19 nt, Homo sapiens
  misc_RNA (1)...(19): siRNA sense strand
ccucgaauuucagcguaaa

SEQ ID NO: 401727 - RNA, 19 nt, Homo sapiens
  misc_RNA (1)...(19): siRNA sense strand
gaagcaacggcugaugaga

SEQ ID NO: 401728 - RNA, 19 nt, Homo sapiens
  misc_RNA (1)...(19): siRNA sense strand
uucaggagguggagaacuu

SEQ ID NO: 401729 - RNA, 19 nt, Homo sapiens
  misc_RNA (1)...(19): siRNA sense strand
gcagaggcagcucaagaag

SEQ ID NO: 401730 - RNA, 19 nt, Homo sapiens
  misc_RNA (1)...(19): siRNA sense strand
gaugugguguuugcacucu

SEQ ID NO: 401731 - RNA, 19 nt, Homo sapiens
  misc_RNA (1)...(19): siRNA sense strand
gcagacagaugauagauug

SEQ ID NO: 401732 - RNA, 19 nt, Homo sapiens
  misc_RNA (1)...(19): siRNA sense strand
gaccagagauccuacagua

SEQ ID NO: 401733 - RNA, 19 nt, Homo sapiens
  misc_RNA (1)...(19): siRNA sense strand
ggauuacucuucccaauga

SEQ ID NO: 401734 - RNA, 19 nt, Homo sapiens
  misc_RNA (1)...(19): siRNA sense strand
gaaagccaauggaaagauu

SEQ ID NO: 401735 - RNA, 19 nt, Homo sapiens
  misc_RNA (1)...(19): siRNA sense strand
caauagaacuguagaagau

SEQ ID NO: 401736 - RNA, 19 nt, Homo sapiens
  misc_RNA (1)...(19): siRNA sense strand
gacgagagcuuccugagaa

SEQ ID NO: 401737 - RNA, 19 nt, Homo sapiens
  misc_RNA (1)...(19): siRNA sense strand
agacagauaugcugaacua

SEQ ID NO: 401738 - RNA, 19 nt, Homo sapiens
  misc_RNA (1)...(19): siRNA sense strand
ggaauuguuugaagaaguu

SEQ ID NO: 401739 - RNA, 19 nt, Homo sapiens
  misc_RNA (1)...(19): siRNA sense strand
gcugagcgcugaugagauu

SEQ ID NO: 401740 - RNA, 19 nt, Homo sapiens
  misc_RNA (1)...(19): siRNA sense strand
gauauaacacugccuuuaa

SEQ ID NO: 401741 - RNA, 19 nt, Homo sapiens
  misc_RNA (1)...(19): siRNA sense strand
acagaaaucucuugcuaaa

SEQ ID NO: 401742 - RNA, 19 nt, Homo sapiens
  misc_RNA (1)...(19): siRNA sense strand
gcaguuuguucgcuauaua

SEQ ID NO: 401743 - RNA, 19 nt, Homo sapiens
  misc_RNA (1)...(19): siRNA sense strand
uagaagauguugcagaauu

SEQ ID NO: 401744 - RNA, 19 nt, Homo sapiens
  misc_RNA (1)...(19): siRNA sense strand
agacagaaaucucuugcua

SEQ ID NO: 401745 - RNA, 19 nt, Homo sapiens
  misc_RNA (1)...(19): siRNA sense strand
guaaggaauuguuugaaga

SEQ ID NO: 401746 - RNA, 19 nt, Homo sapiens
  misc_RNA (1)...(19): siRNA sense strand
guaggaaucucccauaugg

SEQ ID NO: 401747 - RNA, 19 nt, Homo sapiens
  misc_RNA (1)...(19): siRNA sense strand
gaacuuuaaucuucagcaa

SEQ ID NO: 401748 - RNA, 19 nt, Homo sapiens
  misc_RNA (1)...(19): siRNA sense strand
ggauaucgauggugucuca

SEQ ID NO: 401749 - RNA, 19 nt, Homo sapiens
  misc_RNA (1)...(19): siRNA sense strand
cacccaagaugucggauua

SEQ ID NO: 401750 - RNA, 19 nt, Homo sapiens
  misc_RNA (1)...(19): siRNA sense strand
agaaaucucuugcuaaaca

SEQ ID NO: 401751 - RNA, 19 nt, Homo sapiens
  misc_RNA (1)...(19): siRNA sense strand
ggacuugauuggccagauu

SEQ ID NO: 401752 - RNA, 19 nt, Homo sapiens
  misc_RNA (1)...(19): siRNA sense strand
aaacucagcuuaagaaacu

SEQ ID NO: 401753 - RNA, 19 nt, Homo sapiens
  misc_RNA (1)...(19): siRNA sense strand
gacagugacuacuuuaaau

SEQ ID NO: 401754 - RNA, 19 nt, Homo sapiens
  misc_RNA (1)...(19): siRNA sense strand
gcuaaacacuggcuccaau

SEQ ID NO: 401755 - RNA, 19 nt, Homo sapiens
  misc_RNA (1)...(19): siRNA sense strand
cugcaaugcugaacuuuaa

SEQ ID NO: 401756 - RNA, 19 nt, Homo sapiens
  misc_RNA (1)...(19): siRNA sense strand
caagugccgugaccugaaa

SEQ ID NO: 401757 - RNA, 19 nt, Homo sapiens
  misc_RNA (1)...(19): siRNA sense strand
cuaaugauguccacucaga

SEQ ID NO: 401758 - RNA, 19 nt, Homo sapiens
  misc_RNA (1)...(19): siRNA sense strand
gaucaaauccacaauagca

SEQ ID NO: 401759 - RNA, 19 nt, Homo sapiens
  misc_RNA (1)...(19): siRNA sense strand
ugacggauauuuacuuaca

SEQ ID NO: 401760 - RNA, 19 nt, Homo sapiens
  misc_RNA (1)...(19): siRNA sense strand
agaagauguugcagaauuu

SEQ ID NO: 401761 - RNA, 19 nt, Homo sapiens
  misc_RNA (1)...(19): siRNA sense strand
uaacacugccuuuaaauuc

SEQ ID NO: 401762 - RNA, 19 nt, Homo sapiens
  misc_RNA (1)...(19): siRNA sense strand
aagcggagccucagugaua

SEQ ID NO: 401763 - RNA, 19 nt, Homo sapiens
  misc_RNA (1)...(19): siRNA sense strand
aggaagagaugaagaacaa

SEQ ID NO: 401764 - RNA, 19 nt, Homo sapiens
  misc_RNA (1)...(19): siRNA sense strand
cugagaagaugucugaauu

SEQ ID NO: 401765 - RNA, 19 nt, Homo sapiens
  misc_RNA (1)...(19): siRNA sense strand
gaaguauucuccgauuuua

SEQ ID NO: 401766 - RNA, 19 nt, Homo sapiens
  misc_RNA (1)...(19): siRNA sense strand
ggaaggaccgggacagaga

SEQ ID NO: 401767 - RNA, 19 nt, Homo sapiens
  misc_RNA (1)...(19): siRNA sense strand
gaaauacggcuuugaacca

SEQ ID NO: 401768 - RNA, 19 nt, Homo sapiens
  misc_RNA (1)...(19): siRNA sense strand
uguagaagauguugcagaa

SEQ ID NO: 401769 - RNA, 19 nt, Homo sapiens
  misc_RNA (1)...(19): siRNA sense strand
gcacagaugcagacagaug

SEQ ID NO: 401770 - RNA, 19 nt, Homo sapiens
  misc_RNA (1)...(19): siRNA sense strand
gaaccacucaccaggauga

SEQ ID NO: 401771 - RNA, 19 nt, Homo sapiens
  misc_RNA (1)...(19): siRNA sense strand
gagaaccacucaccaggau

SEQ ID NO: 401772 - RNA, 19 nt, Homo sapiens
  misc_RNA (1)...(19): siRNA sense strand
gagaagaugucugaauuuu

SEQ ID NO: 401773 - RNA, 19 nt, Homo sapiens
  misc_RNA (1)...(19): siRNA sense strand
ugcagaagaugauguuaaa

SEQ ID NO: 401774 - RNA, 19 nt, Homo sapiens
  misc_RNA (1)...(19): siRNA sense strand
gaacugaaagagcagauuc

SEQ ID NO: 401775 - RNA, 19 nt, Homo sapiens
  misc_RNA (1)...(19): siRNA sense strand
gcauaucccauacugcuuu

SEQ ID NO: 401776 - RNA, 19 nt, Homo sapiens
  misc_RNA (1)...(19): siRNA sense strand
gccgugaccugaaaguuga

SEQ ID NO: 401777 - RNA, 19 nt, Homo sapiens
  misc_RNA (1)...(19): siRNA sense strand
uaugacaaguucacaauuc

SEQ ID NO: 401778 - RNA, 19 nt, Homo sapiens
  misc_RNA (1)...(19): siRNA sense strand
cgacagugacuacuuuaaa

SEQ ID NO: 401779 - RNA, 19 nt, Homo sapiens
  misc_RNA (1)...(19): siRNA sense strand
gaaggagucaguucucuca

SEQ ID NO: 401780 - RNA, 19 nt, Homo sapiens
  misc_RNA (1)...(19): siRNA sense strand
gaacgcacgcgcagaaauc

SEQ ID NO: 401781 - RNA, 19 nt, Homo sapiens
  misc_RNA (1)...(19): siRNA sense strand
caaauccacaauagcaaua

SEQ ID NO: 401782 - RNA, 19 nt, Homo sapiens
  misc_RNA (1)...(19): siRNA sense strand
caauuugguugcuucuuug

SEQ ID NO: 401783 - RNA, 19 nt, Homo sapiens
  misc_RNA (1)...(19): siRNA sense strand
gcagcaggcucgucagucu

SEQ ID NO: 401784 - RNA, 19 nt, Homo sapiens
  misc_RNA (1)...(19): siRNA sense strand
gaagcaguuuguucgcuau

SEQ ID NO: 401785 - RNA, 19 nt, Homo sapiens
  misc_RNA (1)...(19): siRNA sense strand
guugguaccuucccugaug

SEQ ID NO: 401786 - RNA, 19 nt, Homo sapiens
  misc_RNA (1)...(19): siRNA sense strand
gagcauggauaucgauggu

SEQ ID NO: 401787 - RNA, 19 nt, Homo sapiens
  misc_RNA (1)...(19): siRNA sense strand
gcgcagaaaucgacuacag

SEQ ID NO: 401788 - RNA, 19 nt, Homo sapiens
  misc_RNA (1)...(19): siRNA sense strand
caagaacgcacgcgcagaa

SEQ ID NO: 401789 - RNA, 19 nt, Homo sapiens
  misc_RNA (1)...(19): siRNA sense strand
gcagcucgcccucuaauag

SEQ ID NO: 401790 - RNA, 19 nt, Homo sapiens
  misc_RNA (1)...(19): siRNA sense strand
aagcacagaugcagacaga

SEQ ID NO: 401791 - RNA, 19 nt, Homo sapiens
  misc_RNA (1)...(19): siRNA sense strand
ccucgacagugacuacuuu

SEQ ID NO: 401792 - RNA, 19 nt, Homo sapiens
  misc_RNA (1)...(19): siRNA sense strand
ucacagugcauaucccaua

SEQ ID NO: 401793 - RNA, 19 nt, Homo sapiens
  misc_RNA (1)...(19): siRNA sense strand
uguaagaucuuccgugucu

SEQ ID NO: 401794 - RNA, 19 nt, Homo sapiens
  misc_RNA (1)...(19): siRNA sense strand
gcccugaagugucugaaga

SEQ ID NO: 401795 - RNA, 19 nt, Homo sapiens
  misc_RNA (1)...(19): siRNA sense strand
guugaucccacguauauuu

SEQ ID NO: 401796 - RNA, 19 nt, Homo sapiens
  misc_RNA (1)...(19): siRNA sense strand
gaaagucuggagucucuga

SEQ ID NO: 401797 - RNA, 19 nt, Homo sapiens
  misc_RNA (1)...(19): siRNA sense strand
ggagcucaauagaacugua

SEQ ID NO: 401798 - RNA, 19 nt, Homo sapiens
  misc_RNA (1)...(19): siRNA sense strand
ggugccagcucuuugucua

SEQ ID NO: 401799 - RNA, 19 nt, Homo sapiens
  misc_RNA (1)...(19): siRNA sense strand
ucacgaagcagguccagaa

SEQ ID NO: 401800 - RNA, 19 nt, Homo sapiens
  misc_RNA (1)...(19): siRNA sense strand
gcaccuuuauggaggaguu

SEQ ID NO: 401801 - RNA, 19 nt, Homo sapiens
  misc_RNA (1)...(19): siRNA sense strand
gcaacuagacaccgcgaaa

SEQ ID NO: 401802 - RNA, 19 nt, Homo sapiens
  misc_RNA (1)...(19): siRNA sense strand
agaagaugauguuaaagug

SEQ ID NO: 401803 - RNA, 19 nt, Homo sapiens
  misc_RNA (1)...(19): siRNA sense strand
cauaucccauacugcuuua

SEQ ID NO: 401804 - RNA, 19 nt, Homo sapiens
  misc_RNA (1)...(19): siRNA sense strand
ucaccaggaugaagaagug

SEQ ID NO: 401805 - RNA, 19 nt, Homo sapiens
  misc_RNA (1)...(19): siRNA sense strand
cgauauaacacugccuuua

SEQ ID NO: 401806 - RNA, 19 nt, Homo sapiens
  misc_RNA (1)...(19): siRNA sense strand
aaacauggagguugaugaa

SEQ ID NO: 401807 - RNA, 19 nt, Homo sapiens
  misc_RNA (1)...(19): siRNA sense strand
gaaaguggaggagauagug

SEQ ID NO: 401808 - RNA, 19 nt, Homo sapiens
  misc_RNA (1)...(19): siRNA sense strand
acugacggauauuuacuua

SEQ ID NO: 401809 - RNA, 19 nt, Homo sapiens
  misc_RNA (1)...(19): siRNA sense strand
gaagagaugaagaacaaag

SEQ ID NO: 401810 - RNA, 19 nt, Homo sapiens
  misc_RNA (1)...(19): siRNA sense strand
gauguuccuuguugugaug

SEQ ID NO: 401811 - RNA, 19 nt, Homo sapiens
  misc_RNA (1)...(19): siRNA sense strand
gacagaaaucucuugcuaa

SEQ ID NO: 401812 - RNA, 19 nt, Homo sapiens
  misc_RNA (1)...(19): siRNA sense strand
uaauggaagugcuaaugau

SEQ ID NO: 401813 - RNA, 19 nt, Homo sapiens
  misc_RNA (1)...(19): siRNA sense strand
gcaaagagacagauaugcu

SEQ ID NO: 401814 - RNA, 19 nt, Homo sapiens
  misc_RNA (1)...(19): siRNA sense strand
ugagaaauacggcuuugaa

SEQ ID NO: 401815 - RNA, 19 nt, Homo sapiens
  misc_RNA (1)...(19): siRNA sense strand
gcugcaaugcugaacuuua

SEQ ID NO: 401816 - RNA, 19 nt, Homo sapiens
  misc_RNA (1)...(19): siRNA sense strand
auacagauguugagcauac

SEQ ID NO: 401817 - RNA, 19 nt, Homo sapiens
  misc_RNA (1)...(19): siRNA sense strand
gcucaccaccucucuauuc

SEQ ID NO: 401818 - RNA, 19 nt, Homo sapiens
  misc_RNA (1)...(19): siRNA sense strand
cuacaaggcucccuaacac

SEQ ID NO: 401819 - RNA, 19 nt, Homo sapiens
  misc_RNA (1)...(19): siRNA sense strand
gaaaaugaucgaagagaaa

SEQ ID NO: 401820 - RNA, 19 nt, Homo sapiens
  misc_RNA (1)...(19): siRNA sense strand
gaaaugcugaagcgcugua

SEQ ID NO: 401821 - RNA, 19 nt, Homo sapiens
  misc_RNA (1)...(19): siRNA sense strand
gagcugagcgcugaugaga

SEQ ID NO: 401822 - RNA, 19 nt, Homo sapiens
  misc_RNA (1)...(19): siRNA sense strand
ccagcucuuugucuaguuu

SEQ ID NO: 401823 - RNA, 19 nt, Homo sapiens
  misc_RNA (1)...(19): siRNA sense strand
gcagcacggucaccagaca

SEQ ID NO: 401824 - RNA, 19 nt, Homo sapiens
  misc_RNA (1)...(19): siRNA sense strand
cagcuggucuguaagaucu

SEQ ID NO: 401825 - RNA, 19 nt, Homo sapiens
  misc_RNA (1)...(19): siRNA sense strand
uaauugggauuccuacagu

SEQ ID NO: 401826 - RNA, 19 nt, Homo sapiens
  misc_RNA (1)...(19): siRNA sense strand
augcugaacuuuaaucuuc

SEQ ID NO: 401827 - RNA, 19 nt, Homo sapiens
  misc_RNA (1)...(19): siRNA sense strand
cagcguggcuuccuuuggu

SEQ ID NO: 401828 - RNA, 19 nt, Homo sapiens
  misc_RNA (1)...(19): siRNA sense strand
gaagcgaauccaugaagug

SEQ ID NO: 401829 - RNA, 19 nt, Homo sapiens
  misc_RNA (1)...(19): siRNA sense strand
cgaccgaguuggaauagag

SEQ ID NO: 401830 - RNA, 19 nt, Homo sapiens
  misc_RNA (1)...(19): siRNA sense strand
cgagaaaguggaggagaua

SEQ ID NO: 401831 - RNA, 19 nt, Homo sapiens
  misc_RNA (1)...(19): siRNA sense strand
gcaaugugcuggauaucaa

SEQ ID NO: 401832 - RNA, 19 nt, Homo sapiens
  misc_RNA (1)...(19): siRNA sense strand
gaaagaaggcuauaagaag

SEQ ID NO: 401833 - RNA, 19 nt, Homo sapiens
  misc_RNA (1)...(19): siRNA sense strand
gagaagcccuaccugaguu

SEQ ID NO: 401834 - RNA, 19 nt, Homo sapiens
  misc_RNA (1)...(19): siRNA sense strand
agaaugagcuccuucgaau

SEQ ID NO: 401835 - RNA, 19 nt, Homo sapiens
  misc_RNA (1)...(19): siRNA sense strand
ggucaacggaauagauuua

SEQ ID NO: 401836 - RNA, 19 nt, Homo sapiens
  misc_RNA (1)...(19): siRNA sense strand
ccaagaaugugcacgacaa

SEQ ID NO: 401837 - RNA, 19 nt, Homo sapiens
  misc_RNA (1)...(19): siRNA sense strand
aaagaaggcuauaagaagu

SEQ ID NO: 401838 - RNA, 19 nt, Homo sapiens
  misc_RNA (1)...(19): siRNA sense strand
gcuauaagaaguccucaaa

SEQ ID NO: 401839 - RNA, 19 nt, Homo sapiens
  misc_RNA (1)...(19): siRNA sense strand
ugaaagaaggcuauaagaa

SEQ ID NO: 401840 - RNA, 19 nt, Homo sapiens
  misc_RNA (1)...(19): siRNA sense strand
gacaagaagcugcguguga

SEQ ID NO: 401841 - RNA, 19 nt, Homo sapiens
  misc_RNA (1)...(19): siRNA sense strand
gagcagacaggcaggauug

SEQ ID NO: 401842 - RNA, 19 nt, Homo sapiens
  misc_RNA (1)...(19): siRNA sense strand
gaugugauccucugcaugu

SEQ ID NO: 401843 - RNA, 19 nt, Homo sapiens
  misc_RNA (1)...(19): siRNA sense strand
gagaaugagcuccuucgaa

SEQ ID NO: 401844 - RNA, 19 nt, Homo sapiens
  misc_RNA (1)...(19): siRNA sense strand
ggaaauugaugggcucucu

SEQ ID NO: 401845 - RNA, 19 nt, Homo sapiens
  misc_RNA (1)...(19): siRNA sense strand
gaucgaagaggaaauugau

SEQ ID NO: 401846 - RNA, 19 nt, Homo sapiens
  misc_RNA (1)...(19): siRNA sense strand
gcacgacaaccacuucugu

SEQ ID NO: 401847 - RNA, 19 nt, Homo sapiens
  misc_RNA (1)...(19): siRNA sense strand
gggcugaagcggaacauga

SEQ ID NO: 401848 - RNA, 19 nt, Homo sapiens
  misc_RNA (1)...(19): siRNA sense strand
gaugagauucgacgguuga

SEQ ID NO: 401849 - RNA, 19 nt, Homo sapiens
  misc_RNA (1)...(19): siRNA sense strand
acaagguccucaucuggaa

SEQ ID NO: 401850 - RNA, 19 nt, Homo sapiens
  misc_RNA (1)...(19): siRNA sense strand
acaagaagcugcgugugau

SEQ ID NO: 401851 - RNA, 19 nt, Homo sapiens
  misc_RNA (1)...(19): siRNA sense strand
gagauucgacgguugaaag

SEQ ID NO: 401852 - RNA, 19 nt, Homo sapiens
  misc_RNA (1)...(19): siRNA sense strand
uuaaggcucccaucaaaga

SEQ ID NO: 401853 - RNA, 19 nt, Homo sapiens
  misc_RNA (1)...(19): siRNA sense strand
gcuccaaguuccggaaugu

SEQ ID NO: 401854 - RNA, 19 nt, Homo sapiens
  misc_RNA (1)...(19): siRNA sense strand
aggaagacauuuacccaau

SEQ ID NO: 401855 - RNA, 19 nt, Homo sapiens
  misc_RNA (1)...(19): siRNA sense strand
ucuacaagcuggugacucu

SEQ ID NO: 401856 - RNA, 19 nt, Homo sapiens
  misc_RNA (1)...(19): siRNA sense strand
auuuaaggcucccaucaaa

SEQ ID NO: 401857 - RNA, 19 nt, Homo sapiens
  misc_RNA (1)...(19): siRNA sense strand
gaaacauccgguacuacga

SEQ ID NO: 401858 - RNA, 19 nt, Homo sapiens
  misc_RNA (1)...(19): siRNA sense strand
gcagacaggcaggauugaa

SEQ ID NO: 401859 - RNA, 19 nt, Homo sapiens
  misc_RNA (1)...(19): siRNA sense strand
cagaaggacauccgcauuc

SEQ ID NO: 401860 - RNA, 19 nt, Homo sapiens
  misc_RNA (1)...(19): siRNA sense strand
caagaagcugcgugugauu

SEQ ID NO: 401861 - RNA, 19 nt, Homo sapiens
  misc_RNA (1)...(19): siRNA sense strand
agaagaguguuguggucaa

SEQ ID NO: 401862 - RNA, 19 nt, Homo sapiens
  misc_RNA (1)...(19): siRNA sense strand
ccagaaggacauccgcauu

SEQ ID NO: 401863 - RNA, 19 nt, Homo sapiens
  misc_RNA (1)...(19): siRNA sense strand
ccacuucugugccgucaac

SEQ ID NO: 401864 - RNA, 19 nt, Homo sapiens
  misc_RNA (1)...(19): siRNA sense strand
gaaugagcuccuucgaaug

SEQ ID NO: 401865 - RNA, 19 nt, Homo sapiens
  misc_RNA (1)...(19): siRNA sense strand
ccacgugcaaggacaagaa

SEQ ID NO: 401866 - RNA, 19 nt, Homo sapiens
  misc_RNA (1)...(19): siRNA sense strand
gcagcaggaugagauucga

SEQ ID NO: 401867 - RNA, 19 nt, Homo sapiens
  misc_RNA (1)...(19): siRNA sense strand
uggaaagggugauggaaac

SEQ ID NO: 401868 - RNA, 19 nt, Homo sapiens
  misc_RNA (1)...(19): siRNA sense strand
aaugagcuccuucgaaugu

SEQ ID NO: 401869 - RNA, 19 nt, Homo sapiens
  misc_RNA (1)...(19): siRNA sense strand
gagaucccgugcugauguc

SEQ ID NO: 401870 - RNA, 19 nt, Homo sapiens
  misc_RNA (1)...(19): siRNA sense strand
cgagaucccgugcugaugu

SEQ ID NO: 401871 - RNA, 19 nt, Homo sapiens
  misc_RNA (1)...(19): siRNA sense strand
gcacugagaagcccuaccu

SEQ ID NO: 401872 - RNA, 19 nt, Homo sapiens
  misc_RNA (1)...(19): siRNA sense strand
gacagagaaugagcuccuu

SEQ ID NO: 401873 - RNA, 19 nt, Homo sapiens
  misc_RNA (1)...(19): siRNA sense strand
ggagcagacaggcaggauu

SEQ ID NO: 401874 - RNA, 19 nt, Homo sapiens
  misc_RNA (1)...(19): siRNA sense strand
gaaagggugauggaaacau

SEQ ID NO: 401875 - RNA, 19 nt, Homo sapiens
  misc_RNA (1)...(19): siRNA sense strand
ggugagccggugaagauga

SEQ ID NO: 401876 - RNA, 19 nt, Homo sapiens
  misc_RNA (1)...(19): siRNA sense strand
ugagaagcccuaccugagu

SEQ ID NO: 401877 - RNA, 19 nt, Homo sapiens
  misc_RNA (1)...(19): siRNA sense strand
cuucaucgacaacaucauu

SEQ ID NO: 401878 - RNA, 19 nt, Homo sapiens
  misc_RNA (1)...(19): siRNA sense strand
guggucaacggaauagauu

SEQ ID NO: 401879 - RNA, 19 nt, Homo sapiens
  misc_RNA (1)...(19): siRNA sense strand
guauuuaaggcucccauca

SEQ ID NO: 401880 - RNA, 19 nt, Homo sapiens
  misc_RNA (1)...(19): siRNA sense strand
gaagcugcgugugauugag

SEQ ID NO: 401881 - RNA, 19 nt, Homo sapiens
  misc_RNA (1)...(19): siRNA sense strand
gugagccggugaagaugau

SEQ ID NO: 401882 - RNA, 19 nt, Homo sapiens
  misc_RNA (1)...(19): siRNA sense strand
ggaaagggugauggaaaca

SEQ ID NO: 401883 - RNA, 19 nt, Homo sapiens
  misc_RNA (1)...(19): siRNA sense strand
gcacgggcuggauguguca

SEQ ID NO: 401884 - RNA, 19 nt, Homo sapiens
  misc_RNA (1)...(19): siRNA sense strand
ccaaguuccggaaugucua

SEQ ID NO: 401885 - RNA, 19 nt, Homo sapiens
  misc_RNA (1)...(19): siRNA sense strand
ccuaccaggaagacauuua

SEQ ID NO: 401886 - RNA, 19 nt, Homo sapiens
  misc_RNA (1)...(19): siRNA sense strand
ugggugagccggugaagau

SEQ ID NO: 401887 - RNA, 19 nt, Homo sapiens
  misc_RNA (1)...(19): siRNA sense strand
gcgagguguuccgcuucua

SEQ ID NO: 401888 - RNA, 19 nt, Homo sapiens
  misc_RNA (1)...(19): siRNA sense strand
guggaacacaagacagauu

SEQ ID NO: 401889 - RNA, 19 nt, Homo sapiens
  misc_RNA (1)...(19): siRNA sense strand
gagugaaccgggugguguu

SEQ ID NO: 401890 - RNA, 19 nt, Homo sapiens
  misc_RNA (1)...(19): siRNA sense strand
ggcaaugugcuggauauca

SEQ ID NO: 401891 - RNA, 19 nt, Homo sapiens
  misc_RNA (1)...(19): siRNA sense strand
ggaggcaucaaccgagauc

SEQ ID NO: 401892 - RNA, 19 nt, Homo sapiens
  misc_RNA (1)...(19): siRNA sense strand
auggaaacauccgguacua

SEQ ID NO: 401893 - RNA, 19 nt, Homo sapiens
  misc_RNA (1)...(19): siRNA sense strand
gcaggauugaacccaacua

SEQ ID NO: 401894 - RNA, 19 nt, Homo sapiens
  misc_RNA (1)...(19): siRNA sense strand
caaugugcuggauaucaaa

SEQ ID NO: 401895 - RNA, 19 nt, Homo sapiens
  misc_RNA (1)...(19): siRNA sense strand
ugagcuccuucgaauguuc

SEQ ID NO: 401896 - RNA, 19 nt, Homo sapiens
  misc_RNA (1)...(19): siRNA sense strand
agaagcugcgugugauuga

SEQ ID NO: 401897 - RNA, 19 nt, Homo sapiens
  misc_RNA (1)...(19): siRNA sense strand
uggaacacaagacagauug

SEQ ID NO: 401898 - RNA, 19 nt, Homo sapiens
  misc_RNA (1)...(19): siRNA sense strand
acuacaagguccucaucug

SEQ ID NO: 401899 - RNA, 19 nt, Homo sapiens
  misc_RNA (1)...(19): siRNA sense strand
uauuuaaggcucccaucaa

SEQ ID NO: 401900 - RNA, 19 nt, Homo sapiens
  misc_RNA (1)...(19): siRNA sense strand
agggcaaugugcuggauau

SEQ ID NO: 401901 - RNA, 19 nt, Homo sapiens
  misc_RNA (1)...(19): siRNA sense strand
agaagcccuaccugaguua

SEQ ID NO: 401902 - RNA, 19 nt, Homo sapiens
  misc_RNA (1)...(19): siRNA sense strand
cuggaaagggugauggaaa

SEQ ID NO: 401903 - RNA, 19 nt, Homo sapiens
  misc_RNA (1)...(19): siRNA sense strand
ccugaucgaagaggaaauu

SEQ ID NO: 401904 - RNA, 19 nt, Homo sapiens
  misc_RNA (1)...(19): siRNA sense strand
ugcuggauaucaaauggaa

SEQ ID NO: 401905 - RNA, 19 nt, Homo sapiens
  misc_RNA (1)...(19): siRNA sense strand
gcagagaugcuaaacuaua

SEQ ID NO: 401906 - RNA, 19 nt, Homo sapiens
  misc_RNA (1)...(19): siRNA sense strand
gaaagcagccuuauuagag

SEQ ID NO: 401907 - RNA, 19 nt, Homo sapiens
  misc_RNA (1)...(19): siRNA sense strand
cagagaugcuaaacuauau

SEQ ID NO: 401908 - RNA, 19 nt, Homo sapiens
  misc_RNA (1)...(19): siRNA sense strand
gcagguguccgauguagaa

SEQ ID NO: 401909 - RNA, 19 nt, Homo sapiens
  misc_RNA (1)...(19): siRNA sense strand
gauaaccacugccgaaugc

SEQ ID NO: 401910 - RNA, 19 nt, Homo sapiens
  misc_RNA (1)...(19): siRNA sense strand
gaacugugaugaggcugaa

SEQ ID NO: 401911 - RNA, 19 nt, Homo sapiens
  misc_RNA (1)...(19): siRNA sense strand
ugcgaaagcagccuuauua

SEQ ID NO: 401912 - RNA, 19 nt, Homo sapiens
  misc_RNA (1)...(19): siRNA sense strand
ugaugaggcugaaaucgaa

SEQ ID NO: 401913 - RNA, 19 nt, Homo sapiens
  misc_RNA (1)...(19): siRNA sense strand
ucacuggcgcuguagauua

SEQ ID NO: 401914 - RNA, 19 nt, Homo sapiens
  misc_RNA (1)...(19): siRNA sense strand
gaaggcagcuguggcuuac

SEQ ID NO: 401915 - RNA, 19 nt, Homo sapiens
  misc_RNA (1)...(19): siRNA sense strand
uacaagaggcugacacuuu

SEQ ID NO: 401916 - RNA, 19 nt, Homo sapiens
  misc_RNA (1)...(19): siRNA sense strand
uacagaaggugguagagaa

SEQ ID NO: 401917 - RNA, 19 nt, Homo sapiens
  misc_RNA (1)...(19): siRNA sense strand
gcagauccgugaggaggaa

SEQ ID NO: 401918 - RNA, 19 nt, Homo sapiens
  misc_RNA (1)...(19): siRNA sense strand
cgaugacacuguuggaaga

SEQ ID NO: 401919 - RNA, 19 nt, Homo sapiens
  misc_RNA (1)...(19): siRNA sense strand
cgaaggcagcuguggcuua

SEQ ID NO: 401920 - RNA, 19 nt, Homo sapiens
  misc_RNA (1)...(19): siRNA sense strand
cgaaagcagccuuauuaga

SEQ ID NO: 401921 - RNA, 19 nt, Homo sapiens
  misc_RNA (1)...(19): siRNA sense strand
gggaugcccagaucaaauu

SEQ ID NO: 401922 - RNA, 19 nt, Homo sapiens
  misc_RNA (1)...(19): siRNA sense strand
caacuucugaugcugaauu

SEQ ID NO: 401923 - RNA, 19 nt, Homo sapiens
  misc_RNA (1)...(19): siRNA sense strand
gcacacuaaugagguccua

SEQ ID NO: 401924 - RNA, 19 nt, Homo sapiens
  misc_RNA (1)...(19): siRNA sense strand
gaucaaauuucugaacacu

SEQ ID NO: 401925 - RNA, 19 nt, Homo sapiens
  misc_RNA (1)...(19): siRNA sense strand
acaagaggcugacacuuuu

SEQ ID NO: 401926 - RNA, 19 nt, Homo sapiens
  misc_RNA (1)...(19): siRNA sense strand
ggccauugauaaagauaau

SEQ ID NO: 401927 - RNA, 19 nt, Homo sapiens
  misc_RNA (1)...(19): siRNA sense strand
uaucagaacccgggagaaa

SEQ ID NO: 401928 - RNA, 19 nt, Homo sapiens
  misc_RNA (1)...(19): siRNA sense strand
ggcuggagcacacuaauga

SEQ ID NO: 401929 - RNA, 19 nt, Homo sapiens
  misc_RNA (1)...(19): siRNA sense strand
gaguccauaugguacaaga

SEQ ID NO: 401930 - RNA, 19 nt, Homo sapiens
  misc_RNA (1)...(19): siRNA sense strand
gguggaccgugcaagaugu

SEQ ID NO: 401931 - RNA, 19 nt, Homo sapiens
  misc_RNA (1)...(19): siRNA sense strand
ggccacccuucugcaguua

SEQ ID NO: 401932 - RNA, 19 nt, Homo sapiens
  misc_RNA (1)...(19): siRNA sense strand
guuauucgcauccuuaagu

SEQ ID NO: 401933 - RNA, 19 nt, Homo sapiens
  misc_RNA (1)...(19): siRNA sense strand
ggagaggaaaccuuugauc

SEQ ID NO: 401934 - RNA, 19 nt, Homo sapiens
  misc_RNA (1)...(19): siRNA sense strand
ccaggucuccuaccgaaug

SEQ ID NO: 401935 - RNA, 19 nt, Homo sapiens
  misc_RNA (1)...(19): siRNA sense strand
agagcucacuggcgcugua

SEQ ID NO: 401936 - RNA, 19 nt, Homo sapiens
  misc_RNA (1)...(19): siRNA sense strand
uugcaccucuuccuagcua

SEQ ID NO: 401937 - RNA, 19 nt, Homo sapiens
  misc_RNA (1)...(19): siRNA sense strand
guuauucagccucuuguug

SEQ ID NO: 401938 - RNA, 19 nt, Homo sapiens
  misc_RNA (1)...(19): siRNA sense strand
ggaagaaaaugcgaaagca

SEQ ID NO: 401939 - RNA, 19 nt, Homo sapiens
  misc_RNA (1)...(19): siRNA sense strand
ggaugugaacucccagaga

SEQ ID NO: 401940 - RNA, 19 nt, Homo sapiens
  misc_RNA (1)...(19): siRNA sense strand
gcgaaagcagccuuauuag

SEQ ID NO: 401941 - RNA, 19 nt, Homo sapiens
  misc_RNA (1)...(19): siRNA sense strand
gugaugaggcugaaaucga

SEQ ID NO: 401942 - RNA, 19 nt, Homo sapiens
  misc_RNA (1)...(19): siRNA sense strand
ccagagaugccagcagaga

SEQ ID NO: 401943 - RNA, 19 nt, Homo sapiens
  misc_RNA (1)...(19): siRNA sense strand
ggaugcccagaucaaauuu

SEQ ID NO: 401944 - RNA, 19 nt, Homo sapiens
  misc_RNA (1)...(19): siRNA sense strand
uuauucagccucuuguuga

SEQ ID NO: 401945 - RNA, 19 nt, Homo sapiens
  misc_RNA (1)...(19): siRNA sense strand
aaaauugucugcuuauguc

SEQ ID NO: 401946 - RNA, 19 nt, Homo sapiens
  misc_RNA (1)...(19): siRNA sense strand
ccccaaaccucuuucaguu

SEQ ID NO: 401947 - RNA, 19 nt, Homo sapiens
  misc_RNA (1)...(19): siRNA sense strand
cacuggcgcuguagauuac

SEQ ID NO: 401948 - RNA, 19 nt, Homo sapiens
  misc_RNA (1)...(19): siRNA sense strand
cgauaaccacugccgaaug

SEQ ID NO: 401949 - RNA, 19 nt, Homo sapiens
  misc_RNA (1)...(19): siRNA sense strand
gcaccucuuccuagcuaga

SEQ ID NO: 401950 - RNA, 19 nt, Homo sapiens
  misc_RNA (1)...(19): siRNA sense strand
caaaggaggggucuggaaa

SEQ ID NO: 401951 - RNA, 19 nt, Homo sapiens
  misc_RNA (1)...(19): siRNA sense strand
agagaugccagcagagaug

SEQ ID NO: 401952 - RNA, 19 nt, Homo sapiens
  misc_RNA (1)...(19): siRNA sense strand
gggccauugauaaagauaa

SEQ ID NO: 401953 - RNA, 19 nt, Homo sapiens
  misc_RNA (1)...(19): siRNA sense strand
cgaaugcuugggagaaugu

SEQ ID NO: 401954 - RNA, 19 nt, Homo sapiens
  misc_RNA (1)...(19): siRNA sense strand
acacuaaugagguccuaga

SEQ ID NO: 401955 - RNA, 19 nt, Homo sapiens
  misc_RNA (1)...(19): siRNA sense strand
gccuggagaggaaaccuuu

SEQ ID NO: 401956 - RNA, 19 nt, Homo sapiens
  misc_RNA (1)...(19): siRNA sense strand
aacuucugaugcugaauuu

SEQ ID NO: 401957 - RNA, 19 nt, Homo sapiens
  misc_RNA (1)...(19): siRNA sense strand
aggccacccuucugcaguu

SEQ ID NO: 401958 - RNA, 19 nt, Homo sapiens
  misc_RNA (1)...(19): siRNA sense strand
ccgaaugcuugggagaaug

SEQ ID NO: 401959 - RNA, 19 nt, Homo sapiens
  misc_RNA (1)...(19): siRNA sense strand
guacaagaggcugacacuu

SEQ ID NO: 401960 - RNA, 19 nt, Homo sapiens
  misc_RNA (1)...(19): siRNA sense strand
ggguggaccgugcaagaug

SEQ ID NO: 401961 - RNA, 19 nt, Homo sapiens
  misc_RNA (1)...(19): siRNA sense strand
ccaagaauuugcucaguua

SEQ ID NO: 401962 - RNA, 19 nt, Homo sapiens
  misc_RNA (1)...(19): siRNA sense strand
gggcugcucuccaauguua

SEQ ID NO: 401963 - RNA, 19 nt, Homo sapiens
  misc_RNA (1)...(19): siRNA sense strand
caaauggguucaccucaua

SEQ ID NO: 401964 - RNA, 19 nt, Homo sapiens
  misc_RNA (1)...(19): siRNA sense strand
ggaagggacugccucaugu

SEQ ID NO: 401965 - RNA, 19 nt, Homo sapiens
  misc_RNA (1)...(19): siRNA sense strand
ggauaaaguucuuacucaa

SEQ ID NO: 401966 - RNA, 19 nt, Homo sapiens
  misc_RNA (1)...(19): siRNA sense strand
gaaacagggcgaugaagaa

SEQ ID NO: 401967 - RNA, 19 nt, Homo sapiens
  misc_RNA (1)...(19): siRNA sense strand
caagacacagcgaauauaa

SEQ ID NO: 401968 - RNA, 19 nt, Homo sapiens
  misc_RNA (1)...(19): siRNA sense strand
aaacacuggugcucuauug

SEQ ID NO: 401969 - RNA, 19 nt, Homo sapiens
  misc_RNA (1)...(19): siRNA sense strand
gcucuauugucuacuauga

SEQ ID NO: 401970 - RNA, 19 nt, Homo sapiens
  misc_RNA (1)...(19): siRNA sense strand
ggaaacagggcgaugaaga

SEQ ID NO: 401971 - RNA, 19 nt, Homo sapiens
  misc_RNA (1)...(19): siRNA sense strand
agaauuugcucaguuauug

SEQ ID NO: 401972 - RNA, 19 nt, Homo sapiens
  misc_RNA (1)...(19): siRNA sense strand
gggacugccucaugucauu

SEQ ID NO: 401973 - RNA, 19 nt, Homo sapiens
  misc_RNA (1)...(19): siRNA sense strand
guagaaagcccuguacuuc

SEQ ID NO: 401974 - RNA, 19 nt, Homo sapiens
  misc_RNA (1)...(19): siRNA sense strand
gaguaacugugucaccauu

SEQ ID NO: 401975 - RNA, 19 nt, Homo sapiens
  misc_RNA (1)...(19): siRNA sense strand
ucacugauccuuccaacaa

SEQ ID NO: 401976 - RNA, 19 nt, Homo sapiens
  misc_RNA (1)...(19): siRNA sense strand
uaaccggaauuccacuauu

SEQ ID NO: 401977 - RNA, 19 nt, Homo sapiens
  misc_RNA (1)...(19): siRNA sense strand
ccuaguggguguagucuga

SEQ ID NO: 401978 - RNA, 19 nt, Homo sapiens
  misc_RNA (1)...(19): siRNA sense strand
acagggcgaugaagaagaa

SEQ ID NO: 401979 - RNA, 19 nt, Homo sapiens
  misc_RNA (1)...(19): siRNA sense strand
gaaaucaacagaggagaug

SEQ ID NO: 401980 - RNA, 19 nt, Homo sapiens
  misc_RNA (1)...(19): siRNA sense strand
gcaucaaucccuaccacua

SEQ ID NO: 401981 - RNA, 19 nt, Homo sapiens
  misc_RNA (1)...(19): siRNA sense strand
uggauaaaguucuuacuca

SEQ ID NO: 401982 - RNA, 19 nt, Homo sapiens
  misc_RNA (1)...(19): siRNA sense strand
gaaggaggucugcaucaau

SEQ ID NO: 401983 - RNA, 19 nt, Homo sapiens
  misc_RNA (1)...(19): siRNA sense strand
gaaaacaccaggcggcaua

SEQ ID NO: 401984 - RNA, 19 nt, Homo sapiens
  misc_RNA (1)...(19): siRNA sense strand
ggugcucuauugucuacua

SEQ ID NO: 401985 - RNA, 19 nt, Homo sapiens
  misc_RNA (1)...(19): siRNA sense strand
ggagguguaugccgaaugc

SEQ ID NO: 401986 - RNA, 19 nt, Homo sapiens
  misc_RNA (1)...(19): siRNA sense strand
gguguagucugaaaauuuu

SEQ ID NO: 401987 - RNA, 19 nt, Homo sapiens
  misc_RNA (1)...(19): siRNA sense strand
gagaguagaaagcccugua

SEQ ID NO: 401988 - RNA, 19 nt, Homo sapiens
  misc_RNA (1)...(19): siRNA sense strand
acuaugagcucaacaaucg

SEQ ID NO: 401989 - RNA, 19 nt, Homo sapiens
  misc_RNA (1)...(19): siRNA sense strand
gaacugcaacuaccaucau

SEQ ID NO: 401990 - RNA, 19 nt, Homo sapiens
  misc_RNA (1)...(19): siRNA sense strand
ucaaauggguucaccucau

SEQ ID NO: 401991 - RNA, 19 nt, Homo sapiens
  misc_RNA (1)...(19): siRNA sense strand
ccaagacacagcgaauaua

SEQ ID NO: 401992 - RNA, 19 nt, Homo sapiens
  misc_RNA (1)...(19): siRNA sense strand
ccacuggaaugcugugagu

SEQ ID NO: 401993 - RNA, 19 nt, Homo sapiens
  misc_RNA (1)...(19): siRNA sense strand
ggaguucaucuuuauuaug

SEQ ID NO: 401994 - RNA, 19 nt, Homo sapiens
  misc_RNA (1)...(19): siRNA sense strand
ccaaaacacuggugcucua

SEQ ID NO: 401995 - RNA, 19 nt, Homo sapiens
  misc_RNA (1)...(19): siRNA sense strand
gaaaggugccauggaggaa

SEQ ID NO: 401996 - RNA, 19 nt, Homo sapiens
  misc_RNA (1)...(19): siRNA sense strand
agaaggaggucugcaucaa

SEQ ID NO: 401997 - RNA, 19 nt, Homo sapiens
  misc_RNA (1)...(19): siRNA sense strand
ccaacaauaagaaccguuu

SEQ ID NO: 401998 - RNA, 19 nt, Homo sapiens
  misc_RNA (1)...(19): siRNA sense strand
ggcgguugcuuaugaggaa

SEQ ID NO: 401999 - RNA, 19 nt, Homo sapiens
  misc_RNA (1)...(19): siRNA sense strand
uuuccucacucucccaaua

SEQ ID NO: 402000 - RNA, 19 nt, Homo sapiens
  misc_RNA (1)...(19): siRNA sense strand
ucagagccaccaugaacua

SEQ ID NO: 402001 - RNA, 19 nt, Homo sapiens
  misc_RNA (1)...(19): siRNA sense strand
aaccggaauuccacuauug

SEQ ID NO: 402002 - RNA, 19 nt, Homo sapiens
  misc_RNA (1)...(19): siRNA sense strand
caacaaucgugugggugaa

SEQ ID NO: 402003 - RNA, 19 nt, Homo sapiens
  misc_RNA (1)...(19): siRNA sense strand
caauagcaguuacccaaac

SEQ ID NO: 402004 - RNA, 19 nt, Homo sapiens
  misc_RNA (1)...(19): siRNA sense strand
caucaaucccuaccacuau

SEQ ID NO: 402005 - RNA, 19 nt, Homo sapiens
  misc_RNA (1)...(19): siRNA sense strand
agacacagcgaauauaauc

SEQ ID NO: 402006 - RNA, 19 nt, Homo sapiens
  misc_RNA (1)...(19): siRNA sense strand
acugauccuuccaacaaua

SEQ ID NO: 402007 - RNA, 19 nt, Homo sapiens
  misc_RNA (1)...(19): siRNA sense strand
ggaauuccacuauugaaaa

SEQ ID NO: 402008 - RNA, 19 nt, Homo sapiens
  misc_RNA (1)...(19): siRNA sense strand
gauuucauccuacuacugu

SEQ ID NO: 402009 - RNA, 19 nt, Homo sapiens
  misc_RNA (1)...(19): siRNA sense strand
gagccaccaugaacuaaaa

SEQ ID NO: 402010 - RNA, 19 nt, Homo sapiens
  misc_RNA (1)...(19): siRNA sense strand
aaggaggucugcaucaauc

SEQ ID NO: 402011 - RNA, 19 nt, Homo sapiens
  misc_RNA (1)...(19): siRNA sense strand
gaacuaaaaccacuggaau

SEQ ID NO: 402012 - RNA, 19 nt, Homo sapiens
  misc_RNA (1)...(19): siRNA sense strand
guggaugguuucacugauc

SEQ ID NO: 402013 - RNA, 19 nt, Homo sapiens
  misc_RNA (1)...(19): siRNA sense strand
ccaauagcaguuacccaaa

SEQ ID NO: 402014 - RNA, 19 nt, Homo sapiens
  misc_RNA (1)...(19): siRNA sense strand
gaaccauggauuugagaca

SEQ ID NO: 402015 - RNA, 19 nt, Homo sapiens
  misc_RNA (1)...(19): siRNA sense strand
cuacuacuguuugcaagau

SEQ ID NO: 402016 - RNA, 19 nt, Homo sapiens
  misc_RNA (1)...(19): siRNA sense strand
uucaggcgguugcuuauga

SEQ ID NO: 402017 - RNA, 19 nt, Homo sapiens
  misc_RNA (1)...(19): siRNA sense strand
ggacugccucaugucauuu

SEQ ID NO: 402018 - RNA, 19 nt, Homo sapiens
  misc_RNA (1)...(19): siRNA sense strand
ggaacugcaacuaccauca

SEQ ID NO: 402019 - RNA, 19 nt, Homo sapiens
  misc_RNA (1)...(19): siRNA sense strand
gacugccucaugucauuua

SEQ ID NO: 402020 - RNA, 19 nt, Homo sapiens
  misc_RNA (1)...(19): siRNA sense strand
gacagucuaugagcuuaca

SEQ ID NO: 402021 - RNA, 19 nt, Homo sapiens
  misc_RNA (1)...(19): siRNA sense strand
guacuauacguaugagcuu

SEQ ID NO: 402022 - RNA, 19 nt, Homo sapiens
  misc_RNA (1)...(19): siRNA sense strand
uuccguaacuuaggacaaa

SEQ ID NO: 402023 - RNA, 19 nt, Homo sapiens
  misc_RNA (1)...(19): siRNA sense strand
accaagaauuugcucaguu

SEQ ID NO: 402024 - RNA, 19 nt, Homo sapiens
  misc_RNA (1)...(19): siRNA sense strand
uagugacaguagcaucuuu

SEQ ID NO: 402025 - RNA, 19 nt, Homo sapiens
  misc_RNA (1)...(19): siRNA sense strand
cggaauuccacuauugaaa

SEQ ID NO: 402026 - RNA, 19 nt, Homo sapiens
  misc_RNA (1)...(19): siRNA sense strand
aucaaucccuaccacuaua

SEQ ID NO: 402027 - RNA, 19 nt, Homo sapiens
  misc_RNA (1)...(19): siRNA sense strand
gauggacacaaacaugaug

SEQ ID NO: 402028 - RNA, 19 nt, Homo sapiens
  misc_RNA (1)...(19): siRNA sense strand
ccgauggacacaaacauga

SEQ ID NO: 402029 - RNA, 19 nt, Homo sapiens
  misc_RNA (1)...(19): siRNA sense strand
agaaagcccuguacuuccu

SEQ ID NO: 402030 - RNA, 19 nt, Homo sapiens
  misc_RNA (1)...(19): siRNA sense strand
ucaaucccuaccacuauaa

SEQ ID NO: 402031 - RNA, 19 nt, Homo sapiens
  misc_RNA (1)...(19): siRNA sense strand
auacguaugagcuuuguga

SEQ ID NO: 402032 - RNA, 19 nt, Homo sapiens
  misc_RNA (1)...(19): siRNA sense strand
ccaggcggcauauuggaaa

SEQ ID NO: 402033 - RNA, 19 nt, Homo sapiens
  misc_RNA (1)...(19): siRNA sense strand
gucauuuacugccgugugu

SEQ ID NO: 402034 - RNA, 19 nt, Homo sapiens
  misc_RNA (1)...(19): siRNA sense strand
guguguugguggaugguuu

SEQ ID NO: 402035 - RNA, 19 nt, Homo sapiens
  misc_RNA (1)...(19): siRNA sense strand
cuaccacuauaagagagua

SEQ ID NO: 402036 - RNA, 19 nt, Homo sapiens
  misc_RNA (1)...(19): siRNA sense strand
gagccucacaugccacuca

SEQ ID NO: 402037 - RNA, 19 nt, Homo sapiens
  misc_RNA (1)...(19): siRNA sense strand
cggaagggacugccucaug

SEQ ID NO: 402038 - RNA, 19 nt, Homo sapiens
  misc_RNA (1)...(19): siRNA sense strand
cgaaugccuuagugacagu

SEQ ID NO: 402039 - RNA, 19 nt, Homo sapiens
  misc_RNA (1)...(19): siRNA sense strand
gguggaaacagggcgauga

SEQ ID NO: 402040 - RNA, 19 nt, Homo sapiens
  misc_RNA (1)...(19): siRNA sense strand
guucaccucauaauccuau

SEQ ID NO: 402041 - RNA, 19 nt, Homo sapiens
  misc_RNA (1)...(19): siRNA sense strand
caacgccacuuuuccagau

SEQ ID NO: 402042 - RNA, 19 nt, Homo sapiens
  misc_RNA (1)...(19): siRNA sense strand
uaccaccgccaggauguua

SEQ ID NO: 402043 - RNA, 19 nt, Homo sapiens
  misc_RNA (1)...(19): siRNA sense strand
gcucaguuauuggcacagu

SEQ ID NO: 402044 - RNA, 19 nt, Homo sapiens
  misc_RNA (1)...(19): siRNA sense strand
uuacaaguccagcugugaa

SEQ ID NO: 402045 - RNA, 19 nt, Homo sapiens
  misc_RNA (1)...(19): siRNA sense strand
gauccuuccaacaauaaga

SEQ ID NO: 402046 - RNA, 19 nt, Homo sapiens
  misc_RNA (1)...(19): siRNA sense strand
caaccgaguaacuguguca

SEQ ID NO: 402047 - RNA, 19 nt, Homo sapiens
  misc_RNA (1)...(19): siRNA sense strand
gguggaugguuucacugau

SEQ ID NO: 402048 - RNA, 19 nt, Homo sapiens
  misc_RNA (1)...(19): siRNA sense strand
gaagggacugccucauguc

SEQ ID NO: 402049 - RNA, 19 nt, Homo sapiens
  misc_RNA (1)...(19): siRNA sense strand
guaacugugucaccauucc

SEQ ID NO: 402050 - RNA, 19 nt, Homo sapiens
  misc_RNA (1)...(19): siRNA sense strand
acuggaaugcugugaguuu

SEQ ID NO: 402051 - RNA, 19 nt, Homo sapiens
  misc_RNA (1)...(19): siRNA sense strand
guguaugccgaaugccuua

SEQ ID NO: 402052 - RNA, 19 nt, Homo sapiens
  misc_RNA (1)...(19): siRNA sense strand
guugguggaugguuucacu

SEQ ID NO: 402053 - RNA, 19 nt, Homo sapiens
  misc_RNA (1)...(19): siRNA sense strand
uccaagacacagcgaauau

SEQ ID NO: 402054 - RNA, 19 nt, Homo sapiens
  misc_RNA (1)...(19): siRNA sense strand
guggaaacagggcgaugaa

SEQ ID NO: 402055 - RNA, 19 nt, Homo sapiens
  misc_RNA (1)...(19): siRNA sense strand
caacaauaagaaccguuuc

SEQ ID NO: 402056 - RNA, 19 nt, Homo sapiens
  misc_RNA (1)...(19): siRNA sense strand
uaguggguguagucugaaa

SEQ ID NO: 402057 - RNA, 19 nt, Homo sapiens
  misc_RNA (1)...(19): siRNA sense strand
cucauaauccuauuucauc

SEQ ID NO: 402058 - RNA, 19 nt, Homo sapiens
  misc_RNA (1)...(19): siRNA sense strand
uacuauacguaugagcuuu

SEQ ID NO: 402059 - RNA, 19 nt, Homo sapiens
  misc_RNA (1)...(19): siRNA sense strand
caagaauuugcucaguuau

SEQ ID NO: 402060 - RNA, 19 nt, Homo sapiens
  misc_RNA (1)...(19): siRNA sense strand
ggguguagucugaaaauuu

SEQ ID NO: 402061 - RNA, 19 nt, Homo sapiens
  misc_RNA (1)...(19): siRNA sense strand
ggacuaaacaccuccagaa

SEQ ID NO: 402062 - RNA, 19 nt, Homo sapiens
  misc_RNA (1)...(19): siRNA sense strand
ccaaccgccucuuccagua

SEQ ID NO: 402063 - RNA, 19 nt, Homo sapiens
  misc_RNA (1)...(19): siRNA sense strand
gcucugugacugugagaua

SEQ ID NO: 402064 - RNA, 19 nt, Homo sapiens
  misc_RNA (1)...(19): siRNA sense strand
ggaaucggcaggugacguu

SEQ ID NO: 402065 - RNA, 19 nt, Homo sapiens
  misc_RNA (1)...(19): siRNA sense strand
caagccaccucaccagcaa

SEQ ID NO: 402066 - RNA, 19 nt, Homo sapiens
  misc_RNA (1)...(19): siRNA sense strand
agagaagacccaacaguga

SEQ ID NO: 402067 - RNA, 19 nt, Homo sapiens
  misc_RNA (1)...(19): siRNA sense strand
ugaugaagaaggccuauga

SEQ ID NO: 402068 - RNA, 19 nt, Homo sapiens
  misc_RNA (1)...(19): siRNA sense strand
ggugcacccucucuucuca

SEQ ID NO: 402069 - RNA, 19 nt, Homo sapiens
  misc_RNA (1)...(19): siRNA sense strand
gcccagcccagauguggua

SEQ ID NO: 402070 - RNA, 19 nt, Homo sapiens
  misc_RNA (1)...(19): siRNA sense strand
cacgagagccgcaccaaca

SEQ ID NO: 402071 - RNA, 19 nt, Homo sapiens
  misc_RNA (1)...(19): siRNA sense strand
ggagccaggagagaaguuu

SEQ ID NO: 402072 - RNA, 19 nt, Homo sapiens
  misc_RNA (1)...(19): siRNA sense strand
ggaaguucgggcugaugaa

SEQ ID NO: 402073 - RNA, 19 nt, Homo sapiens
  misc_RNA (1)...(19): siRNA sense strand
accgugugcugcugaagua

SEQ ID NO: 402074 - RNA, 19 nt, Homo sapiens
  misc_RNA (1)...(19): siRNA sense strand
cacccucucuucucaccaa

SEQ ID NO: 402075 - RNA, 19 nt, Homo sapiens
  misc_RNA (1)...(19): siRNA sense strand
gcuaugcccagcccagaug

SEQ ID NO: 402076 - RNA, 19 nt, Homo sapiens
  misc_RNA (1)...(19): siRNA sense strand
caaccgccucuuccaguau

SEQ ID NO: 402077 - RNA, 19 nt, Homo sapiens
  misc_RNA (1)...(19): siRNA sense strand
gaaguucgggcugaugaag

SEQ ID NO: 402078 - RNA, 19 nt, Homo sapiens
  misc_RNA (1)...(19): siRNA sense strand
aguucgggcugaugaagaa

SEQ ID NO: 402079 - RNA, 19 nt, Homo sapiens
  misc_RNA (1)...(19): siRNA sense strand
cagcccagaugugguauac

SEQ ID NO: 402080 - RNA, 19 nt, Homo sapiens
  misc_RNA (1)...(19): siRNA sense strand
gacuaaacaccuccagaag

SEQ ID NO: 402081 - RNA, 19 nt, Homo sapiens
  misc_RNA (1)...(19): siRNA sense strand
ucagagaagacccaacagu

SEQ ID NO: 402082 - RNA, 19 nt, Homo sapiens
  misc_RNA (1)...(19): siRNA sense strand
cggaaguucgggcugauga

SEQ ID NO: 402083 - RNA, 19 nt, Homo sapiens
  misc_RNA (1)...(19): siRNA sense strand
ccuaagaccuuccccuauc

SEQ ID NO: 402084 - RNA, 19 nt, Homo sapiens
  misc_RNA (1)...(19): siRNA sense strand
caugagcugugccaagugu

SEQ ID NO: 402085 - RNA, 19 nt, Homo sapiens
  misc_RNA (1)...(19): siRNA sense strand
gcacuggcuccugcaaaug

SEQ ID NO: 402086 - RNA, 19 nt, Homo sapiens
  misc_RNA (1)...(19): siRNA sense strand
cccaugagcugugccaagu

SEQ ID NO: 402087 - RNA, 19 nt, Homo sapiens
  misc_RNA (1)...(19): siRNA sense strand
gcaaaggggcaucagagaa

SEQ ID NO: 402088 - RNA, 19 nt, Homo sapiens
  misc_RNA (1)...(19): siRNA sense strand
aaauguaccuccugcaaga

SEQ ID NO: 402089 - RNA, 19 nt, Homo sapiens
  misc_RNA (1)...(19): siRNA sense strand
gcaaagagugcaaauguac

SEQ ID NO: 402090 - RNA, 19 nt, Homo sapiens
  misc_RNA (1)...(19): siRNA sense strand
gcaaauguaccuccugcaa

SEQ ID NO: 402091 - RNA, 19 nt, Homo sapiens
  misc_RNA (1)...(19): siRNA sense strand
ugcaaaggcucaucagaga

SEQ ID NO: 402092 - RNA, 19 nt, Homo sapiens
  misc_RNA (1)...(19): siRNA sense strand
ccagggcugugucugcaaa

SEQ ID NO: 402093 - RNA, 19 nt, Homo sapiens
  misc_RNA (1)...(19): siRNA sense strand
gcaaaggcucaucagagaa

SEQ ID NO: 402094 - RNA, 19 nt, Homo sapiens
  misc_RNA (1)...(19): siRNA sense strand
caaaggcucaucagagaag

SEQ ID NO: 402095 - RNA, 19 nt, Homo sapiens
  misc_RNA (1)...(19): siRNA sense strand
ccagggcuguguuugcaaa

SEQ ID NO: 402096 - RNA, 19 nt, Homo sapiens
  misc_RNA (1)...(19): siRNA sense strand
gcaaaggggcgucagagaa

SEQ ID NO: 402097 - RNA, 19 nt, Homo sapiens
  misc_RNA (1)...(19): siRNA sense strand
cccgugggcuguagcaagu

SEQ ID NO: 402098 - RNA, 19 nt, Homo sapiens
  misc_RNA (1)...(19): siRNA sense strand
gcaaaggggcgucagagaa

SEQ ID NO: 402099 - RNA, 19 nt, Homo sapiens
  misc_RNA (1)...(19): siRNA sense strand
caaggacugugugugcaaa

SEQ ID NO: 402100 - RNA, 19 nt, Homo sapiens
  misc_RNA (1)...(19): siRNA sense strand
caagugcgagggaugcaaa

SEQ ID NO: 402101 - RNA, 19 nt, Homo sapiens
  misc_RNA (1)...(19): siRNA sense strand
agaggcagcugaggcagaa

SEQ ID NO: 402102 - RNA, 19 nt, Homo sapiens
  misc_RNA (1)...(19): siRNA sense strand
gaagugugccaaggacugu

SEQ ID NO: 402103 - RNA, 19 nt, Homo sapiens
  misc_RNA (1)...(19): siRNA sense strand
gugagaagugugccaagga

SEQ ID NO: 402104 - RNA, 19 nt, Homo sapiens
  misc_RNA (1)...(19): siRNA sense strand
ccaaggacugugugugcaa

SEQ ID NO: 402105 - RNA, 19 nt, Homo sapiens
  misc_RNA (1)...(19): siRNA sense strand
agaauuugcuggaccauuu

SEQ ID NO: 402106 - RNA, 19 nt, Homo sapiens
  misc_RNA (1)...(19): siRNA sense strand
acgcagaccugauggauuu

SEQ ID NO: 402107 - RNA, 19 nt, Homo sapiens
  misc_RNA (1)...(19): siRNA sense strand
gagcuaaucccauguacaa

SEQ ID NO: 402108 - RNA, 19 nt, Homo sapiens
  misc_RNA (1)...(19): siRNA sense strand
ggacuccucugaucgaucu

SEQ ID NO: 402109 - RNA, 19 nt, Homo sapiens
  misc_RNA (1)...(19): siRNA sense strand
ucagugagccgaaugaaga

SEQ ID NO: 402110 - RNA, 19 nt, Homo sapiens
  misc_RNA (1)...(19): siRNA sense strand
ccugauggauuucaagaau

SEQ ID NO: 402111 - RNA, 19 nt, Homo sapiens
  misc_RNA (1)...(19): siRNA sense strand
gcuaaucccauguacaaug

SEQ ID NO: 402112 - RNA, 19 nt, Homo sapiens
  misc_RNA (1)...(19): siRNA sense strand
ugaucgaucugcccuccua

SEQ ID NO: 402113 - RNA, 19 nt, Homo sapiens
  misc_RNA (1)...(19): siRNA sense strand
accgugagcuuccuccuuu

SEQ ID NO: 402114 - RNA, 19 nt, Homo sapiens
  misc_RNA (1)...(19): siRNA sense strand
ccagagcuaaucccaugua

SEQ ID NO: 402115 - RNA, 19 nt, Homo sapiens
  misc_RNA (1)...(19): siRNA sense strand
gcuggaccauuuggaagaa

SEQ ID NO: 402116 - RNA, 19 nt, Homo sapiens
  misc_RNA (1)...(19): siRNA sense strand
gaauuugcuggaccauuug

SEQ ID NO: 402117 - RNA, 19 nt, Homo sapiens
  misc_RNA (1)...(19): siRNA sense strand
cugauggauuucaagaauu

SEQ ID NO: 402118 - RNA, 19 nt, Homo sapiens
  misc_RNA (1)...(19): siRNA sense strand
uguaacagcuuccgguacu

SEQ ID NO: 402119 - RNA, 19 nt, Homo sapiens
  misc_RNA (1)...(19): siRNA sense strand
uaacagcuuccgguacuga

SEQ ID NO: 402120 - RNA, 19 nt, Homo sapiens
  misc_RNA (1)...(19): siRNA sense strand
agagcggacugggcuguaa

SEQ ID NO: 402121 - RNA, 19 nt, Homo sapiens
  misc_RNA (1)...(19): siRNA sense strand
cuaaucccauguacaaugc

SEQ ID NO: 402122 - RNA, 19 nt, Homo sapiens
  misc_RNA (1)...(19): siRNA sense strand
gaccugauggauuucaaga

SEQ ID NO: 402123 - RNA, 19 nt, Homo sapiens
  misc_RNA (1)...(19): siRNA sense strand
caacgcagaccugauggau

SEQ ID NO: 402124 - RNA, 19 nt, Homo sapiens
  misc_RNA (1)...(19): siRNA sense strand
guccaacgcagaccugaug

SEQ ID NO: 402125 - RNA, 19 nt, Homo sapiens
  misc_RNA (1)...(19): siRNA sense strand
gcucaaggcauucuacaaa

SEQ ID NO: 402126 - RNA, 19 nt, Homo sapiens
  misc_RNA (1)...(19): siRNA sense strand
gaaacacuccucuggaugu

SEQ ID NO: 402127 - RNA, 19 nt, Homo sapiens
  misc_RNA (1)...(19): siRNA sense strand
ggauguggccauaguguuu

SEQ ID NO: 402128 - RNA, 19 nt, Homo sapiens
  misc_RNA (1)...(19): siRNA sense strand
gcuugcagauccugaagaa

SEQ ID NO: 402129 - RNA, 19 nt, Homo sapiens
  misc_RNA (1)...(19): siRNA sense strand
ugaagcugcucaacaaagu

SEQ ID NO: 402130 - RNA, 19 nt, Homo sapiens
  misc_RNA (1)...(19): siRNA sense strand
ccauaguguuugucaucua

SEQ ID NO: 402131 - RNA, 19 nt, Homo sapiens
  misc_RNA (1)...(19): siRNA sense strand
uggugaagcugcucaacaa

SEQ ID NO: 402132 - RNA, 19 nt, Homo sapiens
  misc_RNA (1)...(19): siRNA sense strand
uggaaacacuccucuggau

SEQ ID NO: 402133 - RNA, 19 nt, Homo sapiens
  misc_RNA (1)...(19): siRNA sense strand
gcgcacaaauaccggaaca

SEQ ID NO: 402134 - RNA, 19 nt, Homo sapiens
  misc_RNA (1)...(19): siRNA sense strand
gguuuggaauguucgaguu

SEQ ID NO: 402135 - RNA, 19 nt, Homo sapiens
  misc_RNA (1)...(19): siRNA sense strand
gccagugucuuuggaaaca

SEQ ID NO: 402136 - RNA, 19 nt, Homo sapiens
  misc_RNA (1)...(19): siRNA sense strand
cgucagguuuggaauguuc

SEQ ID NO: 402137 - RNA, 19 nt, Homo sapiens
  misc_RNA (1)...(19): siRNA sense strand
cagccagugucuuuggaaa

SEQ ID NO: 402138 - RNA, 19 nt, Homo sapiens
  misc_RNA (1)...(19): siRNA sense strand
ucaaggcauucuacaaagg

SEQ ID NO: 402139 - RNA, 19 nt, Homo sapiens
  misc_RNA (1)...(19): siRNA sense strand
caaguacagaggauucuuc

SEQ ID NO: 402140 - RNA, 19 nt, Homo sapiens
  misc_RNA (1)...(19): siRNA sense strand
gccgucagguuuggaaugu

SEQ ID NO: 402141 - RNA, 19 nt, Homo sapiens
  misc_RNA (1)...(19): siRNA sense strand
aaacacuccucuggaugug

SEQ ID NO: 402142 - RNA, 19 nt, Homo sapiens
  misc_RNA (1)...(19): siRNA sense strand
ggccauaguguuugucauc

SEQ ID NO: 402143 - RNA, 19 nt, Homo sapiens
  misc_RNA (1)...(19): siRNA sense strand
acacuccucuggaugugau

SEQ ID NO: 402144 - RNA, 19 nt, Homo sapiens
  misc_RNA (1)...(19): siRNA sense strand
cccaugaacccucugauca

SEQ ID NO: 402145 - RNA, 19 nt, Homo sapiens
  misc_RNA (1)...(19): siRNA sense strand
uggagaccaucaaggugaa

SEQ ID NO: 402146 - RNA, 19 nt, Homo sapiens
  misc_RNA (1)...(19): siRNA sense strand
caugaacccucugaucacu

SEQ ID NO: 402147 - RNA, 19 nt, Homo sapiens
  misc_RNA (1)...(19): siRNA sense strand
ggugaagcugcucaacaaa

SEQ ID NO: 402148 - RNA, 19 nt, Homo sapiens
  misc_RNA (1)...(19): siRNA sense strand
gcagccagugucuuuggaa

SEQ ID NO: 402149 - RNA, 19 nt, Homo sapiens
  misc_RNA (1)...(19): siRNA sense strand
aggcgcagccagugucuuu

SEQ ID NO: 402150 - RNA, 19 nt, Homo sapiens
  misc_RNA (1)...(19): siRNA sense strand
gaagcugcucaacaaagug

SEQ ID NO: 402151 - RNA, 19 nt, Homo sapiens
  misc_RNA (1)...(19): siRNA sense strand
cagccacuguccugaagca

SEQ ID NO: 402152 - RNA, 19 nt, Homo sapiens
  misc_RNA (1)...(19): siRNA sense strand
gauguggccauaguguuug

SEQ ID NO: 402153 - RNA, 19 nt, Homo sapiens
  misc_RNA (1)...(19): siRNA sense strand
gugaagcugcucaacaaag

SEQ ID NO: 402154 - RNA, 19 nt, Homo sapiens
  misc_RNA (1)...(19): siRNA sense strand
ucaacaaaguguggaagac

SEQ ID NO: 402155 - RNA, 19 nt, Homo sapiens
  misc_RNA (1)...(19): siRNA sense strand
ugaccucccugcgcaacug

SEQ ID NO: 402156 - RNA, 19 nt, Homo sapiens
  misc_RNA (1)...(19): siRNA sense strand
gccauaguguuugucaucu

SEQ ID NO: 402157 - RNA, 19 nt, Homo sapiens
  misc_RNA (1)...(19): siRNA sense strand
ggacagaacgcgccauuua

SEQ ID NO: 402158 - RNA, 19 nt, Homo sapiens
  misc_RNA (1)...(19): siRNA sense strand
gaacaagauuccacauuug

SEQ ID NO: 402159 - RNA, 19 nt, Homo sapiens
  misc_RNA (1)...(19): siRNA sense strand
caaacaaguugcagaauug

SEQ ID NO: 402160 - RNA, 19 nt, Homo sapiens
  misc_RNA (1)...(19): siRNA sense strand
gaucauagacgaagaagaa

SEQ ID NO: 402161 - RNA, 19 nt, Homo sapiens
  misc_RNA (1)...(19): siRNA sense strand
ugaacaagauuccacauuu

SEQ ID NO: 402162 - RNA, 19 nt, Homo sapiens
  misc_RNA (1)...(19): siRNA sense strand
ggaaccagcuaccgcguaa

SEQ ID NO: 402163 - RNA, 19 nt, Homo sapiens
  misc_RNA (1)...(19): siRNA sense strand
gaucagagcaugcaauguu

SEQ ID NO: 402164 - RNA, 19 nt, Homo sapiens
  misc_RNA (1)...(19): siRNA sense strand
ucaaacaaguugcagaauu

SEQ ID NO: 402165 - RNA, 19 nt, Homo sapiens
  misc_RNA (1)...(19): siRNA sense strand
gcaauguucauccuuguua

SEQ ID NO: 402166 - RNA, 19 nt, Homo sapiens
  misc_RNA (1)...(19): siRNA sense strand
gaacagagagggugauaag

SEQ ID NO: 402167 - RNA, 19 nt, Homo sapiens
  misc_RNA (1)...(19): siRNA sense strand
cgaaauccauccauccaaa

SEQ ID NO: 402168 - RNA, 19 nt, Homo sapiens
  misc_RNA (1)...(19): siRNA sense strand
gaagaaauucgacaacaga

SEQ ID NO: 402169 - RNA, 19 nt, Homo sapiens
  misc_RNA (1)...(19): siRNA sense strand
ggaacaggcugcgugauuc

SEQ ID NO: 402170 - RNA, 19 nt, Homo sapiens
  misc_RNA (1)...(19): siRNA sense strand
ccaagaaacuuugugaaca

SEQ ID NO: 402171 - RNA, 19 nt, Homo sapiens
  misc_RNA (1)...(19): siRNA sense strand
agacacacccaaaggauua

SEQ ID NO: 402172 - RNA, 19 nt, Homo sapiens
  misc_RNA (1)...(19): siRNA sense strand
gugagcagcugaaggaaga

SEQ ID NO: 402173 - RNA, 19 nt, Homo sapiens
  misc_RNA (1)...(19): siRNA sense strand
ggagugagcagcugaagga

SEQ ID NO: 402174 - RNA, 19 nt, Homo sapiens
  misc_RNA (1)...(19): siRNA sense strand
gaaaauggaggaagaaauu

SEQ ID NO: 402175 - RNA, 19 nt, Homo sapiens
  misc_RNA (1)...(19): siRNA sense strand
ccaaauggagccucaguuu

SEQ ID NO: 402176 - RNA, 19 nt, Homo sapiens
  misc_RNA (1)...(19): siRNA sense strand
ggaagaaauucgacaacag

SEQ ID NO: 402177 - RNA, 19 nt, Homo sapiens
  misc_RNA (1)...(19): siRNA sense strand
ggacaaagugcccaaguca

SEQ ID NO: 402178 - RNA, 19 nt, Homo sapiens
  misc_RNA (1)...(19): siRNA sense strand
cuucagaggauucacauua

SEQ ID NO: 402179 - RNA, 19 nt, Homo sapiens
  misc_RNA (1)...(19): siRNA sense strand
gaucccacuccaagaauua

SEQ ID NO: 402180 - RNA, 19 nt, Homo sapiens
  misc_RNA (1)...(19): siRNA sense strand
cagagagggugauaaggaa

SEQ ID NO: 402181 - RNA, 19 nt, Homo sapiens
  misc_RNA (1)...(19): siRNA sense strand
gacagaacgcgccauuuaa

SEQ ID NO: 402182 - RNA, 19 nt, Homo sapiens
  misc_RNA (1)...(19): siRNA sense strand
uaacaagucaugugggaaa

SEQ ID NO: 402183 - RNA, 19 nt, Homo sapiens
  misc_RNA (1)...(19): siRNA sense strand
gcaaagacaagaaggagau

SEQ ID NO: 402184 - RNA, 19 nt, Homo sapiens
  misc_RNA (1)...(19): siRNA sense strand
cgacuggaacguaggcuua

SEQ ID NO: 402185 - RNA, 19 nt, Homo sapiens
  misc_RNA (1)...(19): siRNA sense strand
gggaacaggcugcgugauu

SEQ ID NO: 402186 - RNA, 19 nt, Homo sapiens
  misc_RNA (1)...(19): siRNA sense strand
gaacuuggagacugcaaug

SEQ ID NO: 402187 - RNA, 19 nt, Homo sapiens
  misc_RNA (1)...(19): siRNA sense strand
gaagacacacccaaaggau

SEQ ID NO: 402188 - RNA, 19 nt, Homo sapiens
  misc_RNA (1)...(19): siRNA sense strand
ggaucccacuccaagaauu

SEQ ID NO: 402189 - RNA, 19 nt, Homo sapiens
  misc_RNA (1)...(19): siRNA sense strand
gaggaucccacuccaagaa

SEQ ID NO: 402190 - RNA, 19 nt, Homo sapiens
  misc_RNA (1)...(19): siRNA sense strand
agagguaugugaagcaguu

SEQ ID NO: 402191 - RNA, 19 nt, Homo sapiens
  misc_RNA (1)...(19): siRNA sense strand
gcgaaggcgucaaacaagu

SEQ ID NO: 402192 - RNA, 19 nt, Homo sapiens
  misc_RNA (1)...(19): siRNA sense strand
caaguacagacucacauuu

SEQ ID NO: 402193 - RNA, 19 nt, Homo sapiens
  misc_RNA (1)...(19): siRNA sense strand
ucagaggauucacauuaau

SEQ ID NO: 402194 - RNA, 19 nt, Homo sapiens
  misc_RNA (1)...(19): siRNA sense strand
cagagacugugcagcgaaa

SEQ ID NO: 402195 - RNA, 19 nt, Homo sapiens
  misc_RNA (1)...(19): siRNA sense strand
agagaaagaugaagaugac

SEQ ID NO: 402196 - RNA, 19 nt, Homo sapiens
  misc_RNA (1)...(19): siRNA sense strand
gaagagaaagaugaagaug

SEQ ID NO: 402197 - RNA, 19 nt, Homo sapiens
  misc_RNA (1)...(19): siRNA sense strand
ggacccggauccagguguu

SEQ ID NO: 402198 - RNA, 19 nt, Homo sapiens
  misc_RNA (1)...(19): siRNA sense strand
gagaacagagagggugaua

SEQ ID NO: 402199 - RNA, 19 nt, Homo sapiens
  misc_RNA (1)...(19): siRNA sense strand
cagcgaaggcgucaaacaa

SEQ ID NO: 402200 - RNA, 19 nt, Homo sapiens
  misc_RNA (1)...(19): siRNA sense strand
gagaucagagcaugcaaug

SEQ ID NO: 402201 - RNA, 19 nt, Homo sapiens
  misc_RNA (1)...(19): siRNA sense strand
gaauguaacaagucaugug

SEQ ID NO: 402202 - RNA, 19 nt, Homo sapiens
  misc_RNA (1)...(19): siRNA sense strand
gugcaaagccgagacauca

SEQ ID NO: 402203 - RNA, 19 nt, Homo sapiens
  misc_RNA (1)...(19): siRNA sense strand
caagaugagggcucucuga

SEQ ID NO: 402204 - RNA, 19 nt, Homo sapiens
  misc_RNA (1)...(19): siRNA sense strand
gagcaguucccagguugua

SEQ ID NO: 402205 - RNA, 19 nt, Homo sapiens
  misc_RNA (1)...(19): siRNA sense strand
cagaagagaaagaugaaga

SEQ ID NO: 402206 - RNA, 19 nt, Homo sapiens
  misc_RNA (1)...(19): siRNA sense strand
gggaauugguccgagaaga

SEQ ID NO: 402207 - RNA, 19 nt, Homo sapiens
  misc_RNA (1)...(19): siRNA sense strand
caagauuccacauuugaug

SEQ ID NO: 402208 - RNA, 19 nt, Homo sapiens
  misc_RNA (1)...(19): siRNA sense strand
uucaaaagcucccaguuua

SEQ ID NO: 402209 - RNA, 19 nt, Homo sapiens
  misc_RNA (1)...(19): siRNA sense strand
uucagaggauucacauuaa

SEQ ID NO: 402210 - RNA, 19 nt, Homo sapiens
  misc_RNA (1)...(19): siRNA sense strand
ggaggaagaaauucgacaa

SEQ ID NO: 402211 - RNA, 19 nt, Homo sapiens
  misc_RNA (1)...(19): siRNA sense strand
acaaagugcccaagucaga

SEQ ID NO: 402212 - RNA, 19 nt, Homo sapiens
  misc_RNA (1)...(19): siRNA sense strand
gaaggcgucaaacaaguug

SEQ ID NO: 402213 - RNA, 19 nt, Homo sapiens
  misc_RNA (1)...(19): siRNA sense strand
cacauuaauugcccucaga

SEQ ID NO: 402214 - RNA, 19 nt, Homo sapiens
  misc_RNA (1)...(19): siRNA sense strand
gcuccucccuccuacuuca

SEQ ID NO: 402215 - RNA, 19 nt, Homo sapiens
  misc_RNA (1)...(19): siRNA sense strand
uaauugcccucagagagaa

SEQ ID NO: 402216 - RNA, 19 nt, Homo sapiens
  misc_RNA (1)...(19): siRNA sense strand
gcaaagccgagacaucaca

SEQ ID NO: 402217 - RNA, 19 nt, Homo sapiens
  misc_RNA (1)...(19): siRNA sense strand
ccacuggucugcgaucauc

SEQ ID NO: 402218 - RNA, 19 nt, Homo sapiens
  misc_RNA (1)...(19): siRNA sense strand
cagaggauucacauuaauu

SEQ ID NO: 402219 - RNA, 19 nt, Homo sapiens
  misc_RNA (1)...(19): siRNA sense strand
gaagaugacaccccugaaa

SEQ ID NO: 402220 - RNA, 19 nt, Homo sapiens
  misc_RNA (1)...(19): siRNA sense strand
gguccucaccgucaucaaa

SEQ ID NO: 402221 - RNA, 19 nt, Homo sapiens
  misc_RNA (1)...(19): siRNA sense strand
ccaaguacagacucacauu

SEQ ID NO: 402222 - RNA, 19 nt, Homo sapiens
  misc_RNA (1)...(19): siRNA sense strand
gaaaaugccuucgaaaucc

SEQ ID NO: 402223 - RNA, 19 nt, Homo sapiens
  misc_RNA (1)...(19): siRNA sense strand
aaaccugcaucuacuccaa

SEQ ID NO: 402224 - RNA, 19 nt, Homo sapiens
  misc_RNA (1)...(19): siRNA sense strand
uccagaagguggugcaaga

SEQ ID NO: 402225 - RNA, 19 nt, Homo sapiens
  misc_RNA (1)...(19): siRNA sense strand
gagaagacacacccaaagg

SEQ ID NO: 402226 - RNA, 19 nt, Homo sapiens
  misc_RNA (1)...(19): siRNA sense strand
ggaaaggccacgugauucg

SEQ ID NO: 402227 - RNA, 19 nt, Homo sapiens
  misc_RNA (1)...(19): siRNA sense strand
gacagcggaugcucaaguc

SEQ ID NO: 402228 - RNA, 19 nt, Homo sapiens
  misc_RNA (1)...(19): siRNA sense strand
acagagagggugauaagga

SEQ ID NO: 402229 - RNA, 19 nt, Homo sapiens
  misc_RNA (1)...(19): siRNA sense strand
ucaaguagccagaguuguc

SEQ ID NO: 402230 - RNA, 19 nt, Homo sapiens
  misc_RNA (1)...(19): siRNA sense strand
uaugagcaauugcccuguu

SEQ ID NO: 402231 - RNA, 19 nt, Homo sapiens
  misc_RNA (1)...(19): siRNA sense strand
ucaggaacguuacaugacu

SEQ ID NO: 402232 - RNA, 19 nt, Homo sapiens
  misc_RNA (1)...(19): siRNA sense strand
agacaucacaggcagagaa

SEQ ID NO: 402233 - RNA, 19 nt, Homo sapiens
  misc_RNA (1)...(19): siRNA sense strand
ccacugaggaaacggagaa

SEQ ID NO: 402234 - RNA, 19 nt, Homo sapiens
  misc_RNA (1)...(19): siRNA sense strand
ugacaaacccaucuuagac

SEQ ID NO: 402235 - RNA, 19 nt, Homo sapiens
  misc_RNA (1)...(19): siRNA sense strand
cgacgagacccuggacaaa

SEQ ID NO: 402236 - RNA, 19 nt, Homo sapiens
  misc_RNA (1)...(19): siRNA sense strand
gaacaggcugcgugauucu

SEQ ID NO: 402237 - RNA, 19 nt, Homo sapiens
  misc_RNA (1)...(19): siRNA sense strand
ugaccaagaaacuuuguga

SEQ ID NO: 402238 - RNA, 19 nt, Homo sapiens
  misc_RNA (1)...(19): siRNA sense strand
uuaauugcccucagagaga

SEQ ID NO: 402239 - RNA, 19 nt, Homo sapiens
  misc_RNA (1)...(19): siRNA sense strand
guggaauucaggaacguua

SEQ ID NO: 402240 - RNA, 19 nt, Homo sapiens
  misc_RNA (1)...(19): siRNA sense strand
gagagggugauaaggaaga

SEQ ID NO: 402241 - RNA, 19 nt, Homo sapiens
  misc_RNA (1)...(19): siRNA sense strand
aaauggagccucaguuugg

SEQ ID NO: 402242 - RNA, 19 nt, Homo sapiens
  misc_RNA (1)...(19): siRNA sense strand
ugggaaaggccacgugauu

SEQ ID NO: 402243 - RNA, 19 nt, Homo sapiens
  misc_RNA (1)...(19): siRNA sense strand
uggagcagguggagaagug

SEQ ID NO: 402244 - RNA, 19 nt, Homo sapiens
  misc_RNA (1)...(19): siRNA sense strand
acagaacgcgccauuuaau

SEQ ID NO: 402245 - RNA, 19 nt, Homo sapiens
  misc_RNA (1)...(19): siRNA sense strand
gugaacaagauuccacauu

SEQ ID NO: 402246 - RNA, 19 nt, Homo sapiens
  misc_RNA (1)...(19): siRNA sense strand
ucucugaccaagaaacuuu

SEQ ID NO: 402247 - RNA, 19 nt, Homo sapiens
  misc_RNA (1)...(19): siRNA sense strand
ggagaucagagcaugcaau

SEQ ID NO: 402248 - RNA, 19 nt, Homo sapiens
  misc_RNA (1)...(19): siRNA sense strand
ccugaaaccugcaucuacu

SEQ ID NO: 402249 - RNA, 19 nt, Homo sapiens
  misc_RNA (1)...(19): siRNA sense strand
gaagggugaacaaugcaau

SEQ ID NO: 402250 - RNA, 19 nt, Homo sapiens
  misc_RNA (1)...(19): siRNA sense strand
gcacggaagggugaacaau

SEQ ID NO: 402251 - RNA, 19 nt, Homo sapiens
  misc_RNA (1)...(19): siRNA sense strand
cgaaggcgucaaacaaguu

SEQ ID NO: 402252 - RNA, 19 nt, Homo sapiens
  misc_RNA (1)...(19): siRNA sense strand
cagcugcuccucccuccua

SEQ ID NO: 402253 - RNA, 19 nt, Homo sapiens
  misc_RNA (1)...(19): siRNA sense strand
aagagaaagaugaagauga

SEQ ID NO: 402254 - RNA, 19 nt, Homo sapiens
  misc_RNA (1)...(19): siRNA sense strand
gggaaaggccacgugauuc

SEQ ID NO: 402255 - RNA, 19 nt, Homo sapiens
  misc_RNA (1)...(19): siRNA sense strand
ggaccuuccagaucauaga

SEQ ID NO: 402256 - RNA, 19 nt, Homo sapiens
  misc_RNA (1)...(19): siRNA sense strand
ugugcacgcugcccacuga

SEQ ID NO: 402257 - RNA, 19 nt, Homo sapiens
  misc_RNA (1)...(19): siRNA sense strand
ccaacaaccugcuggauga

SEQ ID NO: 402258 - RNA, 19 nt, Homo sapiens
  misc_RNA (1)...(19): siRNA sense strand
ccacguguguccagaguga

SEQ ID NO: 402259 - RNA, 19 nt, Homo sapiens
  misc_RNA (1)...(19): siRNA sense strand
ccacagacagggagaaaga

SEQ ID NO: 402260 - RNA, 19 nt, Homo sapiens
  misc_RNA (1)...(19): siRNA sense strand
ggagaaagaccccaacaaa

SEQ ID NO: 402261 - RNA, 19 nt, Homo sapiens
  misc_RNA (1)...(19): siRNA sense strand
ucaaccagcugggcacuga

SEQ ID NO: 402262 - RNA, 19 nt, Homo sapiens
  misc_RNA (1)...(19): siRNA sense strand
ccacaucauucucaacucu

SEQ ID NO: 402263 - RNA, 19 nt, Homo sapiens
  misc_RNA (1)...(19): siRNA sense strand
gcagugacagccuaucaga

SEQ ID NO: 402264 - RNA, 19 nt, Homo sapiens
  misc_RNA (1)...(19): siRNA sense strand
cugcuuggcuccaucauca

SEQ ID NO: 402265 - RNA, 19 nt, Homo sapiens
  misc_RNA (1)...(19): siRNA sense strand
uaucagaaccacaggauca

SEQ ID NO: 402266 - RNA, 19 nt, Homo sapiens
  misc_RNA (1)...(19): siRNA sense strand
gccagauuguguccuuuga

SEQ ID NO: 402267 - RNA, 19 nt, Homo sapiens
  misc_RNA (1)...(19): siRNA sense strand
caaggacagugagcgcuau

SEQ ID NO: 402268 - RNA, 19 nt, Homo sapiens
  misc_RNA (1)...(19): siRNA sense strand
ggacccgaccagcaccaua

SEQ ID NO: 402269 - RNA, 19 nt, Homo sapiens
  misc_RNA (1)...(19): siRNA sense strand
cgacuacgcccugcucaug

SEQ ID NO: 402270 - RNA, 19 nt, Homo sapiens
  misc_RNA (1)...(19): siRNA sense strand
gcuaugcccaggagaacuu

SEQ ID NO: 402271 - RNA, 19 nt, Homo sapiens
  misc_RNA (1)...(19): siRNA sense strand
ucacguaucagagccugua

SEQ ID NO: 402272 - RNA, 19 nt, Homo sapiens
  misc_RNA (1)...(19): siRNA sense strand
cuucaaguccuucaucuuc

SEQ ID NO: 402273 - RNA, 19 nt, Homo sapiens
  misc_RNA (1)...(19): siRNA sense strand
cccaagaacccacgugugu

SEQ ID NO: 402274 - RNA, 19 nt, Homo sapiens
  misc_RNA (1)...(19): siRNA sense strand
gcugggcacugagaugauc

SEQ ID NO: 402275 - RNA, 19 nt, Homo sapiens
  misc_RNA (1)...(19): siRNA sense strand
caggaucacccagcugaaa

SEQ ID NO: 402276 - RNA, 19 nt, Homo sapiens
  misc_RNA (1)...(19): siRNA sense strand
uggacucccuggccgacua

SEQ ID NO: 402277 - RNA, 19 nt, Homo sapiens
  misc_RNA (1)...(19): siRNA sense strand
cagcugggcacugagauga

SEQ ID NO: 402278 - RNA, 19 nt, Homo sapiens
  misc_RNA (1)...(19): siRNA sense strand
acaucauucucaacucuau

SEQ ID NO: 402279 - RNA, 19 nt, Homo sapiens
  misc_RNA (1)...(19): siRNA sense strand
ugaagauccugggcaugga

SEQ ID NO: 402280 - RNA, 19 nt, Homo sapiens
  misc_RNA (1)...(19): siRNA sense strand
cccaacauccgggcugaua

SEQ ID NO: 402281 - RNA, 19 nt, Homo sapiens
  misc_RNA (1)...(19): siRNA sense strand
acaaccugcuggaugacaa

SEQ ID NO: 402282 - RNA, 19 nt, Homo sapiens
  misc_RNA (1)...(19): siRNA sense strand
gcgccagauuguguccuuu

SEQ ID NO: 402283 - RNA, 19 nt, Homo sapiens
  misc_RNA (1)...(19): siRNA sense strand
cagcagugacagccuauca

SEQ ID NO: 402284 - RNA, 19 nt, Homo sapiens
  misc_RNA (1)...(19): siRNA sense strand
ucacagagacccaguucac

SEQ ID NO: 402285 - RNA, 19 nt, Homo sapiens
  misc_RNA (1)...(19): siRNA sense strand
caacauccgggcugauagg

SEQ ID NO: 402286 - RNA, 19 nt, Homo sapiens
  misc_RNA (1)...(19): siRNA sense strand
gagaaagaccccaacaaag

SEQ ID NO: 402287 - RNA, 19 nt, Homo sapiens
  misc_RNA (1)...(19): siRNA sense strand
caguggaugcgccagauug

SEQ ID NO: 402288 - RNA, 19 nt, Homo sapiens
  misc_RNA (1)...(19): siRNA sense strand
ggaaauacacauugaacaa

SEQ ID NO: 402289 - RNA, 19 nt, Homo sapiens
  misc_RNA (1)...(19): siRNA sense strand
gcagguggguguggaguuu

SEQ ID NO: 402290 - RNA, 19 nt, Homo sapiens
  misc_RNA (1)...(19): siRNA sense strand
ggagggcacugucaugucu

SEQ ID NO: 402291 - RNA, 19 nt, Homo sapiens
  misc_RNA (1)...(19): siRNA sense strand
gcugggaaauacacauuga

SEQ ID NO: 402292 - RNA, 19 nt, Homo sapiens
  misc_RNA (1)...(19): siRNA sense strand
gugccacgcuggagaagaa

SEQ ID NO: 402293 - RNA, 19 nt, Homo sapiens
  misc_RNA (1)...(19): siRNA sense strand
ucucaacgcucaggucauu

SEQ ID NO: 402294 - RNA, 19 nt, Homo sapiens
  misc_RNA (1)...(19): siRNA sense strand
gaagugcaaggagcuguuu

SEQ ID NO: 402295 - RNA, 19 nt, Homo sapiens
  misc_RNA (1)...(19): siRNA sense strand
gcaacauacuaccacaaag

SEQ ID NO: 402296 - RNA, 19 nt, Homo sapiens
  misc_RNA (1)...(19): siRNA sense strand
gaaauacacauugaacaac

SEQ ID NO: 402297 - RNA, 19 nt, Homo sapiens
  misc_RNA (1)...(19): siRNA sense strand
caagaacaaguuucagugu

SEQ ID NO: 402298 - RNA, 19 nt, Homo sapiens
  misc_RNA (1)...(19): siRNA sense strand
caagcucacagucaacaaa

SEQ ID NO: 402299 - RNA, 19 nt, Homo sapiens
  misc_RNA (1)...(19): siRNA sense strand
uucaaaggcucuguggaua

SEQ ID NO: 402300 - RNA, 19 nt, Homo sapiens
  misc_RNA (1)...(19): siRNA sense strand
ugaaucaccgcaagaacaa

SEQ ID NO: 402301 - RNA, 19 nt, Homo sapiens
  misc_RNA (1)...(19): siRNA sense strand
ccucguggguucaggaauc

SEQ ID NO: 402302 - RNA, 19 nt, Homo sapiens
  misc_RNA (1)...(19): siRNA sense strand
caaaggcucuguggauagc

SEQ ID NO: 402303 - RNA, 19 nt, Homo sapiens
  misc_RNA (1)...(19): siRNA sense strand
gcaugcacgcaacauacua

SEQ ID NO: 402304 - RNA, 19 nt, Homo sapiens
  misc_RNA (1)...(19): siRNA sense strand
ggagaggagggcacuguca

SEQ ID NO: 402305 - RNA, 19 nt, Homo sapiens
  misc_RNA (1)...(19): siRNA sense strand
ucaggucaaccacacagua

SEQ ID NO: 402306 - RNA, 19 nt, Homo sapiens
  misc_RNA (1)...(19): siRNA sense strand
ggaagugcaaggagcuguu

SEQ ID NO: 402307 - RNA, 19 nt, Homo sapiens
  misc_RNA (1)...(19): siRNA sense strand
aaggagcuguuucccauuc

SEQ ID NO: 402308 - RNA, 19 nt, Homo sapiens
  misc_RNA (1)...(19): siRNA sense strand
gugucaagcucacagucaa

SEQ ID NO: 402309 - RNA, 19 nt, Homo sapiens
  misc_RNA (1)...(19): siRNA sense strand
caacauacuaccacaaagc

SEQ ID NO: 402310 - RNA, 19 nt, Homo sapiens
  misc_RNA (1)...(19): siRNA sense strand
ggaguccaacuaccacuuc

SEQ ID NO: 402311 - RNA, 19 nt, Homo sapiens
  misc_RNA (1)...(19): siRNA sense strand
gaggagggcacugucaugu

SEQ ID NO: 402312 - RNA, 19 nt, Homo sapiens
  misc_RNA (1)...(19): siRNA sense strand
gggaaauacacauugaaca

SEQ ID NO: 402313 - RNA, 19 nt, Homo sapiens
  misc_RNA (1)...(19): siRNA sense strand
gacaacaguggcagucuca

SEQ ID NO: 402314 - RNA, 19 nt, Homo sapiens
  misc_RNA (1)...(19): siRNA sense strand
agacccagcagucgaaguu

SEQ ID NO: 402315 - RNA, 19 nt, Homo sapiens
  misc_RNA (1)...(19): siRNA sense strand
cgcaacauacuaccacaaa

SEQ ID NO: 402316 - RNA, 19 nt, Homo sapiens
  misc_RNA (1)...(19): siRNA sense strand
caaguuucaguguggcuuu

SEQ ID NO: 402317 - RNA, 19 nt, Homo sapiens
  misc_RNA (1)...(19): siRNA sense strand
ggccaaccuccucuucaaa

SEQ ID NO: 402318 - RNA, 19 nt, Homo sapiens
  misc_RNA (1)...(19): siRNA sense strand
caguagcccucagcacaau

SEQ ID NO: 402319 - RNA, 19 nt, Homo sapiens
  misc_RNA (1)...(19): siRNA sense strand
ucaaaggcucuguggauag

SEQ ID NO: 402320 - RNA, 19 nt, Homo sapiens
  misc_RNA (1)...(19): siRNA sense strand
aggccaaccuccucuucaa

SEQ ID NO: 402321 - RNA, 19 nt, Homo sapiens
  misc_RNA (1)...(19): siRNA sense strand
gggcaugcacgcaacauac

SEQ ID NO: 402322 - RNA, 19 nt, Homo sapiens
  misc_RNA (1)...(19): siRNA sense strand
acacauugaacaacugguu

SEQ ID NO: 402323 - RNA, 19 nt, Homo sapiens
  misc_RNA (1)...(19): siRNA sense strand
cuucaaaggcucuguggau

SEQ ID NO: 402324 - RNA, 19 nt, Homo sapiens
  misc_RNA (1)...(19): siRNA sense strand
gagaggagggcacugucau

SEQ ID NO: 402325 - RNA, 19 nt, Homo sapiens
  misc_RNA (1)...(19): siRNA sense strand
ggugucaagcucacaguca

SEQ ID NO: 402326 - RNA, 19 nt, Homo sapiens
  misc_RNA (1)...(19): siRNA sense strand
ccaaccuccucuucaaagg

SEQ ID NO: 402327 - RNA, 19 nt, Homo sapiens
  misc_RNA (1)...(19): siRNA sense strand
uagcugggaaauacacauu

SEQ ID NO: 402328 - RNA, 19 nt, Homo sapiens
  misc_RNA (1)...(19): siRNA sense strand
gagcuguuucccauucaga

SEQ ID NO: 402329 - RNA, 19 nt, Homo sapiens
  misc_RNA (1)...(19): siRNA sense strand
caaggccaaccuccucuuc

SEQ ID NO: 402330 - RNA, 19 nt, Homo sapiens
  misc_RNA (1)...(19): siRNA sense strand
gaggagugccaccggaagu

SEQ ID NO: 402331 - RNA, 19 nt, Homo sapiens
  misc_RNA (1)...(19): siRNA sense strand
caacaguggcagucucaac

SEQ ID NO: 402332 - RNA, 19 nt, Homo sapiens
  misc_RNA (1)...(19): siRNA sense strand
caaggagcuguuucccauu

SEQ ID NO: 402333 - RNA, 19 nt, Homo sapiens
  misc_RNA (1)...(19): siRNA sense strand
gccaaccuccucuucaaag

SEQ ID NO: 402334 - RNA, 19 nt, Homo sapiens
  misc_RNA (1)...(19): siRNA sense strand
gaauccucguagcccacua

SEQ ID NO: 402335 - RNA, 19 nt, Homo sapiens
  misc_RNA (1)...(19): siRNA sense strand
acccagcagucgaaguuug

SEQ ID NO: 402336 - RNA, 19 nt, Homo sapiens
  misc_RNA (1)...(19): siRNA sense strand
ucaacgcucaggucauuca

SEQ ID NO: 402337 - RNA, 19 nt, Homo sapiens
  misc_RNA (1)...(19): siRNA sense strand
agaaagagauggagaagau

SEQ ID NO: 402338 - RNA, 19 nt, Homo sapiens
  misc_RNA (1)...(19): siRNA sense strand
gaaaccaaauuagacaaga

SEQ ID NO: 402339 - RNA, 19 nt, Homo sapiens
  misc_RNA (1)...(19): siRNA sense strand
cgacugggcuuacuacaag

SEQ ID NO: 402340 - RNA, 19 nt, Homo sapiens
  misc_RNA (1)...(19): siRNA sense strand
ccagguggaugccgaagaa

SEQ ID NO: 402341 - RNA, 19 nt, Homo sapiens
  misc_RNA (1)...(19): siRNA sense strand
gagaagaugaagaacuuaa

SEQ ID NO: 402342 - RNA, 19 nt, Homo sapiens
  misc_RNA (1)...(19): siRNA sense strand
uggagaagaugaagaacuu

SEQ ID NO: 402343 - RNA, 19 nt, Homo sapiens
  misc_RNA (1)...(19): siRNA sense strand
ggccaggauuguagaauau

SEQ ID NO: 402344 - RNA, 19 nt, Homo sapiens
  misc_RNA (1)...(19): siRNA sense strand
gcgaaaacuugcucuaaaa

SEQ ID NO: 402345 - RNA, 19 nt, Homo sapiens
  misc_RNA (1)...(19): siRNA sense strand
ccaggauuguagaauauga

SEQ ID NO: 402346 - RNA, 19 nt, Homo sapiens
  misc_RNA (1)...(19): siRNA sense strand
uggaugacuuugagaagaa

SEQ ID NO: 402347 - RNA, 19 nt, Homo sapiens
  misc_RNA (1)...(19): siRNA sense strand
aggccaggauuguagaaua

SEQ ID NO: 402348 - RNA, 19 nt, Homo sapiens
  misc_RNA (1)...(19): siRNA sense strand
guggaugacuuugagaaga

SEQ ID NO: 402349 - RNA, 19 nt, Homo sapiens
  misc_RNA (1)...(19): siRNA sense strand
uugaucagaugaccauuga

SEQ ID NO: 402350 - RNA, 19 nt, Homo sapiens
  misc_RNA (1)...(19): siRNA sense strand
ggagaagaugaagaacuua

SEQ ID NO: 402351 - RNA, 19 nt, Homo sapiens
  misc_RNA (1)...(19): siRNA sense strand
cugaaauccuggaaugaga

SEQ ID NO: 402352 - RNA, 19 nt, Homo sapiens
  misc_RNA (1)...(19): siRNA sense strand
aaagagauggagaagauga

SEQ ID NO: 402353 - RNA, 19 nt, Homo sapiens
  misc_RNA (1)...(19): siRNA sense strand
gaaguuuaaugcgcugaag

SEQ ID NO: 402354 - RNA, 19 nt, Homo sapiens
  misc_RNA (1)...(19): siRNA sense strand
ggcgaaaacuugcucuaaa

SEQ ID NO: 402355 - RNA, 19 nt, Homo sapiens
  misc_RNA (1)...(19): siRNA sense strand
ucaaaggccaggauuguag

SEQ ID NO: 402356 - RNA, 19 nt, Homo sapiens
  misc_RNA (1)...(19): siRNA sense strand
gugggugucucucucaaag

SEQ ID NO: 402357 - RNA, 19 nt, Homo sapiens
  misc_RNA (1)...(19): siRNA sense strand
gaaagagauggagaagaug

SEQ ID NO: 402358 - RNA, 19 nt, Homo sapiens
  misc_RNA (1)...(19): siRNA sense strand
ucccugaaauccuggaaug

SEQ ID NO: 402359 - RNA, 19 nt, Homo sapiens
  misc_RNA (1)...(19): siRNA sense strand
gagaaagagauggagaaga

SEQ ID NO: 402360 - RNA, 19 nt, Homo sapiens
  misc_RNA (1)...(19): siRNA sense strand
caaaggccaggauuguaga

SEQ ID NO: 402361 - RNA, 19 nt, Homo sapiens
  misc_RNA (1)...(19): siRNA sense strand
ccuccagguuggcugcuuu

SEQ ID NO: 402362 - RNA, 19 nt, Homo sapiens
  misc_RNA (1)...(19): siRNA sense strand
gaugaagaacuuaauucca

SEQ ID NO: 402363 - RNA, 19 nt, Homo sapiens
  misc_RNA (1)...(19): siRNA sense strand
agauggagaagaugaagaa

SEQ ID NO: 402364 - RNA, 19 nt, Homo sapiens
  misc_RNA (1)...(19): siRNA sense strand
gccagaggauaaauauacu

SEQ ID NO: 402365 - RNA, 19 nt, Homo sapiens
  misc_RNA (1)...(19): siRNA sense strand
gagugggugucucucucaa

SEQ ID NO: 402366 - RNA, 19 nt, Homo sapiens
  misc_RNA (1)...(19): siRNA sense strand
gagauggagaagaugaaga

SEQ ID NO: 402367 - RNA, 19 nt, Homo sapiens
  misc_RNA (1)...(19): siRNA sense strand
uguagaauaugagaaagag

SEQ ID NO: 402368 - RNA, 19 nt, Homo sapiens
  misc_RNA (1)...(19): siRNA sense strand
aaaaggccauugcuaguuc

SEQ ID NO: 402369 - RNA, 19 nt, Homo sapiens
  misc_RNA (1)...(19): siRNA sense strand
ggaugacuuugagaagaag

SEQ ID NO: 402370 - RNA, 19 nt, Homo sapiens
  misc_RNA (1)...(19): siRNA sense strand
ugccagaggauaaauauac

SEQ ID NO: 402371 - RNA, 19 nt, Homo sapiens
  misc_RNA (1)...(19): siRNA sense strand
gaucauaccccagaaccaa

SEQ ID NO: 402372 - RNA, 19 nt, Homo sapiens
  misc_RNA (1)...(19): siRNA sense strand
ucucaaaggccaggauugu

SEQ ID NO: 402373 - RNA, 19 nt, Homo sapiens
  misc_RNA (1)...(19): siRNA sense strand
gagaauccaccagcuaucg

SEQ ID NO: 402374 - RNA, 19 nt, Homo sapiens
  misc_RNA (1)...(19): siRNA sense strand
ccugagaauccaccagcua

SEQ ID NO: 402375 - RNA, 19 nt, Homo sapiens
  misc_RNA (1)...(19): siRNA sense strand
caaaaggccauugcuaguu

SEQ ID NO: 402376 - RNA, 19 nt, Homo sapiens
  misc_RNA (1)...(19): siRNA sense strand
gcucuuggcucucaacuua

SEQ ID NO: 402377 - RNA, 19 nt, Homo sapiens
  misc_RNA (1)...(19): siRNA sense strand
ggaagucuguguuguauau

SEQ ID NO: 402378 - RNA, 19 nt, Homo sapiens
  misc_RNA (1)...(19): siRNA sense strand
acaguggccuuuauuauuu

SEQ ID NO: 402379 - RNA, 19 nt, Homo sapiens
  misc_RNA (1)...(19): siRNA sense strand
ccaaacagauauuuacuuc

SEQ ID NO: 402380 - RNA, 19 nt, Homo sapiens
  misc_RNA (1)...(19): siRNA sense strand
caacugugaugggaaauug

SEQ ID NO: 402381 - RNA, 19 nt, Homo sapiens
  misc_RNA (1)...(19): siRNA sense strand
cccagcagcuucagguuua

SEQ ID NO: 402382 - RNA, 19 nt, Homo sapiens
  misc_RNA (1)...(19): siRNA sense strand
caacuuauucccuucaauu

SEQ ID NO: 402383 - RNA, 19 nt, Homo sapiens
  misc_RNA (1)...(19): siRNA sense strand
gaaacaagauuuuggugaa

SEQ ID NO: 402384 - RNA, 19 nt, Homo sapiens
  misc_RNA (1)...(19): siRNA sense strand
cuccagaauuuguauguua

SEQ ID NO: 402385 - RNA, 19 nt, Homo sapiens
  misc_RNA (1)...(19): siRNA sense strand
guaacaguggccuuuauua

SEQ ID NO: 402386 - RNA, 19 nt, Homo sapiens
  misc_RNA (1)...(19): siRNA sense strand
aaccuuagcugcaaguauu

SEQ ID NO: 402387 - RNA, 19 nt, Homo sapiens
  misc_RNA (1)...(19): siRNA sense strand
gaaccauuauccaugugaa

SEQ ID NO: 402388 - RNA, 19 nt, Homo sapiens
  misc_RNA (1)...(19): siRNA sense strand
guucaacugugaugggaaa

SEQ ID NO: 402389 - RNA, 19 nt, Homo sapiens
  misc_RNA (1)...(19): siRNA sense strand
uaacaguggccuuuauuau

SEQ ID NO: 402390 - RNA, 19 nt, Homo sapiens
  misc_RNA (1)...(19): siRNA sense strand
gcaaguauuccuacaaucu

SEQ ID NO: 402391 - RNA, 19 nt, Homo sapiens
  misc_RNA (1)...(19): siRNA sense strand
gaaacaccuuuguccaagu

SEQ ID NO: 402392 - RNA, 19 nt, Homo sapiens
  misc_RNA (1)...(19): siRNA sense strand
gacaaugcggucaaccuua

SEQ ID NO: 402393 - RNA, 19 nt, Homo sapiens
  misc_RNA (1)...(19): siRNA sense strand
gggaaacaccuuuguccaa

SEQ ID NO: 402394 - RNA, 19 nt, Homo sapiens
  misc_RNA (1)...(19): siRNA sense strand
caauucaaguaacaggaaa

SEQ ID NO: 402395 - RNA, 19 nt, Homo sapiens
  misc_RNA (1)...(19): siRNA sense strand
uuauguauccuccuccuua

SEQ ID NO: 402396 - RNA, 19 nt, Homo sapiens
  misc_RNA (1)...(19): siRNA sense strand
caaguaacaggaaacaaga

SEQ ID NO: 402397 - RNA, 19 nt, Homo sapiens
  misc_RNA (1)...(19): siRNA sense strand
ggauagugcuguggaaguc

SEQ ID NO: 402398 - RNA, 19 nt, Homo sapiens
  misc_RNA (1)...(19): siRNA sense strand
cuccuuaccuagacaauga

SEQ ID NO: 402399 - RNA, 19 nt, Homo sapiens
  misc_RNA (1)...(19): siRNA sense strand
guggaagucuguguuguau

SEQ ID NO: 402400 - RNA, 19 nt, Homo sapiens
  misc_RNA (1)...(19): siRNA sense strand
guaacaggaaacaagauuu

SEQ ID NO: 402401 - RNA, 19 nt, Homo sapiens
  misc_RNA (1)...(19): siRNA sense strand
acaaugcggucaaccuuag

SEQ ID NO: 402402 - RNA, 19 nt, Homo sapiens
  misc_RNA (1)...(19): siRNA sense strand
ccuacaaucucuucucaag

SEQ ID NO: 402403 - RNA, 19 nt, Homo sapiens
  misc_RNA (1)...(19): siRNA sense strand
cuuauucccuucaauucaa

SEQ ID NO: 402404 - RNA, 19 nt, Homo sapiens
  misc_RNA (1)...(19): siRNA sense strand
gcacagugacuacaugaac

SEQ ID NO: 402405 - RNA, 19 nt, Homo sapiens
  misc_RNA (1)...(19): siRNA sense strand
guggaguccuggcuugcua

SEQ ID NO: 402406 - RNA, 19 nt, Homo sapiens
  misc_RNA (1)...(19): siRNA sense strand
gcuaguaacaguggccuuu

SEQ ID NO: 402407 - RNA, 19 nt, Homo sapiens
  misc_RNA (1)...(19): siRNA sense strand
ucaaguaacaggaaacaag

SEQ ID NO: 402408 - RNA, 19 nt, Homo sapiens
  misc_RNA (1)...(19): siRNA sense strand
aacaguggccuuuauuauu

SEQ ID NO: 402409 - RNA, 19 nt, Homo sapiens
  misc_RNA (1)...(19): siRNA sense strand
cugcaaguauuccuacaau

SEQ ID NO: 402410 - RNA, 19 nt, Homo sapiens
  misc_RNA (1)...(19): siRNA sense strand
uaguaacaguggccuuuau

SEQ ID NO: 402411 - RNA, 19 nt, Homo sapiens
  misc_RNA (1)...(19): siRNA sense strand
aaacaccuuuguccaaguc

SEQ ID NO: 402412 - RNA, 19 nt, Homo sapiens
  misc_RNA (1)...(19): siRNA sense strand
cgacaaugcggucaaccuu

SEQ ID NO: 402413 - RNA, 19 nt, Homo sapiens
  misc_RNA (1)...(19): siRNA sense strand
ggaaccauuauccauguga

SEQ ID NO: 402414 - RNA, 19 nt, Homo sapiens
  misc_RNA (1)...(19): siRNA sense strand
ucuuggcucucaacuuauu

SEQ ID NO: 402415 - RNA, 19 nt, Homo sapiens
  misc_RNA (1)...(19): siRNA sense strand
ggaguccuggcuugcuaua

SEQ ID NO: 402416 - RNA, 19 nt, Homo sapiens
  misc_RNA (1)...(19): siRNA sense strand
gaauuacucccagcagcuu

SEQ ID NO: 402417 - RNA, 19 nt, Homo sapiens
  misc_RNA (1)...(19): siRNA sense strand
ggcccacccgcaagcauua

SEQ ID NO: 402418 - RNA, 19 nt, Homo sapiens
  misc_RNA (1)...(19): siRNA sense strand
cacagugacuacaugaaca

SEQ ID NO: 402419 - RNA, 19 nt, Homo sapiens
  misc_RNA (1)...(19): siRNA sense strand
ucaauucaaguaacaggaa

SEQ ID NO: 402420 - RNA, 19 nt, Homo sapiens
  misc_RNA (1)...(19): siRNA sense strand
gagaagagcaauggaacca

SEQ ID NO: 402421 - RNA, 19 nt, Homo sapiens
  misc_RNA (1)...(19): siRNA sense strand
caaccuuagcugcaaguau

SEQ ID NO: 402422 - RNA, 19 nt, Homo sapiens
  misc_RNA (1)...(19): siRNA sense strand
aaacgggguucaacuguga

SEQ ID NO: 402423 - RNA, 19 nt, Homo sapiens
  misc_RNA (1)...(19): siRNA sense strand
uguggaagucuguguugua

SEQ ID NO: 402424 - RNA, 19 nt, Homo sapiens
  misc_RNA (1)...(19): siRNA sense strand
ucacaaaggacuggauagu

SEQ ID NO: 402425 - RNA, 19 nt, Homo sapiens
  misc_RNA (1)...(19): siRNA sense strand
cuaguaacaguggccuuua

SEQ ID NO: 402426 - RNA, 19 nt, Homo sapiens
  misc_RNA (1)...(19): siRNA sense strand
guacgacaaugcggucaac

SEQ ID NO: 402427 - RNA, 19 nt, Homo sapiens
  misc_RNA (1)...(19): siRNA sense strand
guauccuccuccuuaccua

SEQ ID NO: 402428 - RNA, 19 nt, Homo sapiens
  misc_RNA (1)...(19): siRNA sense strand
gcagucgcccaugcuugua

SEQ ID NO: 402429 - RNA, 19 nt, Homo sapiens
  misc_RNA (1)...(19): siRNA sense strand
gacaaugagaagagcaaug

SEQ ID NO: 402430 - RNA, 19 nt, Homo sapiens
  misc_RNA (1)...(19): siRNA sense strand
ccgggcaucccuucacaaa

SEQ ID NO: 402431 - RNA, 19 nt, Homo sapiens
  misc_RNA (1)...(19): siRNA sense strand
ucaacuuauucccuucaau

SEQ ID NO: 402432 - RNA, 19 nt, Homo sapiens
  misc_RNA (1)...(19): siRNA sense strand
ggcaaugaaucagugacau

SEQ ID NO: 402433 - RNA, 19 nt, Homo sapiens
  misc_RNA (1)...(19): siRNA sense strand
cuucacaaaggacuggaua

SEQ ID NO: 402434 - RNA, 19 nt, Homo sapiens
  misc_RNA (1)...(19): siRNA sense strand
aaugagaagagcaauggaa

SEQ ID NO: 402435 - RNA, 19 nt, Homo sapiens
  misc_RNA (1)...(19): siRNA sense strand
gggcaaugaaucagugaca

SEQ ID NO: 402436 - RNA, 19 nt, Homo sapiens
  misc_RNA (1)...(19): siRNA sense strand
gcuguggaagucuguguug

SEQ ID NO: 402437 - RNA, 19 nt, Homo sapiens
  misc_RNA (1)...(19): siRNA sense strand
caaguauuccuacaaucuc

SEQ ID NO: 402438 - RNA, 19 nt, Homo sapiens
  misc_RNA (1)...(19): siRNA sense strand
gcugcaaguauuccuacaa

SEQ ID NO: 402439 - RNA, 19 nt, Homo sapiens
  misc_RNA (1)...(19): siRNA sense strand
acaaugagaagagcaaugg

SEQ ID NO: 402440 - RNA, 19 nt, Homo sapiens
  misc_RNA (1)...(19): siRNA sense strand
cacaaaggacuggauagug

SEQ ID NO: 402441 - RNA, 19 nt, Homo sapiens
  misc_RNA (1)...(19): siRNA sense strand
cguggaagauggcuugaua

SEQ ID NO: 402442 - RNA, 19 nt, Homo sapiens
  misc_RNA (1)...(19): siRNA sense strand
gaagauggcuugauaaaac

SEQ ID NO: 402443 - RNA, 19 nt, Homo sapiens
  misc_RNA (1)...(19): siRNA sense strand
gaaccaccaugaucuugga

SEQ ID NO: 402444 - RNA, 19 nt, Homo sapiens
  misc_RNA (1)...(19): siRNA sense strand
gcaacaggcuggcggagau

SEQ ID NO: 402445 - RNA, 19 nt, Homo sapiens
  misc_RNA (1)...(19): siRNA sense strand
gugggaggaucgugaauga

SEQ ID NO: 402446 - RNA, 19 nt, Homo sapiens
  misc_RNA (1)...(19): siRNA sense strand
gaacguggaguacaacauc

SEQ ID NO: 402447 - RNA, 19 nt, Homo sapiens
  misc_RNA (1)...(19): siRNA sense strand
ggaagauggacgagaauga

SEQ ID NO: 402448 - RNA, 19 nt, Homo sapiens
  misc_RNA (1)...(19): siRNA sense strand
uacgagaucuucagcauca

SEQ ID NO: 402449 - RNA, 19 nt, Homo sapiens
  misc_RNA (1)...(19): siRNA sense strand
gaucuuggaccacgucuuc

SEQ ID NO: 402450 - RNA, 19 nt, Homo sapiens
  misc_RNA (1)...(19): siRNA sense strand
gccaagacccacaaucuga

SEQ ID NO: 402451 - RNA, 19 nt, Homo sapiens
  misc_RNA (1)...(19): siRNA sense strand
ucacacuacuggagcaaga

SEQ ID NO: 402452 - RNA, 19 nt, Homo sapiens
  misc_RNA (1)...(19): siRNA sense strand
gcaggaggaaccaccauga

SEQ ID NO: 402453 - RNA, 19 nt, Homo sapiens
  misc_RNA (1)...(19): siRNA sense strand
gaaugacgaccaguccuuu

SEQ ID NO: 402454 - RNA, 19 nt, Homo sapiens
  misc_RNA (1)...(19): siRNA sense strand
gcacagcacagaagaucau

SEQ ID NO: 402455 - RNA, 19 nt, Homo sapiens
  misc_RNA (1)...(19): siRNA sense strand
gacaccggcugacgacuuc

SEQ ID NO: 402456 - RNA, 19 nt, Homo sapiens
  misc_RNA (1)...(19): siRNA sense strand
ggaggaaccaccaugaucu

SEQ ID NO: 402457 - RNA, 19 nt, Homo sapiens
  misc_RNA (1)...(19): siRNA sense strand
gcagcgacagccagaugua

SEQ ID NO: 402458 - RNA, 19 nt, Homo sapiens
  misc_RNA (1)...(19): siRNA sense strand
caguacaaaugcugccaaa

SEQ ID NO: 402459 - RNA, 19 nt, Homo sapiens
  misc_RNA (1)...(19): siRNA sense strand
gaagauggacgagaaugag

SEQ ID NO: 402460 - RNA, 19 nt, Homo sapiens
  misc_RNA (1)...(19): siRNA sense strand
gcuccaacaucaccucucu

SEQ ID NO: 402461 - RNA, 19 nt, Homo sapiens
  misc_RNA (1)...(19): siRNA sense strand
aaacauucccggacuuugu

SEQ ID NO: 402462 - RNA, 19 nt, Homo sapiens
  misc_RNA (1)...(19): siRNA sense strand
guacaaaugcugccaaaau

SEQ ID NO: 402463 - RNA, 19 nt, Homo sapiens
  misc_RNA (1)...(19): siRNA sense strand
cugggaagauggacgagaa

SEQ ID NO: 402464 - RNA, 19 nt, Homo sapiens
  misc_RNA (1)...(19): siRNA sense strand
uggaagauggcuugauaaa

SEQ ID NO: 402465 - RNA, 19 nt, Homo sapiens
  misc_RNA (1)...(19): siRNA sense strand
cagaccaccucaccugcuu

SEQ ID NO: 402466 - RNA, 19 nt, Homo sapiens
  misc_RNA (1)...(19): siRNA sense strand
gcagagggguggucguguu

SEQ ID NO: 402467 - RNA, 19 nt, Homo sapiens
  misc_RNA (1)...(19): siRNA sense strand
uggaggcccuggucaagga

SEQ ID NO: 402468 - RNA, 19 nt, Homo sapiens
  misc_RNA (1)...(19): siRNA sense strand
gaggaaccaccaugaucuu

SEQ ID NO: 402469 - RNA, 19 nt, Homo sapiens
  misc_RNA (1)...(19): siRNA sense strand
ggcaugagagcaucaagga

SEQ ID NO: 402470 - RNA, 19 nt, Homo sapiens
  misc_RNA (1)...(19): siRNA sense strand
ccaagacccacaaucugaa

SEQ ID NO: 402471 - RNA, 19 nt, Homo sapiens
  misc_RNA (1)...(19): siRNA sense strand
ggaggacgggaagauguuu

SEQ ID NO: 402472 - RNA, 19 nt, Homo sapiens
  misc_RNA (1)...(19): siRNA sense strand
gaaaacauucccggacuuu

SEQ ID NO: 402473 - RNA, 19 nt, Homo sapiens
  misc_RNA (1)...(19): siRNA sense strand
gcguugacguccacacaag

SEQ ID NO: 402474 - RNA, 19 nt, Homo sapiens
  misc_RNA (1)...(19): siRNA sense strand
gaguggcugugggcucuga

SEQ ID NO: 402475 - RNA, 19 nt, Homo sapiens
  misc_RNA (1)...(19): siRNA sense strand
uguacgagaucuucagcau

SEQ ID NO: 402476 - RNA, 19 nt, Homo sapiens
  misc_RNA (1)...(19): siRNA sense strand
gauggacgagaaugaguuc

SEQ ID NO: 402477 - RNA, 19 nt, Homo sapiens
  misc_RNA (1)...(19): siRNA sense strand
ugacaccggcugacgacuu

SEQ ID NO: 402478 - RNA, 19 nt, Homo sapiens
  misc_RNA (1)...(19): siRNA sense strand
cgacgcacagcacagaaga

SEQ ID NO: 402479 - RNA, 19 nt, Homo sapiens
  misc_RNA (1)...(19): siRNA sense strand
ugaaugacgaccaguccuu

SEQ ID NO: 402480 - RNA, 19 nt, Homo sapiens
  misc_RNA (1)...(19): siRNA sense strand
gacgggaagauguuuguca

SEQ ID NO: 402481 - RNA, 19 nt, Homo sapiens
  misc_RNA (1)...(19): siRNA sense strand
ggaagauggcuugauaaaa

SEQ ID NO: 402482 - RNA, 19 nt, Homo sapiens
  misc_RNA (1)...(19): siRNA sense strand
ucgauggucugggagaaau

SEQ ID NO: 402483 - RNA, 19 nt, Homo sapiens
  misc_RNA (1)...(19): siRNA sense strand
ggacaacuucgcgcugauc

SEQ ID NO: 402484 - RNA, 19 nt, Homo sapiens
  misc_RNA (1)...(19): siRNA sense strand
agaaggcugugggcaagga

SEQ ID NO: 402485 - RNA, 19 nt, Homo sapiens
  misc_RNA (1)...(19): siRNA sense strand
acagccagauguacgagau

SEQ ID NO: 402486 - RNA, 19 nt, Homo sapiens
  misc_RNA (1)...(19): siRNA sense strand
gaacuccuuccuggucuuc

SEQ ID NO: 402487 - RNA, 19 nt, Homo sapiens
  misc_RNA (1)...(19): siRNA sense strand
gaggugggaggaucgugaa

SEQ ID NO: 402488 - RNA, 19 nt, Homo sapiens
  misc_RNA (1)...(19): siRNA sense strand
guggaagauggcuugauaa

SEQ ID NO: 402489 - RNA, 19 nt, Homo sapiens
  misc_RNA (1)...(19): siRNA sense strand
caaacugcccgcuguacgu

SEQ ID NO: 402490 - RNA, 19 nt, Homo sapiens
  misc_RNA (1)...(19): siRNA sense strand
gauaaaacaaaucggagaa

SEQ ID NO: 402491 - RNA, 19 nt, Homo sapiens
  misc_RNA (1)...(19): siRNA sense strand
gugcgcaaccuacaucagu

SEQ ID NO: 402492 - RNA, 19 nt, Homo sapiens
  misc_RNA (1)...(19): siRNA sense strand
cgagggcaccaacggcauu

SEQ ID NO: 402493 - RNA, 19 nt, Homo sapiens
  misc_RNA (1)...(19): siRNA sense strand
ccgcagccuucgucacauc

SEQ ID NO: 402494 - RNA, 19 nt, Homo sapiens
  misc_RNA (1)...(19): siRNA sense strand
gugcagcgacagccagaug

SEQ ID NO: 402495 - RNA, 19 nt, Homo sapiens
  misc_RNA (1)...(19): siRNA sense strand
gaugugcacguggaagaug

SEQ ID NO: 402496 - RNA, 19 nt, Homo sapiens
  misc_RNA (1)...(19): siRNA sense strand
uacaaaugcugccaaaauc

SEQ ID NO: 402497 - RNA, 19 nt, Homo sapiens
  misc_RNA (1)...(19): siRNA sense strand
ucaaggagaagggugugaa

SEQ ID NO: 402498 - RNA, 19 nt, Homo sapiens
  misc_RNA (1)...(19): siRNA sense strand
gaagacaucaucauucaga

SEQ ID NO: 402499 - RNA, 19 nt, Homo sapiens
  misc_RNA (1)...(19): siRNA sense strand
gaaggcaaaucccacuuuc

SEQ ID NO: 402500 - RNA, 19 nt, Homo sapiens
  misc_RNA (1)...(19): siRNA sense strand
gcacaacacggaaccagaa

SEQ ID NO: 402501 - RNA, 19 nt, Homo sapiens
  misc_RNA (1)...(19): siRNA sense strand
gcaguccucugucaugaug

SEQ ID NO: 402502 - RNA, 19 nt, Homo sapiens
  misc_RNA (1)...(19): siRNA sense strand
ggaaguaaaggauccaguu

SEQ ID NO: 402503 - RNA, 19 nt, Homo sapiens
  misc_RNA (1)...(19): siRNA sense strand
gcaaaucccacuuucagau

SEQ ID NO: 402504 - RNA, 19 nt, Homo sapiens
  misc_RNA (1)...(19): siRNA sense strand
caggcuggaucaugcuuua

SEQ ID NO: 402505 - RNA, 19 nt, Homo sapiens
  misc_RNA (1)...(19): siRNA sense strand
gaaguaaaggauccaguug

SEQ ID NO: 402506 - RNA, 19 nt, Homo sapiens
  misc_RNA (1)...(19): siRNA sense strand
guuugaagcucgaggucua

SEQ ID NO: 402507 - RNA, 19 nt, Homo sapiens
  misc_RNA (1)...(19): siRNA sense strand
gaauggaugagcacgguuu

SEQ ID NO: 402508 - RNA, 19 nt, Homo sapiens
  misc_RNA (1)...(19): siRNA sense strand
gcuggaucaugcuuuauau

SEQ ID NO: 402509 - RNA, 19 nt, Homo sapiens
  misc_RNA (1)...(19): siRNA sense strand
ggaucaugcuuuauaugca

SEQ ID NO: 402510 - RNA, 19 nt, Homo sapiens
  misc_RNA (1)...(19): siRNA sense strand
ggcuggaucaugcuuuaua

SEQ ID NO: 402511 - RNA, 19 nt, Homo sapiens
  misc_RNA (1)...(19): siRNA sense strand
caacacggaaccagaaugg

SEQ ID NO: 402512 - RNA, 19 nt, Homo sapiens
  misc_RNA (1)...(19): siRNA sense strand
ccucugucaugauggaauu

SEQ ID NO: 402513 - RNA, 19 nt, Homo sapiens
  misc_RNA (1)...(19): siRNA sense strand
guuccucccugaagacauc

SEQ ID NO: 402514 - RNA, 19 nt, Homo sapiens
  misc_RNA (1)...(19): siRNA sense strand
agaaggcaaaucccacuuu

SEQ ID NO: 402515 - RNA, 19 nt, Homo sapiens
  misc_RNA (1)...(19): siRNA sense strand
caaaucccacuuucagauc

SEQ ID NO: 402516 - RNA, 19 nt, Homo sapiens
  misc_RNA (1)...(19): siRNA sense strand
gaagcucgaggucuagaag

SEQ ID NO: 402517 - RNA, 19 nt, Homo sapiens
  misc_RNA (1)...(19): siRNA sense strand
uagagauuccagugcguua

SEQ ID NO: 402518 - RNA, 19 nt, Homo sapiens
  misc_RNA (1)...(19): siRNA sense strand
ugucugcaguccucuguca

SEQ ID NO: 402519 - RNA, 19 nt, Homo sapiens
  misc_RNA (1)...(19): siRNA sense strand
gcaggcuggaucaugcuuu

SEQ ID NO: 402520 - RNA, 19 nt, Homo sapiens
  misc_RNA (1)...(19): siRNA sense strand
acacggaaccagaauggau

SEQ ID NO: 402521 - RNA, 19 nt, Homo sapiens
  misc_RNA (1)...(19): siRNA sense strand
cugcaguccucugucauga

SEQ ID NO: 402522 - RNA, 19 nt, Homo sapiens
  misc_RNA (1)...(19): siRNA sense strand
gagaaggcaaaucccacuu

SEQ ID NO: 402523 - RNA, 19 nt, Homo sapiens
  misc_RNA (1)...(19): siRNA sense strand
gaagcuucacccgacagua

SEQ ID NO: 402524 - RNA, 19 nt, Homo sapiens
  misc_RNA (1)...(19): siRNA sense strand
ccugaagacaucaucauuc

SEQ ID NO: 402525 - RNA, 19 nt, Homo sapiens
  misc_RNA (1)...(19): siRNA sense strand
ggcaaaucccacuuucaga

SEQ ID NO: 402526 - RNA, 19 nt, Homo sapiens
  misc_RNA (1)...(19): siRNA sense strand
ccaggaagaguuugaagcu

SEQ ID NO: 402527 - RNA, 19 nt, Homo sapiens
  misc_RNA (1)...(19): siRNA sense strand
gaauuuuggugguggaagu

SEQ ID NO: 402528 - RNA, 19 nt, Homo sapiens
  misc_RNA (1)...(19): siRNA sense strand
gcguuaccaggaagaguuu

SEQ ID NO: 402529 - RNA, 19 nt, Homo sapiens
  misc_RNA (1)...(19): siRNA sense strand
caucguggaccugaggaaa

SEQ ID NO: 402530 - RNA, 19 nt, Homo sapiens
  misc_RNA (1)...(19): siRNA sense strand
caguacaaacuaccagaug

SEQ ID NO: 402531 - RNA, 19 nt, Homo sapiens
  misc_RNA (1)...(19): siRNA sense strand
ggacauugaugacccauuc

SEQ ID NO: 402532 - RNA, 19 nt, Homo sapiens
  misc_RNA (1)...(19): siRNA sense strand
gaccagaccuccaacaaca

SEQ ID NO: 402533 - RNA, 19 nt, Homo sapiens
  misc_RNA (1)...(19): siRNA sense strand
gcugauaucgucuuuguuu

SEQ ID NO: 402534 - RNA, 19 nt, Homo sapiens
  misc_RNA (1)...(19): siRNA sense strand
ggaaagagcauucgaaacg

SEQ ID NO: 402535 - RNA, 19 nt, Homo sapiens
  misc_RNA (1)...(19): siRNA sense strand
gaaagagcauucgaaacga

SEQ ID NO: 402536 - RNA, 19 nt, Homo sapiens
  misc_RNA (1)...(19): siRNA sense strand
gaaaucccuuugacaccuu

SEQ ID NO: 402537 - RNA, 19 nt, Homo sapiens
  misc_RNA (1)...(19): siRNA sense strand
cagcugauaucgucuuugu

SEQ ID NO: 402538 - RNA, 19 nt, Homo sapiens
  misc_RNA (1)...(19): siRNA sense strand
gagcagguucuuccaauau

SEQ ID NO: 402539 - RNA, 19 nt, Homo sapiens
  misc_RNA (1)...(19): siRNA sense strand
ugagcagguucuuccaaua

SEQ ID NO: 402540 - RNA, 19 nt, Homo sapiens
  misc_RNA (1)...(19): siRNA sense strand
caacaacauuccagcugau

SEQ ID NO: 402541 - RNA, 19 nt, Homo sapiens
  misc_RNA (1)...(19): siRNA sense strand
gcagguucuuccaauauag

SEQ ID NO: 402542 - RNA, 19 nt, Homo sapiens
  misc_RNA (1)...(19): siRNA sense strand
gcucugaugucauuuaucc

SEQ ID NO: 402543 - RNA, 19 nt, Homo sapiens
  misc_RNA (1)...(19): siRNA sense strand
agauggcucugaugucauu

SEQ ID NO: 402544 - RNA, 19 nt, Homo sapiens
  misc_RNA (1)...(19): siRNA sense strand
gaggaaggcauggacauug

SEQ ID NO: 402545 - RNA, 19 nt, Homo sapiens
  misc_RNA (1)...(19): siRNA sense strand
ggaggaaggcauggacauu

SEQ ID NO: 402546 - RNA, 19 nt, Homo sapiens
  misc_RNA (1)...(19): siRNA sense strand
gcgaaaaguuccuggagaa

SEQ ID NO: 402547 - RNA, 19 nt, Homo sapiens
  misc_RNA (1)...(19): siRNA sense strand
aggaaggcauggacauuga

SEQ ID NO: 402548 - RNA, 19 nt, Homo sapiens
  misc_RNA (1)...(19): siRNA sense strand
gagaccagaccuccaacaa

SEQ ID NO: 402549 - RNA, 19 nt, Homo sapiens
  misc_RNA (1)...(19): siRNA sense strand
caacauuccagcugauauc

SEQ ID NO: 402550 - RNA, 19 nt, Homo sapiens
  misc_RNA (1)...(19): siRNA sense strand
guggaaagaaggaaccaaa

SEQ ID NO: 402551 - RNA, 19 nt, Homo sapiens
  misc_RNA (1)...(19): siRNA sense strand
gcuaccacccggacaagaa

SEQ ID NO: 402552 - RNA, 19 nt, Homo sapiens
  misc_RNA (1)...(19): siRNA sense strand
agcagguucuuccaauaua

SEQ ID NO: 402553 - RNA, 19 nt, Homo sapiens
  misc_RNA (1)...(19): siRNA sense strand
cauguuugcugaguucuuc

SEQ ID NO: 402554 - RNA, 19 nt, Homo sapiens
  misc_RNA (1)...(19): siRNA sense strand
gaaagaaggaaccaaaauc

SEQ ID NO: 402555 - RNA, 19 nt, Homo sapiens
  misc_RNA (1)...(19): siRNA sense strand
gaaggcauggacauugaug

SEQ ID NO: 402556 - RNA, 19 nt, Homo sapiens
  misc_RNA (1)...(19): siRNA sense strand
ccagaccuccaacaacauu

SEQ ID NO: 402557 - RNA, 19 nt, Homo sapiens
  misc_RNA (1)...(19): siRNA sense strand
guggggaccucauuauuga

SEQ ID NO: 402558 - RNA, 19 nt, Homo sapiens
  misc_RNA (1)...(19): siRNA sense strand
ggaaagaaggaaccaaaau

SEQ ID NO: 402559 - RNA, 19 nt, Homo sapiens
  misc_RNA (1)...(19): siRNA sense strand
ggacaagccccacaauauc

SEQ ID NO: 402560 - RNA, 19 nt, Homo sapiens
  misc_RNA (1)...(19): siRNA sense strand
aggagaaguucaaggagau

SEQ ID NO: 402561 - RNA, 19 nt, Homo sapiens
  misc_RNA (1)...(19): siRNA sense strand
gugccaaugguaccucuuu

SEQ ID NO: 402562 - RNA, 19 nt, Homo sapiens
  misc_RNA (1)...(19): siRNA sense strand
ccgaggagaaguucaagga

SEQ ID NO: 402563 - RNA, 19 nt, Homo sapiens
  misc_RNA (1)...(19): siRNA sense strand
gacggaaagagcauucgaa

SEQ ID NO: 402564 - RNA, 19 nt, Homo sapiens
  misc_RNA (1)...(19): siRNA sense strand
uggcucugaugucauuuau

SEQ ID NO: 402565 - RNA, 19 nt, Homo sapiens
  misc_RNA (1)...(19): siRNA sense strand
uggcagaaaucccuuugac

SEQ ID NO: 402566 - RNA, 19 nt, Homo sapiens
  misc_RNA (1)...(19): siRNA sense strand
ggaaggcauggacauugau

SEQ ID NO: 402567 - RNA, 19 nt, Homo sapiens
  misc_RNA (1)...(19): siRNA sense strand
gaagaagggguggaaagaa

SEQ ID NO: 402568 - RNA, 19 nt, Homo sapiens
  misc_RNA (1)...(19): siRNA sense strand
cagcuacacauuccaugga

SEQ ID NO: 402569 - RNA, 19 nt, Homo sapiens
  misc_RNA (1)...(19): siRNA sense strand
gaucuuccccgaaaggauu

SEQ ID NO: 402570 - RNA, 19 nt, Homo sapiens
  misc_RNA (1)...(19): siRNA sense strand
gaaggaaccaaaaucacuu

SEQ ID NO: 402571 - RNA, 19 nt, Homo sapiens
  misc_RNA (1)...(19): siRNA sense strand
guaccaagaagaugaaaau

SEQ ID NO: 402572 - RNA, 19 nt, Homo sapiens
  misc_RNA (1)...(19): siRNA sense strand
uugagcagguucuuccaau

SEQ ID NO: 402573 - RNA, 19 nt, Homo sapiens
  misc_RNA (1)...(19): siRNA sense strand
ucgaaacgaagacaaaaua

SEQ ID NO: 402574 - RNA, 19 nt, Homo sapiens
  misc_RNA (1)...(19): siRNA sense strand
acggaaagagcauucgaaa

SEQ ID NO: 402575 - RNA, 19 nt, Homo sapiens
  misc_RNA (1)...(19): siRNA sense strand
gcgccgaggagaaguucaa

SEQ ID NO: 402576 - RNA, 19 nt, Homo sapiens
  misc_RNA (1)...(19): siRNA sense strand
gccaaugguaccucuuuca

SEQ ID NO: 402577 - RNA, 19 nt, Homo sapiens
  misc_RNA (1)...(19): siRNA sense strand
uauugaccaucgaagugaa

SEQ ID NO: 402578 - RNA, 19 nt, Homo sapiens
  misc_RNA (1)...(19): siRNA sense strand
aauauugaccaucgaagug

SEQ ID NO: 402579 - RNA, 19 nt, Homo sapiens
  misc_RNA (1)...(19): siRNA sense strand
gcuguaccaagaagaugaa

SEQ ID NO: 402580 - RNA, 19 nt, Homo sapiens
  misc_RNA (1)...(19): siRNA sense strand
ugccauguuugcugaguuc

SEQ ID NO: 402581 - RNA, 19 nt, Homo sapiens
  misc_RNA (1)...(19): siRNA sense strand
gcgaauauguagagaugua

SEQ ID NO: 402582 - RNA, 19 nt, Homo sapiens
  misc_RNA (1)...(19): siRNA sense strand
gauuaucccucaacuauag

SEQ ID NO: 402583 - RNA, 19 nt, Homo sapiens
  misc_RNA (1)...(19): siRNA sense strand
caagugagccaucauuuga

SEQ ID NO: 402584 - RNA, 19 nt, Homo sapiens
  misc_RNA (1)...(19): siRNA sense strand
gcccagaacugccgcaaga

SEQ ID NO: 402585 - RNA, 19 nt, Homo sapiens
  misc_RNA (1)...(19): siRNA sense strand
ugauacagcuguccacuuc

SEQ ID NO: 402586 - RNA, 19 nt, Homo sapiens
  misc_RNA (1)...(19): siRNA sense strand
cagcgaauauguagagaug

SEQ ID NO: 402587 - RNA, 19 nt, Homo sapiens
  misc_RNA (1)...(19): siRNA sense strand
caagguacccgcugacaga

SEQ ID NO: 402588 - RNA, 19 nt, Homo sapiens
  misc_RNA (1)...(19): siRNA sense strand
ucucaggccugcucaguga

SEQ ID NO: 402589 - RNA, 19 nt, Homo sapiens
  misc_RNA (1)...(19): siRNA sense strand
gccgguagaugacuuuaau

SEQ ID NO: 402590 - RNA, 19 nt, Homo sapiens
  misc_RNA (1)...(19): siRNA sense strand
gauucuggcuucccacuuc

SEQ ID NO: 402591 - RNA, 19 nt, Homo sapiens
  misc_RNA (1)...(19): siRNA sense strand
gaacgggagcggcuucuca

SEQ ID NO: 402592 - RNA, 19 nt, Homo sapiens
  misc_RNA (1)...(19): siRNA sense strand
uggagcggcugaccaauga

SEQ ID NO: 402593 - RNA, 19 nt, Homo sapiens
  misc_RNA (1)...(19): siRNA sense strand
agaggaagcuggaaaccau

SEQ ID NO: 402594 - RNA, 19 nt, Homo sapiens
  misc_RNA (1)...(19): siRNA sense strand
gcuguccacuucagagcua

SEQ ID NO: 402595 - RNA, 19 nt, Homo sapiens
  misc_RNA (1)...(19): siRNA sense strand
caacagcuacucuccugaa

SEQ ID NO: 402596 - RNA, 19 nt, Homo sapiens
  misc_RNA (1)...(19): siRNA sense strand
gauggaggccacagacuga

SEQ ID NO: 402597 - RNA, 19 nt, Homo sapiens
  misc_RNA (1)...(19): siRNA sense strand
ugacuuuaaugagcuauug

SEQ ID NO: 402598 - RNA, 19 nt, Homo sapiens
  misc_RNA (1)...(19): siRNA sense strand
ccaagugagccaucauuug

SEQ ID NO: 402599 - RNA, 19 nt, Homo sapiens
  misc_RNA (1)...(19): siRNA sense strand
ggcaggagaucauguccau

SEQ ID NO: 402600 - RNA, 19 nt, Homo sapiens
  misc_RNA (1)...(19): siRNA sense strand
cuauagcgaugcugaaucu

SEQ ID NO: 402601 - RNA, 19 nt, Homo sapiens
  misc_RNA (1)...(19): siRNA sense strand
gagcaggaacagggugaua

SEQ ID NO: 402602 - RNA, 19 nt, Homo sapiens
  misc_RNA (1)...(19): siRNA sense strand
gagcuguaccgugacauuu

SEQ ID NO: 402603 - RNA, 19 nt, Homo sapiens
  misc_RNA (1)...(19): siRNA sense strand
caggagaucauguccauca

SEQ ID NO: 402604 - RNA, 19 nt, Homo sapiens
  misc_RNA (1)...(19): siRNA sense strand
ggagagauggaacugacuu

SEQ ID NO: 402605 - RNA, 19 nt, Homo sapiens
  misc_RNA (1)...(19): siRNA sense strand
uagcgaugcugaaucucuu

SEQ ID NO: 402606 - RNA, 19 nt, Homo sapiens
  misc_RNA (1)...(19): siRNA sense strand
ucaacuugccgguagauga

SEQ ID NO: 402607 - RNA, 19 nt, Homo sapiens
  misc_RNA (1)...(19): siRNA sense strand
ccaagaagacccagaaucc

SEQ ID NO: 402608 - RNA, 19 nt, Homo sapiens
  misc_RNA (1)...(19): siRNA sense strand
gcaggaacagggugauaca

SEQ ID NO: 402609 - RNA, 19 nt, Homo sapiens
  misc_RNA (1)...(19): siRNA sense strand
gcaagaggaagcuggaaac

SEQ ID NO: 402610 - RNA, 19 nt, Homo sapiens
  misc_RNA (1)...(19): siRNA sense strand
cuucagagcuaggagagau

SEQ ID NO: 402611 - RNA, 19 nt, Homo sapiens
  misc_RNA (1)...(19): siRNA sense strand
caacuauagcgaugcugaa

SEQ ID NO: 402612 - RNA, 19 nt, Homo sapiens
  misc_RNA (1)...(19): siRNA sense strand
cgguagaugacuuuaauga

SEQ ID NO: 402613 - RNA, 19 nt, Homo sapiens
  misc_RNA (1)...(19): siRNA sense strand
gcgcagcgaauauguagag

SEQ ID NO: 402614 - RNA, 19 nt, Homo sapiens
  misc_RNA (1)...(19): siRNA sense strand
gagcugcagggucugaaug

SEQ ID NO: 402615 - RNA, 19 nt, Homo sapiens
  misc_RNA (1)...(19): siRNA sense strand
agauguacccaguggagua

SEQ ID NO: 402616 - RNA, 19 nt, Homo sapiens
  misc_RNA (1)...(19): siRNA sense strand
cuccaccacccacaacuua

SEQ ID NO: 402617 - RNA, 19 nt, Homo sapiens
  misc_RNA (1)...(19): siRNA sense strand
ggaccuccaccacccacaa

SEQ ID NO: 402618 - RNA, 19 nt, Homo sapiens
  misc_RNA (1)...(19): siRNA sense strand
gagagauggaacugacuug

SEQ ID NO: 402619 - RNA, 19 nt, Homo sapiens
  misc_RNA (1)...(19): siRNA sense strand
auacuccuauggcaacaug

SEQ ID NO: 402620 - RNA, 19 nt, Homo sapiens
  misc_RNA (1)...(19): siRNA sense strand
gaagcuggaaaccauugug

SEQ ID NO: 402621 - RNA, 19 nt, Homo sapiens
  misc_RNA (1)...(19): siRNA sense strand
gaggaagcuggaaaccauu

SEQ ID NO: 402622 - RNA, 19 nt, Homo sapiens
  misc_RNA (1)...(19): siRNA sense strand
ggucugaaugcuccaagug

SEQ ID NO: 402623 - RNA, 19 nt, Homo sapiens
  misc_RNA (1)...(19): siRNA sense strand
gcaccuucgggaugaauca

SEQ ID NO: 402624 - RNA, 19 nt, Homo sapiens
  misc_RNA (1)...(19): siRNA sense strand
ugacuuggcaggagaucau

SEQ ID NO: 402625 - RNA, 19 nt, Homo sapiens
  misc_RNA (1)...(19): siRNA sense strand
caagguggcagcccagaac

SEQ ID NO: 402626 - RNA, 19 nt, Homo sapiens
  misc_RNA (1)...(19): siRNA sense strand
caacuugccgguagaugac

SEQ ID NO: 402627 - RNA, 19 nt, Homo sapiens
  misc_RNA (1)...(19): siRNA sense strand
ggcagggagucgggaugaa

SEQ ID NO: 402628 - RNA, 19 nt, Homo sapiens
  misc_RNA (1)...(19): siRNA sense strand
ccaagauggaggccacaga

SEQ ID NO: 402629 - RNA, 19 nt, Homo sapiens
  misc_RNA (1)...(19): siRNA sense strand
uccagcaccuucgggauga

SEQ ID NO: 402630 - RNA, 19 nt, Homo sapiens
  misc_RNA (1)...(19): siRNA sense strand
gguagaugacuuuaaugag

SEQ ID NO: 402631 - RNA, 19 nt, Homo sapiens
  misc_RNA (1)...(19): siRNA sense strand
caaaggagccaacaagaag

SEQ ID NO: 402632 - RNA, 19 nt, Homo sapiens
  misc_RNA (1)...(19): siRNA sense strand
gggcucgccuucugcaaga

SEQ ID NO: 402633 - RNA, 19 nt, Homo sapiens
  misc_RNA (1)...(19): siRNA sense strand
ugagcggccugggauguua

SEQ ID NO: 402634 - RNA, 19 nt, Homo sapiens
  misc_RNA (1)...(19): siRNA sense strand
acaaaggagccaacaagaa

SEQ ID NO: 402635 - RNA, 19 nt, Homo sapiens
  misc_RNA (1)...(19): siRNA sense strand
gccucaagcuggaccgaau

SEQ ID NO: 402636 - RNA, 19 nt, Homo sapiens
  misc_RNA (1)...(19): siRNA sense strand
auacaaaggagccaacaag

SEQ ID NO: 402637 - RNA, 19 nt, Homo sapiens
  misc_RNA (1)...(19): siRNA sense strand
uacaaaggagccaacaaga

SEQ ID NO: 402638 - RNA, 19 nt, Homo sapiens
  misc_RNA (1)...(19): siRNA sense strand
ucacugggcuccacaccuu

SEQ ID NO: 402639 - RNA, 19 nt, Homo sapiens
  misc_RNA (1)...(19): siRNA sense strand
ugaugaaguuugagguaaa

SEQ ID NO: 402640 - RNA, 19 nt, Homo sapiens
  misc_RNA (1)...(19): siRNA sense strand
ggagcgcgaucucuacaag

SEQ ID NO: 402641 - RNA, 19 nt, Homo sapiens
  misc_RNA (1)...(19): siRNA sense strand
caaugacuuugacuugaug

SEQ ID NO: 402642 - RNA, 19 nt, Homo sapiens
  misc_RNA (1)...(19): siRNA sense strand
gaugaaguuugagguaaag

SEQ ID NO: 402643 - RNA, 19 nt, Homo sapiens
  misc_RNA (1)...(19): siRNA sense strand
uugaugaaguuugagguaa

SEQ ID NO: 402644 - RNA, 19 nt, Homo sapiens
  misc_RNA (1)...(19): siRNA sense strand
ccauggaauaugucaauga

SEQ ID NO: 402645 - RNA, 19 nt, Homo sapiens
  misc_RNA (1)...(19): siRNA sense strand
ggccauggaauaugucaau

SEQ ID NO: 402646 - RNA, 19 nt, Homo sapiens
  misc_RNA (1)...(19): siRNA sense strand
uaaagcgggaacccucuga

SEQ ID NO: 402647 - RNA, 19 nt, Homo sapiens
  misc_RNA (1)...(19): siRNA sense strand
gccauggaauaugucaaug

SEQ ID NO: 402648 - RNA, 19 nt, Homo sapiens
  misc_RNA (1)...(19): siRNA sense strand
gcacaaaccaagaagauua

SEQ ID NO: 402649 - RNA, 19 nt, Homo sapiens
  misc_RNA (1)...(19): siRNA sense strand
gaaaaucgccaaucaauua

SEQ ID NO: 402650 - RNA, 19 nt, Homo sapiens
  misc_RNA (1)...(19): siRNA sense strand
caagauggcagcagaauuu

SEQ ID NO: 402651 - RNA, 19 nt, Homo sapiens
  misc_RNA (1)...(19): siRNA sense strand
gagauaggcuugccagaug

SEQ ID NO: 402652 - RNA, 19 nt, Homo sapiens
  misc_RNA (1)...(19): siRNA sense strand
ggauaggaaucaagaaguu

SEQ ID NO: 402653 - RNA, 19 nt, Homo sapiens
  misc_RNA (1)...(19): siRNA sense strand
aaucacagguacacauuua

SEQ ID NO: 402654 - RNA, 19 nt, Homo sapiens
  misc_RNA (1)...(19): siRNA sense strand
gaucuguucuccugauaaa

SEQ ID NO: 402655 - RNA, 19 nt, Homo sapiens
  misc_RNA (1)...(19): siRNA sense strand
gcagauggguuguauacau

SEQ ID NO: 402656 - RNA, 19 nt, Homo sapiens
  misc_RNA (1)...(19): siRNA sense strand
gcagaaaauucgucacuua

SEQ ID NO: 402657 - RNA, 19 nt, Homo sapiens
  misc_RNA (1)...(19): siRNA sense strand
gagcauugcauucaguuua

SEQ ID NO: 402658 - RNA, 19 nt, Homo sapiens
  misc_RNA (1)...(19): siRNA sense strand
gcaaugacuccaacccuua

SEQ ID NO: 402659 - RNA, 19 nt, Homo sapiens
  misc_RNA (1)...(19): siRNA sense strand
ccaagaagauuaugcaagu

SEQ ID NO: 402660 - RNA, 19 nt, Homo sapiens
  misc_RNA (1)...(19): siRNA sense strand
uaacaaauaugugggagaa

SEQ ID NO: 402661 - RNA, 19 nt, Homo sapiens
  misc_RNA (1)...(19): siRNA sense strand
uuaaaggcauccuguuaua

SEQ ID NO: 402662 - RNA, 19 nt, Homo sapiens
  misc_RNA (1)...(19): siRNA sense strand
caauagaccagaucugaua

SEQ ID NO: 402663 - RNA, 19 nt, Homo sapiens
  misc_RNA (1)...(19): siRNA sense strand
agaaauagaagucuccuua

SEQ ID NO: 402664 - RNA, 19 nt, Homo sapiens
  misc_RNA (1)...(19): siRNA sense strand
gagaaaggccgacuacaga

SEQ ID NO: 402665 - RNA, 19 nt, Homo sapiens
  misc_RNA (1)...(19): siRNA sense strand
gcauuugccuuccgaguau

SEQ ID NO: 402666 - RNA, 19 nt, Homo sapiens
  misc_RNA (1)...(19): siRNA sense strand
caagauguccuacagauga

SEQ ID NO: 402667 - RNA, 19 nt, Homo sapiens
  misc_RNA (1)...(19): siRNA sense strand
gcagaagauugaaguagga

SEQ ID NO: 402668 - RNA, 19 nt, Homo sapiens
  misc_RNA (1)...(19): siRNA sense strand
gagacuuccuugcuucuuu

SEQ ID NO: 402669 - RNA, 19 nt, Homo sapiens
  misc_RNA (1)...(19): siRNA sense strand
ggccagaaauccuuaacaa

SEQ ID NO: 402670 - RNA, 19 nt, Homo sapiens
  misc_RNA (1)...(19): siRNA sense strand
ccagaaauccuuaacaaau

SEQ ID NO: 402671 - RNA, 19 nt, Homo sapiens
  misc_RNA (1)...(19): siRNA sense strand
ggaaggcccuccucacagu

SEQ ID NO: 402672 - RNA, 19 nt, Homo sapiens
  misc_RNA (1)...(19): siRNA sense strand
uggaaaugcuuaacgcuuu

SEQ ID NO: 402673 - RNA, 19 nt, Homo sapiens
  misc_RNA (1)...(19): siRNA sense strand
gaagucuccuuauauacau

SEQ ID NO: 402674 - RNA, 19 nt, Homo sapiens
  misc_RNA (1)...(19): siRNA sense strand
ggcaagauguugaaugcaa

SEQ ID NO: 402675 - RNA, 19 nt, Homo sapiens
  misc_RNA (1)...(19): siRNA sense strand
ugacaaagccaaacagugu

SEQ ID NO: 402676 - RNA, 19 nt, Homo sapiens
  misc_RNA (1)...(19): siRNA sense strand
gcauucaguuuaccucaga

SEQ ID NO: 402677 - RNA, 19 nt, Homo sapiens
  misc_RNA (1)...(19): siRNA sense strand
gaaaggccgacuacagauu

SEQ ID NO: 402678 - RNA, 19 nt, Homo sapiens
  misc_RNA (1)...(19): siRNA sense strand
aaaggaggcuuggugcuaa

SEQ ID NO: 402679 - RNA, 19 nt, Homo sapiens
  misc_RNA (1)...(19): siRNA sense strand
ucucuuggcucgacagauu

SEQ ID NO: 402680 - RNA, 19 nt, Homo sapiens
  misc_RNA (1)...(19): siRNA sense strand
gaaauagaagucuccuuau

SEQ ID NO: 402681 - RNA, 19 nt, Homo sapiens
  misc_RNA (1)...(19): siRNA sense strand
gggcugggcuuucuauugg

SEQ ID NO: 402682 - RNA, 19 nt, Homo sapiens
  misc_RNA (1)...(19): siRNA sense strand
gauggcagcagaauuuauu

SEQ ID NO: 402683 - RNA, 19 nt, Homo sapiens
  misc_RNA (1)...(19): siRNA sense strand
ggaaucaagaaguuacuaa

SEQ ID NO: 402684 - RNA, 19 nt, Homo sapiens
  misc_RNA (1)...(19): siRNA sense strand
aagaaggucuggauaggaa

SEQ ID NO: 402685 - RNA, 19 nt, Homo sapiens
  misc_RNA (1)...(19): siRNA sense strand
ggaagaaggucuggauagg

SEQ ID NO: 402686 - RNA, 19 nt, Homo sapiens
  misc_RNA (1)...(19): siRNA sense strand
guuacucucugcugaugua

SEQ ID NO: 402687 - RNA, 19 nt, Homo sapiens
  misc_RNA (1)...(19): siRNA sense strand
gacaaggaauuuucagaua

SEQ ID NO: 402688 - RNA, 19 nt, Homo sapiens
  misc_RNA (1)...(19): siRNA sense strand
gaaguaggacugguuguug

SEQ ID NO: 402689 - RNA, 19 nt, Homo sapiens
  misc_RNA (1)...(19): siRNA sense strand
gaauccaacuucccguuca

SEQ ID NO: 402690 - RNA, 19 nt, Homo sapiens
  misc_RNA (1)...(19): siRNA sense strand
gaaaauucgucacuuaauc

SEQ ID NO: 402691 - RNA, 19 nt, Homo sapiens
  misc_RNA (1)...(19): siRNA sense strand
gcaagcuucuuaucauugg

SEQ ID NO: 402692 - RNA, 19 nt, Homo sapiens
  misc_RNA (1)...(19): siRNA sense strand
uggaugacauugagagauu

SEQ ID NO: 402693 - RNA, 19 nt, Homo sapiens
  misc_RNA (1)...(19): siRNA sense strand
gcuaacauucgcaaacuuu

SEQ ID NO: 402694 - RNA, 19 nt, Homo sapiens
  misc_RNA (1)...(19): siRNA sense strand
gauaggaaucaagaaguua

SEQ ID NO: 402695 - RNA, 19 nt, Homo sapiens
  misc_RNA (1)...(19): siRNA sense strand
ggacauggagaaagcagaa

SEQ ID NO: 402696 - RNA, 19 nt, Homo sapiens
  misc_RNA (1)...(19): siRNA sense strand
aaugagagggcaucaguua

SEQ ID NO: 402697 - RNA, 19 nt, Homo sapiens
  misc_RNA (1)...(19): siRNA sense strand
ggaaaaggcagaagauuga

SEQ ID NO: 402698 - RNA, 19 nt, Homo sapiens
  misc_RNA (1)...(19): siRNA sense strand
acagauggauccugaauac

SEQ ID NO: 402699 - RNA, 19 nt, Homo sapiens
  misc_RNA (1)...(19): siRNA sense strand
ggcaagauguccuacagau

SEQ ID NO: 402700 - RNA, 19 nt, Homo sapiens
  misc_RNA (1)...(19): siRNA sense strand
ugaacgguaucaucaaaug

SEQ ID NO: 402701 - RNA, 19 nt, Homo sapiens
  misc_RNA (1)...(19): siRNA sense strand
cauaaaggccaguacuaaa

SEQ ID NO: 402702 - RNA, 19 nt, Homo sapiens
  misc_RNA (1)...(19): siRNA sense strand
caaaggaggcuuggugcua

SEQ ID NO: 402703 - RNA, 19 nt, Homo sapiens
  misc_RNA (1)...(19): siRNA sense strand
caagaucuguucuccugau

SEQ ID NO: 402704 - RNA, 19 nt, Homo sapiens
  misc_RNA (1)...(19): siRNA sense strand
cagauggguuguauacaug

SEQ ID NO: 402705 - RNA, 19 nt, Homo sapiens
  misc_RNA (1)...(19): siRNA sense strand
gauccugaauaccguguga

SEQ ID NO: 402706 - RNA, 19 nt, Homo sapiens
  misc_RNA (1)...(19): siRNA sense strand
ggagaaugauaucaaacca

SEQ ID NO: 402707 - RNA, 19 nt, Homo sapiens
  misc_RNA (1)...(19): siRNA sense strand
ugaaggacauugaauccau

SEQ ID NO: 402708 - RNA, 19 nt, Homo sapiens
  misc_RNA (1)...(19): siRNA sense strand
auugagagauugcuugauu

SEQ ID NO: 402709 - RNA, 19 nt, Homo sapiens
  misc_RNA (1)...(19): siRNA sense strand
cuggaagacuggaaguuaa

SEQ ID NO: 402710 - RNA, 19 nt, Homo sapiens
  misc_RNA (1)...(19): siRNA sense strand
agaugaggcucuucuuaga

SEQ ID NO: 402711 - RNA, 19 nt, Homo sapiens
  misc_RNA (1)...(19): siRNA sense strand
gagcagauggguuguauac

SEQ ID NO: 402712 - RNA, 19 nt, Homo sapiens
  misc_RNA (1)...(19): siRNA sense strand
gaaacagucaaguugcauu

SEQ ID NO: 402713 - RNA, 19 nt, Homo sapiens
  misc_RNA (1)...(19): siRNA sense strand
gcacaaugaccaucgagau

SEQ ID NO: 402714 - RNA, 19 nt, Homo sapiens
  misc_RNA (1)...(19): siRNA sense strand
gaagaaggucuggauagga

SEQ ID NO: 402715 - RNA, 19 nt, Homo sapiens
  misc_RNA (1)...(19): siRNA sense strand
ccaaaugucaggccaugaa

SEQ ID NO: 402716 - RNA, 19 nt, Homo sapiens
  misc_RNA (1)...(19): siRNA sense strand
ccacacagcaagaaugaga

SEQ ID NO: 402717 - RNA, 19 nt, Homo sapiens
  misc_RNA (1)...(19): siRNA sense strand
acaaauaugugggagaauc

SEQ ID NO: 402718 - RNA, 19 nt, Homo sapiens
  misc_RNA (1)...(19): siRNA sense strand
ccgcaagcuucuuaucauu

SEQ ID NO: 402719 - RNA, 19 nt, Homo sapiens
  misc_RNA (1)...(19): siRNA sense strand
guacaaaucccagcucagu

SEQ ID NO: 402720 - RNA, 19 nt, Homo sapiens
  misc_RNA (1)...(19): siRNA sense strand
caagaagauuaugcaaguu

SEQ ID NO: 402721 - RNA, 19 nt, Homo sapiens
  misc_RNA (1)...(19): siRNA sense strand
aaacaacauccuagucauu

SEQ ID NO: 402722 - RNA, 19 nt, Homo sapiens
  misc_RNA (1)...(19): siRNA sense strand
ggaauaggaggucuagaca

SEQ ID NO: 402723 - RNA, 19 nt, Homo sapiens
  misc_RNA (1)...(19): siRNA sense strand
cgagaugucccuacagaug

SEQ ID NO: 402724 - RNA, 19 nt, Homo sapiens
  misc_RNA (1)...(19): siRNA sense strand
guacacauuuacacugaag

SEQ ID NO: 402725 - RNA, 19 nt, Homo sapiens
  misc_RNA (1)...(19): siRNA sense strand
aauaggaggucuagacaag

SEQ ID NO: 402726 - RNA, 19 nt, Homo sapiens
  misc_RNA (1)...(19): siRNA sense strand
caaggaaaaucgccaauca

SEQ ID NO: 402727 - RNA, 19 nt, Homo sapiens
  misc_RNA (1)...(19): siRNA sense strand
gauaaggaacgcaccacaa

SEQ ID NO: 402728 - RNA, 19 nt, Homo sapiens
  misc_RNA (1)...(19): siRNA sense strand
uugagagauugcuugauua

SEQ ID NO: 402729 - RNA, 19 nt, Homo sapiens
  misc_RNA (1)...(19): siRNA sense strand
ggaaguggacauggagaaa

SEQ ID NO: 402730 - RNA, 19 nt, Homo sapiens
  misc_RNA (1)...(19): siRNA sense strand
ggagauaggcuugccagau

SEQ ID NO: 402731 - RNA, 19 nt, Homo sapiens
  misc_RNA (1)...(19): siRNA sense strand
uaacagugguuugcacauc

SEQ ID NO: 402732 - RNA, 19 nt, Homo sapiens
  misc_RNA (1)...(19): siRNA sense strand
guuaaaggcauccuguuau

SEQ ID NO: 402733 - RNA, 19 nt, Homo sapiens
  misc_RNA (1)...(19): siRNA sense strand
uaaacaacauccuagucau

SEQ ID NO: 402734 - RNA, 19 nt, Homo sapiens
  misc_RNA (1)...(19): siRNA sense strand
uuacucgaguucuagauga

SEQ ID NO: 402735 - RNA, 19 nt, Homo sapiens
  misc_RNA (1)...(19): siRNA sense strand
caacaaccaggccuacuca

SEQ ID NO: 402736 - RNA, 19 nt, Homo sapiens
  misc_RNA (1)...(19): siRNA sense strand
acaaaucccagcucaguug

SEQ ID NO: 402737 - RNA, 19 nt, Homo sapiens
  misc_RNA (1)...(19): siRNA sense strand
ggccaguacuaaaguggaa

SEQ ID NO: 402738 - RNA, 19 nt, Homo sapiens
  misc_RNA (1)...(19): siRNA sense strand
cuaaacaacauccuaguca

SEQ ID NO: 402739 - RNA, 19 nt, Homo sapiens
  misc_RNA (1)...(19): siRNA sense strand
gcagcuaaacaacauccua

SEQ ID NO: 402740 - RNA, 19 nt, Homo sapiens
  misc_RNA (1)...(19): siRNA sense strand
uguuaaaggcauccuguua

SEQ ID NO: 402741 - RNA, 19 nt, Homo sapiens
  misc_RNA (1)...(19): siRNA sense strand
uaggaggucuagacaagga

SEQ ID NO: 402742 - RNA, 19 nt, Homo sapiens
  misc_RNA (1)...(19): siRNA sense strand
aaacagucaaguugcauuu

SEQ ID NO: 402743 - RNA, 19 nt, Homo sapiens
  misc_RNA (1)...(19): siRNA sense strand
gcaagauguccuacagaug

SEQ ID NO: 402744 - RNA, 19 nt, Homo sapiens
  misc_RNA (1)...(19): siRNA sense strand
uugggcaacuuaaaggaua

SEQ ID NO: 402745 - RNA, 19 nt, Homo sapiens
  misc_RNA (1)...(19): siRNA sense strand
caggagauggaaaugcuua

SEQ ID NO: 402746 - RNA, 19 nt, Homo sapiens
  misc_RNA (1)...(19): siRNA sense strand
agagauugcuugauuacgu

SEQ ID NO: 402747 - RNA, 19 nt, Homo sapiens
  misc_RNA (1)...(19): siRNA sense strand
ggaugacauugagagauug

SEQ ID NO: 402748 - RNA, 19 nt, Homo sapiens
  misc_RNA (1)...(19): siRNA sense strand
ggacaaggcuucauucaua

SEQ ID NO: 402749 - RNA, 19 nt, Homo sapiens
  misc_RNA (1)...(19): siRNA sense strand
ggagagaccuucaauaaga

SEQ ID NO: 402750 - RNA, 19 nt, Homo sapiens
  misc_RNA (1)...(19): siRNA sense strand
gcgaagaccucaacacaaa

SEQ ID NO: 402751 - RNA, 19 nt, Homo sapiens
  misc_RNA (1)...(19): siRNA sense strand
gaaagaggcgcuaucauuu

SEQ ID NO: 402752 - RNA, 19 nt, Homo sapiens
  misc_RNA (1)...(19): siRNA sense strand
caaaggagcuauaccauuc

SEQ ID NO: 402753 - RNA, 19 nt, Homo sapiens
  misc_RNA (1)...(19): siRNA sense strand
gagaagcucugugacuuua

SEQ ID NO: 402754 - RNA, 19 nt, Homo sapiens
  misc_RNA (1)...(19): siRNA sense strand
gguaaguccuuuauucaua

SEQ ID NO: 402755 - RNA, 19 nt, Homo sapiens
  misc_RNA (1)...(19): siRNA sense strand
gaaaaggcguucaccauua

SEQ ID NO: 402756 - RNA, 19 nt, Homo sapiens
  misc_RNA (1)...(19): siRNA sense strand
ucucagaccuuaaugauaa

SEQ ID NO: 402757 - RNA, 19 nt, Homo sapiens
  misc_RNA (1)...(19): siRNA sense strand
ggaagaagcccuuugaaug

SEQ ID NO: 402758 - RNA, 19 nt, Homo sapiens
  misc_RNA (1)...(19): siRNA sense strand
gagagcagcuguaugaaug

SEQ ID NO: 402759 - RNA, 19 nt, Homo sapiens
  misc_RNA (1)...(19): siRNA sense strand
ucacucugcuggagaauua

SEQ ID NO: 402760 - RNA, 19 nt, Homo sapiens
  misc_RNA (1)...(19): siRNA sense strand
gcacuugucugccaccaaa

SEQ ID NO: 402761 - RNA, 19 nt, Homo sapiens
  misc_RNA (1)...(19): siRNA sense strand
gaaaugaauugguggaauc

SEQ ID NO: 402762 - RNA, 19 nt, Homo sapiens
  misc_RNA (1)...(19): siRNA sense strand
gaacaaauguaaggacuuc

SEQ ID NO: 402763 - RNA, 19 nt, Homo sapiens
  misc_RNA (1)...(19): siRNA sense strand
gaagaagcccuuugaaugu

SEQ ID NO: 402764 - RNA, 19 nt, Homo sapiens
  misc_RNA (1)...(19): siRNA sense strand
gcucaaauguccgugaaua

SEQ ID NO: 402765 - RNA, 19 nt, Homo sapiens
  misc_RNA (1)...(19): siRNA sense strand
gagguuaucuuguggaaug

SEQ ID NO: 402766 - RNA, 19 nt, Homo sapiens
  misc_RNA (1)...(19): siRNA sense strand
gcacaguccucacuaaaca

SEQ ID NO: 402767 - RNA, 19 nt, Homo sapiens
  misc_RNA (1)...(19): siRNA sense strand
uaagaaggauggcgaauuc

SEQ ID NO: 402768 - RNA, 19 nt, Homo sapiens
  misc_RNA (1)...(19): siRNA sense strand
guaagaaucgcaacuauga

SEQ ID NO: 402769 - RNA, 19 nt, Homo sapiens
  misc_RNA (1)...(19): siRNA sense strand
acucacaccucauuucuua

SEQ ID NO: 402770 - RNA, 19 nt, Homo sapiens
  misc_RNA (1)...(19): siRNA sense strand
cagcagaacuugcagauca

SEQ ID NO: 402771 - RNA, 19 nt, Homo sapiens
  misc_RNA (1)...(19): siRNA sense strand
ccagaaggcucgugcuaaa

SEQ ID NO: 402772 - RNA, 19 nt, Homo sapiens
  misc_RNA (1)...(19): siRNA sense strand
ggaugacccugaugacaaa

SEQ ID NO: 402773 - RNA, 19 nt, Homo sapiens
  misc_RNA (1)...(19): siRNA sense strand
gcacagaaaccuucacuuc

SEQ ID NO: 402774 - RNA, 19 nt, Homo sapiens
  misc_RNA (1)...(19): siRNA sense strand
ggaagacccugaucaaacu

SEQ ID NO: 402775 - RNA, 19 nt, Homo sapiens
  misc_RNA (1)...(19): siRNA sense strand
agagggaucuggugaguuu

SEQ ID NO: 402776 - RNA, 19 nt, Homo sapiens
  misc_RNA (1)...(19): siRNA sense strand
ucagaagagucauacuaua

SEQ ID NO: 402777 - RNA, 19 nt, Homo sapiens
  misc_RNA (1)...(19): siRNA sense strand
agaaugagcccuaugagua

SEQ ID NO: 402778 - RNA, 19 nt, Homo sapiens
  misc_RNA (1)...(19): siRNA sense strand
auucauagcucauuccuuu

SEQ ID NO: 402779 - RNA, 19 nt, Homo sapiens
  misc_RNA (1)...(19): siRNA sense strand
guaagaaucaggaauguga

SEQ ID NO: 402780 - RNA, 19 nt, Homo sapiens
  misc_RNA (1)...(19): siRNA sense strand
agaaauacauugagcauag

SEQ ID NO: 402781 - RNA, 19 nt, Homo sapiens
  misc_RNA (1)...(19): siRNA sense strand
gaaggaagggaauacagua

SEQ ID NO: 402782 - RNA, 19 nt, Homo sapiens
  misc_RNA (1)...(19): siRNA sense strand
guggagagaccuucaauaa

SEQ ID NO: 402783 - RNA, 19 nt, Homo sapiens
  misc_RNA (1)...(19): siRNA sense strand
gugggcagcucuucaauga

SEQ ID NO: 402784 - RNA, 19 nt, Homo sapiens
  misc_RNA (1)...(19): siRNA sense strand
ucacguaacuguucauaag

SEQ ID NO: 402785 - RNA, 19 nt, Homo sapiens
  misc_RNA (1)...(19): siRNA sense strand
gcucaucccugaaagaaca

SEQ ID NO: 402786 - RNA, 19 nt, Homo sapiens
  misc_RNA (1)...(19): siRNA sense strand
ggaagaagaagaagaagau

SEQ ID NO: 402787 - RNA, 19 nt, Homo sapiens
  misc_RNA (1)...(19): siRNA sense strand
gaagagucauacuauaaca

SEQ ID NO: 402788 - RNA, 19 nt, Homo sapiens
  misc_RNA (1)...(19): siRNA sense strand
cagaagagucauacuauaa

SEQ ID NO: 402789 - RNA, 19 nt, Homo sapiens
  misc_RNA (1)...(19): siRNA sense strand
gcaaugagaccucuguaau

SEQ ID NO: 402790 - RNA, 19 nt, Homo sapiens
  misc_RNA (1)...(19): siRNA sense strand
cgaaaccucugccucgauu

SEQ ID NO: 402791 - RNA, 19 nt, Homo sapiens
  misc_RNA (1)...(19): siRNA sense strand
uguaugagcuagacaguga

SEQ ID NO: 402792 - RNA, 19 nt, Homo sapiens
  misc_RNA (1)...(19): siRNA sense strand
gaacaucggaagauucaug

SEQ ID NO: 402793 - RNA, 19 nt, Homo sapiens
  misc_RNA (1)...(19): siRNA sense strand
agaagaaggugaagaucaa

SEQ ID NO: 402794 - RNA, 19 nt, Homo sapiens
  misc_RNA (1)...(19): siRNA sense strand
gagggaugcucuaugaaug

SEQ ID NO: 402795 - RNA, 19 nt, Homo sapiens
  misc_RNA (1)...(19): siRNA sense strand
gagcauaggagcaaugaga

SEQ ID NO: 402796 - RNA, 19 nt, Homo sapiens
  misc_RNA (1)...(19): siRNA sense strand
ggaaaugaauugguggaau

SEQ ID NO: 402797 - RNA, 19 nt, Homo sapiens
  misc_RNA (1)...(19): siRNA sense strand
ugagaaaucugucauucau

SEQ ID NO: 402798 - RNA, 19 nt, Homo sapiens
  misc_RNA (1)...(19): siRNA sense strand
aaacaaggguaaagugugu

SEQ ID NO: 402799 - RNA, 19 nt, Homo sapiens
  misc_RNA (1)...(19): siRNA sense strand
ccuaaucuauguggaauuu

SEQ ID NO: 402800 - RNA, 19 nt, Homo sapiens
  misc_RNA (1)...(19): siRNA sense strand
agaaagaggcgcuaucauu

SEQ ID NO: 402801 - RNA, 19 nt, Homo sapiens
  misc_RNA (1)...(19): siRNA sense strand
caggaaaccucacaacaca

SEQ ID NO: 402802 - RNA, 19 nt, Homo sapiens
  misc_RNA (1)...(19): siRNA sense strand
auucauagcucugcccuua

SEQ ID NO: 402803 - RNA, 19 nt, Homo sapiens
  misc_RNA (1)...(19): siRNA sense strand
gcgaguaucagagagauua

SEQ ID NO: 402804 - RNA, 19 nt, Homo sapiens
  misc_RNA (1)...(19): siRNA sense strand
guaaggacuucagacaauu

SEQ ID NO: 402805 - RNA, 19 nt, Homo sapiens
  misc_RNA (1)...(19): siRNA sense strand
gagaauccuccauuuauau

SEQ ID NO: 402806 - RNA, 19 nt, Homo sapiens
  misc_RNA (1)...(19): siRNA sense strand
gcccagcccuuaaugaguu

SEQ ID NO: 402807 - RNA, 19 nt, Homo sapiens
  misc_RNA (1)...(19): siRNA sense strand
gaaaauauauggcaaagac

SEQ ID NO: 402808 - RNA, 19 nt, Homo sapiens
  misc_RNA (1)...(19): siRNA sense strand
gaaccuaaucuauguggaa

SEQ ID NO: 402809 - RNA, 19 nt, Homo sapiens
  misc_RNA (1)...(19): siRNA sense strand
agaaaucugucauucauag

SEQ ID NO: 402810 - RNA, 19 nt, Homo sapiens
  misc_RNA (1)...(19): siRNA sense strand
guaaguccuuuauucauag

SEQ ID NO: 402811 - RNA, 19 nt, Homo sapiens
  misc_RNA (1)...(19): siRNA sense strand
gaguacggguccuccuaua

SEQ ID NO: 402812 - RNA, 19 nt, Homo sapiens
  misc_RNA (1)...(19): siRNA sense strand
gauggccacucccacauga

SEQ ID NO: 402813 - RNA, 19 nt, Homo sapiens
  misc_RNA (1)...(19): siRNA sense strand
caaugagaccucuguaauu

SEQ ID NO: 402814 - RNA, 19 nt, Homo sapiens
  misc_RNA (1)...(19): siRNA sense strand
gggaacaccucugaaggaa

SEQ ID NO: 402815 - RNA, 19 nt, Homo sapiens
  misc_RNA (1)...(19): siRNA sense strand
uaugagaggucuguuauuc

SEQ ID NO: 402816 - RNA, 19 nt, Homo sapiens
  misc_RNA (1)...(19): siRNA sense strand
ggagaagcucugugacuuu

SEQ ID NO: 402817 - RNA, 19 nt, Homo sapiens
  misc_RNA (1)...(19): siRNA sense strand
gaaaauguaugguaaagag

SEQ ID NO: 402818 - RNA, 19 nt, Homo sapiens
  misc_RNA (1)...(19): siRNA sense strand
gaagcucugugacuuuaca

SEQ ID NO: 402819 - RNA, 19 nt, Homo sapiens
  misc_RNA (1)...(19): siRNA sense strand
gcagaucacguaacuguuc

SEQ ID NO: 402820 - RNA, 19 nt, Homo sapiens
  misc_RNA (1)...(19): siRNA sense strand
gagaauccaugaacaagac

SEQ ID NO: 402821 - RNA, 19 nt, Homo sapiens
  misc_RNA (1)...(19): siRNA sense strand
guaugaauguccaaagugu

SEQ ID NO: 402822 - RNA, 19 nt, Homo sapiens
  misc_RNA (1)...(19): siRNA sense strand
ggaagacccucagaaggau

SEQ ID NO: 402823 - RNA, 19 nt, Homo sapiens
  misc_RNA (1)...(19): siRNA sense strand
caagaagucacaauggaaa

SEQ ID NO: 402824 - RNA, 19 nt, Homo sapiens
  misc_RNA (1)...(19): siRNA sense strand
ggagauguaccaaccagaa

SEQ ID NO: 402825 - RNA, 19 nt, Homo sapiens
  misc_RNA (1)...(19): siRNA sense strand
gguagaagaaccauacuau

SEQ ID NO: 402826 - RNA, 19 nt, Homo sapiens
  misc_RNA (1)...(19): siRNA sense strand
gaacuugcagaucacguaa

SEQ ID NO: 402827 - RNA, 19 nt, Homo sapiens
  misc_RNA (1)...(19): siRNA sense strand
gaaaaucuaugaccaagag

SEQ ID NO: 402828 - RNA, 19 nt, Homo sapiens
  misc_RNA (1)...(19): siRNA sense strand
gcaguaagaaucgcaacua

SEQ ID NO: 402829 - RNA, 19 nt, Homo sapiens
  misc_RNA (1)...(19): siRNA sense strand
gagcuucgaugcuaucaac

SEQ ID NO: 402830 - RNA, 19 nt, Homo sapiens
  misc_RNA (1)...(19): siRNA sense strand
gaaagaacaucagaaaauc

SEQ ID NO: 402831 - RNA, 19 nt, Homo sapiens
  misc_RNA (1)...(19): siRNA sense strand
ggaaacguuuugaauguaa

SEQ ID NO: 402832 - RNA, 19 nt, Homo sapiens
  misc_RNA (1)...(19): siRNA sense strand
aaacaagcuuugaaaugga

SEQ ID NO: 402833 - RNA, 19 nt, Homo sapiens
  misc_RNA (1)...(19): siRNA sense strand
gaaaacaagcuuugaaaug

SEQ ID NO: 402834 - RNA, 19 nt, Homo sapiens
  misc_RNA (1)...(19): siRNA sense strand
gacagugacuugacuaagg

SEQ ID NO: 402835 - RNA, 19 nt, Homo sapiens
  misc_RNA (1)...(19): siRNA sense strand
uguaaggacuucagacaau

SEQ ID NO: 402836 - RNA, 19 nt, Homo sapiens
  misc_RNA (1)...(19): siRNA sense strand
gagaagcccucuggaagca

SEQ ID NO: 402837 - RNA, 19 nt, Homo sapiens
  misc_RNA (1)...(19): siRNA sense strand
aaugagaccucuguaauuc

SEQ ID NO: 402838 - RNA, 19 nt, Homo sapiens
  misc_RNA (1)...(19): siRNA sense strand
ccagagagaacccuuguga

SEQ ID NO: 402839 - RNA, 19 nt, Homo sapiens
  misc_RNA (1)...(19): siRNA sense strand
gauaagcgacagaagauuc

SEQ ID NO: 402840 - RNA, 19 nt, Homo sapiens
  misc_RNA (1)...(19): siRNA sense strand
guaggucuguuauccauag

SEQ ID NO: 402841 - RNA, 19 nt, Homo sapiens
  misc_RNA (1)...(19): siRNA sense strand
gaaaccuuccuucauaguu

SEQ ID NO: 402842 - RNA, 19 nt, Homo sapiens
  misc_RNA (1)...(19): siRNA sense strand
gagcuauaccauucuauga

SEQ ID NO: 402843 - RNA, 19 nt, Homo sapiens
  misc_RNA (1)...(19): siRNA sense strand
ggaagggaauacaguaggu

SEQ ID NO: 402844 - RNA, 19 nt, Homo sapiens
  misc_RNA (1)...(19): siRNA sense strand
uagcuuagccucuguggaa

SEQ ID NO: 402845 - RNA, 19 nt, Homo sapiens
  misc_RNA (1)...(19): siRNA sense strand
accagaagauucccacuaa

SEQ ID NO: 402846 - RNA, 19 nt, Homo sapiens
  misc_RNA (1)...(19): siRNA sense strand
gaaggcagaggguaugaga

SEQ ID NO: 402847 - RNA, 19 nt, Homo sapiens
  misc_RNA (1)...(19): siRNA sense strand
gguaaagugugugaggaaa

SEQ ID NO: 402848 - RNA, 19 nt, Homo sapiens
  misc_RNA (1)...(19): siRNA sense strand
ggagugaaguuuaauguug

SEQ ID NO: 402849 - RNA, 19 nt, Homo sapiens
  misc_RNA (1)...(19): siRNA sense strand
gcaaaacgauugaggaaua

SEQ ID NO: 402850 - RNA, 19 nt, Homo sapiens
  misc_RNA (1)...(19): siRNA sense strand
caaugaaggucccuguaua

SEQ ID NO: 402851 - RNA, 19 nt, Homo sapiens
  misc_RNA (1)...(19): siRNA sense strand
gggauuggacgacugauua

SEQ ID NO: 402852 - RNA, 19 nt, Homo sapiens
  misc_RNA (1)...(19): siRNA sense strand
gaaaggaggagaauaugga

SEQ ID NO: 402853 - RNA, 19 nt, Homo sapiens
  misc_RNA (1)...(19): siRNA sense strand
ccacuacuauugcagguuu

SEQ ID NO: 402854 - RNA, 19 nt, Homo sapiens
  misc_RNA (1)...(19): siRNA sense strand
gaaggucccuguauaugag

SEQ ID NO: 402855 - RNA, 19 nt, Homo sapiens
  misc_RNA (1)...(19): siRNA sense strand
ggacagaguggccaaauca

SEQ ID NO: 402856 - RNA, 19 nt, Homo sapiens
  misc_RNA (1)...(19): siRNA sense strand
caaggcagcugguggaauc

SEQ ID NO: 402857 - RNA, 19 nt, Homo sapiens
  misc_RNA (1)...(19): siRNA sense strand
gacaagaauuugaccuaga

SEQ ID NO: 402858 - RNA, 19 nt, Homo sapiens
  misc_RNA (1)...(19): siRNA sense strand
acaagaauuugaccuagaa

SEQ ID NO: 402859 - RNA, 19 nt, Homo sapiens
  misc_RNA (1)...(19): siRNA sense strand
ucucuugcauuccauauuu

SEQ ID NO: 402860 - RNA, 19 nt, Homo sapiens
  misc_RNA (1)...(19): siRNA sense strand
aaacagggccuaaggauca

SEQ ID NO: 402861 - RNA, 19 nt, Homo sapiens
  misc_RNA (1)...(19): siRNA sense strand
gaaguuuaauguugccaau

SEQ ID NO: 402862 - RNA, 19 nt, Homo sapiens
  misc_RNA (1)...(19): siRNA sense strand
caacugaagauucgcauug

SEQ ID NO: 402863 - RNA, 19 nt, Homo sapiens
  misc_RNA (1)...(19): siRNA sense strand
acagacaaauccuucauug

SEQ ID NO: 402864 - RNA, 19 nt, Homo sapiens
  misc_RNA (1)...(19): siRNA sense strand
gaaaaguucugugugauga

SEQ ID NO: 402865 - RNA, 19 nt, Homo sapiens
  misc_RNA (1)...(19): siRNA sense strand
uaugggaccuuaugugaga

SEQ ID NO: 402866 - RNA, 19 nt, Homo sapiens
  misc_RNA (1)...(19): siRNA sense strand
gacaaaaucuaccaaauca

SEQ ID NO: 402867 - RNA, 19 nt, Homo sapiens
  misc_RNA (1)...(19): siRNA sense strand
ggaggaaauuguccgagau

SEQ ID NO: 402868 - RNA, 19 nt, Homo sapiens
  misc_RNA (1)...(19): siRNA sense strand
ccugcggucuccugcauua

SEQ ID NO: 402869 - RNA, 19 nt, Homo sapiens
  misc_RNA (1)...(19): siRNA sense strand
gccaaccucucuugcauuc

SEQ ID NO: 402870 - RNA, 19 nt, Homo sapiens
  misc_RNA (1)...(19): siRNA sense strand
gaguuuggagugaaguuua

SEQ ID NO: 402871 - RNA, 19 nt, Homo sapiens
  misc_RNA (1)...(19): siRNA sense strand
ggaggagaauauggauuug

SEQ ID NO: 402872 - RNA, 19 nt, Homo sapiens
  misc_RNA (1)...(19): siRNA sense strand
ggacccagccaacugaaga

SEQ ID NO: 402873 - RNA, 19 nt, Homo sapiens
  misc_RNA (1)...(19): siRNA sense strand
gcacugugaccaagaaaca

SEQ ID NO: 402874 - RNA, 19 nt, Homo sapiens
  misc_RNA (1)...(19): siRNA sense strand
caaauucaaaccauucaga

SEQ ID NO: 402875 - RNA, 19 nt, Homo sapiens
  misc_RNA (1)...(19): siRNA sense strand
cgagaucacugggccaaau

SEQ ID NO: 402876 - RNA, 19 nt, Homo sapiens
  misc_RNA (1)...(19): siRNA sense strand
ugaaggucccuguauauga

SEQ ID NO: 402877 - RNA, 19 nt, Homo sapiens
  misc_RNA (1)...(19): siRNA sense strand
ggaguuaugggaccuuaug

SEQ ID NO: 402878 - RNA, 19 nt, Homo sapiens
  misc_RNA (1)...(19): siRNA sense strand
gaagcagaguguggaggaa

SEQ ID NO: 402879 - RNA, 19 nt, Homo sapiens
  misc_RNA (1)...(19): siRNA sense strand
gcauggcccuggacagagu

SEQ ID NO: 402880 - RNA, 19 nt, Homo sapiens
  misc_RNA (1)...(19): siRNA sense strand
uggcgaagacggauaguuu

SEQ ID NO: 402881 - RNA, 19 nt, Homo sapiens
  misc_RNA (1)...(19): siRNA sense strand
gaagacggauaguuuugaa

SEQ ID NO: 402882 - RNA, 19 nt, Homo sapiens
  misc_RNA (1)...(19): siRNA sense strand
gauugaggaauaugcuaua

SEQ ID NO: 402883 - RNA, 19 nt, Homo sapiens
  misc_RNA (1)...(19): siRNA sense strand
ggacagaauggcaucuugu

SEQ ID NO: 402884 - RNA, 19 nt, Homo sapiens
  misc_RNA (1)...(19): siRNA sense strand
caaccucucuugcauucca

SEQ ID NO: 402885 - RNA, 19 nt, Homo sapiens
  misc_RNA (1)...(19): siRNA sense strand
guuaugggaccuuauguga

SEQ ID NO: 402886 - RNA, 19 nt, Homo sapiens
  misc_RNA (1)...(19): siRNA sense strand
gacccaaaccugacauaug

SEQ ID NO: 402887 - RNA, 19 nt, Homo sapiens
  misc_RNA (1)...(19): siRNA sense strand
aaugaaaggaggagaauau

SEQ ID NO: 402888 - RNA, 19 nt, Homo sapiens
  misc_RNA (1)...(19): siRNA sense strand
ggaccaucuuugacuuuca

SEQ ID NO: 402889 - RNA, 19 nt, Homo sapiens
  misc_RNA (1)...(19): siRNA sense strand
aaauaucccagauucauga

SEQ ID NO: 402890 - RNA, 19 nt, Homo sapiens
  misc_RNA (1)...(19): siRNA sense strand
gaaauuguccgagaucacu

SEQ ID NO: 402891 - RNA, 19 nt, Homo sapiens
  misc_RNA (1)...(19): siRNA sense strand
cccaagacgacauauuaua

SEQ ID NO: 402892 - RNA, 19 nt, Homo sapiens
  misc_RNA (1)...(19): siRNA sense strand
gcaaugaaaggaggagaau

SEQ ID NO: 402893 - RNA, 19 nt, Homo sapiens
  misc_RNA (1)...(19): siRNA sense strand
ggacucaggacguugcaau

SEQ ID NO: 402894 - RNA, 19 nt, Homo sapiens
  misc_RNA (1)...(19): siRNA sense strand
ggacggccaucgagaucgu

SEQ ID NO: 402895 - RNA, 19 nt, Homo sapiens
  misc_RNA (1)...(19): siRNA sense strand
gucuggcucuccauuauug

SEQ ID NO: 402896 - RNA, 19 nt, Homo sapiens
  misc_RNA (1)...(19): siRNA sense strand
ucaggacguugcaaucugu

SEQ ID NO: 402897 - RNA, 19 nt, Homo sapiens
  misc_RNA (1)...(19): siRNA sense strand
ucaaugaaggucccuguau

SEQ ID NO: 402898 - RNA, 19 nt, Homo sapiens
  misc_RNA (1)...(19): siRNA sense strand
gcagcacccugacccaaac

SEQ ID NO: 402899 - RNA, 19 nt, Homo sapiens
  misc_RNA (1)...(19): siRNA sense strand
ccagccaauucugcaauaa

SEQ ID NO: 402900 - RNA, 19 nt, Homo sapiens
  misc_RNA (1)...(19): siRNA sense strand
gaccaucuuugacuuucau

SEQ ID NO: 402901 - RNA, 19 nt, Homo sapiens
  misc_RNA (1)...(19): siRNA sense strand
gauaguggacccaguggau

SEQ ID NO: 402902 - RNA, 19 nt, Homo sapiens
  misc_RNA (1)...(19): siRNA sense strand
ggacccaguggauaucuau

SEQ ID NO: 402903 - RNA, 19 nt, Homo sapiens
  misc_RNA (1)...(19): siRNA sense strand
gagaucacugggccaaauu

SEQ ID NO: 402904 - RNA, 19 nt, Homo sapiens
  misc_RNA (1)...(19): siRNA sense strand
cagaguggccaaaucaaug

SEQ ID NO: 402905 - RNA, 19 nt, Homo sapiens
  misc_RNA (1)...(19): siRNA sense strand
cgacuaggaagacaagaau

SEQ ID NO: 402906 - RNA, 19 nt, Homo sapiens
  misc_RNA (1)...(19): siRNA sense strand
gaaaauaucccagauucau

SEQ ID NO: 402907 - RNA, 19 nt, Homo sapiens
  misc_RNA (1)...(19): siRNA sense strand
gcggucuccugcauuauca

SEQ ID NO: 402908 - RNA, 19 nt, Homo sapiens
  misc_RNA (1)...(19): siRNA sense strand
acuaggaagacaagaauuu

SEQ ID NO: 402909 - RNA, 19 nt, Homo sapiens
  misc_RNA (1)...(19): siRNA sense strand
gggccacccucagacugua

SEQ ID NO: 402910 - RNA, 19 nt, Homo sapiens
  misc_RNA (1)...(19): siRNA sense strand
gaucacugggccaaauuug

SEQ ID NO: 402911 - RNA, 19 nt, Homo sapiens
  misc_RNA (1)...(19): siRNA sense strand
aggagaauauggauuugga

SEQ ID NO: 402912 - RNA, 19 nt, Homo sapiens
  misc_RNA (1)...(19): siRNA sense strand
aggaggagaauauggauuu

SEQ ID NO: 402913 - RNA, 19 nt, Homo sapiens
  misc_RNA (1)...(19): siRNA sense strand
cccagccaauucugcaaua

SEQ ID NO: 402914 - RNA, 19 nt, Homo sapiens
  misc_RNA (1)...(19): siRNA sense strand
gcaaugcacggaguuaugg

SEQ ID NO: 402915 - RNA, 19 nt, Homo sapiens
  misc_RNA (1)...(19): siRNA sense strand
acccaaaccugacauaugc

SEQ ID NO: 402916 - RNA, 19 nt, Homo sapiens
  misc_RNA (1)...(19): siRNA sense strand
caagaaacagggccuaagg

SEQ ID NO: 402917 - RNA, 19 nt, Homo sapiens
  misc_RNA (1)...(19): siRNA sense strand
uggaggcccuggucacaga

SEQ ID NO: 402918 - RNA, 19 nt, Homo sapiens
  misc_RNA (1)...(19): siRNA sense strand
gcaggacggccaucgagau

SEQ ID NO: 402919 - RNA, 19 nt, Homo sapiens
  misc_RNA (1)...(19): siRNA sense strand
uauaugauccuaggccaaa

SEQ ID NO: 402920 - RNA, 19 nt, Homo sapiens
  misc_RNA (1)...(19): siRNA sense strand
cacccgauguugucucaga

SEQ ID NO: 402921 - RNA, 19 nt, Homo sapiens
  misc_RNA (1)...(19): siRNA sense strand
gauuuggagcugcauuuga

SEQ ID NO: 402922 - RNA, 19 nt, Homo sapiens
  misc_RNA (1)...(19): siRNA sense strand
cagcauggcccuggacaga

SEQ ID NO: 402923 - RNA, 19 nt, Homo sapiens
  misc_RNA (1)...(19): siRNA sense strand
ucauagccaucgcacugaa

SEQ ID NO: 402924 - RNA, 19 nt, Homo sapiens
  misc_RNA (1)...(19): siRNA sense strand
ggcagcugguggaaucauu

SEQ ID NO: 402925 - RNA, 19 nt, Homo sapiens
  misc_RNA (1)...(19): siRNA sense strand
ggauuggacgacugauuau

SEQ ID NO: 402926 - RNA, 19 nt, Homo sapiens
  misc_RNA (1)...(19): siRNA sense strand
ggaccguuauaugauccua

SEQ ID NO: 402927 - RNA, 19 nt, Homo sapiens
  misc_RNA (1)...(19): siRNA sense strand
ugcaacgacucuucuggaa

SEQ ID NO: 402928 - RNA, 19 nt, Homo sapiens
  misc_RNA (1)...(19): siRNA sense strand
gaucccaagacgacauauu

SEQ ID NO: 402929 - RNA, 19 nt, Homo sapiens
  misc_RNA (1)...(19): siRNA sense strand
gacggcagguacuuuagca

SEQ ID NO: 402930 - RNA, 19 nt, Homo sapiens
  misc_RNA (1)...(19): siRNA sense strand
ccagcuggauggagauucu

SEQ ID NO: 402931 - RNA, 19 nt, Homo sapiens
  misc_RNA (1)...(19): siRNA sense strand
gggagaguuuggagugaag

SEQ ID NO: 402932 - RNA, 19 nt, Homo sapiens
  misc_RNA (1)...(19): siRNA sense strand
uaugcuauauguccugauc

SEQ ID NO: 402933 - RNA, 19 nt, Homo sapiens
  misc_RNA (1)...(19): siRNA sense strand
aucccaagacgacauauua

SEQ ID NO: 402934 - RNA, 19 nt, Homo sapiens
  misc_RNA (1)...(19): siRNA sense strand
gcagaguguggaggaaauu

SEQ ID NO: 402935 - RNA, 19 nt, Homo sapiens
  misc_RNA (1)...(19): siRNA sense strand
ggucuggcucuccauuauu

SEQ ID NO: 402936 - RNA, 19 nt, Homo sapiens
  misc_RNA (1)...(19): siRNA sense strand
cagccaauucugcaauaaa

SEQ ID NO: 402937 - RNA, 19 nt, Homo sapiens
  misc_RNA (1)...(19): siRNA sense strand
caucaaggguuugcugacu

SEQ ID NO: 402938 - RNA, 19 nt, Homo sapiens
  misc_RNA (1)...(19): siRNA sense strand
ugacuuucaugccaucaag

SEQ ID NO: 402939 - RNA, 19 nt, Homo sapiens
  misc_RNA (1)...(19): siRNA sense strand
aguuuggagugaaguuuaa

SEQ ID NO: 402940 - RNA, 19 nt, Homo sapiens
  misc_RNA (1)...(19): siRNA sense strand
aaugaaggucccuguauau

SEQ ID NO: 402941 - RNA, 19 nt, Homo sapiens
  misc_RNA (1)...(19): siRNA sense strand
gauggggaccguuauauga

SEQ ID NO: 402942 - RNA, 19 nt, Homo sapiens
  misc_RNA (1)...(19): siRNA sense strand
ugacauaugcaacgacucu

SEQ ID NO: 402943 - RNA, 19 nt, Homo sapiens
  misc_RNA (1)...(19): siRNA sense strand
uaggaagacaagaauuuga

SEQ ID NO: 402944 - RNA, 19 nt, Homo sapiens
  misc_RNA (1)...(19): siRNA sense strand
gaggaaauuguccgagauc

SEQ ID NO: 402945 - RNA, 19 nt, Homo sapiens
  misc_RNA (1)...(19): siRNA sense strand
caaugaaaggaggagaaua

SEQ ID NO: 402946 - RNA, 19 nt, Homo sapiens
  misc_RNA (1)...(19): siRNA sense strand
uggacagaauggcaucuug

SEQ ID NO: 402947 - RNA, 19 nt, Homo sapiens
  misc_RNA (1)...(19): siRNA sense strand
ggauuuggagcugcauuug

SEQ ID NO: 402948 - RNA, 19 nt, Homo sapiens
  misc_RNA (1)...(19): siRNA sense strand
gaaugccucugaaauugaa

SEQ ID NO: 402949 - RNA, 19 nt, Homo sapiens
  misc_RNA (1)...(19): siRNA sense strand
uaagaaugccucugaaauu

SEQ ID NO: 402950 - RNA, 19 nt, Homo sapiens
  misc_RNA (1)...(19): siRNA sense strand
gcugaaaguucuuggcauu

SEQ ID NO: 402951 - RNA, 19 nt, Homo sapiens
  misc_RNA (1)...(19): siRNA sense strand
guucacagcuguagcacaa

SEQ ID NO: 402952 - RNA, 19 nt, Homo sapiens
  misc_RNA (1)...(19): siRNA sense strand
gaucaucgccucccugguu

SEQ ID NO: 402953 - RNA, 19 nt, Homo sapiens
  misc_RNA (1)...(19): siRNA sense strand
gaauaaagacauugugaca

SEQ ID NO: 402954 - RNA, 19 nt, Homo sapiens
  misc_RNA (1)...(19): siRNA sense strand
aagaaugccucugaaauug

SEQ ID NO: 402955 - RNA, 19 nt, Homo sapiens
  misc_RNA (1)...(19): siRNA sense strand
uuacugacauguuugauuc

SEQ ID NO: 402956 - RNA, 19 nt, Homo sapiens
  misc_RNA (1)...(19): siRNA sense strand
uggcauuacugacauguuu

SEQ ID NO: 402957 - RNA, 19 nt, Homo sapiens
  misc_RNA (1)...(19): siRNA sense strand
gaagauggaaccaaagcuu

SEQ ID NO: 402958 - RNA, 19 nt, Homo sapiens
  misc_RNA (1)...(19): siRNA sense strand
ccagggauaugauugacaa

SEQ ID NO: 402959 - RNA, 19 nt, Homo sapiens
  misc_RNA (1)...(19): siRNA sense strand
ugaaggagccgcugaaagu

SEQ ID NO: 402960 - RNA, 19 nt, Homo sapiens
  misc_RNA (1)...(19): siRNA sense strand
gaaaccagggauaugauug

SEQ ID NO: 402961 - RNA, 19 nt, Homo sapiens
  misc_RNA (1)...(19): siRNA sense strand
cagugaagauggaaccaaa

SEQ ID NO: 402962 - RNA, 19 nt, Homo sapiens
  misc_RNA (1)...(19): siRNA sense strand
ccauguuucucauaucuug

SEQ ID NO: 402963 - RNA, 19 nt, Homo sapiens
  misc_RNA (1)...(19): siRNA sense strand
auaaagacauugugacagu

SEQ ID NO: 402964 - RNA, 19 nt, Homo sapiens
  misc_RNA (1)...(19): siRNA sense strand
ugauugcacugccgacuga

SEQ ID NO: 402965 - RNA, 19 nt, Homo sapiens
  misc_RNA (1)...(19): siRNA sense strand
ugaagucagugaagaugga

SEQ ID NO: 402966 - RNA, 19 nt, Homo sapiens
  misc_RNA (1)...(19): siRNA sense strand
ucaagggucuguggaaauc

SEQ ID NO: 402967 - RNA, 19 nt, Homo sapiens
  misc_RNA (1)...(19): siRNA sense strand
ccacacaucagcaccaaga

SEQ ID NO: 402968 - RNA, 19 nt, Homo sapiens
  misc_RNA (1)...(19): siRNA sense strand
ccacuucaauccucugucu

SEQ ID NO: 402969 - RNA, 19 nt, Homo sapiens
  misc_RNA (1)...(19): siRNA sense strand
gaaaguucuuggcauuacu

SEQ ID NO: 402970 - RNA, 19 nt, Homo sapiens
  misc_RNA (1)...(19): siRNA sense strand
gaaggagccgcugaaaguu

SEQ ID NO: 402971 - RNA, 19 nt, Homo sapiens
  misc_RNA (1)...(19): siRNA sense strand
gacgggaaauccuaucaag

SEQ ID NO: 402972 - RNA, 19 nt, Homo sapiens
  misc_RNA (1)...(19): siRNA sense strand
gccaucgucuccaagaaga

SEQ ID NO: 402973 - RNA, 19 nt, Homo sapiens
  misc_RNA (1)...(19): siRNA sense strand
ccaagagggugcaggugau

SEQ ID NO: 402974 - RNA, 19 nt, Homo sapiens
  misc_RNA (1)...(19): siRNA sense strand
ccaaugauuuaugguacaa

SEQ ID NO: 402975 - RNA, 19 nt, Homo sapiens
  misc_RNA (1)...(19): siRNA sense strand
gguccggaaugugaacuuu

SEQ ID NO: 402976 - RNA, 19 nt, Homo sapiens
  misc_RNA (1)...(19): siRNA sense strand
gaagaauaaagacauugug

SEQ ID NO: 402977 - RNA, 19 nt, Homo sapiens
  misc_RNA (1)...(19): siRNA sense strand
cgggaaauccuaucaagug

SEQ ID NO: 402978 - RNA, 19 nt, Homo sapiens
  misc_RNA (1)...(19): siRNA sense strand
ccaagaagaauaaagacau

SEQ ID NO: 402979 - RNA, 19 nt, Homo sapiens
  misc_RNA (1)...(19): siRNA sense strand
aaauugaagucagugaaga

SEQ ID NO: 402980 - RNA, 19 nt, Homo sapiens
  misc_RNA (1)...(19): siRNA sense strand
gaaugugaacuuugaggau

SEQ ID NO: 402981 - RNA, 19 nt, Homo sapiens
  misc_RNA (1)...(19): siRNA sense strand
gcauuacugacauguuuga

SEQ ID NO: 402982 - RNA, 19 nt, Homo sapiens
  misc_RNA (1)...(19): siRNA sense strand
ucaacgcaguguauuucaa

SEQ ID NO: 402983 - RNA, 19 nt, Homo sapiens
  misc_RNA (1)...(19): siRNA sense strand
guuaagaaugccucugaaa

SEQ ID NO: 402984 - RNA, 19 nt, Homo sapiens
  misc_RNA (1)...(19): siRNA sense strand
gcaacaacugcaauucuca

SEQ ID NO: 402985 - RNA, 19 nt, Homo sapiens
  misc_RNA (1)...(19): siRNA sense strand
ugaaaguucuuggcauuac

SEQ ID NO: 402986 - RNA, 19 nt, Homo sapiens
  misc_RNA (1)...(19): siRNA sense strand
ucauugaacugcccuacca

SEQ ID NO: 402987 - RNA, 19 nt, Homo sapiens
  misc_RNA (1)...(19): siRNA sense strand
ugaagucgaggccucauga

SEQ ID NO: 402988 - RNA, 19 nt, Homo sapiens
  misc_RNA (1)...(19): siRNA sense strand
aaaccagggauaugauuga

SEQ ID NO: 402989 - RNA, 19 nt, Homo sapiens
  misc_RNA (1)...(19): siRNA sense strand
acaaggccaucgucuccaa

SEQ ID NO: 402990 - RNA, 19 nt, Homo sapiens
  misc_RNA (1)...(19): siRNA sense strand
caucugcucccacuucaau

SEQ ID NO: 402991 - RNA, 19 nt, Homo sapiens
  misc_RNA (1)...(19): siRNA sense strand
gaaauugaagugccuuuug

SEQ ID NO: 402992 - RNA, 19 nt, Homo sapiens
  misc_RNA (1)...(19): siRNA sense strand
uuaagaaugccucugaaau

SEQ ID NO: 402993 - RNA, 19 nt, Homo sapiens
  misc_RNA (1)...(19): siRNA sense strand
uuacaaggaacaaagaugu

SEQ ID NO: 402994 - RNA, 19 nt, Homo sapiens
  misc_RNA (1)...(19): siRNA sense strand
caucagcaccaagaccaua

SEQ ID NO: 402995 - RNA, 19 nt, Homo sapiens
  misc_RNA (1)...(19): siRNA sense strand
uccggaaugugaacuuuga

SEQ ID NO: 402996 - RNA, 19 nt, Homo sapiens
  misc_RNA (1)...(19): siRNA sense strand
aagauguguuccaguguga

SEQ ID NO: 402997 - RNA, 19 nt, Homo sapiens
  misc_RNA (1)...(19): siRNA sense strand
ucgccucccugguuuauag

SEQ ID NO: 402998 - RNA, 19 nt, Homo sapiens
  misc_RNA (1)...(19): siRNA sense strand
caucaaugcauggguuaaa

SEQ ID NO: 402999 - RNA, 19 nt, Homo sapiens
  misc_RNA (1)...(19): siRNA sense strand
gauuuaugguacaacuuca

SEQ ID NO: 403000 - RNA, 19 nt, Homo sapiens
  misc_RNA (1)...(19): siRNA sense strand
caaguucacagcuguagca

SEQ ID NO: 403001 - RNA, 19 nt, Homo sapiens
  misc_RNA (1)...(19): siRNA sense strand
gccaucaucccacacauca

SEQ ID NO: 403002 - RNA, 19 nt, Homo sapiens
  misc_RNA (1)...(19): siRNA sense strand
caacgcaguguauuucaag

SEQ ID NO: 403003 - RNA, 19 nt, Homo sapiens
  misc_RNA (1)...(19): siRNA sense strand
ggauccagguuuucaauca

SEQ ID NO: 403004 - RNA, 19 nt, Homo sapiens
  misc_RNA (1)...(19): siRNA sense strand
ucacagcuguagcacaaac

SEQ ID NO: 403005 - RNA, 19 nt, Homo sapiens
  misc_RNA (1)...(19): siRNA sense strand
uaugguacaacuucauuga

SEQ ID NO: 403006 - RNA, 19 nt, Homo sapiens
  misc_RNA (1)...(19): siRNA sense strand
guucuuggcauuacugaca

SEQ ID NO: 403007 - RNA, 19 nt, Homo sapiens
  misc_RNA (1)...(19): siRNA sense strand
ucuccaagaagaauaaaga

SEQ ID NO: 403008 - RNA, 19 nt, Homo sapiens
  misc_RNA (1)...(19): siRNA sense strand
cggcguaaauggaguuggu

SEQ ID NO: 403009 - RNA, 19 nt, Homo sapiens
  misc_RNA (1)...(19): siRNA sense strand
guaaauggaguugguaaaa

SEQ ID NO: 403010 - RNA, 19 nt, Homo sapiens
  misc_RNA (1)...(19): siRNA sense strand
ugugagguccggaauguga

SEQ ID NO: 403011 - RNA, 19 nt, Homo sapiens
  misc_RNA (1)...(19): siRNA sense strand
agaaugccucugaaauuga

SEQ ID NO: 403012 - RNA, 19 nt, Homo sapiens
  misc_RNA (1)...(19): siRNA sense strand
ugaagugccuuuuguuaca

SEQ ID NO: 403013 - RNA, 19 nt, Homo sapiens
  misc_RNA (1)...(19): siRNA sense strand
gcguaaauggaguugguaa

SEQ ID NO: 403014 - RNA, 19 nt, Homo sapiens
  misc_RNA (1)...(19): siRNA sense strand
gagcuccacuccgcugucu

SEQ ID NO: 403015 - RNA, 19 nt, Homo sapiens
  misc_RNA (1)...(19): siRNA sense strand
caaagauguguuccagugu

SEQ ID NO: 403016 - RNA, 19 nt, Homo sapiens
  misc_RNA (1)...(19): siRNA sense strand
caacaacugcaauucucau

SEQ ID NO: 403017 - RNA, 19 nt, Homo sapiens
  misc_RNA (1)...(19): siRNA sense strand
cagcaacaacugcaauucu

SEQ ID NO: 403018 - RNA, 19 nt, Homo sapiens
  misc_RNA (1)...(19): siRNA sense strand
uggcccagcucuccguguu

SEQ ID NO: 403019 - RNA, 19 nt, Homo sapiens
  misc_RNA (1)...(19): siRNA sense strand
acacggggauccagguuuu

SEQ ID NO: 403020 - RNA, 19 nt, Homo sapiens
  misc_RNA (1)...(19): siRNA sense strand
gcaucauggugcccaagag

SEQ ID NO: 403021 - RNA, 19 nt, Homo sapiens
  misc_RNA (1)...(19): siRNA sense strand
cauccgacauaauccuaca

SEQ ID NO: 403022 - RNA, 19 nt, Homo sapiens
  misc_RNA (1)...(19): siRNA sense strand
gaagucagugaagauggaa

SEQ ID NO: 403023 - RNA, 19 nt, Homo sapiens
  misc_RNA (1)...(19): siRNA sense strand
cgucaacgcaguguauuuc

SEQ ID NO: 403024 - RNA, 19 nt, Homo sapiens
  misc_RNA (1)...(19): siRNA sense strand
caggugcuguguuauucau

SEQ ID NO: 403025 - RNA, 19 nt, Homo sapiens
  misc_RNA (1)...(19): siRNA sense strand
cugaaaguucuuggcauua

SEQ ID NO: 403026 - RNA, 19 nt, Homo sapiens
  misc_RNA (1)...(19): siRNA sense strand
gaggaacuaggcuccaaca

SEQ ID NO: 403027 - RNA, 19 nt, Homo sapiens
  misc_RNA (1)...(19): siRNA sense strand
ugauuuaugguacaacuuc

SEQ ID NO: 403028 - RNA, 19 nt, Homo sapiens
  misc_RNA (1)...(19): siRNA sense strand
agugugagguccggaaugu

SEQ ID NO: 403029 - RNA, 19 nt, Homo sapiens
  misc_RNA (1)...(19): siRNA sense strand
uguuaagaaugccucugaa

SEQ ID NO: 403030 - RNA, 19 nt, Homo sapiens
  misc_RNA (1)...(19): siRNA sense strand
uaacaacagggucagaaaa

SEQ ID NO: 403031 - RNA, 19 nt, Homo sapiens
  misc_RNA (1)...(19): siRNA sense strand
cguaaauggaguugguaaa

SEQ ID NO: 403032 - RNA, 19 nt, Homo sapiens
  misc_RNA (1)...(19): siRNA sense strand
cgacgggaaauccuaucaa

SEQ ID NO: 403033 - RNA, 19 nt, Homo sapiens
  misc_RNA (1)...(19): siRNA sense strand
gucgaggccucaugacaac

SEQ ID NO: 403034 - RNA, 19 nt, Homo sapiens
  misc_RNA (1)...(19): siRNA sense strand
cggugugggucgacaagug

SEQ ID NO: 403035 - RNA, 19 nt, Homo sapiens
  misc_RNA (1)...(19): siRNA sense strand
ggauuuaaaugaagauguc

SEQ ID NO: 403036 - RNA, 19 nt, Homo sapiens
  misc_RNA (1)...(19): siRNA sense strand
gcucagcucaggauuuaaa

SEQ ID NO: 403037 - RNA, 19 nt, Homo sapiens
  misc_RNA (1)...(19): siRNA sense strand
gcucaggauuuaaaugaag

SEQ ID NO: 403038 - RNA, 19 nt, Homo sapiens
  misc_RNA (1)...(19): siRNA sense strand
cagcucaggauuuaaauga

SEQ ID NO: 403039 - RNA, 19 nt, Homo sapiens
  misc_RNA (1)...(19): siRNA sense strand
gaggagacucugagcaguu

SEQ ID NO: 403040 - RNA, 19 nt, Homo sapiens
  misc_RNA (1)...(19): siRNA sense strand
ucugagcaguucauagaug

SEQ ID NO: 403041 - RNA, 19 nt, Homo sapiens
  misc_RNA (1)...(19): siRNA sense strand
acucugagcaguucauaga

SEQ ID NO: 403042 - RNA, 19 nt, Homo sapiens
  misc_RNA (1)...(19): siRNA sense strand
ucaaggaaggccacaagga

SEQ ID NO: 403043 - RNA, 19 nt, Homo sapiens
  misc_RNA (1)...(19): siRNA sense strand
gugaugggaaccaggauga

SEQ ID NO: 403044 - RNA, 19 nt, Homo sapiens
  misc_RNA (1)...(19): siRNA sense strand
gaugggaaccaggaugaug

SEQ ID NO: 403045 - RNA, 19 nt, Homo sapiens
  misc_RNA (1)...(19): siRNA sense strand
ggggcagucuccucaguaa

SEQ ID NO: 403046 - RNA, 19 nt, Homo sapiens
  misc_RNA (1)...(19): siRNA sense strand
acagggaggccaucagcaa

SEQ ID NO: 403047 - RNA, 19 nt, Homo sapiens
  misc_RNA (1)...(19): siRNA sense strand
ucagggaaagccacaagga

SEQ ID NO: 403048 - RNA, 19 nt, Homo sapiens
  misc_RNA (1)...(19): siRNA sense strand
caccaccuccucagggaaa

SEQ ID NO: 403049 - RNA, 19 nt, Homo sapiens
  misc_RNA (1)...(19): siRNA sense strand
gggaggacagcaaucucaa

SEQ ID NO: 403050 - RNA, 19 nt, Homo sapiens
  misc_RNA (1)...(19): siRNA sense strand
gggaggccaucagcaaggu

SEQ ID NO: 403051 - RNA, 19 nt, Homo sapiens
  misc_RNA (1)...(19): siRNA sense strand
ucaacccucugcuggugau

SEQ ID NO: 403052 - RNA, 19 nt, Homo sapiens
  misc_RNA (1)...(19): siRNA sense strand
gaacuuaucuacuggauuu

SEQ ID NO: 403053 - RNA, 19 nt, Homo sapiens
  misc_RNA (1)...(19): siRNA sense strand
gaggagagcuauuugauua

SEQ ID NO: 403054 - RNA, 19 nt, Homo sapiens
  misc_RNA (1)...(19): siRNA sense strand
uaaaguagcugugaagaua

SEQ ID NO: 403055 - RNA, 19 nt, Homo sapiens
  misc_RNA (1)...(19): siRNA sense strand
gaugucagauggugaauuu

SEQ ID NO: 403056 - RNA, 19 nt, Homo sapiens
  misc_RNA (1)...(19): siRNA sense strand
gaacaugaaugguuuaaac

SEQ ID NO: 403057 - RNA, 19 nt, Homo sapiens
  misc_RNA (1)...(19): siRNA sense strand
ggagagcuauuugauuaua

SEQ ID NO: 403058 - RNA, 19 nt, Homo sapiens
  misc_RNA (1)...(19): siRNA sense strand
acacaugaaugcaaagaua

SEQ ID NO: 403059 - RNA, 19 nt, Homo sapiens
  misc_RNA (1)...(19): siRNA sense strand
caaagucgaccaaaugaua

SEQ ID NO: 403060 - RNA, 19 nt, Homo sapiens
  misc_RNA (1)...(19): siRNA sense strand
caacagaaaucaccaggau

SEQ ID NO: 403061 - RNA, 19 nt, Homo sapiens
  misc_RNA (1)...(19): siRNA sense strand
caaaaugagucuacaguua

SEQ ID NO: 403062 - RNA, 19 nt, Homo sapiens
  misc_RNA (1)...(19): siRNA sense strand
guagagcaaucaaacaauu

SEQ ID NO: 403063 - RNA, 19 nt, Homo sapiens
  misc_RNA (1)...(19): siRNA sense strand
gaagaucggccacuacauu

SEQ ID NO: 403064 - RNA, 19 nt, Homo sapiens
  misc_RNA (1)...(19): siRNA sense strand
gacaagcacuuacuccaaa

SEQ ID NO: 403065 - RNA, 19 nt, Homo sapiens
  misc_RNA (1)...(19): siRNA sense strand
caacuaugcugcaccagaa

SEQ ID NO: 403066 - RNA, 19 nt, Homo sapiens
  misc_RNA (1)...(19): siRNA sense strand
gauaacaggagaauaauga

SEQ ID NO: 403067 - RNA, 19 nt, Homo sapiens
  misc_RNA (1)...(19): siRNA sense strand
gaggauccaucauauaguu

SEQ ID NO: 403068 - RNA, 19 nt, Homo sapiens
  misc_RNA (1)...(19): siRNA sense strand
gaaaucaccaggauccuuu

SEQ ID NO: 403069 - RNA, 19 nt, Homo sapiens
  misc_RNA (1)...(19): siRNA sense strand
gaaguucucagcugucuuu

SEQ ID NO: 403070 - RNA, 19 nt, Homo sapiens
  misc_RNA (1)...(19): siRNA sense strand
gcagaaguauguagagcaa

SEQ ID NO: 403071 - RNA, 19 nt, Homo sapiens
  misc_RNA (1)...(19): siRNA sense strand
gaaugaagccaaagauuuc

SEQ ID NO: 403072 - RNA, 19 nt, Homo sapiens
  misc_RNA (1)...(19): siRNA sense strand
caaccaugauugaugauga

SEQ ID NO: 403073 - RNA, 19 nt, Homo sapiens
  misc_RNA (1)...(19): siRNA sense strand
gauugaugaugaagccuua

SEQ ID NO: 403074 - RNA, 19 nt, Homo sapiens
  misc_RNA (1)...(19): siRNA sense strand
gaaguaauuucaggaagau

SEQ ID NO: 403075 - RNA, 19 nt, Homo sapiens
  misc_RNA (1)...(19): siRNA sense strand
ucucuuaccucaucuguga

SEQ ID NO: 403076 - RNA, 19 nt, Homo sapiens
  misc_RNA (1)...(19): siRNA sense strand
ggaagaauccugugacaag

SEQ ID NO: 403077 - RNA, 19 nt, Homo sapiens
  misc_RNA (1)...(19): siRNA sense strand
ccauacccuugaugaauua

SEQ ID NO: 403078 - RNA, 19 nt, Homo sapiens
  misc_RNA (1)...(19): siRNA sense strand
gccauacccuugaugaauu

SEQ ID NO: 403079 - RNA, 19 nt, Homo sapiens
  misc_RNA (1)...(19): siRNA sense strand
ugaaugaagccaaagauuu

SEQ ID NO: 403080 - RNA, 19 nt, Homo sapiens
  misc_RNA (1)...(19): siRNA sense strand
ggaauuagaagucaaaguc

SEQ ID NO: 403081 - RNA, 19 nt, Homo sapiens
  misc_RNA (1)...(19): siRNA sense strand
gcaguugccuaccaucuca

SEQ ID NO: 403082 - RNA, 19 nt, Homo sapiens
  misc_RNA (1)...(19): siRNA sense strand
gcccagagguagauauaug

SEQ ID NO: 403083 - RNA, 19 nt, Homo sapiens
  misc_RNA (1)...(19): siRNA sense strand
ugaauugacugggcauaaa

SEQ ID NO: 403084 - RNA, 19 nt, Homo sapiens
  misc_RNA (1)...(19): siRNA sense strand
acaauuggauuaugaaugg

SEQ ID NO: 403085 - RNA, 19 nt, Homo sapiens
  misc_RNA (1)...(19): siRNA sense strand
cagggaacaugaaugguuu

SEQ ID NO: 403086 - RNA, 19 nt, Homo sapiens
  misc_RNA (1)...(19): siRNA sense strand
gcagagaaauucagaaccu

SEQ ID NO: 403087 - RNA, 19 nt, Homo sapiens
  misc_RNA (1)...(19): siRNA sense strand
ccaaaggagugauucagau

SEQ ID NO: 403088 - RNA, 19 nt, Homo sapiens
  misc_RNA (1)...(19): siRNA sense strand
gaagucacacaauagaauu

SEQ ID NO: 403089 - RNA, 19 nt, Homo sapiens
  misc_RNA (1)...(19): siRNA sense strand
gcagguggaucccaugaag

SEQ ID NO: 403090 - RNA, 19 nt, Homo sapiens
  misc_RNA (1)...(19): siRNA sense strand
ggaagucacacaauagaau

SEQ ID NO: 403091 - RNA, 19 nt, Homo sapiens
  misc_RNA (1)...(19): siRNA sense strand
guucucagcugucuuuaca

SEQ ID NO: 403092 - RNA, 19 nt, Homo sapiens
  misc_RNA (1)...(19): siRNA sense strand
agaaguaauuucaggaaga

SEQ ID NO: 403093 - RNA, 19 nt, Homo sapiens
  misc_RNA (1)...(19): siRNA sense strand
gcgacaagcccaccugauu

SEQ ID NO: 403094 - RNA, 19 nt, Homo sapiens
  misc_RNA (1)...(19): siRNA sense strand
ggaggagagcuauuugauu

SEQ ID NO: 403095 - RNA, 19 nt, Homo sapiens
  misc_RNA (1)...(19): siRNA sense strand
ggaaaauccucagaaguuu

SEQ ID NO: 403096 - RNA, 19 nt, Homo sapiens
  misc_RNA (1)...(19): siRNA sense strand
gaccaugugccaacucuuu

SEQ ID NO: 403097 - RNA, 19 nt, Homo sapiens
  misc_RNA (1)...(19): siRNA sense strand
augcaaagauagcugauuu

SEQ ID NO: 403098 - RNA, 19 nt, Homo sapiens
  misc_RNA (1)...(19): siRNA sense strand
gaaaauguccugcuugaug

SEQ ID NO: 403099 - RNA, 19 nt, Homo sapiens
  misc_RNA (1)...(19): siRNA sense strand
ucaaagauaucagggaaca

SEQ ID NO: 403100 - RNA, 19 nt, Homo sapiens
  misc_RNA (1)...(19): siRNA sense strand
uuucaggcauccucauaua

SEQ ID NO: 403101 - RNA, 19 nt, Homo sapiens
  misc_RNA (1)...(19): siRNA sense strand
ugaccucacuugacucuuc

SEQ ID NO: 403102 - RNA, 19 nt, Homo sapiens
  misc_RNA (1)...(19): siRNA sense strand
ugccuaccaucucauaaua

SEQ ID NO: 403103 - RNA, 19 nt, Homo sapiens
  misc_RNA (1)...(19): siRNA sense strand
gugaugggaucuucuauac

SEQ ID NO: 403104 - RNA, 19 nt, Homo sapiens
  misc_RNA (1)...(19): siRNA sense strand
acaggagaauaaugaauga

SEQ ID NO: 403105 - RNA, 19 nt, Homo sapiens
  misc_RNA (1)...(19): siRNA sense strand
gauaugugaugggaucuuc

SEQ ID NO: 403106 - RNA, 19 nt, Homo sapiens
  misc_RNA (1)...(19): siRNA sense strand
caggcauccucauauaauu

SEQ ID NO: 403107 - RNA, 19 nt, Homo sapiens
  misc_RNA (1)...(19): siRNA sense strand
ccuaccaucucauaauaga

SEQ ID NO: 403108 - RNA, 19 nt, Homo sapiens
  misc_RNA (1)...(19): siRNA sense strand
gauacucaaucgacagaag

SEQ ID NO: 403109 - RNA, 19 nt, Homo sapiens
  misc_RNA (1)...(19): siRNA sense strand
gaugugugcaaaucuaauu

SEQ ID NO: 403110 - RNA, 19 nt, Homo sapiens
  misc_RNA (1)...(19): siRNA sense strand
aaagauagcugauuuuggu

SEQ ID NO: 403111 - RNA, 19 nt, Homo sapiens
  misc_RNA (1)...(19): siRNA sense strand
gaaauuacagaagccaaau

SEQ ID NO: 403112 - RNA, 19 nt, Homo sapiens
  misc_RNA (1)...(19): siRNA sense strand
aacaggaccuuccaaaaua

SEQ ID NO: 403113 - RNA, 19 nt, Homo sapiens
  misc_RNA (1)...(19): siRNA sense strand
gaagguuggcaaacaugaa

SEQ ID NO: 403114 - RNA, 19 nt, Homo sapiens
  misc_RNA (1)...(19): siRNA sense strand
agaaguauguagagcaauc

SEQ ID NO: 403115 - RNA, 19 nt, Homo sapiens
  misc_RNA (1)...(19): siRNA sense strand
gauauuauggcagaaguau

SEQ ID NO: 403116 - RNA, 19 nt, Homo sapiens
  misc_RNA (1)...(19): siRNA sense strand
ggugguccauagagauuug

SEQ ID NO: 403117 - RNA, 19 nt, Homo sapiens
  misc_RNA (1)...(19): siRNA sense strand
guuagcaacuaucgaucuu

SEQ ID NO: 403118 - RNA, 19 nt, Homo sapiens
  misc_RNA (1)...(19): siRNA sense strand
caagcccaccugauucuuu

SEQ ID NO: 403119 - RNA, 19 nt, Homo sapiens
  misc_RNA (1)...(19): siRNA sense strand
caaagugaagguuggcaaa

SEQ ID NO: 403120 - RNA, 19 nt, Homo sapiens
  misc_RNA (1)...(19): siRNA sense strand
gaacccuuccauuugauga

SEQ ID NO: 403121 - RNA, 19 nt, Homo sapiens
  misc_RNA (1)...(19): siRNA sense strand
ggcauaaaguagcugugaa

SEQ ID NO: 403122 - RNA, 19 nt, Homo sapiens
  misc_RNA (1)...(19): siRNA sense strand
caaaggagugauucagaug

SEQ ID NO: 403123 - RNA, 19 nt, Homo sapiens
  misc_RNA (1)...(19): siRNA sense strand
guaaacccauauuauuugc

SEQ ID NO: 403124 - RNA, 19 nt, Homo sapiens
  misc_RNA (1)...(19): siRNA sense strand
cgacaagcccaccugauuc

SEQ ID NO: 403125 - RNA, 19 nt, Homo sapiens
  misc_RNA (1)...(19): siRNA sense strand
ggucaucaguacaccaucu

SEQ ID NO: 403126 - RNA, 19 nt, Homo sapiens
  misc_RNA (1)...(19): siRNA sense strand
ccaaguggauaguagaacu

SEQ ID NO: 403127 - RNA, 19 nt, Homo sapiens
  misc_RNA (1)...(19): siRNA sense strand
gcagugggguuauucucua

SEQ ID NO: 403128 - RNA, 19 nt, Homo sapiens
  misc_RNA (1)...(19): siRNA sense strand
uuucugguguggauuauug

SEQ ID NO: 403129 - RNA, 19 nt, Homo sapiens
  misc_RNA (1)...(19): siRNA sense strand
aaagaaagucggcgucugu

SEQ ID NO: 403130 - RNA, 19 nt, Homo sapiens
  misc_RNA (1)...(19): siRNA sense strand
ggcauccucauauaauuaa

SEQ ID NO: 403131 - RNA, 19 nt, Homo sapiens
  misc_RNA (1)...(19): siRNA sense strand
ugaaauuacagaagccaaa

SEQ ID NO: 403132 - RNA, 19 nt, Homo sapiens
  misc_RNA (1)...(19): siRNA sense strand
ggauuuccguaguauugau

SEQ ID NO: 403133 - RNA, 19 nt, Homo sapiens
  misc_RNA (1)...(19): siRNA sense strand
gaugaagccuuaaaagaag

SEQ ID NO: 403134 - RNA, 19 nt, Homo sapiens
  misc_RNA (1)...(19): siRNA sense strand
cuauaccccucaauauuua

SEQ ID NO: 403135 - RNA, 19 nt, Homo sapiens
  misc_RNA (1)...(19): siRNA sense strand
gggcauaaaguagcuguga

SEQ ID NO: 403136 - RNA, 19 nt, Homo sapiens
  misc_RNA (1)...(19): siRNA sense strand
gggugaagaucggccacua

SEQ ID NO: 403137 - RNA, 19 nt, Homo sapiens
  misc_RNA (1)...(19): siRNA sense strand
ucauggugauggaauaugu

SEQ ID NO: 403138 - RNA, 19 nt, Homo sapiens
  misc_RNA (1)...(19): siRNA sense strand
auucagaaccucaagcuuu

SEQ ID NO: 403139 - RNA, 19 nt, Homo sapiens
  misc_RNA (1)...(19): siRNA sense strand
ggucggcaccuucggcaaa

SEQ ID NO: 403140 - RNA, 19 nt, Homo sapiens
  misc_RNA (1)...(19): siRNA sense strand
ucagggaacaugaaugguu

SEQ ID NO: 403141 - RNA, 19 nt, Homo sapiens
  misc_RNA (1)...(19): siRNA sense strand
guaugcaggcccagaggua

SEQ ID NO: 403142 - RNA, 19 nt, Homo sapiens
  misc_RNA (1)...(19): siRNA sense strand
gcacacaugaaugcaaaga

SEQ ID NO: 403143 - RNA, 19 nt, Homo sapiens
  misc_RNA (1)...(19): siRNA sense strand
ggugauggaauaugucuca

SEQ ID NO: 403144 - RNA, 19 nt, Homo sapiens
  misc_RNA (1)...(19): siRNA sense strand
uggcaaacaugaauugacu

SEQ ID NO: 403145 - RNA, 19 nt, Homo sapiens
  misc_RNA (1)...(19): siRNA sense strand
aaagauaucagggaacaug

SEQ ID NO: 403146 - RNA, 19 nt, Homo sapiens
  misc_RNA (1)...(19): siRNA sense strand
gcauaaaguagcugugaag

SEQ ID NO: 403147 - RNA, 19 nt, Homo sapiens
  misc_RNA (1)...(19): siRNA sense strand
gccuugaugugguaggaaa

SEQ ID NO: 403148 - RNA, 19 nt, Homo sapiens
  misc_RNA (1)...(19): siRNA sense strand
ccagaaguaauuucaggaa

SEQ ID NO: 403149 - RNA, 19 nt, Homo sapiens
  misc_RNA (1)...(19): siRNA sense strand
ugacaagcacuuacuccaa

SEQ ID NO: 403150 - RNA, 19 nt, Homo sapiens
  misc_RNA (1)...(19): siRNA sense strand
acagaaauccaaacaccaa

SEQ ID NO: 403151 - RNA, 19 nt, Homo sapiens
  misc_RNA (1)...(19): siRNA sense strand
gauaucagggaacaugaau

SEQ ID NO: 403152 - RNA, 19 nt, Homo sapiens
  misc_RNA (1)...(19): siRNA sense strand
ggagaagccucaccucuug

SEQ ID NO: 403153 - RNA, 19 nt, Homo sapiens
  misc_RNA (1)...(19): siRNA sense strand
gagaacaacuacucauuga

SEQ ID NO: 403154 - RNA, 19 nt, Homo sapiens
  misc_RNA (1)...(19): siRNA sense strand
gaacucuacugccaacuau

SEQ ID NO: 403155 - RNA, 19 nt, Homo sapiens
  misc_RNA (1)...(19): siRNA sense strand
gcagaaaggacucaagauu

SEQ ID NO: 403156 - RNA, 19 nt, Homo sapiens
  misc_RNA (1)...(19): siRNA sense strand
gaacuucucgucacuguau

SEQ ID NO: 403157 - RNA, 19 nt, Homo sapiens
  misc_RNA (1)...(19): siRNA sense strand
gaacacagccauugucaag

SEQ ID NO: 403158 - RNA, 19 nt, Homo sapiens
  misc_RNA (1)...(19): siRNA sense strand
ggaaucagccucacaguca

SEQ ID NO: 403159 - RNA, 19 nt, Homo sapiens
  misc_RNA (1)...(19): siRNA sense strand
gcaaggccauggacaaaca

SEQ ID NO: 403160 - RNA, 19 nt, Homo sapiens
  misc_RNA (1)...(19): siRNA sense strand
ggaaggaguucgaggugau

SEQ ID NO: 403161 - RNA, 19 nt, Homo sapiens
  misc_RNA (1)...(19): siRNA sense strand
cagaaaggacucaagauug

SEQ ID NO: 403162 - RNA, 19 nt, Homo sapiens
  misc_RNA (1)...(19): siRNA sense strand
ggauccagcucccucacaa

SEQ ID NO: 403163 - RNA, 19 nt, Homo sapiens
  misc_RNA (1)...(19): siRNA sense strand
agucggcccugaaccuuua

SEQ ID NO: 403164 - RNA, 19 nt, Homo sapiens
  misc_RNA (1)...(19): siRNA sense strand
cagcaccaguuccaucauu

SEQ ID NO: 403165 - RNA, 19 nt, Homo sapiens
  misc_RNA (1)...(19): siRNA sense strand
gcagcgaccucuccuacgu

SEQ ID NO: 403166 - RNA, 19 nt, Homo sapiens
  misc_RNA (1)...(19): siRNA sense strand
agaaaggacucaagauugc

SEQ ID NO: 403167 - RNA, 19 nt, Homo sapiens
  misc_RNA (1)...(19): siRNA sense strand
gaagaacacagccauuguc

SEQ ID NO: 403168 - RNA, 19 nt, Homo sapiens
  misc_RNA (1)...(19): siRNA sense strand
acacugccaugaaggacua

SEQ ID NO: 403169 - RNA, 19 nt, Homo sapiens
  misc_RNA (1)...(19): siRNA sense strand
gcccugaaccuuuaugaga

SEQ ID NO: 403170 - RNA, 19 nt, Homo sapiens
  misc_RNA (1)...(19): siRNA sense strand
gcaacacccucaggaccaa

SEQ ID NO: 403171 - RNA, 19 nt, Homo sapiens
  misc_RNA (1)...(19): siRNA sense strand
caugaaggacuaucuguau

SEQ ID NO: 403172 - RNA, 19 nt, Homo sapiens
  misc_RNA (1)...(19): siRNA sense strand
gaaggagacgggcaucauc

SEQ ID NO: 403173 - RNA, 19 nt, Homo sapiens
  misc_RNA (1)...(19): siRNA sense strand
gaccaguacucggaggauu

SEQ ID NO: 403174 - RNA, 19 nt, Homo sapiens
  misc_RNA (1)...(19): siRNA sense strand
gcuggacacugccaugaag

SEQ ID NO: 403175 - RNA, 19 nt, Homo sapiens
  misc_RNA (1)...(19): siRNA sense strand
gaucaacggagucaucuac

SEQ ID NO: 403176 - RNA, 19 nt, Homo sapiens
  misc_RNA (1)...(19): siRNA sense strand
ccaagggagugaaggucaa

SEQ ID NO: 403177 - RNA, 19 nt, Homo sapiens
  misc_RNA (1)...(19): siRNA sense strand
agauaaggcuccggcugua

SEQ ID NO: 403178 - RNA, 19 nt, Homo sapiens
  misc_RNA (1)...(19): siRNA sense strand
ggacaguuuccggaucuuu

SEQ ID NO: 403179 - RNA, 19 nt, Homo sapiens
  misc_RNA (1)...(19): siRNA sense strand
gauaaggcuccggcuguaa

SEQ ID NO: 403180 - RNA, 19 nt, Homo sapiens
  misc_RNA (1)...(19): siRNA sense strand
ccacaagcgcucugucuca

SEQ ID NO: 403181 - RNA, 19 nt, Homo sapiens
  misc_RNA (1)...(19): siRNA sense strand
gaaucagccucacagucau

SEQ ID NO: 403182 - RNA, 19 nt, Homo sapiens
  misc_RNA (1)...(19): siRNA sense strand
caagaagaacacagccauu

SEQ ID NO: 403183 - RNA, 19 nt, Homo sapiens
  misc_RNA (1)...(19): siRNA sense strand
gcaaggugcggaccgugaa

SEQ ID NO: 403184 - RNA, 19 nt, Homo sapiens
  misc_RNA (1)...(19): siRNA sense strand
ggacaauggcaacauguac

SEQ ID NO: 403185 - RNA, 19 nt, Homo sapiens
  misc_RNA (1)...(19): siRNA sense strand
gucaccaucuuccugugua

SEQ ID NO: 403186 - RNA, 19 nt, Homo sapiens
  misc_RNA (1)...(19): siRNA sense strand
gguguucccuccagaucug

SEQ ID NO: 403187 - RNA, 19 nt, Homo sapiens
  misc_RNA (1)...(19): siRNA sense strand
ccaugaaggacuaucugua

SEQ ID NO: 403188 - RNA, 19 nt, Homo sapiens
  misc_RNA (1)...(19): siRNA sense strand
ugaagaagacgugggaaga

SEQ ID NO: 403189 - RNA, 19 nt, Homo sapiens
  misc_RNA (1)...(19): siRNA sense strand
ucacccaguucaacagugu

SEQ ID NO: 403190 - RNA, 19 nt, Homo sapiens
  misc_RNA (1)...(19): siRNA sense strand
ucacggccuccucuagaua

SEQ ID NO: 403191 - RNA, 19 nt, Homo sapiens
  misc_RNA (1)...(19): siRNA sense strand
ggacuuucccugccucaag

SEQ ID NO: 403192 - RNA, 19 nt, Homo sapiens
  misc_RNA (1)...(19): siRNA sense strand
gugggcgacugcuguauca

SEQ ID NO: 403193 - RNA, 19 nt, Homo sapiens
  misc_RNA (1)...(19): siRNA sense strand
uucagaagcugucagagau

SEQ ID NO: 403194 - RNA, 19 nt, Homo sapiens
  misc_RNA (1)...(19): siRNA sense strand
ugaacucuacugccaacua

SEQ ID NO: 403195 - RNA, 19 nt, Homo sapiens
  misc_RNA (1)...(19): siRNA sense strand
agcaccaguuccaucauua

SEQ ID NO: 403196 - RNA, 19 nt, Homo sapiens
  misc_RNA (1)...(19): siRNA sense strand
ggagcacucggaacccauu

SEQ ID NO: 403197 - RNA, 19 nt, Homo sapiens
  misc_RNA (1)...(19): siRNA sense strand
cagaugaccggaagcugaa

SEQ ID NO: 403198 - RNA, 19 nt, Homo sapiens
  misc_RNA (1)...(19): siRNA sense strand
ugcagauucucucagauga

SEQ ID NO: 403199 - RNA, 19 nt, Homo sapiens
  misc_RNA (1)...(19): siRNA sense strand
aggaggagccggaggacua

SEQ ID NO: 403200 - RNA, 19 nt, Homo sapiens
  misc_RNA (1)...(19): siRNA sense strand
cagagaacgggcugaguga

SEQ ID NO: 403201 - RNA, 19 nt, Homo sapiens
  misc_RNA (1)...(19): siRNA sense strand
caccugugguugcagagaa

SEQ ID NO: 403202 - RNA, 19 nt, Homo sapiens
  misc_RNA (1)...(19): siRNA sense strand
gccggauccucaagaacuu

SEQ ID NO: 403203 - RNA, 19 nt, Homo sapiens
  misc_RNA (1)...(19): siRNA sense strand
aagaagaacacagccauug

SEQ ID NO: 403204 - RNA, 19 nt, Homo sapiens
  misc_RNA (1)...(19): siRNA sense strand
guacucggaggauuucugu

SEQ ID NO: 403205 - RNA, 19 nt, Homo sapiens
  misc_RNA (1)...(19): siRNA sense strand
gacaauggcaacauguaca

SEQ ID NO: 403206 - RNA, 19 nt, Homo sapiens
  misc_RNA (1)...(19): siRNA sense strand
gaagaagacgugggaagac

SEQ ID NO: 403207 - RNA, 19 nt, Homo sapiens
  misc_RNA (1)...(19): siRNA sense strand
ccagcucccucacaaacuc

SEQ ID NO: 403208 - RNA, 19 nt, Homo sapiens
  misc_RNA (1)...(19): siRNA sense strand
agagccagcugugggacua

SEQ ID NO: 403209 - RNA, 19 nt, Homo sapiens
  misc_RNA (1)...(19): siRNA sense strand
cagaagcugucagagaucu

SEQ ID NO: 403210 - RNA, 19 nt, Homo sapiens
  misc_RNA (1)...(19): siRNA sense strand
aagcagaaaggacucaaga

SEQ ID NO: 403211 - RNA, 19 nt, Homo sapiens
  misc_RNA (1)...(19): siRNA sense strand
aaacgccaacgucuucuau

SEQ ID NO: 403212 - RNA, 19 nt, Homo sapiens
  misc_RNA (1)...(19): siRNA sense strand
gauccagcucccucacaaa

SEQ ID NO: 403213 - RNA, 19 nt, Homo sapiens
  misc_RNA (1)...(19): siRNA sense strand
ggaggagccggaggacuau

SEQ ID NO: 403214 - RNA, 19 nt, Homo sapiens
  misc_RNA (1)...(19): siRNA sense strand
cguggacaauggcaacaug

SEQ ID NO: 403215 - RNA, 19 nt, Homo sapiens
  misc_RNA (1)...(19): siRNA sense strand
uggcagacucaucaacuuu

SEQ ID NO: 403216 - RNA, 19 nt, Homo sapiens
  misc_RNA (1)...(19): siRNA sense strand
gagcugaucaacggaguca

SEQ ID NO: 403217 - RNA, 19 nt, Homo sapiens
  misc_RNA (1)...(19): siRNA sense strand
acuaugacuuuguccugaa

SEQ ID NO: 403218 - RNA, 19 nt, Homo sapiens
  misc_RNA (1)...(19): siRNA sense strand
gagucggcccugaaccuuu

SEQ ID NO: 403219 - RNA, 19 nt, Homo sapiens
  misc_RNA (1)...(19): siRNA sense strand
uggaggagaucaacaucag

SEQ ID NO: 403220 - RNA, 19 nt, Homo sapiens
  misc_RNA (1)...(19): siRNA sense strand
ggcagacucaucaacuuug

SEQ ID NO: 403221 - RNA, 19 nt, Homo sapiens
  misc_RNA (1)...(19): siRNA sense strand
cagaugagaacaacuacuc

SEQ ID NO: 403222 - RNA, 19 nt, Homo sapiens
  misc_RNA (1)...(19): siRNA sense strand
agaagaggaggaaggaguu

SEQ ID NO: 403223 - RNA, 19 nt, Homo sapiens
  misc_RNA (1)...(19): siRNA sense strand
agaaugagucggcccugaa

SEQ ID NO: 403224 - RNA, 19 nt, Homo sapiens
  misc_RNA (1)...(19): siRNA sense strand
aagcugaagaucccugaaa

SEQ ID NO: 403225 - RNA, 19 nt, Homo sapiens
  misc_RNA (1)...(19): siRNA sense strand
ucucagggcucugcaacuc

SEQ ID NO: 403226 - RNA, 19 nt, Homo sapiens
  misc_RNA (1)...(19): siRNA sense strand
gaagaggaggaaggaguuc

SEQ ID NO: 403227 - RNA, 19 nt, Homo sapiens
  misc_RNA (1)...(19): siRNA sense strand
gacaguuuccggaucuuuc

SEQ ID NO: 403228 - RNA, 19 nt, Homo sapiens
  misc_RNA (1)...(19): siRNA sense strand
ucuaugccaugaacucuac

SEQ ID NO: 403229 - RNA, 19 nt, Homo sapiens
  misc_RNA (1)...(19): siRNA sense strand
ccgcaaggccauggacaaa

SEQ ID NO: 403230 - RNA, 19 nt, Homo sapiens
  misc_RNA (1)...(19): siRNA sense strand
gcugaucaacggagucauc

SEQ ID NO: 403231 - RNA, 19 nt, Homo sapiens
  misc_RNA (1)...(19): siRNA sense strand
ucuccuacgucaccaucuu

SEQ ID NO: 403232 - RNA, 19 nt, Homo sapiens
  misc_RNA (1)...(19): siRNA sense strand
gaagcagaaaggacucaag

SEQ ID NO: 403233 - RNA, 19 nt, Homo sapiens
  misc_RNA (1)...(19): siRNA sense strand
acucuacugccaacuauga

SEQ ID NO: 403234 - RNA, 19 nt, Homo sapiens
  misc_RNA (1)...(19): siRNA sense strand
aaagguacgguagauguga

SEQ ID NO: 403235 - RNA, 19 nt, Homo sapiens
  misc_RNA (1)...(19): siRNA sense strand
gccuggacguggacaaugg

SEQ ID NO: 403236 - RNA, 19 nt, Homo sapiens
  misc_RNA (1)...(19): siRNA sense strand
gcaccacggaggcaacaag

SEQ ID NO: 403237 - RNA, 19 nt, Homo sapiens
  misc_RNA (1)...(19): siRNA sense strand
agaagaacacagccauugu

SEQ ID NO: 403238 - RNA, 19 nt, Homo sapiens
  misc_RNA (1)...(19): siRNA sense strand
caaaagguacgguagaugu

SEQ ID NO: 403239 - RNA, 19 nt, Homo sapiens
  misc_RNA (1)...(19): siRNA sense strand
uuucagaagcugucagaga

SEQ ID NO: 403240 - RNA, 19 nt, Homo sapiens
  misc_RNA (1)...(19): siRNA sense strand
aacaccagcuccagguuca

SEQ ID NO: 403241 - RNA, 19 nt, Homo sapiens
  misc_RNA (1)...(19): siRNA sense strand
ccucacggccuccucuaga

SEQ ID NO: 403242 - RNA, 19 nt, Homo sapiens
  misc_RNA (1)...(19): siRNA sense strand
gaaugagucggcccugaac

SEQ ID NO: 403243 - RNA, 19 nt, Homo sapiens
  misc_RNA (1)...(19): siRNA sense strand
ugaaggacuaucuguaugg

SEQ ID NO: 403244 - RNA, 19 nt, Homo sapiens
  misc_RNA (1)...(19): siRNA sense strand
augaaggacuaucuguaug

SEQ ID NO: 403245 - RNA, 19 nt, Homo sapiens
  misc_RNA (1)...(19): siRNA sense strand
uggcagagcaguuuacacu

SEQ ID NO: 403246 - RNA, 19 nt, Homo sapiens
  misc_RNA (1)...(19): siRNA sense strand
gcaccaguuccaucauuac

SEQ ID NO: 403247 - RNA, 19 nt, Homo sapiens
  misc_RNA (1)...(19): siRNA sense strand
cgcgccagaugagcaauuu

SEQ ID NO: 403248 - RNA, 19 nt, Homo sapiens
  misc_RNA (1)...(19): siRNA sense strand
cgucuucuaugccaugaac

SEQ ID NO: 403249 - RNA, 19 nt, Homo sapiens
  misc_RNA (1)...(19): siRNA sense strand
acaauggcaacauguacaa

SEQ ID NO: 403250 - RNA, 19 nt, Homo sapiens
  misc_RNA (1)...(19): siRNA sense strand
gggcgacugcuguaucauc

SEQ ID NO: 403251 - RNA, 19 nt, Homo sapiens
  misc_RNA (1)...(19): siRNA sense strand
gaugaccggaagcugaaga

SEQ ID NO: 403252 - RNA, 19 nt, Homo sapiens
  misc_RNA (1)...(19): siRNA sense strand
ggagguagcuuugcaguuu

SEQ ID NO: 403253 - RNA, 19 nt, Homo sapiens
  misc_RNA (1)...(19): siRNA sense strand
ugaaggagcugguaucuug

SEQ ID NO: 403254 - RNA, 19 nt, Homo sapiens
  misc_RNA (1)...(19): siRNA sense strand
aaccagggcuccacaguua

SEQ ID NO: 403255 - RNA, 19 nt, Homo sapiens
  misc_RNA (1)...(19): siRNA sense strand
caucacaaguggugccuua

SEQ ID NO: 403256 - RNA, 19 nt, Homo sapiens
  misc_RNA (1)...(19): siRNA sense strand
ggugguaucuuucaagcaa

SEQ ID NO: 403257 - RNA, 19 nt, Homo sapiens
  misc_RNA (1)...(19): siRNA sense strand
gaaaggaagaucccuggaa

SEQ ID NO: 403258 - RNA, 19 nt, Homo sapiens
  misc_RNA (1)...(19): siRNA sense strand
ucuccuagcuuuaauugaa

SEQ ID NO: 403259 - RNA, 19 nt, Homo sapiens
  misc_RNA (1)...(19): siRNA sense strand
cgagggaguuugacagcua

SEQ ID NO: 403260 - RNA, 19 nt, Homo sapiens
  misc_RNA (1)...(19): siRNA sense strand
ggaguuugacagcuauuaa

SEQ ID NO: 403261 - RNA, 19 nt, Homo sapiens
  misc_RNA (1)...(19): siRNA sense strand
gggaguaaaccacagacua

SEQ ID NO: 403262 - RNA, 19 nt, Homo sapiens
  misc_RNA (1)...(19): siRNA sense strand
uggagacuaucgacaauau

SEQ ID NO: 403263 - RNA, 19 nt, Homo sapiens
  misc_RNA (1)...(19): siRNA sense strand
gagacuaucgacaauauca

SEQ ID NO: 403264 - RNA, 19 nt, Homo sapiens
  misc_RNA (1)...(19): siRNA sense strand
ggaguaaaccacagacuac

SEQ ID NO: 403265 - RNA, 19 nt, Homo sapiens
  misc_RNA (1)...(19): siRNA sense strand
gagguagcuuugcaguuug

SEQ ID NO: 403266 - RNA, 19 nt, Homo sapiens
  misc_RNA (1)...(19): siRNA sense strand
cauugguggugguaucuuu

SEQ ID NO: 403267 - RNA, 19 nt, Homo sapiens
  misc_RNA (1)...(19): siRNA sense strand
gaguuugacagcuauuaaa

SEQ ID NO: 403268 - RNA, 19 nt, Homo sapiens
  misc_RNA (1)...(19): siRNA sense strand
gagggaguuugacagcuau

SEQ ID NO: 403269 - RNA, 19 nt, Homo sapiens
  misc_RNA (1)...(19): siRNA sense strand
gauugacuguaguaugguu

SEQ ID NO: 403270 - RNA, 19 nt, Homo sapiens
  misc_RNA (1)...(19): siRNA sense strand
ucccaaugguccucaguuu

SEQ ID NO: 403271 - RNA, 19 nt, Homo sapiens
  misc_RNA (1)...(19): siRNA sense strand
ggagggcuguuuuccauga

SEQ ID NO: 403272 - RNA, 19 nt, Homo sapiens
  misc_RNA (1)...(19): siRNA sense strand
ggcauucuccuagcuuuaa

SEQ ID NO: 403273 - RNA, 19 nt, Homo sapiens
  misc_RNA (1)...(19): siRNA sense strand
gagcugguaucuuguugac

SEQ ID NO: 403274 - RNA, 19 nt, Homo sapiens
  misc_RNA (1)...(19): siRNA sense strand
acaguuaggagguagcuuu

SEQ ID NO: 403275 - RNA, 19 nt, Homo sapiens
  misc_RNA (1)...(19): siRNA sense strand
cauggcgaauuguggauga

SEQ ID NO: 403276 - RNA, 19 nt, Homo sapiens
  misc_RNA (1)...(19): siRNA sense strand
uaguaugguucaagucaga

SEQ ID NO: 403277 - RNA, 19 nt, Homo sapiens
  misc_RNA (1)...(19): siRNA sense strand
guuaggagguagcuuugca

SEQ ID NO: 403278 - RNA, 19 nt, Homo sapiens
  misc_RNA (1)...(19): siRNA sense strand
uucaagcaaucaaagguuu

SEQ ID NO: 403279 - RNA, 19 nt, Homo sapiens
  misc_RNA (1)...(19): siRNA sense strand
gcauucuccuagcuuuaau

SEQ ID NO: 403280 - RNA, 19 nt, Homo sapiens
  misc_RNA (1)...(19): siRNA sense strand
guccucaguuugcagaaga

SEQ ID NO: 403281 - RNA, 19 nt, Homo sapiens
  misc_RNA (1)...(19): siRNA sense strand
agacuacgagggaguuuga

SEQ ID NO: 403282 - RNA, 19 nt, Homo sapiens
  misc_RNA (1)...(19): siRNA sense strand
gggaguuugacagcuauua

SEQ ID NO: 403283 - RNA, 19 nt, Homo sapiens
  misc_RNA (1)...(19): siRNA sense strand
guggcauucuccuagcuuu

SEQ ID NO: 403284 - RNA, 19 nt, Homo sapiens
  misc_RNA (1)...(19): siRNA sense strand
aaucaaagguuuucgcaau

SEQ ID NO: 403285 - RNA, 19 nt, Homo sapiens
  misc_RNA (1)...(19): siRNA sense strand
cugcacaguuucccaaugg

SEQ ID NO: 403286 - RNA, 19 nt, Homo sapiens
  misc_RNA (1)...(19): siRNA sense strand
aaaccagggcuccacaguu

SEQ ID NO: 403287 - RNA, 19 nt, Homo sapiens
  misc_RNA (1)...(19): siRNA sense strand
ccaaugguccucaguuugc

SEQ ID NO: 403288 - RNA, 19 nt, Homo sapiens
  misc_RNA (1)...(19): siRNA sense strand
augauugacuguaguaugg

SEQ ID NO: 403289 - RNA, 19 nt, Homo sapiens
  misc_RNA (1)...(19): siRNA sense strand
cauacuggcagcaagaaau

SEQ ID NO: 403290 - RNA, 19 nt, Homo sapiens
  misc_RNA (1)...(19): siRNA sense strand
ggagcugguaucuuguuga

SEQ ID NO: 403291 - RNA, 19 nt, Homo sapiens
  misc_RNA (1)...(19): siRNA sense strand
ucaagucagaggaaaggaa

SEQ ID NO: 403292 - RNA, 19 nt, Homo sapiens
  misc_RNA (1)...(19): siRNA sense strand
gaaggagcugguaucuugu

SEQ ID NO: 403293 - RNA, 19 nt, Homo sapiens
  misc_RNA (1)...(19): siRNA sense strand
caugauugacuguaguaug

SEQ ID NO: 403294 - RNA, 19 nt, Homo sapiens
  misc_RNA (1)...(19): siRNA sense strand
ugccuuaacgggagccaua

SEQ ID NO: 403295 - RNA, 19 nt, Homo sapiens
  misc_RNA (1)...(19): siRNA sense strand
ggggagggcuguuuuccau

SEQ ID NO: 403296 - RNA, 19 nt, Homo sapiens
  misc_RNA (1)...(19): siRNA sense strand
cagaagaccccucccaguu

SEQ ID NO: 403297 - RNA, 19 nt, Homo sapiens
  misc_RNA (1)...(19): siRNA sense strand
uagcaaagcugacacaaua

SEQ ID NO: 403298 - RNA, 19 nt, Homo sapiens
  misc_RNA (1)...(19): siRNA sense strand
gaagaaggcucaccaagug

SEQ ID NO: 403299 - RNA, 19 nt, Homo sapiens
  misc_RNA (1)...(19): siRNA sense strand
gaacucagcuauucagugu

SEQ ID NO: 403300 - RNA, 19 nt, Homo sapiens
  misc_RNA (1)...(19): siRNA sense strand
gaacgcaccuuggaaguuu

SEQ ID NO: 403301 - RNA, 19 nt, Homo sapiens
  misc_RNA (1)...(19): siRNA sense strand
acuguuagcuuuccuauua

SEQ ID NO: 403302 - RNA, 19 nt, Homo sapiens
  misc_RNA (1)...(19): siRNA sense strand
gcagauaagaugauaguua

SEQ ID NO: 403303 - RNA, 19 nt, Homo sapiens
  misc_RNA (1)...(19): siRNA sense strand
gaugauaccaggcauauaa

SEQ ID NO: 403304 - RNA, 19 nt, Homo sapiens
  misc_RNA (1)...(19): siRNA sense strand
guaaagcacugcaaaguag

SEQ ID NO: 403305 - RNA, 19 nt, Homo sapiens
  misc_RNA (1)...(19): siRNA sense strand
ggaacgggaugauauuuau

SEQ ID NO: 403306 - RNA, 19 nt, Homo sapiens
  misc_RNA (1)...(19): siRNA sense strand
gaacuucccucagagaaug

SEQ ID NO: 403307 - RNA, 19 nt, Homo sapiens
  misc_RNA (1)...(19): siRNA sense strand
gcaaugauaaugacaauga

SEQ ID NO: 403308 - RNA, 19 nt, Homo sapiens
  misc_RNA (1)...(19): siRNA sense strand
gaagaucccugguauuguc

SEQ ID NO: 403309 - RNA, 19 nt, Homo sapiens
  misc_RNA (1)...(19): siRNA sense strand
ggauaugucggaauucuua

SEQ ID NO: 403310 - RNA, 19 nt, Homo sapiens
  misc_RNA (1)...(19): siRNA sense strand
gucaagaacuguuagcuuu

SEQ ID NO: 403311 - RNA, 19 nt, Homo sapiens
  misc_RNA (1)...(19): siRNA sense strand
gacaaucccuuaggaauga

SEQ ID NO: 403312 - RNA, 19 nt, Homo sapiens
  misc_RNA (1)...(19): siRNA sense strand
caagugaaauggaaacaga

SEQ ID NO: 403313 - RNA, 19 nt, Homo sapiens
  misc_RNA (1)...(19): siRNA sense strand
gaagauagcaaugauaaug

SEQ ID NO: 403314 - RNA, 19 nt, Homo sapiens
  misc_RNA (1)...(19): siRNA sense strand
gaacugaucaagcaaaugu

SEQ ID NO: 403315 - RNA, 19 nt, Homo sapiens
  misc_RNA (1)...(19): siRNA sense strand
gaauugaagcuaugugaaa

SEQ ID NO: 403316 - RNA, 19 nt, Homo sapiens
  misc_RNA (1)...(19): siRNA sense strand
gaaaauggauuauguacug

SEQ ID NO: 403317 - RNA, 19 nt, Homo sapiens
  misc_RNA (1)...(19): siRNA sense strand
caaguuggauaccuuaguu

SEQ ID NO: 403318 - RNA, 19 nt, Homo sapiens
  misc_RNA (1)...(19): siRNA sense strand
gcagauggaaggccagaua

SEQ ID NO: 403319 - RNA, 19 nt, Homo sapiens
  misc_RNA (1)...(19): siRNA sense strand
ggucagcccuuucuuaugg

SEQ ID NO: 403320 - RNA, 19 nt, Homo sapiens
  misc_RNA (1)...(19): siRNA sense strand
ggacagguauuagugauag

SEQ ID NO: 403321 - RNA, 19 nt, Homo sapiens
  misc_RNA (1)...(19): siRNA sense strand
gguauuguccgaauuguaa

SEQ ID NO: 403322 - RNA, 19 nt, Homo sapiens
  misc_RNA (1)...(19): siRNA sense strand
gggaugauauuuauguguu

SEQ ID NO: 403323 - RNA, 19 nt, Homo sapiens
  misc_RNA (1)...(19): siRNA sense strand
gauagucgcugguucaaac

SEQ ID NO: 403324 - RNA, 19 nt, Homo sapiens
  misc_RNA (1)...(19): siRNA sense strand
ggaaacagaugagccagau

SEQ ID NO: 403325 - RNA, 19 nt, Homo sapiens
  misc_RNA (1)...(19): siRNA sense strand
gcaagacugucaagaacug

SEQ ID NO: 403326 - RNA, 19 nt, Homo sapiens
  misc_RNA (1)...(19): siRNA sense strand
gcacugcaaaguagaagua

SEQ ID NO: 403327 - RNA, 19 nt, Homo sapiens
  misc_RNA (1)...(19): siRNA sense strand
cagcauauguacucuucua

SEQ ID NO: 403328 - RNA, 19 nt, Homo sapiens
  misc_RNA (1)...(19): siRNA sense strand
gaaacaauacugaagacaa

SEQ ID NO: 403329 - RNA, 19 nt, Homo sapiens
  misc_RNA (1)...(19): siRNA sense strand
caacacaccuccacuuacu

SEQ ID NO: 403330 - RNA, 19 nt, Homo sapiens
  misc_RNA (1)...(19): siRNA sense strand
agaaguauaucucacagaa

SEQ ID NO: 403331 - RNA, 19 nt, Homo sapiens
  misc_RNA (1)...(19): siRNA sense strand
gcaauacugauaucaacua

SEQ ID NO: 403332 - RNA, 19 nt, Homo sapiens
  misc_RNA (1)...(19): siRNA sense strand
caaauggcauacaugaaga

SEQ ID NO: 403333 - RNA, 19 nt, Homo sapiens
  misc_RNA (1)...(19): siRNA sense strand
gauaucaacuacaucaaag

SEQ ID NO: 403334 - RNA, 19 nt, Homo sapiens
  misc_RNA (1)...(19): siRNA sense strand
ugaauuggauuacauacug

SEQ ID NO: 403335 - RNA, 19 nt, Homo sapiens
  misc_RNA (1)...(19): siRNA sense strand
gcagcaagacugucaagaa

SEQ ID NO: 403336 - RNA, 19 nt, Homo sapiens
  misc_RNA (1)...(19): siRNA sense strand
gaugaaaaccuuaguagua

SEQ ID NO: 403337 - RNA, 19 nt, Homo sapiens
  misc_RNA (1)...(19): siRNA sense strand
gaggugaaauagcuaaauc

SEQ ID NO: 403338 - RNA, 19 nt, Homo sapiens
  misc_RNA (1)...(19): siRNA sense strand
gcagguccuugccgcuaua

SEQ ID NO: 403339 - RNA, 19 nt, Homo sapiens
  misc_RNA (1)...(19): siRNA sense strand
ucacagaauugaagcuaug

SEQ ID NO: 403340 - RNA, 19 nt, Homo sapiens
  misc_RNA (1)...(19): siRNA sense strand
ggaggacacuauacugcuu

SEQ ID NO: 403341 - RNA, 19 nt, Homo sapiens
  misc_RNA (1)...(19): siRNA sense strand
gagacaaguuggauaccuu

SEQ ID NO: 403342 - RNA, 19 nt, Homo sapiens
  misc_RNA (1)...(19): siRNA sense strand
gaggagauaaugauucuga

SEQ ID NO: 403343 - RNA, 19 nt, Homo sapiens
  misc_RNA (1)...(19): siRNA sense strand
cagauaagaugauaguuac

SEQ ID NO: 403344 - RNA, 19 nt, Homo sapiens
  misc_RNA (1)...(19): siRNA sense strand
ccaaaccuaugcaguacaa

SEQ ID NO: 403345 - RNA, 19 nt, Homo sapiens
  misc_RNA (1)...(19): siRNA sense strand
gaauggauccgcuuaccaa

SEQ ID NO: 403346 - RNA, 19 nt, Homo sapiens
  misc_RNA (1)...(19): siRNA sense strand
gaguauuuccucaaugaua

SEQ ID NO: 403347 - RNA, 19 nt, Homo sapiens
  misc_RNA (1)...(19): siRNA sense strand
ggaacaaauacaugaguaa

SEQ ID NO: 403348 - RNA, 19 nt, Homo sapiens
  misc_RNA (1)...(19): siRNA sense strand
uguuguaacucgaagauuu

SEQ ID NO: 403349 - RNA, 19 nt, Homo sapiens
  misc_RNA (1)...(19): siRNA sense strand
uaaggugguugccgaagaa

SEQ ID NO: 403350 - RNA, 19 nt, Homo sapiens
  misc_RNA (1)...(19): siRNA sense strand
ggaaugagaggugaaauag

SEQ ID NO: 403351 - RNA, 19 nt, Homo sapiens
  misc_RNA (1)...(19): siRNA sense strand
guccaaagcagcauaugua

SEQ ID NO: 403352 - RNA, 19 nt, Homo sapiens
  misc_RNA (1)...(19): siRNA sense strand
cagaugagccagaugauga

SEQ ID NO: 403353 - RNA, 19 nt, Homo sapiens
  misc_RNA (1)...(19): siRNA sense strand
cauacugguucuucacuuu

SEQ ID NO: 403354 - RNA, 19 nt, Homo sapiens
  misc_RNA (1)...(19): siRNA sense strand
ccuauuagauggauuacau

SEQ ID NO: 403355 - RNA, 19 nt, Homo sapiens
  misc_RNA (1)...(19): siRNA sense strand
aauguggucuggaaaguuu

SEQ ID NO: 403356 - RNA, 19 nt, Homo sapiens
  misc_RNA (1)...(19): siRNA sense strand
aagcaaauguggucuggaa

SEQ ID NO: 403357 - RNA, 19 nt, Homo sapiens
  misc_RNA (1)...(19): siRNA sense strand
gcaaagcugacacaauaga

SEQ ID NO: 403358 - RNA, 19 nt, Homo sapiens
  misc_RNA (1)...(19): siRNA sense strand
gaaccuggaagaaacaaug

SEQ ID NO: 403359 - RNA, 19 nt, Homo sapiens
  misc_RNA (1)...(19): siRNA sense strand
ccacuggcaucccauuaga

SEQ ID NO: 403360 - RNA, 19 nt, Homo sapiens
  misc_RNA (1)...(19): siRNA sense strand
caugaggauuugaauagaa

SEQ ID NO: 403361 - RNA, 19 nt, Homo sapiens
  misc_RNA (1)...(19): siRNA sense strand
gagaccagauuguggaaca

SEQ ID NO: 403362 - RNA, 19 nt, Homo sapiens
  misc_RNA (1)...(19): siRNA sense strand
aaacagaugagccagauga

SEQ ID NO: 403363 - RNA, 19 nt, Homo sapiens
  misc_RNA (1)...(19): siRNA sense strand
gaauauucgcuauggauga

SEQ ID NO: 403364 - RNA, 19 nt, Homo sapiens
  misc_RNA (1)...(19): siRNA sense strand
ggaaaaccauuuaaaacga

SEQ ID NO: 403365 - RNA, 19 nt, Homo sapiens
  misc_RNA (1)...(19): siRNA sense strand
acucagcuauucaguguuu

SEQ ID NO: 403366 - RNA, 19 nt, Homo sapiens
  misc_RNA (1)...(19): siRNA sense strand
acacuuccauugcccauga

SEQ ID NO: 403367 - RNA, 19 nt, Homo sapiens
  misc_RNA (1)...(19): siRNA sense strand
aaagcuaggugcugaagau

SEQ ID NO: 403368 - RNA, 19 nt, Homo sapiens
  misc_RNA (1)...(19): siRNA sense strand
augaaaguguggaguauaa

SEQ ID NO: 403369 - RNA, 19 nt, Homo sapiens
  misc_RNA (1)...(19): siRNA sense strand
ggagauaaugauucugaaa

SEQ ID NO: 403370 - RNA, 19 nt, Homo sapiens
  misc_RNA (1)...(19): siRNA sense strand
uaacaucaauaggacagaa

SEQ ID NO: 403371 - RNA, 19 nt, Homo sapiens
  misc_RNA (1)...(19): siRNA sense strand
caagagccuuuaagacaca

SEQ ID NO: 403372 - RNA, 19 nt, Homo sapiens
  misc_RNA (1)...(19): siRNA sense strand
gaugaagauagcaaugaua

SEQ ID NO: 403373 - RNA, 19 nt, Homo sapiens
  misc_RNA (1)...(19): siRNA sense strand
auacagagcacgugauuau

SEQ ID NO: 403374 - RNA, 19 nt, Homo sapiens
  misc_RNA (1)...(19): siRNA sense strand
uggaacaaauacaugagua

SEQ ID NO: 403375 - RNA, 19 nt, Homo sapiens
  misc_RNA (1)...(19): siRNA sense strand
uaccaggcauauaagauuu

SEQ ID NO: 403376 - RNA, 19 nt, Homo sapiens
  misc_RNA (1)...(19): siRNA sense strand
ccaaauggcauacaugaag

SEQ ID NO: 403377 - RNA, 19 nt, Homo sapiens
  misc_RNA (1)...(19): siRNA sense strand
cauuugaaccacugaauaa

SEQ ID NO: 403378 - RNA, 19 nt, Homo sapiens
  misc_RNA (1)...(19): siRNA sense strand
gaauuggauuacauacugu

SEQ ID NO: 403379 - RNA, 19 nt, Homo sapiens
  misc_RNA (1)...(19): siRNA sense strand
guacugaggauacuugcaa

SEQ ID NO: 403380 - RNA, 19 nt, Homo sapiens
  misc_RNA (1)...(19): siRNA sense strand
gcacgugauuauuccuguu

SEQ ID NO: 403381 - RNA, 19 nt, Homo sapiens
  misc_RNA (1)...(19): siRNA sense strand
cagcaagacugucaagaac

SEQ ID NO: 403382 - RNA, 19 nt, Homo sapiens
  misc_RNA (1)...(19): siRNA sense strand
gcaccucaguucucuggau

SEQ ID NO: 403383 - RNA, 19 nt, Homo sapiens
  misc_RNA (1)...(19): siRNA sense strand
ucaaauuacugucuuccau

SEQ ID NO: 403384 - RNA, 19 nt, Homo sapiens
  misc_RNA (1)...(19): siRNA sense strand
ucaggaugcugguuuauac

SEQ ID NO: 403385 - RNA, 19 nt, Homo sapiens
  misc_RNA (1)...(19): siRNA sense strand
guuguaacucgaagauuua

SEQ ID NO: 403386 - RNA, 19 nt, Homo sapiens
  misc_RNA (1)...(19): siRNA sense strand
cacgaaaggugguugaaca

SEQ ID NO: 403387 - RNA, 19 nt, Homo sapiens
  misc_RNA (1)...(19): siRNA sense strand
uuaccaaaccuaugcagua

SEQ ID NO: 403388 - RNA, 19 nt, Homo sapiens
  misc_RNA (1)...(19): siRNA sense strand
caccucaguucucuggaua

SEQ ID NO: 403389 - RNA, 19 nt, Homo sapiens
  misc_RNA (1)...(19): siRNA sense strand
cauucaggaugcugguuua

SEQ ID NO: 403390 - RNA, 19 nt, Homo sapiens
  misc_RNA (1)...(19): siRNA sense strand
acucuggacuucucaaaga

SEQ ID NO: 403391 - RNA, 19 nt, Homo sapiens
  misc_RNA (1)...(19): siRNA sense strand
uaguacaucucaagcgauu

SEQ ID NO: 403392 - RNA, 19 nt, Homo sapiens
  misc_RNA (1)...(19): siRNA sense strand
uauaaucuccugcucuuga

SEQ ID NO: 403393 - RNA, 19 nt, Homo sapiens
  misc_RNA (1)...(19): siRNA sense strand
gcuguaccacgaaacaaua

SEQ ID NO: 403394 - RNA, 19 nt, Homo sapiens
  misc_RNA (1)...(19): siRNA sense strand
aggaauaccugcagauaag

SEQ ID NO: 403395 - RNA, 19 nt, Homo sapiens
  misc_RNA (1)...(19): siRNA sense strand
gcuaagauuucaguaacau

SEQ ID NO: 403396 - RNA, 19 nt, Homo sapiens
  misc_RNA (1)...(19): siRNA sense strand
caaauguggucuggaaagu

SEQ ID NO: 403397 - RNA, 19 nt, Homo sapiens
  misc_RNA (1)...(19): siRNA sense strand
ccacugaaauugccuauua

SEQ ID NO: 403398 - RNA, 19 nt, Homo sapiens
  misc_RNA (1)...(19): siRNA sense strand
gaaauugccuauuacucuu

SEQ ID NO: 403399 - RNA, 19 nt, Homo sapiens
  misc_RNA (1)...(19): siRNA sense strand
ggaacgcuaugcccuagua

SEQ ID NO: 403400 - RNA, 19 nt, Homo sapiens
  misc_RNA (1)...(19): siRNA sense strand
ggccuuggauuagaaauua

SEQ ID NO: 403401 - RNA, 19 nt, Homo sapiens
  misc_RNA (1)...(19): siRNA sense strand
gauuagaaauuaccacuca

SEQ ID NO: 403402 - RNA, 19 nt, Homo sapiens
  misc_RNA (1)...(19): siRNA sense strand
caaucaaguucucaaguaa

SEQ ID NO: 403403 - RNA, 19 nt, Homo sapiens
  misc_RNA (1)...(19): siRNA sense strand
acaaucaaguucucaagua

SEQ ID NO: 403404 - RNA, 19 nt, Homo sapiens
  misc_RNA (1)...(19): siRNA sense strand
agagggaggucuucaauga

SEQ ID NO: 403405 - RNA, 19 nt, Homo sapiens
  misc_RNA (1)...(19): siRNA sense strand
ggaggccguuucaaccuua

SEQ ID NO: 403406 - RNA, 19 nt, Homo sapiens
  misc_RNA (1)...(19): siRNA sense strand
cagacuaccuccguuauaa

SEQ ID NO: 403407 - RNA, 19 nt, Homo sapiens
  misc_RNA (1)...(19): siRNA sense strand
gaagauccacaaucaaguu

SEQ ID NO: 403408 - RNA, 19 nt, Homo sapiens
  misc_RNA (1)...(19): siRNA sense strand
gcuaugcugcuaucuauaa

SEQ ID NO: 403409 - RNA, 19 nt, Homo sapiens
  misc_RNA (1)...(19): siRNA sense strand
cagaaucaucuacauguua

SEQ ID NO: 403410 - RNA, 19 nt, Homo sapiens
  misc_RNA (1)...(19): siRNA sense strand
gaaauuaccacucaguuuu

SEQ ID NO: 403411 - RNA, 19 nt, Homo sapiens
  misc_RNA (1)...(19): siRNA sense strand
uauguugucuucagaauca

SEQ ID NO: 403412 - RNA, 19 nt, Homo sapiens
  misc_RNA (1)...(19): siRNA sense strand
accagaaagucacaaguua

SEQ ID NO: 403413 - RNA, 19 nt, Homo sapiens
  misc_RNA (1)...(19): siRNA sense strand
ugaaaguacuauggaauga

SEQ ID NO: 403414 - RNA, 19 nt, Homo sapiens
  misc_RNA (1)...(19): siRNA sense strand
gaaagucacaaguuacugu

SEQ ID NO: 403415 - RNA, 19 nt, Homo sapiens
  misc_RNA (1)...(19): siRNA sense strand
ccacagacuaccuccguua

SEQ ID NO: 403416 - RNA, 19 nt, Homo sapiens
  misc_RNA (1)...(19): siRNA sense strand
gagagugaauggcaucaag

SEQ ID NO: 403417 - RNA, 19 nt, Homo sapiens
  misc_RNA (1)...(19): siRNA sense strand
ugaaauuuauccaguaugg

SEQ ID NO: 403418 - RNA, 19 nt, Homo sapiens
  misc_RNA (1)...(19): siRNA sense strand
guuugcaguugguuauaua

SEQ ID NO: 403419 - RNA, 19 nt, Homo sapiens
  misc_RNA (1)...(19): siRNA sense strand
cugaaugucaucucucuua

SEQ ID NO: 403420 - RNA, 19 nt, Homo sapiens
  misc_RNA (1)...(19): siRNA sense strand
gcccuaguauuugguguaa

SEQ ID NO: 403421 - RNA, 19 nt, Homo sapiens
  misc_RNA (1)...(19): siRNA sense strand
acaaguuacugucgaagug

SEQ ID NO: 403422 - RNA, 19 nt, Homo sapiens
  misc_RNA (1)...(19): siRNA sense strand
gcacucaucgcugugguuu

SEQ ID NO: 403423 - RNA, 19 nt, Homo sapiens
  misc_RNA (1)...(19): siRNA sense strand
ucagaaucaucuacauguu

SEQ ID NO: 403424 - RNA, 19 nt, Homo sapiens
  misc_RNA (1)...(19): siRNA sense strand
ucgcuaugcugcuaucuau

SEQ ID NO: 403425 - RNA, 19 nt, Homo sapiens
  misc_RNA (1)...(19): siRNA sense strand
gcuaugcccuaguauuugg

SEQ ID NO: 403426 - RNA, 19 nt, Homo sapiens
  misc_RNA (1)...(19): siRNA sense strand
ucaguguuaugaagaaaug

SEQ ID NO: 403427 - RNA, 19 nt, Homo sapiens
  misc_RNA (1)...(19): siRNA sense strand
ugaaauugccuauuacucu

SEQ ID NO: 403428 - RNA, 19 nt, Homo sapiens
  misc_RNA (1)...(19): siRNA sense strand
agaaauuaccacucaguuu

SEQ ID NO: 403429 - RNA, 19 nt, Homo sapiens
  misc_RNA (1)...(19): siRNA sense strand
ggugugcuaugcauccuau

SEQ ID NO: 403430 - RNA, 19 nt, Homo sapiens
  misc_RNA (1)...(19): siRNA sense strand
ccaguggccuuggauuaga

SEQ ID NO: 403431 - RNA, 19 nt, Homo sapiens
  misc_RNA (1)...(19): siRNA sense strand
acucuuauaucuacagugu

SEQ ID NO: 403432 - RNA, 19 nt, Homo sapiens
  misc_RNA (1)...(19): siRNA sense strand
ggcaaauccuugucucagu

SEQ ID NO: 403433 - RNA, 19 nt, Homo sapiens
  misc_RNA (1)...(19): siRNA sense strand
gcagucaguguuaugaaga

SEQ ID NO: 403434 - RNA, 19 nt, Homo sapiens
  misc_RNA (1)...(19): siRNA sense strand
gugcuacuguuuccugugu

SEQ ID NO: 403435 - RNA, 19 nt, Homo sapiens
  misc_RNA (1)...(19): siRNA sense strand
gcugcucacucuaauugug

SEQ ID NO: 403436 - RNA, 19 nt, Homo sapiens
  misc_RNA (1)...(19): siRNA sense strand
ucaucacgauagcaacuuu

SEQ ID NO: 403437 - RNA, 19 nt, Homo sapiens
  misc_RNA (1)...(19): siRNA sense strand
ccucuucuuucaccacauu

SEQ ID NO: 403438 - RNA, 19 nt, Homo sapiens
  misc_RNA (1)...(19): siRNA sense strand
gacauuaucucucuuuucu

SEQ ID NO: 403439 - RNA, 19 nt, Homo sapiens
  misc_RNA (1)...(19): siRNA sense strand
ggacugcuggccauucaau

SEQ ID NO: 403440 - RNA, 19 nt, Homo sapiens
  misc_RNA (1)...(19): siRNA sense strand
ugaauggcaucaagguaca

SEQ ID NO: 403441 - RNA, 19 nt, Homo sapiens
  misc_RNA (1)...(19): siRNA sense strand
gcucagccuuauuguuaca

SEQ ID NO: 403442 - RNA, 19 nt, Homo sapiens
  misc_RNA (1)...(19): siRNA sense strand
acgcuaugcccuaguauuu

SEQ ID NO: 403443 - RNA, 19 nt, Homo sapiens
  misc_RNA (1)...(19): siRNA sense strand
agaaucaucuacauguuac

SEQ ID NO: 403444 - RNA, 19 nt, Homo sapiens
  misc_RNA (1)...(19): siRNA sense strand
ggacacuguggguaacauu

SEQ ID NO: 403445 - RNA, 19 nt, Homo sapiens
  misc_RNA (1)...(19): siRNA sense strand
gaaaguacuauggaaugau

SEQ ID NO: 403446 - RNA, 19 nt, Homo sapiens
  misc_RNA (1)...(19): siRNA sense strand
gaccgucuccuuguauuga

SEQ ID NO: 403447 - RNA, 19 nt, Homo sapiens
  misc_RNA (1)...(19): siRNA sense strand
cgccacagccacugaaauu

SEQ ID NO: 403448 - RNA, 19 nt, Homo sapiens
  misc_RNA (1)...(19): siRNA sense strand
gccuauuacucuuauaucu

SEQ ID NO: 403449 - RNA, 19 nt, Homo sapiens
  misc_RNA (1)...(19): siRNA sense strand
ggaagauccacaaucaagu

SEQ ID NO: 403450 - RNA, 19 nt, Homo sapiens
  misc_RNA (1)...(19): siRNA sense strand
gcuacuguuuccuguguuc

SEQ ID NO: 403451 - RNA, 19 nt, Homo sapiens
  misc_RNA (1)...(19): siRNA sense strand
guuauaaaccuguuguucu

SEQ ID NO: 403452 - RNA, 19 nt, Homo sapiens
  misc_RNA (1)...(19): siRNA sense strand
gguuuaugcugcucuaugc

SEQ ID NO: 403453 - RNA, 19 nt, Homo sapiens
  misc_RNA (1)...(19): siRNA sense strand
gauccacaaucaaguucuc

SEQ ID NO: 403454 - RNA, 19 nt, Homo sapiens
  misc_RNA (1)...(19): siRNA sense strand
cugcaaaccucagcaugga

SEQ ID NO: 403455 - RNA, 19 nt, Homo sapiens
  misc_RNA (1)...(19): siRNA sense strand
agugaugccuucucgcuau

SEQ ID NO: 403456 - RNA, 19 nt, Homo sapiens
  misc_RNA (1)...(19): siRNA sense strand
gcaggcuggucgcuguuca

SEQ ID NO: 403457 - RNA, 19 nt, Homo sapiens
  misc_RNA (1)...(19): siRNA sense strand
gcuggccauucaauuucua

SEQ ID NO: 403458 - RNA, 19 nt, Homo sapiens
  misc_RNA (1)...(19): siRNA sense strand
ucaucucucuuaccugugu

SEQ ID NO: 403459 - RNA, 19 nt, Homo sapiens
  misc_RNA (1)...(19): siRNA sense strand
acagacuaccuccguuaua

SEQ ID NO: 403460 - RNA, 19 nt, Homo sapiens
  misc_RNA (1)...(19): siRNA sense strand
uaccagaaagucacaaguu

SEQ ID NO: 403461 - RNA, 19 nt, Homo sapiens
  misc_RNA (1)...(19): siRNA sense strand
gagagggaggucuucaaug

SEQ ID NO: 403462 - RNA, 19 nt, Homo sapiens
  misc_RNA (1)...(19): siRNA sense strand
cgagagggaggucuucaau

SEQ ID NO: 403463 - RNA, 19 nt, Homo sapiens
  misc_RNA (1)...(19): siRNA sense strand
cagucaguguuaugaagaa

SEQ ID NO: 403464 - RNA, 19 nt, Homo sapiens
  misc_RNA (1)...(19): siRNA sense strand
gaucuaugccaguuauuuu

SEQ ID NO: 403465 - RNA, 19 nt, Homo sapiens
  misc_RNA (1)...(19): siRNA sense strand
gguguaaauaccuucauug

SEQ ID NO: 403466 - RNA, 19 nt, Homo sapiens
  misc_RNA (1)...(19): siRNA sense strand
ucauggacacuguggguaa

SEQ ID NO: 403467 - RNA, 19 nt, Homo sapiens
  misc_RNA (1)...(19): siRNA sense strand
agacgcugcucacucuaau

SEQ ID NO: 403468 - RNA, 19 nt, Homo sapiens
  misc_RNA (1)...(19): siRNA sense strand
gacacuguggguaacauuu

SEQ ID NO: 403469 - RNA, 19 nt, Homo sapiens
  misc_RNA (1)...(19): siRNA sense strand
ggccaguggugcagucagu

SEQ ID NO: 403470 - RNA, 19 nt, Homo sapiens
  misc_RNA (1)...(19): siRNA sense strand
guauugaaaguacuaugga

SEQ ID NO: 403471 - RNA, 19 nt, Homo sapiens
  misc_RNA (1)...(19): siRNA sense strand
cagacgcugcucacucuaa

SEQ ID NO: 403472 - RNA, 19 nt, Homo sapiens
  misc_RNA (1)...(19): siRNA sense strand
ugguguaaauaccuucauu

SEQ ID NO: 403473 - RNA, 19 nt, Homo sapiens
  misc_RNA (1)...(19): siRNA sense strand
ccuauguugucuucagaau

SEQ ID NO: 403474 - RNA, 19 nt, Homo sapiens
  misc_RNA (1)...(19): siRNA sense strand
aaaauauccuggucaacuu

SEQ ID NO: 403475 - RNA, 19 nt, Homo sapiens
  misc_RNA (1)...(19): siRNA sense strand
cauguuacucaucacgaua

SEQ ID NO: 403476 - RNA, 19 nt, Homo sapiens
  misc_RNA (1)...(19): siRNA sense strand
agacuaccuccguuauaaa

SEQ ID NO: 403477 - RNA, 19 nt, Homo sapiens
  misc_RNA (1)...(19): siRNA sense strand
caugguuuaugcugcucua

SEQ ID NO: 403478 - RNA, 19 nt, Homo sapiens
  misc_RNA (1)...(19): siRNA sense strand
ugaucuaugccaguuauuu

SEQ ID NO: 403479 - RNA, 19 nt, Homo sapiens
  misc_RNA (1)...(19): siRNA sense strand
caguggccuuggauuagaa

SEQ ID NO: 403480 - RNA, 19 nt, Homo sapiens
  misc_RNA (1)...(19): siRNA sense strand
cuacuccucucgcccucuu

SEQ ID NO: 403481 - RNA, 19 nt, Homo sapiens
  misc_RNA (1)...(19): siRNA sense strand
ugaaugucaucucucuuac

SEQ ID NO: 403482 - RNA, 19 nt, Homo sapiens
  misc_RNA (1)...(19): siRNA sense strand
gucacaaguuacugucgaa

SEQ ID NO: 403483 - RNA, 19 nt, Homo sapiens
  misc_RNA (1)...(19): siRNA sense strand
cauccuauguugucuucag

SEQ ID NO: 403484 - RNA, 19 nt, Homo sapiens
  misc_RNA (1)...(19): siRNA sense strand
uuugaucuaugccaguuau

SEQ ID NO: 403485 - RNA, 19 nt, Homo sapiens
  misc_RNA (1)...(19): siRNA sense strand
uagaaauuaccacucaguu

SEQ ID NO: 403486 - RNA, 19 nt, Homo sapiens
  misc_RNA (1)...(19): siRNA sense strand
ccacagccacugaaauugc

SEQ ID NO: 403487 - RNA, 19 nt, Homo sapiens
  misc_RNA (1)...(19): siRNA sense strand
cagccugaaugucaucucu

SEQ ID NO: 403488 - RNA, 19 nt, Homo sapiens
  misc_RNA (1)...(19): siRNA sense strand
uaaaccuguuguucuacug

SEQ ID NO: 403489 - RNA, 19 nt, Homo sapiens
  misc_RNA (1)...(19): siRNA sense strand
augaagaaauguagaaagc

SEQ ID NO: 403490 - RNA, 19 nt, Homo sapiens
  misc_RNA (1)...(19): siRNA sense strand
ggccauucaauuucuagaa

SEQ ID NO: 403491 - RNA, 19 nt, Homo sapiens
  misc_RNA (1)...(19): siRNA sense strand
gaacgcuaugcccuaguau

SEQ ID NO: 403492 - RNA, 19 nt, Homo sapiens
  misc_RNA (1)...(19): siRNA sense strand
gugcuaugcauccuauguu

SEQ ID NO: 403493 - RNA, 19 nt, Homo sapiens
  misc_RNA (1)...(19): siRNA sense strand
ugguggaccugggcaugua

SEQ ID NO: 403494 - RNA, 19 nt, Homo sapiens
  misc_RNA (1)...(19): siRNA sense strand
augauuuccugaugugcua

SEQ ID NO: 403495 - RNA, 19 nt, Homo sapiens
  misc_RNA (1)...(19): siRNA sense strand
gggugcuguugcuguguuu

SEQ ID NO: 403496 - RNA, 19 nt, Homo sapiens
  misc_RNA (1)...(19): siRNA sense strand
gugaugccuucucgcuaug

SEQ ID NO: 403497 - RNA, 19 nt, Homo sapiens
  misc_RNA (1)...(19): siRNA sense strand
gaaaggagguucuaaacua

SEQ ID NO: 403498 - RNA, 19 nt, Homo sapiens
  misc_RNA (1)...(19): siRNA sense strand
ggaagaagcucauuugauu

SEQ ID NO: 403499 - RNA, 19 nt, Homo sapiens
  misc_RNA (1)...(19): siRNA sense strand
gcaaagagguggcaguuaa

SEQ ID NO: 403500 - RNA, 19 nt, Homo sapiens
  misc_RNA (1)...(19): siRNA sense strand
gaugaaagcucuaaagaug

SEQ ID NO: 403501 - RNA, 19 nt, Homo sapiens
  misc_RNA (1)...(19): siRNA sense strand
gagcaucacuugccuuuaa

SEQ ID NO: 403502 - RNA, 19 nt, Homo sapiens
  misc_RNA (1)...(19): siRNA sense strand
gaacugcucuuuaaggauu

SEQ ID NO: 403503 - RNA, 19 nt, Homo sapiens
  misc_RNA (1)...(19): siRNA sense strand
gagaagaaauccuaaaguu

SEQ ID NO: 403504 - RNA, 19 nt, Homo sapiens
  misc_RNA (1)...(19): siRNA sense strand
gagcugggcuucugcauaa

SEQ ID NO: 403505 - RNA, 19 nt, Homo sapiens
  misc_RNA (1)...(19): siRNA sense strand
ggagaagacuuuaccauug

SEQ ID NO: 403506 - RNA, 19 nt, Homo sapiens
  misc_RNA (1)...(19): siRNA sense strand
gaaaugaacuuacaaagac

SEQ ID NO: 403507 - RNA, 19 nt, Homo sapiens
  misc_RNA (1)...(19): siRNA sense strand
gaaauuggaucuuacacuu

SEQ ID NO: 403508 - RNA, 19 nt, Homo sapiens
  misc_RNA (1)...(19): siRNA sense strand
gauggaagcuccugaagaa

SEQ ID NO: 403509 - RNA, 19 nt, Homo sapiens
  misc_RNA (1)...(19): siRNA sense strand
ggaaaucacuugaauacug

SEQ ID NO: 403510 - RNA, 19 nt, Homo sapiens
  misc_RNA (1)...(19): siRNA sense strand
ugaaggagcugcauaaaga

SEQ ID NO: 403511 - RNA, 19 nt, Homo sapiens
  misc_RNA (1)...(19): siRNA sense strand
ggaagucacucaacaguau

SEQ ID NO: 403512 - RNA, 19 nt, Homo sapiens
  misc_RNA (1)...(19): siRNA sense strand
gaugagaaguccuuaggua

SEQ ID NO: 403513 - RNA, 19 nt, Homo sapiens
  misc_RNA (1)...(19): siRNA sense strand
gaucaggaguugcaaguuu

SEQ ID NO: 403514 - RNA, 19 nt, Homo sapiens
  misc_RNA (1)...(19): siRNA sense strand
caagaggagugaaagguua

SEQ ID NO: 403515 - RNA, 19 nt, Homo sapiens
  misc_RNA (1)...(19): siRNA sense strand
gcagauggcuuucaaacug

SEQ ID NO: 403516 - RNA, 19 nt, Homo sapiens
  misc_RNA (1)...(19): siRNA sense strand
uaacagaaauucaggaguu

SEQ ID NO: 403517 - RNA, 19 nt, Homo sapiens
  misc_RNA (1)...(19): siRNA sense strand
gaacaaagcaaaucacuca

SEQ ID NO: 403518 - RNA, 19 nt, Homo sapiens
  misc_RNA (1)...(19): siRNA sense strand
gauaaugacucccaggaaa

SEQ ID NO: 403519 - RNA, 19 nt, Homo sapiens
  misc_RNA (1)...(19): siRNA sense strand
aagaaggacuuguguaaua

SEQ ID NO: 403520 - RNA, 19 nt, Homo sapiens
  misc_RNA (1)...(19): siRNA sense strand
ccacacaaauguagaauug

SEQ ID NO: 403521 - RNA, 19 nt, Homo sapiens
  misc_RNA (1)...(19): siRNA sense strand
gaaaugagcuggagauucc

SEQ ID NO: 403522 - RNA, 19 nt, Homo sapiens
  misc_RNA (1)...(19): siRNA sense strand
gaagagaaugcaucaguua

SEQ ID NO: 403523 - RNA, 19 nt, Homo sapiens
  misc_RNA (1)...(19): siRNA sense strand
gugaaagucugaaucauuu

SEQ ID NO: 403524 - RNA, 19 nt, Homo sapiens
  misc_RNA (1)...(19): siRNA sense strand
ggacaaggcuagaagaauc

SEQ ID NO: 403525 - RNA, 19 nt, Homo sapiens
  misc_RNA (1)...(19): siRNA sense strand
uagccaagcuuguuauuaa

SEQ ID NO: 403526 - RNA, 19 nt, Homo sapiens
  misc_RNA (1)...(19): siRNA sense strand
gaacuucuuucccugguuu

SEQ ID NO: 403527 - RNA, 19 nt, Homo sapiens
  misc_RNA (1)...(19): siRNA sense strand
gcagacagguucaugaaug

SEQ ID NO: 403528 - RNA, 19 nt, Homo sapiens
  misc_RNA (1)...(19): siRNA sense strand
gccagaagaucgcaccuua

SEQ ID NO: 403529 - RNA, 19 nt, Homo sapiens
  misc_RNA (1)...(19): siRNA sense strand
gaggagugauucaagauuu

SEQ ID NO: 403530 - RNA, 19 nt, Homo sapiens
  misc_RNA (1)...(19): siRNA sense strand
ggaaaugaacuuacaaaga

SEQ ID NO: 403531 - RNA, 19 nt, Homo sapiens
  misc_RNA (1)...(19): siRNA sense strand
gaaaucacuugaauacugu

SEQ ID NO: 403532 - RNA, 19 nt, Homo sapiens
  misc_RNA (1)...(19): siRNA sense strand
uauaugagcuccuaggauu

SEQ ID NO: 403533 - RNA, 19 nt, Homo sapiens
  misc_RNA (1)...(19): siRNA sense strand
aagcaaagaucacaacauu

SEQ ID NO: 403534 - RNA, 19 nt, Homo sapiens
  misc_RNA (1)...(19): siRNA sense strand
aaaguagacucaccaaauu

SEQ ID NO: 403535 - RNA, 19 nt, Homo sapiens
  misc_RNA (1)...(19): siRNA sense strand
gaacauggcaggagagaau

SEQ ID NO: 403536 - RNA, 19 nt, Homo sapiens
  misc_RNA (1)...(19): siRNA sense strand
gaagauuguugagaaauug

SEQ ID NO: 403537 - RNA, 19 nt, Homo sapiens
  misc_RNA (1)...(19): siRNA sense strand
gcaggaccgugcaagguua

SEQ ID NO: 403538 - RNA, 19 nt, Homo sapiens
  misc_RNA (1)...(19): siRNA sense strand
ugaaagauguucucaagga

SEQ ID NO: 403539 - RNA, 19 nt, Homo sapiens
  misc_RNA (1)...(19): siRNA sense strand
gagaaugcaucaguuauug

SEQ ID NO: 403540 - RNA, 19 nt, Homo sapiens
  misc_RNA (1)...(19): siRNA sense strand
ggaagagaaugcaucaguu

SEQ ID NO: 403541 - RNA, 19 nt, Homo sapiens
  misc_RNA (1)...(19): siRNA sense strand
aaauauccgucucuucuua

SEQ ID NO: 403542 - RNA, 19 nt, Homo sapiens
  misc_RNA (1)...(19): siRNA sense strand
aaagcuggaucuacauuua

SEQ ID NO: 403543 - RNA, 19 nt, Homo sapiens
  misc_RNA (1)...(19): siRNA sense strand
gaaagauguucucaaggaa

SEQ ID NO: 403544 - RNA, 19 nt, Homo sapiens
  misc_RNA (1)...(19): siRNA sense strand
cuagaagaauggucaauuu

SEQ ID NO: 403545 - RNA, 19 nt, Homo sapiens
  misc_RNA (1)...(19): siRNA sense strand
gaaugaagcucagugacuu

SEQ ID NO: 403546 - RNA, 19 nt, Homo sapiens
  misc_RNA (1)...(19): siRNA sense strand
cagcaugacuucacacuga

SEQ ID NO: 403547 - RNA, 19 nt, Homo sapiens
  misc_RNA (1)...(19): siRNA sense strand
gacacaaccuugaaauuau

SEQ ID NO: 403548 - RNA, 19 nt, Homo sapiens
  misc_RNA (1)...(19): siRNA sense strand
aaacaugucuuucauccaa

SEQ ID NO: 403549 - RNA, 19 nt, Homo sapiens
  misc_RNA (1)...(19): siRNA sense strand
agauagagcugcuaaaugu

SEQ ID NO: 403550 - RNA, 19 nt, Homo sapiens
  misc_RNA (1)...(19): siRNA sense strand
ggucauggauucaagaaau

SEQ ID NO: 403551 - RNA, 19 nt, Homo sapiens
  misc_RNA (1)...(19): siRNA sense strand
gaaagaaacgggccuuaug

SEQ ID NO: 403552 - RNA, 19 nt, Homo sapiens
  misc_RNA (1)...(19): siRNA sense strand
guacaggcuuuaacagaaa

SEQ ID NO: 403553 - RNA, 19 nt, Homo sapiens
  misc_RNA (1)...(19): siRNA sense strand
gcaagaugauguugacaga

SEQ ID NO: 403554 - RNA, 19 nt, Homo sapiens
  misc_RNA (1)...(19): siRNA sense strand
ggaaaucaagagugaguua

SEQ ID NO: 403555 - RNA, 19 nt, Homo sapiens
  misc_RNA (1)...(19): siRNA sense strand
gaaagaagccagagaagca

SEQ ID NO: 403556 - RNA, 19 nt, Homo sapiens
  misc_RNA (1)...(19): siRNA sense strand
gagaagacuuuaccauugu

SEQ ID NO: 403557 - RNA, 19 nt, Homo sapiens
  misc_RNA (1)...(19): siRNA sense strand
gaucaacacggaauuauug

SEQ ID NO: 403558 - RNA, 19 nt, Homo sapiens
  misc_RNA (1)...(19): siRNA sense strand
gcagugcccuuuagagaga

SEQ ID NO: 403559 - RNA, 19 nt, Homo sapiens
  misc_RNA (1)...(19): siRNA sense strand
gcaauauccuuagaagaaa

SEQ ID NO: 403560 - RNA, 19 nt, Homo sapiens
  misc_RNA (1)...(19): siRNA sense strand
cagaugagaccaagaauaa

SEQ ID NO: 403561 - RNA, 19 nt, Homo sapiens
  misc_RNA (1)...(19): siRNA sense strand
gaacuuaagacccagauga

SEQ ID NO: 403562 - RNA, 19 nt, Homo sapiens
  misc_RNA (1)...(19): siRNA sense strand
guugagaaauuggaucuua

SEQ ID NO: 403563 - RNA, 19 nt, Homo sapiens
  misc_RNA (1)...(19): siRNA sense strand
gaaagccauugccagagua

SEQ ID NO: 403564 - RNA, 19 nt, Homo sapiens
  misc_RNA (1)...(19): siRNA sense strand
uuccauggcucguguauua

SEQ ID NO: 403565 - RNA, 19 nt, Homo sapiens
  misc_RNA (1)...(19): siRNA sense strand
ccaagaagaugggcuacua

SEQ ID NO: 403566 - RNA, 19 nt, Homo sapiens
  misc_RNA (1)...(19): siRNA sense strand
cagcuaaaccuaaagauuu

SEQ ID NO: 403567 - RNA, 19 nt, Homo sapiens
  misc_RNA (1)...(19): siRNA sense strand
gagcuguacuuccaguuaa

SEQ ID NO: 403568 - RNA, 19 nt, Homo sapiens
  misc_RNA (1)...(19): siRNA sense strand
aaacgaagcaauauccuua

SEQ ID NO: 403569 - RNA, 19 nt, Homo sapiens
  misc_RNA (1)...(19): siRNA sense strand
acacaaagcuggaucuaca

SEQ ID NO: 403570 - RNA, 19 nt, Homo sapiens
  misc_RNA (1)...(19): siRNA sense strand
gcgaauacuuccaggcuuu

SEQ ID NO: 403571 - RNA, 19 nt, Homo sapiens
  misc_RNA (1)...(19): siRNA sense strand
gcauuggaauuaucucaaa

SEQ ID NO: 403572 - RNA, 19 nt, Homo sapiens
  misc_RNA (1)...(19): siRNA sense strand
ggagaaagguacaacuaca

SEQ ID NO: 403573 - RNA, 19 nt, Homo sapiens
  misc_RNA (1)...(19): siRNA sense strand
gauugaaguuuccuagauu

SEQ ID NO: 403574 - RNA, 19 nt, Homo sapiens
  misc_RNA (1)...(19): siRNA sense strand
ggaaacauaucuaccuuac

SEQ ID NO: 403575 - RNA, 19 nt, Homo sapiens
  misc_RNA (1)...(19): siRNA sense strand
acauagagaugaugaaaga

SEQ ID NO: 403576 - RNA, 19 nt, Homo sapiens
  misc_RNA (1)...(19): siRNA sense strand
agacacaaccuugaaauua

SEQ ID NO: 403577 - RNA, 19 nt, Homo sapiens
  misc_RNA (1)...(19): siRNA sense strand
gaaauccaauaguaccauu

SEQ ID NO: 403578 - RNA, 19 nt, Homo sapiens
  misc_RNA (1)...(19): siRNA sense strand
ccacagauuugcaucauuc

SEQ ID NO: 403579 - RNA, 19 nt, Homo sapiens
  misc_RNA (1)...(19): siRNA sense strand
gaagcaauauccuuagaag

SEQ ID NO: 403580 - RNA, 19 nt, Homo sapiens
  misc_RNA (1)...(19): siRNA sense strand
caacauucgugcccaagaa

SEQ ID NO: 403581 - RNA, 19 nt, Homo sapiens
  misc_RNA (1)...(19): siRNA sense strand
gaauguggaucaagaugga

SEQ ID NO: 403582 - RNA, 19 nt, Homo sapiens
  misc_RNA (1)...(19): siRNA sense strand
agaaggaaaucaagaguga

SEQ ID NO: 403583 - RNA, 19 nt, Homo sapiens
  misc_RNA (1)...(19): siRNA sense strand
uuacagagauccagaaagu

SEQ ID NO: 403584 - RNA, 19 nt, Homo sapiens
  misc_RNA (1)...(19): siRNA sense strand
ggacuuauacuucgauaug

SEQ ID NO: 403585 - RNA, 19 nt, Homo sapiens
  misc_RNA (1)...(19): siRNA sense strand
cccuaaagaugaaguguua

SEQ ID NO: 403586 - RNA, 19 nt, Homo sapiens
  misc_RNA (1)...(19): siRNA sense strand
guucagagcuauucauaca

SEQ ID NO: 403587 - RNA, 19 nt, Homo sapiens
  misc_RNA (1)...(19): siRNA sense strand
ugucuucccugucauauuu

SEQ ID NO: 403588 - RNA, 19 nt, Homo sapiens
  misc_RNA (1)...(19): siRNA sense strand
gaacuuacaaagacauuga

SEQ ID NO: 403589 - RNA, 19 nt, Homo sapiens
  misc_RNA (1)...(19): siRNA sense strand
caaauccauugaacucuuu

SEQ ID NO: 403590 - RNA, 19 nt, Homo sapiens
  misc_RNA (1)...(19): siRNA sense strand
gacaguacuuuaagagauu

SEQ ID NO: 403591 - RNA, 19 nt, Homo sapiens
  misc_RNA (1)...(19): siRNA sense strand
guaccaguguuuauacaaa

SEQ ID NO: 403592 - RNA, 19 nt, Homo sapiens
  misc_RNA (1)...(19): siRNA sense strand
aaucugauguuaccaauga

SEQ ID NO: 403593 - RNA, 19 nt, Homo sapiens
  misc_RNA (1)...(19): siRNA sense strand
ggaaagccauugccagagu

SEQ ID NO: 403594 - RNA, 19 nt, Homo sapiens
  misc_RNA (1)...(19): siRNA sense strand
gaagccagauugaaguuuc

SEQ ID NO: 403595 - RNA, 19 nt, Homo sapiens
  misc_RNA (1)...(19): siRNA sense strand
caaaguagacucaccaaau

SEQ ID NO: 403596 - RNA, 19 nt, Homo sapiens
  misc_RNA (1)...(19): siRNA sense strand
uugcaucccuugacuguua

SEQ ID NO: 403597 - RNA, 19 nt, Homo sapiens
  misc_RNA (1)...(19): siRNA sense strand
gaacaacucucagcagaau

SEQ ID NO: 403598 - RNA, 19 nt, Homo sapiens
  misc_RNA (1)...(19): siRNA sense strand
agaagcaucuuucaugaua

SEQ ID NO: 403599 - RNA, 19 nt, Homo sapiens
  misc_RNA (1)...(19): siRNA sense strand
gaaaguacauugaacaacu

SEQ ID NO: 403600 - RNA, 19 nt, Homo sapiens
  misc_RNA (1)...(19): siRNA sense strand
caacaauccugguaucaga

SEQ ID NO: 403601 - RNA, 19 nt, Homo sapiens
  misc_RNA (1)...(19): siRNA sense strand
gaacaucacagcaaugaga

SEQ ID NO: 403602 - RNA, 19 nt, Homo sapiens
  misc_RNA (1)...(19): siRNA sense strand
gaaguccaguaaauucuuu

SEQ ID NO: 403603 - RNA, 19 nt, Homo sapiens
  misc_RNA (1)...(19): siRNA sense strand
gcaaugagagaauacuaua

SEQ ID NO: 403604 - RNA, 19 nt, Homo sapiens
  misc_RNA (1)...(19): siRNA sense strand
guacuacggcccaaauaua

SEQ ID NO: 403605 - RNA, 19 nt, Homo sapiens
  misc_RNA (1)...(19): siRNA sense strand
uguaaggccuuucagauuu

SEQ ID NO: 403606 - RNA, 19 nt, Homo sapiens
  misc_RNA (1)...(19): siRNA sense strand
gaucaucagucuaaacaca

SEQ ID NO: 403607 - RNA, 19 nt, Homo sapiens
  misc_RNA (1)...(19): siRNA sense strand
ggagaagguguauaucaua

SEQ ID NO: 403608 - RNA, 19 nt, Homo sapiens
  misc_RNA (1)...(19): siRNA sense strand
ucacagcaaugagagaaua

SEQ ID NO: 403609 - RNA, 19 nt, Homo sapiens
  misc_RNA (1)...(19): siRNA sense strand
ucuggaagcuggaguauau

SEQ ID NO: 403610 - RNA, 19 nt, Homo sapiens
  misc_RNA (1)...(19): siRNA sense strand
gcaaaccucuggaaaccau

SEQ ID NO: 403611 - RNA, 19 nt, Homo sapiens
  misc_RNA (1)...(19): siRNA sense strand
ccaaauauaaugacacuga

SEQ ID NO: 403612 - RNA, 19 nt, Homo sapiens
  misc_RNA (1)...(19): siRNA sense strand
gagaagguguauaucauag

SEQ ID NO: 403613 - RNA, 19 nt, Homo sapiens
  misc_RNA (1)...(19): siRNA sense strand
gacaguaagcaguuuauaa

SEQ ID NO: 403614 - RNA, 19 nt, Homo sapiens
  misc_RNA (1)...(19): siRNA sense strand
gaugaagaagcuauuagua

SEQ ID NO: 403615 - RNA, 19 nt, Homo sapiens
  misc_RNA (1)...(19): siRNA sense strand
guaaggccuuucagauuug

SEQ ID NO: 403616 - RNA, 19 nt, Homo sapiens
  misc_RNA (1)...(19): siRNA sense strand
ugacagaggcgaaucuaaa

SEQ ID NO: 403617 - RNA, 19 nt, Homo sapiens
  misc_RNA (1)...(19): siRNA sense strand
gaagguguauaucauagca

SEQ ID NO: 403618 - RNA, 19 nt, Homo sapiens
  misc_RNA (1)...(19): siRNA sense strand
ccaguaaauucuuuguuug

SEQ ID NO: 403619 - RNA, 19 nt, Homo sapiens
  misc_RNA (1)...(19): siRNA sense strand
uggauauguugcaguauua

SEQ ID NO: 403620 - RNA, 19 nt, Homo sapiens
  misc_RNA (1)...(19): siRNA sense strand
gcauuaugguucuuucaga

SEQ ID NO: 403621 - RNA, 19 nt, Homo sapiens
  misc_RNA (1)...(19): siRNA sense strand
ugacagcaguguaacaugu

SEQ ID NO: 403622 - RNA, 19 nt, Homo sapiens
  misc_RNA (1)...(19): siRNA sense strand
ccuacgacauugaagauuu

SEQ ID NO: 403623 - RNA, 19 nt, Homo sapiens
  misc_RNA (1)...(19): siRNA sense strand
gauucuccauaucaacuua

SEQ ID NO: 403624 - RNA, 19 nt, Homo sapiens
  misc_RNA (1)...(19): siRNA sense strand
uaccugaacucucaacaga

SEQ ID NO: 403625 - RNA, 19 nt, Homo sapiens
  misc_RNA (1)...(19): siRNA sense strand
ccucaaacagcuuuauaua

SEQ ID NO: 403626 - RNA, 19 nt, Homo sapiens
  misc_RNA (1)...(19): siRNA sense strand
ggagauguucugugugauu

SEQ ID NO: 403627 - RNA, 19 nt, Homo sapiens
  misc_RNA (1)...(19): siRNA sense strand
ugaagaagcuauuaguacu

SEQ ID NO: 403628 - RNA, 19 nt, Homo sapiens
  misc_RNA (1)...(19): siRNA sense strand
gaagcaucuuucaugauau

SEQ ID NO: 403629 - RNA, 19 nt, Homo sapiens
  misc_RNA (1)...(19): siRNA sense strand
ccaguaaaguguacaaugc

SEQ ID NO: 403630 - RNA, 19 nt, Homo sapiens
  misc_RNA (1)...(19): siRNA sense strand
uauuggauauguugcagua

SEQ ID NO: 403631 - RNA, 19 nt, Homo sapiens
  misc_RNA (1)...(19): siRNA sense strand
gaagaagcuauuaguacuu

SEQ ID NO: 403632 - RNA, 19 nt, Homo sapiens
  misc_RNA (1)...(19): siRNA sense strand
ucacagaugaccacacaaa

SEQ ID NO: 403633 - RNA, 19 nt, Homo sapiens
  misc_RNA (1)...(19): siRNA sense strand
guaugauccucgugauuau

SEQ ID NO: 403634 - RNA, 19 nt, Homo sapiens
  misc_RNA (1)...(19): siRNA sense strand
ucacagagacagcauuaug

SEQ ID NO: 403635 - RNA, 19 nt, Homo sapiens
  misc_RNA (1)...(19): siRNA sense strand
gagauguucugugugauuc

SEQ ID NO: 403636 - RNA, 19 nt, Homo sapiens
  misc_RNA (1)...(19): siRNA sense strand
cagacacuguuauaaaugu

SEQ ID NO: 403637 - RNA, 19 nt, Homo sapiens
  misc_RNA (1)...(19): siRNA sense strand
gugcaauuaugaaucuuga

SEQ ID NO: 403638 - RNA, 19 nt, Homo sapiens
  misc_RNA (1)...(19): siRNA sense strand
cuacgacauugaagauuug

SEQ ID NO: 403639 - RNA, 19 nt, Homo sapiens
  misc_RNA (1)...(19): siRNA sense strand
uaaaguguacaaugcagua

SEQ ID NO: 403640 - RNA, 19 nt, Homo sapiens
  misc_RNA (1)...(19): siRNA sense strand
ucacagaacaucacagcaa

SEQ ID NO: 403641 - RNA, 19 nt, Homo sapiens
  misc_RNA (1)...(19): siRNA sense strand
ugacugacuuacacuuaga

SEQ ID NO: 403642 - RNA, 19 nt, Homo sapiens
  misc_RNA (1)...(19): siRNA sense strand
cuaugcagauugccucaaa

SEQ ID NO: 403643 - RNA, 19 nt, Homo sapiens
  misc_RNA (1)...(19): siRNA sense strand
uaagacauguaaggccuuu

SEQ ID NO: 403644 - RNA, 19 nt, Homo sapiens
  misc_RNA (1)...(19): siRNA sense strand
gaaaccauggcuagaugaa

SEQ ID NO: 403645 - RNA, 19 nt, Homo sapiens
  misc_RNA (1)...(19): siRNA sense strand
ucagauuugugcaauuaug

SEQ ID NO: 403646 - RNA, 19 nt, Homo sapiens
  misc_RNA (1)...(19): siRNA sense strand
gcuauuaguacuuuaagga

SEQ ID NO: 403647 - RNA, 19 nt, Homo sapiens
  misc_RNA (1)...(19): siRNA sense strand
aaccauggcuagaugaaga

SEQ ID NO: 403648 - RNA, 19 nt, Homo sapiens
  misc_RNA (1)...(19): siRNA sense strand
agaauaaggagaaggugua

SEQ ID NO: 403649 - RNA, 19 nt, Homo sapiens
  misc_RNA (1)...(19): siRNA sense strand
ccggaaaguuuauauggau

SEQ ID NO: 403650 - RNA, 19 nt, Homo sapiens
  misc_RNA (1)...(19): siRNA sense strand
gagagaauacuauaaugag

SEQ ID NO: 403651 - RNA, 19 nt, Homo sapiens
  misc_RNA (1)...(19): siRNA sense strand
aguaugauccucgugauua

SEQ ID NO: 403652 - RNA, 19 nt, Homo sapiens
  misc_RNA (1)...(19): siRNA sense strand
cuacuuaccacaucacaga

SEQ ID NO: 403653 - RNA, 19 nt, Homo sapiens
  misc_RNA (1)...(19): siRNA sense strand
gccggaaaguuuauaugga

SEQ ID NO: 403654 - RNA, 19 nt, Homo sapiens
  misc_RNA (1)...(19): siRNA sense strand
ggaaguccaguaaauucuu

SEQ ID NO: 403655 - RNA, 19 nt, Homo sapiens
  misc_RNA (1)...(19): siRNA sense strand
aaaaggaaguccaguaaau

SEQ ID NO: 403656 - RNA, 19 nt, Homo sapiens
  misc_RNA (1)...(19): siRNA sense strand
acaacucucagcagaauaa

SEQ ID NO: 403657 - RNA, 19 nt, Homo sapiens
  misc_RNA (1)...(19): siRNA sense strand
guacauugaacaacucuca

SEQ ID NO: 403658 - RNA, 19 nt, Homo sapiens
  misc_RNA (1)...(19): siRNA sense strand
gcuagaaaguacauugaac

SEQ ID NO: 403659 - RNA, 19 nt, Homo sapiens
  misc_RNA (1)...(19): siRNA sense strand
acaacuaauccaaaccuua

SEQ ID NO: 403660 - RNA, 19 nt, Homo sapiens
  misc_RNA (1)...(19): siRNA sense strand
uuggagauguucuguguga

SEQ ID NO: 403661 - RNA, 19 nt, Homo sapiens
  misc_RNA (1)...(19): siRNA sense strand
aaaggaaguccaguaaauu

SEQ ID NO: 403662 - RNA, 19 nt, Homo sapiens
  misc_RNA (1)...(19): siRNA sense strand
auaaggagaagguguauau

SEQ ID NO: 403663 - RNA, 19 nt, Homo sapiens
  misc_RNA (1)...(19): siRNA sense strand
caguuugaauggcuagaaa

SEQ ID NO: 403664 - RNA, 19 nt, Homo sapiens
  misc_RNA (1)...(19): siRNA sense strand
ggaaaccauggcuagauga

SEQ ID NO: 403665 - RNA, 19 nt, Homo sapiens
  misc_RNA (1)...(19): siRNA sense strand
ccugaacucucaacagaca

SEQ ID NO: 403666 - RNA, 19 nt, Homo sapiens
  misc_RNA (1)...(19): siRNA sense strand
aagcaucuuucaugauaug

SEQ ID NO: 403667 - RNA, 19 nt, Homo sapiens
  misc_RNA (1)...(19): siRNA sense strand
uguaacaugugauaagaca

SEQ ID NO: 403668 - RNA, 19 nt, Homo sapiens
  misc_RNA (1)...(19): siRNA sense strand
cagaacaucacagcaauga

SEQ ID NO: 403669 - RNA, 19 nt, Homo sapiens
  misc_RNA (1)...(19): siRNA sense strand
gcaugugacugacuuacac

SEQ ID NO: 403670 - RNA, 19 nt, Homo sapiens
  misc_RNA (1)...(19): siRNA sense strand
ugacccagccaaccaguuu

SEQ ID NO: 403671 - RNA, 19 nt, Homo sapiens
  misc_RNA (1)...(19): siRNA sense strand
ggauagcccaccucauguu

SEQ ID NO: 403672 - RNA, 19 nt, Homo sapiens
  misc_RNA (1)...(19): siRNA sense strand
caaccaccauccagagucu

SEQ ID NO: 403673 - RNA, 19 nt, Homo sapiens
  misc_RNA (1)...(19): siRNA sense strand
gaagauuugcagccggaaa

SEQ ID NO: 403674 - RNA, 19 nt, Homo sapiens
  misc_RNA (1)...(19): siRNA sense strand
cacagaacaucacagcaau

SEQ ID NO: 403675 - RNA, 19 nt, Homo sapiens
  misc_RNA (1)...(19): siRNA sense strand
uaaugacacugaacaagac

SEQ ID NO: 403676 - RNA, 19 nt, Homo sapiens
  misc_RNA (1)...(19): siRNA sense strand
uggaaaccauggcuagaug

SEQ ID NO: 403677 - RNA, 19 nt, Homo sapiens
  misc_RNA (1)...(19): siRNA sense strand
gcuggguaaucaugacuau

SEQ ID NO: 403678 - RNA, 19 nt, Homo sapiens
  misc_RNA (1)...(19): siRNA sense strand
ucaucagucuaaacacaaa

SEQ ID NO: 403679 - RNA, 19 nt, Homo sapiens
  misc_RNA (1)...(19): siRNA sense strand
uuggauauguugcaguauu

SEQ ID NO: 403680 - RNA, 19 nt, Homo sapiens
  misc_RNA (1)...(19): siRNA sense strand
gcccaaauauaaugacacu

SEQ ID NO: 403681 - RNA, 19 nt, Homo sapiens
  misc_RNA (1)...(19): siRNA sense strand
uacuacggcccaaauauaa

SEQ ID NO: 403682 - RNA, 19 nt, Homo sapiens
  misc_RNA (1)...(19): siRNA sense strand
cggaaaguuuauauggauu

SEQ ID NO: 403683 - RNA, 19 nt, Homo sapiens
  misc_RNA (1)...(19): siRNA sense strand
gugacugacuuacacuuag

SEQ ID NO: 403684 - RNA, 19 nt, Homo sapiens
  misc_RNA (1)...(19): siRNA sense strand
gacccagaccuacgacauu

SEQ ID NO: 403685 - RNA, 19 nt, Homo sapiens
  misc_RNA (1)...(19): siRNA sense strand
ggacaguuuuggcauguga

SEQ ID NO: 403686 - RNA, 19 nt, Homo sapiens
  misc_RNA (1)...(19): siRNA sense strand
gaauaaggagaagguguau

SEQ ID NO: 403687 - RNA, 19 nt, Homo sapiens
  misc_RNA (1)...(19): siRNA sense strand
uggguaaucaugacuauug

SEQ ID NO: 403688 - RNA, 19 nt, Homo sapiens
  misc_RNA (1)...(19): siRNA sense strand
cauuaugguucuuucagau

SEQ ID NO: 403689 - RNA, 19 nt, Homo sapiens
  misc_RNA (1)...(19): siRNA sense strand
gagacagcauuaugguucu

SEQ ID NO: 403690 - RNA, 19 nt, Homo sapiens
  misc_RNA (1)...(19): siRNA sense strand
guagucaccaguaaagugu

SEQ ID NO: 403691 - RNA, 19 nt, Homo sapiens
  misc_RNA (1)...(19): siRNA sense strand
gaucaacugccuguaguca

SEQ ID NO: 403692 - RNA, 19 nt, Homo sapiens
  misc_RNA (1)...(19): siRNA sense strand
guacaaugcaguagcaaac

SEQ ID NO: 403693 - RNA, 19 nt, Homo sapiens
  misc_RNA (1)...(19): siRNA sense strand
guuuguggcuccugcuguu

SEQ ID NO: 403694 - RNA, 19 nt, Homo sapiens
  misc_RNA (1)...(19): siRNA sense strand
uugaauggcuagaaaguac

SEQ ID NO: 403695 - RNA, 19 nt, Homo sapiens
  misc_RNA (1)...(19): siRNA sense strand
auaaugacacugaacaaga

SEQ ID NO: 403696 - RNA, 19 nt, Homo sapiens
  misc_RNA (1)...(19): siRNA sense strand
uaucauagcacauguucca

SEQ ID NO: 403697 - RNA, 19 nt, Homo sapiens
  misc_RNA (1)...(19): siRNA sense strand
ggaauuagcugaagaacuu

SEQ ID NO: 403698 - RNA, 19 nt, Homo sapiens
  misc_RNA (1)...(19): siRNA sense strand
ccaaacagaucacaucaua

SEQ ID NO: 403699 - RNA, 19 nt, Homo sapiens
  misc_RNA (1)...(19): siRNA sense strand
gauaaagacugcugaagaa

SEQ ID NO: 403700 - RNA, 19 nt, Homo sapiens
  misc_RNA (1)...(19): siRNA sense strand
gaaguuugcugaggcauuu

SEQ ID NO: 403701 - RNA, 19 nt, Homo sapiens
  misc_RNA (1)...(19): siRNA sense strand
agacauggcucuucauuau

SEQ ID NO: 403702 - RNA, 19 nt, Homo sapiens
  misc_RNA (1)...(19): siRNA sense strand
ccaaugaaguaaucucuaa

SEQ ID NO: 403703 - RNA, 19 nt, Homo sapiens
  misc_RNA (1)...(19): siRNA sense strand
gcuggaagcugguauucua

SEQ ID NO: 403704 - RNA, 19 nt, Homo sapiens
  misc_RNA (1)...(19): siRNA sense strand
cuacagcucuuccuagauu

SEQ ID NO: 403705 - RNA, 19 nt, Homo sapiens
  misc_RNA (1)...(19): siRNA sense strand
aaagacugcugaagaauug

SEQ ID NO: 403706 - RNA, 19 nt, Homo sapiens
  misc_RNA (1)...(19): siRNA sense strand
ggagggagcgaaacacuuu

SEQ ID NO: 403707 - RNA, 19 nt, Homo sapiens
  misc_RNA (1)...(19): siRNA sense strand
cagaaaagcucaugagauu

SEQ ID NO: 403708 - RNA, 19 nt, Homo sapiens
  misc_RNA (1)...(19): siRNA sense strand
cuucguaccuccauaauga

SEQ ID NO: 403709 - RNA, 19 nt, Homo sapiens
  misc_RNA (1)...(19): siRNA sense strand
uguaauggcuucucauaug

SEQ ID NO: 403710 - RNA, 19 nt, Homo sapiens
  misc_RNA (1)...(19): siRNA sense strand
uaagagaacuagaaguaca

SEQ ID NO: 403711 - RNA, 19 nt, Homo sapiens
  misc_RNA (1)...(19): siRNA sense strand
guaccuccauaaugaguaa

SEQ ID NO: 403712 - RNA, 19 nt, Homo sapiens
  misc_RNA (1)...(19): siRNA sense strand
aaacagaucacaucauaug

SEQ ID NO: 403713 - RNA, 19 nt, Homo sapiens
  misc_RNA (1)...(19): siRNA sense strand
ggaaaccgaaggugaugua

SEQ ID NO: 403714 - RNA, 19 nt, Homo sapiens
  misc_RNA (1)...(19): siRNA sense strand
gaaauagccugcagaaaag

SEQ ID NO: 403715 - RNA, 19 nt, Homo sapiens
  misc_RNA (1)...(19): siRNA sense strand
cuaucaaacucgcuacuaa

SEQ ID NO: 403716 - RNA, 19 nt, Homo sapiens
  misc_RNA (1)...(19): siRNA sense strand
gauaacaucagaguuugua

SEQ ID NO: 403717 - RNA, 19 nt, Homo sapiens
  misc_RNA (1)...(19): siRNA sense strand
gaagaaagacugggaugau

SEQ ID NO: 403718 - RNA, 19 nt, Homo sapiens
  misc_RNA (1)...(19): siRNA sense strand
gaaggaaaccgaaggugau

SEQ ID NO: 403719 - RNA, 19 nt, Homo sapiens
  misc_RNA (1)...(19): siRNA sense strand
gaagcugguauucuagaua

SEQ ID NO: 403720 - RNA, 19 nt, Homo sapiens
  misc_RNA (1)...(19): siRNA sense strand
ugaagucccugcuguaaag

SEQ ID NO: 403721 - RNA, 19 nt, Homo sapiens
  misc_RNA (1)...(19): siRNA sense strand
gcaguguacucuuguccuu

SEQ ID NO: 403722 - RNA, 19 nt, Homo sapiens
  misc_RNA (1)...(19): siRNA sense strand
gaacaguaugcuauuaaga

SEQ ID NO: 403723 - RNA, 19 nt, Homo sapiens
  misc_RNA (1)...(19): siRNA sense strand
ggauuggccugucaguuuc

SEQ ID NO: 403724 - RNA, 19 nt, Homo sapiens
  misc_RNA (1)...(19): siRNA sense strand
gcacaagucaaagcuauug

SEQ ID NO: 403725 - RNA, 19 nt, Homo sapiens
  misc_RNA (1)...(19): siRNA sense strand
aaauagcaguguacucuug

SEQ ID NO: 403726 - RNA, 19 nt, Homo sapiens
  misc_RNA (1)...(19): siRNA sense strand
gaagaggcuguguauagaa

SEQ ID NO: 403727 - RNA, 19 nt, Homo sapiens
  misc_RNA (1)...(19): siRNA sense strand
uagaagaggcuguguauag

SEQ ID NO: 403728 - RNA, 19 nt, Homo sapiens
  misc_RNA (1)...(19): siRNA sense strand
ucugauggaugacauagaa

SEQ ID NO: 403729 - RNA, 19 nt, Homo sapiens
  misc_RNA (1)...(19): siRNA sense strand
ucaaagcuauugcugauac

SEQ ID NO: 403730 - RNA, 19 nt, Homo sapiens
  misc_RNA (1)...(19): siRNA sense strand
uaaagacugcugaagaauu

SEQ ID NO: 403731 - RNA, 19 nt, Homo sapiens
  misc_RNA (1)...(19): siRNA sense strand
gaaacuaagggaacagugu

SEQ ID NO: 403732 - RNA, 19 nt, Homo sapiens
  misc_RNA (1)...(19): siRNA sense strand
agaagaggcuguguauaga

SEQ ID NO: 403733 - RNA, 19 nt, Homo sapiens
  misc_RNA (1)...(19): siRNA sense strand
gcucuucauuaugcaaaua

SEQ ID NO: 403734 - RNA, 19 nt, Homo sapiens
  misc_RNA (1)...(19): siRNA sense strand
ggaaugaacaaaaugguua

SEQ ID NO: 403735 - RNA, 19 nt, Homo sapiens
  misc_RNA (1)...(19): siRNA sense strand
gaaaugggacacugugaca

SEQ ID NO: 403736 - RNA, 19 nt, Homo sapiens
  misc_RNA (1)...(19): siRNA sense strand
ugaaauagccugcagaaaa

SEQ ID NO: 403737 - RNA, 19 nt, Homo sapiens
  misc_RNA (1)...(19): siRNA sense strand
cucaugagauucuuccuaa

SEQ ID NO: 403738 - RNA, 19 nt, Homo sapiens
  misc_RNA (1)...(19): siRNA sense strand
gcagacauggcucuucauu

SEQ ID NO: 403739 - RNA, 19 nt, Homo sapiens
  misc_RNA (1)...(19): siRNA sense strand
gacaaacgaugcagcaacu

SEQ ID NO: 403740 - RNA, 19 nt, Homo sapiens
  misc_RNA (1)...(19): siRNA sense strand
guacaucaagaaggaaaua

SEQ ID NO: 403741 - RNA, 19 nt, Homo sapiens
  misc_RNA (1)...(19): siRNA sense strand
ggacuugaacaguaugcua

SEQ ID NO: 403742 - RNA, 19 nt, Homo sapiens
  misc_RNA (1)...(19): siRNA sense strand
ugaauuagccaaacagauc

SEQ ID NO: 403743 - RNA, 19 nt, Homo sapiens
  misc_RNA (1)...(19): siRNA sense strand
ggagguggagcaacagaaa

SEQ ID NO: 403744 - RNA, 19 nt, Homo sapiens
  misc_RNA (1)...(19): siRNA sense strand
caugagauucuuccuaauu

SEQ ID NO: 403745 - RNA, 19 nt, Homo sapiens
  misc_RNA (1)...(19): siRNA sense strand
gcucaggcaugcguaucua

SEQ ID NO: 403746 - RNA, 19 nt, Homo sapiens
  misc_RNA (1)...(19): siRNA sense strand
ggaagaaagacugggauga

SEQ ID NO: 403747 - RNA, 19 nt, Homo sapiens
  misc_RNA (1)...(19): siRNA sense strand
ggaagcugguauucuagau

SEQ ID NO: 403748 - RNA, 19 nt, Homo sapiens
  misc_RNA (1)...(19): siRNA sense strand
acgaugguguuaauacuuu

SEQ ID NO: 403749 - RNA, 19 nt, Homo sapiens
  misc_RNA (1)...(19): siRNA sense strand
ugacauagaaaggguagua

SEQ ID NO: 403750 - RNA, 19 nt, Homo sapiens
  misc_RNA (1)...(19): siRNA sense strand
ugacaguguuuaccucuca

SEQ ID NO: 403751 - RNA, 19 nt, Homo sapiens
  misc_RNA (1)...(19): siRNA sense strand
ugauaaagacugcugaaga

SEQ ID NO: 403752 - RNA, 19 nt, Homo sapiens
  misc_RNA (1)...(19): siRNA sense strand
agacugggaugaugaccaa

SEQ ID NO: 403753 - RNA, 19 nt, Homo sapiens
  misc_RNA (1)...(19): siRNA sense strand
aagaggcuguguauagaaa

SEQ ID NO: 403754 - RNA, 19 nt, Homo sapiens
  misc_RNA (1)...(19): siRNA sense strand
gguaguagacgaugguguu

SEQ ID NO: 403755 - RNA, 19 nt, Homo sapiens
  misc_RNA (1)...(19): siRNA sense strand
cagaggucauagaagguua

SEQ ID NO: 403756 - RNA, 19 nt, Homo sapiens
  misc_RNA (1)...(19): siRNA sense strand
cgccauuucuaccauagua

SEQ ID NO: 403757 - RNA, 19 nt, Homo sapiens
  misc_RNA (1)...(19): siRNA sense strand
gaucuccgaagacuuugua

SEQ ID NO: 403758 - RNA, 19 nt, Homo sapiens
  misc_RNA (1)...(19): siRNA sense strand
ccucauggaugcacaaguc

SEQ ID NO: 403759 - RNA, 19 nt, Homo sapiens
  misc_RNA (1)...(19): siRNA sense strand
caguuccucuucaguauug

SEQ ID NO: 403760 - RNA, 19 nt, Homo sapiens
  misc_RNA (1)...(19): siRNA sense strand
guaauggcuucucauaugc

SEQ ID NO: 403761 - RNA, 19 nt, Homo sapiens
  misc_RNA (1)...(19): siRNA sense strand
uuggagaaguuguuuguga

SEQ ID NO: 403762 - RNA, 19 nt, Homo sapiens
  misc_RNA (1)...(19): siRNA sense strand
uaaggccaaugaaguaauc

SEQ ID NO: 403763 - RNA, 19 nt, Homo sapiens
  misc_RNA (1)...(19): siRNA sense strand
uaucaguuccucuucagua

SEQ ID NO: 403764 - RNA, 19 nt, Homo sapiens
  misc_RNA (1)...(19): siRNA sense strand
ugagauucuuccuaauuug

SEQ ID NO: 403765 - RNA, 19 nt, Homo sapiens
  misc_RNA (1)...(19): siRNA sense strand
gcugaggcauuugaagcua

SEQ ID NO: 403766 - RNA, 19 nt, Homo sapiens
  misc_RNA (1)...(19): siRNA sense strand
aaccgaaggugauguaaca

SEQ ID NO: 403767 - RNA, 19 nt, Homo sapiens
  misc_RNA (1)...(19): siRNA sense strand
gauucuuccuaauuuggua

SEQ ID NO: 403768 - RNA, 19 nt, Homo sapiens
  misc_RNA (1)...(19): siRNA sense strand
guacuuagaguggaucaga

SEQ ID NO: 403769 - RNA, 19 nt, Homo sapiens
  misc_RNA (1)...(19): siRNA sense strand
gcugaagucccugcuguaa

SEQ ID NO: 403770 - RNA, 19 nt, Homo sapiens
  misc_RNA (1)...(19): siRNA sense strand
cuugaacaguaugcuauua

SEQ ID NO: 403771 - RNA, 19 nt, Homo sapiens
  misc_RNA (1)...(19): siRNA sense strand
aguaacagguggcaaagug

SEQ ID NO: 403772 - RNA, 19 nt, Homo sapiens
  misc_RNA (1)...(19): siRNA sense strand
agucaaagcuauugcugau

SEQ ID NO: 403773 - RNA, 19 nt, Homo sapiens
  misc_RNA (1)...(19): siRNA sense strand
cagacauggcucuucauua

SEQ ID NO: 403774 - RNA, 19 nt, Homo sapiens
  misc_RNA (1)...(19): siRNA sense strand
caaacgaugcagcaacuau

SEQ ID NO: 403775 - RNA, 19 nt, Homo sapiens
  misc_RNA (1)...(19): siRNA sense strand
aagaaagacugggaugaug

SEQ ID NO: 403776 - RNA, 19 nt, Homo sapiens
  misc_RNA (1)...(19): siRNA sense strand
caaacucgcuacuaaugcu

SEQ ID NO: 403777 - RNA, 19 nt, Homo sapiens
  misc_RNA (1)...(19): siRNA sense strand
auacuuaccugggaaaaua

SEQ ID NO: 403778 - RNA, 19 nt, Homo sapiens
  misc_RNA (1)...(19): siRNA sense strand
gcucaugagauucuuccua

SEQ ID NO: 403779 - RNA, 19 nt, Homo sapiens
  misc_RNA (1)...(19): siRNA sense strand
gauuagaagaggcugugua

SEQ ID NO: 403780 - RNA, 19 nt, Homo sapiens
  misc_RNA (1)...(19): siRNA sense strand
aggauuggccugucaguuu

SEQ ID NO: 403781 - RNA, 19 nt, Homo sapiens
  misc_RNA (1)...(19): siRNA sense strand
gaauuagccaaacagauca

SEQ ID NO: 403782 - RNA, 19 nt, Homo sapiens
  misc_RNA (1)...(19): siRNA sense strand
guaguagacgaugguguua

SEQ ID NO: 403783 - RNA, 19 nt, Homo sapiens
  misc_RNA (1)...(19): siRNA sense strand
aaaccacucguacagcaua

SEQ ID NO: 403784 - RNA, 19 nt, Homo sapiens
  misc_RNA (1)...(19): siRNA sense strand
gugcaaaugucguaguaac

SEQ ID NO: 403785 - RNA, 19 nt, Homo sapiens
  misc_RNA (1)...(19): siRNA sense strand
ggcuguguauagaaacaua

SEQ ID NO: 403786 - RNA, 19 nt, Homo sapiens
  misc_RNA (1)...(19): siRNA sense strand
guguuuaccucucagaagu

SEQ ID NO: 403787 - RNA, 19 nt, Homo sapiens
  misc_RNA (1)...(19): siRNA sense strand
uggcagacauggcucuuca

SEQ ID NO: 403788 - RNA, 19 nt, Homo sapiens
  misc_RNA (1)...(19): siRNA sense strand
gauggcaugauaacagaaa

SEQ ID NO: 403789 - RNA, 19 nt, Homo sapiens
  misc_RNA (1)...(19): siRNA sense strand
agauauugaugaagucuca

SEQ ID NO: 403790 - RNA, 19 nt, Homo sapiens
  misc_RNA (1)...(19): siRNA sense strand
gcaagagcaagaaguugga

SEQ ID NO: 403791 - RNA, 19 nt, Homo sapiens
  misc_RNA (1)...(19): siRNA sense strand
ugaggcauuugaagcuauu

SEQ ID NO: 403792 - RNA, 19 nt, Homo sapiens
  misc_RNA (1)...(19): siRNA sense strand
ugaacaguaugcuauuaag

SEQ ID NO: 403793 - RNA, 19 nt, Homo sapiens
  misc_RNA (1)...(19): siRNA sense strand
aaacgaugcagcaacuauu

SEQ ID NO: 403794 - RNA, 19 nt, Homo sapiens
  misc_RNA (1)...(19): siRNA sense strand
agaaagacugggaugauga

SEQ ID NO: 403795 - RNA, 19 nt, Homo sapiens
  misc_RNA (1)...(19): siRNA sense strand
gaguuaaggccaaugaagu

SEQ ID NO: 403796 - RNA, 19 nt, Homo sapiens
  misc_RNA (1)...(19): siRNA sense strand
ggaguuaaggccaaugaag

SEQ ID NO: 403797 - RNA, 19 nt, Homo sapiens
  misc_RNA (1)...(19): siRNA sense strand
ggaauuagcccacauggua

SEQ ID NO: 403798 - RNA, 19 nt, Homo sapiens
  misc_RNA (1)...(19): siRNA sense strand
gaggaugaguacagauuua

SEQ ID NO: 403799 - RNA, 19 nt, Homo sapiens
  misc_RNA (1)...(19): siRNA sense strand
gcacaaacccuagcuaaau

SEQ ID NO: 403800 - RNA, 19 nt, Homo sapiens
  misc_RNA (1)...(19): siRNA sense strand
ccaagagaguuagaaauaa

SEQ ID NO: 403801 - RNA, 19 nt, Homo sapiens
  misc_RNA (1)...(19): siRNA sense strand
caacaaauaccucaggaaa

SEQ ID NO: 403802 - RNA, 19 nt, Homo sapiens
  misc_RNA (1)...(19): siRNA sense strand
gccaggcauucaucaauua

SEQ ID NO: 403803 - RNA, 19 nt, Homo sapiens
  misc_RNA (1)...(19): siRNA sense strand
auaacuaccucgacaagua

SEQ ID NO: 403804 - RNA, 19 nt, Homo sapiens
  misc_RNA (1)...(19): siRNA sense strand
ggagaaacaguucaaguug

SEQ ID NO: 403805 - RNA, 19 nt, Homo sapiens
  misc_RNA (1)...(19): siRNA sense strand
ugacaaagaaguaguagaa

SEQ ID NO: 403806 - RNA, 19 nt, Homo sapiens
  misc_RNA (1)...(19): siRNA sense strand
ggauaagugugaacugaau

SEQ ID NO: 403807 - RNA, 19 nt, Homo sapiens
  misc_RNA (1)...(19): siRNA sense strand
gcacacauguagagaccuu

SEQ ID NO: 403808 - RNA, 19 nt, Homo sapiens
  misc_RNA (1)...(19): siRNA sense strand
caagagaguuagaaauaag

SEQ ID NO: 403809 - RNA, 19 nt, Homo sapiens
  misc_RNA (1)...(19): siRNA sense strand
gcaagugagggaaguagua

SEQ ID NO: 403810 - RNA, 19 nt, Homo sapiens
  misc_RNA (1)...(19): siRNA sense strand
gagaagcagacaucauuaa

SEQ ID NO: 403811 - RNA, 19 nt, Homo sapiens
  misc_RNA (1)...(19): siRNA sense strand
gaaaucaggcucugggaau

SEQ ID NO: 403812 - RNA, 19 nt, Homo sapiens
  misc_RNA (1)...(19): siRNA sense strand
ugaaagcuauagccagauu

SEQ ID NO: 403813 - RNA, 19 nt, Homo sapiens
  misc_RNA (1)...(19): siRNA sense strand
gaagacgggaggaugagua

SEQ ID NO: 403814 - RNA, 19 nt, Homo sapiens
  misc_RNA (1)...(19): siRNA sense strand
cuaagaaggugcuuucagu

SEQ ID NO: 403815 - RNA, 19 nt, Homo sapiens
  misc_RNA (1)...(19): siRNA sense strand
acgaggaggugaaguauug

SEQ ID NO: 403816 - RNA, 19 nt, Homo sapiens
  misc_RNA (1)...(19): siRNA sense strand
gaggugaaguauuggauuc

SEQ ID NO: 403817 - RNA, 19 nt, Homo sapiens
  misc_RNA (1)...(19): siRNA sense strand
guagagaccuuuguaucau

SEQ ID NO: 403818 - RNA, 19 nt, Homo sapiens
  misc_RNA (1)...(19): siRNA sense strand
gaagcagacucaaagaaaa

SEQ ID NO: 403819 - RNA, 19 nt, Homo sapiens
  misc_RNA (1)...(19): siRNA sense strand
ggaaauaagaaaucagcaa

SEQ ID NO: 403820 - RNA, 19 nt, Homo sapiens
  misc_RNA (1)...(19): siRNA sense strand
gaauugucuuucuggauga

SEQ ID NO: 403821 - RNA, 19 nt, Homo sapiens
  misc_RNA (1)...(19): siRNA sense strand
cacaaacccuagcuaaaug

SEQ ID NO: 403822 - RNA, 19 nt, Homo sapiens
  misc_RNA (1)...(19): siRNA sense strand
gaauuagcccacaugguaa

SEQ ID NO: 403823 - RNA, 19 nt, Homo sapiens
  misc_RNA (1)...(19): siRNA sense strand
ugagggaaguaguaagaaa

SEQ ID NO: 403824 - RNA, 19 nt, Homo sapiens
  misc_RNA (1)...(19): siRNA sense strand
agaaacaccagcauacuuu

SEQ ID NO: 403825 - RNA, 19 nt, Homo sapiens
  misc_RNA (1)...(19): siRNA sense strand
caaagaaguaguagaagga

SEQ ID NO: 403826 - RNA, 19 nt, Homo sapiens
  misc_RNA (1)...(19): siRNA sense strand
gacucaggcuggauaugua

SEQ ID NO: 403827 - RNA, 19 nt, Homo sapiens
  misc_RNA (1)...(19): siRNA sense strand
ugaagcagacucaaagaaa

SEQ ID NO: 403828 - RNA, 19 nt, Homo sapiens
  misc_RNA (1)...(19): siRNA sense strand
caagaugccaauuauaaug

SEQ ID NO: 403829 - RNA, 19 nt, Homo sapiens
  misc_RNA (1)...(19): siRNA sense strand
aagcagagguugagaagca

SEQ ID NO: 403830 - RNA, 19 nt, Homo sapiens
  misc_RNA (1)...(19): siRNA sense strand
uaggaaggcuugggacauu

SEQ ID NO: 403831 - RNA, 19 nt, Homo sapiens
  misc_RNA (1)...(19): siRNA sense strand
ggagguugacaaagaagua

SEQ ID NO: 403832 - RNA, 19 nt, Homo sapiens
  misc_RNA (1)...(19): siRNA sense strand
gccacgaaaugcuguuauu

SEQ ID NO: 403833 - RNA, 19 nt, Homo sapiens
  misc_RNA (1)...(19): siRNA sense strand
uaaagaugguucuggagau

SEQ ID NO: 403834 - RNA, 19 nt, Homo sapiens
  misc_RNA (1)...(19): siRNA sense strand
guguggagguugacaaaga

SEQ ID NO: 403835 - RNA, 19 nt, Homo sapiens
  misc_RNA (1)...(19): siRNA sense strand
ggaugaaguagauaagauu

SEQ ID NO: 403836 - RNA, 19 nt, Homo sapiens
  misc_RNA (1)...(19): siRNA sense strand
caacagguaaaucaacaaa

SEQ ID NO: 403837 - RNA, 19 nt, Homo sapiens
  misc_RNA (1)...(19): siRNA sense strand
uaagaagacgggaggauga

SEQ ID NO: 403838 - RNA, 19 nt, Homo sapiens
  misc_RNA (1)...(19): siRNA sense strand
gaucgguuauugcgucaug

SEQ ID NO: 403839 - RNA, 19 nt, Homo sapiens
  misc_RNA (1)...(19): siRNA sense strand
uccaagaugccaauuauaa

SEQ ID NO: 403840 - RNA, 19 nt, Homo sapiens
  misc_RNA (1)...(19): siRNA sense strand
ggaggaugaguacagauuu

SEQ ID NO: 403841 - RNA, 19 nt, Homo sapiens
  misc_RNA (1)...(19): siRNA sense strand
caaaagaugggauaaguaa

SEQ ID NO: 403842 - RNA, 19 nt, Homo sapiens
  misc_RNA (1)...(19): siRNA sense strand
gauuggcacuagaacgaaa

SEQ ID NO: 403843 - RNA, 19 nt, Homo sapiens
  misc_RNA (1)...(19): siRNA sense strand
ggaaucgaauacucaccaa

SEQ ID NO: 403844 - RNA, 19 nt, Homo sapiens
  misc_RNA (1)...(19): siRNA sense strand
gaagcagacaucauuaaca

SEQ ID NO: 403845 - RNA, 19 nt, Homo sapiens
  misc_RNA (1)...(19): siRNA sense strand
ggagauggaaauaagaaau

SEQ ID NO: 403846 - RNA, 19 nt, Homo sapiens
  misc_RNA (1)...(19): siRNA sense strand
uagauaagauuggcagugu

SEQ ID NO: 403847 - RNA, 19 nt, Homo sapiens
  misc_RNA (1)...(19): siRNA sense strand
accaagagaguuagaaaua

SEQ ID NO: 403848 - RNA, 19 nt, Homo sapiens
  misc_RNA (1)...(19): siRNA sense strand
aauaagaaaucagcaagug

SEQ ID NO: 403849 - RNA, 19 nt, Homo sapiens
  misc_RNA (1)...(19): siRNA sense strand
gaaaagcuguuacuagaac

SEQ ID NO: 403850 - RNA, 19 nt, Homo sapiens
  misc_RNA (1)...(19): siRNA sense strand
uggcaugauuccugaguuu

SEQ ID NO: 403851 - RNA, 19 nt, Homo sapiens
  misc_RNA (1)...(19): siRNA sense strand
gauugaguuuggcaugauu

SEQ ID NO: 403852 - RNA, 19 nt, Homo sapiens
  misc_RNA (1)...(19): siRNA sense strand
guuauugcgucauguggaa

SEQ ID NO: 403853 - RNA, 19 nt, Homo sapiens
  misc_RNA (1)...(19): siRNA sense strand
gaaacaccagcauacuuug

SEQ ID NO: 403854 - RNA, 19 nt, Homo sapiens
  misc_RNA (1)...(19): siRNA sense strand
guuacuagaaccaauguuu

SEQ ID NO: 403855 - RNA, 19 nt, Homo sapiens
  misc_RNA (1)...(19): siRNA sense strand
gccagucauuugcuaagaa

SEQ ID NO: 403856 - RNA, 19 nt, Homo sapiens
  misc_RNA (1)...(19): siRNA sense strand
uuacagaaacaccagcaua

SEQ ID NO: 403857 - RNA, 19 nt, Homo sapiens
  misc_RNA (1)...(19): siRNA sense strand
gaaaagaauucccgaaagc

SEQ ID NO: 403858 - RNA, 19 nt, Homo sapiens
  misc_RNA (1)...(19): siRNA sense strand
uaucccagcuaaucugaga

SEQ ID NO: 403859 - RNA, 19 nt, Homo sapiens
  misc_RNA (1)...(19): siRNA sense strand
aauagucaauguuccagaa

SEQ ID NO: 403860 - RNA, 19 nt, Homo sapiens
  misc_RNA (1)...(19): siRNA sense strand
ccucuuagauccuuuacag

SEQ ID NO: 403861 - RNA, 19 nt, Homo sapiens
  misc_RNA (1)...(19): siRNA sense strand
ugagaagcagacaucauua

SEQ ID NO: 403862 - RNA, 19 nt, Homo sapiens
  misc_RNA (1)...(19): siRNA sense strand
cuuagauccuuuacagaaa

SEQ ID NO: 403863 - RNA, 19 nt, Homo sapiens
  misc_RNA (1)...(19): siRNA sense strand
ucaccaagacauugaagaa

SEQ ID NO: 403864 - RNA, 19 nt, Homo sapiens
  misc_RNA (1)...(19): siRNA sense strand
guucagcaaggcuuauuaa

SEQ ID NO: 403865 - RNA, 19 nt, Homo sapiens
  misc_RNA (1)...(19): siRNA sense strand
acuccaagaugccaauuau

SEQ ID NO: 403866 - RNA, 19 nt, Homo sapiens
  misc_RNA (1)...(19): siRNA sense strand
gagauggaaauaagaaauc

SEQ ID NO: 403867 - RNA, 19 nt, Homo sapiens
  misc_RNA (1)...(19): siRNA sense strand
gagaucugauugaguuugg

SEQ ID NO: 403868 - RNA, 19 nt, Homo sapiens
  misc_RNA (1)...(19): siRNA sense strand
cugcagaccuugcuaaucg

SEQ ID NO: 403869 - RNA, 19 nt, Homo sapiens
  misc_RNA (1)...(19): siRNA sense strand
gaugaguacagauuuacaa

SEQ ID NO: 403870 - RNA, 19 nt, Homo sapiens
  misc_RNA (1)...(19): siRNA sense strand
gggaggaugaguacagauu

SEQ ID NO: 403871 - RNA, 19 nt, Homo sapiens
  misc_RNA (1)...(19): siRNA sense strand
gagcuccucuuagauccuu

SEQ ID NO: 403872 - RNA, 19 nt, Homo sapiens
  misc_RNA (1)...(19): siRNA sense strand
gaugggauaaguaaagaug

SEQ ID NO: 403873 - RNA, 19 nt, Homo sapiens
  misc_RNA (1)...(19): siRNA sense strand
caagugagggaaguaguaa

SEQ ID NO: 403874 - RNA, 19 nt, Homo sapiens
  misc_RNA (1)...(19): siRNA sense strand
gcaagcagagguugagaag

SEQ ID NO: 403875 - RNA, 19 nt, Homo sapiens
  misc_RNA (1)...(19): siRNA sense strand
gaauacucaccaagacauu

SEQ ID NO: 403876 - RNA, 19 nt, Homo sapiens
  misc_RNA (1)...(19): siRNA sense strand
ggauuuggaacaccaucua

SEQ ID NO: 403877 - RNA, 19 nt, Homo sapiens
  misc_RNA (1)...(19): siRNA sense strand
gaugaaguagauaagauug

SEQ ID NO: 403878 - RNA, 19 nt, Homo sapiens
  misc_RNA (1)...(19): siRNA sense strand
aaagaugguucuggagaug

SEQ ID NO: 403879 - RNA, 19 nt, Homo sapiens
  misc_RNA (1)...(19): siRNA sense strand
ggauauguaggcgaagaua

SEQ ID NO: 403880 - RNA, 19 nt, Homo sapiens
  misc_RNA (1)...(19): siRNA sense strand
cuagcuaaaugccuugaug

SEQ ID NO: 403881 - RNA, 19 nt, Homo sapiens
  misc_RNA (1)...(19): siRNA sense strand
gguggucgcauucauaugu

SEQ ID NO: 403882 - RNA, 19 nt, Homo sapiens
  misc_RNA (1)...(19): siRNA sense strand
caaaauugcuucagauugc

SEQ ID NO: 403883 - RNA, 19 nt, Homo sapiens
  misc_RNA (1)...(19): siRNA sense strand
ugaagucccuaauucugau

SEQ ID NO: 403884 - RNA, 19 nt, Homo sapiens
  misc_RNA (1)...(19): siRNA sense strand
uggaaaagcuguuacuaga

SEQ ID NO: 403885 - RNA, 19 nt, Homo sapiens
  misc_RNA (1)...(19): siRNA sense strand
cuagaaggcacaauaguca

SEQ ID NO: 403886 - RNA, 19 nt, Homo sapiens
  misc_RNA (1)...(19): siRNA sense strand
cagcaaggcuuauuaaaac

SEQ ID NO: 403887 - RNA, 19 nt, Homo sapiens
  misc_RNA (1)...(19): siRNA sense strand
ccaagaugccaauuauaau

SEQ ID NO: 403888 - RNA, 19 nt, Homo sapiens
  misc_RNA (1)...(19): siRNA sense strand
guauuggauucuucucaug

SEQ ID NO: 403889 - RNA, 19 nt, Homo sapiens
  misc_RNA (1)...(19): siRNA sense strand
ggaggugaaguauuggauu

SEQ ID NO: 403890 - RNA, 19 nt, Homo sapiens
  misc_RNA (1)...(19): siRNA sense strand
aaaucaggcucugggaauu

SEQ ID NO: 403891 - RNA, 19 nt, Homo sapiens
  misc_RNA (1)...(19): siRNA sense strand
uaucguauguguggagguu

SEQ ID NO: 403892 - RNA, 19 nt, Homo sapiens
  misc_RNA (1)...(19): siRNA sense strand
cagaaacaccagcauacuu

SEQ ID NO: 403893 - RNA, 19 nt, Homo sapiens
  misc_RNA (1)...(19): siRNA sense strand
ggaaggcuugggacauuug

SEQ ID NO: 403894 - RNA, 19 nt, Homo sapiens
  misc_RNA (1)...(19): siRNA sense strand
gcauucauaugucaguuuu

SEQ ID NO: 403895 - RNA, 19 nt, Homo sapiens
  misc_RNA (1)...(19): siRNA sense strand
uaacuaccucgacaaguau

SEQ ID NO: 403896 - RNA, 19 nt, Homo sapiens
  misc_RNA (1)...(19): siRNA sense strand
gaagucccuaauucugaua

SEQ ID NO: 403897 - RNA, 19 nt, Homo sapiens
  misc_RNA (1)...(19): siRNA sense strand
gggcaaaccucuuuauuua

SEQ ID NO: 403898 - RNA, 19 nt, Homo sapiens
  misc_RNA (1)...(19): siRNA sense strand
gaaauguuaucucugcuaa

SEQ ID NO: 403899 - RNA, 19 nt, Homo sapiens
  misc_RNA (1)...(19): siRNA sense strand
gaugaaaccugcagauagu

SEQ ID NO: 403900 - RNA, 19 nt, Homo sapiens
  misc_RNA (1)...(19): siRNA sense strand
gaagaaauguaaugagaac

SEQ ID NO: 403901 - RNA, 19 nt, Homo sapiens
  misc_RNA (1)...(19): siRNA sense strand
gcuaaagucuucauugaca

SEQ ID NO: 403902 - RNA, 19 nt, Homo sapiens
  misc_RNA (1)...(19): siRNA sense strand
gaguaaagguuguuguuuc

SEQ ID NO: 403903 - RNA, 19 nt, Homo sapiens
  misc_RNA (1)...(19): siRNA sense strand
caugaaugcuuuacaguug

SEQ ID NO: 403904 - RNA, 19 nt, Homo sapiens
  misc_RNA (1)...(19): siRNA sense strand
uaaagguuguuguuucgua

SEQ ID NO: 403905 - RNA, 19 nt, Homo sapiens
  misc_RNA (1)...(19): siRNA sense strand
gcucaaaugcucucaggua

SEQ ID NO: 403906 - RNA, 19 nt, Homo sapiens
  misc_RNA (1)...(19): siRNA sense strand
gaacggagcuuuggaucac

SEQ ID NO: 403907 - RNA, 19 nt, Homo sapiens
  misc_RNA (1)...(19): siRNA sense strand
ucgaagaaauguaaugaga

SEQ ID NO: 403908 - RNA, 19 nt, Homo sapiens
  misc_RNA (1)...(19): siRNA sense strand
caaaugcucucagguaugg

SEQ ID NO: 403909 - RNA, 19 nt, Homo sapiens
  misc_RNA (1)...(19): siRNA sense strand
gcucguuccugacagaauu

SEQ ID NO: 403910 - RNA, 19 nt, Homo sapiens
  misc_RNA (1)...(19): siRNA sense strand
caagggcaauggcacagaa

SEQ ID NO: 403911 - RNA, 19 nt, Homo sapiens
  misc_RNA (1)...(19): siRNA sense strand
gcaaaccucuuuauuuacc

SEQ ID NO: 403912 - RNA, 19 nt, Homo sapiens
  misc_RNA (1)...(19): siRNA sense strand
ggaaauguuaucucugcua

SEQ ID NO: 403913 - RNA, 19 nt, Homo sapiens
  misc_RNA (1)...(19): siRNA sense strand
gcacagccaacaagaugaa

SEQ ID NO: 403914 - RNA, 19 nt, Homo sapiens
  misc_RNA (1)...(19): siRNA sense strand
cagaugccauuaagauguu

SEQ ID NO: 403915 - RNA, 19 nt, Homo sapiens
  misc_RNA (1)...(19): siRNA sense strand
gugauguucucuccauuug

SEQ ID NO: 403916 - RNA, 19 nt, Homo sapiens
  misc_RNA (1)...(19): siRNA sense strand
cugcuaaagucuucauuga

SEQ ID NO: 403917 - RNA, 19 nt, Homo sapiens
  misc_RNA (1)...(19): siRNA sense strand
acucaggaauucaacagua

SEQ ID NO: 403918 - RNA, 19 nt, Homo sapiens
  misc_RNA (1)...(19): siRNA sense strand
gcagcucgcucagcagaug

SEQ ID NO: 403919 - RNA, 19 nt, Homo sapiens
  misc_RNA (1)...(19): siRNA sense strand
uaggaaugguuucgaagaa

SEQ ID NO: 403920 - RNA, 19 nt, Homo sapiens
  misc_RNA (1)...(19): siRNA sense strand
caacaaauggcaggcauga

SEQ ID NO: 403921 - RNA, 19 nt, Homo sapiens
  misc_RNA (1)...(19): siRNA sense strand
gagggcugcucuucaccua

SEQ ID NO: 403922 - RNA, 19 nt, Homo sapiens
  misc_RNA (1)...(19): siRNA sense strand
aaagguuguuguuucguaa

SEQ ID NO: 403923 - RNA, 19 nt, Homo sapiens
  misc_RNA (1)...(19): siRNA sense strand
gccacaggcuugacgaaug

SEQ ID NO: 403924 - RNA, 19 nt, Homo sapiens
  misc_RNA (1)...(19): siRNA sense strand
ucauaggaaugguuucgaa

SEQ ID NO: 403925 - RNA, 19 nt, Homo sapiens
  misc_RNA (1)...(19): siRNA sense strand
ccacaggcuugacgaaugg

SEQ ID NO: 403926 - RNA, 19 nt, Homo sapiens
  misc_RNA (1)...(19): siRNA sense strand
gcacagaaugcaaucaaag

SEQ ID NO: 403927 - RNA, 19 nt, Homo sapiens
  misc_RNA (1)...(19): siRNA sense strand
caagaugaacggagcuuug

SEQ ID NO: 403928 - RNA, 19 nt, Homo sapiens
  misc_RNA (1)...(19): siRNA sense strand
gcuugaaggugcagcugaa

SEQ ID NO: 403929 - RNA, 19 nt, Homo sapiens
  misc_RNA (1)...(19): siRNA sense strand
gggcugcucuucaccuauc

SEQ ID NO: 403930 - RNA, 19 nt, Homo sapiens
  misc_RNA (1)...(19): siRNA sense strand
cgacagcaaaccuuacuga

SEQ ID NO: 403931 - RNA, 19 nt, Homo sapiens
  misc_RNA (1)...(19): siRNA sense strand
cagaugaaaccugcagaua

SEQ ID NO: 403932 - RNA, 19 nt, Homo sapiens
  misc_RNA (1)...(19): siRNA sense strand
ggcacagaaugcaaucaaa

SEQ ID NO: 403933 - RNA, 19 nt, Homo sapiens
  misc_RNA (1)...(19): siRNA sense strand
acaaauggcaggcaugaau

SEQ ID NO: 403934 - RNA, 19 nt, Homo sapiens
  misc_RNA (1)...(19): siRNA sense strand
ggugauguucucuccauuu

SEQ ID NO: 403935 - RNA, 19 nt, Homo sapiens
  misc_RNA (1)...(19): siRNA sense strand
cgaagaaauguaaugagaa

SEQ ID NO: 403936 - RNA, 19 nt, Homo sapiens
  misc_RNA (1)...(19): siRNA sense strand
agaccaaucugagcaagug

SEQ ID NO: 403937 - RNA, 19 nt, Homo sapiens
  misc_RNA (1)...(19): siRNA sense strand
gugcagccaugaacuccuu

SEQ ID NO: 403938 - RNA, 19 nt, Homo sapiens
  misc_RNA (1)...(19): siRNA sense strand
ccagaugccauuaagaugu

SEQ ID NO: 403939 - RNA, 19 nt, Homo sapiens
  misc_RNA (1)...(19): siRNA sense strand
acuguuggacugaauaaua

SEQ ID NO: 403940 - RNA, 19 nt, Homo sapiens
  misc_RNA (1)...(19): siRNA sense strand
aaaaggagcugaaagaacu

SEQ ID NO: 403941 - RNA, 19 nt, Homo sapiens
  misc_RNA (1)...(19): siRNA sense strand
cuguuggacugaauaauau

SEQ ID NO: 403942 - RNA, 19 nt, Homo sapiens
  misc_RNA (1)...(19): siRNA sense strand
gcacuugaggcccagaaug

SEQ ID NO: 403943 - RNA, 19 nt, Homo sapiens
  misc_RNA (1)...(19): siRNA sense strand
ggagccgucuaccagauca

SEQ ID NO: 403944 - RNA, 19 nt, Homo sapiens
  misc_RNA (1)...(19): siRNA sense strand
gcaugaaacgcuugaaggu

SEQ ID NO: 403945 - RNA, 19 nt, Homo sapiens
  misc_RNA (1)...(19): siRNA sense strand
aauguuaucucugcuaaag

SEQ ID NO: 403946 - RNA, 19 nt, Homo sapiens
  misc_RNA (1)...(19): siRNA sense strand
caaauggcaggcaugaaug

SEQ ID NO: 403947 - RNA, 19 nt, Homo sapiens
  misc_RNA (1)...(19): siRNA sense strand
gacagaaaauuguucauag

SEQ ID NO: 403948 - RNA, 19 nt, Homo sapiens
  misc_RNA (1)...(19): siRNA sense strand
gcacugcacaauauuaaaa

SEQ ID NO: 403949 - RNA, 19 nt, Homo sapiens
  misc_RNA (1)...(19): siRNA sense strand
gcaauggcacagaaugcaa

SEQ ID NO: 403950 - RNA, 19 nt, Homo sapiens
  misc_RNA (1)...(19): siRNA sense strand
gaaaccugcagauagugaa

SEQ ID NO: 403951 - RNA, 19 nt, Homo sapiens
  misc_RNA (1)...(19): siRNA sense strand
cuaaagucuucauugacaa

SEQ ID NO: 403952 - RNA, 19 nt, Homo sapiens
  misc_RNA (1)...(19): siRNA sense strand
ugcacaagcugcuauccaa

SEQ ID NO: 403953 - RNA, 19 nt, Homo sapiens
  misc_RNA (1)...(19): siRNA sense strand
cagaguaaagguuguuguu

SEQ ID NO: 403954 - RNA, 19 nt, Homo sapiens
  misc_RNA (1)...(19): siRNA sense strand
acacucagaaggacaaaga

SEQ ID NO: 403955 - RNA, 19 nt, Homo sapiens
  misc_RNA (1)...(19): siRNA sense strand
gagucgaggcugugcguuu

SEQ ID NO: 403956 - RNA, 19 nt, Homo sapiens
  misc_RNA (1)...(19): siRNA sense strand
cucaaaugcucucagguau

SEQ ID NO: 403957 - RNA, 19 nt, Homo sapiens
  misc_RNA (1)...(19): siRNA sense strand
cuacgacaauccagucucu

SEQ ID NO: 403958 - RNA, 19 nt, Homo sapiens
  misc_RNA (1)...(19): siRNA sense strand
uaucucugcuaaagucuuc

SEQ ID NO: 403959 - RNA, 19 nt, Homo sapiens
  misc_RNA (1)...(19): siRNA sense strand
guucaugccuuuuggaaau

SEQ ID NO: 403960 - RNA, 19 nt, Homo sapiens
  misc_RNA (1)...(19): siRNA sense strand
gaugaacggagcuuuggau

SEQ ID NO: 403961 - RNA, 19 nt, Homo sapiens
  misc_RNA (1)...(19): siRNA sense strand
agacccagaugccauuaag

SEQ ID NO: 403962 - RNA, 19 nt, Homo sapiens
  misc_RNA (1)...(19): siRNA sense strand
uguuaucucugcuaaaguc

SEQ ID NO: 403963 - RNA, 19 nt, Homo sapiens
  misc_RNA (1)...(19): siRNA sense strand
cggcacagccaacaagaug

SEQ ID NO: 403964 - RNA, 19 nt, Homo sapiens
  misc_RNA (1)...(19): siRNA sense strand
gagcuuuggaucacucaga

SEQ ID NO: 403965 - RNA, 19 nt, Homo sapiens
  misc_RNA (1)...(19): siRNA sense strand
guaaugagaacgacaucag

SEQ ID NO: 403966 - RNA, 19 nt, Homo sapiens
  misc_RNA (1)...(19): siRNA sense strand
ccacuguuggacugaauaa

SEQ ID NO: 403967 - RNA, 19 nt, Homo sapiens
  misc_RNA (1)...(19): siRNA sense strand
ucagcggcauucaacaaau

SEQ ID NO: 403968 - RNA, 19 nt, Homo sapiens
  misc_RNA (1)...(19): siRNA sense strand
guucagcggcauucaacaa

SEQ ID NO: 403969 - RNA, 19 nt, Homo sapiens
  misc_RNA (1)...(19): siRNA sense strand
ucagaacccuccgcagagu

SEQ ID NO: 403970 - RNA, 19 nt, Homo sapiens
  misc_RNA (1)...(19): siRNA sense strand
ugaaaccugcagauaguga

SEQ ID NO: 403971 - RNA, 19 nt, Homo sapiens
  misc_RNA (1)...(19): siRNA sense strand
ggggcaaaccucuuuauuu

SEQ ID NO: 403972 - RNA, 19 nt, Homo sapiens
  misc_RNA (1)...(19): siRNA sense strand
caaucaaagccaugcauca

SEQ ID NO: 403973 - RNA, 19 nt, Homo sapiens
  misc_RNA (1)...(19): siRNA sense strand
gagccacuguuggacugaa

SEQ ID NO: 403974 - RNA, 19 nt, Homo sapiens
  misc_RNA (1)...(19): siRNA sense strand
aagaaaagcugcacuugag

SEQ ID NO: 403975 - RNA, 19 nt, Homo sapiens
  misc_RNA (1)...(19): siRNA sense strand
gcugcuauccaagcuauga

SEQ ID NO: 403976 - RNA, 19 nt, Homo sapiens
  misc_RNA (1)...(19): siRNA sense strand
ggaaaaggagcugaaagaa

SEQ ID NO: 403977 - RNA, 19 nt, Homo sapiens
  misc_RNA (1)...(19): siRNA sense strand
uaacggcacagccaacaag

SEQ ID NO: 403978 - RNA, 19 nt, Homo sapiens
  misc_RNA (1)...(19): siRNA sense strand
agaugaaaccugcagauag

SEQ ID NO: 403979 - RNA, 19 nt, Homo sapiens
  misc_RNA (1)...(19): siRNA sense strand
agaaauguaaugagaacga

SEQ ID NO: 403980 - RNA, 19 nt, Homo sapiens
  misc_RNA (1)...(19): siRNA sense strand
agaacccuccgcagaguaa

SEQ ID NO: 403981 - RNA, 19 nt, Homo sapiens
  misc_RNA (1)...(19): siRNA sense strand
agaguaaagguuguuguuu

SEQ ID NO: 403982 - RNA, 19 nt, Homo sapiens
  misc_RNA (1)...(19): siRNA sense strand
ucagaaggacaaagagcaa

SEQ ID NO: 403983 - RNA, 19 nt, Homo sapiens
  misc_RNA (1)...(19): siRNA sense strand
agucgaggcugugcguuug

SEQ ID NO: 403984 - RNA, 19 nt, Homo sapiens
  misc_RNA (1)...(19): siRNA sense strand
ucaaaugcucucagguaug

SEQ ID NO: 403985 - RNA, 19 nt, Homo sapiens
  misc_RNA (1)...(19): siRNA sense strand
ccaccagcaccaaugcaaa

SEQ ID NO: 403986 - RNA, 19 nt, Homo sapiens
  misc_RNA (1)...(19): siRNA sense strand
ggugaaguuugcugacacu

SEQ ID NO: 403987 - RNA, 19 nt, Homo sapiens
  misc_RNA (1)...(19): siRNA sense strand
gcagaguaaagguuguugu

SEQ ID NO: 403988 - RNA, 19 nt, Homo sapiens
  misc_RNA (1)...(19): siRNA sense strand
gcagcugaagcguuccaaa

SEQ ID NO: 403989 - RNA, 19 nt, Homo sapiens
  misc_RNA (1)...(19): siRNA sense strand
gaaaaggagcugaaagaac

SEQ ID NO: 403990 - RNA, 19 nt, Homo sapiens
  misc_RNA (1)...(19): siRNA sense strand
gggugauguucucuccauu

SEQ ID NO: 403991 - RNA, 19 nt, Homo sapiens
  misc_RNA (1)...(19): siRNA sense strand
guauggcggcucugaaugg

SEQ ID NO: 403992 - RNA, 19 nt, Homo sapiens
  misc_RNA (1)...(19): siRNA sense strand
ucucgggacucugcaagga

SEQ ID NO: 403993 - RNA, 19 nt, Homo sapiens
  misc_RNA (1)...(19): siRNA sense strand
gcaaacccucucucuacca

SEQ ID NO: 403994 - RNA, 19 nt, Homo sapiens
  misc_RNA (1)...(19): siRNA sense strand
guggugaaguuugcugaca

SEQ ID NO: 403995 - RNA, 19 nt, Homo sapiens
  misc_RNA (1)...(19): siRNA sense strand
caagugcuuugguuuuguu

SEQ ID NO: 403996 - RNA, 19 nt, Homo sapiens
  misc_RNA (1)...(19): siRNA sense strand
ccaggccuacucaggaauu

SEQ ID NO: 403997 - RNA, 19 nt, Homo sapiens
  misc_RNA (1)...(19): siRNA sense strand
gaagaaaguucagggcauu

SEQ ID NO: 403998 - RNA, 19 nt, Homo sapiens
  misc_RNA (1)...(19): siRNA sense strand
gcugguaccuggaugagaa

SEQ ID NO: 403999 - RNA, 19 nt, Homo sapiens
  misc_RNA (1)...(19): siRNA sense strand
gaggagaccugccgagaag

SEQ ID NO: 404000 - RNA, 19 nt, Homo sapiens
  misc_RNA (1)...(19): siRNA sense strand
ccaccaaucuucuggacuu

SEQ ID NO: 404001 - RNA, 19 nt, Homo sapiens
  misc_RNA (1)...(19): siRNA sense strand
ccaaucuucuggacuuuga

SEQ ID NO: 404002 - RNA, 19 nt, Homo sapiens
  misc_RNA (1)...(19): siRNA sense strand
ucacagacgaggcauuuaa

SEQ ID NO: 404003 - RNA, 19 nt, Homo sapiens
  misc_RNA (1)...(19): siRNA sense strand
gaacacaccugaggaaaag

SEQ ID NO: 404004 - RNA, 19 nt, Homo sapiens
  misc_RNA (1)...(19): siRNA sense strand
caagaacacaccugaggaa

SEQ ID NO: 404005 - RNA, 19 nt, Homo sapiens
  misc_RNA (1)...(19): siRNA sense strand
ggaagaaccaggaggugau

SEQ ID NO: 404006 - RNA, 19 nt, Homo sapiens
  misc_RNA (1)...(19): siRNA sense strand
gccaggacgucugaagaaa

SEQ ID NO: 404007 - RNA, 19 nt, Homo sapiens
  misc_RNA (1)...(19): siRNA sense strand
caucacagacgaggcauuu

SEQ ID NO: 404008 - RNA, 19 nt, Homo sapiens
  misc_RNA (1)...(19): siRNA sense strand
caggacgucugaagaaagu

SEQ ID NO: 404009 - RNA, 19 nt, Homo sapiens
  misc_RNA (1)...(19): siRNA sense strand
gggcguguuuggcgcauau

SEQ ID NO: 404010 - RNA, 19 nt, Homo sapiens
  misc_RNA (1)...(19): siRNA sense strand
caaugaggcuccccaagaa

SEQ ID NO: 404011 - RNA, 19 nt, Homo sapiens
  misc_RNA (1)...(19): siRNA sense strand
ggccaaagcccuggagaug

SEQ ID NO: 404012 - RNA, 19 nt, Homo sapiens
  misc_RNA (1)...(19): siRNA sense strand
gcaaugaggcuccccaaga

SEQ ID NO: 404013 - RNA, 19 nt, Homo sapiens
  misc_RNA (1)...(19): siRNA sense strand
ccaccaaccgcaccgugua

SEQ ID NO: 404014 - RNA, 19 nt, Homo sapiens
  misc_RNA (1)...(19): siRNA sense strand
ggacgucugaagaaaguuc

SEQ ID NO: 404015 - RNA, 19 nt, Homo sapiens
  misc_RNA (1)...(19): siRNA sense strand
ccgccuaccuggaagcaau

SEQ ID NO: 404016 - RNA, 19 nt, Homo sapiens
  misc_RNA (1)...(19): siRNA sense strand
ggaaugcguccccaacuuu

SEQ ID NO: 404017 - RNA, 19 nt, Homo sapiens
  misc_RNA (1)...(19): siRNA sense strand
aggagcggaucaucgagua

SEQ ID NO: 404018 - RNA, 19 nt, Homo sapiens
  misc_RNA (1)...(19): siRNA sense strand
cuaaggagcggaucaucga

SEQ ID NO: 404019 - RNA, 19 nt, Homo sapiens
  misc_RNA (1)...(19): siRNA sense strand
cgaggagaccugccgagaa

SEQ ID NO: 404020 - RNA, 19 nt, Homo sapiens
  misc_RNA (1)...(19): siRNA sense strand
gaccagccaggacgucuga

SEQ ID NO: 404021 - RNA, 19 nt, Homo sapiens
  misc_RNA (1)...(19): siRNA sense strand
cagauccaccaucguguuu

SEQ ID NO: 404022 - RNA, 19 nt, Homo sapiens
  misc_RNA (1)...(19): siRNA sense strand
gcugcgugcugcuggaugu

SEQ ID NO: 404023 - RNA, 19 nt, Homo sapiens
  misc_RNA (1)...(19): siRNA sense strand
guaccuggaugagaagaac

SEQ ID NO: 404024 - RNA, 19 nt, Homo sapiens
  misc_RNA (1)...(19): siRNA sense strand
gaagaaccaggaggugauc

SEQ ID NO: 404025 - RNA, 19 nt, Homo sapiens
  misc_RNA (1)...(19): siRNA sense strand
ccugaaggcucugcuggau

SEQ ID NO: 404026 - RNA, 19 nt, Homo sapiens
  misc_RNA (1)...(19): siRNA sense strand
ucaaccugcucggcacaaa

SEQ ID NO: 404027 - RNA, 19 nt, Homo sapiens
  misc_RNA (1)...(19): siRNA sense strand
ccagauccaccaucguguu

SEQ ID NO: 404028 - RNA, 19 nt, Homo sapiens
  misc_RNA (1)...(19): siRNA sense strand
cagacgaggcauuuaagga

SEQ ID NO: 404029 - RNA, 19 nt, Homo sapiens
  misc_RNA (1)...(19): siRNA sense strand
gcgagaaggagaaccucuu

SEQ ID NO: 404030 - RNA, 19 nt, Homo sapiens
  misc_RNA (1)...(19): siRNA sense strand
caccaaucuucuggacuuu

SEQ ID NO: 404031 - RNA, 19 nt, Homo sapiens
  misc_RNA (1)...(19): siRNA sense strand
ggagaccugccgagaagca

SEQ ID NO: 404032 - RNA, 19 nt, Homo sapiens
  misc_RNA (1)...(19): siRNA sense strand
ggugaucgacgccaucucu

SEQ ID NO: 404033 - RNA, 19 nt, Homo sapiens
  misc_RNA (1)...(19): siRNA sense strand
ccucauugcuuuuaacauc

SEQ ID NO: 404034 - RNA, 19 nt, Homo sapiens
  misc_RNA (1)...(19): siRNA sense strand
gaggaggagcagcggauca

SEQ ID NO: 404035 - RNA, 19 nt, Homo sapiens
  misc_RNA (1)...(19): siRNA sense strand
gauccaccaucguguuucc

SEQ ID NO: 404036 - RNA, 19 nt, Homo sapiens
  misc_RNA (1)...(19): siRNA sense strand
uggugggccucaugaccua

SEQ ID NO: 404037 - RNA, 19 nt, Homo sapiens
  misc_RNA (1)...(19): siRNA sense strand
cagccaggacgucugaaga

SEQ ID NO: 404038 - RNA, 19 nt, Homo sapiens
  misc_RNA (1)...(19): siRNA sense strand
ucaacgugcucaucaaccu

SEQ ID NO: 404039 - RNA, 19 nt, Homo sapiens
  misc_RNA (1)...(19): siRNA sense strand
cuucaccgccuaccuggaa

SEQ ID NO: 404040 - RNA, 19 nt, Homo sapiens
  misc_RNA (1)...(19): siRNA sense strand
gcucugugcuuucaccuua

SEQ ID NO: 404041 - RNA, 19 nt, Homo sapiens
  misc_RNA (1)...(19): siRNA sense strand
gaacaacgcuuauuuugga

SEQ ID NO: 404042 - RNA, 19 nt, Homo sapiens
  misc_RNA (1)...(19): siRNA sense strand
gaucuucgcuugucuuguc

SEQ ID NO: 404043 - RNA, 19 nt, Homo sapiens
  misc_RNA (1)...(19): siRNA sense strand
gcaaaucgaguccauauag

SEQ ID NO: 404044 - RNA, 19 nt, Homo sapiens
  misc_RNA (1)...(19): siRNA sense strand
gauggaacaacgcuuauuu

SEQ ID NO: 404045 - RNA, 19 nt, Homo sapiens
  misc_RNA (1)...(19): siRNA sense strand
cacaggauauguagagaaa

SEQ ID NO: 404046 - RNA, 19 nt, Homo sapiens
  misc_RNA (1)...(19): siRNA sense strand
cagcaagcaccucaaauuu

SEQ ID NO: 404047 - RNA, 19 nt, Homo sapiens
  misc_RNA (1)...(19): siRNA sense strand
acaugcagcucaucuaaga

SEQ ID NO: 404048 - RNA, 19 nt, Homo sapiens
  misc_RNA (1)...(19): siRNA sense strand
ggaagcaaaucgaguccau

SEQ ID NO: 404049 - RNA, 19 nt, Homo sapiens
  misc_RNA (1)...(19): siRNA sense strand
gaaaagguccggaagcaaa

SEQ ID NO: 404050 - RNA, 19 nt, Homo sapiens
  misc_RNA (1)...(19): siRNA sense strand
ucagcaagcaccucaaauu

SEQ ID NO: 404051 - RNA, 19 nt, Homo sapiens
  misc_RNA (1)...(19): siRNA sense strand
gcucuaauuuccgggcuaa

SEQ ID NO: 404052 - RNA, 19 nt, Homo sapiens
  misc_RNA (1)...(19): siRNA sense strand
gguggaagaguuuguggua

SEQ ID NO: 404053 - RNA, 19 nt, Homo sapiens
  misc_RNA (1)...(19): siRNA sense strand
ucacaugcagcucaucuaa

SEQ ID NO: 404054 - RNA, 19 nt, Homo sapiens
  misc_RNA (1)...(19): siRNA sense strand
gcucagcuuugauggaaca

SEQ ID NO: 404055 - RNA, 19 nt, Homo sapiens
  misc_RNA (1)...(19): siRNA sense strand
caugcuggcugguggaaga

SEQ ID NO: 404056 - RNA, 19 nt, Homo sapiens
  misc_RNA (1)...(19): siRNA sense strand
gaagcaaaucgaguccaua

SEQ ID NO: 404057 - RNA, 19 nt, Homo sapiens
  misc_RNA (1)...(19): siRNA sense strand
gcugguugcucugugcuuu

SEQ ID NO: 404058 - RNA, 19 nt, Homo sapiens
  misc_RNA (1)...(19): siRNA sense strand
ccgcucagcuuugauggaa

SEQ ID NO: 404059 - RNA, 19 nt, Homo sapiens
  misc_RNA (1)...(19): siRNA sense strand
ggaagaguuugugguagca

SEQ ID NO: 404060 - RNA, 19 nt, Homo sapiens
  misc_RNA (1)...(19): siRNA sense strand
caucuaagagaaaugaguu

SEQ ID NO: 404061 - RNA, 19 nt, Homo sapiens
  misc_RNA (1)...(19): siRNA sense strand
gcagcucaucuaagagaaa

SEQ ID NO: 404062 - RNA, 19 nt, Homo sapiens
  misc_RNA (1)...(19): siRNA sense strand
cagcucaucuaagagaaau

SEQ ID NO: 404063 - RNA, 19 nt, Homo sapiens
  misc_RNA (1)...(19): siRNA sense strand
cgaaggggcugucgugugu

SEQ ID NO: 404064 - RNA, 19 nt, Homo sapiens
  misc_RNA (1)...(19): siRNA sense strand
aagcaaaucgaguccauau

SEQ ID NO: 404065 - RNA, 19 nt, Homo sapiens
  misc_RNA (1)...(19): siRNA sense strand
cagcgacaauuggacagaa

SEQ ID NO: 404066 - RNA, 19 nt, Homo sapiens
  misc_RNA (1)...(19): siRNA sense strand
ccacaggauauguagagaa

SEQ ID NO: 404067 - RNA, 19 nt, Homo sapiens
  misc_RNA (1)...(19): siRNA sense strand
gcccugaucuucgcuuguc

SEQ ID NO: 404068 - RNA, 19 nt, Homo sapiens
  misc_RNA (1)...(19): siRNA sense strand
gcucuccaugcucuaauuu

SEQ ID NO: 404069 - RNA, 19 nt, Homo sapiens
  misc_RNA (1)...(19): siRNA sense strand
caggauauguagagaaaau

SEQ ID NO: 404070 - RNA, 19 nt, Homo sapiens
  misc_RNA (1)...(19): siRNA sense strand
ucgcuugucuugucaucau

SEQ ID NO: 404071 - RNA, 19 nt, Homo sapiens
  misc_RNA (1)...(19): siRNA sense strand
gcaggaagagaagcuguca

SEQ ID NO: 404072 - RNA, 19 nt, Homo sapiens
  misc_RNA (1)...(19): siRNA sense strand
ucugugcuuucaccuuaaa

SEQ ID NO: 404073 - RNA, 19 nt, Homo sapiens
  misc_RNA (1)...(19): siRNA sense strand
gcuggcugguggaagaguu

SEQ ID NO: 404074 - RNA, 19 nt, Homo sapiens
  misc_RNA (1)...(19): siRNA sense strand
uuugauggaacaacgcuua

SEQ ID NO: 404075 - RNA, 19 nt, Homo sapiens
  misc_RNA (1)...(19): siRNA sense strand
agcaagcaccucaaauuug

SEQ ID NO: 404076 - RNA, 19 nt, Homo sapiens
  misc_RNA (1)...(19): siRNA sense strand
caucauucgucagcgacaa

SEQ ID NO: 404077 - RNA, 19 nt, Homo sapiens
  misc_RNA (1)...(19): siRNA sense strand
agacaaagaugcccaguuu

SEQ ID NO: 404078 - RNA, 19 nt, Homo sapiens
  misc_RNA (1)...(19): siRNA sense strand
gaacuuggacaccaugaua

SEQ ID NO: 404079 - RNA, 19 nt, Homo sapiens
  misc_RNA (1)...(19): siRNA sense strand
cagauaagcucccagaaga

SEQ ID NO: 404080 - RNA, 19 nt, Homo sapiens
  misc_RNA (1)...(19): siRNA sense strand
caagucaucugguacaaga

SEQ ID NO: 404081 - RNA, 19 nt, Homo sapiens
  misc_RNA (1)...(19): siRNA sense strand
gaaagagaauaugguguug

SEQ ID NO: 404082 - RNA, 19 nt, Homo sapiens
  misc_RNA (1)...(19): siRNA sense strand
ugauaucgcugcugaguga

SEQ ID NO: 404083 - RNA, 19 nt, Homo sapiens
  misc_RNA (1)...(19): siRNA sense strand
ggagacagguguugaaugc

SEQ ID NO: 404084 - RNA, 19 nt, Homo sapiens
  misc_RNA (1)...(19): siRNA sense strand
gaagucaccgucccuguuu

SEQ ID NO: 404085 - RNA, 19 nt, Homo sapiens
  misc_RNA (1)...(19): siRNA sense strand
aggcacagcugguuaaaga

SEQ ID NO: 404086 - RNA, 19 nt, Homo sapiens
  misc_RNA (1)...(19): siRNA sense strand
gcugggcgcuguccucuau

SEQ ID NO: 404087 - RNA, 19 nt, Homo sapiens
  misc_RNA (1)...(19): siRNA sense strand
gaaguuaagucagauaagc

SEQ ID NO: 404088 - RNA, 19 nt, Homo sapiens
  misc_RNA (1)...(19): siRNA sense strand
gaagaaccggguccacauu

SEQ ID NO: 404089 - RNA, 19 nt, Homo sapiens
  misc_RNA (1)...(19): siRNA sense strand
ccaccacacuucagcauca

SEQ ID NO: 404090 - RNA, 19 nt, Homo sapiens
  misc_RNA (1)...(19): siRNA sense strand
aagagaauaugguguugaa

SEQ ID NO: 404091 - RNA, 19 nt, Homo sapiens
  misc_RNA (1)...(19): siRNA sense strand
uccuggagcuggucaauuu

SEQ ID NO: 404092 - RNA, 19 nt, Homo sapiens
  misc_RNA (1)...(19): siRNA sense strand
gagaauaugguguugaauc

SEQ ID NO: 404093 - RNA, 19 nt, Homo sapiens
  misc_RNA (1)...(19): siRNA sense strand
ggaagucaccgucccuguu

SEQ ID NO: 404094 - RNA, 19 nt, Homo sapiens
  misc_RNA (1)...(19): siRNA sense strand
ugaaagagaauaugguguu

SEQ ID NO: 404095 - RNA, 19 nt, Homo sapiens
  misc_RNA (1)...(19): siRNA sense strand
acaucgaucugaggcauua

SEQ ID NO: 404096 - RNA, 19 nt, Homo sapiens
  misc_RNA (1)...(19): siRNA sense strand
gaacuacuggugaacuaug

SEQ ID NO: 404097 - RNA, 19 nt, Homo sapiens
  misc_RNA (1)...(19): siRNA sense strand
gauaagcucccagaagaga

SEQ ID NO: 404098 - RNA, 19 nt, Homo sapiens
  misc_RNA (1)...(19): siRNA sense strand
uguugaaucugucuuguga

SEQ ID NO: 404099 - RNA, 19 nt, Homo sapiens
  misc_RNA (1)...(19): siRNA sense strand
gaacacagugggcgcuaug

SEQ ID NO: 404100 - RNA, 19 nt, Homo sapiens
  misc_RNA (1)...(19): siRNA sense strand
gagaccagggagagaaaua

SEQ ID NO: 404101 - RNA, 19 nt, Homo sapiens
  misc_RNA (1)...(19): siRNA sense strand
gcguggaaaucagguguuu

SEQ ID NO: 404102 - RNA, 19 nt, Homo sapiens
  misc_RNA (1)...(19): siRNA sense strand
ccacuggccucagcacuuc

SEQ ID NO: 404103 - RNA, 19 nt, Homo sapiens
  misc_RNA (1)...(19): siRNA sense strand
agaauaugguguugaaucu

SEQ ID NO: 404104 - RNA, 19 nt, Homo sapiens
  misc_RNA (1)...(19): siRNA sense strand
caagugaacaagaccaaga

SEQ ID NO: 404105 - RNA, 19 nt, Homo sapiens
  misc_RNA (1)...(19): siRNA sense strand
gcacagcugguuaaagaag

SEQ ID NO: 404106 - RNA, 19 nt, Homo sapiens
  misc_RNA (1)...(19): siRNA sense strand
caucguggcugugauugug

SEQ ID NO: 404107 - RNA, 19 nt, Homo sapiens
  misc_RNA (1)...(19): siRNA sense strand
gcacggcaagugaacaaga

SEQ ID NO: 404108 - RNA, 19 nt, Homo sapiens
  misc_RNA (1)...(19): siRNA sense strand
acaaagaugcccaguuuua

SEQ ID NO: 404109 - RNA, 19 nt, Homo sapiens
  misc_RNA (1)...(19): siRNA sense strand
uaguugaaguuaagucaga

SEQ ID NO: 404110 - RNA, 19 nt, Homo sapiens
  misc_RNA (1)...(19): siRNA sense strand
cacaggaacuacuggugaa

SEQ ID NO: 404111 - RNA, 19 nt, Homo sapiens
  misc_RNA (1)...(19): siRNA sense strand
ggagucgagugguuuguac

SEQ ID NO: 404112 - RNA, 19 nt, Homo sapiens
  misc_RNA (1)...(19): siRNA sense strand
gagaaauacaucgaucuga

SEQ ID NO: 404113 - RNA, 19 nt, Homo sapiens
  misc_RNA (1)...(19): siRNA sense strand
ugaaggcacagcugguuaa

SEQ ID NO: 404114 - RNA, 19 nt, Homo sapiens
  misc_RNA (1)...(19): siRNA sense strand
aauaugguguugaaucugu

SEQ ID NO: 404115 - RNA, 19 nt, Homo sapiens
  misc_RNA (1)...(19): siRNA sense strand
gguuaaagaagacaaagau

SEQ ID NO: 404116 - RNA, 19 nt, Homo sapiens
  misc_RNA (1)...(19): siRNA sense strand
ggaacacagugggcgcuau

SEQ ID NO: 404117 - RNA, 19 nt, Homo sapiens
  misc_RNA (1)...(19): siRNA sense strand
acaccagacuccaacacaa

SEQ ID NO: 404118 - RNA, 19 nt, Homo sapiens
  misc_RNA (1)...(19): siRNA sense strand
gcauccagcuccgcgucua

SEQ ID NO: 404119 - RNA, 19 nt, Homo sapiens
  misc_RNA (1)...(19): siRNA sense strand
ggucaucguggcugugauu

SEQ ID NO: 404120 - RNA, 19 nt, Homo sapiens
  misc_RNA (1)...(19): siRNA sense strand
gaaggcacagcugguuaaa

SEQ ID NO: 404121 - RNA, 19 nt, Homo sapiens
  misc_RNA (1)...(19): siRNA sense strand
gcaccuccacagagagaaa

SEQ ID NO: 404122 - RNA, 19 nt, Homo sapiens
  misc_RNA (1)...(19): siRNA sense strand
caacggcacggcaagugaa

SEQ ID NO: 404123 - RNA, 19 nt, Homo sapiens
  misc_RNA (1)...(19): siRNA sense strand
ggaaggugugggugaaaga

SEQ ID NO: 404124 - RNA, 19 nt, Homo sapiens
  misc_RNA (1)...(19): siRNA sense strand
uuguacaccuugcagagua

SEQ ID NO: 404125 - RNA, 19 nt, Homo sapiens
  misc_RNA (1)...(19): siRNA sense strand
aggaacuacuggugaacua

SEQ ID NO: 404126 - RNA, 19 nt, Homo sapiens
  misc_RNA (1)...(19): siRNA sense strand
gccaggaccucgaguucca

SEQ ID NO: 404127 - RNA, 19 nt, Homo sapiens
  misc_RNA (1)...(19): siRNA sense strand
caauuuaaccacccucaca

SEQ ID NO: 404128 - RNA, 19 nt, Homo sapiens
  misc_RNA (1)...(19): siRNA sense strand
cgagugguuuguacaccuu

SEQ ID NO: 404129 - RNA, 19 nt, Homo sapiens
  misc_RNA (1)...(19): siRNA sense strand
aacagcaccuccacagaga

SEQ ID NO: 404130 - RNA, 19 nt, Homo sapiens
  misc_RNA (1)...(19): siRNA sense strand
gagugaaccacaggaacua

SEQ ID NO: 404131 - RNA, 19 nt, Homo sapiens
  misc_RNA (1)...(19): siRNA sense strand
ggaggcagaggaagagaca

SEQ ID NO: 404132 - RNA, 19 nt, Homo sapiens
  misc_RNA (1)...(19): siRNA sense strand
agaggaaggugugggugaa

SEQ ID NO: 404133 - RNA, 19 nt, Homo sapiens
  misc_RNA (1)...(19): siRNA sense strand
ccagggaggcagaggaaga

SEQ ID NO: 404134 - RNA, 19 nt, Homo sapiens
  misc_RNA (1)...(19): siRNA sense strand
gacgagcgcaucuucuugu

SEQ ID NO: 404135 - RNA, 19 nt, Homo sapiens
  misc_RNA (1)...(19): siRNA sense strand
ucagauaagcucccagaag

SEQ ID NO: 404136 - RNA, 19 nt, Homo sapiens
  misc_RNA (1)...(19): siRNA sense strand
uguccucuauuuccucuau

SEQ ID NO: 404137 - RNA, 19 nt, Homo sapiens
  misc_RNA (1)...(19): siRNA sense strand
ggccugugcuucaguugca

SEQ ID NO: 404138 - RNA, 19 nt, Homo sapiens
  misc_RNA (1)...(19): siRNA sense strand
ugggcgcuguccucuauuu

SEQ ID NO: 404139 - RNA, 19 nt, Homo sapiens
  misc_RNA (1)...(19): siRNA sense strand
ucagccaugucgacugguu

SEQ ID NO: 404140 - RNA, 19 nt, Homo sapiens
  misc_RNA (1)...(19): siRNA sense strand
gagagaaauacaucgaucu

SEQ ID NO: 404141 - RNA, 19 nt, Homo sapiens
  misc_RNA (1)...(19): siRNA sense strand
guccugagcacccugaaug

SEQ ID NO: 404142 - RNA, 19 nt, Homo sapiens
  misc_RNA (1)...(19): siRNA sense strand
agaaccggguccacauuca

SEQ ID NO: 404143 - RNA, 19 nt, Homo sapiens
  misc_RNA (1)...(19): siRNA sense strand
gggagaccagggagagaaa

SEQ ID NO: 404144 - RNA, 19 nt, Homo sapiens
  misc_RNA (1)...(19): siRNA sense strand
ggaacuacuggugaacuau

SEQ ID NO: 404145 - RNA, 19 nt, Homo sapiens
  misc_RNA (1)...(19): siRNA sense strand
cacagcugguuaaagaaga

SEQ ID NO: 404146 - RNA, 19 nt, Homo sapiens
  misc_RNA (1)...(19): siRNA sense strand
gaaggaguccagggaaguc

SEQ ID NO: 404147 - RNA, 19 nt, Homo sapiens
  misc_RNA (1)...(19): siRNA sense strand
gcucagggaagcaggagau

SEQ ID NO: 404148 - RNA, 19 nt, Homo sapiens
  misc_RNA (1)...(19): siRNA sense strand
guggaaaucagguguuugg

SEQ ID NO: 404149 - RNA, 19 nt, Homo sapiens
  misc_RNA (1)...(19): siRNA sense strand
ggcccaccaucuccuggaa

SEQ ID NO: 404150 - RNA, 19 nt, Homo sapiens
  misc_RNA (1)...(19): siRNA sense strand
uccaguggcugagagaaga

SEQ ID NO: 404151 - RNA, 19 nt, Homo sapiens
  misc_RNA (1)...(19): siRNA sense strand
acagugggcgcuaugaaug

SEQ ID NO: 404152 - RNA, 19 nt, Homo sapiens
  misc_RNA (1)...(19): siRNA sense strand
gcuggucugcgccuucuug

SEQ ID NO: 404153 - RNA, 19 nt, Homo sapiens
  misc_RNA (1)...(19): siRNA sense strand
uugaaucugucuugugaag

SEQ ID NO: 404154 - RNA, 19 nt, Homo sapiens
  misc_RNA (1)...(19): siRNA sense strand
gguguugaaucugucuugu

SEQ ID NO: 404155 - RNA, 19 nt, Homo sapiens
  misc_RNA (1)...(19): siRNA sense strand
uuccucaagucaucuggua

SEQ ID NO: 404156 - RNA, 19 nt, Homo sapiens
  misc_RNA (1)...(19): siRNA sense strand
gaggaaggugugggugaaa

SEQ ID NO: 404157 - RNA, 19 nt, Homo sapiens
  misc_RNA (1)...(19): siRNA sense strand
uccucuauuuccucuauaa

SEQ ID NO: 404158 - RNA, 19 nt, Homo sapiens
  misc_RNA (1)...(19): siRNA sense strand
ccagggagagaaauacauc

SEQ ID NO: 404159 - RNA, 19 nt, Homo sapiens
  misc_RNA (1)...(19): siRNA sense strand
guuaaagaagacaaagaug

SEQ ID NO: 404160 - RNA, 19 nt, Homo sapiens
  misc_RNA (1)...(19): siRNA sense strand
gaccagggagagaaauaca

SEQ ID NO: 404161 - RNA, 19 nt, Homo sapiens
  misc_RNA (1)...(19): siRNA sense strand
uaagcucccagaagagaug

SEQ ID NO: 404162 - RNA, 19 nt, Homo sapiens
  misc_RNA (1)...(19): siRNA sense strand
ccaacagcaccuccacaga

SEQ ID NO: 404163 - RNA, 19 nt, Homo sapiens
  misc_RNA (1)...(19): siRNA sense strand
ucaacggcacggcaaguga

SEQ ID NO: 404164 - RNA, 19 nt, Homo sapiens
  misc_RNA (1)...(19): siRNA sense strand
cagaggaagagacaaccaa

SEQ ID NO: 404165 - RNA, 19 nt, Homo sapiens
  misc_RNA (1)...(19): siRNA sense strand
gcagcacagcccuucugaa

SEQ ID NO: 404166 - RNA, 19 nt, Homo sapiens
  misc_RNA (1)...(19): siRNA sense strand
cugaaggcacagcugguua

SEQ ID NO: 404167 - RNA, 19 nt, Homo sapiens
  misc_RNA (1)...(19): siRNA sense strand
guugaaguuaagucagaua

SEQ ID NO: 404168 - RNA, 19 nt, Homo sapiens
  misc_RNA (1)...(19): siRNA sense strand
cagcaccuccacagagaga

SEQ ID NO: 404169 - RNA, 19 nt, Homo sapiens
  misc_RNA (1)...(19): siRNA sense strand
gaaccggguccacauucag

SEQ ID NO: 404170 - RNA, 19 nt, Homo sapiens
  misc_RNA (1)...(19): siRNA sense strand
ccagcuccgcgucuacaaa

SEQ ID NO: 404171 - RNA, 19 nt, Homo sapiens
  misc_RNA (1)...(19): siRNA sense strand
aaacaccagcauccucuuc

SEQ ID NO: 404172 - RNA, 19 nt, Homo sapiens
  misc_RNA (1)...(19): siRNA sense strand
ugaacaagaccaagaucca

SEQ ID NO: 404173 - RNA, 19 nt, Homo sapiens
  misc_RNA (1)...(19): siRNA sense strand
gaauaugguguugaaucug

SEQ ID NO: 404174 - RNA, 19 nt, Homo sapiens
  misc_RNA (1)...(19): siRNA sense strand
aaagagaauaugguguuga

SEQ ID NO: 404175 - RNA, 19 nt, Homo sapiens
  misc_RNA (1)...(19): siRNA sense strand
agccaaacauccaggucaa

SEQ ID NO: 404176 - RNA, 19 nt, Homo sapiens
  misc_RNA (1)...(19): siRNA sense strand
gcugagugaaccacaggaa

SEQ ID NO: 404177 - RNA, 19 nt, Homo sapiens
  misc_RNA (1)...(19): siRNA sense strand
gaauaaaucuucucaguuc

SEQ ID NO: 404178 - RNA, 19 nt, Homo sapiens
  misc_RNA (1)...(19): siRNA sense strand
ccaaguggguggugaauaa

SEQ ID NO: 404179 - RNA, 19 nt, Homo sapiens
  misc_RNA (1)...(19): siRNA sense strand
ggagaauucuggaggaaga

SEQ ID NO: 404180 - RNA, 19 nt, Homo sapiens
  misc_RNA (1)...(19): siRNA sense strand
guacagacccugcuucuca

SEQ ID NO: 404181 - RNA, 19 nt, Homo sapiens
  misc_RNA (1)...(19): siRNA sense strand
gcuggaaccugaccuauag

SEQ ID NO: 404182 - RNA, 19 nt, Homo sapiens
  misc_RNA (1)...(19): siRNA sense strand
gcaacgucauugagacuuu

SEQ ID NO: 404183 - RNA, 19 nt, Homo sapiens
  misc_RNA (1)...(19): siRNA sense strand
ccaagaagcugaggaggau

SEQ ID NO: 404184 - RNA, 19 nt, Homo sapiens
  misc_RNA (1)...(19): siRNA sense strand
gugaauaaaucuucucagu

SEQ ID NO: 404185 - RNA, 19 nt, Homo sapiens
  misc_RNA (1)...(19): siRNA sense strand
gaacuacucagucaaacau

SEQ ID NO: 404186 - RNA, 19 nt, Homo sapiens
  misc_RNA (1)...(19): siRNA sense strand
gcaccugccucacuucaag

SEQ ID NO: 404187 - RNA, 19 nt, Homo sapiens
  misc_RNA (1)...(19): siRNA sense strand
gaguguugcuggagcugua

SEQ ID NO: 404188 - RNA, 19 nt, Homo sapiens
  misc_RNA (1)...(19): siRNA sense strand
ccaaggccaugaagaagau

SEQ ID NO: 404189 - RNA, 19 nt, Homo sapiens
  misc_RNA (1)...(19): siRNA sense strand
aggaggaucuggagaauuc

SEQ ID NO: 404190 - RNA, 19 nt, Homo sapiens
  misc_RNA (1)...(19): siRNA sense strand
ccaggaagguggcgucaca

SEQ ID NO: 404191 - RNA, 19 nt, Homo sapiens
  misc_RNA (1)...(19): siRNA sense strand
caggagagccggacuagga

SEQ ID NO: 404192 - RNA, 19 nt, Homo sapiens
  misc_RNA (1)...(19): siRNA sense strand
acgcugacgugggcuauua

SEQ ID NO: 404193 - RNA, 19 nt, Homo sapiens
  misc_RNA (1)...(19): siRNA sense strand
caaauacccaccucggaaa

SEQ ID NO: 404194 - RNA, 19 nt, Homo sapiens
  misc_RNA (1)...(19): siRNA sense strand
caugggcgcugauuacauc

SEQ ID NO: 404195 - RNA, 19 nt, Homo sapiens
  misc_RNA (1)...(19): siRNA sense strand
gaucggacgcugcacaaga

SEQ ID NO: 404196 - RNA, 19 nt, Homo sapiens
  misc_RNA (1)...(19): siRNA sense strand
agucaaacaucccaaauac

SEQ ID NO: 404197 - RNA, 19 nt, Homo sapiens
  misc_RNA (1)...(19): siRNA sense strand
cccaagagcugcgucauca

SEQ ID NO: 404198 - RNA, 19 nt, Homo sapiens
  misc_RNA (1)...(19): siRNA sense strand
gaagguggcgucacaucug

SEQ ID NO: 404199 - RNA, 19 nt, Homo sapiens
  misc_RNA (1)...(19): siRNA sense strand
agaagcaccugccucacuu

SEQ ID NO: 404200 - RNA, 19 nt, Homo sapiens
  misc_RNA (1)...(19): siRNA sense strand
gacauugaguaccgcaaga

SEQ ID NO: 404201 - RNA, 19 nt, Homo sapiens
  misc_RNA (1)...(19): siRNA sense strand
ggacagcaacgucauugag

SEQ ID NO: 404202 - RNA, 19 nt, Homo sapiens
  misc_RNA (1)...(19): siRNA sense strand
cagucaaacaucccaaaua

SEQ ID NO: 404203 - RNA, 19 nt, Homo sapiens
  misc_RNA (1)...(19): siRNA sense strand
gcaagaaaugggacagcaa

SEQ ID NO: 404204 - RNA, 19 nt, Homo sapiens
  misc_RNA (1)...(19): siRNA sense strand
gacagcaacgucauugaga

SEQ ID NO: 404205 - RNA, 19 nt, Homo sapiens
  misc_RNA (1)...(19): siRNA sense strand
uaugaacuacucagucaaa

SEQ ID NO: 404206 - RNA, 19 nt, Homo sapiens
  misc_RNA (1)...(19): siRNA sense strand
ccaugaagaagauguacaa

SEQ ID NO: 404207 - RNA, 19 nt, Homo sapiens
  misc_RNA (1)...(19): siRNA sense strand
ggcuggaaccugaccuaua

SEQ ID NO: 404208 - RNA, 19 nt, Homo sapiens
  misc_RNA (1)...(19): siRNA sense strand
auuaugaacuacucaguca

SEQ ID NO: 404209 - RNA, 19 nt, Homo sapiens
  misc_RNA (1)...(19): siRNA sense strand
ggugcaggcuguggagaug

SEQ ID NO: 404210 - RNA, 19 nt, Homo sapiens
  misc_RNA (1)...(19): siRNA sense strand
ugaggaggaucuggagaau

SEQ ID NO: 404211 - RNA, 19 nt, Homo sapiens
  misc_RNA (1)...(19): siRNA sense strand
cggauggagugcugugaug

SEQ ID NO: 404212 - RNA, 19 nt, Homo sapiens
  misc_RNA (1)...(19): siRNA sense strand
gcccgaugaccaagacuuu

SEQ ID NO: 404213 - RNA, 19 nt, Homo sapiens
  misc_RNA (1)...(19): siRNA sense strand
ggaggaagaggagaguguu

SEQ ID NO: 404214 - RNA, 19 nt, Homo sapiens
  misc_RNA (1)...(19): siRNA sense strand
ggaagguggcgucacaucu

SEQ ID NO: 404215 - RNA, 19 nt, Homo sapiens
  misc_RNA (1)...(19): siRNA sense strand
ggacgcugcacaagaucaa

SEQ ID NO: 404216 - RNA, 19 nt, Homo sapiens
  misc_RNA (1)...(19): siRNA sense strand
gaggaagaggagaguguug

SEQ ID NO: 404217 - RNA, 19 nt, Homo sapiens
  misc_RNA (1)...(19): siRNA sense strand
agagcugcgucaucaccua

SEQ ID NO: 404218 - RNA, 19 nt, Homo sapiens
  misc_RNA (1)...(19): siRNA sense strand
gaggaggaucuggagaauu

SEQ ID NO: 404219 - RNA, 19 nt, Homo sapiens
  misc_RNA (1)...(19): siRNA sense strand
cggacucacuggagaacau

SEQ ID NO: 404220 - RNA, 19 nt, Homo sapiens
  misc_RNA (1)...(19): siRNA sense strand
ccaggugcccgaugaccaa

SEQ ID NO: 404221 - RNA, 19 nt, Homo sapiens
  misc_RNA (1)...(19): siRNA sense strand
gauggagugcugugaugug

SEQ ID NO: 404222 - RNA, 19 nt, Homo sapiens
  misc_RNA (1)...(19): siRNA sense strand
caaguggguggugaauaaa

SEQ ID NO: 404223 - RNA, 19 nt, Homo sapiens
  misc_RNA (1)...(19): siRNA sense strand
gacacucuacgacguccua

SEQ ID NO: 404224 - RNA, 19 nt, Homo sapiens
  misc_RNA (1)...(19): siRNA sense strand
caacgucauugagacuuuu

SEQ ID NO: 404225 - RNA, 19 nt, Homo sapiens
  misc_RNA (1)...(19): siRNA sense strand
uugaguaccgcaagaaaug

SEQ ID NO: 404226 - RNA, 19 nt, Homo sapiens
  misc_RNA (1)...(19): siRNA sense strand
aggcugaggugggcuggaa

SEQ ID NO: 404227 - RNA, 19 nt, Homo sapiens
  misc_RNA (1)...(19): siRNA sense strand
gguggugaauaaaucuucu

SEQ ID NO: 404228 - RNA, 19 nt, Homo sapiens
  misc_RNA (1)...(19): siRNA sense strand
ugaagaaccgugaugucau

SEQ ID NO: 404229 - RNA, 19 nt, Homo sapiens
  misc_RNA (1)...(19): siRNA sense strand
cugaagaaccgugauguca

SEQ ID NO: 404230 - RNA, 19 nt, Homo sapiens
  misc_RNA (1)...(19): siRNA sense strand
guguccaggugcccgauga

SEQ ID NO: 404231 - RNA, 19 nt, Homo sapiens
  misc_RNA (1)...(19): siRNA sense strand
cgacguccuacacgacauu

SEQ ID NO: 404232 - RNA, 19 nt, Homo sapiens
  misc_RNA (1)...(19): siRNA sense strand
cagaagcaccugccucacu

SEQ ID NO: 404233 - RNA, 19 nt, Homo sapiens
  misc_RNA (1)...(19): siRNA sense strand
ccagacgggcuaccucauc

SEQ ID NO: 404234 - RNA, 19 nt, Homo sapiens
  misc_RNA (1)...(19): siRNA sense strand
gagaagaaaugaagaauug

SEQ ID NO: 404235 - RNA, 19 nt, Homo sapiens
  misc_RNA (1)...(19): siRNA sense strand
uaacagggaucuugaaauu

SEQ ID NO: 404236 - RNA, 19 nt, Homo sapiens
  misc_RNA (1)...(19): siRNA sense strand
gaauagaacuggaugaaag

SEQ ID NO: 404237 - RNA, 19 nt, Homo sapiens
  misc_RNA (1)...(19): siRNA sense strand
ugaaauagcucaacucagu

SEQ ID NO: 404238 - RNA, 19 nt, Homo sapiens
  misc_RNA (1)...(19): siRNA sense strand
ggaacucucuggaaugaaa

SEQ ID NO: 404239 - RNA, 19 nt, Homo sapiens
  misc_RNA (1)...(19): siRNA sense strand
ggaaauggaugucacaaag

SEQ ID NO: 404240 - RNA, 19 nt, Homo sapiens
  misc_RNA (1)...(19): siRNA sense strand
ccaagaaacuggaacaaau

SEQ ID NO: 404241 - RNA, 19 nt, Homo sapiens
  misc_RNA (1)...(19): siRNA sense strand
acagggaucuugaaauuaa

SEQ ID NO: 404242 - RNA, 19 nt, Homo sapiens
  misc_RNA (1)...(19): siRNA sense strand
agaaagagaugacuugaug

SEQ ID NO: 404243 - RNA, 19 nt, Homo sapiens
  misc_RNA (1)...(19): siRNA sense strand
gaacaugaggaaaccaaua

SEQ ID NO: 404244 - RNA, 19 nt, Homo sapiens
  misc_RNA (1)...(19): siRNA sense strand
gaggaacucucuggaauga

SEQ ID NO: 404245 - RNA, 19 nt, Homo sapiens
  misc_RNA (1)...(19): siRNA sense strand
gaucuugucucagaauauu

SEQ ID NO: 404246 - RNA, 19 nt, Homo sapiens
  misc_RNA (1)...(19): siRNA sense strand
ucagagaacuugugaagau

SEQ ID NO: 404247 - RNA, 19 nt, Homo sapiens
  misc_RNA (1)...(19): siRNA sense strand
ggaacgacuuagcugaaua

SEQ ID NO: 404248 - RNA, 19 nt, Homo sapiens
  misc_RNA (1)...(19): siRNA sense strand
ggaaauagagaaauugaga

SEQ ID NO: 404249 - RNA, 19 nt, Homo sapiens
  misc_RNA (1)...(19): siRNA sense strand
gaagauacagcaaauggaa

SEQ ID NO: 404250 - RNA, 19 nt, Homo sapiens
  misc_RNA (1)...(19): siRNA sense strand
gaaagacugguuaaagaaa

SEQ ID NO: 404251 - RNA, 19 nt, Homo sapiens
  misc_RNA (1)...(19): siRNA sense strand
ugacaaaguuaaaggaaga

SEQ ID NO: 404252 - RNA, 19 nt, Homo sapiens
  misc_RNA (1)...(19): siRNA sense strand
ugaccagucucaauauauu

SEQ ID NO: 404253 - RNA, 19 nt, Homo sapiens
  misc_RNA (1)...(19): siRNA sense strand
ggagaaggaugaggcagaa

SEQ ID NO: 404254 - RNA, 19 nt, Homo sapiens
  misc_RNA (1)...(19): siRNA sense strand
aaaccaauaugccuacuau

SEQ ID NO: 404255 - RNA, 19 nt, Homo sapiens
  misc_RNA (1)...(19): siRNA sense strand
ucgaaagacugguuaaaga

SEQ ID NO: 404256 - RNA, 19 nt, Homo sapiens
  misc_RNA (1)...(19): siRNA sense strand
uaaggaaagugaaguaucu

SEQ ID NO: 404257 - RNA, 19 nt, Homo sapiens
  misc_RNA (1)...(19): siRNA sense strand
gaaacaugcacaauucuug

SEQ ID NO: 404258 - RNA, 19 nt, Homo sapiens
  misc_RNA (1)...(19): siRNA sense strand
gcacaauucuuggauuaca

SEQ ID NO: 404259 - RNA, 19 nt, Homo sapiens
  misc_RNA (1)...(19): siRNA sense strand
uaaggcagcuggauaagca

SEQ ID NO: 404260 - RNA, 19 nt, Homo sapiens
  misc_RNA (1)...(19): siRNA sense strand
gaggagugccugagacuaa

SEQ ID NO: 404261 - RNA, 19 nt, Homo sapiens
  misc_RNA (1)...(19): siRNA sense strand
gaaagaaggcgaugucacu

SEQ ID NO: 404262 - RNA, 19 nt, Homo sapiens
  misc_RNA (1)...(19): siRNA sense strand
gcaacuaaagcauaaagaa

SEQ ID NO: 404263 - RNA, 19 nt, Homo sapiens
  misc_RNA (1)...(19): siRNA sense strand
ugaaguaucuccgucaaga

SEQ ID NO: 404264 - RNA, 19 nt, Homo sapiens
  misc_RNA (1)...(19): siRNA sense strand
gaacaugccagcagaagca

SEQ ID NO: 404265 - RNA, 19 nt, Homo sapiens
  misc_RNA (1)...(19): siRNA sense strand
ggaaauaacgaaagaaagg

SEQ ID NO: 404266 - RNA, 19 nt, Homo sapiens
  misc_RNA (1)...(19): siRNA sense strand
gcaccagugugggaaauga

SEQ ID NO: 404267 - RNA, 19 nt, Homo sapiens
  misc_RNA (1)...(19): siRNA sense strand
uugcugaccucccagaaua

SEQ ID NO: 404268 - RNA, 19 nt, Homo sapiens
  misc_RNA (1)...(19): siRNA sense strand
gaaaagggccauugagaaa

SEQ ID NO: 404269 - RNA, 19 nt, Homo sapiens
  misc_RNA (1)...(19): siRNA sense strand
uuaaugaccagucucaaua

SEQ ID NO: 404270 - RNA, 19 nt, Homo sapiens
  misc_RNA (1)...(19): siRNA sense strand
gcaaacaacacuuggaaca

SEQ ID NO: 404271 - RNA, 19 nt, Homo sapiens
  misc_RNA (1)...(19): siRNA sense strand
gcaugaagcuguucuuucc

SEQ ID NO: 404272 - RNA, 19 nt, Homo sapiens
  misc_RNA (1)...(19): siRNA sense strand
aagagcaacuaaagcauaa

SEQ ID NO: 404273 - RNA, 19 nt, Homo sapiens
  misc_RNA (1)...(19): siRNA sense strand
gaacuugugaagaucuuaa

SEQ ID NO: 404274 - RNA, 19 nt, Homo sapiens
  misc_RNA (1)...(19): siRNA sense strand
gaacgacuuagcugaauau

SEQ ID NO: 404275 - RNA, 19 nt, Homo sapiens
  misc_RNA (1)...(19): siRNA sense strand
gggaguacaugggaucaaa

SEQ ID NO: 404276 - RNA, 19 nt, Homo sapiens
  misc_RNA (1)...(19): siRNA sense strand
gcuaaaaucucaaagacaa

SEQ ID NO: 404277 - RNA, 19 nt, Homo sapiens
  misc_RNA (1)...(19): siRNA sense strand
aaaccaacauggagaagga

SEQ ID NO: 404278 - RNA, 19 nt, Homo sapiens
  misc_RNA (1)...(19): siRNA sense strand
uaaagaaagagaugacuug

SEQ ID NO: 404279 - RNA, 19 nt, Homo sapiens
  misc_RNA (1)...(19): siRNA sense strand
ccggaaacaugcacaauuc

SEQ ID NO: 404280 - RNA, 19 nt, Homo sapiens
  misc_RNA (1)...(19): siRNA sense strand
gaagaaaugaagaauugga

SEQ ID NO: 404281 - RNA, 19 nt, Homo sapiens
  misc_RNA (1)...(19): siRNA sense strand
gcucaacucagucaagaaa

SEQ ID NO: 404282 - RNA, 19 nt, Homo sapiens
  misc_RNA (1)...(19): siRNA sense strand
agaaggcgaugucacuauu

SEQ ID NO: 404283 - RNA, 19 nt, Homo sapiens
  misc_RNA (1)...(19): siRNA sense strand
uuaaucaacuggaggaaau

SEQ ID NO: 404284 - RNA, 19 nt, Homo sapiens
  misc_RNA (1)...(19): siRNA sense strand
aaagggccauugagaaaga

SEQ ID NO: 404285 - RNA, 19 nt, Homo sapiens
  misc_RNA (1)...(19): siRNA sense strand
gcagagcuuuagcaaggaa

SEQ ID NO: 404286 - RNA, 19 nt, Homo sapiens
  misc_RNA (1)...(19): siRNA sense strand
ccaacaagcagauaaggaa

SEQ ID NO: 404287 - RNA, 19 nt, Homo sapiens
  misc_RNA (1)...(19): siRNA sense strand
gaaaguuacagagaagaaa

SEQ ID NO: 404288 - RNA, 19 nt, Homo sapiens
  misc_RNA (1)...(19): siRNA sense strand
gagaauagaacuggaugaa

SEQ ID NO: 404289 - RNA, 19 nt, Homo sapiens
  misc_RNA (1)...(19): siRNA sense strand
aaagguguguggagaaaug

SEQ ID NO: 404290 - RNA, 19 nt, Homo sapiens
  misc_RNA (1)...(19): siRNA sense strand
guacaugggaucaaagaug

SEQ ID NO: 404291 - RNA, 19 nt, Homo sapiens
  misc_RNA (1)...(19): siRNA sense strand
aaagagcaacuaaagcaua

SEQ ID NO: 404292 - RNA, 19 nt, Homo sapiens
  misc_RNA (1)...(19): siRNA sense strand
gcagaagcauucaccaacu

SEQ ID NO: 404293 - RNA, 19 nt, Homo sapiens
  misc_RNA (1)...(19): siRNA sense strand
gaccuuguucauacuauua

SEQ ID NO: 404294 - RNA, 19 nt, Homo sapiens
  misc_RNA (1)...(19): siRNA sense strand
cgaaagacugguuaaagaa

SEQ ID NO: 404295 - RNA, 19 nt, Homo sapiens
  misc_RNA (1)...(19): siRNA sense strand
ggaaaguuacagagaagaa

SEQ ID NO: 404296 - RNA, 19 nt, Homo sapiens
  misc_RNA (1)...(19): siRNA sense strand
gaaagaaagggaguacaug

SEQ ID NO: 404297 - RNA, 19 nt, Homo sapiens
  misc_RNA (1)...(19): siRNA sense strand
ccaaacccauacuaauguu

SEQ ID NO: 404298 - RNA, 19 nt, Homo sapiens
  misc_RNA (1)...(19): siRNA sense strand
uggagaagaugcaccaaau

SEQ ID NO: 404299 - RNA, 19 nt, Homo sapiens
  misc_RNA (1)...(19): siRNA sense strand
agaacuggaugaaagcaaa

SEQ ID NO: 404300 - RNA, 19 nt, Homo sapiens
  misc_RNA (1)...(19): siRNA sense strand
gcacuaguuuccguaagga

SEQ ID NO: 404301 - RNA, 19 nt, Homo sapiens
  misc_RNA (1)...(19): siRNA sense strand
gaaaccaauaugccuacua

SEQ ID NO: 404302 - RNA, 19 nt, Homo sapiens
  misc_RNA (1)...(19): siRNA sense strand
gaucugaaauagcucaacu

SEQ ID NO: 404303 - RNA, 19 nt, Homo sapiens
  misc_RNA (1)...(19): siRNA sense strand
gggcgaaucugagcaccaa

SEQ ID NO: 404304 - RNA, 19 nt, Homo sapiens
  misc_RNA (1)...(19): siRNA sense strand
ggaaacaugcacaauucuu

SEQ ID NO: 404305 - RNA, 19 nt, Homo sapiens
  misc_RNA (1)...(19): siRNA sense strand
aaugaccagucucaauaua

SEQ ID NO: 404306 - RNA, 19 nt, Homo sapiens
  misc_RNA (1)...(19): siRNA sense strand
ggaacaaacacuucuggau

SEQ ID NO: 404307 - RNA, 19 nt, Homo sapiens
  misc_RNA (1)...(19): siRNA sense strand
cacagaagauacagcaaau

SEQ ID NO: 404308 - RNA, 19 nt, Homo sapiens
  misc_RNA (1)...(19): siRNA sense strand
acaaagguguguggagaaa

SEQ ID NO: 404309 - RNA, 19 nt, Homo sapiens
  misc_RNA (1)...(19): siRNA sense strand
cuugaugucugcacuaguu

SEQ ID NO: 404310 - RNA, 19 nt, Homo sapiens
  misc_RNA (1)...(19): siRNA sense strand
augcacaauucuuggauua

SEQ ID NO: 404311 - RNA, 19 nt, Homo sapiens
  misc_RNA (1)...(19): siRNA sense strand
ggcagagccugucggaaga

SEQ ID NO: 404312 - RNA, 19 nt, Homo sapiens
  misc_RNA (1)...(19): siRNA sense strand
ggaaaagguuacaaaggaa

SEQ ID NO: 404313 - RNA, 19 nt, Homo sapiens
  misc_RNA (1)...(19): siRNA sense strand
gaggaaaagugugaaauug

SEQ ID NO: 404314 - RNA, 19 nt, Homo sapiens
  misc_RNA (1)...(19): siRNA sense strand
gcaccaaaucuuucuuuua

SEQ ID NO: 404315 - RNA, 19 nt, Homo sapiens
  misc_RNA (1)...(19): siRNA sense strand
gagcaggagcugacacaga

SEQ ID NO: 404316 - RNA, 19 nt, Homo sapiens
  misc_RNA (1)...(19): siRNA sense strand
ugacaugugcccugaaaga

SEQ ID NO: 404317 - RNA, 19 nt, Homo sapiens
  misc_RNA (1)...(19): siRNA sense strand
uaucugaggaagccaauuu

SEQ ID NO: 404318 - RNA, 19 nt, Homo sapiens
  misc_RNA (1)...(19): siRNA sense strand
aggagcagcuuggcagaua

SEQ ID NO: 404319 - RNA, 19 nt, Homo sapiens
  misc_RNA (1)...(19): siRNA sense strand
gagaacuugugaagaucuu

SEQ ID NO: 404320 - RNA, 19 nt, Homo sapiens
  misc_RNA (1)...(19): siRNA sense strand
gaggaacgacuuagcugaa

SEQ ID NO: 404321 - RNA, 19 nt, Homo sapiens
  misc_RNA (1)...(19): siRNA sense strand
gaaacuggaacaaaucucu

SEQ ID NO: 404322 - RNA, 19 nt, Homo sapiens
  misc_RNA (1)...(19): siRNA sense strand
guggagaaaugcgcuauca

SEQ ID NO: 404323 - RNA, 19 nt, Homo sapiens
  misc_RNA (1)...(19): siRNA sense strand
cgaugucacuauuggagaa

SEQ ID NO: 404324 - RNA, 19 nt, Homo sapiens
  misc_RNA (1)...(19): siRNA sense strand
caagaaacuggaacaaauc

SEQ ID NO: 404325 - RNA, 19 nt, Homo sapiens
  misc_RNA (1)...(19): siRNA sense strand
agcaggagcugacacagaa

SEQ ID NO: 404326 - RNA, 19 nt, Homo sapiens
  misc_RNA (1)...(19): siRNA sense strand
gaaauugagaauagaacug

SEQ ID NO: 404327 - RNA, 19 nt, Homo sapiens
  misc_RNA (1)...(19): siRNA sense strand
acagagaguucagagcaaa

SEQ ID NO: 404328 - RNA, 19 nt, Homo sapiens
  misc_RNA (1)...(19): siRNA sense strand
guaucuccgucaagaagaa

SEQ ID NO: 404329 - RNA, 19 nt, Homo sapiens
  misc_RNA (1)...(19): siRNA sense strand
caacaagcagauaaggaaa

SEQ ID NO: 404330 - RNA, 19 nt, Homo sapiens
  misc_RNA (1)...(19): siRNA sense strand
ugaaagcaaacaacacuug

SEQ ID NO: 404331 - RNA, 19 nt, Homo sapiens
  misc_RNA (1)...(19): siRNA sense strand
ggaggaacucucuggaaug

SEQ ID NO: 404332 - RNA, 19 nt, Homo sapiens
  misc_RNA (1)...(19): siRNA sense strand
gcacgaccuuguucauacu

SEQ ID NO: 404333 - RNA, 19 nt, Homo sapiens
  misc_RNA (1)...(19): siRNA sense strand
ggaacaguguguccagcau

SEQ ID NO: 404334 - RNA, 19 nt, Homo sapiens
  misc_RNA (1)...(19): siRNA sense strand
gaacugagcccuucuuuaa

SEQ ID NO: 404335 - RNA, 19 nt, Homo sapiens
  misc_RNA (1)...(19): siRNA sense strand
gaauaaaccuugugcaguu

SEQ ID NO: 404336 - RNA, 19 nt, Homo sapiens
  misc_RNA (1)...(19): siRNA sense strand
gcagaaaggcagaaaguua

SEQ ID NO: 404337 - RNA, 19 nt, Homo sapiens
  misc_RNA (1)...(19): siRNA sense strand
gaagggugguggaauaauu

SEQ ID NO: 404338 - RNA, 19 nt, Homo sapiens
  misc_RNA (1)...(19): siRNA sense strand
gaaguuauguccagaucuu

SEQ ID NO: 404339 - RNA, 19 nt, Homo sapiens
  misc_RNA (1)...(19): siRNA sense strand
gcaauuagcccaggaacua

SEQ ID NO: 404340 - RNA, 19 nt, Homo sapiens
  misc_RNA (1)...(19): siRNA sense strand
gaagaauccucuaaagcaa

SEQ ID NO: 404341 - RNA, 19 nt, Homo sapiens
  misc_RNA (1)...(19): siRNA sense strand
gaugagccaugaugcauuu

SEQ ID NO: 404342 - RNA, 19 nt, Homo sapiens
  misc_RNA (1)...(19): siRNA sense strand
aagcuaaccucaccaagua

SEQ ID NO: 404343 - RNA, 19 nt, Homo sapiens
  misc_RNA (1)...(19): siRNA sense strand
ccacagcucuucagccaaa

SEQ ID NO: 404344 - RNA, 19 nt, Homo sapiens
  misc_RNA (1)...(19): siRNA sense strand
gaaugggucuuggcuauau

SEQ ID NO: 404345 - RNA, 19 nt, Homo sapiens
  misc_RNA (1)...(19): siRNA sense strand
uuaugaagcucgugcauuu

SEQ ID NO: 404346 - RNA, 19 nt, Homo sapiens
  misc_RNA (1)...(19): siRNA sense strand
gcuggaauuucacacaaua

SEQ ID NO: 404347 - RNA, 19 nt, Homo sapiens
  misc_RNA (1)...(19): siRNA sense strand
agaagagacuguucagaaa

SEQ ID NO: 404348 - RNA, 19 nt, Homo sapiens
  misc_RNA (1)...(19): siRNA sense strand
acaauaagguccuggcaaa

SEQ ID NO: 404349 - RNA, 19 nt, Homo sapiens
  misc_RNA (1)...(19): siRNA sense strand
gccaagcacuuacauugaa

SEQ ID NO: 404350 - RNA, 19 nt, Homo sapiens
  misc_RNA (1)...(19): siRNA sense strand
gcaaacauuggaaucauuu

SEQ ID NO: 404351 - RNA, 19 nt, Homo sapiens
  misc_RNA (1)...(19): siRNA sense strand
ggaaaugagagcagccaua

SEQ ID NO: 404352 - RNA, 19 nt, Homo sapiens
  misc_RNA (1)...(19): siRNA sense strand
gaacacauggacuaucauu

SEQ ID NO: 404353 - RNA, 19 nt, Homo sapiens
  misc_RNA (1)...(19): siRNA sense strand
cagaacacauggacuauca

SEQ ID NO: 404354 - RNA, 19 nt, Homo sapiens
  misc_RNA (1)...(19): siRNA sense strand
aaacuggccuguggacuaa

SEQ ID NO: 404355 - RNA, 19 nt, Homo sapiens
  misc_RNA (1)...(19): siRNA sense strand
gaauaauugcagugaguua

SEQ ID NO: 404356 - RNA, 19 nt, Homo sapiens
  misc_RNA (1)...(19): siRNA sense strand
gcucgauucucuucagauu

SEQ ID NO: 404357 - RNA, 19 nt, Homo sapiens
  misc_RNA (1)...(19): siRNA sense strand
cuaaagaccgaaaugauaa

SEQ ID NO: 404358 - RNA, 19 nt, Homo sapiens
  misc_RNA (1)...(19): siRNA sense strand
guccaacuguaaagcauua

SEQ ID NO: 404359 - RNA, 19 nt, Homo sapiens
  misc_RNA (1)...(19): siRNA sense strand
gaacgugccagcauugaug

SEQ ID NO: 404360 - RNA, 19 nt, Homo sapiens
  misc_RNA (1)...(19): siRNA sense strand
ggaacugagcccuucuuua

SEQ ID NO: 404361 - RNA, 19 nt, Homo sapiens
  misc_RNA (1)...(19): siRNA sense strand
cagaaaggcagaaaguuaa

SEQ ID NO: 404362 - RNA, 19 nt, Homo sapiens
  misc_RNA (1)...(19): siRNA sense strand
gauugaacaugauccaguu

SEQ ID NO: 404363 - RNA, 19 nt, Homo sapiens
  misc_RNA (1)...(19): siRNA sense strand
ggaagccaguguugaagug

SEQ ID NO: 404364 - RNA, 19 nt, Homo sapiens
  misc_RNA (1)...(19): siRNA sense strand
gcagaaacagcuuaauaau

SEQ ID NO: 404365 - RNA, 19 nt, Homo sapiens
  misc_RNA (1)...(19): siRNA sense strand
gcagaaaguuaaagaagcu

SEQ ID NO: 404366 - RNA, 19 nt, Homo sapiens
  misc_RNA (1)...(19): siRNA sense strand
gagcauucguguacaagga

SEQ ID NO: 404367 - RNA, 19 nt, Homo sapiens
  misc_RNA (1)...(19): siRNA sense strand
cagaagagacuguucagaa

SEQ ID NO: 404368 - RNA, 19 nt, Homo sapiens
  misc_RNA (1)...(19): siRNA sense strand
gccgagggauugaacauga

SEQ ID NO: 404369 - RNA, 19 nt, Homo sapiens
  misc_RNA (1)...(19): siRNA sense strand
caaguucucugccaaaggu

SEQ ID NO: 404370 - RNA, 19 nt, Homo sapiens
  misc_RNA (1)...(19): siRNA sense strand
gaggagagacugacuaaag

SEQ ID NO: 404371 - RNA, 19 nt, Homo sapiens
  misc_RNA (1)...(19): siRNA sense strand
cuacagacaucaccagcuu

SEQ ID NO: 404372 - RNA, 19 nt, Homo sapiens
  misc_RNA (1)...(19): siRNA sense strand
ucgauucucuucagauuga

SEQ ID NO: 404373 - RNA, 19 nt, Homo sapiens
  misc_RNA (1)...(19): siRNA sense strand
gaccagugcuguacaagag

SEQ ID NO: 404374 - RNA, 19 nt, Homo sapiens
  misc_RNA (1)...(19): siRNA sense strand
ccuuuggccugcacuaaua

SEQ ID NO: 404375 - RNA, 19 nt, Homo sapiens
  misc_RNA (1)...(19): siRNA sense strand
gaaguguggcucccuggua

SEQ ID NO: 404376 - RNA, 19 nt, Homo sapiens
  misc_RNA (1)...(19): siRNA sense strand
aaugguggcuguugcaauu

SEQ ID NO: 404377 - RNA, 19 nt, Homo sapiens
  misc_RNA (1)...(19): siRNA sense strand
gaaaugagagcagccauag

SEQ ID NO: 404378 - RNA, 19 nt, Homo sapiens
  misc_RNA (1)...(19): siRNA sense strand
gaagugauggagauaaugu

SEQ ID NO: 404379 - RNA, 19 nt, Homo sapiens
  misc_RNA (1)...(19): siRNA sense strand
guacaagagagacuacaaa

SEQ ID NO: 404380 - RNA, 19 nt, Homo sapiens
  misc_RNA (1)...(19): siRNA sense strand
gauugaacgugccagcauu

SEQ ID NO: 404381 - RNA, 19 nt, Homo sapiens
  misc_RNA (1)...(19): siRNA sense strand
uuaccaaacucuuuaccaa

SEQ ID NO: 404382 - RNA, 19 nt, Homo sapiens
  misc_RNA (1)...(19): siRNA sense strand
gcauuggaguugcagaaau

SEQ ID NO: 404383 - RNA, 19 nt, Homo sapiens
  misc_RNA (1)...(19): siRNA sense strand
ugaacaugauccaguuaaa

SEQ ID NO: 404384 - RNA, 19 nt, Homo sapiens
  misc_RNA (1)...(19): siRNA sense strand
ggugacagccacuaagaaa

SEQ ID NO: 404385 - RNA, 19 nt, Homo sapiens
  misc_RNA (1)...(19): siRNA sense strand
caugaugcauuuacuguca

SEQ ID NO: 404386 - RNA, 19 nt, Homo sapiens
  misc_RNA (1)...(19): siRNA sense strand
acuaaagaccgaaaugaua

SEQ ID NO: 404387 - RNA, 19 nt, Homo sapiens
  misc_RNA (1)...(19): siRNA sense strand
gggcagaugaugcuaagaa

SEQ ID NO: 404388 - RNA, 19 nt, Homo sapiens
  misc_RNA (1)...(19): siRNA sense strand
gaacuagaggagagacuga

SEQ ID NO: 404389 - RNA, 19 nt, Homo sapiens
  misc_RNA (1)...(19): siRNA sense strand
ugaugaggcuuacguagau

SEQ ID NO: 404390 - RNA, 19 nt, Homo sapiens
  misc_RNA (1)...(19): siRNA sense strand
cagaugaugcuaagaaguu

SEQ ID NO: 404391 - RNA, 19 nt, Homo sapiens
  misc_RNA (1)...(19): siRNA sense strand
ggaggugacucagaaagca

SEQ ID NO: 404392 - RNA, 19 nt, Homo sapiens
  misc_RNA (1)...(19): siRNA sense strand
uaauugcagugaguuauga

SEQ ID NO: 404393 - RNA, 19 nt, Homo sapiens
  misc_RNA (1)...(19): siRNA sense strand
uuucaaaccagucaaagua

SEQ ID NO: 404394 - RNA, 19 nt, Homo sapiens
  misc_RNA (1)...(19): siRNA sense strand
ugucgaagcuagaagaauc

SEQ ID NO: 404395 - RNA, 19 nt, Homo sapiens
  misc_RNA (1)...(19): siRNA sense strand
gaagagacuguucagaaag

SEQ ID NO: 404396 - RNA, 19 nt, Homo sapiens
  misc_RNA (1)...(19): siRNA sense strand
aggagagacugacuaaaga

SEQ ID NO: 404397 - RNA, 19 nt, Homo sapiens
  misc_RNA (1)...(19): siRNA sense strand
aagagacuguucagaaaga

SEQ ID NO: 404398 - RNA, 19 nt, Homo sapiens
  misc_RNA (1)...(19): siRNA sense strand
ggaaagcuaaccucaccaa

SEQ ID NO: 404399 - RNA, 19 nt, Homo sapiens
  misc_RNA (1)...(19): siRNA sense strand
gcauuuggagucacuagaa

SEQ ID NO: 404400 - RNA, 19 nt, Homo sapiens
  misc_RNA (1)...(19): siRNA sense strand
accauuggcuguaguaaga

SEQ ID NO: 404401 - RNA, 19 nt, Homo sapiens
  misc_RNA (1)...(19): siRNA sense strand
guguucagcuggaauuuca

SEQ ID NO: 404402 - RNA, 19 nt, Homo sapiens
  misc_RNA (1)...(19): siRNA sense strand
cauuuacugucaucaagaa

SEQ ID NO: 404403 - RNA, 19 nt, Homo sapiens
  misc_RNA (1)...(19): siRNA sense strand
cagcuggaauuucacacaa

SEQ ID NO: 404404 - RNA, 19 nt, Homo sapiens
  misc_RNA (1)...(19): siRNA sense strand
agaagaauccucuaaagca

SEQ ID NO: 404405 - RNA, 19 nt, Homo sapiens
  misc_RNA (1)...(19): siRNA sense strand
gcuucgcuuucaucucuua

SEQ ID NO: 404406 - RNA, 19 nt, Homo sapiens
  misc_RNA (1)...(19): siRNA sense strand
gcuaugaugcucacaagau

SEQ ID NO: 404407 - RNA, 19 nt, Homo sapiens
  misc_RNA (1)...(19): siRNA sense strand
gaauuucacacaauaaggu

SEQ ID NO: 404408 - RNA, 19 nt, Homo sapiens
  misc_RNA (1)...(19): siRNA sense strand
agaugaugcuaagaaguua

SEQ ID NO: 404409 - RNA, 19 nt, Homo sapiens
  misc_RNA (1)...(19): siRNA sense strand
ggacuaucauuuugcauug

SEQ ID NO: 404410 - RNA, 19 nt, Homo sapiens
  misc_RNA (1)...(19): siRNA sense strand
caaacucuuuaccaacaga

SEQ ID NO: 404411 - RNA, 19 nt, Homo sapiens
  misc_RNA (1)...(19): siRNA sense strand
uaaaccuugugcaguugua

SEQ ID NO: 404412 - RNA, 19 nt, Homo sapiens
  misc_RNA (1)...(19): siRNA sense strand
gaacaugauccaguuaaac

SEQ ID NO: 404413 - RNA, 19 nt, Homo sapiens
  misc_RNA (1)...(19): siRNA sense strand
cauuggaguugcagaaauc

SEQ ID NO: 404414 - RNA, 19 nt, Homo sapiens
  misc_RNA (1)...(19): siRNA sense strand
caagugcccugugagaagu

SEQ ID NO: 404415 - RNA, 19 nt, Homo sapiens
  misc_RNA (1)...(19): siRNA sense strand
gaaguaugugggcagauga

SEQ ID NO: 404416 - RNA, 19 nt, Homo sapiens
  misc_RNA (1)...(19): siRNA sense strand
auggaagggugguggaaua

SEQ ID NO: 404417 - RNA, 19 nt, Homo sapiens
  misc_RNA (1)...(19): siRNA sense strand
agacaucaccagcuucuug

SEQ ID NO: 404418 - RNA, 19 nt, Homo sapiens
  misc_RNA (1)...(19): siRNA sense strand
gaauacaugggugaacuga

SEQ ID NO: 404419 - RNA, 19 nt, Homo sapiens
  misc_RNA (1)...(19): siRNA sense strand
agaaguaugugggcagaug

SEQ ID NO: 404420 - RNA, 19 nt, Homo sapiens
  misc_RNA (1)...(19): siRNA sense strand
gcccuuacccgcuaugaug

SEQ ID NO: 404421 - RNA, 19 nt, Homo sapiens
  misc_RNA (1)...(19): siRNA sense strand
aaucccagcuccagaguca

SEQ ID NO: 404422 - RNA, 19 nt, Homo sapiens
  misc_RNA (1)...(19): siRNA sense strand
gcgaaaacaaggcuuauuu

SEQ ID NO: 404423 - RNA, 19 nt, Homo sapiens
  misc_RNA (1)...(19): siRNA sense strand
ucaaaccagucaaaguaca

SEQ ID NO: 404424 - RNA, 19 nt, Homo sapiens
  misc_RNA (1)...(19): siRNA sense strand
cuaugaugcucacaagaug

SEQ ID NO: 404425 - RNA, 19 nt, Homo sapiens
  misc_RNA (1)...(19): siRNA sense strand
uagaggagagacugacuaa

SEQ ID NO: 404426 - RNA, 19 nt, Homo sapiens
  misc_RNA (1)...(19): siRNA sense strand
ggaauaauugcagugaguu

SEQ ID NO: 404427 - RNA, 19 nt, Homo sapiens
  misc_RNA (1)...(19): siRNA sense strand
agcagaaacagcuuaauaa

SEQ ID NO: 404428 - RNA, 19 nt, Homo sapiens
  misc_RNA (1)...(19): siRNA sense strand
ugacuaaagaccgaaauga

SEQ ID NO: 404429 - RNA, 19 nt, Homo sapiens
  misc_RNA (1)...(19): siRNA sense strand
ucguggacauggacuguuu

SEQ ID NO: 404430 - RNA, 19 nt, Homo sapiens
  misc_RNA (1)...(19): siRNA sense strand
ggaguugcagaaauccuuu

SEQ ID NO: 404431 - RNA, 19 nt, Homo sapiens
  misc_RNA (1)...(19): siRNA sense strand
ccaaauccaagucuucuag

SEQ ID NO: 404432 - RNA, 19 nt, Homo sapiens
  misc_RNA (1)...(19): siRNA sense strand
gacuaaagaccgaaaugau

SEQ ID NO: 404433 - RNA, 19 nt, Homo sapiens
  misc_RNA (1)...(19): siRNA sense strand
uggaauaauugcagugagu

SEQ ID NO: 404434 - RNA, 19 nt, Homo sapiens
  misc_RNA (1)...(19): siRNA sense strand
ggagcuggguuauccaaga

SEQ ID NO: 404435 - RNA, 19 nt, Homo sapiens
  misc_RNA (1)...(19): siRNA sense strand
agaggaggaugaugaagaa

SEQ ID NO: 404436 - RNA, 19 nt, Homo sapiens
  misc_RNA (1)...(19): siRNA sense strand
ugaagaagaggaagaagaa

SEQ ID NO: 404437 - RNA, 19 nt, Homo sapiens
  misc_RNA (1)...(19): siRNA sense strand
ggaagaggaggaugaugaa

SEQ ID NO: 404438 - RNA, 19 nt, Homo sapiens
  misc_RNA (1)...(19): siRNA sense strand
ggaggaugaugaagaagag

SEQ ID NO: 404439 - RNA, 19 nt, Homo sapiens
  misc_RNA (1)...(19): siRNA sense strand
ggaagacccagcacuaagu

SEQ ID NO: 404440 - RNA, 19 nt, Homo sapiens
  misc_RNA (1)...(19): siRNA sense strand
ccucugagccuggcacaua

SEQ ID NO: 404441 - RNA, 19 nt, Homo sapiens
  misc_RNA (1)...(19): siRNA sense strand
ggcaccaucucaagucgaa

SEQ ID NO: 404442 - RNA, 19 nt, Homo sapiens
  misc_RNA (1)...(19): siRNA sense strand
ucagcaauuugaaugagaa

SEQ ID NO: 404443 - RNA, 19 nt, Homo sapiens
  misc_RNA (1)...(19): siRNA sense strand
agaggaagaugaggaggaa

SEQ ID NO: 404444 - RNA, 19 nt, Homo sapiens
  misc_RNA (1)...(19): siRNA sense strand
agucucaccugcagucuau

SEQ ID NO: 404445 - RNA, 19 nt, Homo sapiens
  misc_RNA (1)...(19): siRNA sense strand
gagcuggguuauccaagag

SEQ ID NO: 404446 - RNA, 19 nt, Homo sapiens
  misc_RNA (1)...(19): siRNA sense strand
ugcagucuaucagcaauuu

SEQ ID NO: 404447 - RNA, 19 nt, Homo sapiens
  misc_RNA (1)...(19): siRNA sense strand
aggaagaggaggaugauga

SEQ ID NO: 404448 - RNA, 19 nt, Homo sapiens
  misc_RNA (1)...(19): siRNA sense strand
gcaauuugaaugagaacca

SEQ ID NO: 404449 - RNA, 19 nt, Homo sapiens
  misc_RNA (1)...(19): siRNA sense strand
guggaagacccagcacuaa

SEQ ID NO: 404450 - RNA, 19 nt, Homo sapiens
  misc_RNA (1)...(19): siRNA sense strand
aagaagaggaagaagaaga

SEQ ID NO: 404451 - RNA, 19 nt, Homo sapiens
  misc_RNA (1)...(19): siRNA sense strand
aagaggaggaugaugaaga

SEQ ID NO: 404452 - RNA, 19 nt, Homo sapiens
  misc_RNA (1)...(19): siRNA sense strand
ggaggaagaggaggaugau

SEQ ID NO: 404453 - RNA, 19 nt, Homo sapiens
  misc_RNA (1)...(19): siRNA sense strand
cacaccaccuucgcugaaa

SEQ ID NO: 404454 - RNA, 19 nt, Homo sapiens
  misc_RNA (1)...(19): siRNA sense strand
ggaugaugaagaagaggaa

SEQ ID NO: 404455 - RNA, 19 nt, Homo sapiens
  misc_RNA (1)...(19): siRNA sense strand
uaucagcaauuugaaugag

SEQ ID NO: 404456 - RNA, 19 nt, Homo sapiens
  misc_RNA (1)...(19): siRNA sense strand
gaccaacgccugccaugcu

SEQ ID NO: 404457 - RNA, 19 nt, Homo sapiens
  misc_RNA (1)...(19): siRNA sense strand
cagucuaucagcaauuuga

SEQ ID NO: 404458 - RNA, 19 nt, Homo sapiens
  misc_RNA (1)...(19): siRNA sense strand
acacaccaccuucgcugaa

SEQ ID NO: 404459 - RNA, 19 nt, Homo sapiens
  misc_RNA (1)...(19): siRNA sense strand
ucuaucagcaauuugaaug

SEQ ID NO: 404460 - RNA, 19 nt, Homo sapiens
  misc_RNA (1)...(19): siRNA sense strand
aggcugaaguccugaaggu

SEQ ID NO: 404461 - RNA, 19 nt, Homo sapiens
  misc_RNA (1)...(19): siRNA sense strand
caacgccugccaugcuguu

SEQ ID NO: 404462 - RNA, 19 nt, Homo sapiens
  misc_RNA (1)...(19): siRNA sense strand
ugaugaagaagaggaagaa

SEQ ID NO: 404463 - RNA, 19 nt, Homo sapiens
  misc_RNA (1)...(19): siRNA sense strand
gaagaagaggaagaagaag

SEQ ID NO: 404464 - RNA, 19 nt, Homo sapiens
  misc_RNA (1)...(19): siRNA sense strand
uggaugaguccgagagaga

SEQ ID NO: 404465 - RNA, 19 nt, Homo sapiens
  misc_RNA (1)...(19): siRNA sense strand
gaugaguccgagagagaug

SEQ ID NO: 404466 - RNA, 19 nt, Homo sapiens
  misc_RNA (1)...(19): siRNA sense strand
ggagcuggguuauccaaga

SEQ ID NO: 404467 - RNA, 19 nt, Homo sapiens
  misc_RNA (1)...(19): siRNA sense strand
agaggaggaugaugaagaa

SEQ ID NO: 404468 - RNA, 19 nt, Homo sapiens
  misc_RNA (1)...(19): siRNA sense strand
ugaagaagaggaagaagaa

SEQ ID NO: 404469 - RNA, 19 nt, Homo sapiens
  misc_RNA (1)...(19): siRNA sense strand
ggaagaggaggaugaugaa

SEQ ID NO: 404470 - RNA, 19 nt, Homo sapiens
  misc_RNA (1)...(19): siRNA sense strand
ggaggaugaugaagaagag

SEQ ID NO: 404471 - RNA, 19 nt, Homo sapiens
  misc_RNA (1)...(19): siRNA sense strand
ggaagacccagcacuaagu

SEQ ID NO: 404472 - RNA, 19 nt, Homo sapiens
  misc_RNA (1)...(19): siRNA sense strand
ccucugagccuggcacaua

SEQ ID NO: 404473 - RNA, 19 nt, Homo sapiens
  misc_RNA (1)...(19): siRNA sense strand
ucagcaauuugaaugagaa

SEQ ID NO: 404474 - RNA, 19 nt, Homo sapiens
  misc_RNA (1)...(19): siRNA sense strand
ggcaccaucucaagucgaa

SEQ ID NO: 404475 - RNA, 19 nt, Homo sapiens
  misc_RNA (1)...(19): siRNA sense strand
agaggaagaugaggaggaa

SEQ ID NO: 404476 - RNA, 19 nt, Homo sapiens
  misc_RNA (1)...(19): siRNA sense strand
agucucaccugcagucuau

SEQ ID NO: 404477 - RNA, 19 nt, Homo sapiens
  misc_RNA (1)...(19): siRNA sense strand
gagcuggguuauccaagag

SEQ ID NO: 404478 - RNA, 19 nt, Homo sapiens
  misc_RNA (1)...(19): siRNA sense strand
ugcagucuaucagcaauuu

SEQ ID NO: 404479 - RNA, 19 nt, Homo sapiens
  misc_RNA (1)...(19): siRNA sense strand
aggaagaggaggaugauga

SEQ ID NO: 404480 - RNA, 19 nt, Homo sapiens
  misc_RNA (1)...(19): siRNA sense strand
gcaauuugaaugagaacca

SEQ ID NO: 404481 - RNA, 19 nt, Homo sapiens
  misc_RNA (1)...(19): siRNA sense strand
guggaagacccagcacuaa

SEQ ID NO: 404482 - RNA, 19 nt, Homo sapiens
  misc_RNA (1)...(19): siRNA sense strand
aagaagaggaagaagaaga

SEQ ID NO: 404483 - RNA, 19 nt, Homo sapiens
  misc_RNA (1)...(19): siRNA sense strand
aagaggaggaugaugaaga

SEQ ID NO: 404484 - RNA, 19 nt, Homo sapiens
  misc_RNA (1)...(19): siRNA sense strand
cacaccaccuucgcugaaa

SEQ ID NO: 404485 - RNA, 19 nt, Homo sapiens
  misc_RNA (1)...(19): siRNA sense strand
ggaggaagaggaggaugau

SEQ ID NO: 404486 - RNA, 19 nt, Homo sapiens
  misc_RNA (1)...(19): siRNA sense strand
ggaugaugaagaagaggaa

SEQ ID NO: 404487 - RNA, 19 nt, Homo sapiens
  misc_RNA (1)...(19): siRNA sense strand
uaucagcaauuugaaugag

SEQ ID NO: 404488 - RNA, 19 nt, Homo sapiens
  misc_RNA (1)...(19): siRNA sense strand
cagucuaucagcaauuuga

SEQ ID NO: 404489 - RNA, 19 nt, Homo sapiens
  misc_RNA (1)...(19): siRNA sense strand
acacaccaccuucgcugaa

SEQ ID NO: 404490 - RNA, 19 nt, Homo sapiens
  misc_RNA (1)...(19): siRNA sense strand
ucuaucagcaauuugaaug

SEQ ID NO: 404491 - RNA, 19 nt, Homo sapiens
  misc_RNA (1)...(19): siRNA sense strand
aggcugaaguccugaaggu

SEQ ID NO: 404492 - RNA, 19 nt, Homo sapiens
  misc_RNA (1)...(19): siRNA sense strand
ugaugaagaagaggaagaa

SEQ ID NO: 404493 - RNA, 19 nt, Homo sapiens
  misc_RNA (1)...(19): siRNA sense strand
gaagaagaggaagaagaag

SEQ ID NO: 404494 - RNA, 19 nt, Homo sapiens
  misc_RNA (1)...(19): siRNA sense strand
uggaugaguccgagagaga

SEQ ID NO: 404495 - RNA, 19 nt, Homo sapiens
  misc_RNA (1)...(19): siRNA sense strand
gaugaguccgagagagaug

SEQ ID NO: 404496 - RNA, 19 nt, Homo sapiens
  misc_RNA (1)...(19): siRNA sense strand
gaugggauaucucaaguuu

SEQ ID NO: 404497 - RNA, 19 nt, Homo sapiens
  misc_RNA (1)...(19): siRNA sense strand
gaucuacguugauaaggaa

SEQ ID NO: 404498 - RNA, 19 nt, Homo sapiens
  misc_RNA (1)...(19): siRNA sense strand
ugacgccuauccagaaaua

SEQ ID NO: 404499 - RNA, 19 nt, Homo sapiens
  misc_RNA (1)...(19): siRNA sense strand
caacagagcuacagaaaag

SEQ ID NO: 404500 - RNA, 19 nt, Homo sapiens
  misc_RNA (1)...(19): siRNA sense strand
gaugacgccuauccagaaa

SEQ ID NO: 404501 - RNA, 19 nt, Homo sapiens
  misc_RNA (1)...(19): siRNA sense strand
gaccuucaaucaaagcauu

SEQ ID NO: 404502 - RNA, 19 nt, Homo sapiens
  misc_RNA (1)...(19): siRNA sense strand
gucuagaccuucaaucaaa

SEQ ID NO: 404503 - RNA, 19 nt, Homo sapiens
  misc_RNA (1)...(19): siRNA sense strand
ugggauaucucaaguuuua

SEQ ID NO: 404504 - RNA, 19 nt, Homo sapiens
  misc_RNA (1)...(19): siRNA sense strand
gcagucuccuucaagcauu

SEQ ID NO: 404505 - RNA, 19 nt, Homo sapiens
  misc_RNA (1)...(19): siRNA sense strand
acucugaucuacguugaua

SEQ ID NO: 404506 - RNA, 19 nt, Homo sapiens
  misc_RNA (1)...(19): siRNA sense strand
ccaaggaugugcugaagcu

SEQ ID NO: 404507 - RNA, 19 nt, Homo sapiens
  misc_RNA (1)...(19): siRNA sense strand
caaagcauuagaugggaua

SEQ ID NO: 404508 - RNA, 19 nt, Homo sapiens
  misc_RNA (1)...(19): siRNA sense strand
uaaggaaauuggagaacca

SEQ ID NO: 404509 - RNA, 19 nt, Homo sapiens
  misc_RNA (1)...(19): siRNA sense strand
gagucuagaccuucaauca

SEQ ID NO: 404510 - RNA, 19 nt, Homo sapiens
  misc_RNA (1)...(19): siRNA sense strand
ugaccgagaagacuguuaa

SEQ ID NO: 404511 - RNA, 19 nt, Homo sapiens
  misc_RNA (1)...(19): siRNA sense strand
ugucgacccuggauguuga

SEQ ID NO: 404512 - RNA, 19 nt, Homo sapiens
  misc_RNA (1)...(19): siRNA sense strand
cuacguugauaaggaaauu

SEQ ID NO: 404513 - RNA, 19 nt, Homo sapiens
  misc_RNA (1)...(19): siRNA sense strand
ugaucuacguugauaagga

SEQ ID NO: 404514 - RNA, 19 nt, Homo sapiens
  misc_RNA (1)...(19): siRNA sense strand
gaggagggagagcuugaaa

SEQ ID NO: 404515 - RNA, 19 nt, Homo sapiens
  misc_RNA (1)...(19): siRNA sense strand
cuucaaucuucuagacuuu

SEQ ID NO: 404516 - RNA, 19 nt, Homo sapiens
  misc_RNA (1)...(19): siRNA sense strand
cuacucugaucuacguuga

SEQ ID NO: 404517 - RNA, 19 nt, Homo sapiens
  misc_RNA (1)...(19): siRNA sense strand
ccaucagccuuaccuaaag

SEQ ID NO: 404518 - RNA, 19 nt, Homo sapiens
  misc_RNA (1)...(19): siRNA sense strand
ccaugggaaugcaaucugu

SEQ ID NO: 404519 - RNA, 19 nt, Homo sapiens
  misc_RNA (1)...(19): siRNA sense strand
uaccuaaagcuaccagaaa

SEQ ID NO: 404520 - RNA, 19 nt, Homo sapiens
  misc_RNA (1)...(19): siRNA sense strand
gucaacagagcuacagaaa

SEQ ID NO: 404521 - RNA, 19 nt, Homo sapiens
  misc_RNA (1)...(19): siRNA sense strand
uggagugccucucaugauc

SEQ ID NO: 404522 - RNA, 19 nt, Homo sapiens
  misc_RNA (1)...(19): siRNA sense strand
ucaaucaaagcauuagaug

SEQ ID NO: 404523 - RNA, 19 nt, Homo sapiens
  misc_RNA (1)...(19): siRNA sense strand
ccuucaaucuucuagacuu

SEQ ID NO: 404524 - RNA, 19 nt, Homo sapiens
  misc_RNA (1)...(19): siRNA sense strand
cuucuagacuuugagaguu

SEQ ID NO: 404525 - RNA, 19 nt, Homo sapiens
  misc_RNA (1)...(19): siRNA sense strand
agaugacgccuauccagaa

SEQ ID NO: 404526 - RNA, 19 nt, Homo sapiens
  misc_RNA (1)...(19): siRNA sense strand
uccaucagccuuaccuaaa

SEQ ID NO: 404527 - RNA, 19 nt, Homo sapiens
  misc_RNA (1)...(19): siRNA sense strand
acagaaaagucaguaaaga

SEQ ID NO: 404528 - RNA, 19 nt, Homo sapiens
  misc_RNA (1)...(19): siRNA sense strand
ugccucagaugacgccuau

SEQ ID NO: 404529 - RNA, 19 nt, Homo sapiens
  misc_RNA (1)...(19): siRNA sense strand
gaccgagaagacuguuaaa

SEQ ID NO: 404530 - RNA, 19 nt, Homo sapiens
  misc_RNA (1)...(19): siRNA sense strand
uucuagacuuugagaguuu

SEQ ID NO: 404531 - RNA, 19 nt, Homo sapiens
  misc_RNA (1)...(19): siRNA sense strand
ugauaaggaaauuggagaa

SEQ ID NO: 404532 - RNA, 19 nt, Homo sapiens
  misc_RNA (1)...(19): siRNA sense strand
gaguggagugccucucaug

SEQ ID NO: 404533 - RNA, 19 nt, Homo sapiens
  misc_RNA (1)...(19): siRNA sense strand
ccugaagagcgccagauug

SEQ ID NO: 404534 - RNA, 19 nt, Homo sapiens
  misc_RNA (1)...(19): siRNA sense strand
gcacggcgcugcaaucuuc

SEQ ID NO: 404535 - RNA, 19 nt, Homo sapiens
  misc_RNA (1)...(19): siRNA sense strand
caacuacucuaucguggau

SEQ ID NO: 404536 - RNA, 19 nt, Homo sapiens
  misc_RNA (1)...(19): siRNA sense strand
ucaaaggaguaaagucuag

SEQ ID NO: 404537 - RNA, 19 nt, Homo sapiens
  misc_RNA (1)...(19): siRNA sense strand
gcacggguguuggcggaaa

SEQ ID NO: 404538 - RNA, 19 nt, Homo sapiens
  misc_RNA (1)...(19): siRNA sense strand
gaucaucagccgccucuuc

SEQ ID NO: 404539 - RNA, 19 nt, Homo sapiens
  misc_RNA (1)...(19): siRNA sense strand
uaucguggauuuccucauc

SEQ ID NO: 404540 - RNA, 19 nt, Homo sapiens
  misc_RNA (1)...(19): siRNA sense strand
ggacuacagcgccgaguuc

SEQ ID NO: 404541 - RNA, 19 nt, Homo sapiens
  misc_RNA (1)...(19): siRNA sense strand
gcagacgucgagcagagua

SEQ ID NO: 404542 - RNA, 19 nt, Homo sapiens
  misc_RNA (1)...(19): siRNA sense strand
gaugaaggacccuguagca

SEQ ID NO: 404543 - RNA, 19 nt, Homo sapiens
  misc_RNA (1)...(19): siRNA sense strand
ggaacuacuucgggcuguu

SEQ ID NO: 404544 - RNA, 19 nt, Homo sapiens
  misc_RNA (1)...(19): siRNA sense strand
acuacucuaucguggauuu

SEQ ID NO: 404545 - RNA, 19 nt, Homo sapiens
  misc_RNA (1)...(19): siRNA sense strand
aaacaguaccagcagauca

SEQ ID NO: 404546 - RNA, 19 nt, Homo sapiens
  misc_RNA (1)...(19): siRNA sense strand
gaaacaguaccagcagauc

SEQ ID NO: 404547 - RNA, 19 nt, Homo sapiens
  misc_RNA (1)...(19): siRNA sense strand
ucgagaagugcgacccuua

SEQ ID NO: 404548 - RNA, 19 nt, Homo sapiens
  misc_RNA (1)...(19): siRNA sense strand
ccucaaaggaguaaagucu

SEQ ID NO: 404549 - RNA, 19 nt, Homo sapiens
  misc_RNA (1)...(19): siRNA sense strand
gcaacgacacagucaucug

SEQ ID NO: 404550 - RNA, 19 nt, Homo sapiens
  misc_RNA (1)...(19): siRNA sense strand
gugaagccucaaaggagua

SEQ ID NO: 404551 - RNA, 19 nt, Homo sapiens
  misc_RNA (1)...(19): siRNA sense strand
cagagcagccgcagagcau

SEQ ID NO: 404552 - RNA, 19 nt, Homo sapiens
  misc_RNA (1)...(19): siRNA sense strand
cuacccacaagaaacagua

SEQ ID NO: 404553 - RNA, 19 nt, Homo sapiens
  misc_RNA (1)...(19): siRNA sense strand
caacgaggagggcaucacu

SEQ ID NO: 404554 - RNA, 19 nt, Homo sapiens
  misc_RNA (1)...(19): siRNA sense strand
gugcaacgacacagucauc

SEQ ID NO: 404555 - RNA, 19 nt, Homo sapiens
  misc_RNA (1)...(19): siRNA sense strand
gaugagaucuuccuacugu

SEQ ID NO: 404556 - RNA, 19 nt, Homo sapiens
  misc_RNA (1)...(19): siRNA sense strand
ggaguacccugaggcuaua

SEQ ID NO: 404557 - RNA, 19 nt, Homo sapiens
  misc_RNA (1)...(19): siRNA sense strand
ucaagagcaucaugaagaa

SEQ ID NO: 404558 - RNA, 19 nt, Homo sapiens
  misc_RNA (1)...(19): siRNA sense strand
caagaucaauggcuacaca

SEQ ID NO: 404559 - RNA, 19 nt, Homo sapiens
  misc_RNA (1)...(19): siRNA sense strand
gugacaaggugcagaaaga

SEQ ID NO: 404560 - RNA, 19 nt, Homo sapiens
  misc_RNA (1)...(19): siRNA sense strand
ucagugagcccauggaauu

SEQ ID NO: 404561 - RNA, 19 nt, Homo sapiens
  misc_RNA (1)...(19): siRNA sense strand
ggacauaugagaccuucaa

SEQ ID NO: 404562 - RNA, 19 nt, Homo sapiens
  misc_RNA (1)...(19): siRNA sense strand
ggauugaggagaaacguaa

SEQ ID NO: 404563 - RNA, 19 nt, Homo sapiens
  misc_RNA (1)...(19): siRNA sense strand
caacugagcccaugcugau

SEQ ID NO: 404564 - RNA, 19 nt, Homo sapiens
  misc_RNA (1)...(19): siRNA sense strand
cucaagaucugccgaguga

SEQ ID NO: 404565 - RNA, 19 nt, Homo sapiens
  misc_RNA (1)...(19): siRNA sense strand
ggcuauaacucgccuagug

SEQ ID NO: 404566 - RNA, 19 nt, Homo sapiens
  misc_RNA (1)...(19): siRNA sense strand
gcacagauaccaccaagac

SEQ ID NO: 404567 - RNA, 19 nt, Homo sapiens
  misc_RNA (1)...(19): siRNA sense strand
aagaggacauugaggugua

SEQ ID NO: 404568 - RNA, 19 nt, Homo sapiens
  misc_RNA (1)...(19): siRNA sense strand
ggaauccagugugugaaga

SEQ ID NO: 404569 - RNA, 19 nt, Homo sapiens
  misc_RNA (1)...(19): siRNA sense strand
ugagcaccaucaacuauga

SEQ ID NO: 404570 - RNA, 19 nt, Homo sapiens
  misc_RNA (1)...(19): siRNA sense strand
cccacgagcuuguaggaaa

SEQ ID NO: 404571 - RNA, 19 nt, Homo sapiens
  misc_RNA (1)...(19): siRNA sense strand
gcaguuugaugaugaagac

SEQ ID NO: 404572 - RNA, 19 nt, Homo sapiens
  misc_RNA (1)...(19): siRNA sense strand
gcagaaagaggacauugag

SEQ ID NO: 404573 - RNA, 19 nt, Homo sapiens
  misc_RNA (1)...(19): siRNA sense strand
gggaugagaucuuccuacu

SEQ ID NO: 404574 - RNA, 19 nt, Homo sapiens
  misc_RNA (1)...(19): siRNA sense strand
ggcgagaggagcacagaua

SEQ ID NO: 404575 - RNA, 19 nt, Homo sapiens
  misc_RNA (1)...(19): siRNA sense strand
gcuauaacucgccuaguga

SEQ ID NO: 404576 - RNA, 19 nt, Homo sapiens
  misc_RNA (1)...(19): siRNA sense strand
caacaaccccuuccaaguu

SEQ ID NO: 404577 - RNA, 19 nt, Homo sapiens
  misc_RNA (1)...(19): siRNA sense strand
ugagucagaucagcuccua

SEQ ID NO: 404578 - RNA, 19 nt, Homo sapiens
  misc_RNA (1)...(19): siRNA sense strand
cuuccaaguuccuauagaa

SEQ ID NO: 404579 - RNA, 19 nt, Homo sapiens
  misc_RNA (1)...(19): siRNA sense strand
ggcaugcgcuuccgcuaca

SEQ ID NO: 404580 - RNA, 19 nt, Homo sapiens
  misc_RNA (1)...(19): siRNA sense strand
cauaugagaccuucaagag

SEQ ID NO: 404581 - RNA, 19 nt, Homo sapiens
  misc_RNA (1)...(19): siRNA sense strand
ccaaguuccuauagaagag

SEQ ID NO: 404582 - RNA, 19 nt, Homo sapiens
  misc_RNA (1)...(19): siRNA sense strand
ggacauugagguguauuuc

SEQ ID NO: 404583 - RNA, 19 nt, Homo sapiens
  misc_RNA (1)...(19): siRNA sense strand
gggaaggaacgcugucaga

SEQ ID NO: 404584 - RNA, 19 nt, Homo sapiens
  misc_RNA (1)...(19): siRNA sense strand
ccacgagcuuguaggaaag

SEQ ID NO: 404585 - RNA, 19 nt, Homo sapiens
  misc_RNA (1)...(19): siRNA sense strand
gaauccagugugugaagaa

SEQ ID NO: 404586 - RNA, 19 nt, Homo sapiens
  misc_RNA (1)...(19): siRNA sense strand
gcauccagaccaacaacaa

SEQ ID NO: 404587 - RNA, 19 nt, Homo sapiens
  misc_RNA (1)...(19): siRNA sense strand
cagcugcaguuugaugaug

SEQ ID NO: 404588 - RNA, 19 nt, Homo sapiens
  misc_RNA (1)...(19): siRNA sense strand
gagaggagcacagauacca

SEQ ID NO: 404589 - RNA, 19 nt, Homo sapiens
  misc_RNA (1)...(19): siRNA sense strand
caucccaucuuugacaauc

SEQ ID NO: 404590 - RNA, 19 nt, Homo sapiens
  misc_RNA (1)...(19): siRNA sense strand
gcugcaguuugaugaugaa

SEQ ID NO: 404591 - RNA, 19 nt, Homo sapiens
  misc_RNA (1)...(19): siRNA sense strand
uccaguaccugccagauac

SEQ ID NO: 404592 - RNA, 19 nt, Homo sapiens
  misc_RNA (1)...(19): siRNA sense strand
gacauugagguguauuuca

SEQ ID NO: 404593 - RNA, 19 nt, Homo sapiens
  misc_RNA (1)...(19): siRNA sense strand
cugccgagcucaagaucug

SEQ ID NO: 404594 - RNA, 19 nt, Homo sapiens
  misc_RNA (1)...(19): siRNA sense strand
uggaguacccugaggcuau

SEQ ID NO: 404595 - RNA, 19 nt, Homo sapiens
  misc_RNA (1)...(19): siRNA sense strand
gccgggauggcuucuauga

SEQ ID NO: 404596 - RNA, 19 nt, Homo sapiens
  misc_RNA (1)...(19): siRNA sense strand
gaggagaaacguaaaagga

SEQ ID NO: 404597 - RNA, 19 nt, Homo sapiens
  misc_RNA (1)...(19): siRNA sense strand
uuucucaucccaucuuuga

SEQ ID NO: 404598 - RNA, 19 nt, Homo sapiens
  misc_RNA (1)...(19): siRNA sense strand
caagaucugccgagugaac

SEQ ID NO: 404599 - RNA, 19 nt, Homo sapiens
  misc_RNA (1)...(19): siRNA sense strand
gcaccgacaaguggccauu

SEQ ID NO: 404600 - RNA, 19 nt, Homo sapiens
  misc_RNA (1)...(19): siRNA sense strand
cugccgggauggcuucuau

SEQ ID NO: 404601 - RNA, 19 nt, Homo sapiens
  misc_RNA (1)...(19): siRNA sense strand
ccugagcaccaucaacuau

SEQ ID NO: 404602 - RNA, 19 nt, Homo sapiens
  misc_RNA (1)...(19): siRNA sense strand
aagagcaucaugaagaaga

SEQ ID NO: 404603 - RNA, 19 nt, Homo sapiens
  misc_RNA (1)...(19): siRNA sense strand
ucaccggauugaggagaaa

SEQ ID NO: 404604 - RNA, 19 nt, Homo sapiens
  misc_RNA (1)...(19): siRNA sense strand
gggaauccagugugugaag

SEQ ID NO: 404605 - RNA, 19 nt, Homo sapiens
  misc_RNA (1)...(19): siRNA sense strand
ucaugaagaagaguccuuu

SEQ ID NO: 404606 - RNA, 19 nt, Homo sapiens
  misc_RNA (1)...(19): siRNA sense strand
gauugaggagaaacguaaa

SEQ ID NO: 404607 - RNA, 19 nt, Homo sapiens
  misc_RNA (1)...(19): siRNA sense strand
ugagaucuuccuacugugu

SEQ ID NO: 404608 - RNA, 19 nt, Homo sapiens
  misc_RNA (1)...(19): siRNA sense strand
caacacugccgagcucaag

SEQ ID NO: 404609 - RNA, 19 nt, Homo sapiens
  misc_RNA (1)...(19): siRNA sense strand
cgucaucccugagcaccau

SEQ ID NO: 404610 - RNA, 19 nt, Homo sapiens
  misc_RNA (1)...(19): siRNA sense strand
cgagaaagcugaggaaugg

SEQ ID NO: 404611 - RNA, 19 nt, Homo sapiens
  misc_RNA (1)...(19): siRNA sense strand
ucaaacagauaucucuaug

SEQ ID NO: 404612 - RNA, 19 nt, Homo sapiens
  misc_RNA (1)...(19): siRNA sense strand
aaacagauaucucuaugcu

SEQ ID NO: 404613 - RNA, 19 nt, Homo sapiens
  misc_RNA (1)...(19): siRNA sense strand
ggacaugggcagagccuau

SEQ ID NO: 404614 - RNA, 19 nt, Homo sapiens
  misc_RNA (1)...(19): siRNA sense strand
gggucuaucuucagggauu

SEQ ID NO: 404615 - RNA, 19 nt, Homo sapiens
  misc_RNA (1)...(19): siRNA sense strand
ggucuaucuucagggauua

SEQ ID NO: 404616 - RNA, 19 nt, Homo sapiens
  misc_RNA (1)...(19): siRNA sense strand
ggacauaaugauauccaau

SEQ ID NO: 404617 - RNA, 19 nt, Homo sapiens
  misc_RNA (1)...(19): siRNA sense strand
cuaugaugcugcccaaaga

SEQ ID NO: 404618 - RNA, 19 nt, Homo sapiens
  misc_RNA (1)...(19): siRNA sense strand
cagagccuauugggacaua

SEQ ID NO: 404619 - RNA, 19 nt, Homo sapiens
  misc_RNA (1)...(19): siRNA sense strand
ugaaagcuggcguucguuu

SEQ ID NO: 404620 - RNA, 19 nt, Homo sapiens
  misc_RNA (1)...(19): siRNA sense strand
caacgagaaagcugaggaa

SEQ ID NO: 404621 - RNA, 19 nt, Homo sapiens
  misc_RNA (1)...(19): siRNA sense strand
gacauaaugauauccaauc

SEQ ID NO: 404622 - RNA, 19 nt, Homo sapiens
  misc_RNA (1)...(19): siRNA sense strand
ugucugggcugcuaaacuc

SEQ ID NO: 404623 - RNA, 19 nt, Homo sapiens
  misc_RNA (1)...(19): siRNA sense strand
cuauugggacauaaugaua

SEQ ID NO: 404624 - RNA, 19 nt, Homo sapiens
  misc_RNA (1)...(19): siRNA sense strand
gaccugacggccugccuaa

SEQ ID NO: 404625 - RNA, 19 nt, Homo sapiens
  misc_RNA (1)...(19): siRNA sense strand
guuccagggucuaucuuca

SEQ ID NO: 404626 - RNA, 19 nt, Homo sapiens
  misc_RNA (1)...(19): siRNA sense strand
gauauccaaucaccaaaau

SEQ ID NO: 404627 - RNA, 19 nt, Homo sapiens
  misc_RNA (1)...(19): siRNA sense strand
gggacauaaugauauccaa

SEQ ID NO: 404628 - RNA, 19 nt, Homo sapiens
  misc_RNA (1)...(19): siRNA sense strand
cuucagggauuaauagacu

SEQ ID NO: 404629 - RNA, 19 nt, Homo sapiens
  misc_RNA (1)...(19): siRNA sense strand
ucaccaaaauucaaacaga

SEQ ID NO: 404630 - RNA, 19 nt, Homo sapiens
  misc_RNA (1)...(19): siRNA sense strand
cugacggccugccuaagaa

SEQ ID NO: 404631 - RNA, 19 nt, Homo sapiens
  misc_RNA (1)...(19): siRNA sense strand
agugaaagcuggcguucgu

SEQ ID NO: 404632 - RNA, 19 nt, Homo sapiens
  misc_RNA (1)...(19): siRNA sense strand
ccugacggccugccuaaga

SEQ ID NO: 404633 - RNA, 19 nt, Homo sapiens
  misc_RNA (1)...(19): siRNA sense strand
gacaugggcagagccuauu

SEQ ID NO: 404634 - RNA, 19 nt, Homo sapiens
  misc_RNA (1)...(19): siRNA sense strand
uaucuucagggauuaauag

SEQ ID NO: 404635 - RNA, 19 nt, Homo sapiens
  misc_RNA (1)...(19): siRNA sense strand
gagccuauugggacauaau

SEQ ID NO: 404636 - RNA, 19 nt, Homo sapiens
  misc_RNA (1)...(19): siRNA sense strand
gaaagcuggcguucguuuu

SEQ ID NO: 404637 - RNA, 19 nt, Homo sapiens
  misc_RNA (1)...(19): siRNA sense strand
agggauuaauagacuacua

SEQ ID NO: 404638 - RNA, 19 nt, Homo sapiens
  misc_RNA (1)...(19): siRNA sense strand
gaagaccacuccagcgaua

SEQ ID NO: 404639 - RNA, 19 nt, Homo sapiens
  misc_RNA (1)...(19): siRNA sense strand
gcaauaacuucaucuaugg

SEQ ID NO: 404640 - RNA, 19 nt, Homo sapiens
  misc_RNA (1)...(19): siRNA sense strand
ccagcgauauguucaacua

SEQ ID NO: 404641 - RNA, 19 nt, Homo sapiens
  misc_RNA (1)...(19): siRNA sense strand
gcgauauguucaacuauga

SEQ ID NO: 404642 - RNA, 19 nt, Homo sapiens
  misc_RNA (1)...(19): siRNA sense strand
auaauuaccugaccaagga

SEQ ID NO: 404643 - RNA, 19 nt, Homo sapiens
  misc_RNA (1)...(19): siRNA sense strand
gcucaaagguggugguucu

SEQ ID NO: 404644 - RNA, 19 nt, Homo sapiens
  misc_RNA (1)...(19): siRNA sense strand
gacggaaacagcaauaauu

SEQ ID NO: 404645 - RNA, 19 nt, Homo sapiens
  misc_RNA (1)...(19): siRNA sense strand
gaaggcaggauucugaaga

SEQ ID NO: 404646 - RNA, 19 nt, Homo sapiens
  misc_RNA (1)...(19): siRNA sense strand
ugcaauaacuucaucuaug

SEQ ID NO: 404647 - RNA, 19 nt, Homo sapiens
  misc_RNA (1)...(19): siRNA sense strand
aggagcagcuggugaagaa

SEQ ID NO: 404648 - RNA, 19 nt, Homo sapiens
  misc_RNA (1)...(19): siRNA sense strand
acggaaacagcaauaauua

SEQ ID NO: 404649 - RNA, 19 nt, Homo sapiens
  misc_RNA (1)...(19): siRNA sense strand
gcaauaauuaccugaccaa

SEQ ID NO: 404650 - RNA, 19 nt, Homo sapiens
  misc_RNA (1)...(19): siRNA sense strand
gaacuccugcaauaacuuc

SEQ ID NO: 404651 - RNA, 19 nt, Homo sapiens
  misc_RNA (1)...(19): siRNA sense strand
aggagugccucaagaaaug

SEQ ID NO: 404652 - RNA, 19 nt, Homo sapiens
  misc_RNA (1)...(19): siRNA sense strand
ccugccagcuguuugugua

SEQ ID NO: 404653 - RNA, 19 nt, Homo sapiens
  misc_RNA (1)...(19): siRNA sense strand
ggauuccucugucccaagu

SEQ ID NO: 404654 - RNA, 19 nt, Homo sapiens
  misc_RNA (1)...(19): siRNA sense strand
acaaggagcagcuggugaa

SEQ ID NO: 404655 - RNA, 19 nt, Homo sapiens
  misc_RNA (1)...(19): siRNA sense strand
ggugguacaaugucacuga

SEQ ID NO: 404656 - RNA, 19 nt, Homo sapiens
  misc_RNA (1)...(19): siRNA sense strand
ggaaacagcaauaauuacc

SEQ ID NO: 404657 - RNA, 19 nt, Homo sapiens
  misc_RNA (1)...(19): siRNA sense strand
ccuagguggugguacaaug

SEQ ID NO: 404658 - RNA, 19 nt, Homo sapiens
  misc_RNA (1)...(19): siRNA sense strand
ugacggaaacagcaauaau

SEQ ID NO: 404659 - RNA, 19 nt, Homo sapiens
  misc_RNA (1)...(19): siRNA sense strand
gagcagcuggugaagaaca

SEQ ID NO: 404660 - RNA, 19 nt, Homo sapiens
  misc_RNA (1)...(19): siRNA sense strand
gauccugccagcuguuugu

SEQ ID NO: 404661 - RNA, 19 nt, Homo sapiens
  misc_RNA (1)...(19): siRNA sense strand
ggaacuccugcaauaacuu

SEQ ID NO: 404662 - RNA, 19 nt, Homo sapiens
  misc_RNA (1)...(19): siRNA sense strand
gaaacagcaauaauuaccu

SEQ ID NO: 404663 - RNA, 19 nt, Homo sapiens
  misc_RNA (1)...(19): siRNA sense strand
agcgauauguucaacuaug

SEQ ID NO: 404664 - RNA, 19 nt, Homo sapiens
  misc_RNA (1)...(19): siRNA sense strand
ccacuccagcgauauguuc

SEQ ID NO: 404665 - RNA, 19 nt, Homo sapiens
  misc_RNA (1)...(19): siRNA sense strand
ucaagaaaugugccacugu

SEQ ID NO: 404666 - RNA, 19 nt, Homo sapiens
  misc_RNA (1)...(19): siRNA sense strand
gucuggagcuccggagaug

SEQ ID NO: 404667 - RNA, 19 nt, Homo sapiens
  misc_RNA (1)...(19): siRNA sense strand
gcaauucucugaagcguuu

SEQ ID NO: 404668 - RNA, 19 nt, Homo sapiens
  misc_RNA (1)...(19): siRNA sense strand
ggacagaaaguguuaauuc

SEQ ID NO: 404669 - RNA, 19 nt, Homo sapiens
  misc_RNA (1)...(19): siRNA sense strand
gagaauaugacuaugauga

SEQ ID NO: 404670 - RNA, 19 nt, Homo sapiens
  misc_RNA (1)...(19): siRNA sense strand
ggacaugcuuuggaagaaa

SEQ ID NO: 404671 - RNA, 19 nt, Homo sapiens
  misc_RNA (1)...(19): siRNA sense strand
gaauaugacuaugaugaug

SEQ ID NO: 404672 - RNA, 19 nt, Homo sapiens
  misc_RNA (1)...(19): siRNA sense strand
gaugggacaugcuuuggaa

SEQ ID NO: 404673 - RNA, 19 nt, Homo sapiens
  misc_RNA (1)...(19): siRNA sense strand
gaagaagaguugaggaaaa

SEQ ID NO: 404674 - RNA, 19 nt, Homo sapiens
  misc_RNA (1)...(19): siRNA sense strand
caaagggcgucuacagaga

SEQ ID NO: 404675 - RNA, 19 nt, Homo sapiens
  misc_RNA (1)...(19): siRNA sense strand
acaagagacuuauggagaa

SEQ ID NO: 404676 - RNA, 19 nt, Homo sapiens
  misc_RNA (1)...(19): siRNA sense strand
gauauggcacugcuuauga

SEQ ID NO: 404677 - RNA, 19 nt, Homo sapiens
  misc_RNA (1)...(19): siRNA sense strand
ccucaucccugauuauaau

SEQ ID NO: 404678 - RNA, 19 nt, Homo sapiens
  misc_RNA (1)...(19): siRNA sense strand
ugacuaugaugauggauau

SEQ ID NO: 404679 - RNA, 19 nt, Homo sapiens
  misc_RNA (1)...(19): siRNA sense strand
ucgauguggugauuaauaa

SEQ ID NO: 404680 - RNA, 19 nt, Homo sapiens
  misc_RNA (1)...(19): siRNA sense strand
guacuuccaucucaaugau

SEQ ID NO: 404681 - RNA, 19 nt, Homo sapiens
  misc_RNA (1)...(19): siRNA sense strand
caagaagaguggacuaacu

SEQ ID NO: 404682 - RNA, 19 nt, Homo sapiens
  misc_RNA (1)...(19): siRNA sense strand
ggaagaagaguugaggaaa

SEQ ID NO: 404683 - RNA, 19 nt, Homo sapiens
  misc_RNA (1)...(19): siRNA sense strand
aaacccaccuugcguacaa

SEQ ID NO: 404684 - RNA, 19 nt, Homo sapiens
  misc_RNA (1)...(19): siRNA sense strand
uaaaacaguucccuaaguu

SEQ ID NO: 404685 - RNA, 19 nt, Homo sapiens
  misc_RNA (1)...(19): siRNA sense strand
ccaaaguggugcugauuac

SEQ ID NO: 404686 - RNA, 19 nt, Homo sapiens
  misc_RNA (1)...(19): siRNA sense strand
gagacaaggccaaggaaga

SEQ ID NO: 404687 - RNA, 19 nt, Homo sapiens
  misc_RNA (1)...(19): siRNA sense strand
ucagugaggagacuuauga

SEQ ID NO: 404688 - RNA, 19 nt, Homo sapiens
  misc_RNA (1)...(19): siRNA sense strand
uccaggaguuaacauauuu

SEQ ID NO: 404689 - RNA, 19 nt, Homo sapiens
  misc_RNA (1)...(19): siRNA sense strand
aagaagaaaccuugacaaa

SEQ ID NO: 404690 - RNA, 19 nt, Homo sapiens
  misc_RNA (1)...(19): siRNA sense strand
gugcugauuacuaugauua

SEQ ID NO: 404691 - RNA, 19 nt, Homo sapiens
  misc_RNA (1)...(19): siRNA sense strand
gaugaacagaguuaugauu

SEQ ID NO: 404692 - RNA, 19 nt, Homo sapiens
  misc_RNA (1)...(19): siRNA sense strand
caaugaugaucuccauguu

SEQ ID NO: 404693 - RNA, 19 nt, Homo sapiens
  misc_RNA (1)...(19): siRNA sense strand
gaacagaguuaugauuccu

SEQ ID NO: 404694 - RNA, 19 nt, Homo sapiens
  misc_RNA (1)...(19): siRNA sense strand
gugaggagacuuaugauuc

SEQ ID NO: 404695 - RNA, 19 nt, Homo sapiens
  misc_RNA (1)...(19): siRNA sense strand
ucugaagcguuuacaagaa

SEQ ID NO: 404696 - RNA, 19 nt, Homo sapiens
  misc_RNA (1)...(19): siRNA sense strand
gacaugcuuuggaagaaau

SEQ ID NO: 404697 - RNA, 19 nt, Homo sapiens
  misc_RNA (1)...(19): siRNA sense strand
gggacaugcuuuggaagaa

SEQ ID NO: 404698 - RNA, 19 nt, Homo sapiens
  misc_RNA (1)...(19): siRNA sense strand
ccacguggcaauucucuga

SEQ ID NO: 404699 - RNA, 19 nt, Homo sapiens
  misc_RNA (1)...(19): siRNA sense strand
caagagacuuauggagaau

SEQ ID NO: 404700 - RNA, 19 nt, Homo sapiens
  misc_RNA (1)...(19): siRNA sense strand
acaugaagcugggacagaa

SEQ ID NO: 404701 - RNA, 19 nt, Homo sapiens
  misc_RNA (1)...(19): siRNA sense strand
cuacagagaccagccauau

SEQ ID NO: 404702 - RNA, 19 nt, Homo sapiens
  misc_RNA (1)...(19): siRNA sense strand
gagaaggcaaggaugaaga

SEQ ID NO: 404703 - RNA, 19 nt, Homo sapiens
  misc_RNA (1)...(19): siRNA sense strand
gcugggacagaaaguguua

SEQ ID NO: 404704 - RNA, 19 nt, Homo sapiens
  misc_RNA (1)...(19): siRNA sense strand
gacagaaaguguuaauucc

SEQ ID NO: 404705 - RNA, 19 nt, Homo sapiens
  misc_RNA (1)...(19): siRNA sense strand
gauguggugauuaauaaga

SEQ ID NO: 404706 - RNA, 19 nt, Homo sapiens
  misc_RNA (1)...(19): siRNA sense strand
guaaaacaguucccuaagu

SEQ ID NO: 404707 - RNA, 19 nt, Homo sapiens
  misc_RNA (1)...(19): siRNA sense strand
aaaguggugcugauuacua

SEQ ID NO: 404708 - RNA, 19 nt, Homo sapiens
  misc_RNA (1)...(19): siRNA sense strand
agaguuaugauuccuauga

SEQ ID NO: 404709 - RNA, 19 nt, Homo sapiens
  misc_RNA (1)...(19): siRNA sense strand
uggcacugcuuaugaugaa

SEQ ID NO: 404710 - RNA, 19 nt, Homo sapiens
  misc_RNA (1)...(19): siRNA sense strand
agagacuuauggagaauau

SEQ ID NO: 404711 - RNA, 19 nt, Homo sapiens
  misc_RNA (1)...(19): siRNA sense strand
uggagaauaugacuaugau

SEQ ID NO: 404712 - RNA, 19 nt, Homo sapiens
  misc_RNA (1)...(19): siRNA sense strand
agacuuauggagaauauga

SEQ ID NO: 404713 - RNA, 19 nt, Homo sapiens
  misc_RNA (1)...(19): siRNA sense strand
ggugaaccaagaaauagaa

SEQ ID NO: 404714 - RNA, 19 nt, Homo sapiens
  misc_RNA (1)...(19): siRNA sense strand
uuacggacauggacucagu

SEQ ID NO: 404715 - RNA, 19 nt, Homo sapiens
  misc_RNA (1)...(19): siRNA sense strand
gaguuaugauuccuaugau

SEQ ID NO: 404716 - RNA, 19 nt, Homo sapiens
  misc_RNA (1)...(19): siRNA sense strand
ggauauggcacugcuuaug

SEQ ID NO: 404717 - RNA, 19 nt, Homo sapiens
  misc_RNA (1)...(19): siRNA sense strand
aaacaguucccuaaguuca

SEQ ID NO: 404718 - RNA, 19 nt, Homo sapiens
  misc_RNA (1)...(19): siRNA sense strand
uggacuaacucaagacaca

SEQ ID NO: 404719 - RNA, 19 nt, Homo sapiens
  misc_RNA (1)...(19): siRNA sense strand
acagaguuaugauuccuau

SEQ ID NO: 404720 - RNA, 19 nt, Homo sapiens
  misc_RNA (1)...(19): siRNA sense strand
ggccaaggaagaagaguug

SEQ ID NO: 404721 - RNA, 19 nt, Homo sapiens
  misc_RNA (1)...(19): siRNA sense strand
gaauggugguucagaaaau

SEQ ID NO: 404722 - RNA, 19 nt, Homo sapiens
  misc_RNA (1)...(19): siRNA sense strand
gcaaggaugaagaaaagua

SEQ ID NO: 404723 - RNA, 19 nt, Homo sapiens
  misc_RNA (1)...(19): siRNA sense strand
agacaaggccaaggaagaa

SEQ ID NO: 404724 - RNA, 19 nt, Homo sapiens
  misc_RNA (1)...(19): siRNA sense strand
ucaaugaugaucuccaugu

SEQ ID NO: 404725 - RNA, 19 nt, Homo sapiens
  misc_RNA (1)...(19): siRNA sense strand
ugaucuccauguucucauu

SEQ ID NO: 404726 - RNA, 19 nt, Homo sapiens
  misc_RNA (1)...(19): siRNA sense strand
ggcaagaagaguggacuaa

SEQ ID NO: 404727 - RNA, 19 nt, Homo sapiens
  misc_RNA (1)...(19): siRNA sense strand
cccaaaguggugcugauua

SEQ ID NO: 404728 - RNA, 19 nt, Homo sapiens
  misc_RNA (1)...(19): siRNA sense strand
uaugauaacagcuauagca

SEQ ID NO: 404729 - RNA, 19 nt, Homo sapiens
  misc_RNA (1)...(19): siRNA sense strand
cgacacaagagacuuaugg

SEQ ID NO: 404730 - RNA, 19 nt, Homo sapiens
  misc_RNA (1)...(19): siRNA sense strand
gagagacaaggccaaggaa

SEQ ID NO: 404731 - RNA, 19 nt, Homo sapiens
  misc_RNA (1)...(19): siRNA sense strand
aaguggugcugauuacuau

SEQ ID NO: 404732 - RNA, 19 nt, Homo sapiens
  misc_RNA (1)...(19): siRNA sense strand
cuuaugaugaacagaguua

SEQ ID NO: 404733 - RNA, 19 nt, Homo sapiens
  misc_RNA (1)...(19): siRNA sense strand
guggagaagcgaaguacuu

SEQ ID NO: 404734 - RNA, 19 nt, Homo sapiens
  misc_RNA (1)...(19): siRNA sense strand
gaugaucuccauguucuca

SEQ ID NO: 404735 - RNA, 19 nt, Homo sapiens
  misc_RNA (1)...(19): siRNA sense strand
gaaggcaaggaugaagaaa

SEQ ID NO: 404736 - RNA, 19 nt, Homo sapiens
  misc_RNA (1)...(19): siRNA sense strand
acagagaccagccauaugg

SEQ ID NO: 404737 - RNA, 19 nt, Homo sapiens
  misc_RNA (1)...(19): siRNA sense strand
ugagagacaaggccaagga

SEQ ID NO: 404738 - RNA, 19 nt, Homo sapiens
  misc_RNA (1)...(19): siRNA sense strand
ugaggagacuuaugauucc

SEQ ID NO: 404739 - RNA, 19 nt, Homo sapiens
  misc_RNA (1)...(19): siRNA sense strand
gcacugcuuaugaugaaca

SEQ ID NO: 404740 - RNA, 19 nt, Homo sapiens
  misc_RNA (1)...(19): siRNA sense strand
gccaguuggaguuguagua

SEQ ID NO: 404741 - RNA, 19 nt, Homo sapiens
  misc_RNA (1)...(19): siRNA sense strand
cugaagcguuuacaagaag

SEQ ID NO: 404742 - RNA, 19 nt, Homo sapiens
  misc_RNA (1)...(19): siRNA sense strand
ggacagcaaagggcgucua

SEQ ID NO: 404743 - RNA, 19 nt, Homo sapiens
  misc_RNA (1)...(19): siRNA sense strand
ggugcugauuacuaugauu

SEQ ID NO: 404744 - RNA, 19 nt, Homo sapiens
  misc_RNA (1)...(19): siRNA sense strand
ugaagcguuuacaagaaga

SEQ ID NO: 404745 - RNA, 19 nt, Homo sapiens
  misc_RNA (1)...(19): siRNA sense strand
uuacuaugauuacggacau

SEQ ID NO: 404746 - RNA, 19 nt, Homo sapiens
  misc_RNA (1)...(19): siRNA sense strand
ggaugggacaugcuuugga

SEQ ID NO: 404747 - RNA, 19 nt, Homo sapiens
  misc_RNA (1)...(19): siRNA sense strand
agaaggcaaggaugaagaa

SEQ ID NO: 404748 - RNA, 19 nt, Homo sapiens
  misc_RNA (1)...(19): siRNA sense strand
ggugauuaauaagaacaug

SEQ ID NO: 404749 - RNA, 19 nt, Homo sapiens
  misc_RNA (1)...(19): siRNA sense strand
ggacuaacucaagacacaa

SEQ ID NO: 404750 - RNA, 19 nt, Homo sapiens
  misc_RNA (1)...(19): siRNA sense strand
ggagaaggcaaggaugaag

SEQ ID NO: 404751 - RNA, 19 nt, Homo sapiens
  misc_RNA (1)...(19): siRNA sense strand
gaagcguuuacaagaagaa

SEQ ID NO: 404752 - RNA, 19 nt, Homo sapiens
  misc_RNA (1)...(19): siRNA sense strand
gcaagaagaguggacuaac

SEQ ID NO: 404753 - RNA, 19 nt, Homo sapiens
  misc_RNA (1)...(19): siRNA sense strand
gggcaagaagaguggacua

SEQ ID NO: 404754 - RNA, 19 nt, Homo sapiens
  misc_RNA (1)...(19): siRNA sense strand
gaagcugggacagaaagug

SEQ ID NO: 404755 - RNA, 19 nt, Homo sapiens
  misc_RNA (1)...(19): siRNA sense strand
gaaccaagaaauagaaaag

SEQ ID NO: 404756 - RNA, 19 nt, Homo sapiens
  misc_RNA (1)...(19): siRNA sense strand
gaucuccauguucucauug

SEQ ID NO: 404757 - RNA, 19 nt, Homo sapiens
  misc_RNA (1)...(19): siRNA sense strand
ucucaaugaugaucuccau

SEQ ID NO: 404758 - RNA, 19 nt, Homo sapiens
  misc_RNA (1)...(19): siRNA sense strand
aaaguggagaagcgaagua

SEQ ID NO: 404759 - RNA, 19 nt, Homo sapiens
  misc_RNA (1)...(19): siRNA sense strand
caggaugggacaugcuuug

SEQ ID NO: 404760 - RNA, 19 nt, Homo sapiens
  misc_RNA (1)...(19): siRNA sense strand
ccggccaguuggaguugua

SEQ ID NO: 404761 - RNA, 19 nt, Homo sapiens
  misc_RNA (1)...(19): siRNA sense strand
aaggagaaggcaaggauga

SEQ ID NO: 404762 - RNA, 19 nt, Homo sapiens
  misc_RNA (1)...(19): siRNA sense strand
gcccaaaguggugcugauu

SEQ ID NO: 404763 - RNA, 19 nt, Homo sapiens
  misc_RNA (1)...(19): siRNA sense strand
cagcaaagggcgucuacag

SEQ ID NO: 404764 - RNA, 19 nt, Homo sapiens
  misc_RNA (1)...(19): siRNA sense strand
guggugcugauuacuauga

SEQ ID NO: 404765 - RNA, 19 nt, Homo sapiens
  misc_RNA (1)...(19): siRNA sense strand
augaugaucuccauguucu

SEQ ID NO: 404766 - RNA, 19 nt, Homo sapiens
  misc_RNA (1)...(19): siRNA sense strand
caggaguuaacauauuuga

SEQ ID NO: 404767 - RNA, 19 nt, Homo sapiens
  misc_RNA (1)...(19): siRNA sense strand
ggaagagauugccugauua

SEQ ID NO: 404768 - RNA, 19 nt, Homo sapiens
  misc_RNA (1)...(19): siRNA sense strand
gggaagagauugccugauu

SEQ ID NO: 404769 - RNA, 19 nt, Homo sapiens
  misc_RNA (1)...(19): siRNA sense strand
ccacagaucugguugcaaa

SEQ ID NO: 404770 - RNA, 19 nt, Homo sapiens
  misc_RNA (1)...(19): siRNA sense strand
gaagucaaauggagaguau

SEQ ID NO: 404771 - RNA, 19 nt, Homo sapiens
  misc_RNA (1)...(19): siRNA sense strand
ccagucaacucuguuaaua

SEQ ID NO: 404772 - RNA, 19 nt, Homo sapiens
  misc_RNA (1)...(19): siRNA sense strand
gaagagauugccugauuaa

SEQ ID NO: 404773 - RNA, 19 nt, Homo sapiens
  misc_RNA (1)...(19): siRNA sense strand
caaagaaguuggagaugga

SEQ ID NO: 404774 - RNA, 19 nt, Homo sapiens
  misc_RNA (1)...(19): siRNA sense strand
aagcagcccuuuccauaua

SEQ ID NO: 404775 - RNA, 19 nt, Homo sapiens
  misc_RNA (1)...(19): siRNA sense strand
ccaauacacuagcaguuaa

SEQ ID NO: 404776 - RNA, 19 nt, Homo sapiens
  misc_RNA (1)...(19): siRNA sense strand
ggaacuacuucagugguua

SEQ ID NO: 404777 - RNA, 19 nt, Homo sapiens
  misc_RNA (1)...(19): siRNA sense strand
gaaacgauccgcucccaaa

SEQ ID NO: 404778 - RNA, 19 nt, Homo sapiens
  misc_RNA (1)...(19): siRNA sense strand
ugucaacccuggccaauuu

SEQ ID NO: 404779 - RNA, 19 nt, Homo sapiens
  misc_RNA (1)...(19): siRNA sense strand
gcaaggaagcagugcguua

SEQ ID NO: 404780 - RNA, 19 nt, Homo sapiens
  misc_RNA (1)...(19): siRNA sense strand
ggagagaauuugugaugau

SEQ ID NO: 404781 - RNA, 19 nt, Homo sapiens
  misc_RNA (1)...(19): siRNA sense strand
gaugauaugugucugaagu

SEQ ID NO: 404782 - RNA, 19 nt, Homo sapiens
  misc_RNA (1)...(19): siRNA sense strand
gagauugccugauuaaugc

SEQ ID NO: 404783 - RNA, 19 nt, Homo sapiens
  misc_RNA (1)...(19): siRNA sense strand
ggauuaaacauggaaguua

SEQ ID NO: 404784 - RNA, 19 nt, Homo sapiens
  misc_RNA (1)...(19): siRNA sense strand
gcuaugcacucaacugugu

SEQ ID NO: 404785 - RNA, 19 nt, Homo sapiens
  misc_RNA (1)...(19): siRNA sense strand
caaauuagacagagagaau

SEQ ID NO: 404786 - RNA, 19 nt, Homo sapiens
  misc_RNA (1)...(19): siRNA sense strand
caucccacaucaguuauua

SEQ ID NO: 404787 - RNA, 19 nt, Homo sapiens
  misc_RNA (1)...(19): siRNA sense strand
gggaacagcuugcgauugc

SEQ ID NO: 404788 - RNA, 19 nt, Homo sapiens
  misc_RNA (1)...(19): siRNA sense strand
gcaacuggugccaauguua

SEQ ID NO: 404789 - RNA, 19 nt, Homo sapiens
  misc_RNA (1)...(19): siRNA sense strand
aaucagauaucaccaagga

SEQ ID NO: 404790 - RNA, 19 nt, Homo sapiens
  misc_RNA (1)...(19): siRNA sense strand
gauuaaugcugcuaagaca

SEQ ID NO: 404791 - RNA, 19 nt, Homo sapiens
  misc_RNA (1)...(19): siRNA sense strand
gugcaaccauccugaaguu

SEQ ID NO: 404792 - RNA, 19 nt, Homo sapiens
  misc_RNA (1)...(19): siRNA sense strand
ccauauaccuugaaaacua

SEQ ID NO: 404793 - RNA, 19 nt, Homo sapiens
  misc_RNA (1)...(19): siRNA sense strand
gaagcagcccuuuccauau

SEQ ID NO: 404794 - RNA, 19 nt, Homo sapiens
  misc_RNA (1)...(19): siRNA sense strand
agacagagagaaucagaua

SEQ ID NO: 404795 - RNA, 19 nt, Homo sapiens
  misc_RNA (1)...(19): siRNA sense strand
ggaccaaauuagacagaga

SEQ ID NO: 404796 - RNA, 19 nt, Homo sapiens
  misc_RNA (1)...(19): siRNA sense strand
gcagugcguuauaucaaug

SEQ ID NO: 404797 - RNA, 19 nt, Homo sapiens
  misc_RNA (1)...(19): siRNA sense strand
cuacuucagugguuauuau

SEQ ID NO: 404798 - RNA, 19 nt, Homo sapiens
  misc_RNA (1)...(19): siRNA sense strand
gagcaacuauucugucaac

SEQ ID NO: 404799 - RNA, 19 nt, Homo sapiens
  misc_RNA (1)...(19): siRNA sense strand
agaagcagcccuuuccaua

SEQ ID NO: 404800 - RNA, 19 nt, Homo sapiens
  misc_RNA (1)...(19): siRNA sense strand
gaugaugagcugaucuuaa

SEQ ID NO: 404801 - RNA, 19 nt, Homo sapiens
  misc_RNA (1)...(19): siRNA sense strand
cagaugaacugggaagaga

SEQ ID NO: 404802 - RNA, 19 nt, Homo sapiens
  misc_RNA (1)...(19): siRNA sense strand
gagagaauuugugaugaug

SEQ ID NO: 404803 - RNA, 19 nt, Homo sapiens
  misc_RNA (1)...(19): siRNA sense strand
ggagagaauucagaagauc

SEQ ID NO: 404804 - RNA, 19 nt, Homo sapiens
  misc_RNA (1)...(19): siRNA sense strand
ggagcgcucuuuacaugau

SEQ ID NO: 404805 - RNA, 19 nt, Homo sapiens
  misc_RNA (1)...(19): siRNA sense strand
ccaaccauaguuaaaguua

SEQ ID NO: 404806 - RNA, 19 nt, Homo sapiens
  misc_RNA (1)...(19): siRNA sense strand
uagaacauccugcagcuaa

SEQ ID NO: 404807 - RNA, 19 nt, Homo sapiens
  misc_RNA (1)...(19): siRNA sense strand
gaaccaaccauaguuaaag

SEQ ID NO: 404808 - RNA, 19 nt, Homo sapiens
  misc_RNA (1)...(19): siRNA sense strand
ggauuggucuugauuugag

SEQ ID NO: 404809 - RNA, 19 nt, Homo sapiens
  misc_RNA (1)...(19): siRNA sense strand
gaagcagugcguuauauca

SEQ ID NO: 404810 - RNA, 19 nt, Homo sapiens
  misc_RNA (1)...(19): siRNA sense strand
gaaaauucaucccacauca

SEQ ID NO: 404811 - RNA, 19 nt, Homo sapiens
  misc_RNA (1)...(19): siRNA sense strand
ccaagagaaucguaaaugc

SEQ ID NO: 404812 - RNA, 19 nt, Homo sapiens
  misc_RNA (1)...(19): siRNA sense strand
ggaugauauuggugaugua

SEQ ID NO: 404813 - RNA, 19 nt, Homo sapiens
  misc_RNA (1)...(19): siRNA sense strand
ugagauggagcgcucuuua

SEQ ID NO: 404814 - RNA, 19 nt, Homo sapiens
  misc_RNA (1)...(19): siRNA sense strand
augaugagcugaucuuaau

SEQ ID NO: 404815 - RNA, 19 nt, Homo sapiens
  misc_RNA (1)...(19): siRNA sense strand
gaagagaguuuuggaguca

SEQ ID NO: 404816 - RNA, 19 nt, Homo sapiens
  misc_RNA (1)...(19): siRNA sense strand
ggucuugauuugagcaaug

SEQ ID NO: 404817 - RNA, 19 nt, Homo sapiens
  misc_RNA (1)...(19): siRNA sense strand
uggcugaucugcaagacaa

SEQ ID NO: 404818 - RNA, 19 nt, Homo sapiens
  misc_RNA (1)...(19): siRNA sense strand
gcccaggacuccacagauc

SEQ ID NO: 404819 - RNA, 19 nt, Homo sapiens
  misc_RNA (1)...(19): siRNA sense strand
gagaauuugugaugaugag

SEQ ID NO: 404820 - RNA, 19 nt, Homo sapiens
  misc_RNA (1)...(19): siRNA sense strand
gaugcuguacuugcuauua

SEQ ID NO: 404821 - RNA, 19 nt, Homo sapiens
  misc_RNA (1)...(19): siRNA sense strand
gcagaugaauuagucaaac

SEQ ID NO: 404822 - RNA, 19 nt, Homo sapiens
  misc_RNA (1)...(19): siRNA sense strand
ugaaguuacuggagguaga

SEQ ID NO: 404823 - RNA, 19 nt, Homo sapiens
  misc_RNA (1)...(19): siRNA sense strand
cauaaugaggcccagguua

SEQ ID NO: 404824 - RNA, 19 nt, Homo sapiens
  misc_RNA (1)...(19): siRNA sense strand
aaaugcagaugaauuaguc

SEQ ID NO: 404825 - RNA, 19 nt, Homo sapiens
  misc_RNA (1)...(19): siRNA sense strand
caacuggugccaauguuau

SEQ ID NO: 404826 - RNA, 19 nt, Homo sapiens
  misc_RNA (1)...(19): siRNA sense strand
gaugauauuggugauguaa

SEQ ID NO: 404827 - RNA, 19 nt, Homo sapiens
  misc_RNA (1)...(19): siRNA sense strand
agagauugccugauuaaug

SEQ ID NO: 404828 - RNA, 19 nt, Homo sapiens
  misc_RNA (1)...(19): siRNA sense strand
cagaugaauuagucaaaca

SEQ ID NO: 404829 - RNA, 19 nt, Homo sapiens
  misc_RNA (1)...(19): siRNA sense strand
gaacuacuucagugguuau

SEQ ID NO: 404830 - RNA, 19 nt, Homo sapiens
  misc_RNA (1)...(19): siRNA sense strand
cagagagaaucagauauca

SEQ ID NO: 404831 - RNA, 19 nt, Homo sapiens
  misc_RNA (1)...(19): siRNA sense strand
gcucaucaguggcuaugca

SEQ ID NO: 404832 - RNA, 19 nt, Homo sapiens
  misc_RNA (1)...(19): siRNA sense strand
gaugaacugggaagagauu

SEQ ID NO: 404833 - RNA, 19 nt, Homo sapiens
  misc_RNA (1)...(19): siRNA sense strand
ugagcuggcugaucugcaa

SEQ ID NO: 404834 - RNA, 19 nt, Homo sapiens
  misc_RNA (1)...(19): siRNA sense strand
auaaugaggcccagguuaa

SEQ ID NO: 404835 - RNA, 19 nt, Homo sapiens
  misc_RNA (1)...(19): siRNA sense strand
uggaauugaugauaugugu

SEQ ID NO: 404836 - RNA, 19 nt, Homo sapiens
  misc_RNA (1)...(19): siRNA sense strand
aaauguugguggaugauau

SEQ ID NO: 404837 - RNA, 19 nt, Homo sapiens
  misc_RNA (1)...(19): siRNA sense strand
ccaaggagagaauucagaa

SEQ ID NO: 404838 - RNA, 19 nt, Homo sapiens
  misc_RNA (1)...(19): siRNA sense strand
gaaagcccaugggagaagu

SEQ ID NO: 404839 - RNA, 19 nt, Homo sapiens
  misc_RNA (1)...(19): siRNA sense strand
ggugauuucuuugcuaaca

SEQ ID NO: 404840 - RNA, 19 nt, Homo sapiens
  misc_RNA (1)...(19): siRNA sense strand
gagaaucagauaucaccaa

SEQ ID NO: 404841 - RNA, 19 nt, Homo sapiens
  misc_RNA (1)...(19): siRNA sense strand
gaaguuacuggagguagaa

SEQ ID NO: 404842 - RNA, 19 nt, Homo sapiens
  misc_RNA (1)...(19): siRNA sense strand
ggacuccacagaucugguu

SEQ ID NO: 404843 - RNA, 19 nt, Homo sapiens
  misc_RNA (1)...(19): siRNA sense strand
gcaagacaaagaaguugga

SEQ ID NO: 404844 - RNA, 19 nt, Homo sapiens
  misc_RNA (1)...(19): siRNA sense strand
acauggaaguuaugaagau

SEQ ID NO: 404845 - RNA, 19 nt, Homo sapiens
  misc_RNA (1)...(19): siRNA sense strand
uaaaauggauuggucuuga

SEQ ID NO: 404846 - RNA, 19 nt, Homo sapiens
  misc_RNA (1)...(19): siRNA sense strand
cccaauacacuagcaguua

SEQ ID NO: 404847 - RNA, 19 nt, Homo sapiens
  misc_RNA (1)...(19): siRNA sense strand
ccaguuggcuuggauaaaa

SEQ ID NO: 404848 - RNA, 19 nt, Homo sapiens
  misc_RNA (1)...(19): siRNA sense strand
caggagagaauuugugaug

SEQ ID NO: 404849 - RNA, 19 nt, Homo sapiens
  misc_RNA (1)...(19): siRNA sense strand
caauuuggaaggugaagaa

SEQ ID NO: 404850 - RNA, 19 nt, Homo sapiens
  misc_RNA (1)...(19): siRNA sense strand
gaauugaugauaugugucu

SEQ ID NO: 404851 - RNA, 19 nt, Homo sapiens
  misc_RNA (1)...(19): siRNA sense strand
aaaugaagcuugguguaca

SEQ ID NO: 404852 - RNA, 19 nt, Homo sapiens
  misc_RNA (1)...(19): siRNA sense strand
gcuauccagucaacucugu

SEQ ID NO: 404853 - RNA, 19 nt, Homo sapiens
  misc_RNA (1)...(19): siRNA sense strand
caaggaagcagugcguuau

SEQ ID NO: 404854 - RNA, 19 nt, Homo sapiens
  misc_RNA (1)...(19): siRNA sense strand
cagccacgcuauccaguca

SEQ ID NO: 404855 - RNA, 19 nt, Homo sapiens
  misc_RNA (1)...(19): siRNA sense strand
aaacauggaaguuaugaag

SEQ ID NO: 404856 - RNA, 19 nt, Homo sapiens
  misc_RNA (1)...(19): siRNA sense strand
uuucuuugcuaacauggua

SEQ ID NO: 404857 - RNA, 19 nt, Homo sapiens
  misc_RNA (1)...(19): siRNA sense strand
gaucacuucuuguuauucc

SEQ ID NO: 404858 - RNA, 19 nt, Homo sapiens
  misc_RNA (1)...(19): siRNA sense strand
agacaaagaaguuggagau

SEQ ID NO: 404859 - RNA, 19 nt, Homo sapiens
  misc_RNA (1)...(19): siRNA sense strand
gauaugugucugaaguauu

SEQ ID NO: 404860 - RNA, 19 nt, Homo sapiens
  misc_RNA (1)...(19): siRNA sense strand
caagagaaucguaaaugca

SEQ ID NO: 404861 - RNA, 19 nt, Homo sapiens
  misc_RNA (1)...(19): siRNA sense strand
cagguuaacccagaacgua

SEQ ID NO: 404862 - RNA, 19 nt, Homo sapiens
  misc_RNA (1)...(19): siRNA sense strand
ugauaugugucugaaguau

SEQ ID NO: 404863 - RNA, 19 nt, Homo sapiens
  misc_RNA (1)...(19): siRNA sense strand
gcaaccauccugaaguuac

SEQ ID NO: 404864 - RNA, 19 nt, Homo sapiens
  misc_RNA (1)...(19): siRNA sense strand
gaaauuugcaacagaagcu

SEQ ID NO: 404865 - RNA, 19 nt, Homo sapiens
  misc_RNA (1)...(19): siRNA sense strand
ugaaccaaccauaguuaaa

SEQ ID NO: 404866 - RNA, 19 nt, Homo sapiens
  misc_RNA (1)...(19): siRNA sense strand
guacgucugcaucgauuau

SEQ ID NO: 404867 - RNA, 19 nt, Homo sapiens
  misc_RNA (1)...(19): siRNA sense strand
caaauuaucuauggcaaug

SEQ ID NO: 404868 - RNA, 19 nt, Homo sapiens
  misc_RNA (1)...(19): siRNA sense strand
ugacagaggccaucgcaua

SEQ ID NO: 404869 - RNA, 19 nt, Homo sapiens
  misc_RNA (1)...(19): siRNA sense strand
gcauguaccuggugguguu

SEQ ID NO: 404870 - RNA, 19 nt, Homo sapiens
  misc_RNA (1)...(19): siRNA sense strand
aagcacagaucucuaaaga

SEQ ID NO: 404871 - RNA, 19 nt, Homo sapiens
  misc_RNA (1)...(19): siRNA sense strand
ggaggagcaucaagacuuc

SEQ ID NO: 404872 - RNA, 19 nt, Homo sapiens
  misc_RNA (1)...(19): siRNA sense strand
ucacaucaauggaaaucuu

SEQ ID NO: 404873 - RNA, 19 nt, Homo sapiens
  misc_RNA (1)...(19): siRNA sense strand
ggucucacaucaauggaaa

SEQ ID NO: 404874 - RNA, 19 nt, Homo sapiens
  misc_RNA (1)...(19): siRNA sense strand
caucuacacuauuaacuuc

SEQ ID NO: 404875 - RNA, 19 nt, Homo sapiens
  misc_RNA (1)...(19): siRNA sense strand
gaaaucuucugaggacaau

SEQ ID NO: 404876 - RNA, 19 nt, Homo sapiens
  misc_RNA (1)...(19): siRNA sense strand
gcuauucagucauaaucaa

SEQ ID NO: 404877 - RNA, 19 nt, Homo sapiens
  misc_RNA (1)...(19): siRNA sense strand
ugucugcuauucagucaua

SEQ ID NO: 404878 - RNA, 19 nt, Homo sapiens
  misc_RNA (1)...(19): siRNA sense strand
cagaagcacagaucucuaa

SEQ ID NO: 404879 - RNA, 19 nt, Homo sapiens
  misc_RNA (1)...(19): siRNA sense strand
cugggcaucuacacuauua

SEQ ID NO: 404880 - RNA, 19 nt, Homo sapiens
  misc_RNA (1)...(19): siRNA sense strand
gcacacacugggaauacua

SEQ ID NO: 404881 - RNA, 19 nt, Homo sapiens
  misc_RNA (1)...(19): siRNA sense strand
gacuauggguucagcaguu

SEQ ID NO: 404882 - RNA, 19 nt, Homo sapiens
  misc_RNA (1)...(19): siRNA sense strand
gcaucacuguggaucguuu

SEQ ID NO: 404883 - RNA, 19 nt, Homo sapiens
  misc_RNA (1)...(19): siRNA sense strand
ucuggaaacuugugaagga

SEQ ID NO: 404884 - RNA, 19 nt, Homo sapiens
  misc_RNA (1)...(19): siRNA sense strand
gaggacaauuccaagacuu

SEQ ID NO: 404885 - RNA, 19 nt, Homo sapiens
  misc_RNA (1)...(19): siRNA sense strand
ggaaaucuucugaggacaa

SEQ ID NO: 404886 - RNA, 19 nt, Homo sapiens
  misc_RNA (1)...(19): siRNA sense strand
ggucauauccaucuucuac

SEQ ID NO: 404887 - RNA, 19 nt, Homo sapiens
  misc_RNA (1)...(19): siRNA sense strand
uggcugaccugguguuugu

SEQ ID NO: 404888 - RNA, 19 nt, Homo sapiens
  misc_RNA (1)...(19): siRNA sense strand
ccagcauguuccaguuaua

SEQ ID NO: 404889 - RNA, 19 nt, Homo sapiens
  misc_RNA (1)...(19): siRNA sense strand
ugauuaccaugaagacuau

SEQ ID NO: 404890 - RNA, 19 nt, Homo sapiens
  misc_RNA (1)...(19): siRNA sense strand
ccaccagcauguuccaguu

SEQ ID NO: 404891 - RNA, 19 nt, Homo sapiens
  misc_RNA (1)...(19): siRNA sense strand
ggaaacuugugaaggacau

SEQ ID NO: 404892 - RNA, 19 nt, Homo sapiens
  misc_RNA (1)...(19): siRNA sense strand
ucaccaugauugucugcua

SEQ ID NO: 404893 - RNA, 19 nt, Homo sapiens
  misc_RNA (1)...(19): siRNA sense strand
ccacugcucaccaugauug

SEQ ID NO: 404894 - RNA, 19 nt, Homo sapiens
  misc_RNA (1)...(19): siRNA sense strand
ugauaucccugcugguuuc

SEQ ID NO: 404895 - RNA, 19 nt, Homo sapiens
  misc_RNA (1)...(19): siRNA sense strand
gcaucuacacuauuaacuu

SEQ ID NO: 404896 - RNA, 19 nt, Homo sapiens
  misc_RNA (1)...(19): siRNA sense strand
guggaucguuucauuguag

SEQ ID NO: 404897 - RNA, 19 nt, Homo sapiens
  misc_RNA (1)...(19): siRNA sense strand
cuacugggcaucuacacua

SEQ ID NO: 404898 - RNA, 19 nt, Homo sapiens
  misc_RNA (1)...(19): siRNA sense strand
caucuucuaccauaaguug

SEQ ID NO: 404899 - RNA, 19 nt, Homo sapiens
  misc_RNA (1)...(19): siRNA sense strand
ggugauaucccugcugguu

SEQ ID NO: 404900 - RNA, 19 nt, Homo sapiens
  misc_RNA (1)...(19): siRNA sense strand
gaacuucuggaaacuugug

SEQ ID NO: 404901 - RNA, 19 nt, Homo sapiens
  misc_RNA (1)...(19): siRNA sense strand
ugacccagaugcccuucaa

SEQ ID NO: 404902 - RNA, 19 nt, Homo sapiens
  misc_RNA (1)...(19): siRNA sense strand
cacuguggaucguuucauu

SEQ ID NO: 404903 - RNA, 19 nt, Homo sapiens
  misc_RNA (1)...(19): siRNA sense strand
gcagcacacacugggaaua

SEQ ID NO: 404904 - RNA, 19 nt, Homo sapiens
  misc_RNA (1)...(19): siRNA sense strand
auauccaucuucuaccaua

SEQ ID NO: 404905 - RNA, 19 nt, Homo sapiens
  misc_RNA (1)...(19): siRNA sense strand
agccugaaguuucgaaaga

SEQ ID NO: 404906 - RNA, 19 nt, Homo sapiens
  misc_RNA (1)...(19): siRNA sense strand
caccaugauugucugcuau

SEQ ID NO: 404907 - RNA, 19 nt, Homo sapiens
  misc_RNA (1)...(19): siRNA sense strand
gcaguucagcaaggucuuu

SEQ ID NO: 404908 - RNA, 19 nt, Homo sapiens
  misc_RNA (1)...(19): siRNA sense strand
uaccugagggccugccuua

SEQ ID NO: 404909 - RNA, 19 nt, Homo sapiens
  misc_RNA (1)...(19): siRNA sense strand
cagcaagccaagaggauga

SEQ ID NO: 404910 - RNA, 19 nt, Homo sapiens
  misc_RNA (1)...(19): siRNA sense strand
caccagcauguuccaguua

SEQ ID NO: 404911 - RNA, 19 nt, Homo sapiens
  misc_RNA (1)...(19): siRNA sense strand
gaagcacagaucucuaaag

SEQ ID NO: 404912 - RNA, 19 nt, Homo sapiens
  misc_RNA (1)...(19): siRNA sense strand
uauccaucuucuaccauaa

SEQ ID NO: 404913 - RNA, 19 nt, Homo sapiens
  misc_RNA (1)...(19): siRNA sense strand
gccugaaguuucgaaagaa

SEQ ID NO: 404914 - RNA, 19 nt, Homo sapiens
  misc_RNA (1)...(19): siRNA sense strand
cuauggcaaugucuuuaau

SEQ ID NO: 404915 - RNA, 19 nt, Homo sapiens
  misc_RNA (1)...(19): siRNA sense strand
ucauauccaucuucuacca

SEQ ID NO: 404916 - RNA, 19 nt, Homo sapiens
  misc_RNA (1)...(19): siRNA sense strand
guucuugccacccagauga

SEQ ID NO: 404917 - RNA, 19 nt, Homo sapiens
  misc_RNA (1)...(19): siRNA sense strand
gagccugacggauguguuc

SEQ ID NO: 404918 - RNA, 19 nt, Homo sapiens
  misc_RNA (1)...(19): siRNA sense strand
gccaggaggagcaucaaga

SEQ ID NO: 404919 - RNA, 19 nt, Homo sapiens
  misc_RNA (1)...(19): siRNA sense strand
guucagcaguuucaaugac

SEQ ID NO: 404920 - RNA, 19 nt, Homo sapiens
  misc_RNA (1)...(19): siRNA sense strand
uaucuauggcaaugucuuu

SEQ ID NO: 404921 - RNA, 19 nt, Homo sapiens
  misc_RNA (1)...(19): siRNA sense strand
gugauaucccugcugguuu

SEQ ID NO: 404922 - RNA, 19 nt, Homo sapiens
  misc_RNA (1)...(19): siRNA sense strand
ggccaggucaugugcaaga

SEQ ID NO: 404923 - RNA, 19 nt, Homo sapiens
  misc_RNA (1)...(19): siRNA sense strand
ccuuaacccugugcucuau

SEQ ID NO: 404924 - RNA, 19 nt, Homo sapiens
  misc_RNA (1)...(19): siRNA sense strand
uguggaucguuucauugua

SEQ ID NO: 404925 - RNA, 19 nt, Homo sapiens
  misc_RNA (1)...(19): siRNA sense strand
acuauggguucagcaguuu

SEQ ID NO: 404926 - RNA, 19 nt, Homo sapiens
  misc_RNA (1)...(19): siRNA sense strand
ggguucagcaguuucaaug

SEQ ID NO: 404927 - RNA, 19 nt, Homo sapiens
  misc_RNA (1)...(19): siRNA sense strand
gucaccagcuugcucaucu

SEQ ID NO: 404928 - RNA, 19 nt, Homo sapiens
  misc_RNA (1)...(19): siRNA sense strand
ggcagagcaugauuaccau

SEQ ID NO: 404929 - RNA, 19 nt, Homo sapiens
  misc_RNA (1)...(19): siRNA sense strand
ggaggccaccagcauguuc

SEQ ID NO: 404930 - RNA, 19 nt, Homo sapiens
  misc_RNA (1)...(19): siRNA sense strand
gacagaggccaucgcauac

SEQ ID NO: 404931 - RNA, 19 nt, Homo sapiens
  misc_RNA (1)...(19): siRNA sense strand
caagacuuccugcaguuca

SEQ ID NO: 404932 - RNA, 19 nt, Homo sapiens
  misc_RNA (1)...(19): siRNA sense strand
ccaccaaggccuacaacca

SEQ ID NO: 404933 - RNA, 19 nt, Homo sapiens
  misc_RNA (1)...(19): siRNA sense strand
ugaggacaauuccaagacu

SEQ ID NO: 404934 - RNA, 19 nt, Homo sapiens
  misc_RNA (1)...(19): siRNA sense strand
ucuauggcaaugucuuuaa

SEQ ID NO: 404935 - RNA, 19 nt, Homo sapiens
  misc_RNA (1)...(19): siRNA sense strand
ccagaagcacagaucucua

SEQ ID NO: 404936 - RNA, 19 nt, Homo sapiens
  misc_RNA (1)...(19): siRNA sense strand
gcagccaggaggagcauca

SEQ ID NO: 404937 - RNA, 19 nt, Homo sapiens
  misc_RNA (1)...(19): siRNA sense strand
ugcagagccugacggaugu

SEQ ID NO: 404938 - RNA, 19 nt, Homo sapiens
  misc_RNA (1)...(19): siRNA sense strand
ccaaauuaucuauggcaau

SEQ ID NO: 404939 - RNA, 19 nt, Homo sapiens
  misc_RNA (1)...(19): siRNA sense strand
uugcucaucugggugauau

SEQ ID NO: 404940 - RNA, 19 nt, Homo sapiens
  misc_RNA (1)...(19): siRNA sense strand
acgaggcaauuuccacugu

SEQ ID NO: 404941 - RNA, 19 nt, Homo sapiens
  misc_RNA (1)...(19): siRNA sense strand
ccaugauugucugcuauuc

SEQ ID NO: 404942 - RNA, 19 nt, Homo sapiens
  misc_RNA (1)...(19): siRNA sense strand
gccuuaacccugugcucua

SEQ ID NO: 404943 - RNA, 19 nt, Homo sapiens
  misc_RNA (1)...(19): siRNA sense strand
aggaggagcaucaagacuu

SEQ ID NO: 404944 - RNA, 19 nt, Homo sapiens
  misc_RNA (1)...(19): siRNA sense strand
augauuaccaugaagacua

SEQ ID NO: 404945 - RNA, 19 nt, Homo sapiens
  misc_RNA (1)...(19): siRNA sense strand
uaucccugcugguuuccuu

SEQ ID NO: 404946 - RNA, 19 nt, Homo sapiens
  misc_RNA (1)...(19): siRNA sense strand
ggaaagggauuuagucgua

SEQ ID NO: 404947 - RNA, 19 nt, Homo sapiens
  misc_RNA (1)...(19): siRNA sense strand
ggaaacagauugcaaguga

SEQ ID NO: 404948 - RNA, 19 nt, Homo sapiens
  misc_RNA (1)...(19): siRNA sense strand
gaucaaaucuuguaaguca

SEQ ID NO: 404949 - RNA, 19 nt, Homo sapiens
  misc_RNA (1)...(19): siRNA sense strand
gaucagcacuuaauaauca

SEQ ID NO: 404950 - RNA, 19 nt, Homo sapiens
  misc_RNA (1)...(19): siRNA sense strand
gguaagaacuuccgucgua

SEQ ID NO: 404951 - RNA, 19 nt, Homo sapiens
  misc_RNA (1)...(19): siRNA sense strand
gggaaaggcuucagucgua

SEQ ID NO: 404952 - RNA, 19 nt, Homo sapiens
  misc_RNA (1)...(19): siRNA sense strand
cgucagaguucauaucuua

SEQ ID NO: 404953 - RNA, 19 nt, Homo sapiens
  misc_RNA (1)...(19): siRNA sense strand
gaacaucagagaauucaua

SEQ ID NO: 404954 - RNA, 19 nt, Homo sapiens
  misc_RNA (1)...(19): siRNA sense strand
ggagagaaaugcuauaagu

SEQ ID NO: 404955 - RNA, 19 nt, Homo sapiens
  misc_RNA (1)...(19): siRNA sense strand
gagagaaaccuuacaauug

SEQ ID NO: 404956 - RNA, 19 nt, Homo sapiens
  misc_RNA (1)...(19): siRNA sense strand
gaacuuccgucguagauca

SEQ ID NO: 404957 - RNA, 19 nt, Homo sapiens
  misc_RNA (1)...(19): siRNA sense strand
gggcagggcuucaaucaga

SEQ ID NO: 404958 - RNA, 19 nt, Homo sapiens
  misc_RNA (1)...(19): siRNA sense strand
gcucacaucuucaaacuca

SEQ ID NO: 404959 - RNA, 19 nt, Homo sapiens
  misc_RNA (1)...(19): siRNA sense strand
ggagagaaaccuuacaauu

SEQ ID NO: 404960 - RNA, 19 nt, Homo sapiens
  misc_RNA (1)...(19): siRNA sense strand
agucguagaucaacacuua

SEQ ID NO: 404961 - RNA, 19 nt, Homo sapiens
  misc_RNA (1)...(19): siRNA sense strand
gaagacagcaacucaaaga

SEQ ID NO: 404962 - RNA, 19 nt, Homo sapiens
  misc_RNA (1)...(19): siRNA sense strand
aaucagagcucacgacuuc

SEQ ID NO: 404963 - RNA, 19 nt, Homo sapiens
  misc_RNA (1)...(19): siRNA sense strand
gagagaagccauacaaaug

SEQ ID NO: 404964 - RNA, 19 nt, Homo sapiens
  misc_RNA (1)...(19): siRNA sense strand
gaucaacacuuacuguaca

SEQ ID NO: 404965 - RNA, 19 nt, Homo sapiens
  misc_RNA (1)...(19): siRNA sense strand
gguaaagccuuccgucaga

SEQ ID NO: 404966 - RNA, 19 nt, Homo sapiens
  misc_RNA (1)...(19): siRNA sense strand
agagaaaccuuacaauugu

SEQ ID NO: 404967 - RNA, 19 nt, Homo sapiens
  misc_RNA (1)...(19): siRNA sense strand
ggagaaaccauauaauugu

SEQ ID NO: 404968 - RNA, 19 nt, Homo sapiens
  misc_RNA (1)...(19): siRNA sense strand
guaugaagacucuaugaua

SEQ ID NO: 404969 - RNA, 19 nt, Homo sapiens
  misc_RNA (1)...(19): siRNA sense strand
gguaaggaauuuagucaga

SEQ ID NO: 404970 - RNA, 19 nt, Homo sapiens
  misc_RNA (1)...(19): siRNA sense strand
gaaaucagcagacaagauc

SEQ ID NO: 404971 - RNA, 19 nt, Homo sapiens
  misc_RNA (1)...(19): siRNA sense strand
gagcagaucuuaaaauuca

SEQ ID NO: 404972 - RNA, 19 nt, Homo sapiens
  misc_RNA (1)...(19): siRNA sense strand
agagaaaccuuacaagugu

SEQ ID NO: 404973 - RNA, 19 nt, Homo sapiens
  misc_RNA (1)...(19): siRNA sense strand
cgucguagaucagcacuua

SEQ ID NO: 404974 - RNA, 19 nt, Homo sapiens
  misc_RNA (1)...(19): siRNA sense strand
cagacaagauccaaaguga

SEQ ID NO: 404975 - RNA, 19 nt, Homo sapiens
  misc_RNA (1)...(19): siRNA sense strand
gagagaaaccuuacaagug

SEQ ID NO: 404976 - RNA, 19 nt, Homo sapiens
  misc_RNA (1)...(19): siRNA sense strand
gagagaaaccauacaaaug

SEQ ID NO: 404977 - RNA, 19 nt, Homo sapiens
  misc_RNA (1)...(19): siRNA sense strand
gagagaaaccauacaaaug

SEQ ID NO: 404978 - RNA, 19 nt, Homo sapiens
  misc_RNA (1)...(19): siRNA sense strand
ucacugaugucuucaacuu

SEQ ID NO: 404979 - RNA, 19 nt, Homo sapiens
  misc_RNA (1)...(19): siRNA sense strand
ggagagaaaccauacaaau

SEQ ID NO: 404980 - RNA, 19 nt, Homo sapiens
  misc_RNA (1)...(19): siRNA sense strand
gggagaaaccauauaauug

SEQ ID NO: 404981 - RNA, 19 nt, Homo sapiens
  misc_RNA (1)...(19): siRNA sense strand
ggagagaaaccauacaaau

SEQ ID NO: 404982 - RNA, 19 nt, Homo sapiens
  misc_RNA (1)...(19): siRNA sense strand
agucagagcucacaucuuc

SEQ ID NO: 404983 - RNA, 19 nt, Homo sapiens
  misc_RNA (1)...(19): siRNA sense strand
ggaggaaguucuacaaggu

SEQ ID NO: 404984 - RNA, 19 nt, Homo sapiens
  misc_RNA (1)...(19): siRNA sense strand
ggagagaaaccauacguau

SEQ ID NO: 404985 - RNA, 19 nt, Homo sapiens
  misc_RNA (1)...(19): siRNA sense strand
guaagaacaucagagaguu

SEQ ID NO: 404986 - RNA, 19 nt, Homo sapiens
  misc_RNA (1)...(19): siRNA sense strand
cagucggucuucacaauua

SEQ ID NO: 404987 - RNA, 19 nt, Homo sapiens
  misc_RNA (1)...(19): siRNA sense strand
ggagagaagccauacaaau

SEQ ID NO: 404988 - RNA, 19 nt, Homo sapiens
  misc_RNA (1)...(19): siRNA sense strand
gagaaaccauauaauugug

SEQ ID NO: 404989 - RNA, 19 nt, Homo sapiens
  misc_RNA (1)...(19): siRNA sense strand
agaggaaucuguaccaaga

SEQ ID NO: 404990 - RNA, 19 nt, Homo sapiens
  misc_RNA (1)...(19): siRNA sense strand
gcucacgacuucagauuca

SEQ ID NO: 404991 - RNA, 19 nt, Homo sapiens
  misc_RNA (1)...(19): siRNA sense strand
guagaucagcacuuaauaa

SEQ ID NO: 404992 - RNA, 19 nt, Homo sapiens
  misc_RNA (1)...(19): siRNA sense strand
aaagugagguggagacugu

SEQ ID NO: 404993 - RNA, 19 nt, Homo sapiens
  misc_RNA (1)...(19): siRNA sense strand
ggacagaaauuuuaccaau

SEQ ID NO: 404994 - RNA, 19 nt, Homo sapiens
  misc_RNA (1)...(19): siRNA sense strand
gagaaaccauacaaaugug

SEQ ID NO: 404995 - RNA, 19 nt, Homo sapiens
  misc_RNA (1)...(19): siRNA sense strand
gagaaaccauacaaaugug

SEQ ID NO: 404996 - RNA, 19 nt, Homo sapiens
  misc_RNA (1)...(19): siRNA sense strand
uuacaagugugaagaaugu

SEQ ID NO: 404997 - RNA, 19 nt, Homo sapiens
  misc_RNA (1)...(19): siRNA sense strand
gagaaaccauacaaaugug

SEQ ID NO: 404998 - RNA, 19 nt, Homo sapiens
  misc_RNA (1)...(19): siRNA sense strand
guagagaaaccauucaaau

SEQ ID NO: 404999 - RNA, 19 nt, Homo sapiens
  misc_RNA (1)...(19): siRNA sense strand
caucucagcccuucauauu

SEQ ID NO: 405000 - RNA, 19 nt, Homo sapiens
  misc_RNA (1)...(19): siRNA sense strand
gcgaucaaaucuuguaagu

SEQ ID NO: 405001 - RNA, 19 nt, Homo sapiens
  misc_RNA (1)...(19): siRNA sense strand
gaaagcacauaguguacag

SEQ ID NO: 405002 - RNA, 19 nt, Homo sapiens
  misc_RNA (1)...(19): siRNA sense strand
gugguaaggguuucauuua

SEQ ID NO: 405003 - RNA, 19 nt, Homo sapiens
  misc_RNA (1)...(19): siRNA sense strand
ggagagaaaccuuacaagu

SEQ ID NO: 405004 - RNA, 19 nt, Homo sapiens
  misc_RNA (1)...(19): siRNA sense strand
ugagaaaccauacaaaugu

SEQ ID NO: 405005 - RNA, 19 nt, Homo sapiens
  misc_RNA (1)...(19): siRNA sense strand
ccaaugugaugaguacaaa

SEQ ID NO: 405006 - RNA, 19 nt, Homo sapiens
  misc_RNA (1)...(19): siRNA sense strand
gagaaaagccauacaaaug

SEQ ID NO: 405007 - RNA, 19 nt, Homo sapiens
  misc_RNA (1)...(19): siRNA sense strand
ucucagcccuucauauuca

SEQ ID NO: 405008 - RNA, 19 nt, Homo sapiens
  misc_RNA (1)...(19): siRNA sense strand
gagcucacaucuucaaacu

SEQ ID NO: 405009 - RNA, 19 nt, Homo sapiens
  misc_RNA (1)...(19): siRNA sense strand
ugacgugugugguaaggaa

SEQ ID NO: 405010 - RNA, 19 nt, Homo sapiens
  misc_RNA (1)...(19): siRNA sense strand
uauucagccuucacaauuu

SEQ ID NO: 405011 - RNA, 19 nt, Homo sapiens
  misc_RNA (1)...(19): siRNA sense strand
gaaacagauugcaagugau

SEQ ID NO: 405012 - RNA, 19 nt, Homo sapiens
  misc_RNA (1)...(19): siRNA sense strand
gagaauaguaagaacauca

SEQ ID NO: 405013 - RNA, 19 nt, Homo sapiens
  misc_RNA (1)...(19): siRNA sense strand
ucaggaacaucagagaauu

SEQ ID NO: 405014 - RNA, 19 nt, Homo sapiens
  misc_RNA (1)...(19): siRNA sense strand
gagaaaccuuacaauugug

SEQ ID NO: 405015 - RNA, 19 nt, Homo sapiens
  misc_RNA (1)...(19): siRNA sense strand
ggaaaucagcagacaagau

SEQ ID NO: 405016 - RNA, 19 nt, Homo sapiens
  misc_RNA (1)...(19): siRNA sense strand
aaacagauugcaagugauu

SEQ ID NO: 405017 - RNA, 19 nt, Homo sapiens
  misc_RNA (1)...(19): siRNA sense strand
agagaaaccauacaaaugu

SEQ ID NO: 405018 - RNA, 19 nt, Homo sapiens
  misc_RNA (1)...(19): siRNA sense strand
gcacauaguguacagaaac

SEQ ID NO: 405019 - RNA, 19 nt, Homo sapiens
  misc_RNA (1)...(19): siRNA sense strand
agagaaaccauacaaaugu

SEQ ID NO: 405020 - RNA, 19 nt, Homo sapiens
  misc_RNA (1)...(19): siRNA sense strand
gagaagccauacaaaugca

SEQ ID NO: 405021 - RNA, 19 nt, Homo sapiens
  misc_RNA (1)...(19): siRNA sense strand
gaacaucagagaguuguca

SEQ ID NO: 405022 - RNA, 19 nt, Homo sapiens
  misc_RNA (1)...(19): siRNA sense strand
gaagacucuaugauaagua

SEQ ID NO: 405023 - RNA, 19 nt, Homo sapiens
  misc_RNA (1)...(19): siRNA sense strand
gaaaagccauacaaaugug

SEQ ID NO: 405024 - RNA, 19 nt, Homo sapiens
  misc_RNA (1)...(19): siRNA sense strand
gugagaaaccauacaaaug

SEQ ID NO: 405025 - RNA, 19 nt, Homo sapiens
  misc_RNA (1)...(19): siRNA sense strand
ggugagaaaccauacaaau

SEQ ID NO: 405026 - RNA, 19 nt, Homo sapiens
  misc_RNA (1)...(19): siRNA sense strand
gaaugugguaagugcuuua

SEQ ID NO: 405027 - RNA, 19 nt, Homo sapiens
  misc_RNA (1)...(19): siRNA sense strand
gcucaaaccuucguaucca

SEQ ID NO: 405028 - RNA, 19 nt, Homo sapiens
  misc_RNA (1)...(19): siRNA sense strand
gggcaggacuauauacaac

SEQ ID NO: 405029 - RNA, 19 nt, Homo sapiens
  misc_RNA (1)...(19): siRNA sense strand
agacagcaacucaaagaaa

SEQ ID NO: 405030 - RNA, 19 nt, Homo sapiens
  misc_RNA (1)...(19): siRNA sense strand
ucaugcugcugguacauuu

SEQ ID NO: 405031 - RNA, 19 nt, Homo sapiens
  misc_RNA (1)...(19): siRNA sense strand
gacagcaacucaaagaaaa

SEQ ID NO: 405032 - RNA, 19 nt, Homo sapiens
  misc_RNA (1)...(19): siRNA sense strand
ugugguaagugcuuuauuc

SEQ ID NO: 405033 - RNA, 19 nt, Homo sapiens
  misc_RNA (1)...(19): siRNA sense strand
acagauugcaagugauuua

SEQ ID NO: 405034 - RNA, 19 nt, Homo sapiens
  misc_RNA (1)...(19): siRNA sense strand
gguuagggcaggacuauau

SEQ ID NO: 405035 - RNA, 19 nt, Homo sapiens
  misc_RNA (1)...(19): siRNA sense strand
uauguaaagugugugguaa

SEQ ID NO: 405036 - RNA, 19 nt, Homo sapiens
  misc_RNA (1)...(19): siRNA sense strand
acacaggagagaaaccuua

SEQ ID NO: 405037 - RNA, 19 nt, Homo sapiens
  misc_RNA (1)...(19): siRNA sense strand
caucagagaauucauacug

SEQ ID NO: 405038 - RNA, 19 nt, Homo sapiens
  misc_RNA (1)...(19): siRNA sense strand
caacacuuacuguacauug

SEQ ID NO: 405039 - RNA, 19 nt, Homo sapiens
  misc_RNA (1)...(19): siRNA sense strand
ucagagaguccacacugua

SEQ ID NO: 405040 - RNA, 19 nt, Homo sapiens
  misc_RNA (1)...(19): siRNA sense strand
ucugaaagcacauagugua

SEQ ID NO: 405041 - RNA, 19 nt, Homo sapiens
  misc_RNA (1)...(19): siRNA sense strand
ggucuucacaauuacagua

SEQ ID NO: 405042 - RNA, 19 nt, Homo sapiens
  misc_RNA (1)...(19): siRNA sense strand
gaaaccauacaaaugugaa

SEQ ID NO: 405043 - RNA, 19 nt, Homo sapiens
  misc_RNA (1)...(19): siRNA sense strand
gcagacaagauccaaagug

SEQ ID NO: 405044 - RNA, 19 nt, Homo sapiens
  misc_RNA (1)...(19): siRNA sense strand
ccauacaaaugcaaugagu

SEQ ID NO: 405045 - RNA, 19 nt, Homo sapiens
  misc_RNA (1)...(19): siRNA sense strand
gagcuugaaccuugacaug

SEQ ID NO: 405046 - RNA, 19 nt, Homo sapiens
  misc_RNA (1)...(19): siRNA sense strand
ggaaacagaugauaacaua

SEQ ID NO: 405047 - RNA, 19 nt, Homo sapiens
  misc_RNA (1)...(19): siRNA sense strand
ccacagagcuccaagauaa

SEQ ID NO: 405048 - RNA, 19 nt, Homo sapiens
  misc_RNA (1)...(19): siRNA sense strand
ggaaaucgauccucucaua

SEQ ID NO: 405049 - RNA, 19 nt, Homo sapiens
  misc_RNA (1)...(19): siRNA sense strand
ccaaauagcuguagaauca

SEQ ID NO: 405050 - RNA, 19 nt, Homo sapiens
  misc_RNA (1)...(19): siRNA sense strand
gaacuucgauguuauguga

SEQ ID NO: 405051 - RNA, 19 nt, Homo sapiens
  misc_RNA (1)...(19): siRNA sense strand
gaaaugacuuggacacuaa

SEQ ID NO: 405052 - RNA, 19 nt, Homo sapiens
  misc_RNA (1)...(19): siRNA sense strand
gaauggauccuguaaauaa

SEQ ID NO: 405053 - RNA, 19 nt, Homo sapiens
  misc_RNA (1)...(19): siRNA sense strand
gaagacaaguucacuagaa

SEQ ID NO: 405054 - RNA, 19 nt, Homo sapiens
  misc_RNA (1)...(19): siRNA sense strand
gaagaugugugaucauuug

SEQ ID NO: 405055 - RNA, 19 nt, Homo sapiens
  misc_RNA (1)...(19): siRNA sense strand
gaccagaggugcaucauuu

SEQ ID NO: 405056 - RNA, 19 nt, Homo sapiens
  misc_RNA (1)...(19): siRNA sense strand
guacucaggugauacauaa

SEQ ID NO: 405057 - RNA, 19 nt, Homo sapiens
  misc_RNA (1)...(19): siRNA sense strand
gcaaaucacugaccuuuua

SEQ ID NO: 405058 - RNA, 19 nt, Homo sapiens
  misc_RNA (1)...(19): siRNA sense strand
caacuaaccucacuagaga

SEQ ID NO: 405059 - RNA, 19 nt, Homo sapiens
  misc_RNA (1)...(19): siRNA sense strand
gaaugcagaugauuuagaa

SEQ ID NO: 405060 - RNA, 19 nt, Homo sapiens
  misc_RNA (1)...(19): siRNA sense strand
gacaagaacugcuuauaga

SEQ ID NO: 405061 - RNA, 19 nt, Homo sapiens
  misc_RNA (1)...(19): siRNA sense strand
gcucagauauuugcuauuu

SEQ ID NO: 405062 - RNA, 19 nt, Homo sapiens
  misc_RNA (1)...(19): siRNA sense strand
gaugaaggauucuggagua

SEQ ID NO: 405063 - RNA, 19 nt, Homo sapiens
  misc_RNA (1)...(19): siRNA sense strand
gaacaagucugguuugcau

SEQ ID NO: 405064 - RNA, 19 nt, Homo sapiens
  misc_RNA (1)...(19): siRNA sense strand
ggaaguaacuccucacaca

SEQ ID NO: 405065 - RNA, 19 nt, Homo sapiens
  misc_RNA (1)...(19): siRNA sense strand
gaagggauauuaauguuuc

SEQ ID NO: 405066 - RNA, 19 nt, Homo sapiens
  misc_RNA (1)...(19): siRNA sense strand
ggaaaugacuuggacacua

SEQ ID NO: 405067 - RNA, 19 nt, Homo sapiens
  misc_RNA (1)...(19): siRNA sense strand
gaacugcaaacuacuaaua

SEQ ID NO: 405068 - RNA, 19 nt, Homo sapiens
  misc_RNA (1)...(19): siRNA sense strand
gcaaaggucuuggcuauuc

SEQ ID NO: 405069 - RNA, 19 nt, Homo sapiens
  misc_RNA (1)...(19): siRNA sense strand
gaagaaacacugacaaaug

SEQ ID NO: 405070 - RNA, 19 nt, Homo sapiens
  misc_RNA (1)...(19): siRNA sense strand
gcagagagcagaagauauu

SEQ ID NO: 405071 - RNA, 19 nt, Homo sapiens
  misc_RNA (1)...(19): siRNA sense strand
cgugauaccucugauauua

SEQ ID NO: 405072 - RNA, 19 nt, Homo sapiens
  misc_RNA (1)...(19): siRNA sense strand
gaacagugcuucucaucau

SEQ ID NO: 405073 - RNA, 19 nt, Homo sapiens
  misc_RNA (1)...(19): siRNA sense strand
gauaaagccuugaaaccaa

SEQ ID NO: 405074 - RNA, 19 nt, Homo sapiens
  misc_RNA (1)...(19): siRNA sense strand
gagaagaugugugaucauu

SEQ ID NO: 405075 - RNA, 19 nt, Homo sapiens
  misc_RNA (1)...(19): siRNA sense strand
gagauaacaugguuuguca

SEQ ID NO: 405076 - RNA, 19 nt, Homo sapiens
  misc_RNA (1)...(19): siRNA sense strand
gcucacugaucuauuauuu

SEQ ID NO: 405077 - RNA, 19 nt, Homo sapiens
  misc_RNA (1)...(19): siRNA sense strand
aagaaacacugacaaauga

SEQ ID NO: 405078 - RNA, 19 nt, Homo sapiens
  misc_RNA (1)...(19): siRNA sense strand
ucacagacaugcggaauuu

SEQ ID NO: 405079 - RNA, 19 nt, Homo sapiens
  misc_RNA (1)...(19): siRNA sense strand
gcaauugugugaucacguu

SEQ ID NO: 405080 - RNA, 19 nt, Homo sapiens
  misc_RNA (1)...(19): siRNA sense strand
caacagcauucacaacuga

SEQ ID NO: 405081 - RNA, 19 nt, Homo sapiens
  misc_RNA (1)...(19): siRNA sense strand
gaaacucucuagugccauu

SEQ ID NO: 405082 - RNA, 19 nt, Homo sapiens
  misc_RNA (1)...(19): siRNA sense strand
gaaucugcaucuaauauug

SEQ ID NO: 405083 - RNA, 19 nt, Homo sapiens
  misc_RNA (1)...(19): siRNA sense strand
ggaaguugcugucuguguu

SEQ ID NO: 405084 - RNA, 19 nt, Homo sapiens
  misc_RNA (1)...(19): siRNA sense strand
gcagugggauuggagauaa

SEQ ID NO: 405085 - RNA, 19 nt, Homo sapiens
  misc_RNA (1)...(19): siRNA sense strand
cagaagggcugcauggaaa

SEQ ID NO: 405086 - RNA, 19 nt, Homo sapiens
  misc_RNA (1)...(19): siRNA sense strand
caacucaacuaauccagaa

SEQ ID NO: 405087 - RNA, 19 nt, Homo sapiens
  misc_RNA (1)...(19): siRNA sense strand
gaaggaucaucuaguaaga

SEQ ID NO: 405088 - RNA, 19 nt, Homo sapiens
  misc_RNA (1)...(19): siRNA sense strand
cauauaaugugcuguuuga

SEQ ID NO: 405089 - RNA, 19 nt, Homo sapiens
  misc_RNA (1)...(19): siRNA sense strand
uauaaccgauggaagaaua

SEQ ID NO: 405090 - RNA, 19 nt, Homo sapiens
  misc_RNA (1)...(19): siRNA sense strand
gagcaguacuugaacuuug

SEQ ID NO: 405091 - RNA, 19 nt, Homo sapiens
  misc_RNA (1)...(19): siRNA sense strand
ggaaauugcuacauucucu

SEQ ID NO: 405092 - RNA, 19 nt, Homo sapiens
  misc_RNA (1)...(19): siRNA sense strand
gcaagugaguccauugaug

SEQ ID NO: 405093 - RNA, 19 nt, Homo sapiens
  misc_RNA (1)...(19): siRNA sense strand
cagcaaaggucuuggcuau

SEQ ID NO: 405094 - RNA, 19 nt, Homo sapiens
  misc_RNA (1)...(19): siRNA sense strand
uguaagggcuucuugguaa

SEQ ID NO: 405095 - RNA, 19 nt, Homo sapiens
  misc_RNA (1)...(19): siRNA sense strand
gaaggauucuggaguaaag

SEQ ID NO: 405096 - RNA, 19 nt, Homo sapiens
  misc_RNA (1)...(19): siRNA sense strand
gaagauauccuugcuaaag

SEQ ID NO: 405097 - RNA, 19 nt, Homo sapiens
  misc_RNA (1)...(19): siRNA sense strand
gaggugcuaucuacucuuu

SEQ ID NO: 405098 - RNA, 19 nt, Homo sapiens
  misc_RNA (1)...(19): siRNA sense strand
aggaauggguuacguguua

SEQ ID NO: 405099 - RNA, 19 nt, Homo sapiens
  misc_RNA (1)...(19): siRNA sense strand
gaaguaggccuuguugaaa

SEQ ID NO: 405100 - RNA, 19 nt, Homo sapiens
  misc_RNA (1)...(19): siRNA sense strand
gcuaucuacucuuucuuua

SEQ ID NO: 405101 - RNA, 19 nt, Homo sapiens
  misc_RNA (1)...(19): siRNA sense strand
caucucaucucucaaguga

SEQ ID NO: 405102 - RNA, 19 nt, Homo sapiens
  misc_RNA (1)...(19): siRNA sense strand
gcaugaggaugacaaucua

SEQ ID NO: 405103 - RNA, 19 nt, Homo sapiens
  misc_RNA (1)...(19): siRNA sense strand
uacaggccauucuuaauua

SEQ ID NO: 405104 - RNA, 19 nt, Homo sapiens
  misc_RNA (1)...(19): siRNA sense strand
uagaauggauccuguaaau

SEQ ID NO: 405105 - RNA, 19 nt, Homo sapiens
  misc_RNA (1)...(19): siRNA sense strand
ggaagaugaugauuaugug

SEQ ID NO: 405106 - RNA, 19 nt, Homo sapiens
  misc_RNA (1)...(19): siRNA sense strand
gcaagaaaaucaggaguua

SEQ ID NO: 405107 - RNA, 19 nt, Homo sapiens
  misc_RNA (1)...(19): siRNA sense strand
ggcaauauuugucugauga

SEQ ID NO: 405108 - RNA, 19 nt, Homo sapiens
  misc_RNA (1)...(19): siRNA sense strand
gaacaaauggcacaaccuu

SEQ ID NO: 405109 - RNA, 19 nt, Homo sapiens
  misc_RNA (1)...(19): siRNA sense strand
ggacaagaacugcuuauag

SEQ ID NO: 405110 - RNA, 19 nt, Homo sapiens
  misc_RNA (1)...(19): siRNA sense strand
caagauccgguuucaaaua

SEQ ID NO: 405111 - RNA, 19 nt, Homo sapiens
  misc_RNA (1)...(19): siRNA sense strand
gauacaaggguacauuuaa

SEQ ID NO: 405112 - RNA, 19 nt, Homo sapiens
  misc_RNA (1)...(19): siRNA sense strand
ugaaggagcugucaaucug

SEQ ID NO: 405113 - RNA, 19 nt, Homo sapiens
  misc_RNA (1)...(19): siRNA sense strand
gguugaaguuggagaagua

SEQ ID NO: 405114 - RNA, 19 nt, Homo sapiens
  misc_RNA (1)...(19): siRNA sense strand
gcauagccuuauuccuuua

SEQ ID NO: 405115 - RNA, 19 nt, Homo sapiens
  misc_RNA (1)...(19): siRNA sense strand
ggacauguuugguaaugau

SEQ ID NO: 405116 - RNA, 19 nt, Homo sapiens
  misc_RNA (1)...(19): siRNA sense strand
agaggaagaugaugauuau

SEQ ID NO: 405117 - RNA, 19 nt, Homo sapiens
  misc_RNA (1)...(19): siRNA sense strand
guagacacuuuaucaauca

SEQ ID NO: 405118 - RNA, 19 nt, Homo sapiens
  misc_RNA (1)...(19): siRNA sense strand
uaaagcauaugccucagaa

SEQ ID NO: 405119 - RNA, 19 nt, Homo sapiens
  misc_RNA (1)...(19): siRNA sense strand
aaccagacguauuucauua

SEQ ID NO: 405120 - RNA, 19 nt, Homo sapiens
  misc_RNA (1)...(19): siRNA sense strand
gacagcaacucaacuaauc

SEQ ID NO: 405121 - RNA, 19 nt, Homo sapiens
  misc_RNA (1)...(19): siRNA sense strand
ucucuuggcuuuacugaaa

SEQ ID NO: 405122 - RNA, 19 nt, Homo sapiens
  misc_RNA (1)...(19): siRNA sense strand
ggagaagccauucaacaaa

SEQ ID NO: 405123 - RNA, 19 nt, Homo sapiens
  misc_RNA (1)...(19): siRNA sense strand
gaucuacuguguuucguau

SEQ ID NO: 405124 - RNA, 19 nt, Homo sapiens
  misc_RNA (1)...(19): siRNA sense strand
gaaagcaacuaaccucacu

SEQ ID NO: 405125 - RNA, 19 nt, Homo sapiens
  misc_RNA (1)...(19): siRNA sense strand
caagcagccucuggcauua

SEQ ID NO: 405126 - RNA, 19 nt, Homo sapiens
  misc_RNA (1)...(19): siRNA sense strand
gaaauagggcuguguucuu

SEQ ID NO: 405127 - RNA, 19 nt, Homo sapiens
  misc_RNA (1)...(19): siRNA sense strand
ucacaaugaccacauauaa

SEQ ID NO: 405128 - RNA, 19 nt, Homo sapiens
  misc_RNA (1)...(19): siRNA sense strand
caaccuugcuggccuuuau

SEQ ID NO: 405129 - RNA, 19 nt, Homo sapiens
  misc_RNA (1)...(19): siRNA sense strand
auagugaacuucgauguua

SEQ ID NO: 405130 - RNA, 19 nt, Homo sapiens
  misc_RNA (1)...(19): siRNA sense strand
gcauaugccucagaaguau

SEQ ID NO: 405131 - RNA, 19 nt, Homo sapiens
  misc_RNA (1)...(19): siRNA sense strand
ggauacaaggguacauuua

SEQ ID NO: 405132 - RNA, 19 nt, Homo sapiens
  misc_RNA (1)...(19): siRNA sense strand
gaaggaacaagucugguuu

SEQ ID NO: 405133 - RNA, 19 nt, Homo sapiens
  misc_RNA (1)...(19): siRNA sense strand
caaagacaguuauggacuu

SEQ ID NO: 405134 - RNA, 19 nt, Homo sapiens
  misc_RNA (1)...(19): siRNA sense strand
gaaaaccuguuacugaaaa

SEQ ID NO: 405135 - RNA, 19 nt, Homo sapiens
  misc_RNA (1)...(19): siRNA sense strand
ccaagaaggugagaguauu

SEQ ID NO: 405136 - RNA, 19 nt, Homo sapiens
  misc_RNA (1)...(19): siRNA sense strand
caagaaggugagaguauua

SEQ ID NO: 405137 - RNA, 19 nt, Homo sapiens
  misc_RNA (1)...(19): siRNA sense strand
uauaacaacuggcaaagau

SEQ ID NO: 405138 - RNA, 19 nt, Homo sapiens
  misc_RNA (1)...(19): siRNA sense strand
gguagacacuuuaucaauc

SEQ ID NO: 405139 - RNA, 19 nt, Homo sapiens
  misc_RNA (1)...(19): siRNA sense strand
gaaaggcucaugcuucaga

SEQ ID NO: 405140 - RNA, 19 nt, Homo sapiens
  misc_RNA (1)...(19): siRNA sense strand
gaggaaagcagaagucaug

SEQ ID NO: 405141 - RNA, 19 nt, Homo sapiens
  misc_RNA (1)...(19): siRNA sense strand
caacacaauucaucucauc

SEQ ID NO: 405142 - RNA, 19 nt, Homo sapiens
  misc_RNA (1)...(19): siRNA sense strand
cagaagauauucacagaca

SEQ ID NO: 405143 - RNA, 19 nt, Homo sapiens
  misc_RNA (1)...(19): siRNA sense strand
gauccgguuucaaauauga

SEQ ID NO: 405144 - RNA, 19 nt, Homo sapiens
  misc_RNA (1)...(19): siRNA sense strand
gaagaaacagccacugguu

SEQ ID NO: 405145 - RNA, 19 nt, Homo sapiens
  misc_RNA (1)...(19): siRNA sense strand
caauucaucucaucucuca

SEQ ID NO: 405146 - RNA, 19 nt, Homo sapiens
  misc_RNA (1)...(19): siRNA sense strand
gaggcgcacuucaagcaua

SEQ ID NO: 405147 - RNA, 19 nt, Homo sapiens
  misc_RNA (1)...(19): siRNA sense strand
ggaaguuugugcugacaga

SEQ ID NO: 405148 - RNA, 19 nt, Homo sapiens
  misc_RNA (1)...(19): siRNA sense strand
gaagaucgagcaccugaau

SEQ ID NO: 405149 - RNA, 19 nt, Homo sapiens
  misc_RNA (1)...(19): siRNA sense strand
ugccaaagcucuccaggaa

SEQ ID NO: 405150 - RNA, 19 nt, Homo sapiens
  misc_RNA (1)...(19): siRNA sense strand
caaaguacccuccuucuac

SEQ ID NO: 405151 - RNA, 19 nt, Homo sapiens
  misc_RNA (1)...(19): siRNA sense strand
ucaccuaccugaaggacaa

SEQ ID NO: 405152 - RNA, 19 nt, Homo sapiens
  misc_RNA (1)...(19): siRNA sense strand
caacagcacccguaacauc

SEQ ID NO: 405153 - RNA, 19 nt, Homo sapiens
  misc_RNA (1)...(19): siRNA sense strand
ccaaagcucuccaggaacu

SEQ ID NO: 405154 - RNA, 19 nt, Homo sapiens
  misc_RNA (1)...(19): siRNA sense strand
acgcagaucuggugccaaa

SEQ ID NO: 405155 - RNA, 19 nt, Homo sapiens
  misc_RNA (1)...(19): siRNA sense strand
gaccgcaaguuucuguuug

SEQ ID NO: 405156 - RNA, 19 nt, Homo sapiens
  misc_RNA (1)...(19): siRNA sense strand
agggugcucugaaguauuu

SEQ ID NO: 405157 - RNA, 19 nt, Homo sapiens
  misc_RNA (1)...(19): siRNA sense strand
ccaaggccgugaugaagau

SEQ ID NO: 405158 - RNA, 19 nt, Homo sapiens
  misc_RNA (1)...(19): siRNA sense strand
ccaaaguacccuccuucua

SEQ ID NO: 405159 - RNA, 19 nt, Homo sapiens
  misc_RNA (1)...(19): siRNA sense strand
gacaacagcacccguaaca

SEQ ID NO: 405160 - RNA, 19 nt, Homo sapiens
  misc_RNA (1)...(19): siRNA sense strand
gagccagguuugaguccaa

SEQ ID NO: 405161 - RNA, 19 nt, Homo sapiens
  misc_RNA (1)...(19): siRNA sense strand
cccguaacaucuucaucua

SEQ ID NO: 405162 - RNA, 19 nt, Homo sapiens
  misc_RNA (1)...(19): siRNA sense strand
gcaggcucauguacuucaa

SEQ ID NO: 405163 - RNA, 19 nt, Homo sapiens
  misc_RNA (1)...(19): siRNA sense strand
caggguaccgugaggguuu

SEQ ID NO: 405164 - RNA, 19 nt, Homo sapiens
  misc_RNA (1)...(19): siRNA sense strand
cgaccgcaaguuucuguuu

SEQ ID NO: 405165 - RNA, 19 nt, Homo sapiens
  misc_RNA (1)...(19): siRNA sense strand
ggaauccaccggaauaucc

SEQ ID NO: 405166 - RNA, 19 nt, Homo sapiens
  misc_RNA (1)...(19): siRNA sense strand
cagcacccguaacaucuuc

SEQ ID NO: 405167 - RNA, 19 nt, Homo sapiens
  misc_RNA (1)...(19): siRNA sense strand
aggcgcacuucaagcauaa

SEQ ID NO: 405168 - RNA, 19 nt, Homo sapiens
  misc_RNA (1)...(19): siRNA sense strand
cgacugggccuccuacacu

SEQ ID NO: 405169 - RNA, 19 nt, Homo sapiens
  misc_RNA (1)...(19): siRNA sense strand
ucgggaauccaccggaaua

SEQ ID NO: 405170 - RNA, 19 nt, Homo sapiens
  misc_RNA (1)...(19): siRNA sense strand
acagaaaugaugccaagga

SEQ ID NO: 405171 - RNA, 19 nt, Homo sapiens
  misc_RNA (1)...(19): siRNA sense strand
gcucauguacuucaaagac

SEQ ID NO: 405172 - RNA, 19 nt, Homo sapiens
  misc_RNA (1)...(19): siRNA sense strand
ugaaggaaggcuacaugga

SEQ ID NO: 405173 - RNA, 19 nt, Homo sapiens
  misc_RNA (1)...(19): siRNA sense strand
acuucaagcauaaaccuua

SEQ ID NO: 405174 - RNA, 19 nt, Homo sapiens
  misc_RNA (1)...(19): siRNA sense strand
gagggugcucugaaguauu

SEQ ID NO: 405175 - RNA, 19 nt, Homo sapiens
  misc_RNA (1)...(19): siRNA sense strand
gaaguuugugcugacagaa

SEQ ID NO: 405176 - RNA, 19 nt, Homo sapiens
  misc_RNA (1)...(19): siRNA sense strand
gcagaucuggugccaaagc

SEQ ID NO: 405177 - RNA, 19 nt, Homo sapiens
  misc_RNA (1)...(19): siRNA sense strand
cuucaagcauaaaccuuag

SEQ ID NO: 405178 - RNA, 19 nt, Homo sapiens
  misc_RNA (1)...(19): siRNA sense strand
gcacuucaagcauaaaccu

SEQ ID NO: 405179 - RNA, 19 nt, Homo sapiens
  misc_RNA (1)...(19): siRNA sense strand
ggacaacagcacccguaac

SEQ ID NO: 405180 - RNA, 19 nt, Homo sapiens
  misc_RNA (1)...(19): siRNA sense strand
gcgagagccagguuugagu

SEQ ID NO: 405181 - RNA, 19 nt, Homo sapiens
  misc_RNA (1)...(19): siRNA sense strand
guaacaucuucaucuacca

SEQ ID NO: 405182 - RNA, 19 nt, Homo sapiens
  misc_RNA (1)...(19): siRNA sense strand
gaagaacgcucaagucaga

SEQ ID NO: 405183 - RNA, 19 nt, Homo sapiens
  misc_RNA (1)...(19): siRNA sense strand
gaaccagaauuacaacaaa

SEQ ID NO: 405184 - RNA, 19 nt, Homo sapiens
  misc_RNA (1)...(19): siRNA sense strand
ucacaccacuaaugacuua

SEQ ID NO: 405185 - RNA, 19 nt, Homo sapiens
  misc_RNA (1)...(19): siRNA sense strand
gagcagcccauguaacuua

SEQ ID NO: 405186 - RNA, 19 nt, Homo sapiens
  misc_RNA (1)...(19): siRNA sense strand
caacuucauugucuucuug

SEQ ID NO: 405187 - RNA, 19 nt, Homo sapiens
  misc_RNA (1)...(19): siRNA sense strand
gaggagagcagcccaugua

SEQ ID NO: 405188 - RNA, 19 nt, Homo sapiens
  misc_RNA (1)...(19): siRNA sense strand
gaaacaaacucugccuaca

SEQ ID NO: 405189 - RNA, 19 nt, Homo sapiens
  misc_RNA (1)...(19): siRNA sense strand
gaaauucagaaccaacuuu

SEQ ID NO: 405190 - RNA, 19 nt, Homo sapiens
  misc_RNA (1)...(19): siRNA sense strand
acacucggauugaaccuua

SEQ ID NO: 405191 - RNA, 19 nt, Homo sapiens
  misc_RNA (1)...(19): siRNA sense strand
caacuuugauuucaugauc

SEQ ID NO: 405192 - RNA, 19 nt, Homo sapiens
  misc_RNA (1)...(19): siRNA sense strand
gaaccaacuuugauuucau

SEQ ID NO: 405193 - RNA, 19 nt, Homo sapiens
  misc_RNA (1)...(19): siRNA sense strand
cauguucaccuuuguguua

SEQ ID NO: 405194 - RNA, 19 nt, Homo sapiens
  misc_RNA (1)...(19): siRNA sense strand
gaagucaacagaaacaaau

SEQ ID NO: 405195 - RNA, 19 nt, Homo sapiens
  misc_RNA (1)...(19): siRNA sense strand
gauccagccuucaggaaau

SEQ ID NO: 405196 - RNA, 19 nt, Homo sapiens
  misc_RNA (1)...(19): siRNA sense strand
caagaucucugcuggacau

SEQ ID NO: 405197 - RNA, 19 nt, Homo sapiens
  misc_RNA (1)...(19): siRNA sense strand
gcucagacccugcggaaga

SEQ ID NO: 405198 - RNA, 19 nt, Homo sapiens
  misc_RNA (1)...(19): siRNA sense strand
caaagccacagaagaaauu

SEQ ID NO: 405199 - RNA, 19 nt, Homo sapiens
  misc_RNA (1)...(19): siRNA sense strand
guucagacccguggauaua

SEQ ID NO: 405200 - RNA, 19 nt, Homo sapiens
  misc_RNA (1)...(19): siRNA sense strand
ucugugaccucuucauuug

SEQ ID NO: 405201 - RNA, 19 nt, Homo sapiens
  misc_RNA (1)...(19): siRNA sense strand
gaaacaaauccucccauca

SEQ ID NO: 405202 - RNA, 19 nt, Homo sapiens
  misc_RNA (1)...(19): siRNA sense strand
caccuuggcuaccuugaaa

SEQ ID NO: 405203 - RNA, 19 nt, Homo sapiens
  misc_RNA (1)...(19): siRNA sense strand
gaacucaacaggccaccuu

SEQ ID NO: 405204 - RNA, 19 nt, Homo sapiens
  misc_RNA (1)...(19): siRNA sense strand
caucaacacuguggucaga

SEQ ID NO: 405205 - RNA, 19 nt, Homo sapiens
  misc_RNA (1)...(19): siRNA sense strand
gaucucugcuggacaucaa

SEQ ID NO: 405206 - RNA, 19 nt, Homo sapiens
  misc_RNA (1)...(19): siRNA sense strand
gacuucaccuucuguguug

SEQ ID NO: 405207 - RNA, 19 nt, Homo sapiens
  misc_RNA (1)...(19): siRNA sense strand
ggauuugccaauucauaua

SEQ ID NO: 405208 - RNA, 19 nt, Homo sapiens
  misc_RNA (1)...(19): siRNA sense strand
gaaccucgaagucaacaga

SEQ ID NO: 405209 - RNA, 19 nt, Homo sapiens
  misc_RNA (1)...(19): siRNA sense strand
gugcagggcugagaaggaa

SEQ ID NO: 405210 - RNA, 19 nt, Homo sapiens
  misc_RNA (1)...(19): siRNA sense strand
uguauaggaaccagaauua

SEQ ID NO: 405211 - RNA, 19 nt, Homo sapiens
  misc_RNA (1)...(19): siRNA sense strand
aaacaaauccucccaucau

SEQ ID NO: 405212 - RNA, 19 nt, Homo sapiens
  misc_RNA (1)...(19): siRNA sense strand
gaaccuuacuacagcaucu

SEQ ID NO: 405213 - RNA, 19 nt, Homo sapiens
  misc_RNA (1)...(19): siRNA sense strand
caaauccucccaucaugaa

SEQ ID NO: 405214 - RNA, 19 nt, Homo sapiens
  misc_RNA (1)...(19): siRNA sense strand
ggaaccagaauuacaacaa

SEQ ID NO: 405215 - RNA, 19 nt, Homo sapiens
  misc_RNA (1)...(19): siRNA sense strand
cauauauugccaugcauua

SEQ ID NO: 405216 - RNA, 19 nt, Homo sapiens
  misc_RNA (1)...(19): siRNA sense strand
gaacagugcagggcugaga

SEQ ID NO: 405217 - RNA, 19 nt, Homo sapiens
  misc_RNA (1)...(19): siRNA sense strand
gcaacuucauugucuucuu

SEQ ID NO: 405218 - RNA, 19 nt, Homo sapiens
  misc_RNA (1)...(19): siRNA sense strand
gagagcagcccauguaacu

SEQ ID NO: 405219 - RNA, 19 nt, Homo sapiens
  misc_RNA (1)...(19): siRNA sense strand
aacaaacucugccuacaug

SEQ ID NO: 405220 - RNA, 19 nt, Homo sapiens
  misc_RNA (1)...(19): siRNA sense strand
ucagaaccaacuuugauuu

SEQ ID NO: 405221 - RNA, 19 nt, Homo sapiens
  misc_RNA (1)...(19): siRNA sense strand
gaagacaguggcagugauc

SEQ ID NO: 405222 - RNA, 19 nt, Homo sapiens
  misc_RNA (1)...(19): siRNA sense strand
gugguucucuccagcaaug

SEQ ID NO: 405223 - RNA, 19 nt, Homo sapiens
  misc_RNA (1)...(19): siRNA sense strand
cgacuucaccuucuguguu

SEQ ID NO: 405224 - RNA, 19 nt, Homo sapiens
  misc_RNA (1)...(19): siRNA sense strand
ggauugaaccuuacuacag

SEQ ID NO: 405225 - RNA, 19 nt, Homo sapiens
  misc_RNA (1)...(19): siRNA sense strand
ccaggagggucuucaggau

SEQ ID NO: 405226 - RNA, 19 nt, Homo sapiens
  misc_RNA (1)...(19): siRNA sense strand
ggaaagccauuuugucucu

SEQ ID NO: 405227 - RNA, 19 nt, Homo sapiens
  misc_RNA (1)...(19): siRNA sense strand
cgaagucaacagaaacaaa

SEQ ID NO: 405228 - RNA, 19 nt, Homo sapiens
  misc_RNA (1)...(19): siRNA sense strand
gcacuucagccaagcagau

SEQ ID NO: 405229 - RNA, 19 nt, Homo sapiens
  misc_RNA (1)...(19): siRNA sense strand
gaugcuuucugcuucacuu

SEQ ID NO: 405230 - RNA, 19 nt, Homo sapiens
  misc_RNA (1)...(19): siRNA sense strand
agaaccaacuuugauuuca

SEQ ID NO: 405231 - RNA, 19 nt, Homo sapiens
  misc_RNA (1)...(19): siRNA sense strand
cagcaagucccaccucugu

SEQ ID NO: 405232 - RNA, 19 nt, Homo sapiens
  misc_RNA (1)...(19): siRNA sense strand
uauggcaacuucauugucu

SEQ ID NO: 405233 - RNA, 19 nt, Homo sapiens
  misc_RNA (1)...(19): siRNA sense strand
aaacaaacucugccuacau

SEQ ID NO: 405234 - RNA, 19 nt, Homo sapiens
  misc_RNA (1)...(19): siRNA sense strand
cuucauucuuuaccaguuu

SEQ ID NO: 405235 - RNA, 19 nt, Homo sapiens
  misc_RNA (1)...(19): siRNA sense strand
cggaagaacgcucaaguca

SEQ ID NO: 405236 - RNA, 19 nt, Homo sapiens
  misc_RNA (1)...(19): siRNA sense strand
gcaagucccaccucugucu

SEQ ID NO: 405237 - RNA, 19 nt, Homo sapiens
  misc_RNA (1)...(19): siRNA sense strand
ggaaauucagaaccaacuu

SEQ ID NO: 405238 - RNA, 19 nt, Homo sapiens
  misc_RNA (1)...(19): siRNA sense strand
ccaguaaacucuuuuggau

SEQ ID NO: 405239 - RNA, 19 nt, Homo sapiens
  misc_RNA (1)...(19): siRNA sense strand
acaaauccucccaucauga

SEQ ID NO: 405240 - RNA, 19 nt, Homo sapiens
  misc_RNA (1)...(19): siRNA sense strand
ggaauaugacagcacuuca

SEQ ID NO: 405241 - RNA, 19 nt, Homo sapiens
  misc_RNA (1)...(19): siRNA sense strand
ugcauuaucacaccacuaa

SEQ ID NO: 405242 - RNA, 19 nt, Homo sapiens
  misc_RNA (1)...(19): siRNA sense strand
ccaaagccacagaagaaau

SEQ ID NO: 405243 - RNA, 19 nt, Homo sapiens
  misc_RNA (1)...(19): siRNA sense strand
aagggaaccucgaagucaa

SEQ ID NO: 405244 - RNA, 19 nt, Homo sapiens
  misc_RNA (1)...(19): siRNA sense strand
ugacuuagugcaggaauau

SEQ ID NO: 405245 - RNA, 19 nt, Homo sapiens
  misc_RNA (1)...(19): siRNA sense strand
ccaagucauucaaaagaaa

SEQ ID NO: 405246 - RNA, 19 nt, Homo sapiens
  misc_RNA (1)...(19): siRNA sense strand
cuccaaagccacagaagaa

SEQ ID NO: 405247 - RNA, 19 nt, Homo sapiens
  misc_RNA (1)...(19): siRNA sense strand
aacaaauccucccaucaug

SEQ ID NO: 405248 - RNA, 19 nt, Homo sapiens
  misc_RNA (1)...(19): siRNA sense strand
ugaagacaguggcagugau

SEQ ID NO: 405249 - RNA, 19 nt, Homo sapiens
  misc_RNA (1)...(19): siRNA sense strand
caacaaacugcagcacguu

SEQ ID NO: 405250 - RNA, 19 nt, Homo sapiens
  misc_RNA (1)...(19): siRNA sense strand
aaccaacuuugauuucaug

SEQ ID NO: 405251 - RNA, 19 nt, Homo sapiens
  misc_RNA (1)...(19): siRNA sense strand
gaauaugacagcacuucag

SEQ ID NO: 405252 - RNA, 19 nt, Homo sapiens
  misc_RNA (1)...(19): siRNA sense strand
uaccaagagucccaaccaa

SEQ ID NO: 405253 - RNA, 19 nt, Homo sapiens
  misc_RNA (1)...(19): siRNA sense strand
uauaggaaccagaauuaca

SEQ ID NO: 405254 - RNA, 19 nt, Homo sapiens
  misc_RNA (1)...(19): siRNA sense strand
cagaaccaacuuugauuuc

SEQ ID NO: 405255 - RNA, 19 nt, Homo sapiens
  misc_RNA (1)...(19): siRNA sense strand
aaagggaaccucgaaguca

SEQ ID NO: 405256 - RNA, 19 nt, Homo sapiens
  misc_RNA (1)...(19): siRNA sense strand
gcuucauucuuuaccaguu

SEQ ID NO: 405257 - RNA, 19 nt, Homo sapiens
  misc_RNA (1)...(19): siRNA sense strand
ugccggcucuguauaggaa

SEQ ID NO: 405258 - RNA, 19 nt, Homo sapiens
  misc_RNA (1)...(19): siRNA sense strand
ucucuuacaucaugauugc

SEQ ID NO: 405259 - RNA, 19 nt, Homo sapiens
  misc_RNA (1)...(19): siRNA sense strand
guccuucugugaccucuuc

SEQ ID NO: 405260 - RNA, 19 nt, Homo sapiens
  misc_RNA (1)...(19): siRNA sense strand
cuuacuacagcaucuauaa

SEQ ID NO: 405261 - RNA, 19 nt, Homo sapiens
  misc_RNA (1)...(19): siRNA sense strand
ggagcuucauucuuuacca

SEQ ID NO: 405262 - RNA, 19 nt, Homo sapiens
  misc_RNA (1)...(19): siRNA sense strand
guucaccuuuguguuauuc

SEQ ID NO: 405263 - RNA, 19 nt, Homo sapiens
  misc_RNA (1)...(19): siRNA sense strand
ugugaccucuucauuugug

SEQ ID NO: 405264 - RNA, 19 nt, Homo sapiens
  misc_RNA (1)...(19): siRNA sense strand
auauugccaugcauuauca

SEQ ID NO: 405265 - RNA, 19 nt, Homo sapiens
  misc_RNA (1)...(19): siRNA sense strand
uacagccaguaaacucuuu

SEQ ID NO: 405266 - RNA, 19 nt, Homo sapiens
  misc_RNA (1)...(19): siRNA sense strand
ucaggaaauucagaaccaa

SEQ ID NO: 405267 - RNA, 19 nt, Homo sapiens
  misc_RNA (1)...(19): siRNA sense strand
gaaaagggaaccucgaagu

SEQ ID NO: 405268 - RNA, 19 nt, Homo sapiens
  misc_RNA (1)...(19): siRNA sense strand
ucaccuuuguguuauucuu

SEQ ID NO: 405269 - RNA, 19 nt, Homo sapiens
  misc_RNA (1)...(19): siRNA sense strand
caguuugaauuguuuggau

SEQ ID NO: 405270 - RNA, 19 nt, Homo sapiens
  misc_RNA (1)...(19): siRNA sense strand
cgauccagccuucaggaaa

SEQ ID NO: 405271 - RNA, 19 nt, Homo sapiens
  misc_RNA (1)...(19): siRNA sense strand
agucaggauuaaacccuuu

SEQ ID NO: 405272 - RNA, 19 nt, Homo sapiens
  misc_RNA (1)...(19): siRNA sense strand
guucaggcuucaucaucau

SEQ ID NO: 405273 - RNA, 19 nt, Homo sapiens
  misc_RNA (1)...(19): siRNA sense strand
auucauauauugccaugca

SEQ ID NO: 405274 - RNA, 19 nt, Homo sapiens
  misc_RNA (1)...(19): siRNA sense strand
guccuggugugcugucuuc

SEQ ID NO: 405275 - RNA, 19 nt, Homo sapiens
  misc_RNA (1)...(19): siRNA sense strand
gcucguaucagccaucaac

SEQ ID NO: 405276 - RNA, 19 nt, Homo sapiens
  misc_RNA (1)...(19): siRNA sense strand
ccaagagucccaaccaacu

SEQ ID NO: 405277 - RNA, 19 nt, Homo sapiens
  misc_RNA (1)...(19): siRNA sense strand
auaggaaccagaauuacaa

SEQ ID NO: 405278 - RNA, 19 nt, Homo sapiens
  misc_RNA (1)...(19): siRNA sense strand
gcuguggucucugucucuu

SEQ ID NO: 405279 - RNA, 19 nt, Homo sapiens
  misc_RNA (1)...(19): siRNA sense strand
caagagucccaaccaacug

SEQ ID NO: 405280 - RNA, 19 nt, Homo sapiens
  misc_RNA (1)...(19): siRNA sense strand
uauggugagucccaagauc

SEQ ID NO: 405281 - RNA, 19 nt, Homo sapiens
  misc_RNA (1)...(19): siRNA sense strand
gcucuggugccuccaauac

SEQ ID NO: 405282 - RNA, 19 nt, Homo sapiens
  misc_RNA (1)...(19): siRNA sense strand
gaacaacagugacaaagaa

SEQ ID NO: 405283 - RNA, 19 nt, Homo sapiens
  misc_RNA (1)...(19): siRNA sense strand
caaagaaguugaugaaguu

SEQ ID NO: 405284 - RNA, 19 nt, Homo sapiens
  misc_RNA (1)...(19): siRNA sense strand
gcaaagugguucaugaauu

SEQ ID NO: 405285 - RNA, 19 nt, Homo sapiens
  misc_RNA (1)...(19): siRNA sense strand
gaagacacauuggaccuua

SEQ ID NO: 405286 - RNA, 19 nt, Homo sapiens
  misc_RNA (1)...(19): siRNA sense strand
acacauccauuucuuguua

SEQ ID NO: 405287 - RNA, 19 nt, Homo sapiens
  misc_RNA (1)...(19): siRNA sense strand
gagauguucuacaaacuua

SEQ ID NO: 405288 - RNA, 19 nt, Homo sapiens
  misc_RNA (1)...(19): siRNA sense strand
gaagagauguucuacaaac

SEQ ID NO: 405289 - RNA, 19 nt, Homo sapiens
  misc_RNA (1)...(19): siRNA sense strand
aaacccagauccucaguua

SEQ ID NO: 405290 - RNA, 19 nt, Homo sapiens
  misc_RNA (1)...(19): siRNA sense strand
gcccaggacuguauaguaa

SEQ ID NO: 405291 - RNA, 19 nt, Homo sapiens
  misc_RNA (1)...(19): siRNA sense strand
caaagugguucaugaauuc

SEQ ID NO: 405292 - RNA, 19 nt, Homo sapiens
  misc_RNA (1)...(19): siRNA sense strand
ugaaguagauugcaaagug

SEQ ID NO: 405293 - RNA, 19 nt, Homo sapiens
  misc_RNA (1)...(19): siRNA sense strand
gcagaaggcaugaaugaaa

SEQ ID NO: 405294 - RNA, 19 nt, Homo sapiens
  misc_RNA (1)...(19): siRNA sense strand
ugauauaacuccugaaugu

SEQ ID NO: 405295 - RNA, 19 nt, Homo sapiens
  misc_RNA (1)...(19): siRNA sense strand
caagaucucucauggaaca

SEQ ID NO: 405296 - RNA, 19 nt, Homo sapiens
  misc_RNA (1)...(19): siRNA sense strand
gaacugaguguccauguga

SEQ ID NO: 405297 - RNA, 19 nt, Homo sapiens
  misc_RNA (1)...(19): siRNA sense strand
ucaauaagcugucaaucau

SEQ ID NO: 405298 - RNA, 19 nt, Homo sapiens
  misc_RNA (1)...(19): siRNA sense strand
gaagaaaugaugauguuug

SEQ ID NO: 405299 - RNA, 19 nt, Homo sapiens
  misc_RNA (1)...(19): siRNA sense strand
ggaacaagaugugaaggaa

SEQ ID NO: 405300 - RNA, 19 nt, Homo sapiens
  misc_RNA (1)...(19): siRNA sense strand
gguaaaacgucaacaauuu

SEQ ID NO: 405301 - RNA, 19 nt, Homo sapiens
  misc_RNA (1)...(19): siRNA sense strand
gaagcuagaugaccagucu

SEQ ID NO: 405302 - RNA, 19 nt, Homo sapiens
  misc_RNA (1)...(19): siRNA sense strand
gaguuuagaugaagagaug

SEQ ID NO: 405303 - RNA, 19 nt, Homo sapiens
  misc_RNA (1)...(19): siRNA sense strand
gaaucaaucagcuuuauga

SEQ ID NO: 405304 - RNA, 19 nt, Homo sapiens
  misc_RNA (1)...(19): siRNA sense strand
guacgauuguccuucauuu

SEQ ID NO: 405305 - RNA, 19 nt, Homo sapiens
  misc_RNA (1)...(19): siRNA sense strand
ccaaucacgucaccagaaa

SEQ ID NO: 405306 - RNA, 19 nt, Homo sapiens
  misc_RNA (1)...(19): siRNA sense strand
gaacuugcugacuacauua

SEQ ID NO: 405307 - RNA, 19 nt, Homo sapiens
  misc_RNA (1)...(19): siRNA sense strand
gauaacagcgagaaucuug

SEQ ID NO: 405308 - RNA, 19 nt, Homo sapiens
  misc_RNA (1)...(19): siRNA sense strand
gaagccaagaugagauuua

SEQ ID NO: 405309 - RNA, 19 nt, Homo sapiens
  misc_RNA (1)...(19): siRNA sense strand
gagaaucauuugaacaaca

SEQ ID NO: 405310 - RNA, 19 nt, Homo sapiens
  misc_RNA (1)...(19): siRNA sense strand
acaaagaaguugaugaagu

SEQ ID NO: 405311 - RNA, 19 nt, Homo sapiens
  misc_RNA (1)...(19): siRNA sense strand
cagagcagaucacgacuga

SEQ ID NO: 405312 - RNA, 19 nt, Homo sapiens
  misc_RNA (1)...(19): siRNA sense strand
aaugaaaucuggcuucguu

SEQ ID NO: 405313 - RNA, 19 nt, Homo sapiens
  misc_RNA (1)...(19): siRNA sense strand
ugaaguaugugaaggugaa

SEQ ID NO: 405314 - RNA, 19 nt, Homo sapiens
  misc_RNA (1)...(19): siRNA sense strand
gcacuggagaugcaauuaa

SEQ ID NO: 405315 - RNA, 19 nt, Homo sapiens
  misc_RNA (1)...(19): siRNA sense strand
uggcaucacucacuucauu

SEQ ID NO: 405316 - RNA, 19 nt, Homo sapiens
  misc_RNA (1)...(19): siRNA sense strand
ucugaaagguuacaaacaa

SEQ ID NO: 405317 - RNA, 19 nt, Homo sapiens
  misc_RNA (1)...(19): siRNA sense strand
ugaacuugcugacuacauu

SEQ ID NO: 405318 - RNA, 19 nt, Homo sapiens
  misc_RNA (1)...(19): siRNA sense strand
uggagaaacucgauguaaa

SEQ ID NO: 405319 - RNA, 19 nt, Homo sapiens
  misc_RNA (1)...(19): siRNA sense strand
ucagaugagucuaauugaa

SEQ ID NO: 405320 - RNA, 19 nt, Homo sapiens
  misc_RNA (1)...(19): siRNA sense strand
aauaagcugucaaucauga

SEQ ID NO: 405321 - RNA, 19 nt, Homo sapiens
  misc_RNA (1)...(19): siRNA sense strand
gaacaagaugugaaggaaa

SEQ ID NO: 405322 - RNA, 19 nt, Homo sapiens
  misc_RNA (1)...(19): siRNA sense strand
caccagaaaucuuggcaaa

SEQ ID NO: 405323 - RNA, 19 nt, Homo sapiens
  misc_RNA (1)...(19): siRNA sense strand
ccagagauccaacaaagaa

SEQ ID NO: 405324 - RNA, 19 nt, Homo sapiens
  misc_RNA (1)...(19): siRNA sense strand
gaucaggaaguauauauuc

SEQ ID NO: 405325 - RNA, 19 nt, Homo sapiens
  misc_RNA (1)...(19): siRNA sense strand
ugacaaagaaguugaugaa

SEQ ID NO: 405326 - RNA, 19 nt, Homo sapiens
  misc_RNA (1)...(19): siRNA sense strand
gaagaagaaaugaugaugu

SEQ ID NO: 405327 - RNA, 19 nt, Homo sapiens
  misc_RNA (1)...(19): siRNA sense strand
agaaggcaauccugguaua

SEQ ID NO: 405328 - RNA, 19 nt, Homo sapiens
  misc_RNA (1)...(19): siRNA sense strand
cagaaggcaugaaugaaau

SEQ ID NO: 405329 - RNA, 19 nt, Homo sapiens
  misc_RNA (1)...(19): siRNA sense strand
cuacauauuucucucaaca

SEQ ID NO: 405330 - RNA, 19 nt, Homo sapiens
  misc_RNA (1)...(19): siRNA sense strand
gagauugaaugcacagaag

SEQ ID NO: 405331 - RNA, 19 nt, Homo sapiens
  misc_RNA (1)...(19): siRNA sense strand
caucagagaaucauuugaa

SEQ ID NO: 405332 - RNA, 19 nt, Homo sapiens
  misc_RNA (1)...(19): siRNA sense strand
agaugaggcacuugaauua

SEQ ID NO: 405333 - RNA, 19 nt, Homo sapiens
  misc_RNA (1)...(19): siRNA sense strand
cgauuguccuucauuugua

SEQ ID NO: 405334 - RNA, 19 nt, Homo sapiens
  misc_RNA (1)...(19): siRNA sense strand
caacagugacaaagaaguu

SEQ ID NO: 405335 - RNA, 19 nt, Homo sapiens
  misc_RNA (1)...(19): siRNA sense strand
guaaacauuucaggccaaa

SEQ ID NO: 405336 - RNA, 19 nt, Homo sapiens
  misc_RNA (1)...(19): siRNA sense strand
gaagaugaggcacuugaau

SEQ ID NO: 405337 - RNA, 19 nt, Homo sapiens
  misc_RNA (1)...(19): siRNA sense strand
ggaacugaguguccaugug

SEQ ID NO: 405338 - RNA, 19 nt, Homo sapiens
  misc_RNA (1)...(19): siRNA sense strand
ugacaucagagaaucauuu

SEQ ID NO: 405339 - RNA, 19 nt, Homo sapiens
  misc_RNA (1)...(19): siRNA sense strand
cagaaucaaucagcuuuau

SEQ ID NO: 405340 - RNA, 19 nt, Homo sapiens
  misc_RNA (1)...(19): siRNA sense strand
cucaagaucucucauggaa

SEQ ID NO: 405341 - RNA, 19 nt, Homo sapiens
  misc_RNA (1)...(19): siRNA sense strand
augaagagauguucuacaa

SEQ ID NO: 405342 - RNA, 19 nt, Homo sapiens
  misc_RNA (1)...(19): siRNA sense strand
gaagaacuuauuggaauug

SEQ ID NO: 405343 - RNA, 19 nt, Homo sapiens
  misc_RNA (1)...(19): siRNA sense strand
ggcagucacuaccugaauu

SEQ ID NO: 405344 - RNA, 19 nt, Homo sapiens
  misc_RNA (1)...(19): siRNA sense strand
cacuggagaugcaauuaaa

SEQ ID NO: 405345 - RNA, 19 nt, Homo sapiens
  misc_RNA (1)...(19): siRNA sense strand
cagagaaucauuugaacaa

SEQ ID NO: 405346 - RNA, 19 nt, Homo sapiens
  misc_RNA (1)...(19): siRNA sense strand
gcagucacuaccugaauuu

SEQ ID NO: 405347 - RNA, 19 nt, Homo sapiens
  misc_RNA (1)...(19): siRNA sense strand
guucaagccucaagcucuu

SEQ ID NO: 405348 - RNA, 19 nt, Homo sapiens
  misc_RNA (1)...(19): siRNA sense strand
gcauacaacagacugauuc

SEQ ID NO: 405349 - RNA, 19 nt, Homo sapiens
  misc_RNA (1)...(19): siRNA sense strand
ucaaagcuguuucugacau

SEQ ID NO: 405350 - RNA, 19 nt, Homo sapiens
  misc_RNA (1)...(19): siRNA sense strand
ccguagaguuugcagauga

SEQ ID NO: 405351 - RNA, 19 nt, Homo sapiens
  misc_RNA (1)...(19): siRNA sense strand
cacauuggaccuuagauaa

SEQ ID NO: 405352 - RNA, 19 nt, Homo sapiens
  misc_RNA (1)...(19): siRNA sense strand
ggaggcccaucagaaugua

SEQ ID NO: 405353 - RNA, 19 nt, Homo sapiens
  misc_RNA (1)...(19): siRNA sense strand
caauauuggugcaccuuca

SEQ ID NO: 405354 - RNA, 19 nt, Homo sapiens
  misc_RNA (1)...(19): siRNA sense strand
gcacagaagaagaaaugau

SEQ ID NO: 405355 - RNA, 19 nt, Homo sapiens
  misc_RNA (1)...(19): siRNA sense strand
ugaaugcacagaagaagaa

SEQ ID NO: 405356 - RNA, 19 nt, Homo sapiens
  misc_RNA (1)...(19): siRNA sense strand
gaacuuauuggaauugcau

SEQ ID NO: 405357 - RNA, 19 nt, Homo sapiens
  misc_RNA (1)...(19): siRNA sense strand
gccaagaugagauuuauuc

SEQ ID NO: 405358 - RNA, 19 nt, Homo sapiens
  misc_RNA (1)...(19): siRNA sense strand
uauaacuccugaauguuug

SEQ ID NO: 405359 - RNA, 19 nt, Homo sapiens
  misc_RNA (1)...(19): siRNA sense strand
guuauaagagcaaagaaga

SEQ ID NO: 405360 - RNA, 19 nt, Homo sapiens
  misc_RNA (1)...(19): siRNA sense strand
gaucucucauggaacaaga

SEQ ID NO: 405361 - RNA, 19 nt, Homo sapiens
  misc_RNA (1)...(19): siRNA sense strand
gcagaugaaguacgauugu

SEQ ID NO: 405362 - RNA, 19 nt, Homo sapiens
  misc_RNA (1)...(19): siRNA sense strand
acacauuggaccuuagaua

SEQ ID NO: 405363 - RNA, 19 nt, Homo sapiens
  misc_RNA (1)...(19): siRNA sense strand
ucaggcagaugcuaagcuu

SEQ ID NO: 405364 - RNA, 19 nt, Homo sapiens
  misc_RNA (1)...(19): siRNA sense strand
gcagauaacagcgagaauc

SEQ ID NO: 405365 - RNA, 19 nt, Homo sapiens
  misc_RNA (1)...(19): siRNA sense strand
gaauauucuuuccuuucug

SEQ ID NO: 405366 - RNA, 19 nt, Homo sapiens
  misc_RNA (1)...(19): siRNA sense strand
ucaaagacacauccauuuc

SEQ ID NO: 405367 - RNA, 19 nt, Homo sapiens
  misc_RNA (1)...(19): siRNA sense strand
ucagaaggcaauccuggua

SEQ ID NO: 405368 - RNA, 19 nt, Homo sapiens
  misc_RNA (1)...(19): siRNA sense strand
auucauugguggcuacaua

SEQ ID NO: 405369 - RNA, 19 nt, Homo sapiens
  misc_RNA (1)...(19): siRNA sense strand
gaugagauuuauucaagcu

SEQ ID NO: 405370 - RNA, 19 nt, Homo sapiens
  misc_RNA (1)...(19): siRNA sense strand
ggagaaacucgauguaaaa

SEQ ID NO: 405371 - RNA, 19 nt, Homo sapiens
  misc_RNA (1)...(19): siRNA sense strand
gcacauuggaggcgugaug

SEQ ID NO: 405372 - RNA, 19 nt, Homo sapiens
  misc_RNA (1)...(19): siRNA sense strand
ucugacaucuguaagacuu

SEQ ID NO: 405373 - RNA, 19 nt, Homo sapiens
  misc_RNA (1)...(19): siRNA sense strand
gggauaaggaugccagaug

SEQ ID NO: 405374 - RNA, 19 nt, Homo sapiens
  misc_RNA (1)...(19): siRNA sense strand
uuucagaccuggagauuac

SEQ ID NO: 405375 - RNA, 19 nt, Homo sapiens
  misc_RNA (1)...(19): siRNA sense strand
caaagacacauccauuucu

SEQ ID NO: 405376 - RNA, 19 nt, Homo sapiens
  misc_RNA (1)...(19): siRNA sense strand
gagaugcaauuaaaacaug

SEQ ID NO: 405377 - RNA, 19 nt, Homo sapiens
  misc_RNA (1)...(19): siRNA sense strand
aaaucuggcuucguuguga

SEQ ID NO: 405378 - RNA, 19 nt, Homo sapiens
  misc_RNA (1)...(19): siRNA sense strand
gaaaucuggcuucguugug

SEQ ID NO: 405379 - RNA, 19 nt, Homo sapiens
  misc_RNA (1)...(19): siRNA sense strand
gcaguaucauaucaauaag

SEQ ID NO: 405380 - RNA, 19 nt, Homo sapiens
  misc_RNA (1)...(19): siRNA sense strand
aagccaagaugagauuuau

SEQ ID NO: 405381 - RNA, 19 nt, Homo sapiens
  misc_RNA (1)...(19): siRNA sense strand
cccagauccucaguuaaua

SEQ ID NO: 405382 - RNA, 19 nt, Homo sapiens
  misc_RNA (1)...(19): siRNA sense strand
caaugggucuccugaguua

SEQ ID NO: 405383 - RNA, 19 nt, Homo sapiens
  misc_RNA (1)...(19): siRNA sense strand
gacagaggcuuguauauca

SEQ ID NO: 405384 - RNA, 19 nt, Homo sapiens
  misc_RNA (1)...(19): siRNA sense strand
gcaggugcaccauuaauaa

SEQ ID NO: 405385 - RNA, 19 nt, Homo sapiens
  misc_RNA (1)...(19): siRNA sense strand
guacagauaagacaauuga

SEQ ID NO: 405386 - RNA, 19 nt, Homo sapiens
  misc_RNA (1)...(19): siRNA sense strand
gaacaaaccagacaugaac

SEQ ID NO: 405387 - RNA, 19 nt, Homo sapiens
  misc_RNA (1)...(19): siRNA sense strand
gaagaaaccaagagaagga

SEQ ID NO: 405388 - RNA, 19 nt, Homo sapiens
  misc_RNA (1)...(19): siRNA sense strand
gaaagcagcauccucuguu

SEQ ID NO: 405389 - RNA, 19 nt, Homo sapiens
  misc_RNA (1)...(19): siRNA sense strand
ggccagaugucauuacaga

SEQ ID NO: 405390 - RNA, 19 nt, Homo sapiens
  misc_RNA (1)...(19): siRNA sense strand
uaaauggacucagagagaa

SEQ ID NO: 405391 - RNA, 19 nt, Homo sapiens
  misc_RNA (1)...(19): siRNA sense strand
aaccagacaugaacuauga

SEQ ID NO: 405392 - RNA, 19 nt, Homo sapiens
  misc_RNA (1)...(19): siRNA sense strand
caacagcgaccucuccaaa

SEQ ID NO: 405393 - RNA, 19 nt, Homo sapiens
  misc_RNA (1)...(19): siRNA sense strand
gacaaucccuacugugaug

SEQ ID NO: 405394 - RNA, 19 nt, Homo sapiens
  misc_RNA (1)...(19): siRNA sense strand
gcuauugcccuuccuguaa

SEQ ID NO: 405395 - RNA, 19 nt, Homo sapiens
  misc_RNA (1)...(19): siRNA sense strand
gcaguucagucaguuaaug

SEQ ID NO: 405396 - RNA, 19 nt, Homo sapiens
  misc_RNA (1)...(19): siRNA sense strand
ggacagaggcuuguauauc

SEQ ID NO: 405397 - RNA, 19 nt, Homo sapiens
  misc_RNA (1)...(19): siRNA sense strand
gaugccagcuucuacugaa

SEQ ID NO: 405398 - RNA, 19 nt, Homo sapiens
  misc_RNA (1)...(19): siRNA sense strand
uagcuagaguugugaauau

SEQ ID NO: 405399 - RNA, 19 nt, Homo sapiens
  misc_RNA (1)...(19): siRNA sense strand
ucaggaagcauuaacauug

SEQ ID NO: 405400 - RNA, 19 nt, Homo sapiens
  misc_RNA (1)...(19): siRNA sense strand
guaaugagacuaucaaugc

SEQ ID NO: 405401 - RNA, 19 nt, Homo sapiens
  misc_RNA (1)...(19): siRNA sense strand
cagaaggacuagugacaug

SEQ ID NO: 405402 - RNA, 19 nt, Homo sapiens
  misc_RNA (1)...(19): siRNA sense strand
gaaguccuguggaaguguu

SEQ ID NO: 405403 - RNA, 19 nt, Homo sapiens
  misc_RNA (1)...(19): siRNA sense strand
uguaucaacuccagaauuc

SEQ ID NO: 405404 - RNA, 19 nt, Homo sapiens
  misc_RNA (1)...(19): siRNA sense strand
ccagaugucauuacagaaa

SEQ ID NO: 405405 - RNA, 19 nt, Homo sapiens
  misc_RNA (1)...(19): siRNA sense strand
gcagaaagucuccugaaag

SEQ ID NO: 405406 - RNA, 19 nt, Homo sapiens
  misc_RNA (1)...(19): siRNA sense strand
gggaaagcauaagaacaaa

SEQ ID NO: 405407 - RNA, 19 nt, Homo sapiens
  misc_RNA (1)...(19): siRNA sense strand
ugaguuagguauaaagaag

SEQ ID NO: 405408 - RNA, 19 nt, Homo sapiens
  misc_RNA (1)...(19): siRNA sense strand
aaugcacacuguacagaua

SEQ ID NO: 405409 - RNA, 19 nt, Homo sapiens
  misc_RNA (1)...(19): siRNA sense strand
uaguggaggugucaacuga

SEQ ID NO: 405410 - RNA, 19 nt, Homo sapiens
  misc_RNA (1)...(19): siRNA sense strand
caggaagcauuaacauugu

SEQ ID NO: 405411 - RNA, 19 nt, Homo sapiens
  misc_RNA (1)...(19): siRNA sense strand
cagaaagucuccugaaagc

SEQ ID NO: 405412 - RNA, 19 nt, Homo sapiens
  misc_RNA (1)...(19): siRNA sense strand
uaaagaagaaaccaagaga

SEQ ID NO: 405413 - RNA, 19 nt, Homo sapiens
  misc_RNA (1)...(19): siRNA sense strand
aaacauaguggucauagau

SEQ ID NO: 405414 - RNA, 19 nt, Homo sapiens
  misc_RNA (1)...(19): siRNA sense strand
caagaaguccuguggaagu

SEQ ID NO: 405415 - RNA, 19 nt, Homo sapiens
  misc_RNA (1)...(19): siRNA sense strand
cagacaaucccuacuguga

SEQ ID NO: 405416 - RNA, 19 nt, Homo sapiens
  misc_RNA (1)...(19): siRNA sense strand
agagaaggguguagcuaga

SEQ ID NO: 405417 - RNA, 19 nt, Homo sapiens
  misc_RNA (1)...(19): siRNA sense strand
gaaggacagaggcuuguau

SEQ ID NO: 405418 - RNA, 19 nt, Homo sapiens
  misc_RNA (1)...(19): siRNA sense strand
gggacgagcuuugagauac

SEQ ID NO: 405419 - RNA, 19 nt, Homo sapiens
  misc_RNA (1)...(19): siRNA sense strand
ucaagcugguggauucaaa

SEQ ID NO: 405420 - RNA, 19 nt, Homo sapiens
  misc_RNA (1)...(19): siRNA sense strand
acccagcaaucaccaauuu

SEQ ID NO: 405421 - RNA, 19 nt, Homo sapiens
  misc_RNA (1)...(19): siRNA sense strand
ggguguagcuagaguugug

SEQ ID NO: 405422 - RNA, 19 nt, Homo sapiens
  misc_RNA (1)...(19): siRNA sense strand
caaaggcugucucuaagcu

SEQ ID NO: 405423 - RNA, 19 nt, Homo sapiens
  misc_RNA (1)...(19): siRNA sense strand
ggugucaacugaagagucu

SEQ ID NO: 405424 - RNA, 19 nt, Homo sapiens
  misc_RNA (1)...(19): siRNA sense strand
ggacuagugacaugugaga

SEQ ID NO: 405425 - RNA, 19 nt, Homo sapiens
  misc_RNA (1)...(19): siRNA sense strand
uauucaagcugguggauuc

SEQ ID NO: 405426 - RNA, 19 nt, Homo sapiens
  misc_RNA (1)...(19): siRNA sense strand
caaccuauuugugggaguu

SEQ ID NO: 405427 - RNA, 19 nt, Homo sapiens
  misc_RNA (1)...(19): siRNA sense strand
aaaggaaacacaaccuauu

SEQ ID NO: 405428 - RNA, 19 nt, Homo sapiens
  misc_RNA (1)...(19): siRNA sense strand
auggauaccucuccuauuc

SEQ ID NO: 405429 - RNA, 19 nt, Homo sapiens
  misc_RNA (1)...(19): siRNA sense strand
gaggccagaugucauuaca

SEQ ID NO: 405430 - RNA, 19 nt, Homo sapiens
  misc_RNA (1)...(19): siRNA sense strand
gacuaucaaugccuacuca

SEQ ID NO: 405431 - RNA, 19 nt, Homo sapiens
  misc_RNA (1)...(19): siRNA sense strand
gaaaauggagacaaaauca

SEQ ID NO: 405432 - RNA, 19 nt, Homo sapiens
  misc_RNA (1)...(19): siRNA sense strand
guagcuagaguugugaaua

SEQ ID NO: 405433 - RNA, 19 nt, Homo sapiens
  misc_RNA (1)...(19): siRNA sense strand
aaagugaaaccuguaauga

SEQ ID NO: 405434 - RNA, 19 nt, Homo sapiens
  misc_RNA (1)...(19): siRNA sense strand
gggaauucuugcaaagguu

SEQ ID NO: 405435 - RNA, 19 nt, Homo sapiens
  misc_RNA (1)...(19): siRNA sense strand
uuaaauggacucagagaga

SEQ ID NO: 405436 - RNA, 19 nt, Homo sapiens
  misc_RNA (1)...(19): siRNA sense strand
aaggaaacacaaccuauuu

SEQ ID NO: 405437 - RNA, 19 nt, Homo sapiens
  misc_RNA (1)...(19): siRNA sense strand
gaagauuuagcaggaacua

SEQ ID NO: 405438 - RNA, 19 nt, Homo sapiens
  misc_RNA (1)...(19): siRNA sense strand
ugaaaccuguaaugaagau

SEQ ID NO: 405439 - RNA, 19 nt, Homo sapiens
  misc_RNA (1)...(19): siRNA sense strand
agugaaaccuguaaugaag

SEQ ID NO: 405440 - RNA, 19 nt, Homo sapiens
  misc_RNA (1)...(19): siRNA sense strand
ggacgagcuuugagauacu

SEQ ID NO: 405441 - RNA, 19 nt, Homo sapiens
  misc_RNA (1)...(19): siRNA sense strand
auucaaaggcugucucuaa

SEQ ID NO: 405442 - RNA, 19 nt, Homo sapiens
  misc_RNA (1)...(19): siRNA sense strand
gacgagcuuugagauacua

SEQ ID NO: 405443 - RNA, 19 nt, Homo sapiens
  misc_RNA (1)...(19): siRNA sense strand
gaaaacagaaggacuagug

SEQ ID NO: 405444 - RNA, 19 nt, Homo sapiens
  misc_RNA (1)...(19): siRNA sense strand
ccaaagguagucauucaga

SEQ ID NO: 405445 - RNA, 19 nt, Homo sapiens
  misc_RNA (1)...(19): siRNA sense strand
gcagagaaggguguagcua

SEQ ID NO: 405446 - RNA, 19 nt, Homo sapiens
  misc_RNA (1)...(19): siRNA sense strand
ugcagaaagucuccugaaa

SEQ ID NO: 405447 - RNA, 19 nt, Homo sapiens
  misc_RNA (1)...(19): siRNA sense strand
ggauaccucuccuauucca

SEQ ID NO: 405448 - RNA, 19 nt, Homo sapiens
  misc_RNA (1)...(19): siRNA sense strand
agugacaugugagaaauaa

SEQ ID NO: 405449 - RNA, 19 nt, Homo sapiens
  misc_RNA (1)...(19): siRNA sense strand
ucauccaggucuccuacua

SEQ ID NO: 405450 - RNA, 19 nt, Homo sapiens
  misc_RNA (1)...(19): siRNA sense strand
gcaaucaccaauuuccaau

SEQ ID NO: 405451 - RNA, 19 nt, Homo sapiens
  misc_RNA (1)...(19): siRNA sense strand
gaaaaggaaacacaaccua

SEQ ID NO: 405452 - RNA, 19 nt, Homo sapiens
  misc_RNA (1)...(19): siRNA sense strand
uagcaggaacuacugauga

SEQ ID NO: 405453 - RNA, 19 nt, Homo sapiens
  misc_RNA (1)...(19): siRNA sense strand
guucaaggauaugccgaaa

SEQ ID NO: 405454 - RNA, 19 nt, Homo sapiens
  misc_RNA (1)...(19): siRNA sense strand
gacaugaacuaugaaacca

SEQ ID NO: 405455 - RNA, 19 nt, Homo sapiens
  misc_RNA (1)...(19): siRNA sense strand
ggacaguucguguggcaau

SEQ ID NO: 405456 - RNA, 19 nt, Homo sapiens
  misc_RNA (1)...(19): siRNA sense strand
aguuaucagugcagucaua

SEQ ID NO: 405457 - RNA, 19 nt, Homo sapiens
  misc_RNA (1)...(19): siRNA sense strand
auuccaacaucaccagaua

SEQ ID NO: 405458 - RNA, 19 nt, Homo sapiens
  misc_RNA (1)...(19): siRNA sense strand
gaaggacuagugacaugug

SEQ ID NO: 405459 - RNA, 19 nt, Homo sapiens
  misc_RNA (1)...(19): siRNA sense strand
gacagugacccacguagug

SEQ ID NO: 405460 - RNA, 19 nt, Homo sapiens
  misc_RNA (1)...(19): siRNA sense strand
gaucaggaagcauuaacau

SEQ ID NO: 405461 - RNA, 19 nt, Homo sapiens
  misc_RNA (1)...(19): siRNA sense strand
gagcuuugagauacuacua

SEQ ID NO: 405462 - RNA, 19 nt, Homo sapiens
  misc_RNA (1)...(19): siRNA sense strand
ccagauagccaugaaccaa

SEQ ID NO: 405463 - RNA, 19 nt, Homo sapiens
  misc_RNA (1)...(19): siRNA sense strand
gaauucauccaugcugcua

SEQ ID NO: 405464 - RNA, 19 nt, Homo sapiens
  misc_RNA (1)...(19): siRNA sense strand
ucagugcgccuucagcuau

SEQ ID NO: 405465 - RNA, 19 nt, Homo sapiens
  misc_RNA (1)...(19): siRNA sense strand
aaggcugucucuaagcuuu

SEQ ID NO: 405466 - RNA, 19 nt, Homo sapiens
  misc_RNA (1)...(19): siRNA sense strand
agauagccaugaaccaaug

SEQ ID NO: 405467 - RNA, 19 nt, Homo sapiens
  misc_RNA (1)...(19): siRNA sense strand
gcuaugaggccagauguca

SEQ ID NO: 405468 - RNA, 19 nt, Homo sapiens
  misc_RNA (1)...(19): siRNA sense strand
cuagugacaugugagaaau

SEQ ID NO: 405469 - RNA, 19 nt, Homo sapiens
  misc_RNA (1)...(19): siRNA sense strand
cuccaaagguagucauuca

SEQ ID NO: 405470 - RNA, 19 nt, Homo sapiens
  misc_RNA (1)...(19): siRNA sense strand
gagauacuacuaccaaagg

SEQ ID NO: 405471 - RNA, 19 nt, Homo sapiens
  misc_RNA (1)...(19): siRNA sense strand
uaagaacaaaccagacaug

SEQ ID NO: 405472 - RNA, 19 nt, Homo sapiens
  misc_RNA (1)...(19): siRNA sense strand
cauaagaacaaaccagaca

SEQ ID NO: 405473 - RNA, 19 nt, Homo sapiens
  misc_RNA (1)...(19): siRNA sense strand
aaucaccaauuuccaaugg

SEQ ID NO: 405474 - RNA, 19 nt, Homo sapiens
  misc_RNA (1)...(19): siRNA sense strand
ccaaugggucuccugaguu

SEQ ID NO: 405475 - RNA, 19 nt, Homo sapiens
  misc_RNA (1)...(19): siRNA sense strand
ucuccugaguuagguauaa

SEQ ID NO: 405476 - RNA, 19 nt, Homo sapiens
  misc_RNA (1)...(19): siRNA sense strand
ucaguucacagcaguaaug

SEQ ID NO: 405477 - RNA, 19 nt, Homo sapiens
  misc_RNA (1)...(19): siRNA sense strand
aaagcagcauccucuguuc

SEQ ID NO: 405478 - RNA, 19 nt, Homo sapiens
  misc_RNA (1)...(19): siRNA sense strand
guaaugcacacuguacaga

SEQ ID NO: 405479 - RNA, 19 nt, Homo sapiens
  misc_RNA (1)...(19): siRNA sense strand
aaagaagaaaccaagagaa

SEQ ID NO: 405480 - RNA, 19 nt, Homo sapiens
  misc_RNA (1)...(19): siRNA sense strand
gaaaccaugggacgagcuu

SEQ ID NO: 405481 - RNA, 19 nt, Homo sapiens
  misc_RNA (1)...(19): siRNA sense strand
gcaggaacuacugaugaaa

SEQ ID NO: 405482 - RNA, 19 nt, Homo sapiens
  misc_RNA (1)...(19): siRNA sense strand
ggaaugaucuggauagguu

SEQ ID NO: 405483 - RNA, 19 nt, Homo sapiens
  misc_RNA (1)...(19): siRNA sense strand
ggacagacuuucuucucua

SEQ ID NO: 405484 - RNA, 19 nt, Homo sapiens
  misc_RNA (1)...(19): siRNA sense strand
ugacggagcucaccaaauc

SEQ ID NO: 405485 - RNA, 19 nt, Homo sapiens
  misc_RNA (1)...(19): siRNA sense strand
gaacaagcaggauuugaaa

SEQ ID NO: 405486 - RNA, 19 nt, Homo sapiens
  misc_RNA (1)...(19): siRNA sense strand
uugagaagcucccaacaua

SEQ ID NO: 405487 - RNA, 19 nt, Homo sapiens
  misc_RNA (1)...(19): siRNA sense strand
gagaagcucccaacauaaa

SEQ ID NO: 405488 - RNA, 19 nt, Homo sapiens
  misc_RNA (1)...(19): siRNA sense strand
ucaaugacaugaaggcaaa

SEQ ID NO: 405489 - RNA, 19 nt, Homo sapiens
  misc_RNA (1)...(19): siRNA sense strand
ggaacaagcaggauuugaa

SEQ ID NO: 405490 - RNA, 19 nt, Homo sapiens
  misc_RNA (1)...(19): siRNA sense strand
ggaaucagccaaggguuua

SEQ ID NO: 405491 - RNA, 19 nt, Homo sapiens
  misc_RNA (1)...(19): siRNA sense strand
gcagggcgcucaacuuucu

SEQ ID NO: 405492 - RNA, 19 nt, Homo sapiens
  misc_RNA (1)...(19): siRNA sense strand
ggagaucaaugacaugaag

SEQ ID NO: 405493 - RNA, 19 nt, Homo sapiens
  misc_RNA (1)...(19): siRNA sense strand
uagaugaccugaggaauga

SEQ ID NO: 405494 - RNA, 19 nt, Homo sapiens
  misc_RNA (1)...(19): siRNA sense strand
ccaaauccaucaacgacaa

SEQ ID NO: 405495 - RNA, 19 nt, Homo sapiens
  misc_RNA (1)...(19): siRNA sense strand
ugcagaaacuccagaauga

SEQ ID NO: 405496 - RNA, 19 nt, Homo sapiens
  misc_RNA (1)...(19): siRNA sense strand
ucacagaaguccagaagag

SEQ ID NO: 405497 - RNA, 19 nt, Homo sapiens
  misc_RNA (1)...(19): siRNA sense strand
cuggauagguuguuuguga

SEQ ID NO: 405498 - RNA, 19 nt, Homo sapiens
  misc_RNA (1)...(19): siRNA sense strand
aacaagaccucacagagaa

SEQ ID NO: 405499 - RNA, 19 nt, Homo sapiens
  misc_RNA (1)...(19): siRNA sense strand
agagaaagcugugaagcaa

SEQ ID NO: 405500 - RNA, 19 nt, Homo sapiens
  misc_RNA (1)...(19): siRNA sense strand
aaacaagaccucacagaga

SEQ ID NO: 405501 - RNA, 19 nt, Homo sapiens
  misc_RNA (1)...(19): siRNA sense strand
caacaucgccaucuucaca

SEQ ID NO: 405502 - RNA, 19 nt, Homo sapiens
  misc_RNA (1)...(19): siRNA sense strand
gcgaagugcugcagaaacu

SEQ ID NO: 405503 - RNA, 19 nt, Homo sapiens
  misc_RNA (1)...(19): siRNA sense strand
ggacauggaggcccugaga

SEQ ID NO: 405504 - RNA, 19 nt, Homo sapiens
  misc_RNA (1)...(19): siRNA sense strand
uaaaggaagcugugaagga

SEQ ID NO: 405505 - RNA, 19 nt, Homo sapiens
  misc_RNA (1)...(19): siRNA sense strand
agaaggagaucaaugacau

SEQ ID NO: 405506 - RNA, 19 nt, Homo sapiens
  misc_RNA (1)...(19): siRNA sense strand
gccaaggguuuacuagaug

SEQ ID NO: 405507 - RNA, 19 nt, Homo sapiens
  misc_RNA (1)...(19): siRNA sense strand
cgagaacaaucuggaauca

SEQ ID NO: 405508 - RNA, 19 nt, Homo sapiens
  misc_RNA (1)...(19): siRNA sense strand
cggaugacguggcgaagaa

SEQ ID NO: 405509 - RNA, 19 nt, Homo sapiens
  misc_RNA (1)...(19): siRNA sense strand
gccagaaggagaucaauga

SEQ ID NO: 405510 - RNA, 19 nt, Homo sapiens
  misc_RNA (1)...(19): siRNA sense strand
ccaaggguuuacuagauga

SEQ ID NO: 405511 - RNA, 19 nt, Homo sapiens
  misc_RNA (1)...(19): siRNA sense strand
agcagaaggugcagucuuu

SEQ ID NO: 405512 - RNA, 19 nt, Homo sapiens
  misc_RNA (1)...(19): siRNA sense strand
gcucaacuuucucuucuac

SEQ ID NO: 405513 - RNA, 19 nt, Homo sapiens
  misc_RNA (1)...(19): siRNA sense strand
gcgcucaacuuucucuucu

SEQ ID NO: 405514 - RNA, 19 nt, Homo sapiens
  misc_RNA (1)...(19): siRNA sense strand
gaaacuccagaaugagauu

SEQ ID NO: 405515 - RNA, 19 nt, Homo sapiens
  misc_RNA (1)...(19): siRNA sense strand
agacccagcuggugcucua

SEQ ID NO: 405516 - RNA, 19 nt, Homo sapiens
  misc_RNA (1)...(19): siRNA sense strand
cggcagggcgcucaacuuu

SEQ ID NO: 405517 - RNA, 19 nt, Homo sapiens
  misc_RNA (1)...(19): siRNA sense strand
gacagacuuucuucucuag

SEQ ID NO: 405518 - RNA, 19 nt, Homo sapiens
  misc_RNA (1)...(19): siRNA sense strand
aaauagaaaccaacgagaa

SEQ ID NO: 405519 - RNA, 19 nt, Homo sapiens
  misc_RNA (1)...(19): siRNA sense strand
ggauccauguggugaagga

SEQ ID NO: 405520 - RNA, 19 nt, Homo sapiens
  misc_RNA (1)...(19): siRNA sense strand
cagaaacuccagaaugaga

SEQ ID NO: 405521 - RNA, 19 nt, Homo sapiens
  misc_RNA (1)...(19): siRNA sense strand
gaaaccaacgagaacaauc

SEQ ID NO: 405522 - RNA, 19 nt, Homo sapiens
  misc_RNA (1)...(19): siRNA sense strand
caacgagaacaaucuggaa

SEQ ID NO: 405523 - RNA, 19 nt, Homo sapiens
  misc_RNA (1)...(19): siRNA sense strand
ugagaagcucccaacauaa

SEQ ID NO: 405524 - RNA, 19 nt, Homo sapiens
  misc_RNA (1)...(19): siRNA sense strand
ggauagguuguuugugaaa

SEQ ID NO: 405525 - RNA, 19 nt, Homo sapiens
  misc_RNA (1)...(19): siRNA sense strand
gacggaggcuucagacacu

SEQ ID NO: 405526 - RNA, 19 nt, Homo sapiens
  misc_RNA (1)...(19): siRNA sense strand
auacagaccucagccaagu

SEQ ID NO: 405527 - RNA, 19 nt, Homo sapiens
  misc_RNA (1)...(19): siRNA sense strand
cuagaugaccugaggaaug

SEQ ID NO: 405528 - RNA, 19 nt, Homo sapiens
  misc_RNA (1)...(19): siRNA sense strand
gaaggagaucaaugacaug

SEQ ID NO: 405529 - RNA, 19 nt, Homo sapiens
  misc_RNA (1)...(19): siRNA sense strand
ggaggacggaggcuucaga

SEQ ID NO: 405530 - RNA, 19 nt, Homo sapiens
  misc_RNA (1)...(19): siRNA sense strand
gaagcucccaacauaaaca

SEQ ID NO: 405531 - RNA, 19 nt, Homo sapiens
  misc_RNA (1)...(19): siRNA sense strand
gagcagaaggugcagucuu

SEQ ID NO: 405532 - RNA, 19 nt, Homo sapiens
  misc_RNA (1)...(19): siRNA sense strand
uauggagucugacaucuac

SEQ ID NO: 405533 - RNA, 19 nt, Homo sapiens
  misc_RNA (1)...(19): siRNA sense strand
gacaacaucgccaucuuca

SEQ ID NO: 405534 - RNA, 19 nt, Homo sapiens
  misc_RNA (1)...(19): siRNA sense strand
caagccacauuuggaacuu

SEQ ID NO: 405535 - RNA, 19 nt, Homo sapiens
  misc_RNA (1)...(19): siRNA sense strand
gagcucaccaaauccauca

SEQ ID NO: 405536 - RNA, 19 nt, Homo sapiens
  misc_RNA (1)...(19): siRNA sense strand
uggagaagauucacgaaaa

SEQ ID NO: 405537 - RNA, 19 nt, Homo sapiens
  misc_RNA (1)...(19): siRNA sense strand
ugacaugaaggcaaagguu

SEQ ID NO: 405538 - RNA, 19 nt, Homo sapiens
  misc_RNA (1)...(19): siRNA sense strand
cgacaacaucgccaucuuc

SEQ ID NO: 405539 - RNA, 19 nt, Homo sapiens
  misc_RNA (1)...(19): siRNA sense strand
agccaaggguuuacuagau

SEQ ID NO: 405540 - RNA, 19 nt, Homo sapiens
  misc_RNA (1)...(19): siRNA sense strand
ggagaagauucacgaaaag

SEQ ID NO: 405541 - RNA, 19 nt, Homo sapiens
  misc_RNA (1)...(19): siRNA sense strand
gauagguuguuugugaaag

SEQ ID NO: 405542 - RNA, 19 nt, Homo sapiens
  misc_RNA (1)...(19): siRNA sense strand
uggauagguuguuugugaa

SEQ ID NO: 405543 - RNA, 19 nt, Homo sapiens
  misc_RNA (1)...(19): siRNA sense strand
ucacgucccuggagaacac

SEQ ID NO: 405544 - RNA, 19 nt, Homo sapiens
  misc_RNA (1)...(19): siRNA sense strand
gcucccaacauaaacaaga

SEQ ID NO: 405545 - RNA, 19 nt, Homo sapiens
  misc_RNA (1)...(19): siRNA sense strand
aaagguugccucccuggaa

SEQ ID NO: 405546 - RNA, 19 nt, Homo sapiens
  misc_RNA (1)...(19): siRNA sense strand
cagagaaagcugugaagca

SEQ ID NO: 405547 - RNA, 19 nt, Homo sapiens
  misc_RNA (1)...(19): siRNA sense strand
ugacaucuacaccgagguu

SEQ ID NO: 405548 - RNA, 19 nt, Homo sapiens
  misc_RNA (1)...(19): siRNA sense strand
guggagaagauucacgaaa

SEQ ID NO: 405549 - RNA, 19 nt, Homo sapiens
  misc_RNA (1)...(19): siRNA sense strand
ccugaggaaugaucuggau

SEQ ID NO: 405550 - RNA, 19 nt, Homo sapiens
  misc_RNA (1)...(19): siRNA sense strand
ggauuugaaagccuuaaag

SEQ ID NO: 405551 - RNA, 19 nt, Homo sapiens
  misc_RNA (1)...(19): siRNA sense strand
gaucuggauagguuguuug

SEQ ID NO: 405552 - RNA, 19 nt, Homo sapiens
  misc_RNA (1)...(19): siRNA sense strand
gaggaaugaucuggauagg

SEQ ID NO: 405553 - RNA, 19 nt, Homo sapiens
  misc_RNA (1)...(19): siRNA sense strand
uggaaucagccaaggguuu

SEQ ID NO: 405554 - RNA, 19 nt, Homo sapiens
  misc_RNA (1)...(19): siRNA sense strand
gcagaaggugcagucuuug

SEQ ID NO: 405555 - RNA, 19 nt, Homo sapiens
  misc_RNA (1)...(19): siRNA sense strand
ccagagagugggacaugga

SEQ ID NO: 405556 - RNA, 19 nt, Homo sapiens
  misc_RNA (1)...(19): siRNA sense strand
cugcagaaacuccagaaug

SEQ ID NO: 405557 - RNA, 19 nt, Homo sapiens
  misc_RNA (1)...(19): siRNA sense strand
uggacaguuugguugcaua

SEQ ID NO: 405558 - RNA, 19 nt, Homo sapiens
  misc_RNA (1)...(19): siRNA sense strand
gcaggauuugaaagccuua

SEQ ID NO: 405559 - RNA, 19 nt, Homo sapiens
  misc_RNA (1)...(19): siRNA sense strand
gaguccaucuugagaagcu

SEQ ID NO: 405560 - RNA, 19 nt, Homo sapiens
  misc_RNA (1)...(19): siRNA sense strand
ugaucuggauagguuguuu

SEQ ID NO: 405561 - RNA, 19 nt, Homo sapiens
  misc_RNA (1)...(19): siRNA sense strand
uagaaaccaacgagaacaa

SEQ ID NO: 405562 - RNA, 19 nt, Homo sapiens
  misc_RNA (1)...(19): siRNA sense strand
ggacuuccuggacagacuu

SEQ ID NO: 405563 - RNA, 19 nt, Homo sapiens
  misc_RNA (1)...(19): siRNA sense strand
gggaacaagcaggauuuga

SEQ ID NO: 405564 - RNA, 19 nt, Homo sapiens
  misc_RNA (1)...(19): siRNA sense strand
gcaagccacauuuggaacu

SEQ ID NO: 405565 - RNA, 19 nt, Homo sapiens
  misc_RNA (1)...(19): siRNA sense strand
ggagccagaaggagaucaa

SEQ ID NO: 405566 - RNA, 19 nt, Homo sapiens
  misc_RNA (1)...(19): siRNA sense strand
ugcacacgcugcucaguca

SEQ ID NO: 405567 - RNA, 19 nt, Homo sapiens
  misc_RNA (1)...(19): siRNA sense strand
cagacacucggaagccuuu

SEQ ID NO: 405568 - RNA, 19 nt, Homo sapiens
  misc_RNA (1)...(19): siRNA sense strand
ugcaggcccucacggagaa

SEQ ID NO: 405569 - RNA, 19 nt, Homo sapiens
  misc_RNA (1)...(19): siRNA sense strand
cuauggagucugacaucua

SEQ ID NO: 405570 - RNA, 19 nt, Homo sapiens
  misc_RNA (1)...(19): siRNA sense strand
agaagaggagccagaagga

SEQ ID NO: 405571 - RNA, 19 nt, Homo sapiens
  misc_RNA (1)...(19): siRNA sense strand
ugaggaaugaucuggauag

SEQ ID NO: 405572 - RNA, 19 nt, Homo sapiens
  misc_RNA (1)...(19): siRNA sense strand
aaaccaacgagaacaaucu

SEQ ID NO: 405573 - RNA, 19 nt, Homo sapiens
  misc_RNA (1)...(19): siRNA sense strand
uggacagacuuucuucucu

SEQ ID NO: 405574 - RNA, 19 nt, Homo sapiens
  misc_RNA (1)...(19): siRNA sense strand
aggaagcugugaaggagau

SEQ ID NO: 405575 - RNA, 19 nt, Homo sapiens
  misc_RNA (1)...(19): siRNA sense strand
gcagaaacuccagaaugag

SEQ ID NO: 405576 - RNA, 19 nt, Homo sapiens
  misc_RNA (1)...(19): siRNA sense strand
cagccaaggguuuacuaga

SEQ ID NO: 405577 - RNA, 19 nt, Homo sapiens
  misc_RNA (1)...(19): siRNA sense strand
cagaaggagaucaaugaca

SEQ ID NO: 405578 - RNA, 19 nt, Homo sapiens
  misc_RNA (1)...(19): siRNA sense strand
cauacucggucaaaauaga

SEQ ID NO: 405579 - RNA, 19 nt, Homo sapiens
  misc_RNA (1)...(19): siRNA sense strand
acaguuugguugcauacuc

SEQ ID NO: 405580 - RNA, 19 nt, Homo sapiens
  misc_RNA (1)...(19): siRNA sense strand
ggacaguuugguugcauac

SEQ ID NO: 405581 - RNA, 19 nt, Homo sapiens
  misc_RNA (1)...(19): siRNA sense strand
cagacuuucuucucuagac

SEQ ID NO: 405582 - RNA, 19 nt, Homo sapiens
  misc_RNA (1)...(19): siRNA sense strand
gaaaugaucuggacuucua

SEQ ID NO: 405583 - RNA, 19 nt, Homo sapiens
  misc_RNA (1)...(19): siRNA sense strand
gcaagaaacuccuuauaga

SEQ ID NO: 405584 - RNA, 19 nt, Homo sapiens
  misc_RNA (1)...(19): siRNA sense strand
caccaaagaucucaaauaa

SEQ ID NO: 405585 - RNA, 19 nt, Homo sapiens
  misc_RNA (1)...(19): siRNA sense strand
ccaaagaucucaaauaaag

SEQ ID NO: 405586 - RNA, 19 nt, Homo sapiens
  misc_RNA (1)...(19): siRNA sense strand
gaaauacaaggaacgauua

SEQ ID NO: 405587 - RNA, 19 nt, Homo sapiens
  misc_RNA (1)...(19): siRNA sense strand
gaucaucccagaauaguua

SEQ ID NO: 405588 - RNA, 19 nt, Homo sapiens
  misc_RNA (1)...(19): siRNA sense strand
gaagaaggagggaagaaua

SEQ ID NO: 405589 - RNA, 19 nt, Homo sapiens
  misc_RNA (1)...(19): siRNA sense strand
ggacagaugguuaugcuuu

SEQ ID NO: 405590 - RNA, 19 nt, Homo sapiens
  misc_RNA (1)...(19): siRNA sense strand
gaaagucagucucuacaag

SEQ ID NO: 405591 - RNA, 19 nt, Homo sapiens
  misc_RNA (1)...(19): siRNA sense strand
ggaaagaaccaccaaagau

SEQ ID NO: 405592 - RNA, 19 nt, Homo sapiens
  misc_RNA (1)...(19): siRNA sense strand
gaaagaaccaccaaagauc

SEQ ID NO: 405593 - RNA, 19 nt, Homo sapiens
  misc_RNA (1)...(19): siRNA sense strand
gggaagaauagaugauuua

SEQ ID NO: 405594 - RNA, 19 nt, Homo sapiens
  misc_RNA (1)...(19): siRNA sense strand
gcagauugaugaacagcaa

SEQ ID NO: 405595 - RNA, 19 nt, Homo sapiens
  misc_RNA (1)...(19): siRNA sense strand
gcauggagcuaacaucaca

SEQ ID NO: 405596 - RNA, 19 nt, Homo sapiens
  misc_RNA (1)...(19): siRNA sense strand
gggaagagauagaaagaca

SEQ ID NO: 405597 - RNA, 19 nt, Homo sapiens
  misc_RNA (1)...(19): siRNA sense strand
caacaggaaaggauaaauu

SEQ ID NO: 405598 - RNA, 19 nt, Homo sapiens
  misc_RNA (1)...(19): siRNA sense strand
gagcaagaaacuccuuaua

SEQ ID NO: 405599 - RNA, 19 nt, Homo sapiens
  misc_RNA (1)...(19): siRNA sense strand
gaugauagcuacaauucag

SEQ ID NO: 405600 - RNA, 19 nt, Homo sapiens
  misc_RNA (1)...(19): siRNA sense strand
caagaaacuccuuauagaa

SEQ ID NO: 405601 - RNA, 19 nt, Homo sapiens
  misc_RNA (1)...(19): siRNA sense strand
ccaauaacaguucuucuaa

SEQ ID NO: 405602 - RNA, 19 nt, Homo sapiens
  misc_RNA (1)...(19): siRNA sense strand
gaagauggcguguagagau

SEQ ID NO: 405603 - RNA, 19 nt, Homo sapiens
  misc_RNA (1)...(19): siRNA sense strand
gaaaggauaaauucacaga

SEQ ID NO: 405604 - RNA, 19 nt, Homo sapiens
  misc_RNA (1)...(19): siRNA sense strand
caagacauccuacaagaga

SEQ ID NO: 405605 - RNA, 19 nt, Homo sapiens
  misc_RNA (1)...(19): siRNA sense strand
agaauaccaugaacaagaa

SEQ ID NO: 405606 - RNA, 19 nt, Homo sapiens
  misc_RNA (1)...(19): siRNA sense strand
aauaaaaccucccaucaua

SEQ ID NO: 405607 - RNA, 19 nt, Homo sapiens
  misc_RNA (1)...(19): siRNA sense strand
gagauaagagcaugcaaga

SEQ ID NO: 405608 - RNA, 19 nt, Homo sapiens
  misc_RNA (1)...(19): siRNA sense strand
ccaccaaagaucucaaaua

SEQ ID NO: 405609 - RNA, 19 nt, Homo sapiens
  misc_RNA (1)...(19): siRNA sense strand
ccugaaacagcacaaauua

SEQ ID NO: 405610 - RNA, 19 nt, Homo sapiens
  misc_RNA (1)...(19): siRNA sense strand
gaaacagcacaaauuaaug

SEQ ID NO: 405611 - RNA, 19 nt, Homo sapiens
  misc_RNA (1)...(19): siRNA sense strand
cagaauaccaugaacaaga

SEQ ID NO: 405612 - RNA, 19 nt, Homo sapiens
  misc_RNA (1)...(19): siRNA sense strand
caaaccagguaauauucuu

SEQ ID NO: 405613 - RNA, 19 nt, Homo sapiens
  misc_RNA (1)...(19): siRNA sense strand
ccagaauaguuaagcugua

SEQ ID NO: 405614 - RNA, 19 nt, Homo sapiens
  misc_RNA (1)...(19): siRNA sense strand
aagaaaagcugaaccauau

SEQ ID NO: 405615 - RNA, 19 nt, Homo sapiens
  misc_RNA (1)...(19): siRNA sense strand
gaagcaaaggcguuuauuc

SEQ ID NO: 405616 - RNA, 19 nt, Homo sapiens
  misc_RNA (1)...(19): siRNA sense strand
aagauggcguguagagaua

SEQ ID NO: 405617 - RNA, 19 nt, Homo sapiens
  misc_RNA (1)...(19): siRNA sense strand
caauggagcugaaaaugaa

SEQ ID NO: 405618 - RNA, 19 nt, Homo sapiens
  misc_RNA (1)...(19): siRNA sense strand
gaauaguuaagcuguauga

SEQ ID NO: 405619 - RNA, 19 nt, Homo sapiens
  misc_RNA (1)...(19): siRNA sense strand
cagaauaguuaagcuguau

SEQ ID NO: 405620 - RNA, 19 nt, Homo sapiens
  misc_RNA (1)...(19): siRNA sense strand
cuacauaucagggaacuaa

SEQ ID NO: 405621 - RNA, 19 nt, Homo sapiens
  misc_RNA (1)...(19): siRNA sense strand
caaggcauuugaucuaaca

SEQ ID NO: 405622 - RNA, 19 nt, Homo sapiens
  misc_RNA (1)...(19): siRNA sense strand
aaagauacguagcugugaa

SEQ ID NO: 405623 - RNA, 19 nt, Homo sapiens
  misc_RNA (1)...(19): siRNA sense strand
gauuugagacggcagauug

SEQ ID NO: 405624 - RNA, 19 nt, Homo sapiens
  misc_RNA (1)...(19): siRNA sense strand
gaaagagggaccgcauuga

SEQ ID NO: 405625 - RNA, 19 nt, Homo sapiens
  misc_RNA (1)...(19): siRNA sense strand
acaaggugcugguacuuau

SEQ ID NO: 405626 - RNA, 19 nt, Homo sapiens
  misc_RNA (1)...(19): siRNA sense strand
ccucaaaccagguaauauu

SEQ ID NO: 405627 - RNA, 19 nt, Homo sapiens
  misc_RNA (1)...(19): siRNA sense strand
uuacaaggcauuugaucua

SEQ ID NO: 405628 - RNA, 19 nt, Homo sapiens
  misc_RNA (1)...(19): siRNA sense strand
gaucauccaacgcuaaaug

SEQ ID NO: 405629 - RNA, 19 nt, Homo sapiens
  misc_RNA (1)...(19): siRNA sense strand
gauagaaagacaacggaaa

SEQ ID NO: 405630 - RNA, 19 nt, Homo sapiens
  misc_RNA (1)...(19): siRNA sense strand
aagagaagauggcguguag

SEQ ID NO: 405631 - RNA, 19 nt, Homo sapiens
  misc_RNA (1)...(19): siRNA sense strand
gggaaagaaccaccaaaga

SEQ ID NO: 405632 - RNA, 19 nt, Homo sapiens
  misc_RNA (1)...(19): siRNA sense strand
acaaauuaaugucggagaa

SEQ ID NO: 405633 - RNA, 19 nt, Homo sapiens
  misc_RNA (1)...(19): siRNA sense strand
caagaccaauggagcugaa

SEQ ID NO: 405634 - RNA, 19 nt, Homo sapiens
  misc_RNA (1)...(19): siRNA sense strand
gauugugaaugcuuuaaag

SEQ ID NO: 405635 - RNA, 19 nt, Homo sapiens
  misc_RNA (1)...(19): siRNA sense strand
gauacugacucguuuugua

SEQ ID NO: 405636 - RNA, 19 nt, Homo sapiens
  misc_RNA (1)...(19): siRNA sense strand
caaggaacgauuaaauaga

SEQ ID NO: 405637 - RNA, 19 nt, Homo sapiens
  misc_RNA (1)...(19): siRNA sense strand
cgaaagagggaccgcauug

SEQ ID NO: 405638 - RNA, 19 nt, Homo sapiens
  misc_RNA (1)...(19): siRNA sense strand
ucuuaaagcuacugaagug

SEQ ID NO: 405639 - RNA, 19 nt, Homo sapiens
  misc_RNA (1)...(19): siRNA sense strand
gaaacuagccaagggaaag

SEQ ID NO: 405640 - RNA, 19 nt, Homo sapiens
  misc_RNA (1)...(19): siRNA sense strand
uacaaggcauuugaucuaa

SEQ ID NO: 405641 - RNA, 19 nt, Homo sapiens
  misc_RNA (1)...(19): siRNA sense strand
aaauagaugugugacaaug

SEQ ID NO: 405642 - RNA, 19 nt, Homo sapiens
  misc_RNA (1)...(19): siRNA sense strand
gcugaaccauaugaaacua

SEQ ID NO: 405643 - RNA, 19 nt, Homo sapiens
  misc_RNA (1)...(19): siRNA sense strand
gaaauaaaaccucccauca

SEQ ID NO: 405644 - RNA, 19 nt, Homo sapiens
  misc_RNA (1)...(19): siRNA sense strand
gcagauugugaaugcuuua

SEQ ID NO: 405645 - RNA, 19 nt, Homo sapiens
  misc_RNA (1)...(19): siRNA sense strand
uagaaaggguuagaaaucu

SEQ ID NO: 405646 - RNA, 19 nt, Homo sapiens
  misc_RNA (1)...(19): siRNA sense strand
gagagacuagaaaggguua

SEQ ID NO: 405647 - RNA, 19 nt, Homo sapiens
  misc_RNA (1)...(19): siRNA sense strand
aaacucagauuaggucauc

SEQ ID NO: 405648 - RNA, 19 nt, Homo sapiens
  misc_RNA (1)...(19): siRNA sense strand
gagggaagagauagaaaga

SEQ ID NO: 405649 - RNA, 19 nt, Homo sapiens
  misc_RNA (1)...(19): siRNA sense strand
gacggcagauugaugaaca

SEQ ID NO: 405650 - RNA, 19 nt, Homo sapiens
  misc_RNA (1)...(19): siRNA sense strand
gagcugcuauugcaucaac

SEQ ID NO: 405651 - RNA, 19 nt, Homo sapiens
  misc_RNA (1)...(19): siRNA sense strand
gggaaaugaucuggacuuc

SEQ ID NO: 405652 - RNA, 19 nt, Homo sapiens
  misc_RNA (1)...(19): siRNA sense strand
aguagagacucccgagaaa

SEQ ID NO: 405653 - RNA, 19 nt, Homo sapiens
  misc_RNA (1)...(19): siRNA sense strand
caagcaacaggaaaggaua

SEQ ID NO: 405654 - RNA, 19 nt, Homo sapiens
  misc_RNA (1)...(19): siRNA sense strand
cagaaguguuccaccaguu

SEQ ID NO: 405655 - RNA, 19 nt, Homo sapiens
  misc_RNA (1)...(19): siRNA sense strand
ggaugaugauagcuacaau

SEQ ID NO: 405656 - RNA, 19 nt, Homo sapiens
  misc_RNA (1)...(19): siRNA sense strand
cuagaaaggguuagaaauc

SEQ ID NO: 405657 - RNA, 19 nt, Homo sapiens
  misc_RNA (1)...(19): siRNA sense strand
gaacaguggacagaugguu

SEQ ID NO: 405658 - RNA, 19 nt, Homo sapiens
  misc_RNA (1)...(19): siRNA sense strand
agaaauacaaggaacgauu

SEQ ID NO: 405659 - RNA, 19 nt, Homo sapiens
  misc_RNA (1)...(19): siRNA sense strand
gagggaagaauagaugauu

SEQ ID NO: 405660 - RNA, 19 nt, Homo sapiens
  misc_RNA (1)...(19): siRNA sense strand
gaaggagggaagaauagau

SEQ ID NO: 405661 - RNA, 19 nt, Homo sapiens
  misc_RNA (1)...(19): siRNA sense strand
ggccugugaucccuacuug

SEQ ID NO: 405662 - RNA, 19 nt, Homo sapiens
  misc_RNA (1)...(19): siRNA sense strand
gcugguacuuauugguauu

SEQ ID NO: 405663 - RNA, 19 nt, Homo sapiens
  misc_RNA (1)...(19): siRNA sense strand
guagaggagguuucaguga

SEQ ID NO: 405664 - RNA, 19 nt, Homo sapiens
  misc_RNA (1)...(19): siRNA sense strand
cguuaacguuagcagaaua

SEQ ID NO: 405665 - RNA, 19 nt, Homo sapiens
  misc_RNA (1)...(19): siRNA sense strand
gaagagauagaaagacaac

SEQ ID NO: 405666 - RNA, 19 nt, Homo sapiens
  misc_RNA (1)...(19): siRNA sense strand
gauccucaccgcaacauuc

SEQ ID NO: 405667 - RNA, 19 nt, Homo sapiens
  misc_RNA (1)...(19): siRNA sense strand
gucggauccuugagugaua

SEQ ID NO: 405668 - RNA, 19 nt, Homo sapiens
  misc_RNA (1)...(19): siRNA sense strand
caaauuaaugucggagaaa

SEQ ID NO: 405669 - RNA, 19 nt, Homo sapiens
  misc_RNA (1)...(19): siRNA sense strand
cuugagugauaaagaagua

SEQ ID NO: 405670 - RNA, 19 nt, Homo sapiens
  misc_RNA (1)...(19): siRNA sense strand
caagggaaaggcacuccua

SEQ ID NO: 405671 - RNA, 19 nt, Homo sapiens
  misc_RNA (1)...(19): siRNA sense strand
gagcuggagagacuagaaa

SEQ ID NO: 405672 - RNA, 19 nt, Homo sapiens
  misc_RNA (1)...(19): siRNA sense strand
ugagacggcagauugauga

SEQ ID NO: 405673 - RNA, 19 nt, Homo sapiens
  misc_RNA (1)...(19): siRNA sense strand
aagucagucucuacaagua

SEQ ID NO: 405674 - RNA, 19 nt, Homo sapiens
  misc_RNA (1)...(19): siRNA sense strand
gaucuucuaucagugucuu

SEQ ID NO: 405675 - RNA, 19 nt, Homo sapiens
  misc_RNA (1)...(19): siRNA sense strand
gaugaugauagcuacaauu

SEQ ID NO: 405676 - RNA, 19 nt, Homo sapiens
  misc_RNA (1)...(19): siRNA sense strand
aaaggagaauuaccacaag

SEQ ID NO: 405677 - RNA, 19 nt, Homo sapiens
  misc_RNA (1)...(19): siRNA sense strand
auacguagcugugaaaauu

SEQ ID NO: 405678 - RNA, 19 nt, Homo sapiens
  misc_RNA (1)...(19): siRNA sense strand
gaaagacaacggaaaaugu

SEQ ID NO: 405679 - RNA, 19 nt, Homo sapiens
  misc_RNA (1)...(19): siRNA sense strand
gaaaagcugaaccauauga

SEQ ID NO: 405680 - RNA, 19 nt, Homo sapiens
  misc_RNA (1)...(19): siRNA sense strand
gagaagauggcguguagag

SEQ ID NO: 405681 - RNA, 19 nt, Homo sapiens
  misc_RNA (1)...(19): siRNA sense strand
acaaggaacgauuaaauag

SEQ ID NO: 405682 - RNA, 19 nt, Homo sapiens
  misc_RNA (1)...(19): siRNA sense strand
gagcauggcugccucuuca

SEQ ID NO: 405683 - RNA, 19 nt, Homo sapiens
  misc_RNA (1)...(19): siRNA sense strand
ggugaugacugcuugauga

SEQ ID NO: 405684 - RNA, 19 nt, Homo sapiens
  misc_RNA (1)...(19): siRNA sense strand
ucacagagguggacagugu

SEQ ID NO: 405685 - RNA, 19 nt, Homo sapiens
  misc_RNA (1)...(19): siRNA sense strand
gaugacugcuugaugaaga

SEQ ID NO: 405686 - RNA, 19 nt, Homo sapiens
  misc_RNA (1)...(19): siRNA sense strand
cugagaaucugcucuacua

SEQ ID NO: 405687 - RNA, 19 nt, Homo sapiens
  misc_RNA (1)...(19): siRNA sense strand
gaaccugcaccgcuccaua

SEQ ID NO: 405688 - RNA, 19 nt, Homo sapiens
  misc_RNA (1)...(19): siRNA sense strand
gggccaggguagcuaagua

SEQ ID NO: 405689 - RNA, 19 nt, Homo sapiens
  misc_RNA (1)...(19): siRNA sense strand
ugacaucaaggcccuaauu

SEQ ID NO: 405690 - RNA, 19 nt, Homo sapiens
  misc_RNA (1)...(19): siRNA sense strand
guacaagcacuucaucaca

SEQ ID NO: 405691 - RNA, 19 nt, Homo sapiens
  misc_RNA (1)...(19): siRNA sense strand
gcuccacacgcuccaauaa

SEQ ID NO: 405692 - RNA, 19 nt, Homo sapiens
  misc_RNA (1)...(19): siRNA sense strand
ggcacugacuccaagauca

SEQ ID NO: 405693 - RNA, 19 nt, Homo sapiens
  misc_RNA (1)...(19): siRNA sense strand
ggccagugcucgcaagaag

SEQ ID NO: 405694 - RNA, 19 nt, Homo sapiens
  misc_RNA (1)...(19): siRNA sense strand
cgucauugccuacauccua

SEQ ID NO: 405695 - RNA, 19 nt, Homo sapiens
  misc_RNA (1)...(19): siRNA sense strand
acaagcacuucaucacaga

SEQ ID NO: 405696 - RNA, 19 nt, Homo sapiens
  misc_RNA (1)...(19): siRNA sense strand
uaaguacagggccaaguuu

SEQ ID NO: 405697 - RNA, 19 nt, Homo sapiens
  misc_RNA (1)...(19): siRNA sense strand
gacaucaaggcccuaauug

SEQ ID NO: 405698 - RNA, 19 nt, Homo sapiens
  misc_RNA (1)...(19): siRNA sense strand
uguccaaccuggccaagga

SEQ ID NO: 405699 - RNA, 19 nt, Homo sapiens
  misc_RNA (1)...(19): siRNA sense strand
agagugacguguacaagca

SEQ ID NO: 405700 - RNA, 19 nt, Homo sapiens
  misc_RNA (1)...(19): siRNA sense strand
gcucuuugaccgcaucauu

SEQ ID NO: 405701 - RNA, 19 nt, Homo sapiens
  misc_RNA (1)...(19): siRNA sense strand
ggguguacauggugaugga

SEQ ID NO: 405702 - RNA, 19 nt, Homo sapiens
  misc_RNA (1)...(19): siRNA sense strand
ccaacucaguggacaugug

SEQ ID NO: 405703 - RNA, 19 nt, Homo sapiens
  misc_RNA (1)...(19): siRNA sense strand
gcagggccaggguagcuaa

SEQ ID NO: 405704 - RNA, 19 nt, Homo sapiens
  misc_RNA (1)...(19): siRNA sense strand
gcuaccagcagcaauacaa

SEQ ID NO: 405705 - RNA, 19 nt, Homo sapiens
  misc_RNA (1)...(19): siRNA sense strand
gcacugacuccaagaucau

SEQ ID NO: 405706 - RNA, 19 nt, Homo sapiens
  misc_RNA (1)...(19): siRNA sense strand
cuaaguacagggccaaguu

SEQ ID NO: 405707 - RNA, 19 nt, Homo sapiens
  misc_RNA (1)...(19): siRNA sense strand
aaguuugacccacguguua

SEQ ID NO: 405708 - RNA, 19 nt, Homo sapiens
  misc_RNA (1)...(19): siRNA sense strand
ccaugccguuugaggauga

SEQ ID NO: 405709 - RNA, 19 nt, Homo sapiens
  misc_RNA (1)...(19): siRNA sense strand
cagcuucagccgaguggua

SEQ ID NO: 405710 - RNA, 19 nt, Homo sapiens
  misc_RNA (1)...(19): siRNA sense strand
gaucaucaucaccgacuuc

SEQ ID NO: 405711 - RNA, 19 nt, Homo sapiens
  misc_RNA (1)...(19): siRNA sense strand
gggcgucauugccuacauc

SEQ ID NO: 405712 - RNA, 19 nt, Homo sapiens
  misc_RNA (1)...(19): siRNA sense strand
agaaucugcucuacuacca

SEQ ID NO: 405713 - RNA, 19 nt, Homo sapiens
  misc_RNA (1)...(19): siRNA sense strand
uggcacgccugaguacauu

SEQ ID NO: 405714 - RNA, 19 nt, Homo sapiens
  misc_RNA (1)...(19): siRNA sense strand
gacccuggagcccguauga

SEQ ID NO: 405715 - RNA, 19 nt, Homo sapiens
  misc_RNA (1)...(19): siRNA sense strand
caaguuugacccacguguu

SEQ ID NO: 405716 - RNA, 19 nt, Homo sapiens
  misc_RNA (1)...(19): siRNA sense strand
uccacacgcuccaauaagu

SEQ ID NO: 405717 - RNA, 19 nt, Homo sapiens
  misc_RNA (1)...(19): siRNA sense strand
cccagaaccuccuuaaacg

SEQ ID NO: 405718 - RNA, 19 nt, Homo sapiens
  misc_RNA (1)...(19): siRNA sense strand
gcagccguaugccaucaag

SEQ ID NO: 405719 - RNA, 19 nt, Homo sapiens
  misc_RNA (1)...(19): siRNA sense strand
cagcuaaguaugacaucaa

SEQ ID NO: 405720 - RNA, 19 nt, Homo sapiens
  misc_RNA (1)...(19): siRNA sense strand
agcuggaucuggucaagaa

SEQ ID NO: 405721 - RNA, 19 nt, Homo sapiens
  misc_RNA (1)...(19): siRNA sense strand
caaccuggccaaggacuuc

SEQ ID NO: 405722 - RNA, 19 nt, Homo sapiens
  misc_RNA (1)...(19): siRNA sense strand
guguuacagcuaaguauga

SEQ ID NO: 405723 - RNA, 19 nt, Homo sapiens
  misc_RNA (1)...(19): siRNA sense strand
cacaggagcggguguacau

SEQ ID NO: 405724 - RNA, 19 nt, Homo sapiens
  misc_RNA (1)...(19): siRNA sense strand
acccacguguuacagcuaa

SEQ ID NO: 405725 - RNA, 19 nt, Homo sapiens
  misc_RNA (1)...(19): siRNA sense strand
gcauggcugccucuucauc

SEQ ID NO: 405726 - RNA, 19 nt, Homo sapiens
  misc_RNA (1)...(19): siRNA sense strand
cuaagagugacguguacaa

SEQ ID NO: 405727 - RNA, 19 nt, Homo sapiens
  misc_RNA (1)...(19): siRNA sense strand
ucccagaaccuccuuaaac

SEQ ID NO: 405728 - RNA, 19 nt, Homo sapiens
  misc_RNA (1)...(19): siRNA sense strand
uaucccagaaccuccuuaa

SEQ ID NO: 405729 - RNA, 19 nt, Homo sapiens
  misc_RNA (1)...(19): siRNA sense strand
acacgaagauggccaagaa

SEQ ID NO: 405730 - RNA, 19 nt, Homo sapiens
  misc_RNA (1)...(19): siRNA sense strand
uaugaggguucucuuauaa

SEQ ID NO: 405731 - RNA, 19 nt, Homo sapiens
  misc_RNA (1)...(19): siRNA sense strand
gaagauggccaagaacaaa

SEQ ID NO: 405732 - RNA, 19 nt, Homo sapiens
  misc_RNA (1)...(19): siRNA sense strand
ccgcuucgauccugaaauu

SEQ ID NO: 405733 - RNA, 19 nt, Homo sapiens
  misc_RNA (1)...(19): siRNA sense strand
cuaugaggguucucuuaua

SEQ ID NO: 405734 - RNA, 19 nt, Homo sapiens
  misc_RNA (1)...(19): siRNA sense strand
ggaguuagcgccugcucua

SEQ ID NO: 405735 - RNA, 19 nt, Homo sapiens
  misc_RNA (1)...(19): siRNA sense strand
gcaaagccgagaaggagaa

SEQ ID NO: 405736 - RNA, 19 nt, Homo sapiens
  misc_RNA (1)...(19): siRNA sense strand
gcuaugaggguucucuuau

SEQ ID NO: 405737 - RNA, 19 nt, Homo sapiens
  misc_RNA (1)...(19): siRNA sense strand
cgggagcucuaucugcuuu

SEQ ID NO: 405738 - RNA, 19 nt, Homo sapiens
  misc_RNA (1)...(19): siRNA sense strand
gaaauuccgcaaacacuac

SEQ ID NO: 405739 - RNA, 19 nt, Homo sapiens
  misc_RNA (1)...(19): siRNA sense strand
ugaggguucucuuauaaag

SEQ ID NO: 405740 - RNA, 19 nt, Homo sapiens
  misc_RNA (1)...(19): siRNA sense strand
ugaaauuccgcaaacacua

SEQ ID NO: 405741 - RNA, 19 nt, Homo sapiens
  misc_RNA (1)...(19): siRNA sense strand
ggaagucccgucaguucug

SEQ ID NO: 405742 - RNA, 19 nt, Homo sapiens
  misc_RNA (1)...(19): siRNA sense strand
cgaagauggccaagaacaa

SEQ ID NO: 405743 - RNA, 19 nt, Homo sapiens
  misc_RNA (1)...(19): siRNA sense strand
ggccaagaacaaacucgua

SEQ ID NO: 405744 - RNA, 19 nt, Homo sapiens
  misc_RNA (1)...(19): siRNA sense strand
gcaaacacuacgacuagag

SEQ ID NO: 405745 - RNA, 19 nt, Homo sapiens
  misc_RNA (1)...(19): siRNA sense strand
cgacuagaguuugcuaagg

SEQ ID NO: 405746 - RNA, 19 nt, Homo sapiens
  misc_RNA (1)...(19): siRNA sense strand
ccgcaaacacuacgacuag

SEQ ID NO: 405747 - RNA, 19 nt, Homo sapiens
  misc_RNA (1)...(19): siRNA sense strand
guacuccucugcccaacac

SEQ ID NO: 405748 - RNA, 19 nt, Homo sapiens
  misc_RNA (1)...(19): siRNA sense strand
ggcuaugaggguucucuua

SEQ ID NO: 405749 - RNA, 19 nt, Homo sapiens
  misc_RNA (1)...(19): siRNA sense strand
guccggacccuauuuguca

SEQ ID NO: 405750 - RNA, 19 nt, Homo sapiens
  misc_RNA (1)...(19): siRNA sense strand
cuuauaaagcucacaucua

SEQ ID NO: 405751 - RNA, 19 nt, Homo sapiens
  misc_RNA (1)...(19): siRNA sense strand
caaacacuacgacuagagu

SEQ ID NO: 405752 - RNA, 19 nt, Homo sapiens
  misc_RNA (1)...(19): siRNA sense strand
gauccugaaauuccgcaaa

SEQ ID NO: 405753 - RNA, 19 nt, Homo sapiens
  misc_RNA (1)...(19): siRNA sense strand
ucaaaccucgggagcucua

SEQ ID NO: 405754 - RNA, 19 nt, Homo sapiens
  misc_RNA (1)...(19): siRNA sense strand
gcuaaggcaaacacgaaga

SEQ ID NO: 405755 - RNA, 19 nt, Homo sapiens
  misc_RNA (1)...(19): siRNA sense strand
gaccauuuaagggcuauga

SEQ ID NO: 405756 - RNA, 19 nt, Homo sapiens
  misc_RNA (1)...(19): siRNA sense strand
acacuacgacuagaguuug

SEQ ID NO: 405757 - RNA, 19 nt, Homo sapiens
  misc_RNA (1)...(19): siRNA sense strand
cgagcgaggccaaccuuca

SEQ ID NO: 405758 - RNA, 19 nt, Homo sapiens
  misc_RNA (1)...(19): siRNA sense strand
auaaagcucacaucuaaac

SEQ ID NO: 405759 - RNA, 19 nt, Homo sapiens
  misc_RNA (1)...(19): siRNA sense strand
gaauggcauccgcuucgau

SEQ ID NO: 405760 - RNA, 19 nt, Homo sapiens
  misc_RNA (1)...(19): siRNA sense strand
guacaaaggucgagaaaua

SEQ ID NO: 405761 - RNA, 19 nt, Homo sapiens
  misc_RNA (1)...(19): siRNA sense strand
ggaguuagauaccuuauua

SEQ ID NO: 405762 - RNA, 19 nt, Homo sapiens
  misc_RNA (1)...(19): siRNA sense strand
ggacagaaauuuaguugaa

SEQ ID NO: 405763 - RNA, 19 nt, Homo sapiens
  misc_RNA (1)...(19): siRNA sense strand
gaagguauaucuacacauu

SEQ ID NO: 405764 - RNA, 19 nt, Homo sapiens
  misc_RNA (1)...(19): siRNA sense strand
gaacaucauugcaacagua

SEQ ID NO: 405765 - RNA, 19 nt, Homo sapiens
  misc_RNA (1)...(19): siRNA sense strand
gaacugcuuucaauucuaa

SEQ ID NO: 405766 - RNA, 19 nt, Homo sapiens
  misc_RNA (1)...(19): siRNA sense strand
ccagagagcugugcaguua

SEQ ID NO: 405767 - RNA, 19 nt, Homo sapiens
  misc_RNA (1)...(19): siRNA sense strand
caaauaagaugcagcaguu

SEQ ID NO: 405768 - RNA, 19 nt, Homo sapiens
  misc_RNA (1)...(19): siRNA sense strand
ucacaaggcuuaucagauu

SEQ ID NO: 405769 - RNA, 19 nt, Homo sapiens
  misc_RNA (1)...(19): siRNA sense strand
gcagagagaugcagacguu

SEQ ID NO: 405770 - RNA, 19 nt, Homo sapiens
  misc_RNA (1)...(19): siRNA sense strand
gaacuuuccuacuguauug

SEQ ID NO: 405771 - RNA, 19 nt, Homo sapiens
  misc_RNA (1)...(19): siRNA sense strand
gaggagaaauggacaguuu

SEQ ID NO: 405772 - RNA, 19 nt, Homo sapiens
  misc_RNA (1)...(19): siRNA sense strand
cagcugaaaugacagauua

SEQ ID NO: 405773 - RNA, 19 nt, Homo sapiens
  misc_RNA (1)...(19): siRNA sense strand
caaacgagaugacaacaaa

SEQ ID NO: 405774 - RNA, 19 nt, Homo sapiens
  misc_RNA (1)...(19): siRNA sense strand
caacauuacuguccucgua

SEQ ID NO: 405775 - RNA, 19 nt, Homo sapiens
  misc_RNA (1)...(19): siRNA sense strand
gcauugaaccucuaacuua

SEQ ID NO: 405776 - RNA, 19 nt, Homo sapiens
  misc_RNA (1)...(19): siRNA sense strand
gaucuaaacuucaugaaca

SEQ ID NO: 405777 - RNA, 19 nt, Homo sapiens
  misc_RNA (1)...(19): siRNA sense strand
gaugagagcaaauccauua

SEQ ID NO: 405778 - RNA, 19 nt, Homo sapiens
  misc_RNA (1)...(19): siRNA sense strand
gaacagcuaugucucuaau

SEQ ID NO: 405779 - RNA, 19 nt, Homo sapiens
  misc_RNA (1)...(19): siRNA sense strand
gcagugaaguggauaaguu

SEQ ID NO: 405780 - RNA, 19 nt, Homo sapiens
  misc_RNA (1)...(19): siRNA sense strand
gggauuaaaugugcaaaua

SEQ ID NO: 405781 - RNA, 19 nt, Homo sapiens
  misc_RNA (1)...(19): siRNA sense strand
ccagagaccuugcugauug

SEQ ID NO: 405782 - RNA, 19 nt, Homo sapiens
  misc_RNA (1)...(19): siRNA sense strand
gaucuuugcuguacuuuau

SEQ ID NO: 405783 - RNA, 19 nt, Homo sapiens
  misc_RNA (1)...(19): siRNA sense strand
agagagaacuuauugcuuu

SEQ ID NO: 405784 - RNA, 19 nt, Homo sapiens
  misc_RNA (1)...(19): siRNA sense strand
cuccaaagcugaagaauuu

SEQ ID NO: 405785 - RNA, 19 nt, Homo sapiens
  misc_RNA (1)...(19): siRNA sense strand
gaaacaauaucgacgugaa

SEQ ID NO: 405786 - RNA, 19 nt, Homo sapiens
  misc_RNA (1)...(19): siRNA sense strand
ugacugaccuggcauuaaa

SEQ ID NO: 405787 - RNA, 19 nt, Homo sapiens
  misc_RNA (1)...(19): siRNA sense strand
ggaaagaggcccuguucua

SEQ ID NO: 405788 - RNA, 19 nt, Homo sapiens
  misc_RNA (1)...(19): siRNA sense strand
agacaaagcucagaugauu

SEQ ID NO: 405789 - RNA, 19 nt, Homo sapiens
  misc_RNA (1)...(19): siRNA sense strand
gagaacaguuggucauuga

SEQ ID NO: 405790 - RNA, 19 nt, Homo sapiens
  misc_RNA (1)...(19): siRNA sense strand
gagcaaauccauuagcaua

SEQ ID NO: 405791 - RNA, 19 nt, Homo sapiens
  misc_RNA (1)...(19): siRNA sense strand
ccacuuaaaugcagagauu

SEQ ID NO: 405792 - RNA, 19 nt, Homo sapiens
  misc_RNA (1)...(19): siRNA sense strand
gaacauggcgauaggguuu

SEQ ID NO: 405793 - RNA, 19 nt, Homo sapiens
  misc_RNA (1)...(19): siRNA sense strand
gaagauagaggaccaguau

SEQ ID NO: 405794 - RNA, 19 nt, Homo sapiens
  misc_RNA (1)...(19): siRNA sense strand
ggacuuaugugcuuugauc

SEQ ID NO: 405795 - RNA, 19 nt, Homo sapiens
  misc_RNA (1)...(19): siRNA sense strand
ggaaugaagagacucaaua

SEQ ID NO: 405796 - RNA, 19 nt, Homo sapiens
  misc_RNA (1)...(19): siRNA sense strand
gcagaagaauauacagauu

SEQ ID NO: 405797 - RNA, 19 nt, Homo sapiens
  misc_RNA (1)...(19): siRNA sense strand
gaggaaagaugaaauaggu

SEQ ID NO: 405798 - RNA, 19 nt, Homo sapiens
  misc_RNA (1)...(19): siRNA sense strand
gaagaucuuugcuguacuu

SEQ ID NO: 405799 - RNA, 19 nt, Homo sapiens
  misc_RNA (1)...(19): siRNA sense strand
caagaugcauuggauuaua

SEQ ID NO: 405800 - RNA, 19 nt, Homo sapiens
  misc_RNA (1)...(19): siRNA sense strand
ggagaaccuugguggauuu

SEQ ID NO: 405801 - RNA, 19 nt, Homo sapiens
  misc_RNA (1)...(19): siRNA sense strand
gaacaagccugcauuucag

SEQ ID NO: 405802 - RNA, 19 nt, Homo sapiens
  misc_RNA (1)...(19): siRNA sense strand
ggaaagaccauguauuuag

SEQ ID NO: 405803 - RNA, 19 nt, Homo sapiens
  misc_RNA (1)...(19): siRNA sense strand
uaaccuaaaugcagagauu

SEQ ID NO: 405804 - RNA, 19 nt, Homo sapiens
  misc_RNA (1)...(19): siRNA sense strand
gaagaacugcuuucaauuc

SEQ ID NO: 405805 - RNA, 19 nt, Homo sapiens
  misc_RNA (1)...(19): siRNA sense strand
aggcaaagcuguaauucua

SEQ ID NO: 405806 - RNA, 19 nt, Homo sapiens
  misc_RNA (1)...(19): siRNA sense strand
uagaagauccuacaaauga

SEQ ID NO: 405807 - RNA, 19 nt, Homo sapiens
  misc_RNA (1)...(19): siRNA sense strand
ggagaagauuuagaaguuu

SEQ ID NO: 405808 - RNA, 19 nt, Homo sapiens
  misc_RNA (1)...(19): siRNA sense strand
ucaccaagcaagauaauua

SEQ ID NO: 405809 - RNA, 19 nt, Homo sapiens
  misc_RNA (1)...(19): siRNA sense strand
gcaaauccauuagcauaug

SEQ ID NO: 405810 - RNA, 19 nt, Homo sapiens
  misc_RNA (1)...(19): siRNA sense strand
caacgaaacccaauugaga

SEQ ID NO: 405811 - RNA, 19 nt, Homo sapiens
  misc_RNA (1)...(19): siRNA sense strand
guaccuaaauucaacuuug

SEQ ID NO: 405812 - RNA, 19 nt, Homo sapiens
  misc_RNA (1)...(19): siRNA sense strand
acaaauacccuacuucaaa

SEQ ID NO: 405813 - RNA, 19 nt, Homo sapiens
  misc_RNA (1)...(19): siRNA sense strand
gagagaauaacaagcuuua

SEQ ID NO: 405814 - RNA, 19 nt, Homo sapiens
  misc_RNA (1)...(19): siRNA sense strand
gaacaggcacuucugaaug

SEQ ID NO: 405815 - RNA, 19 nt, Homo sapiens
  misc_RNA (1)...(19): siRNA sense strand
ggaacuauuuguaaacugu

SEQ ID NO: 405816 - RNA, 19 nt, Homo sapiens
  misc_RNA (1)...(19): siRNA sense strand
gcaagucacuauucucauc

SEQ ID NO: 405817 - RNA, 19 nt, Homo sapiens
  misc_RNA (1)...(19): siRNA sense strand
gaaauagaggaguuagaua

SEQ ID NO: 405818 - RNA, 19 nt, Homo sapiens
  misc_RNA (1)...(19): siRNA sense strand
gaaggaauccaaagagaga

SEQ ID NO: 405819 - RNA, 19 nt, Homo sapiens
  misc_RNA (1)...(19): siRNA sense strand
caacaaauggaucaaauug

SEQ ID NO: 405820 - RNA, 19 nt, Homo sapiens
  misc_RNA (1)...(19): siRNA sense strand
uggaaagccuugcagauaa

SEQ ID NO: 405821 - RNA, 19 nt, Homo sapiens
  misc_RNA (1)...(19): siRNA sense strand
aaacaaaggcuaucaaaca

SEQ ID NO: 405822 - RNA, 19 nt, Homo sapiens
  misc_RNA (1)...(19): siRNA sense strand
ugacagcccucacaccaaa

SEQ ID NO: 405823 - RNA, 19 nt, Homo sapiens
  misc_RNA (1)...(19): siRNA sense strand
agaagucccugauugaauu

SEQ ID NO: 405824 - RNA, 19 nt, Homo sapiens
  misc_RNA (1)...(19): siRNA sense strand
ugaaagacaugaggaaaga

SEQ ID NO: 405825 - RNA, 19 nt, Homo sapiens
  misc_RNA (1)...(19): siRNA sense strand
ggaaacaaaggcuaucaaa

SEQ ID NO: 405826 - RNA, 19 nt, Homo sapiens
  misc_RNA (1)...(19): siRNA sense strand
aaagagagauggagaacau

SEQ ID NO: 405827 - RNA, 19 nt, Homo sapiens
  misc_RNA (1)...(19): siRNA sense strand
ccaaagcagugguuaaaca

SEQ ID NO: 405828 - RNA, 19 nt, Homo sapiens
  misc_RNA (1)...(19): siRNA sense strand
aaacucgucuuacugcuuu

SEQ ID NO: 405829 - RNA, 19 nt, Homo sapiens
  misc_RNA (1)...(19): siRNA sense strand
gacaguuucucccuuauau

SEQ ID NO: 405830 - RNA, 19 nt, Homo sapiens
  misc_RNA (1)...(19): siRNA sense strand
ugaagagacucaauagaau

SEQ ID NO: 405831 - RNA, 19 nt, Homo sapiens
  misc_RNA (1)...(19): siRNA sense strand
uggagaagauuuagaaguu

SEQ ID NO: 405832 - RNA, 19 nt, Homo sapiens
  misc_RNA (1)...(19): siRNA sense strand
gauaugcuugcuucuauua

SEQ ID NO: 405833 - RNA, 19 nt, Homo sapiens
  misc_RNA (1)...(19): siRNA sense strand
gacaacaaauggaucaaau

SEQ ID NO: 405834 - RNA, 19 nt, Homo sapiens
  misc_RNA (1)...(19): siRNA sense strand
guagaggaacuauuuguaa

SEQ ID NO: 405835 - RNA, 19 nt, Homo sapiens
  misc_RNA (1)...(19): siRNA sense strand
uaaagaagcccaacuacug

SEQ ID NO: 405836 - RNA, 19 nt, Homo sapiens
  misc_RNA (1)...(19): siRNA sense strand
ggucagagaagaggaaaua

SEQ ID NO: 405837 - RNA, 19 nt, Homo sapiens
  misc_RNA (1)...(19): siRNA sense strand
aacagaaggugauaucuuu

SEQ ID NO: 405838 - RNA, 19 nt, Homo sapiens
  misc_RNA (1)...(19): siRNA sense strand
gacuugaacuuauugagaa

SEQ ID NO: 405839 - RNA, 19 nt, Homo sapiens
  misc_RNA (1)...(19): siRNA sense strand
ugaaggacuugaacuuauu

SEQ ID NO: 405840 - RNA, 19 nt, Homo sapiens
  misc_RNA (1)...(19): siRNA sense strand
gugaaagaauggaugauug

SEQ ID NO: 405841 - RNA, 19 nt, Homo sapiens
  misc_RNA (1)...(19): siRNA sense strand
ugacaucuaucucaacguu

SEQ ID NO: 405842 - RNA, 19 nt, Homo sapiens
  misc_RNA (1)...(19): siRNA sense strand
uuaaaggacucuucucuuc

SEQ ID NO: 405843 - RNA, 19 nt, Homo sapiens
  misc_RNA (1)...(19): siRNA sense strand
ggaugugacuccugauaug

SEQ ID NO: 405844 - RNA, 19 nt, Homo sapiens
  misc_RNA (1)...(19): siRNA sense strand
gagaagauuuagaaguuuc

SEQ ID NO: 405845 - RNA, 19 nt, Homo sapiens
  misc_RNA (1)...(19): siRNA sense strand
gauaaauguuggcauaagu

SEQ ID NO: 405846 - RNA, 19 nt, Homo sapiens
  misc_RNA (1)...(19): siRNA sense strand
uggacuaucuacugcauua

SEQ ID NO: 405847 - RNA, 19 nt, Homo sapiens
  misc_RNA (1)...(19): siRNA sense strand
gaacugccagccauuacua

SEQ ID NO: 405848 - RNA, 19 nt, Homo sapiens
  misc_RNA (1)...(19): siRNA sense strand
cagaaggacuuaugugcuu

SEQ ID NO: 405849 - RNA, 19 nt, Homo sapiens
  misc_RNA (1)...(19): siRNA sense strand
caaauugcaugcugaccaa

SEQ ID NO: 405850 - RNA, 19 nt, Homo sapiens
  misc_RNA (1)...(19): siRNA sense strand
gaaagaccauguauuuagc

SEQ ID NO: 405851 - RNA, 19 nt, Homo sapiens
  misc_RNA (1)...(19): siRNA sense strand
ggacguggcugcaaaucag

SEQ ID NO: 405852 - RNA, 19 nt, Homo sapiens
  misc_RNA (1)...(19): siRNA sense strand
caaauacccuacuucaaag

SEQ ID NO: 405853 - RNA, 19 nt, Homo sapiens
  misc_RNA (1)...(19): siRNA sense strand
caacaaauacccuacuuca

SEQ ID NO: 405854 - RNA, 19 nt, Homo sapiens
  misc_RNA (1)...(19): siRNA sense strand
gaccuuuaaugaacucuuu

SEQ ID NO: 405855 - RNA, 19 nt, Homo sapiens
  misc_RNA (1)...(19): siRNA sense strand
gaaacccaauugagaguca

SEQ ID NO: 405856 - RNA, 19 nt, Homo sapiens
  misc_RNA (1)...(19): siRNA sense strand
gaaugcagcuagaauuguc

SEQ ID NO: 405857 - RNA, 19 nt, Homo sapiens
  misc_RNA (1)...(19): siRNA sense strand
gaaagaggcccuguucuag

SEQ ID NO: 405858 - RNA, 19 nt, Homo sapiens
  misc_RNA (1)...(19): siRNA sense strand
aagaauggaugauuggaaa

SEQ ID NO: 405859 - RNA, 19 nt, Homo sapiens
  misc_RNA (1)...(19): siRNA sense strand
ucagagucuucaacaaaua

SEQ ID NO: 405860 - RNA, 19 nt, Homo sapiens
  misc_RNA (1)...(19): siRNA sense strand
gaagguggauggcucugua

SEQ ID NO: 405861 - RNA, 19 nt, Homo sapiens
  misc_RNA (1)...(19): siRNA sense strand
caacagaccuuuggauuuc

SEQ ID NO: 405862 - RNA, 19 nt, Homo sapiens
  misc_RNA (1)...(19): siRNA sense strand
ccauaaaugucucucagaa

SEQ ID NO: 405863 - RNA, 19 nt, Homo sapiens
  misc_RNA (1)...(19): siRNA sense strand
gcaaagaacggcagauuac

SEQ ID NO: 405864 - RNA, 19 nt, Homo sapiens
  misc_RNA (1)...(19): siRNA sense strand
auaaaugucucucagaaga

SEQ ID NO: 405865 - RNA, 19 nt, Homo sapiens
  misc_RNA (1)...(19): siRNA sense strand
gaaaugaugaaguuaaugg

SEQ ID NO: 405866 - RNA, 19 nt, Homo sapiens
  misc_RNA (1)...(19): siRNA sense strand
ggcaguacaugaaucgaaa

SEQ ID NO: 405867 - RNA, 19 nt, Homo sapiens
  misc_RNA (1)...(19): siRNA sense strand
caaaacagaggaagaaaua

SEQ ID NO: 405868 - RNA, 19 nt, Homo sapiens
  misc_RNA (1)...(19): siRNA sense strand
gaaagaagagaugaggaaa

SEQ ID NO: 405869 - RNA, 19 nt, Homo sapiens
  misc_RNA (1)...(19): siRNA sense strand
guggauggcucuguaaaug

SEQ ID NO: 405870 - RNA, 19 nt, Homo sapiens
  misc_RNA (1)...(19): siRNA sense strand
ggaagaaauagaaaugaug

SEQ ID NO: 405871 - RNA, 19 nt, Homo sapiens
  misc_RNA (1)...(19): siRNA sense strand
gagcaaagaacggcagauu

SEQ ID NO: 405872 - RNA, 19 nt, Homo sapiens
  misc_RNA (1)...(19): siRNA sense strand
ucaacagaccuuuggauuu

SEQ ID NO: 405873 - RNA, 19 nt, Homo sapiens
  misc_RNA (1)...(19): siRNA sense strand
aaacagaggaagaaauaga

SEQ ID NO: 405874 - RNA, 19 nt, Homo sapiens
  misc_RNA (1)...(19): siRNA sense strand
cgaagacgcucccgaucuc

SEQ ID NO: 405875 - RNA, 19 nt, Homo sapiens
  misc_RNA (1)...(19): siRNA sense strand
ggauuugccuccuuugacu

SEQ ID NO: 405876 - RNA, 19 nt, Homo sapiens
  misc_RNA (1)...(19): siRNA sense strand
gaagagaugaggaaaagaa

SEQ ID NO: 405877 - RNA, 19 nt, Homo sapiens
  misc_RNA (1)...(19): siRNA sense strand
gaggaagaaauagaaauga

SEQ ID NO: 405878 - RNA, 19 nt, Homo sapiens
  misc_RNA (1)...(19): siRNA sense strand
gauuacugaggaagacuua

SEQ ID NO: 405879 - RNA, 19 nt, Homo sapiens
  misc_RNA (1)...(19): siRNA sense strand
gaaagaaagaagagaugag

SEQ ID NO: 405880 - RNA, 19 nt, Homo sapiens
  misc_RNA (1)...(19): siRNA sense strand
ccacaucccgggagagaga

SEQ ID NO: 405881 - RNA, 19 nt, Homo sapiens
  misc_RNA (1)...(19): siRNA sense strand
ugaugaaguuaaugggauu

SEQ ID NO: 405882 - RNA, 19 nt, Homo sapiens
  misc_RNA (1)...(19): siRNA sense strand
gaaacaaagagcaaagaac

SEQ ID NO: 405883 - RNA, 19 nt, Homo sapiens
  misc_RNA (1)...(19): siRNA sense strand
agaaagaagagaugaggaa

SEQ ID NO: 405884 - RNA, 19 nt, Homo sapiens
  misc_RNA (1)...(19): siRNA sense strand
gcagauuacugaggaagac

SEQ ID NO: 405885 - RNA, 19 nt, Homo sapiens
  misc_RNA (1)...(19): siRNA sense strand
aaugggauuugccuccuuu

SEQ ID NO: 405886 - RNA, 19 nt, Homo sapiens
  misc_RNA (1)...(19): siRNA sense strand
aagaacggcagauuacuga

SEQ ID NO: 405887 - RNA, 19 nt, Homo sapiens
  misc_RNA (1)...(19): siRNA sense strand
guacaugaaucgaaaaggu

SEQ ID NO: 405888 - RNA, 19 nt, Homo sapiens
  misc_RNA (1)...(19): siRNA sense strand
ugaaagaaagaagagauga

SEQ ID NO: 405889 - RNA, 19 nt, Homo sapiens
  misc_RNA (1)...(19): siRNA sense strand
agcaaagaacggcagauua

SEQ ID NO: 405890 - RNA, 19 nt, Homo sapiens
  misc_RNA (1)...(19): siRNA sense strand
agaggaagaaauagaaaug

SEQ ID NO: 405891 - RNA, 19 nt, Homo sapiens
  misc_RNA (1)...(19): siRNA sense strand
gagagagaucggagaagga

SEQ ID NO: 405892 - RNA, 19 nt, Homo sapiens
  misc_RNA (1)...(19): siRNA sense strand
agaaacaaagagcaaagaa

SEQ ID NO: 405893 - RNA, 19 nt, Homo sapiens
  misc_RNA (1)...(19): siRNA sense strand
aaagaacggcagauuacug

SEQ ID NO: 405894 - RNA, 19 nt, Homo sapiens
  misc_RNA (1)...(19): siRNA sense strand
caaaagaaacaaagagcaa

SEQ ID NO: 405895 - RNA, 19 nt, Homo sapiens
  misc_RNA (1)...(19): siRNA sense strand
ggauucaacagaccuuugg

SEQ ID NO: 405896 - RNA, 19 nt, Homo sapiens
  misc_RNA (1)...(19): siRNA sense strand
uaaugggauuugccuccuu

SEQ ID NO: 405897 - RNA, 19 nt, Homo sapiens
  misc_RNA (1)...(19): siRNA sense strand
gagaugaggaaaagaaaga

SEQ ID NO: 405898 - RNA, 19 nt, Homo sapiens
  misc_RNA (1)...(19): siRNA sense strand
gguggauggcucuguaaau

SEQ ID NO: 405899 - RNA, 19 nt, Homo sapiens
  misc_RNA (1)...(19): siRNA sense strand
uuacugaggaagacuuaga

SEQ ID NO: 405900 - RNA, 19 nt, Homo sapiens
  misc_RNA (1)...(19): siRNA sense strand
gcaaaacagaggaagaaau

SEQ ID NO: 405901 - RNA, 19 nt, Homo sapiens
  misc_RNA (1)...(19): siRNA sense strand
cagaggaagaaauagaaau

SEQ ID NO: 405902 - RNA, 19 nt, Homo sapiens
  misc_RNA (1)...(19): siRNA sense strand
aaagaaacaaagagcaaag

SEQ ID NO: 405903 - RNA, 19 nt, Homo sapiens
  misc_RNA (1)...(19): siRNA sense strand
gaugaaguuaaugggauuu

SEQ ID NO: 405904 - RNA, 19 nt, Homo sapiens
  misc_RNA (1)...(19): siRNA sense strand
acagaggaagaaauagaaa

SEQ ID NO: 405905 - RNA, 19 nt, Homo sapiens
  misc_RNA (1)...(19): siRNA sense strand
cgacugaaagaaagaagag

SEQ ID NO: 405906 - RNA, 19 nt, Homo sapiens
  misc_RNA (1)...(19): siRNA sense strand
ggaagacuuagagggcaaa

SEQ ID NO: 405907 - RNA, 19 nt, Homo sapiens
  misc_RNA (1)...(19): siRNA sense strand
gccauaaaugucucucaga

SEQ ID NO: 405908 - RNA, 19 nt, Homo sapiens
  misc_RNA (1)...(19): siRNA sense strand
aacagaggaagaaauagaa

SEQ ID NO: 405909 - RNA, 19 nt, Homo sapiens
  misc_RNA (1)...(19): siRNA sense strand
ucuccaagacgacauagau

SEQ ID NO: 405910 - RNA, 19 nt, Homo sapiens
  misc_RNA (1)...(19): siRNA sense strand
gaagguggucauaauauua

SEQ ID NO: 405911 - RNA, 19 nt, Homo sapiens
  misc_RNA (1)...(19): siRNA sense strand
ggaagguggucauaauauu

SEQ ID NO: 405912 - RNA, 19 nt, Homo sapiens
  misc_RNA (1)...(19): siRNA sense strand
gaauguacucugugcauga

SEQ ID NO: 405913 - RNA, 19 nt, Homo sapiens
  misc_RNA (1)...(19): siRNA sense strand
cagggaagguggucauaau

SEQ ID NO: 405914 - RNA, 19 nt, Homo sapiens
  misc_RNA (1)...(19): siRNA sense strand
caguauagauuaccaggau

SEQ ID NO: 405915 - RNA, 19 nt, Homo sapiens
  misc_RNA (1)...(19): siRNA sense strand
gccaaugaauguacucugu

SEQ ID NO: 405916 - RNA, 19 nt, Homo sapiens
  misc_RNA (1)...(19): siRNA sense strand
ccacuuaugccaaugaaug

SEQ ID NO: 405917 - RNA, 19 nt, Homo sapiens
  misc_RNA (1)...(19): siRNA sense strand
gggaagguggucauaauau

SEQ ID NO: 405918 - RNA, 19 nt, Homo sapiens
  misc_RNA (1)...(19): siRNA sense strand
ucucugaucccucaauuug

SEQ ID NO: 405919 - RNA, 19 nt, Homo sapiens
  misc_RNA (1)...(19): siRNA sense strand
cauguccacuuaugccaau

SEQ ID NO: 405920 - RNA, 19 nt, Homo sapiens
  misc_RNA (1)...(19): siRNA sense strand
ccucucugaucccucaauu

SEQ ID NO: 405921 - RNA, 19 nt, Homo sapiens
  misc_RNA (1)...(19): siRNA sense strand
aaauauagaacgccaaacu

SEQ ID NO: 405922 - RNA, 19 nt, Homo sapiens
  misc_RNA (1)...(19): siRNA sense strand
aauguacucugugcaugaa

SEQ ID NO: 405923 - RNA, 19 nt, Homo sapiens
  misc_RNA (1)...(19): siRNA sense strand
ucugaucccucaauuuggu

SEQ ID NO: 405924 - RNA, 19 nt, Homo sapiens
  misc_RNA (1)...(19): siRNA sense strand
guauagauuaccaggaugu

SEQ ID NO: 405925 - RNA, 19 nt, Homo sapiens
  misc_RNA (1)...(19): siRNA sense strand
caaaauauagaacgccaaa

SEQ ID NO: 405926 - RNA, 19 nt, Homo sapiens
  misc_RNA (1)...(19): siRNA sense strand
ucagggaagguggucauaa

SEQ ID NO: 405927 - RNA, 19 nt, Homo sapiens
  misc_RNA (1)...(19): siRNA sense strand
agggaagguggucauaaua

SEQ ID NO: 405928 - RNA, 19 nt, Homo sapiens
  misc_RNA (1)...(19): siRNA sense strand
gaacgccaaacugcucuca

SEQ ID NO: 405929 - RNA, 19 nt, Homo sapiens
  misc_RNA (1)...(19): siRNA sense strand
guccacuuaugccaaugaa

SEQ ID NO: 405930 - RNA, 19 nt, Homo sapiens
  misc_RNA (1)...(19): siRNA sense strand
gaaaagagauggaaacuua

SEQ ID NO: 405931 - RNA, 19 nt, Homo sapiens
  misc_RNA (1)...(19): siRNA sense strand
gaagaagauuccuggauuu

SEQ ID NO: 405932 - RNA, 19 nt, Homo sapiens
  misc_RNA (1)...(19): siRNA sense strand
ccagauggcugcacagaaa

SEQ ID NO: 405933 - RNA, 19 nt, Homo sapiens
  misc_RNA (1)...(19): siRNA sense strand
gaaacuuacuugaagaaga

SEQ ID NO: 405934 - RNA, 19 nt, Homo sapiens
  misc_RNA (1)...(19): siRNA sense strand
ugaagaagauuccuggauu

SEQ ID NO: 405935 - RNA, 19 nt, Homo sapiens
  misc_RNA (1)...(19): siRNA sense strand
ggucagccauguccaauga

SEQ ID NO: 405936 - RNA, 19 nt, Homo sapiens
  misc_RNA (1)...(19): siRNA sense strand
gauggaaacuuacuugaag

SEQ ID NO: 405937 - RNA, 19 nt, Homo sapiens
  misc_RNA (1)...(19): siRNA sense strand
guauuaaccugauccuuug

SEQ ID NO: 405938 - RNA, 19 nt, Homo sapiens
  misc_RNA (1)...(19): siRNA sense strand
gugaugugcugguugguua

SEQ ID NO: 405939 - RNA, 19 nt, Homo sapiens
  misc_RNA (1)...(19): siRNA sense strand
ccaugaggcugauauaaau

SEQ ID NO: 405940 - RNA, 19 nt, Homo sapiens
  misc_RNA (1)...(19): siRNA sense strand
guacagcccugaugcaaag

SEQ ID NO: 405941 - RNA, 19 nt, Homo sapiens
  misc_RNA (1)...(19): siRNA sense strand
gaaaacaaguucuucauca

SEQ ID NO: 405942 - RNA, 19 nt, Homo sapiens
  misc_RNA (1)...(19): siRNA sense strand
gggcugcucuauacauauu

SEQ ID NO: 405943 - RNA, 19 nt, Homo sapiens
  misc_RNA (1)...(19): siRNA sense strand
cguuguggcuucuauuaua

SEQ ID NO: 405944 - RNA, 19 nt, Homo sapiens
  misc_RNA (1)...(19): siRNA sense strand
gcacugucguauccuauau

SEQ ID NO: 405945 - RNA, 19 nt, Homo sapiens
  misc_RNA (1)...(19): siRNA sense strand
caaaauugcugcccuuauu

SEQ ID NO: 405946 - RNA, 19 nt, Homo sapiens
  misc_RNA (1)...(19): siRNA sense strand
ggucuuuacuggauucaga

SEQ ID NO: 405947 - RNA, 19 nt, Homo sapiens
  misc_RNA (1)...(19): siRNA sense strand
agauaaagauugugaugug

SEQ ID NO: 405948 - RNA, 19 nt, Homo sapiens
  misc_RNA (1)...(19): siRNA sense strand
guugugguaugcugcuuua

SEQ ID NO: 405949 - RNA, 19 nt, Homo sapiens
  misc_RNA (1)...(19): siRNA sense strand
gaagauuccuggauuuugu

SEQ ID NO: 405950 - RNA, 19 nt, Homo sapiens
  misc_RNA (1)...(19): siRNA sense strand
aacaaguucuucaucagua

SEQ ID NO: 405951 - RNA, 19 nt, Homo sapiens
  misc_RNA (1)...(19): siRNA sense strand
gaaucaugguuggcucuuu

SEQ ID NO: 405952 - RNA, 19 nt, Homo sapiens
  misc_RNA (1)...(19): siRNA sense strand
gcagauaaagauugugaug

SEQ ID NO: 405953 - RNA, 19 nt, Homo sapiens
  misc_RNA (1)...(19): siRNA sense strand
ccucauuuaugcuuucauu

SEQ ID NO: 405954 - RNA, 19 nt, Homo sapiens
  misc_RNA (1)...(19): siRNA sense strand
gaaagagggagugcaguau

SEQ ID NO: 405955 - RNA, 19 nt, Homo sapiens
  misc_RNA (1)...(19): siRNA sense strand
cugcucauguucaaaguaa

SEQ ID NO: 405956 - RNA, 19 nt, Homo sapiens
  misc_RNA (1)...(19): siRNA sense strand
gggucugccuccugcuuua

SEQ ID NO: 405957 - RNA, 19 nt, Homo sapiens
  misc_RNA (1)...(19): siRNA sense strand
gagcuuuauuacacgcaua

SEQ ID NO: 405958 - RNA, 19 nt, Homo sapiens
  misc_RNA (1)...(19): siRNA sense strand
aaagagggagugcaguaua

SEQ ID NO: 405959 - RNA, 19 nt, Homo sapiens
  misc_RNA (1)...(19): siRNA sense strand
uuauaucgauccacccaaa

SEQ ID NO: 405960 - RNA, 19 nt, Homo sapiens
  misc_RNA (1)...(19): siRNA sense strand
agaaagagggagugcagua

SEQ ID NO: 405961 - RNA, 19 nt, Homo sapiens
  misc_RNA (1)...(19): siRNA sense strand
gagugggucuuuacuggau

SEQ ID NO: 405962 - RNA, 19 nt, Homo sapiens
  misc_RNA (1)...(19): siRNA sense strand
aaccugaugagcuuuauua

SEQ ID NO: 405963 - RNA, 19 nt, Homo sapiens
  misc_RNA (1)...(19): siRNA sense strand
aguauuaaccugauccuuu

SEQ ID NO: 405964 - RNA, 19 nt, Homo sapiens
  misc_RNA (1)...(19): siRNA sense strand
guauagcuacuccuuauuc

SEQ ID NO: 405965 - RNA, 19 nt, Homo sapiens
  misc_RNA (1)...(19): siRNA sense strand
guuguggcuucuauuauau

SEQ ID NO: 405966 - RNA, 19 nt, Homo sapiens
  misc_RNA (1)...(19): siRNA sense strand
cauguuugcuguguaguug

SEQ ID NO: 405967 - RNA, 19 nt, Homo sapiens
  misc_RNA (1)...(19): siRNA sense strand
gagcggcaguacacaaugg

SEQ ID NO: 405968 - RNA, 19 nt, Homo sapiens
  misc_RNA (1)...(19): siRNA sense strand
gcagcggugccucauguuu

SEQ ID NO: 405969 - RNA, 19 nt, Homo sapiens
  misc_RNA (1)...(19): siRNA sense strand
gagauggaaacuuacuuga

SEQ ID NO: 405970 - RNA, 19 nt, Homo sapiens
  misc_RNA (1)...(19): siRNA sense strand
gcaaaguuucagagcauga

SEQ ID NO: 405971 - RNA, 19 nt, Homo sapiens
  misc_RNA (1)...(19): siRNA sense strand
uguaguugcuguccuaaca

SEQ ID NO: 405972 - RNA, 19 nt, Homo sapiens
  misc_RNA (1)...(19): siRNA sense strand
ugacucgccucauuuaugc

SEQ ID NO: 405973 - RNA, 19 nt, Homo sapiens
  misc_RNA (1)...(19): siRNA sense strand
gaagaaggaaacccaaggu

SEQ ID NO: 405974 - RNA, 19 nt, Homo sapiens
  misc_RNA (1)...(19): siRNA sense strand
ugucguauccuauaucaug

SEQ ID NO: 405975 - RNA, 19 nt, Homo sapiens
  misc_RNA (1)...(19): siRNA sense strand
cacggugacucgccucauu

SEQ ID NO: 405976 - RNA, 19 nt, Homo sapiens
  misc_RNA (1)...(19): siRNA sense strand
cugaugagcuuuauuacac

SEQ ID NO: 405977 - RNA, 19 nt, Homo sapiens
  misc_RNA (1)...(19): siRNA sense strand
aaucauggguaaaucgaau

SEQ ID NO: 405978 - RNA, 19 nt, Homo sapiens
  misc_RNA (1)...(19): siRNA sense strand
gguuggcucuuucuacauc

SEQ ID NO: 405979 - RNA, 19 nt, Homo sapiens
  misc_RNA (1)...(19): siRNA sense strand
ccuauaucaugcagagaaa

SEQ ID NO: 405980 - RNA, 19 nt, Homo sapiens
  misc_RNA (1)...(19): siRNA sense strand
ucgggcugcucuauacaua

SEQ ID NO: 405981 - RNA, 19 nt, Homo sapiens
  misc_RNA (1)...(19): siRNA sense strand
ucaucacccucuacacuau

SEQ ID NO: 405982 - RNA, 19 nt, Homo sapiens
  misc_RNA (1)...(19): siRNA sense strand
gcugauauaaaugcagaua

SEQ ID NO: 405983 - RNA, 19 nt, Homo sapiens
  misc_RNA (1)...(19): siRNA sense strand
aaucaugguuggcucuuuc

SEQ ID NO: 405984 - RNA, 19 nt, Homo sapiens
  misc_RNA (1)...(19): siRNA sense strand
cauccgcacuuccacuaau

SEQ ID NO: 405985 - RNA, 19 nt, Homo sapiens
  misc_RNA (1)...(19): siRNA sense strand
cagcccugaugcaaaguuu

SEQ ID NO: 405986 - RNA, 19 nt, Homo sapiens
  misc_RNA (1)...(19): siRNA sense strand
aagagggagugcaguauag

SEQ ID NO: 405987 - RNA, 19 nt, Homo sapiens
  misc_RNA (1)...(19): siRNA sense strand
ccacuaauagccaaguaga

SEQ ID NO: 405988 - RNA, 19 nt, Homo sapiens
  misc_RNA (1)...(19): siRNA sense strand
guuuguuguuggcaugaua

SEQ ID NO: 405989 - RNA, 19 nt, Homo sapiens
  misc_RNA (1)...(19): siRNA sense strand
ugagcacugucguauccua

SEQ ID NO: 405990 - RNA, 19 nt, Homo sapiens
  misc_RNA (1)...(19): siRNA sense strand
gcuuuacugucuuucacaa

SEQ ID NO: 405991 - RNA, 19 nt, Homo sapiens
  misc_RNA (1)...(19): siRNA sense strand
gugguaugcugcuuuacug

SEQ ID NO: 405992 - RNA, 19 nt, Homo sapiens
  misc_RNA (1)...(19): siRNA sense strand
acaaguucuucaucaguau

SEQ ID NO: 405993 - RNA, 19 nt, Homo sapiens
  misc_RNA (1)...(19): siRNA sense strand
ccucauguuugcuguguag

SEQ ID NO: 405994 - RNA, 19 nt, Homo sapiens
  misc_RNA (1)...(19): siRNA sense strand
cugcuuggcuuccuuguac

SEQ ID NO: 405995 - RNA, 19 nt, Homo sapiens
  misc_RNA (1)...(19): siRNA sense strand
uccaugaggcugauauaaa

SEQ ID NO: 405996 - RNA, 19 nt, Homo sapiens
  misc_RNA (1)...(19): siRNA sense strand
gguacagcccugaugcaaa

SEQ ID NO: 405997 - RNA, 19 nt, Homo sapiens
  misc_RNA (1)...(19): siRNA sense strand
cugcagcggugccucaugu

SEQ ID NO: 405998 - RNA, 19 nt, Homo sapiens
  misc_RNA (1)...(19): siRNA sense strand
gugacucgccucauuuaug

SEQ ID NO: 405999 - RNA, 19 nt, Homo sapiens
  misc_RNA (1)...(19): siRNA sense strand
gaugugcugguugguuaua

SEQ ID NO: 406000 - RNA, 19 nt, Homo sapiens
  misc_RNA (1)...(19): siRNA sense strand
guaugcugcuuuacugucu

SEQ ID NO: 406001 - RNA, 19 nt, Homo sapiens
  misc_RNA (1)...(19): siRNA sense strand
guaaaucgaauggaagaag

SEQ ID NO: 406002 - RNA, 19 nt, Homo sapiens
  misc_RNA (1)...(19): siRNA sense strand
ggguaaaucgaauggaaga

SEQ ID NO: 406003 - RNA, 19 nt, Homo sapiens
  misc_RNA (1)...(19): siRNA sense strand
ggcaguacacaauggguuu

SEQ ID NO: 406004 - RNA, 19 nt, Homo sapiens
  misc_RNA (1)...(19): siRNA sense strand
aaacaaguucuucaucagu

SEQ ID NO: 406005 - RNA, 19 nt, Homo sapiens
  misc_RNA (1)...(19): siRNA sense strand
uggcuucuauuauaucgau

SEQ ID NO: 406006 - RNA, 19 nt, Homo sapiens
  misc_RNA (1)...(19): siRNA sense strand
cagcggugccucauguuug

SEQ ID NO: 406007 - RNA, 19 nt, Homo sapiens
  misc_RNA (1)...(19): siRNA sense strand
uguccuaacaguaagaauu

SEQ ID NO: 406008 - RNA, 19 nt, Homo sapiens
  misc_RNA (1)...(19): siRNA sense strand
gaaucauggguaaaucgaa

SEQ ID NO: 406009 - RNA, 19 nt, Homo sapiens
  misc_RNA (1)...(19): siRNA sense strand
cgucauccuuggugauaca

SEQ ID NO: 406010 - RNA, 19 nt, Homo sapiens
  misc_RNA (1)...(19): siRNA sense strand
ccugaucguuccugcaauc

SEQ ID NO: 406011 - RNA, 19 nt, Homo sapiens
  misc_RNA (1)...(19): siRNA sense strand
guuauaaagcuguguaucg

SEQ ID NO: 406012 - RNA, 19 nt, Homo sapiens
  misc_RNA (1)...(19): siRNA sense strand
guccuaacaguaagaauuc

SEQ ID NO: 406013 - RNA, 19 nt, Homo sapiens
  misc_RNA (1)...(19): siRNA sense strand
agagauggaaacuuacuug

SEQ ID NO: 406014 - RNA, 19 nt, Homo sapiens
  misc_RNA (1)...(19): siRNA sense strand
gcugguugguuauaaagcu

SEQ ID NO: 406015 - RNA, 19 nt, Homo sapiens
  misc_RNA (1)...(19): siRNA sense strand
ggacuguuugucuuuguuc

SEQ ID NO: 406016 - RNA, 19 nt, Homo sapiens
  misc_RNA (1)...(19): siRNA sense strand
uuauuggacuguuugucuu

SEQ ID NO: 406017 - RNA, 19 nt, Homo sapiens
  misc_RNA (1)...(19): siRNA sense strand
aacccuggcuccuggaaau

SEQ ID NO: 406018 - RNA, 19 nt, Homo sapiens
  misc_RNA (1)...(19): siRNA sense strand
caaguucuucaucaguauu

SEQ ID NO: 406019 - RNA, 19 nt, Homo sapiens
  misc_RNA (1)...(19): siRNA sense strand
uauauccugucaaucaucu

SEQ ID NO: 406020 - RNA, 19 nt, Homo sapiens
  misc_RNA (1)...(19): siRNA sense strand
ugugcugguugguuauaaa

SEQ ID NO: 406021 - RNA, 19 nt, Homo sapiens
  misc_RNA (1)...(19): siRNA sense strand
ugccagugaugaagaagau

SEQ ID NO: 406022 - RNA, 19 nt, Homo sapiens
  misc_RNA (1)...(19): siRNA sense strand
gcauccgcacuuccacuaa

SEQ ID NO: 406023 - RNA, 19 nt, Homo sapiens
  misc_RNA (1)...(19): siRNA sense strand
agauggaaacuuacuugaa

SEQ ID NO: 406024 - RNA, 19 nt, Homo sapiens
  misc_RNA (1)...(19): siRNA sense strand
gagcacugucguauccuau

SEQ ID NO: 406025 - RNA, 19 nt, Homo sapiens
  misc_RNA (1)...(19): siRNA sense strand
aaagcuguguaucggauca

SEQ ID NO: 406026 - RNA, 19 nt, Homo sapiens
  misc_RNA (1)...(19): siRNA sense strand
ccugagcacugucguaucc

SEQ ID NO: 406027 - RNA, 19 nt, Homo sapiens
  misc_RNA (1)...(19): siRNA sense strand
cauuuaugcuuucauucuc

SEQ ID NO: 406028 - RNA, 19 nt, Homo sapiens
  misc_RNA (1)...(19): siRNA sense strand
ccaaccugaugagcuuuau

SEQ ID NO: 406029 - RNA, 19 nt, Homo sapiens
  misc_RNA (1)...(19): siRNA sense strand
cggugacucgccucauuua

SEQ ID NO: 406030 - RNA, 19 nt, Homo sapiens
  misc_RNA (1)...(19): siRNA sense strand
gaaaagagauggaaacuua

SEQ ID NO: 406031 - RNA, 19 nt, Homo sapiens
  misc_RNA (1)...(19): siRNA sense strand
gaagaagauuccuggauuu

SEQ ID NO: 406032 - RNA, 19 nt, Homo sapiens
  misc_RNA (1)...(19): siRNA sense strand
ccagauggcugcacagaaa

SEQ ID NO: 406033 - RNA, 19 nt, Homo sapiens
  misc_RNA (1)...(19): siRNA sense strand
gaaacuuacuugaagaaga

SEQ ID NO: 406034 - RNA, 19 nt, Homo sapiens
  misc_RNA (1)...(19): siRNA sense strand
ugaagaagauuccuggauu

SEQ ID NO: 406035 - RNA, 19 nt, Homo sapiens
  misc_RNA (1)...(19): siRNA sense strand
ggucagccauguccaauga

SEQ ID NO: 406036 - RNA, 19 nt, Homo sapiens
  misc_RNA (1)...(19): siRNA sense strand
gauggaaacuuacuugaag

SEQ ID NO: 406037 - RNA, 19 nt, Homo sapiens
  misc_RNA (1)...(19): siRNA sense strand
guauuaaccugauccuuug

SEQ ID NO: 406038 - RNA, 19 nt, Homo sapiens
  misc_RNA (1)...(19): siRNA sense strand
gugaugugcugguugguua

SEQ ID NO: 406039 - RNA, 19 nt, Homo sapiens
  misc_RNA (1)...(19): siRNA sense strand
ccaugaggcugauauaaau

SEQ ID NO: 406040 - RNA, 19 nt, Homo sapiens
  misc_RNA (1)...(19): siRNA sense strand
guacagcccugaugcaaag

SEQ ID NO: 406041 - RNA, 19 nt, Homo sapiens
  misc_RNA (1)...(19): siRNA sense strand
gaaaacaaguucuucauca

SEQ ID NO: 406042 - RNA, 19 nt, Homo sapiens
  misc_RNA (1)...(19): siRNA sense strand
gggcugcucuauacauauu

SEQ ID NO: 406043 - RNA, 19 nt, Homo sapiens
  misc_RNA (1)...(19): siRNA sense strand
cguuguggcuucuauuaua

SEQ ID NO: 406044 - RNA, 19 nt, Homo sapiens
  misc_RNA (1)...(19): siRNA sense strand
gcacugucguauccuauau

SEQ ID NO: 406045 - RNA, 19 nt, Homo sapiens
  misc_RNA (1)...(19): siRNA sense strand
caaaauugcugcccuuauu

SEQ ID NO: 406046 - RNA, 19 nt, Homo sapiens
  misc_RNA (1)...(19): siRNA sense strand
ggucuuuacuggauucaga

SEQ ID NO: 406047 - RNA, 19 nt, Homo sapiens
  misc_RNA (1)...(19): siRNA sense strand
agauaaagauugugaugug

SEQ ID NO: 406048 - RNA, 19 nt, Homo sapiens
  misc_RNA (1)...(19): siRNA sense strand
guugugguaugcugcuuua

SEQ ID NO: 406049 - RNA, 19 nt, Homo sapiens
  misc_RNA (1)...(19): siRNA sense strand
gaagauuccuggauuuugu

SEQ ID NO: 406050 - RNA, 19 nt, Homo sapiens
  misc_RNA (1)...(19): siRNA sense strand
aacaaguucuucaucagua

SEQ ID NO: 406051 - RNA, 19 nt, Homo sapiens
  misc_RNA (1)...(19): siRNA sense strand
gaaucaugguuggcucuuu

SEQ ID NO: 406052 - RNA, 19 nt, Homo sapiens
  misc_RNA (1)...(19): siRNA sense strand
gcagauaaagauugugaug

SEQ ID NO: 406053 - RNA, 19 nt, Homo sapiens
  misc_RNA (1)...(19): siRNA sense strand
ccucauuuaugcuuucauu

SEQ ID NO: 406054 - RNA, 19 nt, Homo sapiens
  misc_RNA (1)...(19): siRNA sense strand
gaaagagggagugcaguau

SEQ ID NO: 406055 - RNA, 19 nt, Homo sapiens
  misc_RNA (1)...(19): siRNA sense strand
cugcucauguucaaaguaa

SEQ ID NO: 406056 - RNA, 19 nt, Homo sapiens
  misc_RNA (1)...(19): siRNA sense strand
gggucugccuccugcuuua

SEQ ID NO: 406057 - RNA, 19 nt, Homo sapiens
  misc_RNA (1)...(19): siRNA sense strand
gagcuuuauuacacgcaua

SEQ ID NO: 406058 - RNA, 19 nt, Homo sapiens
  misc_RNA (1)...(19): siRNA sense strand
aaagagggagugcaguaua

SEQ ID NO: 406059 - RNA, 19 nt, Homo sapiens
  misc_RNA (1)...(19): siRNA sense strand
uuauaucgauccacccaaa

SEQ ID NO: 406060 - RNA, 19 nt, Homo sapiens
  misc_RNA (1)...(19): siRNA sense strand
agaaagagggagugcagua

SEQ ID NO: 406061 - RNA, 19 nt, Homo sapiens
  misc_RNA (1)...(19): siRNA sense strand
gagugggucuuuacuggau

SEQ ID NO: 406062 - RNA, 19 nt, Homo sapiens
  misc_RNA (1)...(19): siRNA sense strand
aaccugaugagcuuuauua

SEQ ID NO: 406063 - RNA, 19 nt, Homo sapiens
  misc_RNA (1)...(19): siRNA sense strand
aguauuaaccugauccuuu

SEQ ID NO: 406064 - RNA, 19 nt, Homo sapiens
  misc_RNA (1)...(19): siRNA sense strand
guauagcuacuccuuauuc

SEQ ID NO: 406065 - RNA, 19 nt, Homo sapiens
  misc_RNA (1)...(19): siRNA sense strand
guuguggcuucuauuauau

SEQ ID NO: 406066 - RNA, 19 nt, Homo sapiens
  misc_RNA (1)...(19): siRNA sense strand
cauguuugcuguguaguug

SEQ ID NO: 406067 - RNA, 19 nt, Homo sapiens
  misc_RNA (1)...(19): siRNA sense strand
gagcggcaguacacaaugg

SEQ ID NO: 406068 - RNA, 19 nt, Homo sapiens
  misc_RNA (1)...(19): siRNA sense strand
gcagcggugccucauguuu

SEQ ID NO: 406069 - RNA, 19 nt, Homo sapiens
  misc_RNA (1)...(19): siRNA sense strand
gagauggaaacuuacuuga

SEQ ID NO: 406070 - RNA, 19 nt, Homo sapiens
  misc_RNA (1)...(19): siRNA sense strand
gcaaaguuucagagcauga

SEQ ID NO: 406071 - RNA, 19 nt, Homo sapiens
  misc_RNA (1)...(19): siRNA sense strand
uguaguugcuguccuaaca

SEQ ID NO: 406072 - RNA, 19 nt, Homo sapiens
  misc_RNA (1)...(19): siRNA sense strand
ugacucgccucauuuaugc

SEQ ID NO: 406073 - RNA, 19 nt, Homo sapiens
  misc_RNA (1)...(19): siRNA sense strand
gaagaaggaaacccaaggu

SEQ ID NO: 406074 - RNA, 19 nt, Homo sapiens
  misc_RNA (1)...(19): siRNA sense strand
ugucguauccuauaucaug

SEQ ID NO: 406075 - RNA, 19 nt, Homo sapiens
  misc_RNA (1)...(19): siRNA sense strand
cacggugacucgccucauu

SEQ ID NO: 406076 - RNA, 19 nt, Homo sapiens
  misc_RNA (1)...(19): siRNA sense strand
cugaugagcuuuauuacac

SEQ ID NO: 406077 - RNA, 19 nt, Homo sapiens
  misc_RNA (1)...(19): siRNA sense strand
aaucauggguaaaucgaau

SEQ ID NO: 406078 - RNA, 19 nt, Homo sapiens
  misc_RNA (1)...(19): siRNA sense strand
gguuggcucuuucuacauc

SEQ ID NO: 406079 - RNA, 19 nt, Homo sapiens
  misc_RNA (1)...(19): siRNA sense strand
ccuauaucaugcagagaaa

SEQ ID NO: 406080 - RNA, 19 nt, Homo sapiens
  misc_RNA (1)...(19): siRNA sense strand
ucgggcugcucuauacaua

SEQ ID NO: 406081 - RNA, 19 nt, Homo sapiens
  misc_RNA (1)...(19): siRNA sense strand
ucaucacccucuacacuau

SEQ ID NO: 406082 - RNA, 19 nt, Homo sapiens
  misc_RNA (1)...(19): siRNA sense strand
gcugauauaaaugcagaua

SEQ ID NO: 406083 - RNA, 19 nt, Homo sapiens
  misc_RNA (1)...(19): siRNA sense strand
aaucaugguuggcucuuuc

SEQ ID NO: 406084 - RNA, 19 nt, Homo sapiens
  misc_RNA (1)...(19): siRNA sense strand
cauccgcacuuccacuaau

SEQ ID NO: 406085 - RNA, 19 nt, Homo sapiens
  misc_RNA (1)...(19): siRNA sense strand
cagcccugaugcaaaguuu

SEQ ID NO: 406086 - RNA, 19 nt, Homo sapiens
  misc_RNA (1)...(19): siRNA sense strand
aagagggagugcaguauag

SEQ ID NO: 406087 - RNA, 19 nt, Homo sapiens
  misc_RNA (1)...(19): siRNA sense strand
ccacuaauagccaaguaga

SEQ ID NO: 406088 - RNA, 19 nt, Homo sapiens
  misc_RNA (1)...(19): siRNA sense strand
guuuguuguuggcaugaua

SEQ ID NO: 406089 - RNA, 19 nt, Homo sapiens
  misc_RNA (1)...(19): siRNA sense strand
ugagcacugucguauccua

SEQ ID NO: 406090 - RNA, 19 nt, Homo sapiens
  misc_RNA (1)...(19): siRNA sense strand
gcuuuacugucuuucacaa

SEQ ID NO: 406091 - RNA, 19 nt, Homo sapiens
  misc_RNA (1)...(19): siRNA sense strand
gugguaugcugcuuuacug

SEQ ID NO: 406092 - RNA, 19 nt, Homo sapiens
  misc_RNA (1)...(19): siRNA sense strand
acaaguucuucaucaguau

SEQ ID NO: 406093 - RNA, 19 nt, Homo sapiens
  misc_RNA (1)...(19): siRNA sense strand
ccucauguuugcuguguag

SEQ ID NO: 406094 - RNA, 19 nt, Homo sapiens
  misc_RNA (1)...(19): siRNA sense strand
cugcuuggcuuccuuguac

SEQ ID NO: 406095 - RNA, 19 nt, Homo sapiens
  misc_RNA (1)...(19): siRNA sense strand
uccaugaggcugauauaaa

SEQ ID NO: 406096 - RNA, 19 nt, Homo sapiens
  misc_RNA (1)...(19): siRNA sense strand
gguacagcccugaugcaaa

SEQ ID NO: 406097 - RNA, 19 nt, Homo sapiens
  misc_RNA (1)...(19): siRNA sense strand
cugcagcggugccucaugu

SEQ ID NO: 406098 - RNA, 19 nt, Homo sapiens
  misc_RNA (1)...(19): siRNA sense strand
gugacucgccucauuuaug

SEQ ID NO: 406099 - RNA, 19 nt, Homo sapiens
  misc_RNA (1)...(19): siRNA sense strand
gaugugcugguugguuaua

SEQ ID NO: 406100 - RNA, 19 nt, Homo sapiens
  misc_RNA (1)...(19): siRNA sense strand
guaugcugcuuuacugucu

SEQ ID NO: 406101 - RNA, 19 nt, Homo sapiens
  misc_RNA (1)...(19): siRNA sense strand
guaaaucgaauggaagaag

SEQ ID NO: 406102 - RNA, 19 nt, Homo sapiens
  misc_RNA (1)...(19): siRNA sense strand
ggguaaaucgaauggaaga

SEQ ID NO: 406103 - RNA, 19 nt, Homo sapiens
  misc_RNA (1)...(19): siRNA sense strand
ggcaguacacaauggguuu

SEQ ID NO: 406104 - RNA, 19 nt, Homo sapiens
  misc_RNA (1)...(19): siRNA sense strand
aaacaaguucuucaucagu

SEQ ID NO: 406105 - RNA, 19 nt, Homo sapiens
  misc_RNA (1)...(19): siRNA sense strand
uggcuucuauuauaucgau

SEQ ID NO: 406106 - RNA, 19 nt, Homo sapiens
  misc_RNA (1)...(19): siRNA sense strand
cagcggugccucauguuug

SEQ ID NO: 406107 - RNA, 19 nt, Homo sapiens
  misc_RNA (1)...(19): siRNA sense strand
uguccuaacaguaagaauu

SEQ ID NO: 406108 - RNA, 19 nt, Homo sapiens
  misc_RNA (1)...(19): siRNA sense strand
gaaucauggguaaaucgaa

SEQ ID NO: 406109 - RNA, 19 nt, Homo sapiens
  misc_RNA (1)...(19): siRNA sense strand
cgucauccuuggugauaca

SEQ ID NO: 406110 - RNA, 19 nt, Homo sapiens
  misc_RNA (1)...(19): siRNA sense strand
ccugaucguuccugcaauc

SEQ ID NO: 406111 - RNA, 19 nt, Homo sapiens
  misc_RNA (1)...(19): siRNA sense strand
guuauaaagcuguguaucg

SEQ ID NO: 406112 - RNA, 19 nt, Homo sapiens
  misc_RNA (1)...(19): siRNA sense strand
guccuaacaguaagaauuc

SEQ ID NO: 406113 - RNA, 19 nt, Homo sapiens
  misc_RNA (1)...(19): siRNA sense strand
agagauggaaacuuacuug

SEQ ID NO: 406114 - RNA, 19 nt, Homo sapiens
  misc_RNA (1)...(19): siRNA sense strand
gcugguugguuauaaagcu

SEQ ID NO: 406115 - RNA, 19 nt, Homo sapiens
  misc_RNA (1)...(19): siRNA sense strand
ggacuguuugucuuuguuc

SEQ ID NO: 406116 - RNA, 19 nt, Homo sapiens
  misc_RNA (1)...(19): siRNA sense strand
uuauuggacuguuugucuu

SEQ ID NO: 406117 - RNA, 19 nt, Homo sapiens
  misc_RNA (1)...(19): siRNA sense strand
aacccuggcuccuggaaau

SEQ ID NO: 406118 - RNA, 19 nt, Homo sapiens
  misc_RNA (1)...(19): siRNA sense strand
caaguucuucaucaguauu

SEQ ID NO: 406119 - RNA, 19 nt, Homo sapiens
  misc_RNA (1)...(19): siRNA sense strand
uauauccugucaaucaucu

SEQ ID NO: 406120 - RNA, 19 nt, Homo sapiens
  misc_RNA (1)...(19): siRNA sense strand
ugugcugguugguuauaaa

SEQ ID NO: 406121 - RNA, 19 nt, Homo sapiens
  misc_RNA (1)...(19): siRNA sense strand
ugccagugaugaagaagau

SEQ ID NO: 406122 - RNA, 19 nt, Homo sapiens
  misc_RNA (1)...(19): siRNA sense strand
gcauccgcacuuccacuaa

SEQ ID NO: 406123 - RNA, 19 nt, Homo sapiens
  misc_RNA (1)...(19): siRNA sense strand
agauggaaacuuacuugaa

SEQ ID NO: 406124 - RNA, 19 nt, Homo sapiens
  misc_RNA (1)...(19): siRNA sense strand
gagcacugucguauccuau

SEQ ID NO: 406125 - RNA, 19 nt, Homo sapiens
  misc_RNA (1)...(19): siRNA sense strand
aaagcuguguaucggauca

SEQ ID NO: 406126 - RNA, 19 nt, Homo sapiens
  misc_RNA (1)...(19): siRNA sense strand
ccugagcacugucguaucc

SEQ ID NO: 406127 - RNA, 19 nt, Homo sapiens
  misc_RNA (1)...(19): siRNA sense strand
cauuuaugcuuucauucuc

SEQ ID NO: 406128 - RNA, 19 nt, Homo sapiens
  misc_RNA (1)...(19): siRNA sense strand
ccaaccugaugagcuuuau

SEQ ID NO: 406129 - RNA, 19 nt, Homo sapiens
  misc_RNA (1)...(19): siRNA sense strand
cggugacucgccucauuua

SEQ ID NO: 406130 - RNA, 19 nt, Homo sapiens
  misc_RNA (1)...(19): siRNA sense strand
guacaaaccugucaugaau

SEQ ID NO: 406131 - RNA, 19 nt, Homo sapiens
  misc_RNA (1)...(19): siRNA sense strand
agaagaaccucaggaauua

SEQ ID NO: 406132 - RNA, 19 nt, Homo sapiens
  misc_RNA (1)...(19): siRNA sense strand
gaacccagcuggagaacuu

SEQ ID NO: 406133 - RNA, 19 nt, Homo sapiens
  misc_RNA (1)...(19): siRNA sense strand
guauagaccuucugauuug

SEQ ID NO: 406134 - RNA, 19 nt, Homo sapiens
  misc_RNA (1)...(19): siRNA sense strand
gauauacagugugaucuua

SEQ ID NO: 406135 - RNA, 19 nt, Homo sapiens
  misc_RNA (1)...(19): siRNA sense strand
guacuacgauccugauuau

SEQ ID NO: 406136 - RNA, 19 nt, Homo sapiens
  misc_RNA (1)...(19): siRNA sense strand
gugccgaccuuuacaauuu

SEQ ID NO: 406137 - RNA, 19 nt, Homo sapiens
  misc_RNA (1)...(19): siRNA sense strand
gaaagaagaaccucaggaa

SEQ ID NO: 406138 - RNA, 19 nt, Homo sapiens
  misc_RNA (1)...(19): siRNA sense strand
gaaugcaucacacaaguua

SEQ ID NO: 406139 - RNA, 19 nt, Homo sapiens
  misc_RNA (1)...(19): siRNA sense strand
guuaguaccugucuccuuu

SEQ ID NO: 406140 - RNA, 19 nt, Homo sapiens
  misc_RNA (1)...(19): siRNA sense strand
caaaggaaauccggaaaga

SEQ ID NO: 406141 - RNA, 19 nt, Homo sapiens
  misc_RNA (1)...(19): siRNA sense strand
gucccaagaugaaauauaa

SEQ ID NO: 406142 - RNA, 19 nt, Homo sapiens
  misc_RNA (1)...(19): siRNA sense strand
caaaggaaguugugaggau

SEQ ID NO: 406143 - RNA, 19 nt, Homo sapiens
  misc_RNA (1)...(19): siRNA sense strand
agacugaguucacaagauu

SEQ ID NO: 406144 - RNA, 19 nt, Homo sapiens
  misc_RNA (1)...(19): siRNA sense strand
gagaaugcaucacacaagu

SEQ ID NO: 406145 - RNA, 19 nt, Homo sapiens
  misc_RNA (1)...(19): siRNA sense strand
gaccgaggauggcgaagaa

SEQ ID NO: 406146 - RNA, 19 nt, Homo sapiens
  misc_RNA (1)...(19): siRNA sense strand
agagagccaucaugccuua

SEQ ID NO: 406147 - RNA, 19 nt, Homo sapiens
  misc_RNA (1)...(19): siRNA sense strand
caaagagaguuuagagagu

SEQ ID NO: 406148 - RNA, 19 nt, Homo sapiens
  misc_RNA (1)...(19): siRNA sense strand
cuucucaacucagcuauua

SEQ ID NO: 406149 - RNA, 19 nt, Homo sapiens
  misc_RNA (1)...(19): siRNA sense strand
guacggaaccugaccgauu

SEQ ID NO: 406150 - RNA, 19 nt, Homo sapiens
  misc_RNA (1)...(19): siRNA sense strand
ggaauuacuucagucacaa

SEQ ID NO: 406151 - RNA, 19 nt, Homo sapiens
  misc_RNA (1)...(19): siRNA sense strand
ggaugcugcuguucagaaa

SEQ ID NO: 406152 - RNA, 19 nt, Homo sapiens
  misc_RNA (1)...(19): siRNA sense strand
caucaugccuuacgguguu

SEQ ID NO: 406153 - RNA, 19 nt, Homo sapiens
  misc_RNA (1)...(19): siRNA sense strand
cuaggcagcuucaugagaa

SEQ ID NO: 406154 - RNA, 19 nt, Homo sapiens
  misc_RNA (1)...(19): siRNA sense strand
gcgaagaaguggaaaauau

SEQ ID NO: 406155 - RNA, 19 nt, Homo sapiens
  misc_RNA (1)...(19): siRNA sense strand
ccaugacaguacaggauua

SEQ ID NO: 406156 - RNA, 19 nt, Homo sapiens
  misc_RNA (1)...(19): siRNA sense strand
gcagguguuucacaagaga

SEQ ID NO: 406157 - RNA, 19 nt, Homo sapiens
  misc_RNA (1)...(19): siRNA sense strand
caaguuagaggugagguua

SEQ ID NO: 406158 - RNA, 19 nt, Homo sapiens
  misc_RNA (1)...(19): siRNA sense strand
cuggagaacuugaggguuu

SEQ ID NO: 406159 - RNA, 19 nt, Homo sapiens
  misc_RNA (1)...(19): siRNA sense strand
gaaccgucacauucaguua

SEQ ID NO: 406160 - RNA, 19 nt, Homo sapiens
  misc_RNA (1)...(19): siRNA sense strand
aagaagaaccucaggaauu

SEQ ID NO: 406161 - RNA, 19 nt, Homo sapiens
  misc_RNA (1)...(19): siRNA sense strand
uuacuucagucacaagauu

SEQ ID NO: 406162 - RNA, 19 nt, Homo sapiens
  misc_RNA (1)...(19): siRNA sense strand
acaaaccugucaugaauca

SEQ ID NO: 406163 - RNA, 19 nt, Homo sapiens
  misc_RNA (1)...(19): siRNA sense strand
gaaauauaagggucaguau

SEQ ID NO: 406164 - RNA, 19 nt, Homo sapiens
  misc_RNA (1)...(19): siRNA sense strand
caagauuccuuugcaguuc

SEQ ID NO: 406165 - RNA, 19 nt, Homo sapiens
  misc_RNA (1)...(19): siRNA sense strand
gaaguugggcucuggugaa

SEQ ID NO: 406166 - RNA, 19 nt, Homo sapiens
  misc_RNA (1)...(19): siRNA sense strand
ugaaauuucuggcuaaagg

SEQ ID NO: 406167 - RNA, 19 nt, Homo sapiens
  misc_RNA (1)...(19): siRNA sense strand
gaaaauauguguacaaacc

SEQ ID NO: 406168 - RNA, 19 nt, Homo sapiens
  misc_RNA (1)...(19): siRNA sense strand
cacaauggaugaugcuguu

SEQ ID NO: 406169 - RNA, 19 nt, Homo sapiens
  misc_RNA (1)...(19): siRNA sense strand
gauugcagguguuucacaa

SEQ ID NO: 406170 - RNA, 19 nt, Homo sapiens
  misc_RNA (1)...(19): siRNA sense strand
gcagaacccagcuggagaa

SEQ ID NO: 406171 - RNA, 19 nt, Homo sapiens
  misc_RNA (1)...(19): siRNA sense strand
gaaagaaaggaaaagguua

SEQ ID NO: 406172 - RNA, 19 nt, Homo sapiens
  misc_RNA (1)...(19): siRNA sense strand
aaggaaauccggaaagaaa

SEQ ID NO: 406173 - RNA, 19 nt, Homo sapiens
  misc_RNA (1)...(19): siRNA sense strand
caguauagaccuucugauu

SEQ ID NO: 406174 - RNA, 19 nt, Homo sapiens
  misc_RNA (1)...(19): siRNA sense strand
uauauggguuucuacauuc

SEQ ID NO: 406175 - RNA, 19 nt, Homo sapiens
  misc_RNA (1)...(19): siRNA sense strand
caaacuguguaucaucugu

SEQ ID NO: 406176 - RNA, 19 nt, Homo sapiens
  misc_RNA (1)...(19): siRNA sense strand
gcgggugacuuugcauuga

SEQ ID NO: 406177 - RNA, 19 nt, Homo sapiens
  misc_RNA (1)...(19): siRNA sense strand
uacggaaccugaccgauug

SEQ ID NO: 406178 - RNA, 19 nt, Homo sapiens
  misc_RNA (1)...(19): siRNA sense strand
gggugacuuugcauugaua

SEQ ID NO: 406179 - RNA, 19 nt, Homo sapiens
  misc_RNA (1)...(19): siRNA sense strand
gucacaagauuucguagga

SEQ ID NO: 406180 - RNA, 19 nt, Homo sapiens
  misc_RNA (1)...(19): siRNA sense strand
ugaaauauaagggucagua

SEQ ID NO: 406181 - RNA, 19 nt, Homo sapiens
  misc_RNA (1)...(19): siRNA sense strand
ugauugacauccucccaaa

SEQ ID NO: 406182 - RNA, 19 nt, Homo sapiens
  misc_RNA (1)...(19): siRNA sense strand
gaguucaagucgucuuuca

SEQ ID NO: 406183 - RNA, 19 nt, Homo sapiens
  misc_RNA (1)...(19): siRNA sense strand
gaagacugaguucacaaga

SEQ ID NO: 406184 - RNA, 19 nt, Homo sapiens
  misc_RNA (1)...(19): siRNA sense strand
uguaucaucuguguauuug

SEQ ID NO: 406185 - RNA, 19 nt, Homo sapiens
  misc_RNA (1)...(19): siRNA sense strand
ggauauacagugugaucuu

SEQ ID NO: 406186 - RNA, 19 nt, Homo sapiens
  misc_RNA (1)...(19): siRNA sense strand
gcugugcccugagacauau

SEQ ID NO: 406187 - RNA, 19 nt, Homo sapiens
  misc_RNA (1)...(19): siRNA sense strand
ugacaucaaagagaguuua

SEQ ID NO: 406188 - RNA, 19 nt, Homo sapiens
  misc_RNA (1)...(19): siRNA sense strand
ugaggaggcugcuguucug

SEQ ID NO: 406189 - RNA, 19 nt, Homo sapiens
  misc_RNA (1)...(19): siRNA sense strand
auaagaaacagcagaaaga

SEQ ID NO: 406190 - RNA, 19 nt, Homo sapiens
  misc_RNA (1)...(19): siRNA sense strand
gauuugcugugcccugaga

SEQ ID NO: 406191 - RNA, 19 nt, Homo sapiens
  misc_RNA (1)...(19): siRNA sense strand
uuacuaggcagcuucauga

SEQ ID NO: 406192 - RNA, 19 nt, Homo sapiens
  misc_RNA (1)...(19): siRNA sense strand
caccaaaggcuaaauccaa

SEQ ID NO: 406193 - RNA, 19 nt, Homo sapiens
  misc_RNA (1)...(19): siRNA sense strand
gcaaaggaaauccggaaag

SEQ ID NO: 406194 - RNA, 19 nt, Homo sapiens
  misc_RNA (1)...(19): siRNA sense strand
aaaccugucaugaaucaaa

SEQ ID NO: 406195 - RNA, 19 nt, Homo sapiens
  misc_RNA (1)...(19): siRNA sense strand
aaacauguuguccucagua

SEQ ID NO: 406196 - RNA, 19 nt, Homo sapiens
  misc_RNA (1)...(19): siRNA sense strand
gcacauuccaugacaguac

SEQ ID NO: 406197 - RNA, 19 nt, Homo sapiens
  misc_RNA (1)...(19): siRNA sense strand
cgucuacucugcacuacga

SEQ ID NO: 406198 - RNA, 19 nt, Homo sapiens
  misc_RNA (1)...(19): siRNA sense strand
gaggaugagcccauggauu

SEQ ID NO: 406199 - RNA, 19 nt, Homo sapiens
  misc_RNA (1)...(19): siRNA sense strand
aguauagaccuucugauuu

SEQ ID NO: 406200 - RNA, 19 nt, Homo sapiens
  misc_RNA (1)...(19): siRNA sense strand
gcacuacgagaaauugcuu

SEQ ID NO: 406201 - RNA, 19 nt, Homo sapiens
  misc_RNA (1)...(19): siRNA sense strand
ugacaguacaggauuauca

SEQ ID NO: 406202 - RNA, 19 nt, Homo sapiens
  misc_RNA (1)...(19): siRNA sense strand
ccucaggaauuacuucagu

SEQ ID NO: 406203 - RNA, 19 nt, Homo sapiens
  misc_RNA (1)...(19): siRNA sense strand
guugaaauuucuggcuaaa

SEQ ID NO: 406204 - RNA, 19 nt, Homo sapiens
  misc_RNA (1)...(19): siRNA sense strand
gagcggaugcugcuguuca

SEQ ID NO: 406205 - RNA, 19 nt, Homo sapiens
  misc_RNA (1)...(19): siRNA sense strand
guacuggcuugacggaaag

SEQ ID NO: 406206 - RNA, 19 nt, Homo sapiens
  misc_RNA (1)...(19): siRNA sense strand
ucacccaccaucuuuguuu

SEQ ID NO: 406207 - RNA, 19 nt, Homo sapiens
  misc_RNA (1)...(19): siRNA sense strand
ggaaagaaaggaaaagguu

SEQ ID NO: 406208 - RNA, 19 nt, Homo sapiens
  misc_RNA (1)...(19): siRNA sense strand
ggauuaucaggaucucaua

SEQ ID NO: 406209 - RNA, 19 nt, Homo sapiens
  misc_RNA (1)...(19): siRNA sense strand
uguccucaguacacaauaa

SEQ ID NO: 406210 - RNA, 19 nt, Homo sapiens
  misc_RNA (1)...(19): siRNA sense strand
caaggucacccaccaucuu

SEQ ID NO: 406211 - RNA, 19 nt, Homo sapiens
  misc_RNA (1)...(19): siRNA sense strand
cacauucaguuaaaguuca

SEQ ID NO: 406212 - RNA, 19 nt, Homo sapiens
  misc_RNA (1)...(19): siRNA sense strand
aguacuggcuugacggaaa

SEQ ID NO: 406213 - RNA, 19 nt, Homo sapiens
  misc_RNA (1)...(19): siRNA sense strand
ucucaacucagcuauuauu

SEQ ID NO: 406214 - RNA, 19 nt, Homo sapiens
  misc_RNA (1)...(19): siRNA sense strand
gaaccucaggaauuacuuc

SEQ ID NO: 406215 - RNA, 19 nt, Homo sapiens
  misc_RNA (1)...(19): siRNA sense strand
caaacauguuguccucagu

SEQ ID NO: 406216 - RNA, 19 nt, Homo sapiens
  misc_RNA (1)...(19): siRNA sense strand
ggauccacccgaugaaugu

SEQ ID NO: 406217 - RNA, 19 nt, Homo sapiens
  misc_RNA (1)...(19): siRNA sense strand
caguuaaaguucacacagu

SEQ ID NO: 406218 - RNA, 19 nt, Homo sapiens
  misc_RNA (1)...(19): siRNA sense strand
aaacuucucaacucagcua

SEQ ID NO: 406219 - RNA, 19 nt, Homo sapiens
  misc_RNA (1)...(19): siRNA sense strand
aguuaaaguucacacaguu

SEQ ID NO: 406220 - RNA, 19 nt, Homo sapiens
  misc_RNA (1)...(19): siRNA sense strand
aggaugagcccauggauuc

SEQ ID NO: 406221 - RNA, 19 nt, Homo sapiens
  misc_RNA (1)...(19): siRNA sense strand
gcccugagacauauguuug

SEQ ID NO: 406222 - RNA, 19 nt, Homo sapiens
  misc_RNA (1)...(19): siRNA sense strand
uguacuacgauccugauua

SEQ ID NO: 406223 - RNA, 19 nt, Homo sapiens
  misc_RNA (1)...(19): siRNA sense strand
ggaagacugaguucacaag

SEQ ID NO: 406224 - RNA, 19 nt, Homo sapiens
  misc_RNA (1)...(19): siRNA sense strand
cuuuguaugucaaguauca

SEQ ID NO: 406225 - RNA, 19 nt, Homo sapiens
  misc_RNA (1)...(19): siRNA sense strand
ggauggcgaagaaguggaa

SEQ ID NO: 406226 - RNA, 19 nt, Homo sapiens
  misc_RNA (1)...(19): siRNA sense strand
uugcagguguuucacaaga

SEQ ID NO: 406227 - RNA, 19 nt, Homo sapiens
  misc_RNA (1)...(19): siRNA sense strand
gggcgucuacucugcacua

SEQ ID NO: 406228 - RNA, 19 nt, Homo sapiens
  misc_RNA (1)...(19): siRNA sense strand
guguaucaucuguguauuu

SEQ ID NO: 406229 - RNA, 19 nt, Homo sapiens
  misc_RNA (1)...(19): siRNA sense strand
ggaaauccggaaagaaagg

SEQ ID NO: 406230 - RNA, 19 nt, Homo sapiens
  misc_RNA (1)...(19): siRNA sense strand
gcacacaacuucacugaug

SEQ ID NO: 406231 - RNA, 19 nt, Homo sapiens
  misc_RNA (1)...(19): siRNA sense strand
gaaucuggcugcugacuug

SEQ ID NO: 406232 - RNA, 19 nt, Homo sapiens
  misc_RNA (1)...(19): siRNA sense strand
gcacucacaugaagauuuc

SEQ ID NO: 406233 - RNA, 19 nt, Homo sapiens
  misc_RNA (1)...(19): siRNA sense strand
gaucucagcagcuccauuu

SEQ ID NO: 406234 - RNA, 19 nt, Homo sapiens
  misc_RNA (1)...(19): siRNA sense strand
cggcaucgcucucuacuuc

SEQ ID NO: 406235 - RNA, 19 nt, Homo sapiens
  misc_RNA (1)...(19): siRNA sense strand
cuucagaucuugcucaguu

SEQ ID NO: 406236 - RNA, 19 nt, Homo sapiens
  misc_RNA (1)...(19): siRNA sense strand
cacaaugacuguccugcua

SEQ ID NO: 406237 - RNA, 19 nt, Homo sapiens
  misc_RNA (1)...(19): siRNA sense strand
gcugugcccuucucacuga

SEQ ID NO: 406238 - RNA, 19 nt, Homo sapiens
  misc_RNA (1)...(19): siRNA sense strand
gacaagagcguucuaccaa

SEQ ID NO: 406239 - RNA, 19 nt, Homo sapiens
  misc_RNA (1)...(19): siRNA sense strand
ugacuguccugcuacauga

SEQ ID NO: 406240 - RNA, 19 nt, Homo sapiens
  misc_RNA (1)...(19): siRNA sense strand
gacauucacaugaggauuu

SEQ ID NO: 406241 - RNA, 19 nt, Homo sapiens
  misc_RNA (1)...(19): siRNA sense strand
gcacgacgaucugcaagag

SEQ ID NO: 406242 - RNA, 19 nt, Homo sapiens
  misc_RNA (1)...(19): siRNA sense strand
ucacgaccauggacauuca

SEQ ID NO: 406243 - RNA, 19 nt, Homo sapiens
  misc_RNA (1)...(19): siRNA sense strand
ggagcacaguacccaaaga

SEQ ID NO: 406244 - RNA, 19 nt, Homo sapiens
  misc_RNA (1)...(19): siRNA sense strand
ggagaaauuugugagacau

SEQ ID NO: 406245 - RNA, 19 nt, Homo sapiens
  misc_RNA (1)...(19): siRNA sense strand
ggaccuggaugcugucacu

SEQ ID NO: 406246 - RNA, 19 nt, Homo sapiens
  misc_RNA (1)...(19): siRNA sense strand
ggacacgcucacagucaua

SEQ ID NO: 406247 - RNA, 19 nt, Homo sapiens
  misc_RNA (1)...(19): siRNA sense strand
ggaauuguugccuuucuug

SEQ ID NO: 406248 - RNA, 19 nt, Homo sapiens
  misc_RNA (1)...(19): siRNA sense strand
gcagagcucagaggaagaa

SEQ ID NO: 406249 - RNA, 19 nt, Homo sapiens
  misc_RNA (1)...(19): siRNA sense strand
acauucacaugaggauuua

SEQ ID NO: 406250 - RNA, 19 nt, Homo sapiens
  misc_RNA (1)...(19): siRNA sense strand
ccacaggcacucacaugaa

SEQ ID NO: 406251 - RNA, 19 nt, Homo sapiens
  misc_RNA (1)...(19): siRNA sense strand
ugacuuggcacacaacuuc

SEQ ID NO: 406252 - RNA, 19 nt, Homo sapiens
  misc_RNA (1)...(19): siRNA sense strand
gcauggacauacccacgau

SEQ ID NO: 406253 - RNA, 19 nt, Homo sapiens
  misc_RNA (1)...(19): siRNA sense strand
gaagcagagcucagaggaa

SEQ ID NO: 406254 - RNA, 19 nt, Homo sapiens
  misc_RNA (1)...(19): siRNA sense strand
ggagcaacccggacaugga

SEQ ID NO: 406255 - RNA, 19 nt, Homo sapiens
  misc_RNA (1)...(19): siRNA sense strand
caguggaauuguugccuuu

SEQ ID NO: 406256 - RNA, 19 nt, Homo sapiens
  misc_RNA (1)...(19): siRNA sense strand
gcucucuacuucagaucuu

SEQ ID NO: 406257 - RNA, 19 nt, Homo sapiens
  misc_RNA (1)...(19): siRNA sense strand
gagcacaguacccaaagau

SEQ ID NO: 406258 - RNA, 19 nt, Homo sapiens
  misc_RNA (1)...(19): siRNA sense strand
gcgaggagggagcacagua

SEQ ID NO: 406259 - RNA, 19 nt, Homo sapiens
  misc_RNA (1)...(19): siRNA sense strand
ggaagacaagagcguucua

SEQ ID NO: 406260 - RNA, 19 nt, Homo sapiens
  misc_RNA (1)...(19): siRNA sense strand
ccacagaggacauggacau

SEQ ID NO: 406261 - RNA, 19 nt, Homo sapiens
  misc_RNA (1)...(19): siRNA sense strand
cacaggcacucacaugaag

SEQ ID NO: 406262 - RNA, 19 nt, Homo sapiens
  misc_RNA (1)...(19): siRNA sense strand
ggcuggguccugccauuua

SEQ ID NO: 406263 - RNA, 19 nt, Homo sapiens
  misc_RNA (1)...(19): siRNA sense strand
gaucacgaccauggacauu

SEQ ID NO: 406264 - RNA, 19 nt, Homo sapiens
  misc_RNA (1)...(19): siRNA sense strand
ggcgaugcgucugcaacua

SEQ ID NO: 406265 - RNA, 19 nt, Homo sapiens
  misc_RNA (1)...(19): siRNA sense strand
acaugaagauuuccaccau

SEQ ID NO: 406266 - RNA, 19 nt, Homo sapiens
  misc_RNA (1)...(19): siRNA sense strand
ggcacucacaugaagauuu

SEQ ID NO: 406267 - RNA, 19 nt, Homo sapiens
  misc_RNA (1)...(19): siRNA sense strand
caaagaugggccagugaga

SEQ ID NO: 406268 - RNA, 19 nt, Homo sapiens
  misc_RNA (1)...(19): siRNA sense strand
ccucauuccucaugcucuu

SEQ ID NO: 406269 - RNA, 19 nt, Homo sapiens
  misc_RNA (1)...(19): siRNA sense strand
caaugacuguccugcuaca

SEQ ID NO: 406270 - RNA, 19 nt, Homo sapiens
  misc_RNA (1)...(19): siRNA sense strand
ggacauggacacgcucaca

SEQ ID NO: 406271 - RNA, 19 nt, Homo sapiens
  misc_RNA (1)...(19): siRNA sense strand
ugugagacaugugaaagga

SEQ ID NO: 406272 - RNA, 19 nt, Homo sapiens
  misc_RNA (1)...(19): siRNA sense strand
agaaauuugugagacaugu

SEQ ID NO: 406273 - RNA, 19 nt, Homo sapiens
  misc_RNA (1)...(19): siRNA sense strand
uggagaaauuugugagaca

SEQ ID NO: 406274 - RNA, 19 nt, Homo sapiens
  misc_RNA (1)...(19): siRNA sense strand
cuagggauccugaccacaa

SEQ ID NO: 406275 - RNA, 19 nt, Homo sapiens
  misc_RNA (1)...(19): siRNA sense strand
caagagggguucagaagag

SEQ ID NO: 406276 - RNA, 19 nt, Homo sapiens
  misc_RNA (1)...(19): siRNA sense strand
gaggacauggucacaguca

SEQ ID NO: 406277 - RNA, 19 nt, Homo sapiens
  misc_RNA (1)...(19): siRNA sense strand
gaaauuugugagacaugug

SEQ ID NO: 406278 - RNA, 19 nt, Homo sapiens
  misc_RNA (1)...(19): siRNA sense strand
gcaucgcucucuacuucag

SEQ ID NO: 406279 - RNA, 19 nt, Homo sapiens
  misc_RNA (1)...(19): siRNA sense strand
gcuggguccugccauuuac

SEQ ID NO: 406280 - RNA, 19 nt, Homo sapiens
  misc_RNA (1)...(19): siRNA sense strand
gaagacaagagcguucuac

SEQ ID NO: 406281 - RNA, 19 nt, Homo sapiens
  misc_RNA (1)...(19): siRNA sense strand
ggacauucacaugaggauu

SEQ ID NO: 406282 - RNA, 19 nt, Homo sapiens
  misc_RNA (1)...(19): siRNA sense strand
gagaaauuugugagacaug

SEQ ID NO: 406283 - RNA, 19 nt, Homo sapiens
  misc_RNA (1)...(19): siRNA sense strand
gccacaggcacucacauga

SEQ ID NO: 406284 - RNA, 19 nt, Homo sapiens
  misc_RNA (1)...(19): siRNA sense strand
gguucucaguggaauuguu

SEQ ID NO: 406285 - RNA, 19 nt, Homo sapiens
  misc_RNA (1)...(19): siRNA sense strand
ucaccacacucuggagcaa

SEQ ID NO: 406286 - RNA, 19 nt, Homo sapiens
  misc_RNA (1)...(19): siRNA sense strand
gaauuguugccuuucuugu

SEQ ID NO: 406287 - RNA, 19 nt, Homo sapiens
  misc_RNA (1)...(19): siRNA sense strand
gggauccugaccacaauga

SEQ ID NO: 406288 - RNA, 19 nt, Homo sapiens
  misc_RNA (1)...(19): siRNA sense strand
uagggauccugaccacaau

SEQ ID NO: 406289 - RNA, 19 nt, Homo sapiens
  misc_RNA (1)...(19): siRNA sense strand
gauuuacaccauggccaua

SEQ ID NO: 406290 - RNA, 19 nt, Homo sapiens
  misc_RNA (1)...(19): siRNA sense strand
uggaauuguugccuuucuu

SEQ ID NO: 406291 - RNA, 19 nt, Homo sapiens
  misc_RNA (1)...(19): siRNA sense strand
guucucaguggaauuguug

SEQ ID NO: 406292 - RNA, 19 nt, Homo sapiens
  misc_RNA (1)...(19): siRNA sense strand
gcaccucauuccucaugcu

SEQ ID NO: 406293 - RNA, 19 nt, Homo sapiens
  misc_RNA (1)...(19): siRNA sense strand
acaugaggauuuacaccau

SEQ ID NO: 406294 - RNA, 19 nt, Homo sapiens
  misc_RNA (1)...(19): siRNA sense strand
gagcaucuggcauggacau

SEQ ID NO: 406295 - RNA, 19 nt, Homo sapiens
  misc_RNA (1)...(19): siRNA sense strand
aggaggacauggucacagu

SEQ ID NO: 406296 - RNA, 19 nt, Homo sapiens
  misc_RNA (1)...(19): siRNA sense strand
aaauuugugagacauguga

SEQ ID NO: 406297 - RNA, 19 nt, Homo sapiens
  misc_RNA (1)...(19): siRNA sense strand
guggaauuguugccuuucu

SEQ ID NO: 406298 - RNA, 19 nt, Homo sapiens
  misc_RNA (1)...(19): siRNA sense strand
ugaagaaggucauguccau

SEQ ID NO: 406299 - RNA, 19 nt, Homo sapiens
  misc_RNA (1)...(19): siRNA sense strand
gaucggacacugccucuug

SEQ ID NO: 406300 - RNA, 19 nt, Homo sapiens
  misc_RNA (1)...(19): siRNA sense strand
gugcuuggcugugcucaaa

SEQ ID NO: 406301 - RNA, 19 nt, Homo sapiens
  misc_RNA (1)...(19): siRNA sense strand
gacacugccucuuguggaa

SEQ ID NO: 406302 - RNA, 19 nt, Homo sapiens
  misc_RNA (1)...(19): siRNA sense strand
cgacuacuaccacguguug

SEQ ID NO: 406303 - RNA, 19 nt, Homo sapiens
  misc_RNA (1)...(19): siRNA sense strand
ggaagaagacaaggacauc

SEQ ID NO: 406304 - RNA, 19 nt, Homo sapiens
  misc_RNA (1)...(19): siRNA sense strand
gacgugaggccuuucauuc

SEQ ID NO: 406305 - RNA, 19 nt, Homo sapiens
  misc_RNA (1)...(19): siRNA sense strand
gcagaugcaggaguuugua

SEQ ID NO: 406306 - RNA, 19 nt, Homo sapiens
  misc_RNA (1)...(19): siRNA sense strand
gaagaagacaaggacauca

SEQ ID NO: 406307 - RNA, 19 nt, Homo sapiens
  misc_RNA (1)...(19): siRNA sense strand
cguggaagccggcagguuu

SEQ ID NO: 406308 - RNA, 19 nt, Homo sapiens
  misc_RNA (1)...(19): siRNA sense strand
cauccacccuuucauugau

SEQ ID NO: 406309 - RNA, 19 nt, Homo sapiens
  misc_RNA (1)...(19): siRNA sense strand
uuacauccacccuuucauu

SEQ ID NO: 406310 - RNA, 19 nt, Homo sapiens
  misc_RNA (1)...(19): siRNA sense strand
cuacuaccaucacaucuac

SEQ ID NO: 406311 - RNA, 19 nt, Homo sapiens
  misc_RNA (1)...(19): siRNA sense strand
agccuuagcccauuauaaa

SEQ ID NO: 406312 - RNA, 19 nt, Homo sapiens
  misc_RNA (1)...(19): siRNA sense strand
gccaugaaguacaucaaca

SEQ ID NO: 406313 - RNA, 19 nt, Homo sapiens
  misc_RNA (1)...(19): siRNA sense strand
caacacgacucugguuucg

SEQ ID NO: 406314 - RNA, 19 nt, Homo sapiens
  misc_RNA (1)...(19): siRNA sense strand
ggaggagaccuacuaccau

SEQ ID NO: 406315 - RNA, 19 nt, Homo sapiens
  misc_RNA (1)...(19): siRNA sense strand
caagauggacccggacuuc

SEQ ID NO: 406316 - RNA, 19 nt, Homo sapiens
  misc_RNA (1)...(19): siRNA sense strand
ggagcagaacgaggucaua

SEQ ID NO: 406317 - RNA, 19 nt, Homo sapiens
  misc_RNA (1)...(19): siRNA sense strand
caucaucgacagcaaagug

SEQ ID NO: 406318 - RNA, 19 nt, Homo sapiens
  misc_RNA (1)...(19): siRNA sense strand
gagcagaacgaggucauag

SEQ ID NO: 406319 - RNA, 19 nt, Homo sapiens
  misc_RNA (1)...(19): siRNA sense strand
ucguuuacauccacccuuu

SEQ ID NO: 406320 - RNA, 19 nt, Homo sapiens
  misc_RNA (1)...(19): siRNA sense strand
uugcagccuuagcccauua

SEQ ID NO: 406321 - RNA, 19 nt, Homo sapiens
  misc_RNA (1)...(19): siRNA sense strand
aaaagcagaugcaggaguu

SEQ ID NO: 406322 - RNA, 19 nt, Homo sapiens
  misc_RNA (1)...(19): siRNA sense strand
uggacgcgcucaccgaguu

SEQ ID NO: 406323 - RNA, 19 nt, Homo sapiens
  misc_RNA (1)...(19): siRNA sense strand
cgacgugaggccuuucauu

SEQ ID NO: 406324 - RNA, 19 nt, Homo sapiens
  misc_RNA (1)...(19): siRNA sense strand
ccacggagcucagcaucac

SEQ ID NO: 406325 - RNA, 19 nt, Homo sapiens
  misc_RNA (1)...(19): siRNA sense strand
ucauggaggagaccuacua

SEQ ID NO: 406326 - RNA, 19 nt, Homo sapiens
  misc_RNA (1)...(19): siRNA sense strand
gagaucgaccagagguauu

SEQ ID NO: 406327 - RNA, 19 nt, Homo sapiens
  misc_RNA (1)...(19): siRNA sense strand
cauccaggcggacuacuug

SEQ ID NO: 406328 - RNA, 19 nt, Homo sapiens
  misc_RNA (1)...(19): siRNA sense strand
gccggcagguuucggacaa

SEQ ID NO: 406329 - RNA, 19 nt, Homo sapiens
  misc_RNA (1)...(19): siRNA sense strand
gagcagcgguccgacuacu

SEQ ID NO: 406330 - RNA, 19 nt, Homo sapiens
  misc_RNA (1)...(19): siRNA sense strand
acagcaaagugaagaaggu

SEQ ID NO: 406331 - RNA, 19 nt, Homo sapiens
  misc_RNA (1)...(19): siRNA sense strand
cagccuuagcccauuauaa

SEQ ID NO: 406332 - RNA, 19 nt, Homo sapiens
  misc_RNA (1)...(19): siRNA sense strand
caucaacacgacucugguu

SEQ ID NO: 406333 - RNA, 19 nt, Homo sapiens
  misc_RNA (1)...(19): siRNA sense strand
ucaccgaguuuggcaucuu

SEQ ID NO: 406334 - RNA, 19 nt, Homo sapiens
  misc_RNA (1)...(19): siRNA sense strand
ccuacuaccaucacaucua

SEQ ID NO: 406335 - RNA, 19 nt, Homo sapiens
  misc_RNA (1)...(19): siRNA sense strand
gcaaagugaagaaggucau

SEQ ID NO: 406336 - RNA, 19 nt, Homo sapiens
  misc_RNA (1)...(19): siRNA sense strand
agccagagcugcccugaac

SEQ ID NO: 406337 - RNA, 19 nt, Homo sapiens
  misc_RNA (1)...(19): siRNA sense strand
ggacgcgcucaccgaguuu

SEQ ID NO: 406338 - RNA, 19 nt, Homo sapiens
  misc_RNA (1)...(19): siRNA sense strand
cagcaucaucgacagcaaa

SEQ ID NO: 406339 - RNA, 19 nt, Homo sapiens
  misc_RNA (1)...(19): siRNA sense strand
cagagguauuucagcauca

SEQ ID NO: 406340 - RNA, 19 nt, Homo sapiens
  misc_RNA (1)...(19): siRNA sense strand
aguggaguuugcagccuua

SEQ ID NO: 406341 - RNA, 19 nt, Homo sapiens
  misc_RNA (1)...(19): siRNA sense strand
gcagcgguccgacuacuac

SEQ ID NO: 406342 - RNA, 19 nt, Homo sapiens
  misc_RNA (1)...(19): siRNA sense strand
ccaucucacccuaccauga

SEQ ID NO: 406343 - RNA, 19 nt, Homo sapiens
  misc_RNA (1)...(19): siRNA sense strand
gaccuacuaccaucacauc

SEQ ID NO: 406344 - RNA, 19 nt, Homo sapiens
  misc_RNA (1)...(19): siRNA sense strand
gcagguuucggacaacaca

SEQ ID NO: 406345 - RNA, 19 nt, Homo sapiens
  misc_RNA (1)...(19): siRNA sense strand
caccgaguuuggcaucuuc

SEQ ID NO: 406346 - RNA, 19 nt, Homo sapiens
  misc_RNA (1)...(19): siRNA sense strand
ccagagcauugaccaucuc

SEQ ID NO: 406347 - RNA, 19 nt, Homo sapiens
  misc_RNA (1)...(19): siRNA sense strand
ccucccgucugcucaugaa

SEQ ID NO: 406348 - RNA, 19 nt, Homo sapiens
  misc_RNA (1)...(19): siRNA sense strand
caugcacgcccucaagaug

SEQ ID NO: 406349 - RNA, 19 nt, Homo sapiens
  misc_RNA (1)...(19): siRNA sense strand
gaccaucucacccuaccau

SEQ ID NO: 406350 - RNA, 19 nt, Homo sapiens
  misc_RNA (1)...(19): siRNA sense strand
ucaacacgacucugguuuc

SEQ ID NO: 406351 - RNA, 19 nt, Homo sapiens
  misc_RNA (1)...(19): siRNA sense strand
gagaccuacuaccaucaca

SEQ ID NO: 406352 - RNA, 19 nt, Homo sapiens
  misc_RNA (1)...(19): siRNA sense strand
cccaaaagcucuucaugca

SEQ ID NO: 406353 - RNA, 19 nt, Homo sapiens
  misc_RNA (1)...(19): siRNA sense strand
uacauccacccuuucauug

SEQ ID NO: 406354 - RNA, 19 nt, Homo sapiens
  misc_RNA (1)...(19): siRNA sense strand
ugagaaagcacuggucaac

SEQ ID NO: 406355 - RNA, 19 nt, Homo sapiens
  misc_RNA (1)...(19): siRNA sense strand
gcagccuuagcccauuaua

SEQ ID NO: 406356 - RNA, 19 nt, Homo sapiens
  misc_RNA (1)...(19): siRNA sense strand
gaauaugccuccaagauua

SEQ ID NO: 406357 - RNA, 19 nt, Homo sapiens
  misc_RNA (1)...(19): siRNA sense strand
gaaauaagguguccagaau

SEQ ID NO: 406358 - RNA, 19 nt, Homo sapiens
  misc_RNA (1)...(19): siRNA sense strand
gaaugucucuguaauaugu

SEQ ID NO: 406359 - RNA, 19 nt, Homo sapiens
  misc_RNA (1)...(19): siRNA sense strand
ggauggaaaugaaaucaaa

SEQ ID NO: 406360 - RNA, 19 nt, Homo sapiens
  misc_RNA (1)...(19): siRNA sense strand
gagacuaaaucacaacaaa

SEQ ID NO: 406361 - RNA, 19 nt, Homo sapiens
  misc_RNA (1)...(19): siRNA sense strand
aaauagaggucucaaagaa

SEQ ID NO: 406362 - RNA, 19 nt, Homo sapiens
  misc_RNA (1)...(19): siRNA sense strand
ucaaagaaauuccugcuau

SEQ ID NO: 406363 - RNA, 19 nt, Homo sapiens
  misc_RNA (1)...(19): siRNA sense strand
gaacgagauuccuucaguu

SEQ ID NO: 406364 - RNA, 19 nt, Homo sapiens
  misc_RNA (1)...(19): siRNA sense strand
caaagaaauuccugcuauu

SEQ ID NO: 406365 - RNA, 19 nt, Homo sapiens
  misc_RNA (1)...(19): siRNA sense strand
gaaaucaaaccaccaauuc

SEQ ID NO: 406366 - RNA, 19 nt, Homo sapiens
  misc_RNA (1)...(19): siRNA sense strand
cagcuaagauggauaaauc

SEQ ID NO: 406367 - RNA, 19 nt, Homo sapiens
  misc_RNA (1)...(19): siRNA sense strand
ggaauaugccuccaagauu

SEQ ID NO: 406368 - RNA, 19 nt, Homo sapiens
  misc_RNA (1)...(19): siRNA sense strand
uaagccagcugaagaaguu

SEQ ID NO: 406369 - RNA, 19 nt, Homo sapiens
  misc_RNA (1)...(19): siRNA sense strand
acaacaaacugucagauga

SEQ ID NO: 406370 - RNA, 19 nt, Homo sapiens
  misc_RNA (1)...(19): siRNA sense strand
gccaagaaguuuagaacaa

SEQ ID NO: 406371 - RNA, 19 nt, Homo sapiens
  misc_RNA (1)...(19): siRNA sense strand
gugaaugucucuguaauau

SEQ ID NO: 406372 - RNA, 19 nt, Homo sapiens
  misc_RNA (1)...(19): siRNA sense strand
guacaugauucagaugauu

SEQ ID NO: 406373 - RNA, 19 nt, Homo sapiens
  misc_RNA (1)...(19): siRNA sense strand
uuaaaggacucaagaaucu

SEQ ID NO: 406374 - RNA, 19 nt, Homo sapiens
  misc_RNA (1)...(19): siRNA sense strand
gagaaugccacccagcuaa

SEQ ID NO: 406375 - RNA, 19 nt, Homo sapiens
  misc_RNA (1)...(19): siRNA sense strand
cgagauuccuucaguuaug

SEQ ID NO: 406376 - RNA, 19 nt, Homo sapiens
  misc_RNA (1)...(19): siRNA sense strand
ccaagaaguuuagaacaau

SEQ ID NO: 406377 - RNA, 19 nt, Homo sapiens
  misc_RNA (1)...(19): siRNA sense strand
ggcacaaucuguuucauca

SEQ ID NO: 406378 - RNA, 19 nt, Homo sapiens
  misc_RNA (1)...(19): siRNA sense strand
gcaggucuaugaaguacau

SEQ ID NO: 406379 - RNA, 19 nt, Homo sapiens
  misc_RNA (1)...(19): siRNA sense strand
aauaagguguccagaauuc

SEQ ID NO: 406380 - RNA, 19 nt, Homo sapiens
  misc_RNA (1)...(19): siRNA sense strand
aagaaugcccugaggaaua

SEQ ID NO: 406381 - RNA, 19 nt, Homo sapiens
  misc_RNA (1)...(19): siRNA sense strand
ucagaugauuggacuauuc

SEQ ID NO: 406382 - RNA, 19 nt, Homo sapiens
  misc_RNA (1)...(19): siRNA sense strand
ucaccuugaucauaacaaa

SEQ ID NO: 406383 - RNA, 19 nt, Homo sapiens
  misc_RNA (1)...(19): siRNA sense strand
agaaugcccugaggaauau

SEQ ID NO: 406384 - RNA, 19 nt, Homo sapiens
  misc_RNA (1)...(19): siRNA sense strand
uaaggcaggucuaugaagu

SEQ ID NO: 406385 - RNA, 19 nt, Homo sapiens
  misc_RNA (1)...(19): siRNA sense strand
caaaacaaccugauagaaa

SEQ ID NO: 406386 - RNA, 19 nt, Homo sapiens
  misc_RNA (1)...(19): siRNA sense strand
ugcaggcugucauuauuua

SEQ ID NO: 406387 - RNA, 19 nt, Homo sapiens
  misc_RNA (1)...(19): siRNA sense strand
cacaaucuguuucaucaug

SEQ ID NO: 406388 - RNA, 19 nt, Homo sapiens
  misc_RNA (1)...(19): siRNA sense strand
acaaucaacucacaaaggu

SEQ ID NO: 406389 - RNA, 19 nt, Homo sapiens
  misc_RNA (1)...(19): siRNA sense strand
auagaggucucaaagaaau

SEQ ID NO: 406390 - RNA, 19 nt, Homo sapiens
  misc_RNA (1)...(19): siRNA sense strand
caagaggauuugauguauc

SEQ ID NO: 406391 - RNA, 19 nt, Homo sapiens
  misc_RNA (1)...(19): siRNA sense strand
gaaaauagaggucucaaag

SEQ ID NO: 406392 - RNA, 19 nt, Homo sapiens
  misc_RNA (1)...(19): siRNA sense strand
agaacgagauuccuucagu

SEQ ID NO: 406393 - RNA, 19 nt, Homo sapiens
  misc_RNA (1)...(19): siRNA sense strand
ccaagaaugcccugaggaa

SEQ ID NO: 406394 - RNA, 19 nt, Homo sapiens
  misc_RNA (1)...(19): siRNA sense strand
caucaauucuagaucuuca

SEQ ID NO: 406395 - RNA, 19 nt, Homo sapiens
  misc_RNA (1)...(19): siRNA sense strand
ugaaaucaaaccaccaauu

SEQ ID NO: 406396 - RNA, 19 nt, Homo sapiens
  misc_RNA (1)...(19): siRNA sense strand
cuacugcuuuauauuguga

SEQ ID NO: 406397 - RNA, 19 nt, Homo sapiens
  misc_RNA (1)...(19): siRNA sense strand
gaaauuccugcuauuccuu

SEQ ID NO: 406398 - RNA, 19 nt, Homo sapiens
  misc_RNA (1)...(19): siRNA sense strand
ucuggaagauaaugagcua

SEQ ID NO: 406399 - RNA, 19 nt, Homo sapiens
  misc_RNA (1)...(19): siRNA sense strand
agaaauaagguguccagaa

SEQ ID NO: 406400 - RNA, 19 nt, Homo sapiens
  misc_RNA (1)...(19): siRNA sense strand
ucugcaggcugucauuauu

SEQ ID NO: 406401 - RNA, 19 nt, Homo sapiens
  misc_RNA (1)...(19): siRNA sense strand
cuacagaacaacaaauuag

SEQ ID NO: 406402 - RNA, 19 nt, Homo sapiens
  misc_RNA (1)...(19): siRNA sense strand
ucuaugaaguacaugauuc

SEQ ID NO: 406403 - RNA, 19 nt, Homo sapiens
  misc_RNA (1)...(19): siRNA sense strand
caauuccaauggcuuuaau

SEQ ID NO: 406404 - RNA, 19 nt, Homo sapiens
  misc_RNA (1)...(19): siRNA sense strand
gcccuaagccagcugaaga

SEQ ID NO: 406405 - RNA, 19 nt, Homo sapiens
  misc_RNA (1)...(19): siRNA sense strand
uaaugugauuccuaaagug

SEQ ID NO: 406406 - RNA, 19 nt, Homo sapiens
  misc_RNA (1)...(19): siRNA sense strand
gaaggaauaccagaaaauu

SEQ ID NO: 406407 - RNA, 19 nt, Homo sapiens
  misc_RNA (1)...(19): siRNA sense strand
guguaaggcaggucuauga

SEQ ID NO: 406408 - RNA, 19 nt, Homo sapiens
  misc_RNA (1)...(19): siRNA sense strand
gagauuccuucaguuaugg

SEQ ID NO: 406409 - RNA, 19 nt, Homo sapiens
  misc_RNA (1)...(19): siRNA sense strand
aagaaucucaugcagcuaa

SEQ ID NO: 406410 - RNA, 19 nt, Homo sapiens
  misc_RNA (1)...(19): siRNA sense strand
ccuacagaacaacaaauua

SEQ ID NO: 406411 - RNA, 19 nt, Homo sapiens
  misc_RNA (1)...(19): siRNA sense strand
ggaagauaaugagcuagag

SEQ ID NO: 406412 - RNA, 19 nt, Homo sapiens
  misc_RNA (1)...(19): siRNA sense strand
caacaaauuaguggacaau

SEQ ID NO: 406413 - RNA, 19 nt, Homo sapiens
  misc_RNA (1)...(19): siRNA sense strand
ucacaaagguuccccgaau

SEQ ID NO: 406414 - RNA, 19 nt, Homo sapiens
  misc_RNA (1)...(19): siRNA sense strand
acaaauuaguggacaaugc

SEQ ID NO: 406415 - RNA, 19 nt, Homo sapiens
  misc_RNA (1)...(19): siRNA sense strand
aacgagauuccuucaguua

SEQ ID NO: 406416 - RNA, 19 nt, Homo sapiens
  misc_RNA (1)...(19): siRNA sense strand
gcagaacgagauuccuuca

SEQ ID NO: 406417 - RNA, 19 nt, Homo sapiens
  misc_RNA (1)...(19): siRNA sense strand
aaagaaauuccugcuauuc

SEQ ID NO: 406418 - RNA, 19 nt, Homo sapiens
  misc_RNA (1)...(19): siRNA sense strand
caccuucaccuugaucaua

SEQ ID NO: 406419 - RNA, 19 nt, Homo sapiens
  misc_RNA (1)...(19): siRNA sense strand
cauguggguguuauucaua

SEQ ID NO: 406420 - RNA, 19 nt, Homo sapiens
  misc_RNA (1)...(19): siRNA sense strand
gaaccugacccuucuugac

SEQ ID NO: 406421 - RNA, 19 nt, Homo sapiens
  misc_RNA (1)...(19): siRNA sense strand
aaguugcucuucuuauuuc

SEQ ID NO: 406422 - RNA, 19 nt, Homo sapiens
  misc_RNA (1)...(19): siRNA sense strand
gaaugccacccagcuaaga

SEQ ID NO: 406423 - RNA, 19 nt, Homo sapiens
  misc_RNA (1)...(19): siRNA sense strand
ccaauuccaauggcuuuaa

SEQ ID NO: 406424 - RNA, 19 nt, Homo sapiens
  misc_RNA (1)...(19): siRNA sense strand
caagauuaccagccaauac

SEQ ID NO: 406425 - RNA, 19 nt, Homo sapiens
  misc_RNA (1)...(19): siRNA sense strand
gcaggcacaaucuguuuca

SEQ ID NO: 406426 - RNA, 19 nt, Homo sapiens
  misc_RNA (1)...(19): siRNA sense strand
cuaaaucacaacaaacugu

SEQ ID NO: 406427 - RNA, 19 nt, Homo sapiens
  misc_RNA (1)...(19): siRNA sense strand
ugugaaugucucuguaaua

SEQ ID NO: 406428 - RNA, 19 nt, Homo sapiens
  misc_RNA (1)...(19): siRNA sense strand
ggacuauucaugacuucga

SEQ ID NO: 406429 - RNA, 19 nt, Homo sapiens
  misc_RNA (1)...(19): siRNA sense strand
gcacaaucaacucacaaag

SEQ ID NO: 406430 - RNA, 19 nt, Homo sapiens
  misc_RNA (1)...(19): siRNA sense strand
caacaaacugucagaugag

SEQ ID NO: 406431 - RNA, 19 nt, Homo sapiens
  misc_RNA (1)...(19): siRNA sense strand
gaaguacaugauucagaug

SEQ ID NO: 406432 - RNA, 19 nt, Homo sapiens
  misc_RNA (1)...(19): siRNA sense strand
gcaggcugucauuauuuaa

SEQ ID NO: 406433 - RNA, 19 nt, Homo sapiens
  misc_RNA (1)...(19): siRNA sense strand
ccaagauuaccagccaaua

SEQ ID NO: 406434 - RNA, 19 nt, Homo sapiens
  misc_RNA (1)...(19): siRNA sense strand
uguguggucuagaagugua

SEQ ID NO: 406435 - RNA, 19 nt, Homo sapiens
  misc_RNA (1)...(19): siRNA sense strand
aauagaggucucaaagaaa

SEQ ID NO: 406436 - RNA, 19 nt, Homo sapiens
  misc_RNA (1)...(19): siRNA sense strand
caaaccaccaauuccaaug

SEQ ID NO: 406437 - RNA, 19 nt, Homo sapiens
  misc_RNA (1)...(19): siRNA sense strand
gcagcaccuucaccuugau

SEQ ID NO: 406438 - RNA, 19 nt, Homo sapiens
  misc_RNA (1)...(19): siRNA sense strand
ugcagcaccuucaccuuga

SEQ ID NO: 406439 - RNA, 19 nt, Homo sapiens
  misc_RNA (1)...(19): siRNA sense strand
ggucucccaucaagaggau

SEQ ID NO: 406440 - RNA, 19 nt, Homo sapiens
  misc_RNA (1)...(19): siRNA sense strand
gacuaaaucacaacaaacu

SEQ ID NO: 406441 - RNA, 19 nt, Homo sapiens
  misc_RNA (1)...(19): siRNA sense strand
ccacccagcuaagauggau

SEQ ID NO: 406442 - RNA, 19 nt, Homo sapiens
  misc_RNA (1)...(19): siRNA sense strand
gugugaaugucucuguaau

SEQ ID NO: 406443 - RNA, 19 nt, Homo sapiens
  misc_RNA (1)...(19): siRNA sense strand
ccgaaucagugcucaucug

SEQ ID NO: 406444 - RNA, 19 nt, Homo sapiens
  misc_RNA (1)...(19): siRNA sense strand
gagggucucccaucaagag

SEQ ID NO: 406445 - RNA, 19 nt, Homo sapiens
  misc_RNA (1)...(19): siRNA sense strand
caagaaugcccugaggaau

SEQ ID NO: 406446 - RNA, 19 nt, Homo sapiens
  misc_RNA (1)...(19): siRNA sense strand
cuaaacauggccaagaaug

SEQ ID NO: 406447 - RNA, 19 nt, Homo sapiens
  misc_RNA (1)...(19): siRNA sense strand
gaaguguaaggcaggucua

SEQ ID NO: 406448 - RNA, 19 nt, Homo sapiens
  misc_RNA (1)...(19): siRNA sense strand
aaauaagguguccagaauu

SEQ ID NO: 406449 - RNA, 19 nt, Homo sapiens
  misc_RNA (1)...(19): siRNA sense strand
auaaccaacuacggaauug

SEQ ID NO: 406450 - RNA, 19 nt, Homo sapiens
  misc_RNA (1)...(19): siRNA sense strand
ucauguggguguuauucau

SEQ ID NO: 406451 - RNA, 19 nt, Homo sapiens
  misc_RNA (1)...(19): siRNA sense strand
accuucaccuugaucauaa

SEQ ID NO: 406452 - RNA, 19 nt, Homo sapiens
  misc_RNA (1)...(19): siRNA sense strand
cuucaacugucgcacaauc

SEQ ID NO: 406453 - RNA, 19 nt, Homo sapiens
  misc_RNA (1)...(19): siRNA sense strand
cacaacaaacugucagaug

SEQ ID NO: 406454 - RNA, 19 nt, Homo sapiens
  misc_RNA (1)...(19): siRNA sense strand
acaaucuguuucaucaugu

SEQ ID NO: 406455 - RNA, 19 nt, Homo sapiens
  misc_RNA (1)...(19): siRNA sense strand
uuuaaugaccugcuucaga

SEQ ID NO: 406456 - RNA, 19 nt, Homo sapiens
  misc_RNA (1)...(19): siRNA sense strand
gcacaaagagcgucuaaua

SEQ ID NO: 406457 - RNA, 19 nt, Homo sapiens
  misc_RNA (1)...(19): siRNA sense strand
gauuacaucuuucgucaua

SEQ ID NO: 406458 - RNA, 19 nt, Homo sapiens
  misc_RNA (1)...(19): siRNA sense strand
gggagaaucuguccaauug

SEQ ID NO: 406459 - RNA, 19 nt, Homo sapiens
  misc_RNA (1)...(19): siRNA sense strand
gaacgaucgucauuaacua

SEQ ID NO: 406460 - RNA, 19 nt, Homo sapiens
  misc_RNA (1)...(19): siRNA sense strand
acaaauggaugagcuguua

SEQ ID NO: 406461 - RNA, 19 nt, Homo sapiens
  misc_RNA (1)...(19): siRNA sense strand
gaacugaucaagucucuga

SEQ ID NO: 406462 - RNA, 19 nt, Homo sapiens
  misc_RNA (1)...(19): siRNA sense strand
gacgacaacuggacauaaa

SEQ ID NO: 406463 - RNA, 19 nt, Homo sapiens
  misc_RNA (1)...(19): siRNA sense strand
ucaagucucugaguuagua

SEQ ID NO: 406464 - RNA, 19 nt, Homo sapiens
  misc_RNA (1)...(19): siRNA sense strand
acaaagagcgucuaauaaa

SEQ ID NO: 406465 - RNA, 19 nt, Homo sapiens
  misc_RNA (1)...(19): siRNA sense strand
gcaaaacgcuucaagaaca

SEQ ID NO: 406466 - RNA, 19 nt, Homo sapiens
  misc_RNA (1)...(19): siRNA sense strand
gaucuucugccaaccuuua

SEQ ID NO: 406467 - RNA, 19 nt, Homo sapiens
  misc_RNA (1)...(19): siRNA sense strand
aaccaagacuccacagaua

SEQ ID NO: 406468 - RNA, 19 nt, Homo sapiens
  misc_RNA (1)...(19): siRNA sense strand
cagcagaucucagugaaga

SEQ ID NO: 406469 - RNA, 19 nt, Homo sapiens
  misc_RNA (1)...(19): siRNA sense strand
gaagaaagggagaaucugu

SEQ ID NO: 406470 - RNA, 19 nt, Homo sapiens
  misc_RNA (1)...(19): siRNA sense strand
gaucaagucucugaguuag

SEQ ID NO: 406471 - RNA, 19 nt, Homo sapiens
  misc_RNA (1)...(19): siRNA sense strand
gaaccaagacuccacagau

SEQ ID NO: 406472 - RNA, 19 nt, Homo sapiens
  misc_RNA (1)...(19): siRNA sense strand
gaaaggaggagcucaacau

SEQ ID NO: 406473 - RNA, 19 nt, Homo sapiens
  misc_RNA (1)...(19): siRNA sense strand
caaagagcgucuaauaaaa

SEQ ID NO: 406474 - RNA, 19 nt, Homo sapiens
  misc_RNA (1)...(19): siRNA sense strand
uggaaacacccgaggauua

SEQ ID NO: 406475 - RNA, 19 nt, Homo sapiens
  misc_RNA (1)...(19): siRNA sense strand
ggcuauugcuugaagagua

SEQ ID NO: 406476 - RNA, 19 nt, Homo sapiens
  misc_RNA (1)...(19): siRNA sense strand
ccucaaaccuggcaagaag

SEQ ID NO: 406477 - RNA, 19 nt, Homo sapiens
  misc_RNA (1)...(19): siRNA sense strand
gcuauugcuugaagaguau

SEQ ID NO: 406478 - RNA, 19 nt, Homo sapiens
  misc_RNA (1)...(19): siRNA sense strand
ggacgacaacuggacauaa

SEQ ID NO: 406479 - RNA, 19 nt, Homo sapiens
  misc_RNA (1)...(19): siRNA sense strand
gcagugagguccgaacgau

SEQ ID NO: 406480 - RNA, 19 nt, Homo sapiens
  misc_RNA (1)...(19): siRNA sense strand
ugaaggagcugagcaaagg

SEQ ID NO: 406481 - RNA, 19 nt, Homo sapiens
  misc_RNA (1)...(19): siRNA sense strand
aggaggagcucaacauugu

SEQ ID NO: 406482 - RNA, 19 nt, Homo sapiens
  misc_RNA (1)...(19): siRNA sense strand
cacaaagagcgucuaauaa

SEQ ID NO: 406483 - RNA, 19 nt, Homo sapiens
  misc_RNA (1)...(19): siRNA sense strand
gagaaucuguccaauugac

SEQ ID NO: 406484 - RNA, 19 nt, Homo sapiens
  misc_RNA (1)...(19): siRNA sense strand
gaacagcauacagucauga

SEQ ID NO: 406485 - RNA, 19 nt, Homo sapiens
  misc_RNA (1)...(19): siRNA sense strand
uccgaacgaucgucauuaa

SEQ ID NO: 406486 - RNA, 19 nt, Homo sapiens
  misc_RNA (1)...(19): siRNA sense strand
aguaucagcucccucgaaa

SEQ ID NO: 406487 - RNA, 19 nt, Homo sapiens
  misc_RNA (1)...(19): siRNA sense strand
gcuucgagcugaugugaca

SEQ ID NO: 406488 - RNA, 19 nt, Homo sapiens
  misc_RNA (1)...(19): siRNA sense strand
auaaagaagucaagcuaca

SEQ ID NO: 406489 - RNA, 19 nt, Homo sapiens
  misc_RNA (1)...(19): siRNA sense strand
caacuggacauaaagaagu

SEQ ID NO: 406490 - RNA, 19 nt, Homo sapiens
  misc_RNA (1)...(19): siRNA sense strand
ugacaucacccuagcacaa

SEQ ID NO: 406491 - RNA, 19 nt, Homo sapiens
  misc_RNA (1)...(19): siRNA sense strand
ccuaugugacugcaucuua

SEQ ID NO: 406492 - RNA, 19 nt, Homo sapiens
  misc_RNA (1)...(19): siRNA sense strand
ggaaacacccgaggauuac

SEQ ID NO: 406493 - RNA, 19 nt, Homo sapiens
  misc_RNA (1)...(19): siRNA sense strand
cuaaguuccugcagcaaau

SEQ ID NO: 406494 - RNA, 19 nt, Homo sapiens
  misc_RNA (1)...(19): siRNA sense strand
gaggagcucaacauuguga

SEQ ID NO: 406495 - RNA, 19 nt, Homo sapiens
  misc_RNA (1)...(19): siRNA sense strand
ugaucaagucucugaguua

SEQ ID NO: 406496 - RNA, 19 nt, Homo sapiens
  misc_RNA (1)...(19): siRNA sense strand
cagccugccuaucaaguga

SEQ ID NO: 406497 - RNA, 19 nt, Homo sapiens
  misc_RNA (1)...(19): siRNA sense strand
gaacuuggaggccuauggu

SEQ ID NO: 406498 - RNA, 19 nt, Homo sapiens
  misc_RNA (1)...(19): siRNA sense strand
aaagaagucaagcuacaaa

SEQ ID NO: 406499 - RNA, 19 nt, Homo sapiens
  misc_RNA (1)...(19): siRNA sense strand
acccgaggauuacaucuuu

SEQ ID NO: 406500 - RNA, 19 nt, Homo sapiens
  misc_RNA (1)...(19): siRNA sense strand
ggcgaccucugugccauuu

SEQ ID NO: 406501 - RNA, 19 nt, Homo sapiens
  misc_RNA (1)...(19): siRNA sense strand
gcagcaggagcagauuaua

SEQ ID NO: 406502 - RNA, 19 nt, Homo sapiens
  misc_RNA (1)...(19): siRNA sense strand
acauaaagaagucaagcua

SEQ ID NO: 406503 - RNA, 19 nt, Homo sapiens
  misc_RNA (1)...(19): siRNA sense strand
cgacaacuggacauaaaga

SEQ ID NO: 406504 - RNA, 19 nt, Homo sapiens
  misc_RNA (1)...(19): siRNA sense strand
uaaaaccccucuacugugu

SEQ ID NO: 406505 - RNA, 19 nt, Homo sapiens
  misc_RNA (1)...(19): siRNA sense strand
gacaucacccuagcacaaa

SEQ ID NO: 406506 - RNA, 19 nt, Homo sapiens
  misc_RNA (1)...(19): siRNA sense strand
gugacugcaucuuagagaa

SEQ ID NO: 406507 - RNA, 19 nt, Homo sapiens
  misc_RNA (1)...(19): siRNA sense strand
gcaugacccugcucuucca

SEQ ID NO: 406508 - RNA, 19 nt, Homo sapiens
  misc_RNA (1)...(19): siRNA sense strand
ggauucagcagaucucagu

SEQ ID NO: 406509 - RNA, 19 nt, Homo sapiens
  misc_RNA (1)...(19): siRNA sense strand
gcaaagggguggagagcau

SEQ ID NO: 406510 - RNA, 19 nt, Homo sapiens
  misc_RNA (1)...(19): siRNA sense strand
ugacugcaucuuagagaaa

SEQ ID NO: 406511 - RNA, 19 nt, Homo sapiens
  misc_RNA (1)...(19): siRNA sense strand
aaaggaggagcucaacauu

SEQ ID NO: 406512 - RNA, 19 nt, Homo sapiens
  misc_RNA (1)...(19): siRNA sense strand
caagagcccauugugaaga

SEQ ID NO: 406513 - RNA, 19 nt, Homo sapiens
  misc_RNA (1)...(19): siRNA sense strand
guacgugaguggugguaac

SEQ ID NO: 406514 - RNA, 19 nt, Homo sapiens
  misc_RNA (1)...(19): siRNA sense strand
acacauccaaggucuagaa

SEQ ID NO: 406515 - RNA, 19 nt, Homo sapiens
  misc_RNA (1)...(19): siRNA sense strand
ggagaaucuguccaauuga

SEQ ID NO: 406516 - RNA, 19 nt, Homo sapiens
  misc_RNA (1)...(19): siRNA sense strand
aagagcccauugugaagaa

SEQ ID NO: 406517 - RNA, 19 nt, Homo sapiens
  misc_RNA (1)...(19): siRNA sense strand
gucauuaacuacgccaaga

SEQ ID NO: 406518 - RNA, 19 nt, Homo sapiens
  misc_RNA (1)...(19): siRNA sense strand
uaaagaagucaagcuacaa

SEQ ID NO: 406519 - RNA, 19 nt, Homo sapiens
  misc_RNA (1)...(19): siRNA sense strand
ccaggcacgugaagacaag

SEQ ID NO: 406520 - RNA, 19 nt, Homo sapiens
  misc_RNA (1)...(19): siRNA sense strand
aauuacagccugccuauca

SEQ ID NO: 406521 - RNA, 19 nt, Homo sapiens
  misc_RNA (1)...(19): siRNA sense strand
ugaacagcauacagucaug

SEQ ID NO: 406522 - RNA, 19 nt, Homo sapiens
  misc_RNA (1)...(19): siRNA sense strand
gcugaccucccuuuacuca

SEQ ID NO: 406523 - RNA, 19 nt, Homo sapiens
  misc_RNA (1)...(19): siRNA sense strand
aaagggagaaucuguccaa

SEQ ID NO: 406524 - RNA, 19 nt, Homo sapiens
  misc_RNA (1)...(19): siRNA sense strand
cuaugugacugcaucuuag

SEQ ID NO: 406525 - RNA, 19 nt, Homo sapiens
  misc_RNA (1)...(19): siRNA sense strand
gacaacuggacauaaagaa

SEQ ID NO: 406526 - RNA, 19 nt, Homo sapiens
  misc_RNA (1)...(19): siRNA sense strand
ggaaaggaggagcucaaca

SEQ ID NO: 406527 - RNA, 19 nt, Homo sapiens
  misc_RNA (1)...(19): siRNA sense strand
cugccaaccuuuacaacau

SEQ ID NO: 406528 - RNA, 19 nt, Homo sapiens
  misc_RNA (1)...(19): siRNA sense strand
ucaaaccuggcaagaagaa

SEQ ID NO: 406529 - RNA, 19 nt, Homo sapiens
  misc_RNA (1)...(19): siRNA sense strand
gaguaucagcucccucgaa

SEQ ID NO: 406530 - RNA, 19 nt, Homo sapiens
  misc_RNA (1)...(19): siRNA sense strand
gugaagaaagggagaaucu

SEQ ID NO: 406531 - RNA, 19 nt, Homo sapiens
  misc_RNA (1)...(19): siRNA sense strand
cauuaacuacgccaagaaa

SEQ ID NO: 406532 - RNA, 19 nt, Homo sapiens
  misc_RNA (1)...(19): siRNA sense strand
cgaacgaucgucauuaacu

SEQ ID NO: 406533 - RNA, 19 nt, Homo sapiens
  misc_RNA (1)...(19): siRNA sense strand
gguccgaacgaucgucauu

SEQ ID NO: 406534 - RNA, 19 nt, Homo sapiens
  misc_RNA (1)...(19): siRNA sense strand
cugaucaagucucugaguu

SEQ ID NO: 406535 - RNA, 19 nt, Homo sapiens
  misc_RNA (1)...(19): siRNA sense strand
cgaccucugugccauuucu

SEQ ID NO: 406536 - RNA, 19 nt, Homo sapiens
  misc_RNA (1)...(19): siRNA sense strand
acacuuaccaggaccacuu

SEQ ID NO: 406537 - RNA, 19 nt, Homo sapiens
  misc_RNA (1)...(19): siRNA sense strand
caaaacgcuucaagaacaa

SEQ ID NO: 406538 - RNA, 19 nt, Homo sapiens
  misc_RNA (1)...(19): siRNA sense strand
uguacacgcugugguccua

SEQ ID NO: 406539 - RNA, 19 nt, Homo sapiens
  misc_RNA (1)...(19): siRNA sense strand
gccuugaagugccgaguca

SEQ ID NO: 406540 - RNA, 19 nt, Homo sapiens
  misc_RNA (1)...(19): siRNA sense strand
cugaccagguguuuggaaa

SEQ ID NO: 406541 - RNA, 19 nt, Homo sapiens
  misc_RNA (1)...(19): siRNA sense strand
aaacacauccaaggucuag

SEQ ID NO: 406542 - RNA, 19 nt, Homo sapiens
  misc_RNA (1)...(19): siRNA sense strand
uagcacaaagagcgucuaa

SEQ ID NO: 406543 - RNA, 19 nt, Homo sapiens
  misc_RNA (1)...(19): siRNA sense strand
gguccuauccugaucuucu

SEQ ID NO: 406544 - RNA, 19 nt, Homo sapiens
  misc_RNA (1)...(19): siRNA sense strand
ccaccucggcuggcuauug

SEQ ID NO: 406545 - RNA, 19 nt, Homo sapiens
  misc_RNA (1)...(19): siRNA sense strand
ccaugggacagucuucuga

SEQ ID NO: 406546 - RNA, 19 nt, Homo sapiens
  misc_RNA (1)...(19): siRNA sense strand
ggcccuggauucagcagau

SEQ ID NO: 406547 - RNA, 19 nt, Homo sapiens
  misc_RNA (1)...(19): siRNA sense strand
uagcaaaacgcuucaagaa

SEQ ID NO: 406548 - RNA, 19 nt, Homo sapiens
  misc_RNA (1)...(19): siRNA sense strand
cauccaaggucuagaaaag

SEQ ID NO: 406549 - RNA, 19 nt, Homo sapiens
  misc_RNA (1)...(19): siRNA sense strand
gaucccauccuaugugacu

SEQ ID NO: 406550 - RNA, 19 nt, Homo sapiens
  misc_RNA (1)...(19): siRNA sense strand
guccgaacgaucgucauua

SEQ ID NO: 406551 - RNA, 19 nt, Homo sapiens
  misc_RNA (1)...(19): siRNA sense strand
ugccaaccuuuacaacaug

SEQ ID NO: 406552 - RNA, 19 nt, Homo sapiens
  misc_RNA (1)...(19): siRNA sense strand
gagcucaacauugugaagu

SEQ ID NO: 406553 - RNA, 19 nt, Homo sapiens
  misc_RNA (1)...(19): siRNA sense strand
ucuaaguuccugcagcaaa

SEQ ID NO: 406554 - RNA, 19 nt, Homo sapiens
  misc_RNA (1)...(19): siRNA sense strand
aggcugaccucccuuuacu

SEQ ID NO: 406555 - RNA, 19 nt, Homo sapiens
  misc_RNA (1)...(19): siRNA sense strand
aacaaguccucuccaccuu

SEQ ID NO: 406556 - RNA, 19 nt, Homo sapiens
  misc_RNA (1)...(19): siRNA sense strand
gggcauaucuggaaucuga

SEQ ID NO: 406557 - RNA, 19 nt, Homo sapiens
  misc_RNA (1)...(19): siRNA sense strand
gauccaagcuauccagaaa

SEQ ID NO: 406558 - RNA, 19 nt, Homo sapiens
  misc_RNA (1)...(19): siRNA sense strand
caugugaacugcacgauaa

SEQ ID NO: 406559 - RNA, 19 nt, Homo sapiens
  misc_RNA (1)...(19): siRNA sense strand
guucagaaguacaguaauu

SEQ ID NO: 406560 - RNA, 19 nt, Homo sapiens
  misc_RNA (1)...(19): siRNA sense strand
ggagagacauuaagaagac

SEQ ID NO: 406561 - RNA, 19 nt, Homo sapiens
  misc_RNA (1)...(19): siRNA sense strand
aggcacagauagaucauua

SEQ ID NO: 406562 - RNA, 19 nt, Homo sapiens
  misc_RNA (1)...(19): siRNA sense strand
gagcguaacagccuacauu

SEQ ID NO: 406563 - RNA, 19 nt, Homo sapiens
  misc_RNA (1)...(19): siRNA sense strand
ggucugacacuacugauuu

SEQ ID NO: 406564 - RNA, 19 nt, Homo sapiens
  misc_RNA (1)...(19): siRNA sense strand
gaacugcacgauaaaggaa

SEQ ID NO: 406565 - RNA, 19 nt, Homo sapiens
  misc_RNA (1)...(19): siRNA sense strand
gaccaucagcuuuaggaua

SEQ ID NO: 406566 - RNA, 19 nt, Homo sapiens
  misc_RNA (1)...(19): siRNA sense strand
uuaaagaugcuauggcuaa

SEQ ID NO: 406567 - RNA, 19 nt, Homo sapiens
  misc_RNA (1)...(19): siRNA sense strand
guuggugccuuguuuaaug

SEQ ID NO: 406568 - RNA, 19 nt, Homo sapiens
  misc_RNA (1)...(19): siRNA sense strand
ucaguguuccuguuauuua

SEQ ID NO: 406569 - RNA, 19 nt, Homo sapiens
  misc_RNA (1)...(19): siRNA sense strand
uaaagaugcuauggcuaaa

SEQ ID NO: 406570 - RNA, 19 nt, Homo sapiens
  misc_RNA (1)...(19): siRNA sense strand
guguugauguggguauuua

SEQ ID NO: 406571 - RNA, 19 nt, Homo sapiens
  misc_RNA (1)...(19): siRNA sense strand
guacaguaauucugcucuu

SEQ ID NO: 406572 - RNA, 19 nt, Homo sapiens
  misc_RNA (1)...(19): siRNA sense strand
uaucuaggacuugcaaaua

SEQ ID NO: 406573 - RNA, 19 nt, Homo sapiens
  misc_RNA (1)...(19): siRNA sense strand
gaagcgcaaagcugaauga

SEQ ID NO: 406574 - RNA, 19 nt, Homo sapiens
  misc_RNA (1)...(19): siRNA sense strand
ggaaucugaaguugcuaua

SEQ ID NO: 406575 - RNA, 19 nt, Homo sapiens
  misc_RNA (1)...(19): siRNA sense strand
accaucagcuuuaggauau

SEQ ID NO: 406576 - RNA, 19 nt, Homo sapiens
  misc_RNA (1)...(19): siRNA sense strand
gaacucaggcgccucuucu

SEQ ID NO: 406577 - RNA, 19 nt, Homo sapiens
  misc_RNA (1)...(19): siRNA sense strand
aaucugaaguugcuauauc

SEQ ID NO: 406578 - RNA, 19 nt, Homo sapiens
  misc_RNA (1)...(19): siRNA sense strand
aggaguugguucagaagua

SEQ ID NO: 406579 - RNA, 19 nt, Homo sapiens
  misc_RNA (1)...(19): siRNA sense strand
gaaguuugcaguguugaug

SEQ ID NO: 406580 - RNA, 19 nt, Homo sapiens
  misc_RNA (1)...(19): siRNA sense strand
cuauguuggugccuuguuu

SEQ ID NO: 406581 - RNA, 19 nt, Homo sapiens
  misc_RNA (1)...(19): siRNA sense strand
ggaguugguucagaaguac

SEQ ID NO: 406582 - RNA, 19 nt, Homo sapiens
  misc_RNA (1)...(19): siRNA sense strand
ggacuugcaaauaagaaug

SEQ ID NO: 406583 - RNA, 19 nt, Homo sapiens
  misc_RNA (1)...(19): siRNA sense strand
gcucucauuucacucuuca

SEQ ID NO: 406584 - RNA, 19 nt, Homo sapiens
  misc_RNA (1)...(19): siRNA sense strand
uaucuggaaucugaaguug

SEQ ID NO: 406585 - RNA, 19 nt, Homo sapiens
  misc_RNA (1)...(19): siRNA sense strand
caguguuccuguuauuuau

SEQ ID NO: 406586 - RNA, 19 nt, Homo sapiens
  misc_RNA (1)...(19): siRNA sense strand
gaagacuggagugguguuu

SEQ ID NO: 406587 - RNA, 19 nt, Homo sapiens
  misc_RNA (1)...(19): siRNA sense strand
guguuccuguuauuuauga

SEQ ID NO: 406588 - RNA, 19 nt, Homo sapiens
  misc_RNA (1)...(19): siRNA sense strand
gauuuuggcucucauuuca

SEQ ID NO: 406589 - RNA, 19 nt, Homo sapiens
  misc_RNA (1)...(19): siRNA sense strand
ucugugaccaucagcuuua

SEQ ID NO: 406590 - RNA, 19 nt, Homo sapiens
  misc_RNA (1)...(19): siRNA sense strand
acucaggcgccucuucuua

SEQ ID NO: 406591 - RNA, 19 nt, Homo sapiens
  misc_RNA (1)...(19): siRNA sense strand
cuucaguguuccuguuauu

SEQ ID NO: 406592 - RNA, 19 nt, Homo sapiens
  misc_RNA (1)...(19): siRNA sense strand
aucuaggacuugcaaauaa

SEQ ID NO: 406593 - RNA, 19 nt, Homo sapiens
  misc_RNA (1)...(19): siRNA sense strand
auacaagggugugauccaa

SEQ ID NO: 406594 - RNA, 19 nt, Homo sapiens
  misc_RNA (1)...(19): siRNA sense strand
ucugaaguuugcaguguug

SEQ ID NO: 406595 - RNA, 19 nt, Homo sapiens
  misc_RNA (1)...(19): siRNA sense strand
uccaagcuauccagaaauc

SEQ ID NO: 406596 - RNA, 19 nt, Homo sapiens
  misc_RNA (1)...(19): siRNA sense strand
gauauacaagggugugauc

SEQ ID NO: 406597 - RNA, 19 nt, Homo sapiens
  misc_RNA (1)...(19): siRNA sense strand
agacuggagugguguuugg

SEQ ID NO: 406598 - RNA, 19 nt, Homo sapiens
  misc_RNA (1)...(19): siRNA sense strand
aggcgccucuucuuaguug

SEQ ID NO: 406599 - RNA, 19 nt, Homo sapiens
  misc_RNA (1)...(19): siRNA sense strand
uacaguaauucugcucuug

SEQ ID NO: 406600 - RNA, 19 nt, Homo sapiens
  misc_RNA (1)...(19): siRNA sense strand
uuaauggucugacacuacu

SEQ ID NO: 406601 - RNA, 19 nt, Homo sapiens
  misc_RNA (1)...(19): siRNA sense strand
gaaucugaaguugcuauau

SEQ ID NO: 406602 - RNA, 19 nt, Homo sapiens
  misc_RNA (1)...(19): siRNA sense strand
gaucauuaucuaggacuug

SEQ ID NO: 406603 - RNA, 19 nt, Homo sapiens
  misc_RNA (1)...(19): siRNA sense strand
ucaggcgccucuucuuagu

SEQ ID NO: 406604 - RNA, 19 nt, Homo sapiens
  misc_RNA (1)...(19): siRNA sense strand
ugcuauaucugaggaguug

SEQ ID NO: 406605 - RNA, 19 nt, Homo sapiens
  misc_RNA (1)...(19): siRNA sense strand
ccaucagcuuuaggauaua

SEQ ID NO: 406606 - RNA, 19 nt, Homo sapiens
  misc_RNA (1)...(19): siRNA sense strand
ucuaggacuugcaaauaag

SEQ ID NO: 406607 - RNA, 19 nt, Homo sapiens
  misc_RNA (1)...(19): siRNA sense strand
uauguuggugccuuguuua

SEQ ID NO: 406608 - RNA, 19 nt, Homo sapiens
  misc_RNA (1)...(19): siRNA sense strand
ucucugaaguuugcagugu

SEQ ID NO: 406609 - RNA, 19 nt, Homo sapiens
  misc_RNA (1)...(19): siRNA sense strand
cagaugaaggccacccauu

SEQ ID NO: 406610 - RNA, 19 nt, Homo sapiens
  misc_RNA (1)...(19): siRNA sense strand
ucaugugaacugcacgaua

SEQ ID NO: 406611 - RNA, 19 nt, Homo sapiens
  misc_RNA (1)...(19): siRNA sense strand
uaucugaggaguugguuca

SEQ ID NO: 406612 - RNA, 19 nt, Homo sapiens
  misc_RNA (1)...(19): siRNA sense strand
guuuaauggucugacacua

SEQ ID NO: 406613 - RNA, 19 nt, Homo sapiens
  misc_RNA (1)...(19): siRNA sense strand
ggaacucaggcgccucuuc

SEQ ID NO: 406614 - RNA, 19 nt, Homo sapiens
  misc_RNA (1)...(19): siRNA sense strand
ugacaguauucagcauugu

SEQ ID NO: 406615 - RNA, 19 nt, Homo sapiens
  misc_RNA (1)...(19): siRNA sense strand
guacuggagagacauuaag

SEQ ID NO: 406616 - RNA, 19 nt, Homo sapiens
  misc_RNA (1)...(19): siRNA sense strand
cugcuuucauugacaguau

SEQ ID NO: 406617 - RNA, 19 nt, Homo sapiens
  misc_RNA (1)...(19): siRNA sense strand
ugaacugcacgauaaagga

SEQ ID NO: 406618 - RNA, 19 nt, Homo sapiens
  misc_RNA (1)...(19): siRNA sense strand
caucagcuuuaggauauac

SEQ ID NO: 406619 - RNA, 19 nt, Homo sapiens
  misc_RNA (1)...(19): siRNA sense strand
gaauguuaaagaugcuaug

SEQ ID NO: 406620 - RNA, 19 nt, Homo sapiens
  misc_RNA (1)...(19): siRNA sense strand
uugacaguauucagcauug

SEQ ID NO: 406621 - RNA, 19 nt, Homo sapiens
  misc_RNA (1)...(19): siRNA sense strand
agaugaaggccacccauuc

SEQ ID NO: 406622 - RNA, 19 nt, Homo sapiens
  misc_RNA (1)...(19): siRNA sense strand
gaacggcaucaggcacaga

SEQ ID NO: 406623 - RNA, 19 nt, Homo sapiens
  misc_RNA (1)...(19): siRNA sense strand
gccuauuccugcugcuuuc

SEQ ID NO: 406624 - RNA, 19 nt, Homo sapiens
  misc_RNA (1)...(19): siRNA sense strand
ucuggaaucugaaguugcu

SEQ ID NO: 406625 - RNA, 19 nt, Homo sapiens
  misc_RNA (1)...(19): siRNA sense strand
acucuucaguguuccuguu

SEQ ID NO: 406626 - RNA, 19 nt, Homo sapiens
  misc_RNA (1)...(19): siRNA sense strand
uggagagacauuaagaaga

SEQ ID NO: 406627 - RNA, 19 nt, Homo sapiens
  misc_RNA (1)...(19): siRNA sense strand
caguaauucugcucuuggu

SEQ ID NO: 406628 - RNA, 19 nt, Homo sapiens
  misc_RNA (1)...(19): siRNA sense strand
uauuccugcugcuuucauu

SEQ ID NO: 406629 - RNA, 19 nt, Homo sapiens
  misc_RNA (1)...(19): siRNA sense strand
acaguauucagcauuguga

SEQ ID NO: 406630 - RNA, 19 nt, Homo sapiens
  misc_RNA (1)...(19): siRNA sense strand
ggcaucaggcacagauaga

SEQ ID NO: 406631 - RNA, 19 nt, Homo sapiens
  misc_RNA (1)...(19): siRNA sense strand
gcaguguugauguggguau

SEQ ID NO: 406632 - RNA, 19 nt, Homo sapiens
  misc_RNA (1)...(19): siRNA sense strand
uugauucucugaaguuugc

SEQ ID NO: 406633 - RNA, 19 nt, Homo sapiens
  misc_RNA (1)...(19): siRNA sense strand
uuaguugauucucugaagu

SEQ ID NO: 406634 - RNA, 19 nt, Homo sapiens
  misc_RNA (1)...(19): siRNA sense strand
gggcauaucuggaaucuga

SEQ ID NO: 406635 - RNA, 19 nt, Homo sapiens
  misc_RNA (1)...(19): siRNA sense strand
gauccaagcuauccagaaa

SEQ ID NO: 406636 - RNA, 19 nt, Homo sapiens
  misc_RNA (1)...(19): siRNA sense strand
caugugaacugcacgauaa

SEQ ID NO: 406637 - RNA, 19 nt, Homo sapiens
  misc_RNA (1)...(19): siRNA sense strand
guucagaaguacaguaauu

SEQ ID NO: 406638 - RNA, 19 nt, Homo sapiens
  misc_RNA (1)...(19): siRNA sense strand
ggagagacauuaagaagac

SEQ ID NO: 406639 - RNA, 19 nt, Homo sapiens
  misc_RNA (1)...(19): siRNA sense strand
aggcacagauagaucauua

SEQ ID NO: 406640 - RNA, 19 nt, Homo sapiens
  misc_RNA (1)...(19): siRNA sense strand
gagcguaacagccuacauu

SEQ ID NO: 406641 - RNA, 19 nt, Homo sapiens
  misc_RNA (1)...(19): siRNA sense strand
ggucugacacuacugauuu

SEQ ID NO: 406642 - RNA, 19 nt, Homo sapiens
  misc_RNA (1)...(19): siRNA sense strand
gaacugcacgauaaaggaa

SEQ ID NO: 406643 - RNA, 19 nt, Homo sapiens
  misc_RNA (1)...(19): siRNA sense strand
gaccaucagcuuuaggaua

SEQ ID NO: 406644 - RNA, 19 nt, Homo sapiens
  misc_RNA (1)...(19): siRNA sense strand
uuaaagaugcuauggcuaa

SEQ ID NO: 406645 - RNA, 19 nt, Homo sapiens
  misc_RNA (1)...(19): siRNA sense strand
guuggugccuuguuuaaug

SEQ ID NO: 406646 - RNA, 19 nt, Homo sapiens
  misc_RNA (1)...(19): siRNA sense strand
ucaguguuccuguuauuua

SEQ ID NO: 406647 - RNA, 19 nt, Homo sapiens
  misc_RNA (1)...(19): siRNA sense strand
uaaagaugcuauggcuaaa

SEQ ID NO: 406648 - RNA, 19 nt, Homo sapiens
  misc_RNA (1)...(19): siRNA sense strand
guguugauguggguauuua

SEQ ID NO: 406649 - RNA, 19 nt, Homo sapiens
  misc_RNA (1)...(19): siRNA sense strand
guacaguaauucugcucuu

SEQ ID NO: 406650 - RNA, 19 nt, Homo sapiens
  misc_RNA (1)...(19): siRNA sense strand
uaucuaggacuugcaaaua

SEQ ID NO: 406651 - RNA, 19 nt, Homo sapiens
  misc_RNA (1)...(19): siRNA sense strand
gaagcgcaaagcugaauga

SEQ ID NO: 406652 - RNA, 19 nt, Homo sapiens
  misc_RNA (1)...(19): siRNA sense strand
ggaaucugaaguugcuaua

SEQ ID NO: 406653 - RNA, 19 nt, Homo sapiens
  misc_RNA (1)...(19): siRNA sense strand
accaucagcuuuaggauau

SEQ ID NO: 406654 - RNA, 19 nt, Homo sapiens
  misc_RNA (1)...(19): siRNA sense strand
gaacucaggcgccucuucu

SEQ ID NO: 406655 - RNA, 19 nt, Homo sapiens
  misc_RNA (1)...(19): siRNA sense strand
aaucugaaguugcuauauc

SEQ ID NO: 406656 - RNA, 19 nt, Homo sapiens
  misc_RNA (1)...(19): siRNA sense strand
aggaguugguucagaagua

SEQ ID NO: 406657 - RNA, 19 nt, Homo sapiens
  misc_RNA (1)...(19): siRNA sense strand
gaaguuugcaguguugaug

SEQ ID NO: 406658 - RNA, 19 nt, Homo sapiens
  misc_RNA (1)...(19): siRNA sense strand
cuauguuggugccuuguuu

SEQ ID NO: 406659 - RNA, 19 nt, Homo sapiens
  misc_RNA (1)...(19): siRNA sense strand
ggaguugguucagaaguac

SEQ ID NO: 406660 - RNA, 19 nt, Homo sapiens
  misc_RNA (1)...(19): siRNA sense strand
ggacuugcaaauaagaaug

SEQ ID NO: 406661 - RNA, 19 nt, Homo sapiens
  misc_RNA (1)...(19): siRNA sense strand
gcucucauuucacucuuca

SEQ ID NO: 406662 - RNA, 19 nt, Homo sapiens
  misc_RNA (1)...(19): siRNA sense strand
uaucuggaaucugaaguug

SEQ ID NO: 406663 - RNA, 19 nt, Homo sapiens
  misc_RNA (1)...(19): siRNA sense strand
caguguuccuguuauuuau

SEQ ID NO: 406664 - RNA, 19 nt, Homo sapiens
  misc_RNA (1)...(19): siRNA sense strand
gaagacuggagugguguuu

SEQ ID NO: 406665 - RNA, 19 nt, Homo sapiens
  misc_RNA (1)...(19): siRNA sense strand
guguuccuguuauuuauga

SEQ ID NO: 406666 - RNA, 19 nt, Homo sapiens
  misc_RNA (1)...(19): siRNA sense strand
gauuuuggcucucauuuca

SEQ ID NO: 406667 - RNA, 19 nt, Homo sapiens
  misc_RNA (1)...(19): siRNA sense strand
ucugugaccaucagcuuua

SEQ ID NO: 406668 - RNA, 19 nt, Homo sapiens
  misc_RNA (1)...(19): siRNA sense strand
acucaggcgccucuucuua

SEQ ID NO: 406669 - RNA, 19 nt, Homo sapiens
  misc_RNA (1)...(19): siRNA sense strand
cuucaguguuccuguuauu

SEQ ID NO: 406670 - RNA, 19 nt, Homo sapiens
  misc_RNA (1)...(19): siRNA sense strand
aucuaggacuugcaaauaa

SEQ ID NO: 406671 - RNA, 19 nt, Homo sapiens
  misc_RNA (1)...(19): siRNA sense strand
auacaagggugugauccaa

SEQ ID NO: 406672 - RNA, 19 nt, Homo sapiens
  misc_RNA (1)...(19): siRNA sense strand
ucugaaguuugcaguguug

SEQ ID NO: 406673 - RNA, 19 nt, Homo sapiens
  misc_RNA (1)...(19): siRNA sense strand
uccaagcuauccagaaauc

SEQ ID NO: 406674 - RNA, 19 nt, Homo sapiens
  misc_RNA (1)...(19): siRNA sense strand
gauauacaagggugugauc

SEQ ID NO: 406675 - RNA, 19 nt, Homo sapiens
  misc_RNA (1)...(19): siRNA sense strand
agacuggagugguguuugg

SEQ ID NO: 406676 - RNA, 19 nt, Homo sapiens
  misc_RNA (1)...(19): siRNA sense strand
aggcgccucuucuuaguug

SEQ ID NO: 406677 - RNA, 19 nt, Homo sapiens
  misc_RNA (1)...(19): siRNA sense strand
uacaguaauucugcucuug

SEQ ID NO: 406678 - RNA, 19 nt, Homo sapiens
  misc_RNA (1)...(19): siRNA sense strand
uuaauggucugacacuacu

SEQ ID NO: 406679 - RNA, 19 nt, Homo sapiens
  misc_RNA (1)...(19): siRNA sense strand
gaaucugaaguugcuauau

SEQ ID NO: 406680 - RNA, 19 nt, Homo sapiens
  misc_RNA (1)...(19): siRNA sense strand
gaucauuaucuaggacuug

SEQ ID NO: 406681 - RNA, 19 nt, Homo sapiens
  misc_RNA (1)...(19): siRNA sense strand
ucaggcgccucuucuuagu

SEQ ID NO: 406682 - RNA, 19 nt, Homo sapiens
  misc_RNA (1)...(19): siRNA sense strand
ugcuauaucugaggaguug

SEQ ID NO: 406683 - RNA, 19 nt, Homo sapiens
  misc_RNA (1)...(19): siRNA sense strand
ccaucagcuuuaggauaua

SEQ ID NO: 406684 - RNA, 19 nt, Homo sapiens
  misc_RNA (1)...(19): siRNA sense strand
ucuaggacuugcaaauaag

SEQ ID NO: 406685 - RNA, 19 nt, Homo sapiens
  misc_RNA (1)...(19): siRNA sense strand
uauguuggugccuuguuua

SEQ ID NO: 406686 - RNA, 19 nt, Homo sapiens
  misc_RNA (1)...(19): siRNA sense strand
ucucugaaguuugcagugu

SEQ ID NO: 406687 - RNA, 19 nt, Homo sapiens
  misc_RNA (1)...(19): siRNA sense strand
cagaugaaggccacccauu

SEQ ID NO: 406688 - RNA, 19 nt, Homo sapiens
  misc_RNA (1)...(19): siRNA sense strand
ucaugugaacugcacgaua

SEQ ID NO: 406689 - RNA, 19 nt, Homo sapiens
  misc_RNA (1)...(19): siRNA sense strand
uaucugaggaguugguuca

SEQ ID NO: 406690 - RNA, 19 nt, Homo sapiens
  misc_RNA (1)...(19): siRNA sense strand
guuuaauggucugacacua

SEQ ID NO: 406691 - RNA, 19 nt, Homo sapiens
  misc_RNA (1)...(19): siRNA sense strand
ggaacucaggcgccucuuc

SEQ ID NO: 406692 - RNA, 19 nt, Homo sapiens
  misc_RNA (1)...(19): siRNA sense strand
ugacaguauucagcauugu

SEQ ID NO: 406693 - RNA, 19 nt, Homo sapiens
  misc_RNA (1)...(19): siRNA sense strand
guacuggagagacauuaag

SEQ ID NO: 406694 - RNA, 19 nt, Homo sapiens
  misc_RNA (1)...(19): siRNA sense strand
cugcuuucauugacaguau

SEQ ID NO: 406695 - RNA, 19 nt, Homo sapiens
  misc_RNA (1)...(19): siRNA sense strand
ugaacugcacgauaaagga

SEQ ID NO: 406696 - RNA, 19 nt, Homo sapiens
  misc_RNA (1)...(19): siRNA sense strand
caucagcuuuaggauauac

SEQ ID NO: 406697 - RNA, 19 nt, Homo sapiens
  misc_RNA (1)...(19): siRNA sense strand
gaauguuaaagaugcuaug

SEQ ID NO: 406698 - RNA, 19 nt, Homo sapiens
  misc_RNA (1)...(19): siRNA sense strand
uugacaguauucagcauug

SEQ ID NO: 406699 - RNA, 19 nt, Homo sapiens
  misc_RNA (1)...(19): siRNA sense strand
agaugaaggccacccauuc

SEQ ID NO: 406700 - RNA, 19 nt, Homo sapiens
  misc_RNA (1)...(19): siRNA sense strand
gaacggcaucaggcacaga

SEQ ID NO: 406701 - RNA, 19 nt, Homo sapiens
  misc_RNA (1)...(19): siRNA sense strand
gccuauuccugcugcuuuc

SEQ ID NO: 406702 - RNA, 19 nt, Homo sapiens
  misc_RNA (1)...(19): siRNA sense strand
ucuggaaucugaaguugcu

SEQ ID NO: 406703 - RNA, 19 nt, Homo sapiens
  misc_RNA (1)...(19): siRNA sense strand
acucuucaguguuccuguu

SEQ ID NO: 406704 - RNA, 19 nt, Homo sapiens
  misc_RNA (1)...(19): siRNA sense strand
uggagagacauuaagaaga

SEQ ID NO: 406705 - RNA, 19 nt, Homo sapiens
  misc_RNA (1)...(19): siRNA sense strand
caguaauucugcucuuggu

SEQ ID NO: 406706 - RNA, 19 nt, Homo sapiens
  misc_RNA (1)...(19): siRNA sense strand
uauuccugcugcuuucauu

SEQ ID NO: 406707 - RNA, 19 nt, Homo sapiens
  misc_RNA (1)...(19): siRNA sense strand
acaguauucagcauuguga

SEQ ID NO: 406708 - RNA, 19 nt, Homo sapiens
  misc_RNA (1)...(19): siRNA sense strand
ggcaucaggcacagauaga

SEQ ID NO: 406709 - RNA, 19 nt, Homo sapiens
  misc_RNA (1)...(19): siRNA sense strand
gcaguguugauguggguau

SEQ ID NO: 406710 - RNA, 19 nt, Homo sapiens
  misc_RNA (1)...(19): siRNA sense strand
uugauucucugaaguuugc

SEQ ID NO: 406711 - RNA, 19 nt, Homo sapiens
  misc_RNA (1)...(19): siRNA sense strand
uuaguugauucucugaagu

SEQ ID NO: 406712 - RNA, 19 nt, Homo sapiens
  misc_RNA (1)...(19): siRNA sense strand
gggcauaucuggaaucuga

SEQ ID NO: 406713 - RNA, 19 nt, Homo sapiens
  misc_RNA (1)...(19): siRNA sense strand
gauccaagcuauccagaaa

SEQ ID NO: 406714 - RNA, 19 nt, Homo sapiens
  misc_RNA (1)...(19): siRNA sense strand
caugugaacugcacgauaa

SEQ ID NO: 406715 - RNA, 19 nt, Homo sapiens
  misc_RNA (1)...(19): siRNA sense strand
guucagaaguacaguaauu

SEQ ID NO: 406716 - RNA, 19 nt, Homo sapiens
  misc_RNA (1)...(19): siRNA sense strand
ggagagacauuaagaagac

SEQ ID NO: 406717 - RNA, 19 nt, Homo sapiens
  misc_RNA (1)...(19): siRNA sense strand
aggcacagauagaucauua

SEQ ID NO: 406718 - RNA, 19 nt, Homo sapiens
  misc_RNA (1)...(19): siRNA sense strand
gagcguaacagccuacauu

SEQ ID NO: 406719 - RNA, 19 nt, Homo sapiens
  misc_RNA (1)...(19): siRNA sense strand
ggucugacacuacugauuu

SEQ ID NO: 406720 - RNA, 19 nt, Homo sapiens
  misc_RNA (1)...(19): siRNA sense strand
gaacugcacgauaaaggaa

SEQ ID NO: 406721 - RNA, 19 nt, Homo sapiens
  misc_RNA (1)...(19): siRNA sense strand
gaccaucagcuuuaggaua

SEQ ID NO: 406722 - RNA, 19 nt, Homo sapiens
  misc_RNA (1)...(19): siRNA sense strand
uuaaagaugcuauggcuaa

SEQ ID NO: 406723 - RNA, 19 nt, Homo sapiens
  misc_RNA (1)...(19): siRNA sense strand
guuggugccuuguuuaaug

SEQ ID NO: 406724 - RNA, 19 nt, Homo sapiens
  misc_RNA (1)...(19): siRNA sense strand
ucaguguuccuguuauuua

SEQ ID NO: 406725 - RNA, 19 nt, Homo sapiens
  misc_RNA (1)...(19): siRNA sense strand
uaaagaugcuauggcuaaa

SEQ ID NO: 406726 - RNA, 19 nt, Homo sapiens
  misc_RNA (1)...(19): siRNA sense strand
guguugauguggguauuua

SEQ ID NO: 406727 - RNA, 19 nt, Homo sapiens
  misc_RNA (1)...(19): siRNA sense strand
guacaguaauucugcucuu

SEQ ID NO: 406728 - RNA, 19 nt, Homo sapiens
  misc_RNA (1)...(19): siRNA sense strand
uaucuaggacuugcaaaua

SEQ ID NO: 406729 - RNA, 19 nt, Homo sapiens
  misc_RNA (1)...(19): siRNA sense strand
gaagcgcaaagcugaauga

SEQ ID NO: 406730 - RNA, 19 nt, Homo sapiens
  misc_RNA (1)...(19): siRNA sense strand
ggaaucugaaguugcuaua

SEQ ID NO: 406731 - RNA, 19 nt, Homo sapiens
  misc_RNA (1)...(19): siRNA sense strand
accaucagcuuuaggauau

SEQ ID NO: 406732 - RNA, 19 nt, Homo sapiens
  misc_RNA (1)...(19): siRNA sense strand
gaacucaggcgccucuucu

SEQ ID NO: 406733 - RNA, 19 nt, Homo sapiens
  misc_RNA (1)...(19): siRNA sense strand
aaucugaaguugcuauauc

SEQ ID NO: 406734 - RNA, 19 nt, Homo sapiens
  misc_RNA (1)...(19): siRNA sense strand
aggaguugguucagaagua

SEQ ID NO: 406735 - RNA, 19 nt, Homo sapiens
  misc_RNA (1)...(19): siRNA sense strand
gaaguuugcaguguugaug

SEQ ID NO: 406736 - RNA, 19 nt, Homo sapiens
  misc_RNA (1)...(19): siRNA sense strand
cuauguuggugccuuguuu

SEQ ID NO: 406737 - RNA, 19 nt, Homo sapiens
  misc_RNA (1)...(19): siRNA sense strand
ggaguugguucagaaguac

SEQ ID NO: 406738 - RNA, 19 nt, Homo sapiens
  misc_RNA (1)...(19): siRNA sense strand
ggacuugcaaauaagaaug

SEQ ID NO: 406739 - RNA, 19 nt, Homo sapiens
  misc_RNA (1)...(19): siRNA sense strand
gcucucauuucacucuuca

SEQ ID NO: 406740 - RNA, 19 nt, Homo sapiens
  misc_RNA (1)...(19): siRNA sense strand
uaucuggaaucugaaguug

SEQ ID NO: 406741 - RNA, 19 nt, Homo sapiens
  misc_RNA (1)...(19): siRNA sense strand
caguguuccuguuauuuau

SEQ ID NO: 406742 - RNA, 19 nt, Homo sapiens
  misc_RNA (1)...(19): siRNA sense strand
gaagacuggagugguguuu

SEQ ID NO: 406743 - RNA, 19 nt, Homo sapiens
  misc_RNA (1)...(19): siRNA sense strand
guguuccuguuauuuauga

SEQ ID NO: 406744 - RNA, 19 nt, Homo sapiens
  misc_RNA (1)...(19): siRNA sense strand
gauuuuggcucucauuuca

SEQ ID NO: 406745 - RNA, 19 nt, Homo sapiens
  misc_RNA (1)...(19): siRNA sense strand
ucugugaccaucagcuuua

SEQ ID NO: 406746 - RNA, 19 nt, Homo sapiens
  misc_RNA (1)...(19): siRNA sense strand
acucaggcgccucuucuua

SEQ ID NO: 406747 - RNA, 19 nt, Homo sapiens
  misc_RNA (1)...(19): siRNA sense strand
cuucaguguuccuguuauu

SEQ ID NO: 406748 - RNA, 19 nt, Homo sapiens
  misc_RNA (1)...(19): siRNA sense strand
aucuaggacuugcaaauaa

SEQ ID NO: 406749 - RNA, 19 nt, Homo sapiens
  misc_RNA (1)...(19): siRNA sense strand
auacaagggugugauccaa

SEQ ID NO: 406750 - RNA, 19 nt, Homo sapiens
  misc_RNA (1)...(19): siRNA sense strand
ucugaaguuugcaguguug

SEQ ID NO: 406751 - RNA, 19 nt, Homo sapiens
  misc_RNA (1)...(19): siRNA sense strand
uccaagcuauccagaaauc

SEQ ID NO: 406752 - RNA, 19 nt, Homo sapiens
  misc_RNA (1)...(19): siRNA sense strand
gauauacaagggugugauc

SEQ ID NO: 406753 - RNA, 19 nt, Homo sapiens
  misc_RNA (1)...(19): siRNA sense strand
agacuggagugguguuugg

SEQ ID NO: 406754 - RNA, 19 nt, Homo sapiens
  misc_RNA (1)...(19): siRNA sense strand
aggcgccucuucuuaguug

SEQ ID NO: 406755 - RNA, 19 nt, Homo sapiens
  misc_RNA (1)...(19): siRNA sense strand
uacaguaauucugcucuug

SEQ ID NO: 406756 - RNA, 19 nt, Homo sapiens
  misc_RNA (1)...(19): siRNA sense strand
uuaauggucugacacuacu

SEQ ID NO: 406757 - RNA, 19 nt, Homo sapiens
  misc_RNA (1)...(19): siRNA sense strand
gaaucugaaguugcuauau

SEQ ID NO: 406758 - RNA, 19 nt, Homo sapiens
  misc_RNA (1)...(19): siRNA sense strand
gaucauuaucuaggacuug

SEQ ID NO: 406759 - RNA, 19 nt, Homo sapiens
  misc_RNA (1)...(19): siRNA sense strand
ucaggcgccucuucuuagu

SEQ ID NO: 406760 - RNA, 19 nt, Homo sapiens
  misc_RNA (1)...(19): siRNA sense strand
ugcuauaucugaggaguug

SEQ ID NO: 406761 - RNA, 19 nt, Homo sapiens
  misc_RNA (1)...(19): siRNA sense strand
ccaucagcuuuaggauaua

SEQ ID NO: 406762 - RNA, 19 nt, Homo sapiens
  misc_RNA (1)...(19): siRNA sense strand
ucuaggacuugcaaauaag

SEQ ID NO: 406763 - RNA, 19 nt, Homo sapiens
  misc_RNA (1)...(19): siRNA sense strand
uauguuggugccuuguuua

SEQ ID NO: 406764 - RNA, 19 nt, Homo sapiens
  misc_RNA (1)...(19): siRNA sense strand
ucucugaaguuugcagugu

SEQ ID NO: 406765 - RNA, 19 nt, Homo sapiens
  misc_RNA (1)...(19): siRNA sense strand
cagaugaaggccacccauu

SEQ ID NO: 406766 - RNA, 19 nt, Homo sapiens
  misc_RNA (1)...(19): siRNA sense strand
ucaugugaacugcacgaua

SEQ ID NO: 406767 - RNA, 19 nt, Homo sapiens
  misc_RNA (1)...(19): siRNA sense strand
uaucugaggaguugguuca

SEQ ID NO: 406768 - RNA, 19 nt, Homo sapiens
  misc_RNA (1)...(19): siRNA sense strand
guuuaauggucugacacua

SEQ ID NO: 406769 - RNA, 19 nt, Homo sapiens
  misc_RNA (1)...(19): siRNA sense strand
ggaacucaggcgccucuuc

SEQ ID NO: 406770 - RNA, 19 nt, Homo sapiens
  misc_RNA (1)...(19): siRNA sense strand
ugacaguauucagcauugu

SEQ ID NO: 406771 - RNA, 19 nt, Homo sapiens
  misc_RNA (1)...(19): siRNA sense strand
guacuggagagacauuaag

SEQ ID NO: 406772 - RNA, 19 nt, Homo sapiens
  misc_RNA (1)...(19): siRNA sense strand
cugcuuucauugacaguau

SEQ ID NO: 406773 - RNA, 19 nt, Homo sapiens
  misc_RNA (1)...(19): siRNA sense strand
ugaacugcacgauaaagga

SEQ ID NO: 406774 - RNA, 19 nt, Homo sapiens
  misc_RNA (1)...(19): siRNA sense strand
caucagcuuuaggauauac

SEQ ID NO: 406775 - RNA, 19 nt, Homo sapiens
  misc_RNA (1)...(19): siRNA sense strand
gaauguuaaagaugcuaug

SEQ ID NO: 406776 - RNA, 19 nt, Homo sapiens
  misc_RNA (1)...(19): siRNA sense strand
uugacaguauucagcauug

SEQ ID NO: 406777 - RNA, 19 nt, Homo sapiens
  misc_RNA (1)...(19): siRNA sense strand
agaugaaggccacccauuc

SEQ ID NO: 406778 - RNA, 19 nt, Homo sapiens
  misc_RNA (1)...(19): siRNA sense strand
gaacggcaucaggcacaga

SEQ ID NO: 406779 - RNA, 19 nt, Homo sapiens
  misc_RNA (1)...(19): siRNA sense strand
gccuauuccugcugcuuuc

SEQ ID NO: 406780 - RNA, 19 nt, Homo sapiens
  misc_RNA (1)...(19): siRNA sense strand
ucuggaaucugaaguugcu

SEQ ID NO: 406781 - RNA, 19 nt, Homo sapiens
  misc_RNA (1)...(19): siRNA sense strand
acucuucaguguuccuguu

SEQ ID NO: 406782 - RNA, 19 nt, Homo sapiens
  misc_RNA (1)...(19): siRNA sense strand
uggagagacauuaagaaga

SEQ ID NO: 406783 - RNA, 19 nt, Homo sapiens
  misc_RNA (1)...(19): siRNA sense strand
caguaauucugcucuuggu

SEQ ID NO: 406784 - RNA, 19 nt, Homo sapiens
  misc_RNA (1)...(19): siRNA sense strand
uauuccugcugcuuucauu

SEQ ID NO: 406785 - RNA, 19 nt, Homo sapiens
  misc_RNA (1)...(19): siRNA sense strand
acaguauucagcauuguga

SEQ ID NO: 406786 - RNA, 19 nt, Homo sapiens
  misc_RNA (1)...(19): siRNA sense strand
ggcaucaggcacagauaga

SEQ ID NO: 406787 - RNA, 19 nt, Homo sapiens
  misc_RNA (1)...(19): siRNA sense strand
gcaguguugauguggguau

SEQ ID NO: 406788 - RNA, 19 nt, Homo sapiens
  misc_RNA (1)...(19): siRNA sense strand
uugauucucugaaguuugc

SEQ ID NO: 406789 - RNA, 19 nt, Homo sapiens
  misc_RNA (1)...(19): siRNA sense strand
uuaguugauucucugaagu

SEQ ID NO: 406790 - RNA, 19 nt, Homo sapiens
  misc_RNA (1)...(19): siRNA sense strand
gaagagagccuaacugaaa

SEQ ID NO: 406791 - RNA, 19 nt, Homo sapiens
  misc_RNA (1)...(19): siRNA sense strand
gaaacaacccgcaaauaaa

SEQ ID NO: 406792 - RNA, 19 nt, Homo sapiens
  misc_RNA (1)...(19): siRNA sense strand
gaacaguggugcaaacuca

SEQ ID NO: 406793 - RNA, 19 nt, Homo sapiens
  misc_RNA (1)...(19): siRNA sense strand
agaagaaggugcuacuaua

SEQ ID NO: 406794 - RNA, 19 nt, Homo sapiens
  misc_RNA (1)...(19): siRNA sense strand
ugaaacaacccgcaaauaa

SEQ ID NO: 406795 - RNA, 19 nt, Homo sapiens
  misc_RNA (1)...(19): siRNA sense strand
caagaaauuuggaccuaaa

SEQ ID NO: 406796 - RNA, 19 nt, Homo sapiens
  misc_RNA (1)...(19): siRNA sense strand
agaaauugcuucccaagaa

SEQ ID NO: 406797 - RNA, 19 nt, Homo sapiens
  misc_RNA (1)...(19): siRNA sense strand
ugaaagggcuaaagaacuu

SEQ ID NO: 406798 - RNA, 19 nt, Homo sapiens
  misc_RNA (1)...(19): siRNA sense strand
gaaagggagagcauuagua

SEQ ID NO: 406799 - RNA, 19 nt, Homo sapiens
  misc_RNA (1)...(19): siRNA sense strand
ggaaauaugacuuugauuc

SEQ ID NO: 406800 - RNA, 19 nt, Homo sapiens
  misc_RNA (1)...(19): siRNA sense strand
uaagaagcguugcuaaugu

SEQ ID NO: 406801 - RNA, 19 nt, Homo sapiens
  misc_RNA (1)...(19): siRNA sense strand
caagagggauugauuuuaa

SEQ ID NO: 406802 - RNA, 19 nt, Homo sapiens
  misc_RNA (1)...(19): siRNA sense strand
uaaacuaacuuccggaaag

SEQ ID NO: 406803 - RNA, 19 nt, Homo sapiens
  misc_RNA (1)...(19): siRNA sense strand
gaacacaacaacagagaga

SEQ ID NO: 406804 - RNA, 19 nt, Homo sapiens
  misc_RNA (1)...(19): siRNA sense strand
aagcaaagauugaagacaa

SEQ ID NO: 406805 - RNA, 19 nt, Homo sapiens
  misc_RNA (1)...(19): siRNA sense strand
ggaccuaaaucaucuaaaa

SEQ ID NO: 406806 - RNA, 19 nt, Homo sapiens
  misc_RNA (1)...(19): siRNA sense strand
ggacguccacgaucucuuu

SEQ ID NO: 406807 - RNA, 19 nt, Homo sapiens
  misc_RNA (1)...(19): siRNA sense strand
ccaaaucgacuaaucuauu

SEQ ID NO: 406808 - RNA, 19 nt, Homo sapiens
  misc_RNA (1)...(19): siRNA sense strand
ggaacaggauucaggauac

SEQ ID NO: 406809 - RNA, 19 nt, Homo sapiens
  misc_RNA (1)...(19): siRNA sense strand
gaacuugccagccagauuc

SEQ ID NO: 406810 - RNA, 19 nt, Homo sapiens
  misc_RNA (1)...(19): siRNA sense strand
gaacagcaagaagaaagua

SEQ ID NO: 406811 - RNA, 19 nt, Homo sapiens
  misc_RNA (1)...(19): siRNA sense strand
gaaucgaccuagcaagugu

SEQ ID NO: 406812 - RNA, 19 nt, Homo sapiens
  misc_RNA (1)...(19): siRNA sense strand
gaacaggauucaggauaca

SEQ ID NO: 406813 - RNA, 19 nt, Homo sapiens
  misc_RNA (1)...(19): siRNA sense strand
gagagaaaguaaacuaacu

SEQ ID NO: 406814 - RNA, 19 nt, Homo sapiens
  misc_RNA (1)...(19): siRNA sense strand
gcagcucgauuccagauag

SEQ ID NO: 406815 - RNA, 19 nt, Homo sapiens
  misc_RNA (1)...(19): siRNA sense strand
aagcguugcuaauguuaua

SEQ ID NO: 406816 - RNA, 19 nt, Homo sapiens
  misc_RNA (1)...(19): siRNA sense strand
auaaacuucuugcggaaua

SEQ ID NO: 406817 - RNA, 19 nt, Homo sapiens
  misc_RNA (1)...(19): siRNA sense strand
ggucagaacagcaagaaga

SEQ ID NO: 406818 - RNA, 19 nt, Homo sapiens
  misc_RNA (1)...(19): siRNA sense strand
aguagaaacuguagaacaa

SEQ ID NO: 406819 - RNA, 19 nt, Homo sapiens
  misc_RNA (1)...(19): siRNA sense strand
gcaaggaauucugcaguag

SEQ ID NO: 406820 - RNA, 19 nt, Homo sapiens
  misc_RNA (1)...(19): siRNA sense strand
caacuugaccaggaauaua

SEQ ID NO: 406821 - RNA, 19 nt, Homo sapiens
  misc_RNA (1)...(19): siRNA sense strand
gggaacaggauucaggaua

SEQ ID NO: 406822 - RNA, 19 nt, Homo sapiens
  misc_RNA (1)...(19): siRNA sense strand
gaucaacuaugacuuucca

SEQ ID NO: 406823 - RNA, 19 nt, Homo sapiens
  misc_RNA (1)...(19): siRNA sense strand
ggugaucaacuaugacuuu

SEQ ID NO: 406824 - RNA, 19 nt, Homo sapiens
  misc_RNA (1)...(19): siRNA sense strand
gccaugagagaacuuguua

SEQ ID NO: 406825 - RNA, 19 nt, Homo sapiens
  misc_RNA (1)...(19): siRNA sense strand
ccaacuagcucaguggaau

SEQ ID NO: 406826 - RNA, 19 nt, Homo sapiens
  misc_RNA (1)...(19): siRNA sense strand
ugaacuuggugaucaacua

SEQ ID NO: 406827 - RNA, 19 nt, Homo sapiens
  misc_RNA (1)...(19): siRNA sense strand
caugagagaacuuguuaaa

SEQ ID NO: 406828 - RNA, 19 nt, Homo sapiens
  misc_RNA (1)...(19): siRNA sense strand
gaagaaggugcuacuauac

SEQ ID NO: 406829 - RNA, 19 nt, Homo sapiens
  misc_RNA (1)...(19): siRNA sense strand
gagcagggaauaagggaaa

SEQ ID NO: 406830 - RNA, 19 nt, Homo sapiens
  misc_RNA (1)...(19): siRNA sense strand
gaacuuggugaucaacuau

SEQ ID NO: 406831 - RNA, 19 nt, Homo sapiens
  misc_RNA (1)...(19): siRNA sense strand
ggugugaacuuggugauca

SEQ ID NO: 406832 - RNA, 19 nt, Homo sapiens
  misc_RNA (1)...(19): siRNA sense strand
gagcuucucuuuguuggau

SEQ ID NO: 406833 - RNA, 19 nt, Homo sapiens
  misc_RNA (1)...(19): siRNA sense strand
ucagagagaaaguaaacua

SEQ ID NO: 406834 - RNA, 19 nt, Homo sapiens
  misc_RNA (1)...(19): siRNA sense strand
caauccaccuguucuuguu

SEQ ID NO: 406835 - RNA, 19 nt, Homo sapiens
  misc_RNA (1)...(19): siRNA sense strand
guaguagacgaaucagaua

SEQ ID NO: 406836 - RNA, 19 nt, Homo sapiens
  misc_RNA (1)...(19): siRNA sense strand
ugacccaauugcuacauuu

SEQ ID NO: 406837 - RNA, 19 nt, Homo sapiens
  misc_RNA (1)...(19): siRNA sense strand
aaucaauucucgacuacuu

SEQ ID NO: 406838 - RNA, 19 nt, Homo sapiens
  misc_RNA (1)...(19): siRNA sense strand
gagaccagcuggcuuccau

SEQ ID NO: 406839 - RNA, 19 nt, Homo sapiens
  misc_RNA (1)...(19): siRNA sense strand
uagaaacuguagaacaaga

SEQ ID NO: 406840 - RNA, 19 nt, Homo sapiens
  misc_RNA (1)...(19): siRNA sense strand
gguauuaauguggauguua

SEQ ID NO: 406841 - RNA, 19 nt, Homo sapiens
  misc_RNA (1)...(19): siRNA sense strand
aagaagcguugcuaauguu

SEQ ID NO: 406842 - RNA, 19 nt, Homo sapiens
  misc_RNA (1)...(19): siRNA sense strand
caacuagcucaguggaaua

SEQ ID NO: 406843 - RNA, 19 nt, Homo sapiens
  misc_RNA (1)...(19): siRNA sense strand
gagagaacacaacaacaga

SEQ ID NO: 406844 - RNA, 19 nt, Homo sapiens
  misc_RNA (1)...(19): siRNA sense strand
aaacaacccgcaaauaaag

SEQ ID NO: 406845 - RNA, 19 nt, Homo sapiens
  misc_RNA (1)...(19): siRNA sense strand
gggaaaagcaauuacauuu

SEQ ID NO: 406846 - RNA, 19 nt, Homo sapiens
  misc_RNA (1)...(19): siRNA sense strand
gauaacacaguccacaguu

SEQ ID NO: 406847 - RNA, 19 nt, Homo sapiens
  misc_RNA (1)...(19): siRNA sense strand
acacaacaacagagagaua

SEQ ID NO: 406848 - RNA, 19 nt, Homo sapiens
  misc_RNA (1)...(19): siRNA sense strand
gagaacacaacaacagaga

SEQ ID NO: 406849 - RNA, 19 nt, Homo sapiens
  misc_RNA (1)...(19): siRNA sense strand
gcagagagaacacaacaac

SEQ ID NO: 406850 - RNA, 19 nt, Homo sapiens
  misc_RNA (1)...(19): siRNA sense strand
ggauucaggauacacauga

SEQ ID NO: 406851 - RNA, 19 nt, Homo sapiens
  misc_RNA (1)...(19): siRNA sense strand
ccagccagauucacagaga

SEQ ID NO: 406852 - RNA, 19 nt, Homo sapiens
  misc_RNA (1)...(19): siRNA sense strand
aagaagagagccuaacuga

SEQ ID NO: 406853 - RNA, 19 nt, Homo sapiens
  misc_RNA (1)...(19): siRNA sense strand
ugaggaugauaagccauua

SEQ ID NO: 406854 - RNA, 19 nt, Homo sapiens
  misc_RNA (1)...(19): siRNA sense strand
gagcaucacaaacacauca

SEQ ID NO: 406855 - RNA, 19 nt, Homo sapiens
  misc_RNA (1)...(19): siRNA sense strand
agaugcagguuuccaaaug

SEQ ID NO: 406856 - RNA, 19 nt, Homo sapiens
  misc_RNA (1)...(19): siRNA sense strand
aacuaugacuuuccaacua

SEQ ID NO: 406857 - RNA, 19 nt, Homo sapiens
  misc_RNA (1)...(19): siRNA sense strand
ccggaaaguuggagaaucu

SEQ ID NO: 406858 - RNA, 19 nt, Homo sapiens
  misc_RNA (1)...(19): siRNA sense strand
guacaacuccaaaauguuu

SEQ ID NO: 406859 - RNA, 19 nt, Homo sapiens
  misc_RNA (1)...(19): siRNA sense strand
gguguccuguaccagaaua

SEQ ID NO: 406860 - RNA, 19 nt, Homo sapiens
  misc_RNA (1)...(19): siRNA sense strand
cuagcucaguggaauauau

SEQ ID NO: 406861 - RNA, 19 nt, Homo sapiens
  misc_RNA (1)...(19): siRNA sense strand
uaacacaguccacaguuuc

SEQ ID NO: 406862 - RNA, 19 nt, Homo sapiens
  misc_RNA (1)...(19): siRNA sense strand
ccgaagagcuauguucagu

SEQ ID NO: 406863 - RNA, 19 nt, Homo sapiens
  misc_RNA (1)...(19): siRNA sense strand
gaccagcuggcuuccauuu

SEQ ID NO: 406864 - RNA, 19 nt, Homo sapiens
  misc_RNA (1)...(19): siRNA sense strand
ccagauucacagagaguua

SEQ ID NO: 406865 - RNA, 19 nt, Homo sapiens
  misc_RNA (1)...(19): siRNA sense strand
cagagagaaaguaaacuaa

SEQ ID NO: 406866 - RNA, 19 nt, Homo sapiens
  misc_RNA (1)...(19): siRNA sense strand
gaaacuacuaagcaaacaa

SEQ ID NO: 406867 - RNA, 19 nt, Homo sapiens
  misc_RNA (1)...(19): siRNA sense strand
auaacacaguccacaguuu

SEQ ID NO: 406868 - RNA, 19 nt, Homo sapiens
  misc_RNA (1)...(19): siRNA sense strand
ccaaaugccuacgccaauc

SEQ ID NO: 406869 - RNA, 19 nt, Homo sapiens
  misc_RNA (1)...(19): siRNA sense strand
uaaacuucuugcggaauaa

SEQ ID NO: 406870 - RNA, 19 nt, Homo sapiens
  misc_RNA (1)...(19): siRNA sense strand
ggaagagggagcagagcaa

SEQ ID NO: 406871 - RNA, 19 nt, Homo sapiens
  misc_RNA (1)...(19): siRNA sense strand
ggaaagggagagcauuagu

SEQ ID NO: 406872 - RNA, 19 nt, Homo sapiens
  misc_RNA (1)...(19): siRNA sense strand
uagcaagagggauugauuu

SEQ ID NO: 406873 - RNA, 19 nt, Homo sapiens
  misc_RNA (1)...(19): siRNA sense strand
uuaagaagcguugcuaaug

SEQ ID NO: 406874 - RNA, 19 nt, Homo sapiens
  misc_RNA (1)...(19): siRNA sense strand
gcaacuugaccaggaauau

SEQ ID NO: 406875 - RNA, 19 nt, Homo sapiens
  misc_RNA (1)...(19): siRNA sense strand
aaaggucacuggucagaac

SEQ ID NO: 406876 - RNA, 19 nt, Homo sapiens
  misc_RNA (1)...(19): siRNA sense strand
gcaagagggauugauuuua

SEQ ID NO: 406877 - RNA, 19 nt, Homo sapiens
  misc_RNA (1)...(19): siRNA sense strand
agcaaggaauucugcagua

SEQ ID NO: 406878 - RNA, 19 nt, Homo sapiens
  misc_RNA (1)...(19): siRNA sense strand
cacaagguccgaagagcua

SEQ ID NO: 406879 - RNA, 19 nt, Homo sapiens
  misc_RNA (1)...(19): siRNA sense strand
uugaguggcuuguaguaga

SEQ ID NO: 406880 - RNA, 19 nt, Homo sapiens
  misc_RNA (1)...(19): siRNA sense strand
ggaaucgaccuagcaagug

SEQ ID NO: 406881 - RNA, 19 nt, Homo sapiens
  misc_RNA (1)...(19): siRNA sense strand
caagaagaaggugcuacua

SEQ ID NO: 406882 - RNA, 19 nt, Homo sapiens
  misc_RNA (1)...(19): siRNA sense strand
ggagagcauuaguacaacu

SEQ ID NO: 406883 - RNA, 19 nt, Homo sapiens
  misc_RNA (1)...(19): siRNA sense strand
ugucaucuguagaagcaaa

SEQ ID NO: 406884 - RNA, 19 nt, Homo sapiens
  misc_RNA (1)...(19): siRNA sense strand
gcuuuuagcauuccuauuu

SEQ ID NO: 406885 - RNA, 19 nt, Homo sapiens
  misc_RNA (1)...(19): siRNA sense strand
uuaaaggugugaacuuggu

SEQ ID NO: 406886 - RNA, 19 nt, Homo sapiens
  misc_RNA (1)...(19): siRNA sense strand
caaggaauucugcaguaga

SEQ ID NO: 406887 - RNA, 19 nt, Homo sapiens
  misc_RNA (1)...(19): siRNA sense strand
agacgaaucagauaaacug

SEQ ID NO: 406888 - RNA, 19 nt, Homo sapiens
  misc_RNA (1)...(19): siRNA sense strand
caacaacagagagauaaca

SEQ ID NO: 406889 - RNA, 19 nt, Homo sapiens
  misc_RNA (1)...(19): siRNA sense strand
aagcuaaggauaaacagaa

SEQ ID NO: 406890 - RNA, 19 nt, Homo sapiens
  misc_RNA (1)...(19): siRNA sense strand
gaaacaacccgcaaauaaa

SEQ ID NO: 406891 - RNA, 19 nt, Homo sapiens
  misc_RNA (1)...(19): siRNA sense strand
gaacaguggugcaaacuca

SEQ ID NO: 406892 - RNA, 19 nt, Homo sapiens
  misc_RNA (1)...(19): siRNA sense strand
ugaaacaacccgcaaauaa

SEQ ID NO: 406893 - RNA, 19 nt, Homo sapiens
  misc_RNA (1)...(19): siRNA sense strand
caagaaauuuggaccuaaa

SEQ ID NO: 406894 - RNA, 19 nt, Homo sapiens
  misc_RNA (1)...(19): siRNA sense strand
ugaaagggcuaaagaacuu

SEQ ID NO: 406895 - RNA, 19 nt, Homo sapiens
  misc_RNA (1)...(19): siRNA sense strand
gaaagggagagcauuagua

SEQ ID NO: 406896 - RNA, 19 nt, Homo sapiens
  misc_RNA (1)...(19): siRNA sense strand
uaagaagcguugcuaaugu

SEQ ID NO: 406897 - RNA, 19 nt, Homo sapiens
  misc_RNA (1)...(19): siRNA sense strand
caagagggauugauuuuaa

SEQ ID NO: 406898 - RNA, 19 nt, Homo sapiens
  misc_RNA (1)...(19): siRNA sense strand
uaaacuaacuuccggaaag

SEQ ID NO: 406899 - RNA, 19 nt, Homo sapiens
  misc_RNA (1)...(19): siRNA sense strand
gaacacaacaacagagaga

SEQ ID NO: 406900 - RNA, 19 nt, Homo sapiens
  misc_RNA (1)...(19): siRNA sense strand
aagcaaagauugaagacaa

SEQ ID NO: 406901 - RNA, 19 nt, Homo sapiens
  misc_RNA (1)...(19): siRNA sense strand
ggaccuaaaucaucuaaaa

SEQ ID NO: 406902 - RNA, 19 nt, Homo sapiens
  misc_RNA (1)...(19): siRNA sense strand
ccaaaucgacuaaucuauu

SEQ ID NO: 406903 - RNA, 19 nt, Homo sapiens
  misc_RNA (1)...(19): siRNA sense strand
ggaacaggauucaggauac

SEQ ID NO: 406904 - RNA, 19 nt, Homo sapiens
  misc_RNA (1)...(19): siRNA sense strand
gaacuugccagccagauuc

SEQ ID NO: 406905 - RNA, 19 nt, Homo sapiens
  misc_RNA (1)...(19): siRNA sense strand
gaacagcaagaagaaagua

SEQ ID NO: 406906 - RNA, 19 nt, Homo sapiens
  misc_RNA (1)...(19): siRNA sense strand
gaaucgaccuagcaagugu

SEQ ID NO: 406907 - RNA, 19 nt, Homo sapiens
  misc_RNA (1)...(19): siRNA sense strand
gaacaggauucaggauaca

SEQ ID NO: 406908 - RNA, 19 nt, Homo sapiens
  misc_RNA (1)...(19): siRNA sense strand
gagagaaaguaaacuaacu

SEQ ID NO: 406909 - RNA, 19 nt, Homo sapiens
  misc_RNA (1)...(19): siRNA sense strand
aagcguugcuaauguuaua

SEQ ID NO: 406910 - RNA, 19 nt, Homo sapiens
  misc_RNA (1)...(19): siRNA sense strand
auaaacuucuugcggaaua

SEQ ID NO: 406911 - RNA, 19 nt, Homo sapiens
  misc_RNA (1)...(19): siRNA sense strand
ggucagaacagcaagaaga

SEQ ID NO: 406912 - RNA, 19 nt, Homo sapiens
  misc_RNA (1)...(19): siRNA sense strand
aguagaaacuguagaacaa

SEQ ID NO: 406913 - RNA, 19 nt, Homo sapiens
  misc_RNA (1)...(19): siRNA sense strand
gcaaggaauucugcaguag

SEQ ID NO: 406914 - RNA, 19 nt, Homo sapiens
  misc_RNA (1)...(19): siRNA sense strand
caacuugaccaggaauaua

SEQ ID NO: 406915 - RNA, 19 nt, Homo sapiens
  misc_RNA (1)...(19): siRNA sense strand
gggaacaggauucaggaua

SEQ ID NO: 406916 - RNA, 19 nt, Homo sapiens
  misc_RNA (1)...(19): siRNA sense strand
gaucaacuaugacuuucca

SEQ ID NO: 406917 - RNA, 19 nt, Homo sapiens
  misc_RNA (1)...(19): siRNA sense strand
ggugaucaacuaugacuuu

SEQ ID NO: 406918 - RNA, 19 nt, Homo sapiens
  misc_RNA (1)...(19): siRNA sense strand
gccaugagagaacuuguua

SEQ ID NO: 406919 - RNA, 19 nt, Homo sapiens
  misc_RNA (1)...(19): siRNA sense strand
ccaacuagcucaguggaau

SEQ ID NO: 406920 - RNA, 19 nt, Homo sapiens
  misc_RNA (1)...(19): siRNA sense strand
ugaacuuggugaucaacua

SEQ ID NO: 406921 - RNA, 19 nt, Homo sapiens
  misc_RNA (1)...(19): siRNA sense strand
caugagagaacuuguuaaa

SEQ ID NO: 406922 - RNA, 19 nt, Homo sapiens
  misc_RNA (1)...(19): siRNA sense strand
gagcuucucuuuguuggau

SEQ ID NO: 406923 - RNA, 19 nt, Homo sapiens
  misc_RNA (1)...(19): siRNA sense strand
gagcagggaauaagggaaa

SEQ ID NO: 406924 - RNA, 19 nt, Homo sapiens
  misc_RNA (1)...(19): siRNA sense strand
gaacuuggugaucaacuau

SEQ ID NO: 406925 - RNA, 19 nt, Homo sapiens
  misc_RNA (1)...(19): siRNA sense strand
ggugugaacuuggugauca

SEQ ID NO: 406926 - RNA, 19 nt, Homo sapiens
  misc_RNA (1)...(19): siRNA sense strand
ugacccaauugcuacauuu

SEQ ID NO: 406927 - RNA, 19 nt, Homo sapiens
  misc_RNA (1)...(19): siRNA sense strand
caauccaccuguucuuguu

SEQ ID NO: 406928 - RNA, 19 nt, Homo sapiens
  misc_RNA (1)...(19): siRNA sense strand
ucagagagaaaguaaacua

SEQ ID NO: 406929 - RNA, 19 nt, Homo sapiens
  misc_RNA (1)...(19): siRNA sense strand
guaguagacgaaucagaua

SEQ ID NO: 406930 - RNA, 19 nt, Homo sapiens
  misc_RNA (1)...(19): siRNA sense strand
aaucaauucucgacuacuu

SEQ ID NO: 406931 - RNA, 19 nt, Homo sapiens
  misc_RNA (1)...(19): siRNA sense strand
gagaccagcuggcuuccau

SEQ ID NO: 406932 - RNA, 19 nt, Homo sapiens
  misc_RNA (1)...(19): siRNA sense strand
uagaaacuguagaacaaga

SEQ ID NO: 406933 - RNA, 19 nt, Homo sapiens
  misc_RNA (1)...(19): siRNA sense strand
gguauuaauguggauguua

SEQ ID NO: 406934 - RNA, 19 nt, Homo sapiens
  misc_RNA (1)...(19): siRNA sense strand
aagaagcguugcuaauguu

SEQ ID NO: 406935 - RNA, 19 nt, Homo sapiens
  misc_RNA (1)...(19): siRNA sense strand
caacuagcucaguggaaua

SEQ ID NO: 406936 - RNA, 19 nt, Homo sapiens
  misc_RNA (1)...(19): siRNA sense strand
gagagaacacaacaacaga

SEQ ID NO: 406937 - RNA, 19 nt, Homo sapiens
  misc_RNA (1)...(19): siRNA sense strand
aaacaacccgcaaauaaag

SEQ ID NO: 406938 - RNA, 19 nt, Homo sapiens
  misc_RNA (1)...(19): siRNA sense strand
gggaaaagcaauuacauuu

SEQ ID NO: 406939 - RNA, 19 nt, Homo sapiens
  misc_RNA (1)...(19): siRNA sense strand
gauaacacaguccacaguu

SEQ ID NO: 406940 - RNA, 19 nt, Homo sapiens
  misc_RNA (1)...(19): siRNA sense strand
acacaacaacagagagaua

SEQ ID NO: 406941 - RNA, 19 nt, Homo sapiens
  misc_RNA (1)...(19): siRNA sense strand
gagaacacaacaacagaga

SEQ ID NO: 406942 - RNA, 19 nt, Homo sapiens
  misc_RNA (1)...(19): siRNA sense strand
gcagagagaacacaacaac

SEQ ID NO: 406943 - RNA, 19 nt, Homo sapiens
  misc_RNA (1)...(19): siRNA sense strand
ggauucaggauacacauga

SEQ ID NO: 406944 - RNA, 19 nt, Homo sapiens
  misc_RNA (1)...(19): siRNA sense strand
ccagccagauucacagaga

SEQ ID NO: 406945 - RNA, 19 nt, Homo sapiens
  misc_RNA (1)...(19): siRNA sense strand
ugaggaugauaagccauua

SEQ ID NO: 406946 - RNA, 19 nt, Homo sapiens
  misc_RNA (1)...(19): siRNA sense strand
agaugcagguuuccaaaug

SEQ ID NO: 406947 - RNA, 19 nt, Homo sapiens
  misc_RNA (1)...(19): siRNA sense strand
aacuaugacuuuccaacua

SEQ ID NO: 406948 - RNA, 19 nt, Homo sapiens
  misc_RNA (1)...(19): siRNA sense strand
ccagauucacagagaguua

SEQ ID NO: 406949 - RNA, 19 nt, Homo sapiens
  misc_RNA (1)...(19): siRNA sense strand
guacaacuccaaaauguuu

SEQ ID NO: 406950 - RNA, 19 nt, Homo sapiens
  misc_RNA (1)...(19): siRNA sense strand
gguguccuguaccagaaua

SEQ ID NO: 406951 - RNA, 19 nt, Homo sapiens
  misc_RNA (1)...(19): siRNA sense strand
cuagcucaguggaauauau

SEQ ID NO: 406952 - RNA, 19 nt, Homo sapiens
  misc_RNA (1)...(19): siRNA sense strand
uaacacaguccacaguuuc

SEQ ID NO: 406953 - RNA, 19 nt, Homo sapiens
  misc_RNA (1)...(19): siRNA sense strand
ccgaagagcuauguucagu

SEQ ID NO: 406954 - RNA, 19 nt, Homo sapiens
  misc_RNA (1)...(19): siRNA sense strand
gaccagcuggcuuccauuu

SEQ ID NO: 406955 - RNA, 19 nt, Homo sapiens
  misc_RNA (1)...(19): siRNA sense strand
ccggaaaguuggagaaucu

SEQ ID NO: 406956 - RNA, 19 nt, Homo sapiens
  misc_RNA (1)...(19): siRNA sense strand
ccaaaugccuacgccaauc

SEQ ID NO: 406957 - RNA, 19 nt, Homo sapiens
  misc_RNA (1)...(19): siRNA sense strand
gaaacuacuaagcaaacaa

SEQ ID NO: 406958 - RNA, 19 nt, Homo sapiens
  misc_RNA (1)...(19): siRNA sense strand
cagagagaaaguaaacuaa

SEQ ID NO: 406959 - RNA, 19 nt, Homo sapiens
  misc_RNA (1)...(19): siRNA sense strand
auaacacaguccacaguuu

SEQ ID NO: 406960 - RNA, 19 nt, Homo sapiens
  misc_RNA (1)...(19): siRNA sense strand
uaaacuucuugcggaauaa

SEQ ID NO: 406961 - RNA, 19 nt, Homo sapiens
  misc_RNA (1)...(19): siRNA sense strand
ggaaagggagagcauuagu

SEQ ID NO: 406962 - RNA, 19 nt, Homo sapiens
  misc_RNA (1)...(19): siRNA sense strand
uagcaagagggauugauuu

SEQ ID NO: 406963 - RNA, 19 nt, Homo sapiens
  misc_RNA (1)...(19): siRNA sense strand
uuaagaagcguugcuaaug

SEQ ID NO: 406964 - RNA, 19 nt, Homo sapiens
  misc_RNA (1)...(19): siRNA sense strand
uugaguggcuuguaguaga

SEQ ID NO: 406965 - RNA, 19 nt, Homo sapiens
  misc_RNA (1)...(19): siRNA sense strand
aaaggucacuggucagaac

SEQ ID NO: 406966 - RNA, 19 nt, Homo sapiens
  misc_RNA (1)...(19): siRNA sense strand
gcaacuugaccaggaauau

SEQ ID NO: 406967 - RNA, 19 nt, Homo sapiens
  misc_RNA (1)...(19): siRNA sense strand
gcaagagggauugauuuua

SEQ ID NO: 406968 - RNA, 19 nt, Homo sapiens
  misc_RNA (1)...(19): siRNA sense strand
agcaaggaauucugcagua

SEQ ID NO: 406969 - RNA, 19 nt, Homo sapiens
  misc_RNA (1)...(19): siRNA sense strand
cacaagguccgaagagcua

SEQ ID NO: 406970 - RNA, 19 nt, Homo sapiens
  misc_RNA (1)...(19): siRNA sense strand
ggaaucgaccuagcaagug

SEQ ID NO: 406971 - RNA, 19 nt, Homo sapiens
  misc_RNA (1)...(19): siRNA sense strand
ggagagcauuaguacaacu

SEQ ID NO: 406972 - RNA, 19 nt, Homo sapiens
  misc_RNA (1)...(19): siRNA sense strand
gcuuuuagcauuccuauuu

SEQ ID NO: 406973 - RNA, 19 nt, Homo sapiens
  misc_RNA (1)...(19): siRNA sense strand
uuaaaggugugaacuuggu

SEQ ID NO: 406974 - RNA, 19 nt, Homo sapiens
  misc_RNA (1)...(19): siRNA sense strand
caaggaauucugcaguaga

SEQ ID NO: 406975 - RNA, 19 nt, Homo sapiens
  misc_RNA (1)...(19): siRNA sense strand
agacgaaucagauaaacug

SEQ ID NO: 406976 - RNA, 19 nt, Homo sapiens
  misc_RNA (1)...(19): siRNA sense strand
guaaacuaacuuccggaaa

SEQ ID NO: 406977 - RNA, 19 nt, Homo sapiens
  misc_RNA (1)...(19): siRNA sense strand
aagcuaaggauaaacagaa

SEQ ID NO: 406978 - RNA, 19 nt, Homo sapiens
  misc_RNA (1)...(19): siRNA sense strand
caacaacagagagauaaca

SEQ ID NO: 406979 - RNA, 19 nt, Homo sapiens
  misc_RNA (1)...(19): siRNA sense strand
gaugcagguuuccaaaugc

SEQ ID NO: 406980 - RNA, 19 nt, Homo sapiens
  misc_RNA (1)...(19): siRNA sense strand
gauuaagaaaccauuggaa

SEQ ID NO: 406981 - RNA, 19 nt, Homo sapiens
  misc_RNA (1)...(19): siRNA sense strand
gaccaggaauauaaaauca

SEQ ID NO: 406982 - RNA, 19 nt, Homo sapiens
  misc_RNA (1)...(19): siRNA sense strand
cauucuagaugcagguuuc

SEQ ID NO: 406983 - RNA, 19 nt, Homo sapiens
  misc_RNA (1)...(19): siRNA sense strand
cacaacaacagagagauaa

SEQ ID NO: 406984 - RNA, 19 nt, Homo sapiens
  misc_RNA (1)...(19): siRNA sense strand
cgaucuuccugacccaauu

SEQ ID NO: 406985 - RNA, 19 nt, Homo sapiens
  misc_RNA (1)...(19): siRNA sense strand
ucagcaacuugaccaggaa

SEQ ID NO: 406986 - RNA, 19 nt, Homo sapiens
  misc_RNA (1)...(19): siRNA sense strand
aaacucaaccuggacaaug

SEQ ID NO: 406987 - RNA, 19 nt, Homo sapiens
  misc_RNA (1)...(19): siRNA sense strand
uaagaaaccauuggaaagg

SEQ ID NO: 406988 - RNA, 19 nt, Homo sapiens
  misc_RNA (1)...(19): siRNA sense strand
ucagaaacuacuaagcaaa

SEQ ID NO: 406989 - RNA, 19 nt, Homo sapiens
  misc_RNA (1)...(19): siRNA sense strand
gaagcguugcuaauguuau

SEQ ID NO: 406990 - RNA, 19 nt, Homo sapiens
  misc_RNA (1)...(19): siRNA sense strand
gauauggccuugguuauga

SEQ ID NO: 406991 - RNA, 19 nt, Homo sapiens
  misc_RNA (1)...(19): siRNA sense strand
ggacccaguucccaucuuu

SEQ ID NO: 406992 - RNA, 19 nt, Homo sapiens
  misc_RNA (1)...(19): siRNA sense strand
ggcaggagcuaacaugauu

SEQ ID NO: 406993 - RNA, 19 nt, Homo sapiens
  misc_RNA (1)...(19): siRNA sense strand
uaagaaauguuugcucaga

SEQ ID NO: 406994 - RNA, 19 nt, Homo sapiens
  misc_RNA (1)...(19): siRNA sense strand
agaaugggaugaagucuug

SEQ ID NO: 406995 - RNA, 19 nt, Homo sapiens
  misc_RNA (1)...(19): siRNA sense strand
uggaagauaugaugccaaa

SEQ ID NO: 406996 - RNA, 19 nt, Homo sapiens
  misc_RNA (1)...(19): siRNA sense strand
gggcuaaucagauagauau

SEQ ID NO: 406997 - RNA, 19 nt, Homo sapiens
  misc_RNA (1)...(19): siRNA sense strand
gaagauaugaugccaaagg

SEQ ID NO: 406998 - RNA, 19 nt, Homo sapiens
  misc_RNA (1)...(19): siRNA sense strand
cucagaagcugcucagaaa

SEQ ID NO: 406999 - RNA, 19 nt, Homo sapiens
  misc_RNA (1)...(19): siRNA sense strand
agaggucgaugguggagua

SEQ ID NO: 407000 - RNA, 19 nt, Homo sapiens
  misc_RNA (1)...(19): siRNA sense strand
gaaauucauggaagauaug

SEQ ID NO: 407001 - RNA, 19 nt, Homo sapiens
  misc_RNA (1)...(19): siRNA sense strand
guucccaucuuuggauaua

SEQ ID NO: 407002 - RNA, 19 nt, Homo sapiens
  misc_RNA (1)...(19): siRNA sense strand
gcucagaagcugcucagaa

SEQ ID NO: 407003 - RNA, 19 nt, Homo sapiens
  misc_RNA (1)...(19): siRNA sense strand
uuaaagacauucgggagaa

SEQ ID NO: 407004 - RNA, 19 nt, Homo sapiens
  misc_RNA (1)...(19): siRNA sense strand
ggcagaaauucauggaaga

SEQ ID NO: 407005 - RNA, 19 nt, Homo sapiens
  misc_RNA (1)...(19): siRNA sense strand
ugccaaagguucacugguu

SEQ ID NO: 407006 - RNA, 19 nt, Homo sapiens
  misc_RNA (1)...(19): siRNA sense strand
ggagcuaacaugauugugu

SEQ ID NO: 407007 - RNA, 19 nt, Homo sapiens
  misc_RNA (1)...(19): siRNA sense strand
accaugggcuaaucagaua

SEQ ID NO: 407008 - RNA, 19 nt, Homo sapiens
  misc_RNA (1)...(19): siRNA sense strand
gagaaugggaugaagucuu

SEQ ID NO: 407009 - RNA, 19 nt, Homo sapiens
  misc_RNA (1)...(19): siRNA sense strand
aagaaauguuugcucagaa

SEQ ID NO: 407010 - RNA, 19 nt, Homo sapiens
  misc_RNA (1)...(19): siRNA sense strand
uagcaggagccaaucagua

SEQ ID NO: 407011 - RNA, 19 nt, Homo sapiens
  misc_RNA (1)...(19): siRNA sense strand
auagauauggccuugguua

SEQ ID NO: 407012 - RNA, 19 nt, Homo sapiens
  misc_RNA (1)...(19): siRNA sense strand
gcacagucagggcccauug

SEQ ID NO: 407013 - RNA, 19 nt, Homo sapiens
  misc_RNA (1)...(19): siRNA sense strand
agaaauguuugcucagaag

SEQ ID NO: 407014 - RNA, 19 nt, Homo sapiens
  misc_RNA (1)...(19): siRNA sense strand
gagccaaucaguacaccuu

SEQ ID NO: 407015 - RNA, 19 nt, Homo sapiens
  misc_RNA (1)...(19): siRNA sense strand
gaguagguccugacacugu

SEQ ID NO: 407016 - RNA, 19 nt, Homo sapiens
  misc_RNA (1)...(19): siRNA sense strand
cagaaauucauggaagaua

SEQ ID NO: 407017 - RNA, 19 nt, Homo sapiens
  misc_RNA (1)...(19): siRNA sense strand
ggauauagaggucgauggu

SEQ ID NO: 407018 - RNA, 19 nt, Homo sapiens
  misc_RNA (1)...(19): siRNA sense strand
ggucgaugguggaguaggu

SEQ ID NO: 407019 - RNA, 19 nt, Homo sapiens
  misc_RNA (1)...(19): siRNA sense strand
gccaaucaguacaccuuuc

SEQ ID NO: 407020 - RNA, 19 nt, Homo sapiens
  misc_RNA (1)...(19): siRNA sense strand
caguucccaucuuuggaua

SEQ ID NO: 407021 - RNA, 19 nt, Homo sapiens
  misc_RNA (1)...(19): siRNA sense strand
gcagaaauucauggaagau

SEQ ID NO: 407022 - RNA, 19 nt, Homo sapiens
  misc_RNA (1)...(19): siRNA sense strand
gaggcaggagcuaacauga

SEQ ID NO: 407023 - RNA, 19 nt, Homo sapiens
  misc_RNA (1)...(19): siRNA sense strand
ccaaucaguacaccuuuca

SEQ ID NO: 407024 - RNA, 19 nt, Homo sapiens
  misc_RNA (1)...(19): siRNA sense strand
agauagauauggccuuggu

SEQ ID NO: 407025 - RNA, 19 nt, Homo sapiens
  misc_RNA (1)...(19): siRNA sense strand
gcaccaugggcuaaucaga

SEQ ID NO: 407026 - RNA, 19 nt, Homo sapiens
  misc_RNA (1)...(19): siRNA sense strand
aaaccaggaaccucaguug

SEQ ID NO: 407027 - RNA, 19 nt, Homo sapiens
  misc_RNA (1)...(19): siRNA sense strand
uggaguagguccugacacu

SEQ ID NO: 407028 - RNA, 19 nt, Homo sapiens
  misc_RNA (1)...(19): siRNA sense strand
gcuauuaugaggagugaag

SEQ ID NO: 407029 - RNA, 19 nt, Homo sapiens
  misc_RNA (1)...(19): siRNA sense strand
gugcagaggcaggagcuaa

SEQ ID NO: 407030 - RNA, 19 nt, Homo sapiens
  misc_RNA (1)...(19): siRNA sense strand
ggaugaagucuugcucugu

SEQ ID NO: 407031 - RNA, 19 nt, Homo sapiens
  misc_RNA (1)...(19): siRNA sense strand
gaagaccccagaucuguga

SEQ ID NO: 407032 - RNA, 19 nt, Homo sapiens
  misc_RNA (1)...(19): siRNA sense strand
gugcuauuaugaggaguga

SEQ ID NO: 407033 - RNA, 19 nt, Homo sapiens
  misc_RNA (1)...(19): siRNA sense strand
ccaaagguucacugguuga

SEQ ID NO: 407034 - RNA, 19 nt, Homo sapiens
  misc_RNA (1)...(19): siRNA sense strand
gggagaaugggaugaaguc

SEQ ID NO: 407035 - RNA, 19 nt, Homo sapiens
  misc_RNA (1)...(19): siRNA sense strand
ucccaucuuuggauauaga

SEQ ID NO: 407036 - RNA, 19 nt, Homo sapiens
  misc_RNA (1)...(19): siRNA sense strand
aagauaugaugccaaaggu

SEQ ID NO: 407037 - RNA, 19 nt, Homo sapiens
  misc_RNA (1)...(19): siRNA sense strand
caaaccaggaaccucaguu

SEQ ID NO: 407038 - RNA, 19 nt, Homo sapiens
  misc_RNA (1)...(19): siRNA sense strand
gaacccaggggcuuugauu

SEQ ID NO: 407039 - RNA, 19 nt, Homo sapiens
  misc_RNA (1)...(19): siRNA sense strand
caccaugggcuaaucagau

SEQ ID NO: 407040 - RNA, 19 nt, Homo sapiens
  misc_RNA (1)...(19): siRNA sense strand
gcaggagcuaacaugauug

SEQ ID NO: 407041 - RNA, 19 nt, Homo sapiens
  misc_RNA (1)...(19): siRNA sense strand
gaagcugcucagaaacguu

SEQ ID NO: 407042 - RNA, 19 nt, Homo sapiens
  misc_RNA (1)...(19): siRNA sense strand
gcuaaucagauagauaugg

SEQ ID NO: 407043 - RNA, 19 nt, Homo sapiens
  misc_RNA (1)...(19): siRNA sense strand
gugucuggcagugcuauua

SEQ ID NO: 407044 - RNA, 19 nt, Homo sapiens
  misc_RNA (1)...(19): siRNA sense strand
gcagaggcaggagcuaaca

SEQ ID NO: 407045 - RNA, 19 nt, Homo sapiens
  misc_RNA (1)...(19): siRNA sense strand
ccagaacaguggguaaagc

SEQ ID NO: 407046 - RNA, 19 nt, Homo sapiens
  misc_RNA (1)...(19): siRNA sense strand
agauauggccuugguuaug

SEQ ID NO: 407047 - RNA, 19 nt, Homo sapiens
  misc_RNA (1)...(19): siRNA sense strand
ccaguucccaucuuuggau

SEQ ID NO: 407048 - RNA, 19 nt, Homo sapiens
  misc_RNA (1)...(19): siRNA sense strand
gguuuggagggcagaaauu

SEQ ID NO: 407049 - RNA, 19 nt, Homo sapiens
  misc_RNA (1)...(19): siRNA sense strand
ggacaaguuugcagaauau

SEQ ID NO: 407050 - RNA, 19 nt, Homo sapiens
  misc_RNA (1)...(19): siRNA sense strand
gaaagucgaaagaagauua

SEQ ID NO: 407051 - RNA, 19 nt, Homo sapiens
  misc_RNA (1)...(19): siRNA sense strand
gaagaaagucgaaagaaga

SEQ ID NO: 407052 - RNA, 19 nt, Homo sapiens
  misc_RNA (1)...(19): siRNA sense strand
caaauccacugaugcauau

SEQ ID NO: 407053 - RNA, 19 nt, Homo sapiens
  misc_RNA (1)...(19): siRNA sense strand
gcaaagaucuaagcaugau

SEQ ID NO: 407054 - RNA, 19 nt, Homo sapiens
  misc_RNA (1)...(19): siRNA sense strand
gaaagucaaacgaaugaaa

SEQ ID NO: 407055 - RNA, 19 nt, Homo sapiens
  misc_RNA (1)...(19): siRNA sense strand
gaacgcaaucuauuucaaa

SEQ ID NO: 407056 - RNA, 19 nt, Homo sapiens
  misc_RNA (1)...(19): siRNA sense strand
gaucuaagcaugauugugu

SEQ ID NO: 407057 - RNA, 19 nt, Homo sapiens
  misc_RNA (1)...(19): siRNA sense strand
cagcaucacaucagcauua

SEQ ID NO: 407058 - RNA, 19 nt, Homo sapiens
  misc_RNA (1)...(19): siRNA sense strand
acacuuaccucgguucaaa

SEQ ID NO: 407059 - RNA, 19 nt, Homo sapiens
  misc_RNA (1)...(19): siRNA sense strand
gcagaccucucaggcauga

SEQ ID NO: 407060 - RNA, 19 nt, Homo sapiens
  misc_RNA (1)...(19): siRNA sense strand
gcugagaaauugauggaau

SEQ ID NO: 407061 - RNA, 19 nt, Homo sapiens
  misc_RNA (1)...(19): siRNA sense strand
ugacugaauucaacaaauc

SEQ ID NO: 407062 - RNA, 19 nt, Homo sapiens
  misc_RNA (1)...(19): siRNA sense strand
ccagaagcuugaagagaaa

SEQ ID NO: 407063 - RNA, 19 nt, Homo sapiens
  misc_RNA (1)...(19): siRNA sense strand
guaaucacccuuuccuauu

SEQ ID NO: 407064 - RNA, 19 nt, Homo sapiens
  misc_RNA (1)...(19): siRNA sense strand
guugauaggucaggaaaug

SEQ ID NO: 407065 - RNA, 19 nt, Homo sapiens
  misc_RNA (1)...(19): siRNA sense strand
ggccaaacaagaauacaua

SEQ ID NO: 407066 - RNA, 19 nt, Homo sapiens
  misc_RNA (1)...(19): siRNA sense strand
gaaauguucaucaccaguu

SEQ ID NO: 407067 - RNA, 19 nt, Homo sapiens
  misc_RNA (1)...(19): siRNA sense strand
uccagaagcuugaagagaa

SEQ ID NO: 407068 - RNA, 19 nt, Homo sapiens
  misc_RNA (1)...(19): siRNA sense strand
augaagaguuccauuguaa

SEQ ID NO: 407069 - RNA, 19 nt, Homo sapiens
  misc_RNA (1)...(19): siRNA sense strand
uggacaaguuugcagaaua

SEQ ID NO: 407070 - RNA, 19 nt, Homo sapiens
  misc_RNA (1)...(19): siRNA sense strand
gaagaguuccauuguaauc

SEQ ID NO: 407071 - RNA, 19 nt, Homo sapiens
  misc_RNA (1)...(19): siRNA sense strand
caacaaauccacugaugca

SEQ ID NO: 407072 - RNA, 19 nt, Homo sapiens
  misc_RNA (1)...(19): siRNA sense strand
uaaucacccuuuccuauuc

SEQ ID NO: 407073 - RNA, 19 nt, Homo sapiens
  misc_RNA (1)...(19): siRNA sense strand
caacacugcacaacagauu

SEQ ID NO: 407074 - RNA, 19 nt, Homo sapiens
  misc_RNA (1)...(19): siRNA sense strand
caacagcauccucuucuau

SEQ ID NO: 407075 - RNA, 19 nt, Homo sapiens
  misc_RNA (1)...(19): siRNA sense strand
cacaacagauuaagaaggu

SEQ ID NO: 407076 - RNA, 19 nt, Homo sapiens
  misc_RNA (1)...(19): siRNA sense strand
ccaacagcauccucuucua

SEQ ID NO: 407077 - RNA, 19 nt, Homo sapiens
  misc_RNA (1)...(19): siRNA sense strand
agaagaaagucgaaagaag

SEQ ID NO: 407078 - RNA, 19 nt, Homo sapiens
  misc_RNA (1)...(19): siRNA sense strand
acaaauccacugaugcaua

SEQ ID NO: 407079 - RNA, 19 nt, Homo sapiens
  misc_RNA (1)...(19): siRNA sense strand
gguggaaagucaaacgaau

SEQ ID NO: 407080 - RNA, 19 nt, Homo sapiens
  misc_RNA (1)...(19): siRNA sense strand
ugcaaaugcuccagaagaa

SEQ ID NO: 407081 - RNA, 19 nt, Homo sapiens
  misc_RNA (1)...(19): siRNA sense strand
gcaaaugcuccagaagaaa

SEQ ID NO: 407082 - RNA, 19 nt, Homo sapiens
  misc_RNA (1)...(19): siRNA sense strand
gaauacauacaaguccaua

SEQ ID NO: 407083 - RNA, 19 nt, Homo sapiens
  misc_RNA (1)...(19): siRNA sense strand
agacaacacugcacaacag

SEQ ID NO: 407084 - RNA, 19 nt, Homo sapiens
  misc_RNA (1)...(19): siRNA sense strand
caacaagcucuucggagaa

SEQ ID NO: 407085 - RNA, 19 nt, Homo sapiens
  misc_RNA (1)...(19): siRNA sense strand
guucaucaccaguuucaaa

SEQ ID NO: 407086 - RNA, 19 nt, Homo sapiens
  misc_RNA (1)...(19): siRNA sense strand
aaauguucaucaccaguuu

SEQ ID NO: 407087 - RNA, 19 nt, Homo sapiens
  misc_RNA (1)...(19): siRNA sense strand
gcagugggagaagaaauuu

SEQ ID NO: 407088 - RNA, 19 nt, Homo sapiens
  misc_RNA (1)...(19): siRNA sense strand
aggaaaagcugcaacauau

SEQ ID NO: 407089 - RNA, 19 nt, Homo sapiens
  misc_RNA (1)...(19): siRNA sense strand
cgugcuaucuggaguccua

SEQ ID NO: 407090 - RNA, 19 nt, Homo sapiens
  misc_RNA (1)...(19): siRNA sense strand
auacaaaggcaaagaucua

SEQ ID NO: 407091 - RNA, 19 nt, Homo sapiens
  misc_RNA (1)...(19): siRNA sense strand
agaagauacuaaagaggaa

SEQ ID NO: 407092 - RNA, 19 nt, Homo sapiens
  misc_RNA (1)...(19): siRNA sense strand
ccuaauuccugaagguaau

SEQ ID NO: 407093 - RNA, 19 nt, Homo sapiens
  misc_RNA (1)...(19): siRNA sense strand
acauacaaguccauacaga

SEQ ID NO: 407094 - RNA, 19 nt, Homo sapiens
  misc_RNA (1)...(19): siRNA sense strand
gaaaagcugcaacauauca

SEQ ID NO: 407095 - RNA, 19 nt, Homo sapiens
  misc_RNA (1)...(19): siRNA sense strand
gaacaacaucuucuauucc

SEQ ID NO: 407096 - RNA, 19 nt, Homo sapiens
  misc_RNA (1)...(19): siRNA sense strand
aaagaucuaagcaugauug

SEQ ID NO: 407097 - RNA, 19 nt, Homo sapiens
  misc_RNA (1)...(19): siRNA sense strand
caaaugcuccagaagaaag

SEQ ID NO: 407098 - RNA, 19 nt, Homo sapiens
  misc_RNA (1)...(19): siRNA sense strand
cagagaacaccacaggaaa

SEQ ID NO: 407099 - RNA, 19 nt, Homo sapiens
  misc_RNA (1)...(19): siRNA sense strand
ccucuucuauggcagauuc

SEQ ID NO: 407100 - RNA, 19 nt, Homo sapiens
  misc_RNA (1)...(19): siRNA sense strand
ggccaagguccuggaaaua

SEQ ID NO: 407101 - RNA, 19 nt, Homo sapiens
  misc_RNA (1)...(19): siRNA sense strand
gaagauacuaaagaggaaa

SEQ ID NO: 407102 - RNA, 19 nt, Homo sapiens
  misc_RNA (1)...(19): siRNA sense strand
ccagaagaaagucgaaaga

SEQ ID NO: 407103 - RNA, 19 nt, Homo sapiens
  misc_RNA (1)...(19): siRNA sense strand
aacaagcucuucggagaaa

SEQ ID NO: 407104 - RNA, 19 nt, Homo sapiens
  misc_RNA (1)...(19): siRNA sense strand
acagagaacaccacaggaa

SEQ ID NO: 407105 - RNA, 19 nt, Homo sapiens
  misc_RNA (1)...(19): siRNA sense strand
cagaagaaagucgaaagaa

SEQ ID NO: 407106 - RNA, 19 nt, Homo sapiens
  misc_RNA (1)...(19): siRNA sense strand
uaucuggaguccuacacaa

SEQ ID NO: 407107 - RNA, 19 nt, Homo sapiens
  misc_RNA (1)...(19): siRNA sense strand
gaagccaacaccaaguuca

SEQ ID NO: 407108 - RNA, 19 nt, Homo sapiens
  misc_RNA (1)...(19): siRNA sense strand
ggcagugggagaagaaauu

SEQ ID NO: 407109 - RNA, 19 nt, Homo sapiens
  misc_RNA (1)...(19): siRNA sense strand
guucuucacuuugaucaag

SEQ ID NO: 407110 - RNA, 19 nt, Homo sapiens
  misc_RNA (1)...(19): siRNA sense strand
uacagaugaugaggcaaua

SEQ ID NO: 407111 - RNA, 19 nt, Homo sapiens
  misc_RNA (1)...(19): siRNA sense strand
acacugcacaacagauuaa

SEQ ID NO: 407112 - RNA, 19 nt, Homo sapiens
  misc_RNA (1)...(19): siRNA sense strand
ggucaggaaauguucauca

SEQ ID NO: 407113 - RNA, 19 nt, Homo sapiens
  misc_RNA (1)...(19): siRNA sense strand
ggcaaagaucuaagcauga

SEQ ID NO: 407114 - RNA, 19 nt, Homo sapiens
  misc_RNA (1)...(19): siRNA sense strand
uguaaucacccuuuccuau

SEQ ID NO: 407115 - RNA, 19 nt, Homo sapiens
  misc_RNA (1)...(19): siRNA sense strand
gggaaugguggauaucuuc

SEQ ID NO: 407116 - RNA, 19 nt, Homo sapiens
  misc_RNA (1)...(19): siRNA sense strand
cugagaaauugauggaaug

SEQ ID NO: 407117 - RNA, 19 nt, Homo sapiens
  misc_RNA (1)...(19): siRNA sense strand
ucaaagggcagugggagaa

SEQ ID NO: 407118 - RNA, 19 nt, Homo sapiens
  misc_RNA (1)...(19): siRNA sense strand
ccuuuccuauucuucauaa

SEQ ID NO: 407119 - RNA, 19 nt, Homo sapiens
  misc_RNA (1)...(19): siRNA sense strand
agagagcuaugaccucaag

SEQ ID NO: 407120 - RNA, 19 nt, Homo sapiens
  misc_RNA (1)...(19): siRNA sense strand
gaucaagucacagagaaca

SEQ ID NO: 407121 - RNA, 19 nt, Homo sapiens
  misc_RNA (1)...(19): siRNA sense strand
uucaaaagcuucugacuga

SEQ ID NO: 407122 - RNA, 19 nt, Homo sapiens
  misc_RNA (1)...(19): siRNA sense strand
uugauggaauggacaaguu

SEQ ID NO: 407123 - RNA, 19 nt, Homo sapiens
  misc_RNA (1)...(19): siRNA sense strand
caaagacaacacugcacaa

SEQ ID NO: 407124 - RNA, 19 nt, Homo sapiens
  misc_RNA (1)...(19): siRNA sense strand
uggaaagucaaacgaauga

SEQ ID NO: 407125 - RNA, 19 nt, Homo sapiens
  misc_RNA (1)...(19): siRNA sense strand
cauuagggaugguccucuu

SEQ ID NO: 407126 - RNA, 19 nt, Homo sapiens
  misc_RNA (1)...(19): siRNA sense strand
cugcacaacagauuaagaa

SEQ ID NO: 407127 - RNA, 19 nt, Homo sapiens
  misc_RNA (1)...(19): siRNA sense strand
caaaguggaagagagcuau

SEQ ID NO: 407128 - RNA, 19 nt, Homo sapiens
  misc_RNA (1)...(19): siRNA sense strand
agaccaguguggaaucugu

SEQ ID NO: 407129 - RNA, 19 nt, Homo sapiens
  misc_RNA (1)...(19): siRNA sense strand
agugggagaagaaauuuaa

SEQ ID NO: 407130 - RNA, 19 nt, Homo sapiens
  misc_RNA (1)...(19): siRNA sense strand
gauuaacuccuggguggaa

SEQ ID NO: 407131 - RNA, 19 nt, Homo sapiens
  misc_RNA (1)...(19): siRNA sense strand
gaugaugaggcaauacaca

SEQ ID NO: 407132 - RNA, 19 nt, Homo sapiens
  misc_RNA (1)...(19): siRNA sense strand
aaugguggauaucuucaau

SEQ ID NO: 407133 - RNA, 19 nt, Homo sapiens
  misc_RNA (1)...(19): siRNA sense strand
gaaugguggauaucuucaa

SEQ ID NO: 407134 - RNA, 19 nt, Homo sapiens
  misc_RNA (1)...(19): siRNA sense strand
ggaaugguggauaucuuca

SEQ ID NO: 407135 - RNA, 19 nt, Homo sapiens
  misc_RNA (1)...(19): siRNA sense strand
gauggaauggacaaguuug

SEQ ID NO: 407136 - RNA, 19 nt, Homo sapiens
  misc_RNA (1)...(19): siRNA sense strand
gugaagccaacaccaaguu

SEQ ID NO: 407137 - RNA, 19 nt, Homo sapiens
  misc_RNA (1)...(19): siRNA sense strand
gcugccaaaugaaaucgau

SEQ ID NO: 407138 - RNA, 19 nt, Homo sapiens
  misc_RNA (1)...(19): siRNA sense strand
uacaaaggcaaagaucuaa

SEQ ID NO: 407139 - RNA, 19 nt, Homo sapiens
  misc_RNA (1)...(19): siRNA sense strand
acaaguccauacagaugau

SEQ ID NO: 407140 - RNA, 19 nt, Homo sapiens
  misc_RNA (1)...(19): siRNA sense strand
auacaaguccauacagaug

SEQ ID NO: 407141 - RNA, 19 nt, Homo sapiens
  misc_RNA (1)...(19): siRNA sense strand
aaagggcagugggagaaga

SEQ ID NO: 407142 - RNA, 19 nt, Homo sapiens
  misc_RNA (1)...(19): siRNA sense strand
gaccaacagcauccucuuc

SEQ ID NO: 407143 - RNA, 19 nt, Homo sapiens
  misc_RNA (1)...(19): siRNA sense strand
uugaucaagucacagagaa

SEQ ID NO: 407144 - RNA, 19 nt, Homo sapiens
  misc_RNA (1)...(19): siRNA sense strand
caggaaaagcugcaacaua

SEQ ID NO: 407145 - RNA, 19 nt, Homo sapiens
  misc_RNA (1)...(19): siRNA sense strand
uuguguugcugccaaauga

SEQ ID NO: 407146 - RNA, 19 nt, Homo sapiens
  misc_RNA (1)...(19): siRNA sense strand
ugauaggucaggaaauguu

SEQ ID NO: 407147 - RNA, 19 nt, Homo sapiens
  misc_RNA (1)...(19): siRNA sense strand
aggccaagguccuggaaau

SEQ ID NO: 407148 - RNA, 19 nt, Homo sapiens
  misc_RNA (1)...(19): siRNA sense strand
ucagugaagccaacaccaa

SEQ ID NO: 407149 - RNA, 19 nt, Homo sapiens
  misc_RNA (1)...(19): siRNA sense strand
gaaaagaacucuguaguga

SEQ ID NO: 407150 - RNA, 19 nt, Homo sapiens
  misc_RNA (1)...(19): siRNA sense strand
aaagaacucuguagugaaa

SEQ ID NO: 407151 - RNA, 19 nt, Homo sapiens
  misc_RNA (1)...(19): siRNA sense strand
caagggauauggacggaua

SEQ ID NO: 407152 - RNA, 19 nt, Homo sapiens
  misc_RNA (1)...(19): siRNA sense strand
gugaaaggguuacuauuga

SEQ ID NO: 407153 - RNA, 19 nt, Homo sapiens
  misc_RNA (1)...(19): siRNA sense strand
uguaugagcuugauggaaa

SEQ ID NO: 407154 - RNA, 19 nt, Homo sapiens
  misc_RNA (1)...(19): siRNA sense strand
agaaggacguggaaagauu

SEQ ID NO: 407155 - RNA, 19 nt, Homo sapiens
  misc_RNA (1)...(19): siRNA sense strand
ugaaaggguuacuauugaa

SEQ ID NO: 407156 - RNA, 19 nt, Homo sapiens
  misc_RNA (1)...(19): siRNA sense strand
ggacggauaagagauauug

SEQ ID NO: 407157 - RNA, 19 nt, Homo sapiens
  misc_RNA (1)...(19): siRNA sense strand
cagaugaugcuguguauga

SEQ ID NO: 407158 - RNA, 19 nt, Homo sapiens
  misc_RNA (1)...(19): siRNA sense strand
ggagaaggacguggaaaga

SEQ ID NO: 407159 - RNA, 19 nt, Homo sapiens
  misc_RNA (1)...(19): siRNA sense strand
gauauggacggauaagaga

SEQ ID NO: 407160 - RNA, 19 nt, Homo sapiens
  misc_RNA (1)...(19): siRNA sense strand
ucgcagaccucgaaaugau

SEQ ID NO: 407161 - RNA, 19 nt, Homo sapiens
  misc_RNA (1)...(19): siRNA sense strand
gaaaugauagacgguaugu

SEQ ID NO: 407162 - RNA, 19 nt, Homo sapiens
  misc_RNA (1)...(19): siRNA sense strand
aaugauagacgguauguga

SEQ ID NO: 407163 - RNA, 19 nt, Homo sapiens
  misc_RNA (1)...(19): siRNA sense strand
gaaggacguggaaagauuc

SEQ ID NO: 407164 - RNA, 19 nt, Homo sapiens
  misc_RNA (1)...(19): siRNA sense strand
guauucaucgggagacuaa

SEQ ID NO: 407165 - RNA, 19 nt, Homo sapiens
  misc_RNA (1)...(19): siRNA sense strand
ggauauggacggauaagag

SEQ ID NO: 407166 - RNA, 19 nt, Homo sapiens
  misc_RNA (1)...(19): siRNA sense strand
gacgauacucugaccguuu

SEQ ID NO: 407167 - RNA, 19 nt, Homo sapiens
  misc_RNA (1)...(19): siRNA sense strand
gaagagguagaggacgaua

SEQ ID NO: 407168 - RNA, 19 nt, Homo sapiens
  misc_RNA (1)...(19): siRNA sense strand
agugaaaggguuacuauug

SEQ ID NO: 407169 - RNA, 19 nt, Homo sapiens
  misc_RNA (1)...(19): siRNA sense strand
uauggacggauaagagaua

SEQ ID NO: 407170 - RNA, 19 nt, Homo sapiens
  misc_RNA (1)...(19): siRNA sense strand
gagaaggacguggaaagau

SEQ ID NO: 407171 - RNA, 19 nt, Homo sapiens
  misc_RNA (1)...(19): siRNA sense strand
ggaaaagaacucuguagug

SEQ ID NO: 407172 - RNA, 19 nt, Homo sapiens
  misc_RNA (1)...(19): siRNA sense strand
gcagaccucgaaaugauag

SEQ ID NO: 407173 - RNA, 19 nt, Homo sapiens
  misc_RNA (1)...(19): siRNA sense strand
gaaaggguuacuauugaac

SEQ ID NO: 407174 - RNA, 19 nt, Homo sapiens
  misc_RNA (1)...(19): siRNA sense strand
aaggguggauggcugcauu

SEQ ID NO: 407175 - RNA, 19 nt, Homo sapiens
  misc_RNA (1)...(19): siRNA sense strand
ucacgagguggaagaggua

SEQ ID NO: 407176 - RNA, 19 nt, Homo sapiens
  misc_RNA (1)...(19): siRNA sense strand
gaguggcugucggguauuc

SEQ ID NO: 407177 - RNA, 19 nt, Homo sapiens
  misc_RNA (1)...(19): siRNA sense strand
ucgaaaugauagacgguau

SEQ ID NO: 407178 - RNA, 19 nt, Homo sapiens
  misc_RNA (1)...(19): siRNA sense strand
gggagaaggacguggaaag

SEQ ID NO: 407179 - RNA, 19 nt, Homo sapiens
  misc_RNA (1)...(19): siRNA sense strand
uccaagggaugcagaugau

SEQ ID NO: 407180 - RNA, 19 nt, Homo sapiens
  misc_RNA (1)...(19): siRNA sense strand
ugcagaugaugcuguguau

SEQ ID NO: 407181 - RNA, 19 nt, Homo sapiens
  misc_RNA (1)...(19): siRNA sense strand
cgaaaugauagacgguaug

SEQ ID NO: 407182 - RNA, 19 nt, Homo sapiens
  misc_RNA (1)...(19): siRNA sense strand
gcaaaugccuccuucucua

SEQ ID NO: 407183 - RNA, 19 nt, Homo sapiens
  misc_RNA (1)...(19): siRNA sense strand
gaagagaagcuuuguuuau

SEQ ID NO: 407184 - RNA, 19 nt, Homo sapiens
  misc_RNA (1)...(19): siRNA sense strand
gcagagagcacagguauga

SEQ ID NO: 407185 - RNA, 19 nt, Homo sapiens
  misc_RNA (1)...(19): siRNA sense strand
gaacaagcacuuccugaga

SEQ ID NO: 407186 - RNA, 19 nt, Homo sapiens
  misc_RNA (1)...(19): siRNA sense strand
gccaaccacugaagucaua

SEQ ID NO: 407187 - RNA, 19 nt, Homo sapiens
  misc_RNA (1)...(19): siRNA sense strand
uaucaugccuggucaagaa

SEQ ID NO: 407188 - RNA, 19 nt, Homo sapiens
  misc_RNA (1)...(19): siRNA sense strand
ggaagugacugucuaccau

SEQ ID NO: 407189 - RNA, 19 nt, Homo sapiens
  misc_RNA (1)...(19): siRNA sense strand
cagaagagaagcuuuguuu

SEQ ID NO: 407190 - RNA, 19 nt, Homo sapiens
  misc_RNA (1)...(19): siRNA sense strand
gaugccagcucaaucaugu

SEQ ID NO: 407191 - RNA, 19 nt, Homo sapiens
  misc_RNA (1)...(19): siRNA sense strand
aaccacagcugcacaggua

SEQ ID NO: 407192 - RNA, 19 nt, Homo sapiens
  misc_RNA (1)...(19): siRNA sense strand
ccaagugccuacuacagaa

SEQ ID NO: 407193 - RNA, 19 nt, Homo sapiens
  misc_RNA (1)...(19): siRNA sense strand
aagagaagcuuuguuuaug

SEQ ID NO: 407194 - RNA, 19 nt, Homo sapiens
  misc_RNA (1)...(19): siRNA sense strand
ucaaucaugucuacggaaa

SEQ ID NO: 407195 - RNA, 19 nt, Homo sapiens
  misc_RNA (1)...(19): siRNA sense strand
ggacuggcuuggugucuca

SEQ ID NO: 407196 - RNA, 19 nt, Homo sapiens
  misc_RNA (1)...(19): siRNA sense strand
guaucgauaugguuccuuu

SEQ ID NO: 407197 - RNA, 19 nt, Homo sapiens
  misc_RNA (1)...(19): siRNA sense strand
caccacagcuggccaagug

SEQ ID NO: 407198 - RNA, 19 nt, Homo sapiens
  misc_RNA (1)...(19): siRNA sense strand
gcagacuuaugaagcaaga

SEQ ID NO: 407199 - RNA, 19 nt, Homo sapiens
  misc_RNA (1)...(19): siRNA sense strand
gagaagcuuuguuuauguc

SEQ ID NO: 407200 - RNA, 19 nt, Homo sapiens
  misc_RNA (1)...(19): siRNA sense strand
auauauaggcgcagacuua

SEQ ID NO: 407201 - RNA, 19 nt, Homo sapiens
  misc_RNA (1)...(19): siRNA sense strand
uugcaucucugauauauag

SEQ ID NO: 407202 - RNA, 19 nt, Homo sapiens
  misc_RNA (1)...(19): siRNA sense strand
guaccacacuggcagagau

SEQ ID NO: 407203 - RNA, 19 nt, Homo sapiens
  misc_RNA (1)...(19): siRNA sense strand
uauaggcgcagacuuauga

SEQ ID NO: 407204 - RNA, 19 nt, Homo sapiens
  misc_RNA (1)...(19): siRNA sense strand
caaggcaacucagaaccaa

SEQ ID NO: 407205 - RNA, 19 nt, Homo sapiens
  misc_RNA (1)...(19): siRNA sense strand
gcacacacaccauggaagu

SEQ ID NO: 407206 - RNA, 19 nt, Homo sapiens
  misc_RNA (1)...(19): siRNA sense strand
caacaauaccaucaucaau

SEQ ID NO: 407207 - RNA, 19 nt, Homo sapiens
  misc_RNA (1)...(19): siRNA sense strand
ggucaacaauaccaucauc

SEQ ID NO: 407208 - RNA, 19 nt, Homo sapiens
  misc_RNA (1)...(19): siRNA sense strand
agagaagcuuuguuuaugu

SEQ ID NO: 407209 - RNA, 19 nt, Homo sapiens
  misc_RNA (1)...(19): siRNA sense strand
aacaagcacuuccugagaa

SEQ ID NO: 407210 - RNA, 19 nt, Homo sapiens
  misc_RNA (1)...(19): siRNA sense strand
ggacagaagcccagagacu

SEQ ID NO: 407211 - RNA, 19 nt, Homo sapiens
  misc_RNA (1)...(19): siRNA sense strand
ccauggaagugacugucua

SEQ ID NO: 407212 - RNA, 19 nt, Homo sapiens
  misc_RNA (1)...(19): siRNA sense strand
caaaagguauugccagaug

SEQ ID NO: 407213 - RNA, 19 nt, Homo sapiens
  misc_RNA (1)...(19): siRNA sense strand
cagcucagccuucaccauu

SEQ ID NO: 407214 - RNA, 19 nt, Homo sapiens
  misc_RNA (1)...(19): siRNA sense strand
ccacauagcagcagucacu

SEQ ID NO: 407215 - RNA, 19 nt, Homo sapiens
  misc_RNA (1)...(19): siRNA sense strand
acaagcacuuccugagaaa

SEQ ID NO: 407216 - RNA, 19 nt, Homo sapiens
  misc_RNA (1)...(19): siRNA sense strand
cugcagagguaucaauugu

SEQ ID NO: 407217 - RNA, 19 nt, Homo sapiens
  misc_RNA (1)...(19): siRNA sense strand
gaugguacagccaccuuaa

SEQ ID NO: 407218 - RNA, 19 nt, Homo sapiens
  misc_RNA (1)...(19): siRNA sense strand
caaaugccuccuucucuau

SEQ ID NO: 407219 - RNA, 19 nt, Homo sapiens
  misc_RNA (1)...(19): siRNA sense strand
agaagagaagcuuuguuua

SEQ ID NO: 407220 - RNA, 19 nt, Homo sapiens
  misc_RNA (1)...(19): siRNA sense strand
ccagaugccagcucaauca

SEQ ID NO: 407221 - RNA, 19 nt, Homo sapiens
  misc_RNA (1)...(19): siRNA sense strand
cuggagagguggucaagug

SEQ ID NO: 407222 - RNA, 19 nt, Homo sapiens
  misc_RNA (1)...(19): siRNA sense strand
gguccuugcaucucugaua

SEQ ID NO: 407223 - RNA, 19 nt, Homo sapiens
  misc_RNA (1)...(19): siRNA sense strand
gcaucuugcugguguugau

SEQ ID NO: 407224 - RNA, 19 nt, Homo sapiens
  misc_RNA (1)...(19): siRNA sense strand
ggaugguacagccaccuua

SEQ ID NO: 407225 - RNA, 19 nt, Homo sapiens
  misc_RNA (1)...(19): siRNA sense strand
gggacauacugccucaaug

SEQ ID NO: 407226 - RNA, 19 nt, Homo sapiens
  misc_RNA (1)...(19): siRNA sense strand
ugaugggccuacacugauu

SEQ ID NO: 407227 - RNA, 19 nt, Homo sapiens
  misc_RNA (1)...(19): siRNA sense strand
cuucugcucuugucccauu

SEQ ID NO: 407228 - RNA, 19 nt, Homo sapiens
  misc_RNA (1)...(19): siRNA sense strand
guccuugcaucucugauau

SEQ ID NO: 407229 - RNA, 19 nt, Homo sapiens
  misc_RNA (1)...(19): siRNA sense strand
guugauggcugugguccuu

SEQ ID NO: 407230 - RNA, 19 nt, Homo sapiens
  misc_RNA (1)...(19): siRNA sense strand
guggucagcacccagcuua

SEQ ID NO: 407231 - RNA, 19 nt, Homo sapiens
  misc_RNA (1)...(19): siRNA sense strand
gccaagugccuacuacaga

SEQ ID NO: 407232 - RNA, 19 nt, Homo sapiens
  misc_RNA (1)...(19): siRNA sense strand
uuacugaccaggugccuuu

SEQ ID NO: 407233 - RNA, 19 nt, Homo sapiens
  misc_RNA (1)...(19): siRNA sense strand
gcucagccuucaccauuac

SEQ ID NO: 407234 - RNA, 19 nt, Homo sapiens
  misc_RNA (1)...(19): siRNA sense strand
gggcaaugcugggcacaca

SEQ ID NO: 407235 - RNA, 19 nt, Homo sapiens
  misc_RNA (1)...(19): siRNA sense strand
gacagaagcccagagacuu

SEQ ID NO: 407236 - RNA, 19 nt, Homo sapiens
  misc_RNA (1)...(19): siRNA sense strand
cagguuaucugggucaaca

SEQ ID NO: 407237 - RNA, 19 nt, Homo sapiens
  misc_RNA (1)...(19): siRNA sense strand
cugagaaggugccaguuuc

SEQ ID NO: 407238 - RNA, 19 nt, Homo sapiens
  misc_RNA (1)...(19): siRNA sense strand
cuacaaaaguacccagaaa

SEQ ID NO: 407239 - RNA, 19 nt, Homo sapiens
  misc_RNA (1)...(19): siRNA sense strand
gaagcugaccucuccuaca

SEQ ID NO: 407240 - RNA, 19 nt, Homo sapiens
  misc_RNA (1)...(19): siRNA sense strand
ccuuaaggcuggugaagag

SEQ ID NO: 407241 - RNA, 19 nt, Homo sapiens
  misc_RNA (1)...(19): siRNA sense strand
uaucaauuguggugcuuuc

SEQ ID NO: 407242 - RNA, 19 nt, Homo sapiens
  misc_RNA (1)...(19): siRNA sense strand
gcacagguaacaacuacag

SEQ ID NO: 407243 - RNA, 19 nt, Homo sapiens
  misc_RNA (1)...(19): siRNA sense strand
aacaauaccaucaucaaug

SEQ ID NO: 407244 - RNA, 19 nt, Homo sapiens
  misc_RNA (1)...(19): siRNA sense strand
gggaggacagccaguguau

SEQ ID NO: 407245 - RNA, 19 nt, Homo sapiens
  misc_RNA (1)...(19): siRNA sense strand
ucaacaauaccaucaucaa

SEQ ID NO: 407246 - RNA, 19 nt, Homo sapiens
  misc_RNA (1)...(19): siRNA sense strand
gcgcagacuuaugaagcaa

SEQ ID NO: 407247 - RNA, 19 nt, Homo sapiens
  misc_RNA (1)...(19): siRNA sense strand
ccuugcaucucugauauau

SEQ ID NO: 407248 - RNA, 19 nt, Homo sapiens
  misc_RNA (1)...(19): siRNA sense strand
aaugaugggccuacacuga

SEQ ID NO: 407249 - RNA, 19 nt, Homo sapiens
  misc_RNA (1)...(19): siRNA sense strand
gcauuugagcugacugugu

SEQ ID NO: 407250 - RNA, 19 nt, Homo sapiens
  misc_RNA (1)...(19): siRNA sense strand
ccugagaaggugccaguuu

SEQ ID NO: 407251 - RNA, 19 nt, Homo sapiens
  misc_RNA (1)...(19): siRNA sense strand
cuacacugauuggugcaaa

SEQ ID NO: 407252 - RNA, 19 nt, Homo sapiens
  misc_RNA (1)...(19): siRNA sense strand
aaucaugucuacggaaagu

SEQ ID NO: 407253 - RNA, 19 nt, Homo sapiens
  misc_RNA (1)...(19): siRNA sense strand
ucauuuggcugugauaggu

SEQ ID NO: 407254 - RNA, 19 nt, Homo sapiens
  misc_RNA (1)...(19): siRNA sense strand
gcaaugcugggcacacaca

SEQ ID NO: 407255 - RNA, 19 nt, Homo sapiens
  misc_RNA (1)...(19): siRNA sense strand
acagaagcccagagacuug

SEQ ID NO: 407256 - RNA, 19 nt, Homo sapiens
  misc_RNA (1)...(19): siRNA sense strand
acacacaccauggaaguga

SEQ ID NO: 407257 - RNA, 19 nt, Homo sapiens
  misc_RNA (1)...(19): siRNA sense strand
uaaggcuggugaagagaca

SEQ ID NO: 407258 - RNA, 19 nt, Homo sapiens
  misc_RNA (1)...(19): siRNA sense strand
ccagcucaaucaugucuac

SEQ ID NO: 407259 - RNA, 19 nt, Homo sapiens
  misc_RNA (1)...(19): siRNA sense strand
gaggacagccaguguaucc

SEQ ID NO: 407260 - RNA, 19 nt, Homo sapiens
  misc_RNA (1)...(19): siRNA sense strand
gcugaucgugggcaucuug

SEQ ID NO: 407261 - RNA, 19 nt, Homo sapiens
  misc_RNA (1)...(19): siRNA sense strand
uauugaaagugccgagauc

SEQ ID NO: 407262 - RNA, 19 nt, Homo sapiens
  misc_RNA (1)...(19): siRNA sense strand
aagcugaccucuccuacac

SEQ ID NO: 407263 - RNA, 19 nt, Homo sapiens
  misc_RNA (1)...(19): siRNA sense strand
gggcacacacaccauggaa

SEQ ID NO: 407264 - RNA, 19 nt, Homo sapiens
  misc_RNA (1)...(19): siRNA sense strand
gaaccaaagccuggaacag

SEQ ID NO: 407265 - RNA, 19 nt, Homo sapiens
  misc_RNA (1)...(19): siRNA sense strand
caaugugucucuggcugau

SEQ ID NO: 407266 - RNA, 19 nt, Homo sapiens
  misc_RNA (1)...(19): siRNA sense strand
gguaucaauuguggugcuu

SEQ ID NO: 407267 - RNA, 19 nt, Homo sapiens
  misc_RNA (1)...(19): siRNA sense strand
guuaucugggucaacaaua

SEQ ID NO: 407268 - RNA, 19 nt, Homo sapiens
  misc_RNA (1)...(19): siRNA sense strand
ggcgcagacuuaugaagca

SEQ ID NO: 407269 - RNA, 19 nt, Homo sapiens
  misc_RNA (1)...(19): siRNA sense strand
ggucagcacccagcuuauc

SEQ ID NO: 407270 - RNA, 19 nt, Homo sapiens
  misc_RNA (1)...(19): siRNA sense strand
auuguguucuguaucgaua

SEQ ID NO: 407271 - RNA, 19 nt, Homo sapiens
  misc_RNA (1)...(19): siRNA sense strand
gcaggugccaaccacugaa

SEQ ID NO: 407272 - RNA, 19 nt, Homo sapiens
  misc_RNA (1)...(19): siRNA sense strand
guaccccaguugccacaua

SEQ ID NO: 407273 - RNA, 19 nt, Homo sapiens
  misc_RNA (1)...(19): siRNA sense strand
ccuggauuguguucuguau

SEQ ID NO: 407274 - RNA, 19 nt, Homo sapiens
  misc_RNA (1)...(19): siRNA sense strand
cugcacagguaacaacuac

SEQ ID NO: 407275 - RNA, 19 nt, Homo sapiens
  misc_RNA (1)...(19): siRNA sense strand
guaaugaugggccuacacu

SEQ ID NO: 407276 - RNA, 19 nt, Homo sapiens
  misc_RNA (1)...(19): siRNA sense strand
ggacuuuggagacaguagu

SEQ ID NO: 407277 - RNA, 19 nt, Homo sapiens
  misc_RNA (1)...(19): siRNA sense strand
agaaggugccaguuucaga

SEQ ID NO: 407278 - RNA, 19 nt, Homo sapiens
  misc_RNA (1)...(19): siRNA sense strand
agcucagccuucaccauua

SEQ ID NO: 407279 - RNA, 19 nt, Homo sapiens
  misc_RNA (1)...(19): siRNA sense strand
uggauuguguucuguaucg

SEQ ID NO: 407280 - RNA, 19 nt, Homo sapiens
  misc_RNA (1)...(19): siRNA sense strand
ccaaggaagccugcaugga

SEQ ID NO: 407281 - RNA, 19 nt, Homo sapiens
  misc_RNA (1)...(19): siRNA sense strand
cagaagcccagagacuuga

SEQ ID NO: 407282 - RNA, 19 nt, Homo sapiens
  misc_RNA (1)...(19): siRNA sense strand
caaggaagauuaagcauuu

SEQ ID NO: 407283 - RNA, 19 nt, Homo sapiens
  misc_RNA (1)...(19): siRNA sense strand
gaagaaagcccuguuauug

SEQ ID NO: 407284 - RNA, 19 nt, Homo sapiens
  misc_RNA (1)...(19): siRNA sense strand
ggaccaagaugaugaagaa

SEQ ID NO: 407285 - RNA, 19 nt, Homo sapiens
  misc_RNA (1)...(19): siRNA sense strand
gaaauguuaucguuccaua

SEQ ID NO: 407286 - RNA, 19 nt, Homo sapiens
  misc_RNA (1)...(19): siRNA sense strand
ggagagacaaggaagauua

SEQ ID NO: 407287 - RNA, 19 nt, Homo sapiens
  misc_RNA (1)...(19): siRNA sense strand
gcagaagcauccagauaaa

SEQ ID NO: 407288 - RNA, 19 nt, Homo sapiens
  misc_RNA (1)...(19): siRNA sense strand
ggaaaguggucaauucuca

SEQ ID NO: 407289 - RNA, 19 nt, Homo sapiens
  misc_RNA (1)...(19): siRNA sense strand
ugaaggaacuuaagcagaa

SEQ ID NO: 407290 - RNA, 19 nt, Homo sapiens
  misc_RNA (1)...(19): siRNA sense strand
gcagacgccuccauaggua

SEQ ID NO: 407291 - RNA, 19 nt, Homo sapiens
  misc_RNA (1)...(19): siRNA sense strand
gcauccagauaaagaaaua

SEQ ID NO: 407292 - RNA, 19 nt, Homo sapiens
  misc_RNA (1)...(19): siRNA sense strand
gugaggaucuggaaugaaa

SEQ ID NO: 407293 - RNA, 19 nt, Homo sapiens
  misc_RNA (1)...(19): siRNA sense strand
ugaaggaacugugguguuu

SEQ ID NO: 407294 - RNA, 19 nt, Homo sapiens
  misc_RNA (1)...(19): siRNA sense strand
gcauuugcgugucuucuuu

SEQ ID NO: 407295 - RNA, 19 nt, Homo sapiens
  misc_RNA (1)...(19): siRNA sense strand
gggaagguuugcuuacuuu

SEQ ID NO: 407296 - RNA, 19 nt, Homo sapiens
  misc_RNA (1)...(19): siRNA sense strand
agaaagcccuguuauugaa

SEQ ID NO: 407297 - RNA, 19 nt, Homo sapiens
  misc_RNA (1)...(19): siRNA sense strand
gaucuggaaugaaacaguu

SEQ ID NO: 407298 - RNA, 19 nt, Homo sapiens
  misc_RNA (1)...(19): siRNA sense strand
ggagaugagugagaagaaa

SEQ ID NO: 407299 - RNA, 19 nt, Homo sapiens
  misc_RNA (1)...(19): siRNA sense strand
aaaugaaacuggugaaugu

SEQ ID NO: 407300 - RNA, 19 nt, Homo sapiens
  misc_RNA (1)...(19): siRNA sense strand
ccgauucucucuacuguaa

SEQ ID NO: 407301 - RNA, 19 nt, Homo sapiens
  misc_RNA (1)...(19): siRNA sense strand
gacuggagcuggcaacauu

SEQ ID NO: 407302 - RNA, 19 nt, Homo sapiens
  misc_RNA (1)...(19): siRNA sense strand
agaauuagcuaacuaccaa

SEQ ID NO: 407303 - RNA, 19 nt, Homo sapiens
  misc_RNA (1)...(19): siRNA sense strand
ggaaggagaaggaaaugaa

SEQ ID NO: 407304 - RNA, 19 nt, Homo sapiens
  misc_RNA (1)...(19): siRNA sense strand
ccgcagagguggugauuug

SEQ ID NO: 407305 - RNA, 19 nt, Homo sapiens
  misc_RNA (1)...(19): siRNA sense strand
gggaagugcugcauucaau

SEQ ID NO: 407306 - RNA, 19 nt, Homo sapiens
  misc_RNA (1)...(19): siRNA sense strand
caaaugcugggucugauua

SEQ ID NO: 407307 - RNA, 19 nt, Homo sapiens
  misc_RNA (1)...(19): siRNA sense strand
gaagguucaugcuagagaa

SEQ ID NO: 407308 - RNA, 19 nt, Homo sapiens
  misc_RNA (1)...(19): siRNA sense strand
agaccuggcuucccacuuu

SEQ ID NO: 407309 - RNA, 19 nt, Homo sapiens
  misc_RNA (1)...(19): siRNA sense strand
gaaaugaaacuggugaaug

SEQ ID NO: 407310 - RNA, 19 nt, Homo sapiens
  misc_RNA (1)...(19): siRNA sense strand
cuugguggcuucacaauaa

SEQ ID NO: 407311 - RNA, 19 nt, Homo sapiens
  misc_RNA (1)...(19): siRNA sense strand
ucucagcaaugucaaagua

SEQ ID NO: 407312 - RNA, 19 nt, Homo sapiens
  misc_RNA (1)...(19): siRNA sense strand
acaccuggcuuuacauuau

SEQ ID NO: 407313 - RNA, 19 nt, Homo sapiens
  misc_RNA (1)...(19): siRNA sense strand
ucaaugggauuucaucugu

SEQ ID NO: 407314 - RNA, 19 nt, Homo sapiens
  misc_RNA (1)...(19): siRNA sense strand
gaacaagggacauaucagu

SEQ ID NO: 407315 - RNA, 19 nt, Homo sapiens
  misc_RNA (1)...(19): siRNA sense strand
ggagacaggccaucuucua

SEQ ID NO: 407316 - RNA, 19 nt, Homo sapiens
  misc_RNA (1)...(19): siRNA sense strand
ugaauguacuggaucauau

SEQ ID NO: 407317 - RNA, 19 nt, Homo sapiens
  misc_RNA (1)...(19): siRNA sense strand
gcaugcagcugaccaagca

SEQ ID NO: 407318 - RNA, 19 nt, Homo sapiens
  misc_RNA (1)...(19): siRNA sense strand
caagaguacuguggacaaa

SEQ ID NO: 407319 - RNA, 19 nt, Homo sapiens
  misc_RNA (1)...(19): siRNA sense strand
gaacauccgauucucucua

SEQ ID NO: 407320 - RNA, 19 nt, Homo sapiens
  misc_RNA (1)...(19): siRNA sense strand
ggagcucgaggaaauguua

SEQ ID NO: 407321 - RNA, 19 nt, Homo sapiens
  misc_RNA (1)...(19): siRNA sense strand
aaugggauuucaucuguua

SEQ ID NO: 407322 - RNA, 19 nt, Homo sapiens
  misc_RNA (1)...(19): siRNA sense strand
ggauuucaucuguuaguua

SEQ ID NO: 407323 - RNA, 19 nt, Homo sapiens
  misc_RNA (1)...(19): siRNA sense strand
ggaagaugaugacgacgau

SEQ ID NO: 407324 - RNA, 19 nt, Homo sapiens
  misc_RNA (1)...(19): siRNA sense strand
uggacaaacucauuaagaa

SEQ ID NO: 407325 - RNA, 19 nt, Homo sapiens
  misc_RNA (1)...(19): siRNA sense strand
gaaaaugacccuguuagua

SEQ ID NO: 407326 - RNA, 19 nt, Homo sapiens
  misc_RNA (1)...(19): siRNA sense strand
ggaugauuauugaacauga

SEQ ID NO: 407327 - RNA, 19 nt, Homo sapiens
  misc_RNA (1)...(19): siRNA sense strand
gaaggagaaggaaaugaaa

SEQ ID NO: 407328 - RNA, 19 nt, Homo sapiens
  misc_RNA (1)...(19): siRNA sense strand
cuauggcucuuguacauuu

SEQ ID NO: 407329 - RNA, 19 nt, Homo sapiens
  misc_RNA (1)...(19): siRNA sense strand
gaagugcugcauucaauau

SEQ ID NO: 407330 - RNA, 19 nt, Homo sapiens
  misc_RNA (1)...(19): siRNA sense strand
ugucauaucuccugguguu

SEQ ID NO: 407331 - RNA, 19 nt, Homo sapiens
  misc_RNA (1)...(19): siRNA sense strand
ugaagaagcuaggcgagaa

SEQ ID NO: 407332 - RNA, 19 nt, Homo sapiens
  misc_RNA (1)...(19): siRNA sense strand
agacugaaauugaaaugga

SEQ ID NO: 407333 - RNA, 19 nt, Homo sapiens
  misc_RNA (1)...(19): siRNA sense strand
gagacaggccaucuucuaa

SEQ ID NO: 407334 - RNA, 19 nt, Homo sapiens
  misc_RNA (1)...(19): siRNA sense strand
guucauguccucuauagaa

SEQ ID NO: 407335 - RNA, 19 nt, Homo sapiens
  misc_RNA (1)...(19): siRNA sense strand
gaagugaucauugaagaau

SEQ ID NO: 407336 - RNA, 19 nt, Homo sapiens
  misc_RNA (1)...(19): siRNA sense strand
ucauggaggugaaaguauu

SEQ ID NO: 407337 - RNA, 19 nt, Homo sapiens
  misc_RNA (1)...(19): siRNA sense strand
gaaaucagaguggguauca

SEQ ID NO: 407338 - RNA, 19 nt, Homo sapiens
  misc_RNA (1)...(19): siRNA sense strand
ggaagugcugcauucaaua

SEQ ID NO: 407339 - RNA, 19 nt, Homo sapiens
  misc_RNA (1)...(19): siRNA sense strand
ggagagaccaccaagacaa

SEQ ID NO: 407340 - RNA, 19 nt, Homo sapiens
  misc_RNA (1)...(19): siRNA sense strand
gagagacaaggaagauuaa

SEQ ID NO: 407341 - RNA, 19 nt, Homo sapiens
  misc_RNA (1)...(19): siRNA sense strand
gcaacgcggugaaugucuu

SEQ ID NO: 407342 - RNA, 19 nt, Homo sapiens
  misc_RNA (1)...(19): siRNA sense strand
gaaauggcuaggauucuga

SEQ ID NO: 407343 - RNA, 19 nt, Homo sapiens
  misc_RNA (1)...(19): siRNA sense strand
aaggaacugugguguuuaa

SEQ ID NO: 407344 - RNA, 19 nt, Homo sapiens
  misc_RNA (1)...(19): siRNA sense strand
gacaaacucauuaagaaga

SEQ ID NO: 407345 - RNA, 19 nt, Homo sapiens
  misc_RNA (1)...(19): siRNA sense strand
gaagaggagaggcgcauug

SEQ ID NO: 407346 - RNA, 19 nt, Homo sapiens
  misc_RNA (1)...(19): siRNA sense strand
caauaucagucaagguaau

SEQ ID NO: 407347 - RNA, 19 nt, Homo sapiens
  misc_RNA (1)...(19): siRNA sense strand
cuagagcuacuguguauuu

SEQ ID NO: 407348 - RNA, 19 nt, Homo sapiens
  misc_RNA (1)...(19): siRNA sense strand
gagaagaaagcccuguuau

SEQ ID NO: 407349 - RNA, 19 nt, Homo sapiens
  misc_RNA (1)...(19): siRNA sense strand
ggaagccaaucauguuucu

SEQ ID NO: 407350 - RNA, 19 nt, Homo sapiens
  misc_RNA (1)...(19): siRNA sense strand
gaaggaacugugguguuua

SEQ ID NO: 407351 - RNA, 19 nt, Homo sapiens
  misc_RNA (1)...(19): siRNA sense strand
gaauguacuggaucauauu

SEQ ID NO: 407352 - RNA, 19 nt, Homo sapiens
  misc_RNA (1)...(19): siRNA sense strand
gucacucucuucaccauuu

SEQ ID NO: 407353 - RNA, 19 nt, Homo sapiens
  misc_RNA (1)...(19): siRNA sense strand
ccauuggccugaaagauuc

SEQ ID NO: 407354 - RNA, 19 nt, Homo sapiens
  misc_RNA (1)...(19): siRNA sense strand
agacgaauaugaugacaag

SEQ ID NO: 407355 - RNA, 19 nt, Homo sapiens
  misc_RNA (1)...(19): siRNA sense strand
gaaccugugacucauguga

SEQ ID NO: 407356 - RNA, 19 nt, Homo sapiens
  misc_RNA (1)...(19): siRNA sense strand
gcaaaugcugggucugauu

SEQ ID NO: 407357 - RNA, 19 nt, Homo sapiens
  misc_RNA (1)...(19): siRNA sense strand
gaagaagcuaggcgagaaa

SEQ ID NO: 407358 - RNA, 19 nt, Homo sapiens
  misc_RNA (1)...(19): siRNA sense strand
acaaguaugucuacaagag

SEQ ID NO: 407359 - RNA, 19 nt, Homo sapiens
  misc_RNA (1)...(19): siRNA sense strand
ggauaggagacuucuguuu

SEQ ID NO: 407360 - RNA, 19 nt, Homo sapiens
  misc_RNA (1)...(19): siRNA sense strand
aaucauguuucuacacuug

SEQ ID NO: 407361 - RNA, 19 nt, Homo sapiens
  misc_RNA (1)...(19): siRNA sense strand
ccucacauccugccucuuu

SEQ ID NO: 407362 - RNA, 19 nt, Homo sapiens
  misc_RNA (1)...(19): siRNA sense strand
ugagaagaaagcccuguua

SEQ ID NO: 407363 - RNA, 19 nt, Homo sapiens
  misc_RNA (1)...(19): siRNA sense strand
gugaaaguauugagaacau

SEQ ID NO: 407364 - RNA, 19 nt, Homo sapiens
  misc_RNA (1)...(19): siRNA sense strand
gaagucaucacaucucaag

SEQ ID NO: 407365 - RNA, 19 nt, Homo sapiens
  misc_RNA (1)...(19): siRNA sense strand
ggacaaacucauuaagaag

SEQ ID NO: 407366 - RNA, 19 nt, Homo sapiens
  misc_RNA (1)...(19): siRNA sense strand
ucgaggaaauguuaucguu

SEQ ID NO: 407367 - RNA, 19 nt, Homo sapiens
  misc_RNA (1)...(19): siRNA sense strand
aaucagaguggguaucaua

SEQ ID NO: 407368 - RNA, 19 nt, Homo sapiens
  misc_RNA (1)...(19): siRNA sense strand
aaaaugacccuguuaguaa

SEQ ID NO: 407369 - RNA, 19 nt, Homo sapiens
  misc_RNA (1)...(19): siRNA sense strand
gauuucaucuguuaguuac

SEQ ID NO: 407370 - RNA, 19 nt, Homo sapiens
  misc_RNA (1)...(19): siRNA sense strand
ggaagugaucauugaagaa

SEQ ID NO: 407371 - RNA, 19 nt, Homo sapiens
  misc_RNA (1)...(19): siRNA sense strand
aagaaagcccuguuauuga

SEQ ID NO: 407372 - RNA, 19 nt, Homo sapiens
  misc_RNA (1)...(19): siRNA sense strand
caagguaauugaugaugag

SEQ ID NO: 407373 - RNA, 19 nt, Homo sapiens
  misc_RNA (1)...(19): siRNA sense strand
ggugauacccagaaggaaa

SEQ ID NO: 407374 - RNA, 19 nt, Homo sapiens
  misc_RNA (1)...(19): siRNA sense strand
gucaucacaucucaagaaa

SEQ ID NO: 407375 - RNA, 19 nt, Homo sapiens
  misc_RNA (1)...(19): siRNA sense strand
ggaggccuacugccacaua

SEQ ID NO: 407376 - RNA, 19 nt, Homo sapiens
  misc_RNA (1)...(19): siRNA sense strand
agaagaaagcccuguuauu

SEQ ID NO: 407377 - RNA, 19 nt, Homo sapiens
  misc_RNA (1)...(19): siRNA sense strand
ccagaaugaugaaauuguc

SEQ ID NO: 407378 - RNA, 19 nt, Homo sapiens
  misc_RNA (1)...(19): siRNA sense strand
gaagcauccagauaaagaa

SEQ ID NO: 407379 - RNA, 19 nt, Homo sapiens
  misc_RNA (1)...(19): siRNA sense strand
uuacaaguaugucuacaag

SEQ ID NO: 407380 - RNA, 19 nt, Homo sapiens
  misc_RNA (1)...(19): siRNA sense strand
gauucuccuuucaguaauu

SEQ ID NO: 407381 - RNA, 19 nt, Homo sapiens
  misc_RNA (1)...(19): siRNA sense strand
guccaucgcugccaucuac

SEQ ID NO: 407382 - RNA, 19 nt, Homo sapiens
  misc_RNA (1)...(19): siRNA sense strand
gagcaggaauuacacauga

SEQ ID NO: 407383 - RNA, 19 nt, Homo sapiens
  misc_RNA (1)...(19): siRNA sense strand
gagaagcugugcagaagaa

SEQ ID NO: 407384 - RNA, 19 nt, Homo sapiens
  misc_RNA (1)...(19): siRNA sense strand
gaugaagacugcagguuau

SEQ ID NO: 407385 - RNA, 19 nt, Homo sapiens
  misc_RNA (1)...(19): siRNA sense strand
uuaccuauguggcuacuua

SEQ ID NO: 407386 - RNA, 19 nt, Homo sapiens
  misc_RNA (1)...(19): siRNA sense strand
ggcgagagcucacccuuga

SEQ ID NO: 407387 - RNA, 19 nt, Homo sapiens
  misc_RNA (1)...(19): siRNA sense strand
ccaaugcgcuggccaaugg

SEQ ID NO: 407388 - RNA, 19 nt, Homo sapiens
  misc_RNA (1)...(19): siRNA sense strand
gagcaggucuaccgaguca

SEQ ID NO: 407389 - RNA, 19 nt, Homo sapiens
  misc_RNA (1)...(19): siRNA sense strand
gcaaacaugucuucaagcu

SEQ ID NO: 407390 - RNA, 19 nt, Homo sapiens
  misc_RNA (1)...(19): siRNA sense strand
gcgcaaacaugucuucaag

SEQ ID NO: 407391 - RNA, 19 nt, Homo sapiens
  misc_RNA (1)...(19): siRNA sense strand
gcaaagaccgcauugucaa

SEQ ID NO: 407392 - RNA, 19 nt, Homo sapiens
  misc_RNA (1)...(19): siRNA sense strand
gaacacccuugcagcacaa

SEQ ID NO: 407393 - RNA, 19 nt, Homo sapiens
  misc_RNA (1)...(19): siRNA sense strand
ccacagacuuugacagcuu

SEQ ID NO: 407394 - RNA, 19 nt, Homo sapiens
  misc_RNA (1)...(19): siRNA sense strand
ccagagagcacucggauau

SEQ ID NO: 407395 - RNA, 19 nt, Homo sapiens
  misc_RNA (1)...(19): siRNA sense strand
gagauggacuagcuuucaa

SEQ ID NO: 407396 - RNA, 19 nt, Homo sapiens
  misc_RNA (1)...(19): siRNA sense strand
agaagucaaucauuaccua

SEQ ID NO: 407397 - RNA, 19 nt, Homo sapiens
  misc_RNA (1)...(19): siRNA sense strand
ugacauugccgagcaguua

SEQ ID NO: 407398 - RNA, 19 nt, Homo sapiens
  misc_RNA (1)...(19): siRNA sense strand
uggcugagcugcaggaaau

SEQ ID NO: 407399 - RNA, 19 nt, Homo sapiens
  misc_RNA (1)...(19): siRNA sense strand
ucaacgccaucgugcauaa

SEQ ID NO: 407400 - RNA, 19 nt, Homo sapiens
  misc_RNA (1)...(19): siRNA sense strand
gaagaagucagccaaggau

SEQ ID NO: 407401 - RNA, 19 nt, Homo sapiens
  misc_RNA (1)...(19): siRNA sense strand
cagcaaagacggcagagaa

SEQ ID NO: 407402 - RNA, 19 nt, Homo sapiens
  misc_RNA (1)...(19): siRNA sense strand
ggacaaggcacugcaguuc

SEQ ID NO: 407403 - RNA, 19 nt, Homo sapiens
  misc_RNA (1)...(19): siRNA sense strand
gagaaggagcgaaagagaa

SEQ ID NO: 407404 - RNA, 19 nt, Homo sapiens
  misc_RNA (1)...(19): siRNA sense strand
ggagaaggagcgaaagaga

SEQ ID NO: 407405 - RNA, 19 nt, Homo sapiens
  misc_RNA (1)...(19): siRNA sense strand
gaaaaggaacugggacuua

SEQ ID NO: 407406 - RNA, 19 nt, Homo sapiens
  misc_RNA (1)...(19): siRNA sense strand
ggagagauggacuagcuuu

SEQ ID NO: 407407 - RNA, 19 nt, Homo sapiens
  misc_RNA (1)...(19): siRNA sense strand
caacgucaauguacacaac

SEQ ID NO: 407408 - RNA, 19 nt, Homo sapiens
  misc_RNA (1)...(19): siRNA sense strand
ggacaagguggacaaggaa

SEQ ID NO: 407409 - RNA, 19 nt, Homo sapiens
  misc_RNA (1)...(19): siRNA sense strand
ggaccaucauccuucgauu

SEQ ID NO: 407410 - RNA, 19 nt, Homo sapiens
  misc_RNA (1)...(19): siRNA sense strand
ggacaccacagacaaguuc

SEQ ID NO: 407411 - RNA, 19 nt, Homo sapiens
  misc_RNA (1)...(19): siRNA sense strand
agaaggagguggaggcaau

SEQ ID NO: 407412 - RNA, 19 nt, Homo sapiens
  misc_RNA (1)...(19): siRNA sense strand
gagaggaggcacaagaaga

SEQ ID NO: 407413 - RNA, 19 nt, Homo sapiens
  misc_RNA (1)...(19): siRNA sense strand
ccaggaauauguucugucu

SEQ ID NO: 407414 - RNA, 19 nt, Homo sapiens
  misc_RNA (1)...(19): siRNA sense strand
aggaauauguucugucuca

SEQ ID NO: 407415 - RNA, 19 nt, Homo sapiens
  misc_RNA (1)...(19): siRNA sense strand
ggaagaaggcugccaacag

SEQ ID NO: 407416 - RNA, 19 nt, Homo sapiens
  misc_RNA (1)...(19): siRNA sense strand
gaugggcgagcaggaauua

SEQ ID NO: 407417 - RNA, 19 nt, Homo sapiens
  misc_RNA (1)...(19): siRNA sense strand
ucaacauccugcucaagaa

SEQ ID NO: 407418 - RNA, 19 nt, Homo sapiens
  misc_RNA (1)...(19): siRNA sense strand
gcaagagaauuggcaaggu

SEQ ID NO: 407419 - RNA, 19 nt, Homo sapiens
  misc_RNA (1)...(19): siRNA sense strand
ggcagaacguguacugugu

SEQ ID NO: 407420 - RNA, 19 nt, Homo sapiens
  misc_RNA (1)...(19): siRNA sense strand
agacaaggcugaggagauc

SEQ ID NO: 407421 - RNA, 19 nt, Homo sapiens
  misc_RNA (1)...(19): siRNA sense strand
gggaaagaguauagaccuu

SEQ ID NO: 407422 - RNA, 19 nt, Homo sapiens
  misc_RNA (1)...(19): siRNA sense strand
agaugaagacugcagguua

SEQ ID NO: 407423 - RNA, 19 nt, Homo sapiens
  misc_RNA (1)...(19): siRNA sense strand
agaaggagcgaaagagaaa

SEQ ID NO: 407424 - RNA, 19 nt, Homo sapiens
  misc_RNA (1)...(19): siRNA sense strand
cgagacaaauuccgagagu

SEQ ID NO: 407425 - RNA, 19 nt, Homo sapiens
  misc_RNA (1)...(19): siRNA sense strand
guaaugcacacuauaaucu

SEQ ID NO: 407426 - RNA, 19 nt, Homo sapiens
  misc_RNA (1)...(19): siRNA sense strand
cgggagagauacugccaaa

SEQ ID NO: 407427 - RNA, 19 nt, Homo sapiens
  misc_RNA (1)...(19): siRNA sense strand
ggaaggacagucucaacga

SEQ ID NO: 407428 - RNA, 19 nt, Homo sapiens
  misc_RNA (1)...(19): siRNA sense strand
agacugcuguggccucuga

SEQ ID NO: 407429 - RNA, 19 nt, Homo sapiens
  misc_RNA (1)...(19): siRNA sense strand
cauccagaacuaccacuua

SEQ ID NO: 407430 - RNA, 19 nt, Homo sapiens
  misc_RNA (1)...(19): siRNA sense strand
ggccuacgcuggagacaag

SEQ ID NO: 407431 - RNA, 19 nt, Homo sapiens
  misc_RNA (1)...(19): siRNA sense strand
gccgccagcugguaucuga

SEQ ID NO: 407432 - RNA, 19 nt, Homo sapiens
  misc_RNA (1)...(19): siRNA sense strand
uaccauuacuucuccaaga

SEQ ID NO: 407433 - RNA, 19 nt, Homo sapiens
  misc_RNA (1)...(19): siRNA sense strand
gcagcgucgccuuugauua

SEQ ID NO: 407434 - RNA, 19 nt, Homo sapiens
  misc_RNA (1)...(19): siRNA sense strand
cagcauuuccugcaagauu

SEQ ID NO: 407435 - RNA, 19 nt, Homo sapiens
  misc_RNA (1)...(19): siRNA sense strand
agaaccagcugcaguccuu

SEQ ID NO: 407436 - RNA, 19 nt, Homo sapiens
  misc_RNA (1)...(19): siRNA sense strand
ggagacagaagacaacaag

SEQ ID NO: 407437 - RNA, 19 nt, Homo sapiens
  misc_RNA (1)...(19): siRNA sense strand
ggacuggcuucagcugguu

SEQ ID NO: 407438 - RNA, 19 nt, Homo sapiens
  misc_RNA (1)...(19): siRNA sense strand
cgagcuggaugaccuggaa

SEQ ID NO: 407439 - RNA, 19 nt, Homo sapiens
  misc_RNA (1)...(19): siRNA sense strand
gcguccagcuucucaugaa

SEQ ID NO: 407440 - RNA, 19 nt, Homo sapiens
  misc_RNA (1)...(19): siRNA sense strand
cccgcaaccugcauacuaa

SEQ ID NO: 407441 - RNA, 19 nt, Homo sapiens
  misc_RNA (1)...(19): siRNA sense strand
ggagagauacugccaaagc

SEQ ID NO: 407442 - RNA, 19 nt, Homo sapiens
  misc_RNA (1)...(19): siRNA sense strand
acuauaaucugcagaaugc

SEQ ID NO: 407443 - RNA, 19 nt, Homo sapiens
  misc_RNA (1)...(19): siRNA sense strand
gaagacaacaaggagaaga

SEQ ID NO: 407444 - RNA, 19 nt, Homo sapiens
  misc_RNA (1)...(19): siRNA sense strand
ggaaaaggcagacuccauu

SEQ ID NO: 407445 - RNA, 19 nt, Homo sapiens
  misc_RNA (1)...(19): siRNA sense strand
gagacaaauuccgagaguu

SEQ ID NO: 407446 - RNA, 19 nt, Homo sapiens
  misc_RNA (1)...(19): siRNA sense strand
aggcagaggugaagaagca

SEQ ID NO: 407447 - RNA, 19 nt, Homo sapiens
  misc_RNA (1)...(19): siRNA sense strand
cagaagacaacaaggagaa

SEQ ID NO: 407448 - RNA, 19 nt, Homo sapiens
  misc_RNA (1)...(19): siRNA sense strand
ggaggcacaagaagaauca

SEQ ID NO: 407449 - RNA, 19 nt, Homo sapiens
  misc_RNA (1)...(19): siRNA sense strand
cauccacgccgacaagauu

SEQ ID NO: 407450 - RNA, 19 nt, Homo sapiens
  misc_RNA (1)...(19): siRNA sense strand
gagagaagaccaaagucau

SEQ ID NO: 407451 - RNA, 19 nt, Homo sapiens
  misc_RNA (1)...(19): siRNA sense strand
gcacggcucugggacuucu

SEQ ID NO: 407452 - RNA, 19 nt, Homo sapiens
  misc_RNA (1)...(19): siRNA sense strand
gaagucaaucauuaccuau

SEQ ID NO: 407453 - RNA, 19 nt, Homo sapiens
  misc_RNA (1)...(19): siRNA sense strand
ccgcggaucuagucaucaa

SEQ ID NO: 407454 - RNA, 19 nt, Homo sapiens
  misc_RNA (1)...(19): siRNA sense strand
ggucaggagcgcguagaua

SEQ ID NO: 407455 - RNA, 19 nt, Homo sapiens
  misc_RNA (1)...(19): siRNA sense strand
gcaggaauuacacaugaug

SEQ ID NO: 407456 - RNA, 19 nt, Homo sapiens
  misc_RNA (1)...(19): siRNA sense strand
ggcagaagcaccaggcauu

SEQ ID NO: 407457 - RNA, 19 nt, Homo sapiens
  misc_RNA (1)...(19): siRNA sense strand
gcccgcaaccugcauacua

SEQ ID NO: 407458 - RNA, 19 nt, Homo sapiens
  misc_RNA (1)...(19): siRNA sense strand
gaauauguucugucucaca

SEQ ID NO: 407459 - RNA, 19 nt, Homo sapiens
  misc_RNA (1)...(19): siRNA sense strand
ugagagagaagaccaaagu

SEQ ID NO: 407460 - RNA, 19 nt, Homo sapiens
  misc_RNA (1)...(19): siRNA sense strand
ggcaaagaccgcauuguca

SEQ ID NO: 407461 - RNA, 19 nt, Homo sapiens
  misc_RNA (1)...(19): siRNA sense strand
cgagaaagggaacuuggaa

SEQ ID NO: 407462 - RNA, 19 nt, Homo sapiens
  misc_RNA (1)...(19): siRNA sense strand
gcccaaguuuaccgagaaa

SEQ ID NO: 407463 - RNA, 19 nt, Homo sapiens
  misc_RNA (1)...(19): siRNA sense strand
cagagcgccugguggagaa

SEQ ID NO: 407464 - RNA, 19 nt, Homo sapiens
  misc_RNA (1)...(19): siRNA sense strand
cauuacuucuccaagauga

SEQ ID NO: 407465 - RNA, 19 nt, Homo sapiens
  misc_RNA (1)...(19): siRNA sense strand
agacgcagcgcagcaauuu

SEQ ID NO: 407466 - RNA, 19 nt, Homo sapiens
  misc_RNA (1)...(19): siRNA sense strand
gagacaaggcugaggagau

SEQ ID NO: 407467 - RNA, 19 nt, Homo sapiens
  misc_RNA (1)...(19): siRNA sense strand
gcagccaggacaugauuga

SEQ ID NO: 407468 - RNA, 19 nt, Homo sapiens
  misc_RNA (1)...(19): siRNA sense strand
uggacaagguggacaagga

SEQ ID NO: 407469 - RNA, 19 nt, Homo sapiens
  misc_RNA (1)...(19): siRNA sense strand
agacagaagacaacaagga

SEQ ID NO: 407470 - RNA, 19 nt, Homo sapiens
  misc_RNA (1)...(19): siRNA sense strand
uagaggagcgggagaagga

SEQ ID NO: 407471 - RNA, 19 nt, Homo sapiens
  misc_RNA (1)...(19): siRNA sense strand
ugacuaugcuccgagacaa

SEQ ID NO: 407472 - RNA, 19 nt, Homo sapiens
  misc_RNA (1)...(19): siRNA sense strand
gacggaaaccaccgacuga

SEQ ID NO: 407473 - RNA, 19 nt, Homo sapiens
  misc_RNA (1)...(19): siRNA sense strand
caacauccacgccgacaag

SEQ ID NO: 407474 - RNA, 19 nt, Homo sapiens
  misc_RNA (1)...(19): siRNA sense strand
ggaagcacgaagccauuga

SEQ ID NO: 407475 - RNA, 19 nt, Homo sapiens
  misc_RNA (1)...(19): siRNA sense strand
guggaaggcaagagaauug

SEQ ID NO: 407476 - RNA, 19 nt, Homo sapiens
  misc_RNA (1)...(19): siRNA sense strand
ccaacaaccagaaggucua

SEQ ID NO: 407477 - RNA, 19 nt, Homo sapiens
  misc_RNA (1)...(19): siRNA sense strand
agacaaauuccgagaguuc

SEQ ID NO: 407478 - RNA, 19 nt, Homo sapiens
  misc_RNA (1)...(19): siRNA sense strand
ggaaauccagggccaguac

SEQ ID NO: 407479 - RNA, 19 nt, Homo sapiens
  misc_RNA (1)...(19): siRNA sense strand
gggaacugaugcucuggau

SEQ ID NO: 407480 - RNA, 19 nt, Homo sapiens
  misc_RNA (1)...(19): siRNA sense strand
aaacgcuucagcuucuuua

SEQ ID NO: 407481 - RNA, 19 nt, Homo sapiens
  misc_RNA (1)...(19): siRNA sense strand
caaagacggcagagaacga

SEQ ID NO: 407482 - RNA, 19 nt, Homo sapiens
  misc_RNA (1)...(19): siRNA sense strand
gauggaggccucauuugua

SEQ ID NO: 407483 - RNA, 19 nt, Homo sapiens
  misc_RNA (1)...(19): siRNA sense strand
ccucaaggauggcuacgua

SEQ ID NO: 407484 - RNA, 19 nt, Homo sapiens
  misc_RNA (1)...(19): siRNA sense strand
caaaggcacugucguagcu

SEQ ID NO: 407485 - RNA, 19 nt, Homo sapiens
  misc_RNA (1)...(19): siRNA sense strand
caacaucgucuaccucugu

SEQ ID NO: 407486 - RNA, 19 nt, Homo sapiens
  misc_RNA (1)...(19): siRNA sense strand
cgagauggaggccucauuu

SEQ ID NO: 407487 - RNA, 19 nt, Homo sapiens
  misc_RNA (1)...(19): siRNA sense strand
caaguuccgccacguguuu

SEQ ID NO: 407488 - RNA, 19 nt, Homo sapiens
  misc_RNA (1)...(19): siRNA sense strand
gcacugucguagcugagaa

SEQ ID NO: 407489 - RNA, 19 nt, Homo sapiens
  misc_RNA (1)...(19): siRNA sense strand
gaccagugcuaugaagaug

SEQ ID NO: 407490 - RNA, 19 nt, Homo sapiens
  misc_RNA (1)...(19): siRNA sense strand
ccagugcuaugaagaugug

SEQ ID NO: 407491 - RNA, 19 nt, Homo sapiens
  misc_RNA (1)...(19): siRNA sense strand
ccgcaaaggcacugucgua

SEQ ID NO: 407492 - RNA, 19 nt, Homo sapiens
  misc_RNA (1)...(19): siRNA sense strand
gccuggaggugaacaagug

SEQ ID NO: 407493 - RNA, 19 nt, Homo sapiens
  misc_RNA (1)...(19): siRNA sense strand
gcugucaacccuaaguuug

SEQ ID NO: 407494 - RNA, 19 nt, Homo sapiens
  misc_RNA (1)...(19): siRNA sense strand
gaggugaacaagugugaga

SEQ ID NO: 407495 - RNA, 19 nt, Homo sapiens
  misc_RNA (1)...(19): siRNA sense strand
gagauggaggccucauuug

SEQ ID NO: 407496 - RNA, 19 nt, Homo sapiens
  misc_RNA (1)...(19): siRNA sense strand
ggacuggagccgagaugga

SEQ ID NO: 407497 - RNA, 19 nt, Homo sapiens
  misc_RNA (1)...(19): siRNA sense strand
ccaugacagugccucgaaa

SEQ ID NO: 407498 - RNA, 19 nt, Homo sapiens
  misc_RNA (1)...(19): siRNA sense strand
agacaguccaggccaagua

SEQ ID NO: 407499 - RNA, 19 nt, Homo sapiens
  misc_RNA (1)...(19): siRNA sense strand
gaaagucggaccuguucca

SEQ ID NO: 407500 - RNA, 19 nt, Homo sapiens
  misc_RNA (1)...(19): siRNA sense strand
ugcacuaucucuccauguu

SEQ ID NO: 407501 - RNA, 19 nt, Homo sapiens
  misc_RNA (1)...(19): siRNA sense strand
agugugagaucgccagguu

SEQ ID NO: 407502 - RNA, 19 nt, Homo sapiens
  misc_RNA (1)...(19): siRNA sense strand
cacuaucucuccauguuca

SEQ ID NO: 407503 - RNA, 19 nt, Homo sapiens
  misc_RNA (1)...(19): siRNA sense strand
ucugugcugucaacccuaa

SEQ ID NO: 407504 - RNA, 19 nt, Homo sapiens
  misc_RNA (1)...(19): siRNA sense strand
gcacuaucucuccauguuc

SEQ ID NO: 407505 - RNA, 19 nt, Homo sapiens
  misc_RNA (1)...(19): siRNA sense strand
ggacguguggacaagaaug

SEQ ID NO: 407506 - RNA, 19 nt, Homo sapiens
  misc_RNA (1)...(19): siRNA sense strand
gcaaguuccgccacguguu

SEQ ID NO: 407507 - RNA, 19 nt, Homo sapiens
  misc_RNA (1)...(19): siRNA sense strand
gcggaggugugagcccauu

SEQ ID NO: 407508 - RNA, 19 nt, Homo sapiens
  misc_RNA (1)...(19): siRNA sense strand
gcacaccacagcccagaac

SEQ ID NO: 407509 - RNA, 19 nt, Homo sapiens
  misc_RNA (1)...(19): siRNA sense strand
gugacaacgugaucauggu

SEQ ID NO: 407510 - RNA, 19 nt, Homo sapiens
  misc_RNA (1)...(19): siRNA sense strand
gugguccgcuccagcaagu

SEQ ID NO: 407511 - RNA, 19 nt, Homo sapiens
  misc_RNA (1)...(19): siRNA sense strand
ccucaucucccucaaggau

SEQ ID NO: 407512 - RNA, 19 nt, Homo sapiens
  misc_RNA (1)...(19): siRNA sense strand
caccaagcgugugggcauu

SEQ ID NO: 407513 - RNA, 19 nt, Homo sapiens
  misc_RNA (1)...(19): siRNA sense strand
cagcucggaugccgugucu

SEQ ID NO: 407514 - RNA, 19 nt, Homo sapiens
  misc_RNA (1)...(19): siRNA sense strand
ccaaggccgaccagugcua

SEQ ID NO: 407515 - RNA, 19 nt, Homo sapiens
  misc_RNA (1)...(19): siRNA sense strand
cgaccagugcuaugaagau

SEQ ID NO: 407516 - RNA, 19 nt, Homo sapiens
  misc_RNA (1)...(19): siRNA sense strand
ccaagcgugugggcauugu

SEQ ID NO: 407517 - RNA, 19 nt, Homo sapiens
  misc_RNA (1)...(19): siRNA sense strand
ugacagugccucgaaaguc

SEQ ID NO: 407518 - RNA, 19 nt, Homo sapiens
  misc_RNA (1)...(19): siRNA sense strand
ugucaacccuaaguuugug

SEQ ID NO: 407519 - RNA, 19 nt, Homo sapiens
  misc_RNA (1)...(19): siRNA sense strand
gcaagggugacagcucaau

SEQ ID NO: 407520 - RNA, 19 nt, Homo sapiens
  misc_RNA (1)...(19): siRNA sense strand
cuggacguguggacaagaa

SEQ ID NO: 407521 - RNA, 19 nt, Homo sapiens
  misc_RNA (1)...(19): siRNA sense strand
gccaugacagugccucgaa

SEQ ID NO: 407522 - RNA, 19 nt, Homo sapiens
  misc_RNA (1)...(19): siRNA sense strand
agauggaggccucauuugu

SEQ ID NO: 407523 - RNA, 19 nt, Homo sapiens
  misc_RNA (1)...(19): siRNA sense strand
ucgaaagucggaccuguuc

SEQ ID NO: 407524 - RNA, 19 nt, Homo sapiens
  misc_RNA (1)...(19): siRNA sense strand
ggaacaagguaauguaaua

SEQ ID NO: 407525 - RNA, 19 nt, Homo sapiens
  misc_RNA (1)...(19): siRNA sense strand
gagaauaacugugacuaua

SEQ ID NO: 407526 - RNA, 19 nt, Homo sapiens
  misc_RNA (1)...(19): siRNA sense strand
uaagucagcucuaauugua

SEQ ID NO: 407527 - RNA, 19 nt, Homo sapiens
  misc_RNA (1)...(19): siRNA sense strand
gagaaacacuuugaaugua

SEQ ID NO: 407528 - RNA, 19 nt, Homo sapiens
  misc_RNA (1)...(19): siRNA sense strand
gaagucagaccucacaaua

SEQ ID NO: 407529 - RNA, 19 nt, Homo sapiens
  misc_RNA (1)...(19): siRNA sense strand
gcagaaacccuaugaaugu

SEQ ID NO: 407530 - RNA, 19 nt, Homo sapiens
  misc_RNA (1)...(19): siRNA sense strand
ggagaaacccuaugaaugu

SEQ ID NO: 407531 - RNA, 19 nt, Homo sapiens
  misc_RNA (1)...(19): siRNA sense strand
ggagaaacccuaugaaugu

SEQ ID NO: 407532 - RNA, 19 nt, Homo sapiens
  misc_RNA (1)...(19): siRNA sense strand
uaagucagcccucacauua

SEQ ID NO: 407533 - RNA, 19 nt, Homo sapiens
  misc_RNA (1)...(19): siRNA sense strand
gggaaauucuuuagccaua

SEQ ID NO: 407534 - RNA, 19 nt, Homo sapiens
  misc_RNA (1)...(19): siRNA sense strand
gagaaacccuaucagugua

SEQ ID NO: 407535 - RNA, 19 nt, Homo sapiens
  misc_RNA (1)...(19): siRNA sense strand
ucagaaaggugauaaagga

SEQ ID NO: 407536 - RNA, 19 nt, Homo sapiens
  misc_RNA (1)...(19): siRNA sense strand
guugaaaccuuaugaaugu

SEQ ID NO: 407537 - RNA, 19 nt, Homo sapiens
  misc_RNA (1)...(19): siRNA sense strand
gaacucacauaggagauaa

SEQ ID NO: 407538 - RNA, 19 nt, Homo sapiens
  misc_RNA (1)...(19): siRNA sense strand
cagaauugguuaucaguaa

SEQ ID NO: 407539 - RNA, 19 nt, Homo sapiens
  misc_RNA (1)...(19): siRNA sense strand
ggagagaaaucuugucagu

SEQ ID NO: 407540 - RNA, 19 nt, Homo sapiens
  misc_RNA (1)...(19): siRNA sense strand
ucagagaacucacauagga

SEQ ID NO: 407541 - RNA, 19 nt, Homo sapiens
  misc_RNA (1)...(19): siRNA sense strand
ggacagucacuaugaauuu

SEQ ID NO: 407542 - RNA, 19 nt, Homo sapiens
  misc_RNA (1)...(19): siRNA sense strand
gagaaacccuaugaaugua

SEQ ID NO: 407543 - RNA, 19 nt, Homo sapiens
  misc_RNA (1)...(19): siRNA sense strand
gacagucacuaugaauuua

SEQ ID NO: 407544 - RNA, 19 nt, Homo sapiens
  misc_RNA (1)...(19): siRNA sense strand
ggagaaacccuuugcaugu

SEQ ID NO: 407545 - RNA, 19 nt, Homo sapiens
  misc_RNA (1)...(19): siRNA sense strand
ggagaaacccuaucagugu

SEQ ID NO: 407546 - RNA, 19 nt, Homo sapiens
  misc_RNA (1)...(19): siRNA sense strand
ggaaaauccuucuguauga

SEQ ID NO: 407547 - RNA, 19 nt, Homo sapiens
  misc_RNA (1)...(19): siRNA sense strand
ggaaauucuuuagccauaa

SEQ ID NO: 407548 - RNA, 19 nt, Homo sapiens
  misc_RNA (1)...(19): siRNA sense strand
agagaaaucuugucagugu

SEQ ID NO: 407549 - RNA, 19 nt, Homo sapiens
  misc_RNA (1)...(19): siRNA sense strand
aaucagaccuugcuaaaca

SEQ ID NO: 407550 - RNA, 19 nt, Homo sapiens
  misc_RNA (1)...(19): siRNA sense strand
gaagagagagaaugcagaa

SEQ ID NO: 407551 - RNA, 19 nt, Homo sapiens
  misc_RNA (1)...(19): siRNA sense strand
ggaauaauuucaggaggaa

SEQ ID NO: 407552 - RNA, 19 nt, Homo sapiens
  misc_RNA (1)...(19): siRNA sense strand
caaaggacagucacuauga

SEQ ID NO: 407553 - RNA, 19 nt, Homo sapiens
  misc_RNA (1)...(19): siRNA sense strand
caaaucaucacucacagua

SEQ ID NO: 407554 - RNA, 19 nt, Homo sapiens
  misc_RNA (1)...(19): siRNA sense strand
gaaacccuaugaauguuau

SEQ ID NO: 407555 - RNA, 19 nt, Homo sapiens
  misc_RNA (1)...(19): siRNA sense strand
caagguagaucagaaguuc

SEQ ID NO: 407556 - RNA, 19 nt, Homo sapiens
  misc_RNA (1)...(19): siRNA sense strand
ucagauaccuccaucaaag

SEQ ID NO: 407557 - RNA, 19 nt, Homo sapiens
  misc_RNA (1)...(19): siRNA sense strand
ggagaaacccuaugaaugc

SEQ ID NO: 407558 - RNA, 19 nt, Homo sapiens
  misc_RNA (1)...(19): siRNA sense strand
gagagaaacacuuugaaug

SEQ ID NO: 407559 - RNA, 19 nt, Homo sapiens
  misc_RNA (1)...(19): siRNA sense strand
gaaaagcccuaugaaugua

SEQ ID NO: 407560 - RNA, 19 nt, Homo sapiens
  misc_RNA (1)...(19): siRNA sense strand
cagaagagaauaacuguga

SEQ ID NO: 407561 - RNA, 19 nt, Homo sapiens
  misc_RNA (1)...(19): siRNA sense strand
caucagagaucacauacag

SEQ ID NO: 407562 - RNA, 19 nt, Homo sapiens
  misc_RNA (1)...(19): siRNA sense strand
gagaacccauacacaagaa

SEQ ID NO: 407563 - RNA, 19 nt, Homo sapiens
  misc_RNA (1)...(19): siRNA sense strand
gaauucacaccuuacagua

SEQ ID NO: 407564 - RNA, 19 nt, Homo sapiens
  misc_RNA (1)...(19): siRNA sense strand
uguaugaauucacaccuua

SEQ ID NO: 407565 - RNA, 19 nt, Homo sapiens
  misc_RNA (1)...(19): siRNA sense strand
gagaugugaugcuggagaa

SEQ ID NO: 407566 - RNA, 19 nt, Homo sapiens
  misc_RNA (1)...(19): siRNA sense strand
gaagucaaaccucacuaaa

SEQ ID NO: 407567 - RNA, 19 nt, Homo sapiens
  misc_RNA (1)...(19): siRNA sense strand
gagaaaucuugucagugua

SEQ ID NO: 407568 - RNA, 19 nt, Homo sapiens
  misc_RNA (1)...(19): siRNA sense strand
gaaauucuuuagccauaag

SEQ ID NO: 407569 - RNA, 19 nt, Homo sapiens
  misc_RNA (1)...(19): siRNA sense strand
aaucugaccucacuaaaca

SEQ ID NO: 407570 - RNA, 19 nt, Homo sapiens
  misc_RNA (1)...(19): siRNA sense strand
agucaaaccucacuaaaca

SEQ ID NO: 407571 - RNA, 19 nt, Homo sapiens
  misc_RNA (1)...(19): siRNA sense strand
gaaacccuaugaauguaau

SEQ ID NO: 407572 - RNA, 19 nt, Homo sapiens
  misc_RNA (1)...(19): siRNA sense strand
aaacaucagagaucacaua

SEQ ID NO: 407573 - RNA, 19 nt, Homo sapiens
  misc_RNA (1)...(19): siRNA sense strand
gaaguccacccuuucuaaa

SEQ ID NO: 407574 - RNA, 19 nt, Homo sapiens
  misc_RNA (1)...(19): siRNA sense strand
uaaaucagaccuugcuaaa

SEQ ID NO: 407575 - RNA, 19 nt, Homo sapiens
  misc_RNA (1)...(19): siRNA sense strand
gaaugaguuucaacacugu

SEQ ID NO: 407576 - RNA, 19 nt, Homo sapiens
  misc_RNA (1)...(19): siRNA sense strand
gaaacccuaugaaugcaau

SEQ ID NO: 407577 - RNA, 19 nt, Homo sapiens
  misc_RNA (1)...(19): siRNA sense strand
gggagaaacccuaugaaug

SEQ ID NO: 407578 - RNA, 19 nt, Homo sapiens
  misc_RNA (1)...(19): siRNA sense strand
gggagaaacccuaugaaug

SEQ ID NO: 407579 - RNA, 19 nt, Homo sapiens
  misc_RNA (1)...(19): siRNA sense strand
gggagaaacccuaugaaug

SEQ ID NO: 407580 - RNA, 19 nt, Homo sapiens
  misc_RNA (1)...(19): siRNA sense strand
ggagaaaccuuuugaaugc

SEQ ID NO: 407581 - RNA, 19 nt, Homo sapiens
  misc_RNA (1)...(19): siRNA sense strand
ggugaaagugggaauaauu

SEQ ID NO: 407582 - RNA, 19 nt, Homo sapiens
  misc_RNA (1)...(19): siRNA sense strand
guaaaucagaccuugcuaa

SEQ ID NO: 407583 - RNA, 19 nt, Homo sapiens
  misc_RNA (1)...(19): siRNA sense strand
guacaucagagaacccaua

SEQ ID NO: 407584 - RNA, 19 nt, Homo sapiens
  misc_RNA (1)...(19): siRNA sense strand
ggagagaaacacuuugaau

SEQ ID NO: 407585 - RNA, 19 nt, Homo sapiens
  misc_RNA (1)...(19): siRNA sense strand
gaaaucugaccucacuaaa

SEQ ID NO: 407586 - RNA, 19 nt, Homo sapiens
  misc_RNA (1)...(19): siRNA sense strand
ggaaaaccuucucucaaaa

SEQ ID NO: 407587 - RNA, 19 nt, Homo sapiens
  misc_RNA (1)...(19): siRNA sense strand
ggaaauccuucagucacaa

SEQ ID NO: 407588 - RNA, 19 nt, Homo sapiens
  misc_RNA (1)...(19): siRNA sense strand
gggaaaaccuucugcuuga

SEQ ID NO: 407589 - RNA, 19 nt, Homo sapiens
  misc_RNA (1)...(19): siRNA sense strand
aaagagaggagccaagaaa

SEQ ID NO: 407590 - RNA, 19 nt, Homo sapiens
  misc_RNA (1)...(19): siRNA sense strand
gggaaauccuucagucaca

SEQ ID NO: 407591 - RNA, 19 nt, Homo sapiens
  misc_RNA (1)...(19): siRNA sense strand
ggacuuauuuuacaugaga

SEQ ID NO: 407592 - RNA, 19 nt, Homo sapiens
  misc_RNA (1)...(19): siRNA sense strand
gagaaacccuuugcauguc

SEQ ID NO: 407593 - RNA, 19 nt, Homo sapiens
  misc_RNA (1)...(19): siRNA sense strand
ugucaaaagucacaucuua

SEQ ID NO: 407594 - RNA, 19 nt, Homo sapiens
  misc_RNA (1)...(19): siRNA sense strand
ugagaaaccuuuugaaugu

SEQ ID NO: 407595 - RNA, 19 nt, Homo sapiens
  misc_RNA (1)...(19): siRNA sense strand
gaacaagguagaucagaag

SEQ ID NO: 407596 - RNA, 19 nt, Homo sapiens
  misc_RNA (1)...(19): siRNA sense strand
gagagagaaugcagaagag

SEQ ID NO: 407597 - RNA, 19 nt, Homo sapiens
  misc_RNA (1)...(19): siRNA sense strand
gugaaagugggaauaauuu

SEQ ID NO: 407598 - RNA, 19 nt, Homo sapiens
  misc_RNA (1)...(19): siRNA sense strand
uaaggaacaagguaaugua

SEQ ID NO: 407599 - RNA, 19 nt, Homo sapiens
  misc_RNA (1)...(19): siRNA sense strand
caaaucucauuguacauca

SEQ ID NO: 407600 - RNA, 19 nt, Homo sapiens
  misc_RNA (1)...(19): siRNA sense strand
gaaagagaggagccaagaa

SEQ ID NO: 407601 - RNA, 19 nt, Homo sapiens
  misc_RNA (1)...(19): siRNA sense strand
ucaacccucucucaacauu

SEQ ID NO: 407602 - RNA, 19 nt, Homo sapiens
  misc_RNA (1)...(19): siRNA sense strand
ugucacagcuucagaaagg

SEQ ID NO: 407603 - RNA, 19 nt, Homo sapiens
  misc_RNA (1)...(19): siRNA sense strand
aaaggacagucacuaugaa

SEQ ID NO: 407604 - RNA, 19 nt, Homo sapiens
  misc_RNA (1)...(19): siRNA sense strand
uacaguauaugucaggaaa

SEQ ID NO: 407605 - RNA, 19 nt, Homo sapiens
  misc_RNA (1)...(19): siRNA sense strand
caguaugacucacguggaa

SEQ ID NO: 407606 - RNA, 19 nt, Homo sapiens
  misc_RNA (1)...(19): siRNA sense strand
agucaaaucucauuguaca

SEQ ID NO: 407607 - RNA, 19 nt, Homo sapiens
  misc_RNA (1)...(19): siRNA sense strand
ucacaaaucaucacucaca

SEQ ID NO: 407608 - RNA, 19 nt, Homo sapiens
  misc_RNA (1)...(19): siRNA sense strand
ucagagaacccauacacaa

SEQ ID NO: 407609 - RNA, 19 nt, Homo sapiens
  misc_RNA (1)...(19): siRNA sense strand
caucagagaauucacauag

SEQ ID NO: 407610 - RNA, 19 nt, Homo sapiens
  misc_RNA (1)...(19): siRNA sense strand
agucagaccucacaauaca

SEQ ID NO: 407611 - RNA, 19 nt, Homo sapiens
  misc_RNA (1)...(19): siRNA sense strand
gggcagaaacccuaugaau

SEQ ID NO: 407612 - RNA, 19 nt, Homo sapiens
  misc_RNA (1)...(19): siRNA sense strand
gaacaagguaauguaauag

SEQ ID NO: 407613 - RNA, 19 nt, Homo sapiens
  misc_RNA (1)...(19): siRNA sense strand
ggaaaagcccuaugaaugu

SEQ ID NO: 407614 - RNA, 19 nt, Homo sapiens
  misc_RNA (1)...(19): siRNA sense strand
cauggagacuggaggaaga

SEQ ID NO: 407615 - RNA, 19 nt, Homo sapiens
  misc_RNA (1)...(19): siRNA sense strand
ccauaagucagcucuaauu

SEQ ID NO: 407616 - RNA, 19 nt, Homo sapiens
  misc_RNA (1)...(19): siRNA sense strand
ugaaguccacccuuucuaa

SEQ ID NO: 407617 - RNA, 19 nt, Homo sapiens
  misc_RNA (1)...(19): siRNA sense strand
gagagaaugcagaagagaa

SEQ ID NO: 407618 - RNA, 19 nt, Homo sapiens
  misc_RNA (1)...(19): siRNA sense strand
gaacacacauaggagaaaa

SEQ ID NO: 407619 - RNA, 19 nt, Homo sapiens
  misc_RNA (1)...(19): siRNA sense strand
ucagagaacacacauagga

SEQ ID NO: 407620 - RNA, 19 nt, Homo sapiens
  misc_RNA (1)...(19): siRNA sense strand
cagcugaucaccugaaaga

SEQ ID NO: 407621 - RNA, 19 nt, Homo sapiens
  misc_RNA (1)...(19): siRNA sense strand
gcugaucaccugaaagaga

SEQ ID NO: 407622 - RNA, 19 nt, Homo sapiens
  misc_RNA (1)...(19): siRNA sense strand
cagaaacccuaugaauguu

SEQ ID NO: 407623 - RNA, 19 nt, Homo sapiens
  misc_RNA (1)...(19): siRNA sense strand
agagaaacacuuugaaugu

SEQ ID NO: 407624 - RNA, 19 nt, Homo sapiens
  misc_RNA (1)...(19): siRNA sense strand
agaaagaucuggacuguaa

SEQ ID NO: 407625 - RNA, 19 nt, Homo sapiens
  misc_RNA (1)...(19): siRNA sense strand
gcucaaaccucaucaaaca

SEQ ID NO: 407626 - RNA, 19 nt, Homo sapiens
  misc_RNA (1)...(19): siRNA sense strand
agucagagcuccagccuua

SEQ ID NO: 407627 - RNA, 19 nt, Homo sapiens
  misc_RNA (1)...(19): siRNA sense strand
gaaaguccacucauaugua

SEQ ID NO: 407628 - RNA, 19 nt, Homo sapiens
  misc_RNA (1)...(19): siRNA sense strand
gaucuggacuguaaugguu

SEQ ID NO: 407629 - RNA, 19 nt, Homo sapiens
  misc_RNA (1)...(19): siRNA sense strand
gcucaaaccucauccaaca

SEQ ID NO: 407630 - RNA, 19 nt, Homo sapiens
  misc_RNA (1)...(19): siRNA sense strand
ggagaaagaucuggacugu

SEQ ID NO: 407631 - RNA, 19 nt, Homo sapiens
  misc_RNA (1)...(19): siRNA sense strand
gagagaagcccuauaagug

SEQ ID NO: 407632 - RNA, 19 nt, Homo sapiens
  misc_RNA (1)...(19): siRNA sense strand
gagagaagcccuaugaaug

SEQ ID NO: 407633 - RNA, 19 nt, Homo sapiens
  misc_RNA (1)...(19): siRNA sense strand
ggaaucacaggcagaaaua

SEQ ID NO: 407634 - RNA, 19 nt, Homo sapiens
  misc_RNA (1)...(19): siRNA sense strand
ggaaaucccuacagaagag

SEQ ID NO: 407635 - RNA, 19 nt, Homo sapiens
  misc_RNA (1)...(19): siRNA sense strand
gagagaagccguacagaug

SEQ ID NO: 407636 - RNA, 19 nt, Homo sapiens
  misc_RNA (1)...(19): siRNA sense strand
gagaagcccuaugaaugua

SEQ ID NO: 407637 - RNA, 19 nt, Homo sapiens
  misc_RNA (1)...(19): siRNA sense strand
aaaguccacucauauguaa

SEQ ID NO: 407638 - RNA, 19 nt, Homo sapiens
  misc_RNA (1)...(19): siRNA sense strand
gggaaagcauuuagucaga

SEQ ID NO: 407639 - RNA, 19 nt, Homo sapiens
  misc_RNA (1)...(19): siRNA sense strand
ggaagacauucaugaagau

SEQ ID NO: 407640 - RNA, 19 nt, Homo sapiens
  misc_RNA (1)...(19): siRNA sense strand
gcagugagaggccuuauau

SEQ ID NO: 407641 - RNA, 19 nt, Homo sapiens
  misc_RNA (1)...(19): siRNA sense strand
aaacuaugcuggugauguu

SEQ ID NO: 407642 - RNA, 19 nt, Homo sapiens
  misc_RNA (1)...(19): siRNA sense strand
ugagaggccuuauaugugu

SEQ ID NO: 407643 - RNA, 19 nt, Homo sapiens
  misc_RNA (1)...(19): siRNA sense strand
gaagagaggccacauccau

SEQ ID NO: 407644 - RNA, 19 nt, Homo sapiens
  misc_RNA (1)...(19): siRNA sense strand
agccagaacucgagccuua

SEQ ID NO: 407645 - RNA, 19 nt, Homo sapiens
  misc_RNA (1)...(19): siRNA sense strand
ggccuuauauguguaauga

SEQ ID NO: 407646 - RNA, 19 nt, Homo sapiens
  misc_RNA (1)...(19): siRNA sense strand
ggagagaagcccuauaagu

SEQ ID NO: 407647 - RNA, 19 nt, Homo sapiens
  misc_RNA (1)...(19): siRNA sense strand
ggagagaagcccuaugaau

SEQ ID NO: 407648 - RNA, 19 nt, Homo sapiens
  misc_RNA (1)...(19): siRNA sense strand
ggagaucugugugaugaug

SEQ ID NO: 407649 - RNA, 19 nt, Homo sapiens
  misc_RNA (1)...(19): siRNA sense strand
caucagaggauucauaaug

SEQ ID NO: 407650 - RNA, 19 nt, Homo sapiens
  misc_RNA (1)...(19): siRNA sense strand
aaccgaagcucaaaucuca

SEQ ID NO: 407651 - RNA, 19 nt, Homo sapiens
  misc_RNA (1)...(19): siRNA sense strand
gacaaggaguuucuucaca

SEQ ID NO: 407652 - RNA, 19 nt, Homo sapiens
  misc_RNA (1)...(19): siRNA sense strand
agagaagccuuaugagugu

SEQ ID NO: 407653 - RNA, 19 nt, Homo sapiens
  misc_RNA (1)...(19): siRNA sense strand
agacauucaugaagauuug

SEQ ID NO: 407654 - RNA, 19 nt, Homo sapiens
  misc_RNA (1)...(19): siRNA sense strand
ggacugaagacaaggaguu

SEQ ID NO: 407655 - RNA, 19 nt, Homo sapiens
  misc_RNA (1)...(19): siRNA sense strand
gcuccaaccucauccuuca

SEQ ID NO: 407656 - RNA, 19 nt, Homo sapiens
  misc_RNA (1)...(19): siRNA sense strand
caacaucaaagaauccauu

SEQ ID NO: 407657 - RNA, 19 nt, Homo sapiens
  misc_RNA (1)...(19): siRNA sense strand
gugagaagcccuaugaaug

SEQ ID NO: 407658 - RNA, 19 nt, Homo sapiens
  misc_RNA (1)...(19): siRNA sense strand
acaaggaguuucuucacaa

SEQ ID NO: 407659 - RNA, 19 nt, Homo sapiens
  misc_RNA (1)...(19): siRNA sense strand
caaggaagacauucaugaa

SEQ ID NO: 407660 - RNA, 19 nt, Homo sapiens
  misc_RNA (1)...(19): siRNA sense strand
ggagagaagccuuaugagu

SEQ ID NO: 407661 - RNA, 19 nt, Homo sapiens
  misc_RNA (1)...(19): siRNA sense strand
aggaagacauucaugaaga

SEQ ID NO: 407662 - RNA, 19 nt, Homo sapiens
  misc_RNA (1)...(19): siRNA sense strand
gcugaaaguccacucauau

SEQ ID NO: 407663 - RNA, 19 nt, Homo sapiens
  misc_RNA (1)...(19): siRNA sense strand
ugacauggguggccagagu

SEQ ID NO: 407664 - RNA, 19 nt, Homo sapiens
  misc_RNA (1)...(19): siRNA sense strand
gagaggccuuauaugugua

SEQ ID NO: 407665 - RNA, 19 nt, Homo sapiens
  misc_RNA (1)...(19): siRNA sense strand
ggagagaagccguacagau

SEQ ID NO: 407666 - RNA, 19 nt, Homo sapiens
  misc_RNA (1)...(19): siRNA sense strand
ucacguguguaauguaugu

SEQ ID NO: 407667 - RNA, 19 nt, Homo sapiens
  misc_RNA (1)...(19): siRNA sense strand
gaagccaucugcccucacu

SEQ ID NO: 407668 - RNA, 19 nt, Homo sapiens
  misc_RNA (1)...(19): siRNA sense strand
aaacaccaguugauucaca

SEQ ID NO: 407669 - RNA, 19 nt, Homo sapiens
  misc_RNA (1)...(19): siRNA sense strand
ccacagcucagcccucauu

SEQ ID NO: 407670 - RNA, 19 nt, Homo sapiens
  misc_RNA (1)...(19): siRNA sense strand
ggaguuucuucacaaggaa

SEQ ID NO: 407671 - RNA, 19 nt, Homo sapiens
  misc_RNA (1)...(19): siRNA sense strand
cagcaucagaggauucaua

SEQ ID NO: 407672 - RNA, 19 nt, Homo sapiens
  misc_RNA (1)...(19): siRNA sense strand
ugagugagaagcccuauga

SEQ ID NO: 407673 - RNA, 19 nt, Homo sapiens
  misc_RNA (1)...(19): siRNA sense strand
gaaauccugaccuuauuca

SEQ ID NO: 407674 - RNA, 19 nt, Homo sapiens
  misc_RNA (1)...(19): siRNA sense strand
cauccaacaucaaagaauc

SEQ ID NO: 407675 - RNA, 19 nt, Homo sapiens
  misc_RNA (1)...(19): siRNA sense strand
gaagcccuaugaaugcaau

SEQ ID NO: 407676 - RNA, 19 nt, Homo sapiens
  misc_RNA (1)...(19): siRNA sense strand
gucaggaaaucccuacaga

SEQ ID NO: 407677 - RNA, 19 nt, Homo sapiens
  misc_RNA (1)...(19): siRNA sense strand
ccuuaugaguguaaugauu

SEQ ID NO: 407678 - RNA, 19 nt, Homo sapiens
  misc_RNA (1)...(19): siRNA sense strand
gagaagccuuaugagugua

SEQ ID NO: 407679 - RNA, 19 nt, Homo sapiens
  misc_RNA (1)...(19): siRNA sense strand
gaagacauucaugaagauu

SEQ ID NO: 407680 - RNA, 19 nt, Homo sapiens
  misc_RNA (1)...(19): siRNA sense strand
ccagagcucacaccucauu

SEQ ID NO: 407681 - RNA, 19 nt, Homo sapiens
  misc_RNA (1)...(19): siRNA sense strand
ccucacguguguaauguau

SEQ ID NO: 407682 - RNA, 19 nt, Homo sapiens
  misc_RNA (1)...(19): siRNA sense strand
ggaaauccugaccuuauuc

SEQ ID NO: 407683 - RNA, 19 nt, Homo sapiens
  misc_RNA (1)...(19): siRNA sense strand
caccaggacugaagacaag

SEQ ID NO: 407684 - RNA, 19 nt, Homo sapiens
  misc_RNA (1)...(19): siRNA sense strand
gagaagcccuaugaaugca

SEQ ID NO: 407685 - RNA, 19 nt, Homo sapiens
  misc_RNA (1)...(19): siRNA sense strand
agagaagcccuaugaaugu

SEQ ID NO: 407686 - RNA, 19 nt, Homo sapiens
  misc_RNA (1)...(19): siRNA sense strand
gagaagccguacagaugca

SEQ ID NO: 407687 - RNA, 19 nt, Homo sapiens
  misc_RNA (1)...(19): siRNA sense strand
caaaccugauggcauguca

SEQ ID NO: 407688 - RNA, 19 nt, Homo sapiens
  misc_RNA (1)...(19): siRNA sense strand
gaaagcaccagaucaucca

SEQ ID NO: 407689 - RNA, 19 nt, Homo sapiens
  misc_RNA (1)...(19): siRNA sense strand
caaggaguuucuucacaag

SEQ ID NO: 407690 - RNA, 19 nt, Homo sapiens
  misc_RNA (1)...(19): siRNA sense strand
acaaggaagacauucauga

SEQ ID NO: 407691 - RNA, 19 nt, Homo sapiens
  misc_RNA (1)...(19): siRNA sense strand
ggugaagcccuaugacugu

SEQ ID NO: 407692 - RNA, 19 nt, Homo sapiens
  misc_RNA (1)...(19): siRNA sense strand
cuaugaauguacugaaugu

SEQ ID NO: 407693 - RNA, 19 nt, Homo sapiens
  misc_RNA (1)...(19): siRNA sense strand
uuggagaucugugugauga

SEQ ID NO: 407694 - RNA, 19 nt, Homo sapiens
  misc_RNA (1)...(19): siRNA sense strand
ccaugaauguaaccagugu

SEQ ID NO: 407695 - RNA, 19 nt, Homo sapiens
  misc_RNA (1)...(19): siRNA sense strand
cuggagagaagcccuauaa

SEQ ID NO: 407696 - RNA, 19 nt, Homo sapiens
  misc_RNA (1)...(19): siRNA sense strand
caggaaaucccuacagaag

SEQ ID NO: 407697 - RNA, 19 nt, Homo sapiens
  misc_RNA (1)...(19): siRNA sense strand
gauggcaugucaggaaauc

SEQ ID NO: 407698 - RNA, 19 nt, Homo sapiens
  misc_RNA (1)...(19): siRNA sense strand
ugaaaguccacucauaugu

SEQ ID NO: 407699 - RNA, 19 nt, Homo sapiens
  misc_RNA (1)...(19): siRNA sense strand
gaagcucaaaucucauuca

SEQ ID NO: 407700 - RNA, 19 nt, Homo sapiens
  misc_RNA (1)...(19): siRNA sense strand
ucuccaaccucauuaagca

SEQ ID NO: 407701 - RNA, 19 nt, Homo sapiens
  misc_RNA (1)...(19): siRNA sense strand
gugagaggccuuauaugug

SEQ ID NO: 407702 - RNA, 19 nt, Homo sapiens
  misc_RNA (1)...(19): siRNA sense strand
ucagagcuccagccuuauu

SEQ ID NO: 407703 - RNA, 19 nt, Homo sapiens
  misc_RNA (1)...(19): siRNA sense strand
gagcucaaaccucauccaa

SEQ ID NO: 407704 - RNA, 19 nt, Homo sapiens
  misc_RNA (1)...(19): siRNA sense strand
ccagaacucgagccuuaaa

SEQ ID NO: 407705 - RNA, 19 nt, Homo sapiens
  misc_RNA (1)...(19): siRNA sense strand
aagagaggccacauccaua

SEQ ID NO: 407706 - RNA, 19 nt, Homo sapiens
  misc_RNA (1)...(19): siRNA sense strand
caccaaaagucucacauga

SEQ ID NO: 407707 - RNA, 19 nt, Homo sapiens
  misc_RNA (1)...(19): siRNA sense strand
gaaaagccuucagccagaa

SEQ ID NO: 407708 - RNA, 19 nt, Homo sapiens
  misc_RNA (1)...(19): siRNA sense strand
gagaaagaucuggacugua

SEQ ID NO: 407709 - RNA, 19 nt, Homo sapiens
  misc_RNA (1)...(19): siRNA sense strand
cuacaaaugcagugagugu

SEQ ID NO: 407710 - RNA, 19 nt, Homo sapiens
  misc_RNA (1)...(19): siRNA sense strand
caaaccucauccaacauca

SEQ ID NO: 407711 - RNA, 19 nt, Homo sapiens
  misc_RNA (1)...(19): siRNA sense strand
gcagaaauaucagaaaacu

SEQ ID NO: 407712 - RNA, 19 nt, Homo sapiens
  misc_RNA (1)...(19): siRNA sense strand
acacuggagagaagccuua

SEQ ID NO: 407713 - RNA, 19 nt, Homo sapiens
  misc_RNA (1)...(19): siRNA sense strand
gugcacaccugaggaagca

SEQ ID NO: 407714 - RNA, 19 nt, Homo sapiens
  misc_RNA (1)...(19): siRNA sense strand
gaccuuauucagcgucaaa

SEQ ID NO: 407715 - RNA, 19 nt, Homo sapiens
  misc_RNA (1)...(19): siRNA sense strand
cuggagagaagccuuauga

SEQ ID NO: 407716 - RNA, 19 nt, Homo sapiens
  misc_RNA (1)...(19): siRNA sense strand
ccagagcucaacccucauu

SEQ ID NO: 407717 - RNA, 19 nt, Homo sapiens
  misc_RNA (1)...(19): siRNA sense strand
gaauguacugaauguggaa

SEQ ID NO: 407718 - RNA, 19 nt, Homo sapiens
  misc_RNA (1)...(19): siRNA sense strand
gagaauucacacuggagaa

SEQ ID NO: 407719 - RNA, 19 nt, Homo sapiens
  misc_RNA (1)...(19): siRNA sense strand
agaucugugugaugaugua

SEQ ID NO: 407720 - RNA, 19 nt, Homo sapiens
  misc_RNA (1)...(19): siRNA sense strand
caacccucauucagcauca

SEQ ID NO: 407721 - RNA, 19 nt, Homo sapiens
  misc_RNA (1)...(19): siRNA sense strand
ugagaagcccuaugaaugc

SEQ ID NO: 407722 - RNA, 19 nt, Homo sapiens
  misc_RNA (1)...(19): siRNA sense strand
agugagaggccuuauaugu

SEQ ID NO: 407723 - RNA, 19 nt, Homo sapiens
  misc_RNA (1)...(19): siRNA sense strand
caucugcccucacuaucag

SEQ ID NO: 407724 - RNA, 19 nt, Homo sapiens
  misc_RNA (1)...(19): siRNA sense strand
gggaauaguuucacgagua

SEQ ID NO: 407725 - RNA, 19 nt, Homo sapiens
  misc_RNA (1)...(19): siRNA sense strand
gggcgagccuuuaaugaua

SEQ ID NO: 407726 - RNA, 19 nt, Homo sapiens
  misc_RNA (1)...(19): siRNA sense strand
guaaagauguugagaccaa

SEQ ID NO: 407727 - RNA, 19 nt, Homo sapiens
  misc_RNA (1)...(19): siRNA sense strand
guacagaagugugauguug

SEQ ID NO: 407728 - RNA, 19 nt, Homo sapiens
  misc_RNA (1)...(19): siRNA sense strand
gaagugugauguuggagaa

SEQ ID NO: 407729 - RNA, 19 nt, Homo sapiens
  misc_RNA (1)...(19): siRNA sense strand
ggagaaacccuaugagugu

SEQ ID NO: 407730 - RNA, 19 nt, Homo sapiens
  misc_RNA (1)...(19): siRNA sense strand
ggagaaacccuuugacugu

SEQ ID NO: 407731 - RNA, 19 nt, Homo sapiens
  misc_RNA (1)...(19): siRNA sense strand
gacagugaguccacauuaa

SEQ ID NO: 407732 - RNA, 19 nt, Homo sapiens
  misc_RNA (1)...(19): siRNA sense strand
gaacugacuucccagaaac

SEQ ID NO: 407733 - RNA, 19 nt, Homo sapiens
  misc_RNA (1)...(19): siRNA sense strand
gagaaacccuaugagugua

SEQ ID NO: 407734 - RNA, 19 nt, Homo sapiens
  misc_RNA (1)...(19): siRNA sense strand
gagaaacccuaugagugua

SEQ ID NO: 407735 - RNA, 19 nt, Homo sapiens
  misc_RNA (1)...(19): siRNA sense strand
gagaaacccuaugagugua

SEQ ID NO: 407736 - RNA, 19 nt, Homo sapiens
  misc_RNA (1)...(19): siRNA sense strand
gagaugggaugaugucaca

SEQ ID NO: 407737 - RNA, 19 nt, Homo sapiens
  misc_RNA (1)...(19): siRNA sense strand
ggacaagccuucaauuuuc

SEQ ID NO: 407738 - RNA, 19 nt, Homo sapiens
  misc_RNA (1)...(19): siRNA sense strand
ggaauaguuucacgaguag

SEQ ID NO: 407739 - RNA, 19 nt, Homo sapiens
  misc_RNA (1)...(19): siRNA sense strand
ggagaaaccuuuugagugu

SEQ ID NO: 407740 - RNA, 19 nt, Homo sapiens
  misc_RNA (1)...(19): siRNA sense strand
agaaagagaugggaugaug

SEQ ID NO: 407741 - RNA, 19 nt, Homo sapiens
  misc_RNA (1)...(19): siRNA sense strand
gaagaaagagaugggauga

SEQ ID NO: 407742 - RNA, 19 nt, Homo sapiens
  misc_RNA (1)...(19): siRNA sense strand
ggagagagacccuaucagu

SEQ ID NO: 407743 - RNA, 19 nt, Homo sapiens
  misc_RNA (1)...(19): siRNA sense strand
ggaaauccuucagcuacuu

SEQ ID NO: 407744 - RNA, 19 nt, Homo sapiens
  misc_RNA (1)...(19): siRNA sense strand
gaaaagccuuauucuugua

SEQ ID NO: 407745 - RNA, 19 nt, Homo sapiens
  misc_RNA (1)...(19): siRNA sense strand
gaaacccuuugacugugua

SEQ ID NO: 407746 - RNA, 19 nt, Homo sapiens
  misc_RNA (1)...(19): siRNA sense strand
ggaaaagccuuauucuugu

SEQ ID NO: 407747 - RNA, 19 nt, Homo sapiens
  misc_RNA (1)...(19): siRNA sense strand
gagaaggccuuugggacuu

SEQ ID NO: 407748 - RNA, 19 nt, Homo sapiens
  misc_RNA (1)...(19): siRNA sense strand
agaccaacauugacaguga

SEQ ID NO: 407749 - RNA, 19 nt, Homo sapiens
  misc_RNA (1)...(19): siRNA sense strand
gcugugcacuucaccaaga

SEQ ID NO: 407750 - RNA, 19 nt, Homo sapiens
  misc_RNA (1)...(19): siRNA sense strand
agaacugacuucccagaaa

SEQ ID NO: 407751 - RNA, 19 nt, Homo sapiens
  misc_RNA (1)...(19): siRNA sense strand
ugacagugaguccacauua

SEQ ID NO: 407752 - RNA, 19 nt, Homo sapiens
  misc_RNA (1)...(19): siRNA sense strand
ggauguggcugugcacuuc

SEQ ID NO: 407753 - RNA, 19 nt, Homo sapiens
  misc_RNA (1)...(19): siRNA sense strand
gcacugaucucacuuuugg

SEQ ID NO: 407754 - RNA, 19 nt, Homo sapiens
  misc_RNA (1)...(19): siRNA sense strand
ggagagaaacccuaugagu

SEQ ID NO: 407755 - RNA, 19 nt, Homo sapiens
  misc_RNA (1)...(19): siRNA sense strand
ggaaaagccuugacuagca

SEQ ID NO: 407756 - RNA, 19 nt, Homo sapiens
  misc_RNA (1)...(19): siRNA sense strand
gggaaaagccuuauucuug

SEQ ID NO: 407757 - RNA, 19 nt, Homo sapiens
  misc_RNA (1)...(19): siRNA sense strand
ggagagaaacccuaugagu

SEQ ID NO: 407758 - RNA, 19 nt, Homo sapiens
  misc_RNA (1)...(19): siRNA sense strand
ggcgagccuuuaaugauaa

SEQ ID NO: 407759 - RNA, 19 nt, Homo sapiens
  misc_RNA (1)...(19): siRNA sense strand
gaaauccuucagcuacuuu

SEQ ID NO: 407760 - RNA, 19 nt, Homo sapiens
  misc_RNA (1)...(19): siRNA sense strand
gccuuauucuuguaaagua

SEQ ID NO: 407761 - RNA, 19 nt, Homo sapiens
  misc_RNA (1)...(19): siRNA sense strand
aaacgucuguaaagauguu

SEQ ID NO: 407762 - RNA, 19 nt, Homo sapiens
  misc_RNA (1)...(19): siRNA sense strand
agaaacacguaauguggaa

SEQ ID NO: 407763 - RNA, 19 nt, Homo sapiens
  misc_RNA (1)...(19): siRNA sense strand
caacaucagcguauucaca

SEQ ID NO: 407764 - RNA, 19 nt, Homo sapiens
  misc_RNA (1)...(19): siRNA sense strand
gaucaggcaucagagaauc

SEQ ID NO: 407765 - RNA, 19 nt, Homo sapiens
  misc_RNA (1)...(19): siRNA sense strand
gaagagugucccucagaga

SEQ ID NO: 407766 - RNA, 19 nt, Homo sapiens
  misc_RNA (1)...(19): siRNA sense strand
ccacauuaauccagggaau

SEQ ID NO: 407767 - RNA, 19 nt, Homo sapiens
  misc_RNA (1)...(19): siRNA sense strand
agagaaacccuaugagugu

SEQ ID NO: 407768 - RNA, 19 nt, Homo sapiens
  misc_RNA (1)...(19): siRNA sense strand
gaaaucuucaucagcauca

SEQ ID NO: 407769 - RNA, 19 nt, Homo sapiens
  misc_RNA (1)...(19): siRNA sense strand
gaaaagccuugacuagcaa

SEQ ID NO: 407770 - RNA, 19 nt, Homo sapiens
  misc_RNA (1)...(19): siRNA sense strand
guggacaagccuucaauuu

SEQ ID NO: 407771 - RNA, 19 nt, Homo sapiens
  misc_RNA (1)...(19): siRNA sense strand
agagaaacccuaugagugu

SEQ ID NO: 407772 - RNA, 19 nt, Homo sapiens
  misc_RNA (1)...(19): siRNA sense strand
gauucacacuggagagaga

SEQ ID NO: 407773 - RNA, 19 nt, Homo sapiens
  misc_RNA (1)...(19): siRNA sense strand
aaaggcaucugagaauuca

SEQ ID NO: 407774 - RNA, 19 nt, Homo sapiens
  misc_RNA (1)...(19): siRNA sense strand
caucaaagaauccauacug

SEQ ID NO: 407775 - RNA, 19 nt, Homo sapiens
  misc_RNA (1)...(19): siRNA sense strand
gaaagagaugggaugaugu

SEQ ID NO: 407776 - RNA, 19 nt, Homo sapiens
  misc_RNA (1)...(19): siRNA sense strand
cagcaucaaagaauccaua

SEQ ID NO: 407777 - RNA, 19 nt, Homo sapiens
  misc_RNA (1)...(19): siRNA sense strand
agagagacccuaucagugu

SEQ ID NO: 407778 - RNA, 19 nt, Homo sapiens
  misc_RNA (1)...(19): siRNA sense strand
ucccaaaccugcacugauc

SEQ ID NO: 407779 - RNA, 19 nt, Homo sapiens
  misc_RNA (1)...(19): siRNA sense strand
acagaagugugauguugga

SEQ ID NO: 407780 - RNA, 19 nt, Homo sapiens
  misc_RNA (1)...(19): siRNA sense strand
cuauguaugugaugagugu

SEQ ID NO: 407781 - RNA, 19 nt, Homo sapiens
  misc_RNA (1)...(19): siRNA sense strand
uugggaaccugacugcuuu

SEQ ID NO: 407782 - RNA, 19 nt, Homo sapiens
  misc_RNA (1)...(19): siRNA sense strand
gcacuucaccaagacagaa

SEQ ID NO: 407783 - RNA, 19 nt, Homo sapiens
  misc_RNA (1)...(19): siRNA sense strand
gaaacccuaugaguguaau

SEQ ID NO: 407784 - RNA, 19 nt, Homo sapiens
  misc_RNA (1)...(19): siRNA sense strand
gaaacccuaugaguguaau

SEQ ID NO: 407785 - RNA, 19 nt, Homo sapiens
  misc_RNA (1)...(19): siRNA sense strand
guacagagugugggaauag

SEQ ID NO: 407786 - RNA, 19 nt, Homo sapiens
  misc_RNA (1)...(19): siRNA sense strand
gauaaugcaaaucugauca

SEQ ID NO: 407787 - RNA, 19 nt, Homo sapiens
  misc_RNA (1)...(19): siRNA sense strand
gaguguagcaaguaugaga

SEQ ID NO: 407788 - RNA, 19 nt, Homo sapiens
  misc_RNA (1)...(19): siRNA sense strand
ggagucuuccuauguaugu

SEQ ID NO: 407789 - RNA, 19 nt, Homo sapiens
  misc_RNA (1)...(19): siRNA sense strand
guuccgaguuuguuauaca

SEQ ID NO: 407790 - RNA, 19 nt, Homo sapiens
  misc_RNA (1)...(19): siRNA sense strand
gagaacugacuucccagaa

SEQ ID NO: 407791 - RNA, 19 nt, Homo sapiens
  misc_RNA (1)...(19): siRNA sense strand
gugugauguuggagaauuu

SEQ ID NO: 407792 - RNA, 19 nt, Homo sapiens
  misc_RNA (1)...(19): siRNA sense strand
cacgaguaguuccgaguuu

SEQ ID NO: 407793 - RNA, 19 nt, Homo sapiens
  misc_RNA (1)...(19): siRNA sense strand
ggacauccccacagugaaa

SEQ ID NO: 407794 - RNA, 19 nt, Homo sapiens
  misc_RNA (1)...(19): siRNA sense strand
uaacucggcaccagagaau

SEQ ID NO: 407795 - RNA, 19 nt, Homo sapiens
  misc_RNA (1)...(19): siRNA sense strand
ccagagggcccuguacaga

SEQ ID NO: 407796 - RNA, 19 nt, Homo sapiens
  misc_RNA (1)...(19): siRNA sense strand
cagagugugggaauaguuu

SEQ ID NO: 407797 - RNA, 19 nt, Homo sapiens
  misc_RNA (1)...(19): siRNA sense strand
gggaaauccuucagcuacu

SEQ ID NO: 407798 - RNA, 19 nt, Homo sapiens
  misc_RNA (1)...(19): siRNA sense strand
cagagggcccuguacagaa

SEQ ID NO: 407799 - RNA, 19 nt, Homo sapiens
  misc_RNA (1)...(19): siRNA sense strand
ucagugcucaggaacaauu

SEQ ID NO: 407800 - RNA, 19 nt, Homo sapiens
  misc_RNA (1)...(19): siRNA sense strand
gaggagaaacccuuugacu

SEQ ID NO: 407801 - RNA, 19 nt, Homo sapiens
  misc_RNA (1)...(19): siRNA sense strand
gauggugaccuucgaggau

SEQ ID NO: 407802 - RNA, 19 nt, Homo sapiens
  misc_RNA (1)...(19): siRNA sense strand
agaaacccuuugacugugu

SEQ ID NO: 407803 - RNA, 19 nt, Homo sapiens
  misc_RNA (1)...(19): siRNA sense strand
acauuaauccagggaauuu

SEQ ID NO: 407804 - RNA, 19 nt, Homo sapiens
  misc_RNA (1)...(19): siRNA sense strand
ccgaguuuguuauacauca

SEQ ID NO: 407805 - RNA, 19 nt, Homo sapiens
  misc_RNA (1)...(19): siRNA sense strand
ggagugugggcgagccuuu

SEQ ID NO: 407806 - RNA, 19 nt, Homo sapiens
  misc_RNA (1)...(19): siRNA sense strand
gagugugggcgagccuuua

SEQ ID NO: 407807 - RNA, 19 nt, Homo sapiens
  misc_RNA (1)...(19): siRNA sense strand
gugaggagaaacccuuuga

SEQ ID NO: 407808 - RNA, 19 nt, Homo sapiens
  misc_RNA (1)...(19): siRNA sense strand
agagggcccuguacagaag

SEQ ID NO: 407809 - RNA, 19 nt, Homo sapiens
  misc_RNA (1)...(19): siRNA sense strand
ucacauggucagcugaaga

SEQ ID NO: 407810 - RNA, 19 nt, Homo sapiens
  misc_RNA (1)...(19): siRNA sense strand
caucugagaauucauacuc

SEQ ID NO: 407811 - RNA, 19 nt, Homo sapiens
  misc_RNA (1)...(19): siRNA sense strand
cuucagugcucaggaacaa

SEQ ID NO: 407812 - RNA, 19 nt, Homo sapiens
  misc_RNA (1)...(19): siRNA sense strand
aggcaucugagaauucaua

SEQ ID NO: 407813 - RNA, 19 nt, Homo sapiens
  misc_RNA (1)...(19): siRNA sense strand
acagugaguccacauuaau

SEQ ID NO: 407814 - RNA, 19 nt, Homo sapiens
  misc_RNA (1)...(19): siRNA sense strand
ccuaugaguguagcaagua

SEQ ID NO: 407815 - RNA, 19 nt, Homo sapiens
  misc_RNA (1)...(19): siRNA sense strand
uguacagagugugggaaua

SEQ ID NO: 407816 - RNA, 19 nt, Homo sapiens
  misc_RNA (1)...(19): siRNA sense strand
uuucauaugugaggagugu

SEQ ID NO: 407817 - RNA, 19 nt, Homo sapiens
  misc_RNA (1)...(19): siRNA sense strand
aagagugucccucagagaa

SEQ ID NO: 407818 - RNA, 19 nt, Homo sapiens
  misc_RNA (1)...(19): siRNA sense strand
agccugugcuggacauuug

SEQ ID NO: 407819 - RNA, 19 nt, Homo sapiens
  misc_RNA (1)...(19): siRNA sense strand
cuaugaguguagcaaguau

SEQ ID NO: 407820 - RNA, 19 nt, Homo sapiens
  misc_RNA (1)...(19): siRNA sense strand
guaguuccgaguuuguuau

SEQ ID NO: 407821 - RNA, 19 nt, Homo sapiens
  misc_RNA (1)...(19): siRNA sense strand
gagaaaccuuuugagugua

SEQ ID NO: 407822 - RNA, 19 nt, Homo sapiens
  misc_RNA (1)...(19): siRNA sense strand
gggacagacccuauuacug

SEQ ID NO: 407823 - RNA, 19 nt, Homo sapiens
  misc_RNA (1)...(19): siRNA sense strand
gugcucaggaacaauuaaa

SEQ ID NO: 407824 - RNA, 19 nt, Homo sapiens
  misc_RNA (1)...(19): siRNA sense strand
ggagaaagcuucaaacaga

SEQ ID NO: 407825 - RNA, 19 nt, Homo sapiens
  misc_RNA (1)...(19): siRNA sense strand
ggaaagaaaucccauaaau

SEQ ID NO: 407826 - RNA, 19 nt, Homo sapiens
  misc_RNA (1)...(19): siRNA sense strand
aaacagagcucaaaucuca

SEQ ID NO: 407827 - RNA, 19 nt, Homo sapiens
  misc_RNA (1)...(19): siRNA sense strand
gacaaacccuauaaaugua

SEQ ID NO: 407828 - RNA, 19 nt, Homo sapiens
  misc_RNA (1)...(19): siRNA sense strand
gggcaugacuauucgauuu

SEQ ID NO: 407829 - RNA, 19 nt, Homo sapiens
  misc_RNA (1)...(19): siRNA sense strand
gaaagaaaucccauaaaug

SEQ ID NO: 407830 - RNA, 19 nt, Homo sapiens
  misc_RNA (1)...(19): siRNA sense strand
ugacaaacccuauaaaugu

SEQ ID NO: 407831 - RNA, 19 nt, Homo sapiens
  misc_RNA (1)...(19): siRNA sense strand
gaagaagcuuggaugacaa

SEQ ID NO: 407832 - RNA, 19 nt, Homo sapiens
  misc_RNA (1)...(19): siRNA sense strand
cuacaaaugugaugagugu

SEQ ID NO: 407833 - RNA, 19 nt, Homo sapiens
  misc_RNA (1)...(19): siRNA sense strand
agccagagcucccaccuua

SEQ ID NO: 407834 - RNA, 19 nt, Homo sapiens
  misc_RNA (1)...(19): siRNA sense strand
ggaaaggccuaugagaaca

SEQ ID NO: 407835 - RNA, 19 nt, Homo sapiens
  misc_RNA (1)...(19): siRNA sense strand
ccauaaaugugcugauugu

SEQ ID NO: 407836 - RNA, 19 nt, Homo sapiens
  misc_RNA (1)...(19): siRNA sense strand
acaugaaggugcauaaaga

SEQ ID NO: 407837 - RNA, 19 nt, Homo sapiens
  misc_RNA (1)...(19): siRNA sense strand
gaaagcugguacagaagga

SEQ ID NO: 407838 - RNA, 19 nt, Homo sapiens
  misc_RNA (1)...(19): siRNA sense strand
gaagagaagccucguaaaa

SEQ ID NO: 407839 - RNA, 19 nt, Homo sapiens
  misc_RNA (1)...(19): siRNA sense strand
ucacuuacccucuuggaaa

SEQ ID NO: 407840 - RNA, 19 nt, Homo sapiens
  misc_RNA (1)...(19): siRNA sense strand
agaagaagcuuggaugaca

SEQ ID NO: 407841 - RNA, 19 nt, Homo sapiens
  misc_RNA (1)...(19): siRNA sense strand
uuggaaagcugguacagaa

SEQ ID NO: 407842 - RNA, 19 nt, Homo sapiens
  misc_RNA (1)...(19): siRNA sense strand
gaaggugcauaaagaagag

SEQ ID NO: 407843 - RNA, 19 nt, Homo sapiens
  misc_RNA (1)...(19): siRNA sense strand
gagaauucauacuggagaa

SEQ ID NO: 407844 - RNA, 19 nt, Homo sapiens
  misc_RNA (1)...(19): siRNA sense strand
gaaaagcccuacaaaugug

SEQ ID NO: 407845 - RNA, 19 nt, Homo sapiens
  misc_RNA (1)...(19): siRNA sense strand
gaugacaaacccuauaaau

SEQ ID NO: 407846 - RNA, 19 nt, Homo sapiens
  misc_RNA (1)...(19): siRNA sense strand
ucagaguucuaaucucauu

SEQ ID NO: 407847 - RNA, 19 nt, Homo sapiens
  misc_RNA (1)...(19): siRNA sense strand
gcaugacuauucgauuuga

SEQ ID NO: 407848 - RNA, 19 nt, Homo sapiens
  misc_RNA (1)...(19): siRNA sense strand
cagcaucgacggauccaua

SEQ ID NO: 407849 - RNA, 19 nt, Homo sapiens
  misc_RNA (1)...(19): siRNA sense strand
ccagagcucccaccuuauu

SEQ ID NO: 407850 - RNA, 19 nt, Homo sapiens
  misc_RNA (1)...(19): siRNA sense strand
gggaaaagcccuacaaaug

SEQ ID NO: 407851 - RNA, 19 nt, Homo sapiens
  misc_RNA (1)...(19): siRNA sense strand
ggaaaagcccuacaaaugu

SEQ ID NO: 407852 - RNA, 19 nt, Homo sapiens
  misc_RNA (1)...(19): siRNA sense strand
gaauguggcaaauguuuca

SEQ ID NO: 407853 - RNA, 19 nt, Homo sapiens
  misc_RNA (1)...(19): siRNA sense strand
uuucagaguucuaaucuca

SEQ ID NO: 407854 - RNA, 19 nt, Homo sapiens
  misc_RNA (1)...(19): siRNA sense strand
gcucccaccuuauucaaca

SEQ ID NO: 407855 - RNA, 19 nt, Homo sapiens
  misc_RNA (1)...(19): siRNA sense strand
gaaaggccuaugagaacaa

SEQ ID NO: 407856 - RNA, 19 nt, Homo sapiens
  misc_RNA (1)...(19): siRNA sense strand
cagugaauguggcaaaugu

SEQ ID NO: 407857 - RNA, 19 nt, Homo sapiens
  misc_RNA (1)...(19): siRNA sense strand
ggcaaauguuucagucaga

SEQ ID NO: 407858 - RNA, 19 nt, Homo sapiens
  misc_RNA (1)...(19): siRNA sense strand
aagaagagaagccucguaa

SEQ ID NO: 407859 - RNA, 19 nt, Homo sapiens
  misc_RNA (1)...(19): siRNA sense strand
gugaauguggcaaauguuu

SEQ ID NO: 407860 - RNA, 19 nt, Homo sapiens
  misc_RNA (1)...(19): siRNA sense strand
caucugaggcagcacauga

SEQ ID NO: 407861 - RNA, 19 nt, Homo sapiens
  misc_RNA (1)...(19): siRNA sense strand
gagcucaaaucucauucag

SEQ ID NO: 407862 - RNA, 19 nt, Homo sapiens
  misc_RNA (1)...(19): siRNA sense strand
gcuggucuccguuaaguau

SEQ ID NO: 407863 - RNA, 19 nt, Homo sapiens
  misc_RNA (1)...(19): siRNA sense strand
caaggaaaggccuaugaga

SEQ ID NO: 407864 - RNA, 19 nt, Homo sapiens
  misc_RNA (1)...(19): siRNA sense strand
ucaaacagagcucaaaucu

SEQ ID NO: 407865 - RNA, 19 nt, Homo sapiens
  misc_RNA (1)...(19): siRNA sense strand
caacaccagaagauccaua

SEQ ID NO: 407866 - RNA, 19 nt, Homo sapiens
  misc_RNA (1)...(19): siRNA sense strand
ggaugacaaacccuauaaa

SEQ ID NO: 407867 - RNA, 19 nt, Homo sapiens
  misc_RNA (1)...(19): siRNA sense strand
aaggaaaggccuaugagaa

SEQ ID NO: 407868 - RNA, 19 nt, Homo sapiens
  misc_RNA (1)...(19): siRNA sense strand
ucccauaaaugugcugauu

SEQ ID NO: 407869 - RNA, 19 nt, Homo sapiens
  misc_RNA (1)...(19): siRNA sense strand
cagcaccagagaauucaua

SEQ ID NO: 407870 - RNA, 19 nt, Homo sapiens
  misc_RNA (1)...(19): siRNA sense strand
ugaaggugcauaaagaaga

SEQ ID NO: 407871 - RNA, 19 nt, Homo sapiens
  misc_RNA (1)...(19): siRNA sense strand
gaguguggccgguguuuca

SEQ ID NO: 407872 - RNA, 19 nt, Homo sapiens
  misc_RNA (1)...(19): siRNA sense strand
gacucaagcuucaguagac

SEQ ID NO: 407873 - RNA, 19 nt, Homo sapiens
  misc_RNA (1)...(19): siRNA sense strand
gccaaggaaaggccuauga

SEQ ID NO: 407874 - RNA, 19 nt, Homo sapiens
  misc_RNA (1)...(19): siRNA sense strand
ucagaagaagcuuggauga

SEQ ID NO: 407875 - RNA, 19 nt, Homo sapiens
  misc_RNA (1)...(19): siRNA sense strand
cccuauaaauguacugaau

SEQ ID NO: 407876 - RNA, 19 nt, Homo sapiens
  misc_RNA (1)...(19): siRNA sense strand
caugaaggugcauaaagaa

SEQ ID NO: 407877 - RNA, 19 nt, Homo sapiens
  misc_RNA (1)...(19): siRNA sense strand
caccagagaauucauacug

SEQ ID NO: 407878 - RNA, 19 nt, Homo sapiens
  misc_RNA (1)...(19): siRNA sense strand
agacucacuuacccucuug

SEQ ID NO: 407879 - RNA, 19 nt, Homo sapiens
  misc_RNA (1)...(19): siRNA sense strand
ucaguagacucagaagaag

SEQ ID NO: 407880 - RNA, 19 nt, Homo sapiens
  misc_RNA (1)...(19): siRNA sense strand
gagcucaagccaaggaaag

SEQ ID NO: 407881 - RNA, 19 nt, Homo sapiens
  misc_RNA (1)...(19): siRNA sense strand
gcagugaauguggcaaaug

SEQ ID NO: 407882 - RNA, 19 nt, Homo sapiens
  misc_RNA (1)...(19): siRNA sense strand
uggaugacaaacccuauaa

SEQ ID NO: 407883 - RNA, 19 nt, Homo sapiens
  misc_RNA (1)...(19): siRNA sense strand
cuggaaagaaaucccauaa

SEQ ID NO: 407884 - RNA, 19 nt, Homo sapiens
  misc_RNA (1)...(19): siRNA sense strand
acagagcucaaaucucauu

SEQ ID NO: 407885 - RNA, 19 nt, Homo sapiens
  misc_RNA (1)...(19): siRNA sense strand
ugugaugaguguggagaaa

SEQ ID NO: 407886 - RNA, 19 nt, Homo sapiens
  misc_RNA (1)...(19): siRNA sense strand
aagcuucaguagacucaga

SEQ ID NO: 407887 - RNA, 19 nt, Homo sapiens
  misc_RNA (1)...(19): siRNA sense strand
aaagaagagaagccucgua

SEQ ID NO: 407888 - RNA, 19 nt, Homo sapiens
  misc_RNA (1)...(19): siRNA sense strand
ugacucaagcuucaguaga

SEQ ID NO: 407889 - RNA, 19 nt, Homo sapiens
  misc_RNA (1)...(19): siRNA sense strand
uggaaagaaaucccauaaa

SEQ ID NO: 407890 - RNA, 19 nt, Homo sapiens
  misc_RNA (1)...(19): siRNA sense strand
guggagaaagcuucaaaca

SEQ ID NO: 407891 - RNA, 19 nt, Homo sapiens
  misc_RNA (1)...(19): siRNA sense strand
ggcaugacuauucgauuug

SEQ ID NO: 407892 - RNA, 19 nt, Homo sapiens
  misc_RNA (1)...(19): siRNA sense strand
gagcucccaccuuauucaa

SEQ ID NO: 407893 - RNA, 19 nt, Homo sapiens
  misc_RNA (1)...(19): siRNA sense strand
gaguuucagucagaguuca

SEQ ID NO: 407894 - RNA, 19 nt, Homo sapiens
  misc_RNA (1)...(19): siRNA sense strand
ggagcucaagccaaggaaa

SEQ ID NO: 407895 - RNA, 19 nt, Homo sapiens
  misc_RNA (1)...(19): siRNA sense strand
uucaguagacucagaagaa

SEQ ID NO: 407896 - RNA, 19 nt, Homo sapiens
  misc_RNA (1)...(19): siRNA sense strand
gccuaaagcggguauuucu

SEQ ID NO: 407897 - RNA, 19 nt, Homo sapiens
  misc_RNA (1)...(19): siRNA sense strand
ccuauaaauguacugaaug

SEQ ID NO: 407898 - RNA, 19 nt, Homo sapiens
  misc_RNA (1)...(19): siRNA sense strand
uggcuggucuccguuaagu

SEQ ID NO: 407899 - RNA, 19 nt, Homo sapiens
  misc_RNA (1)...(19): siRNA sense strand
augacaaacccuauaaaug

SEQ ID NO: 407900 - RNA, 19 nt, Homo sapiens
  misc_RNA (1)...(19): siRNA sense strand
gugcagugaauguggcaaa

SEQ ID NO: 407901 - RNA, 19 nt, Homo sapiens
  misc_RNA (1)...(19): siRNA sense strand
ugaggcagcacaugaaggu

SEQ ID NO: 407902 - RNA, 19 nt, Homo sapiens
  misc_RNA (1)...(19): siRNA sense strand
aaaggaagcuuaauuguuc

SEQ ID NO: 407903 - RNA, 19 nt, Homo sapiens
  misc_RNA (1)...(19): siRNA sense strand
gaaaggaagcuuaauuguu

SEQ ID NO: 407904 - RNA, 19 nt, Homo sapiens
  misc_RNA (1)...(19): siRNA sense strand
gaagauaugcccagaaugu

SEQ ID NO: 407905 - RNA, 19 nt, Homo sapiens
  misc_RNA (1)...(19): siRNA sense strand
gagagaagcuggaacaaaa

SEQ ID NO: 407906 - RNA, 19 nt, Homo sapiens
  misc_RNA (1)...(19): siRNA sense strand
cagagaagcuucaggaauc

SEQ ID NO: 407907 - RNA, 19 nt, Homo sapiens
  misc_RNA (1)...(19): siRNA sense strand
gaauguagcguucuucaau

SEQ ID NO: 407908 - RNA, 19 nt, Homo sapiens
  misc_RNA (1)...(19): siRNA sense strand
ggacugucauggaagauau

SEQ ID NO: 407909 - RNA, 19 nt, Homo sapiens
  misc_RNA (1)...(19): siRNA sense strand
ccacaaauaugaccacucu

SEQ ID NO: 407910 - RNA, 19 nt, Homo sapiens
  misc_RNA (1)...(19): siRNA sense strand
gagaagcccuauagaugug

SEQ ID NO: 407911 - RNA, 19 nt, Homo sapiens
  misc_RNA (1)...(19): siRNA sense strand
gaagagagaagcuggaaca

SEQ ID NO: 407912 - RNA, 19 nt, Homo sapiens
  misc_RNA (1)...(19): siRNA sense strand
caaaggcaaucuuguuaca

SEQ ID NO: 407913 - RNA, 19 nt, Homo sapiens
  misc_RNA (1)...(19): siRNA sense strand
ucacagaggcucacccuuu

SEQ ID NO: 407914 - RNA, 19 nt, Homo sapiens
  misc_RNA (1)...(19): siRNA sense strand
ggaaaagccuucagucaga

SEQ ID NO: 407915 - RNA, 19 nt, Homo sapiens
  misc_RNA (1)...(19): siRNA sense strand
gccaaaggcaaucuuguua

SEQ ID NO: 407916 - RNA, 19 nt, Homo sapiens
  misc_RNA (1)...(19): siRNA sense strand
cgaagacacuacaggaaga

SEQ ID NO: 407917 - RNA, 19 nt, Homo sapiens
  misc_RNA (1)...(19): siRNA sense strand
ggagagacacccuaucugu

SEQ ID NO: 407918 - RNA, 19 nt, Homo sapiens
  misc_RNA (1)...(19): siRNA sense strand
gcaaucuuguuacacauca

SEQ ID NO: 407919 - RNA, 19 nt, Homo sapiens
  misc_RNA (1)...(19): siRNA sense strand
cagaaaggaagcuuaauug

SEQ ID NO: 407920 - RNA, 19 nt, Homo sapiens
  misc_RNA (1)...(19): siRNA sense strand
gugagaagcccuauagaug

SEQ ID NO: 407921 - RNA, 19 nt, Homo sapiens
  misc_RNA (1)...(19): siRNA sense strand
guagcguucuucaauguga

SEQ ID NO: 407922 - RNA, 19 nt, Homo sapiens
  misc_RNA (1)...(19): siRNA sense strand
ggagagaagccuuaucagu

SEQ ID NO: 407923 - RNA, 19 nt, Homo sapiens
  misc_RNA (1)...(19): siRNA sense strand
agaguaaccuugcuguuca

SEQ ID NO: 407924 - RNA, 19 nt, Homo sapiens
  misc_RNA (1)...(19): siRNA sense strand
ucagaaaggaagcuuaauu

SEQ ID NO: 407925 - RNA, 19 nt, Homo sapiens
  misc_RNA (1)...(19): siRNA sense strand
cacagaggcucacccuuug

SEQ ID NO: 407926 - RNA, 19 nt, Homo sapiens
  misc_RNA (1)...(19): siRNA sense strand
gacugaagcccaccacaaa

SEQ ID NO: 407927 - RNA, 19 nt, Homo sapiens
  misc_RNA (1)...(19): siRNA sense strand
cuauagaugugaucagugu

SEQ ID NO: 407928 - RNA, 19 nt, Homo sapiens
  misc_RNA (1)...(19): siRNA sense strand
uggaagauaugcccagaau

SEQ ID NO: 407929 - RNA, 19 nt, Homo sapiens
  misc_RNA (1)...(19): siRNA sense strand
acaaauaugaccacucuga

SEQ ID NO: 407930 - RNA, 19 nt, Homo sapiens
  misc_RNA (1)...(19): siRNA sense strand
gaaaauccuuccggcaaaa

SEQ ID NO: 407931 - RNA, 19 nt, Homo sapiens
  misc_RNA (1)...(19): siRNA sense strand
cuacgagugugcuauuugu

SEQ ID NO: 407932 - RNA, 19 nt, Homo sapiens
  misc_RNA (1)...(19): siRNA sense strand
gggaaaagcuucagucaac

SEQ ID NO: 407933 - RNA, 19 nt, Homo sapiens
  misc_RNA (1)...(19): siRNA sense strand
gcuggacugucauggaaga

SEQ ID NO: 407934 - RNA, 19 nt, Homo sapiens
  misc_RNA (1)...(19): siRNA sense strand
agucuaacguuacaugaga

SEQ ID NO: 407935 - RNA, 19 nt, Homo sapiens
  misc_RNA (1)...(19): siRNA sense strand
acagaaacccuacgagugu

SEQ ID NO: 407936 - RNA, 19 nt, Homo sapiens
  misc_RNA (1)...(19): siRNA sense strand
cugaagcccaccacaaaua

SEQ ID NO: 407937 - RNA, 19 nt, Homo sapiens
  misc_RNA (1)...(19): siRNA sense strand
gaagcuuaauuguucacau

SEQ ID NO: 407938 - RNA, 19 nt, Homo sapiens
  misc_RNA (1)...(19): siRNA sense strand
ugagaagcccuauagaugu

SEQ ID NO: 407939 - RNA, 19 nt, Homo sapiens
  misc_RNA (1)...(19): siRNA sense strand
ggccaaaggcaaucuuguu

SEQ ID NO: 407940 - RNA, 19 nt, Homo sapiens
  misc_RNA (1)...(19): siRNA sense strand
ggugagaagcccuauagau

SEQ ID NO: 407941 - RNA, 19 nt, Homo sapiens
  misc_RNA (1)...(19): siRNA sense strand
uguuacacaucaacggaua

SEQ ID NO: 407942 - RNA, 19 nt, Homo sapiens
  misc_RNA (1)...(19): siRNA sense strand
gaaaagccuucagucagaa

SEQ ID NO: 407943 - RNA, 19 nt, Homo sapiens
  misc_RNA (1)...(19): siRNA sense strand
aaaagguagucuaacguua

SEQ ID NO: 407944 - RNA, 19 nt, Homo sapiens
  misc_RNA (1)...(19): siRNA sense strand
aagcuuaauuguucacauc

SEQ ID NO: 407945 - RNA, 19 nt, Homo sapiens
  misc_RNA (1)...(19): siRNA sense strand
gaugugaucaguguggaaa

SEQ ID NO: 407946 - RNA, 19 nt, Homo sapiens
  misc_RNA (1)...(19): siRNA sense strand
cugcuggacugucauggaa

SEQ ID NO: 407947 - RNA, 19 nt, Homo sapiens
  misc_RNA (1)...(19): siRNA sense strand
gcugggauauccaaaauuc

SEQ ID NO: 407948 - RNA, 19 nt, Homo sapiens
  misc_RNA (1)...(19): siRNA sense strand
cagaguaaccuugcuguuc

SEQ ID NO: 407949 - RNA, 19 nt, Homo sapiens
  misc_RNA (1)...(19): siRNA sense strand
aaggcaaucuuguuacaca

SEQ ID NO: 407950 - RNA, 19 nt, Homo sapiens
  misc_RNA (1)...(19): siRNA sense strand
uaacguuacaugagagaau

SEQ ID NO: 407951 - RNA, 19 nt, Homo sapiens
  misc_RNA (1)...(19): siRNA sense strand
cuuaauuguucacaucaga

SEQ ID NO: 407952 - RNA, 19 nt, Homo sapiens
  misc_RNA (1)...(19): siRNA sense strand
ucagagaagcuucaggaau

SEQ ID NO: 407953 - RNA, 19 nt, Homo sapiens
  misc_RNA (1)...(19): siRNA sense strand
ugaagcccaccacaaauau

SEQ ID NO: 407954 - RNA, 19 nt, Homo sapiens
  misc_RNA (1)...(19): siRNA sense strand
gaagcccaccacaaauaug

SEQ ID NO: 407955 - RNA, 19 nt, Homo sapiens
  misc_RNA (1)...(19): siRNA sense strand
cgggagagaagccuuauca

SEQ ID NO: 407956 - RNA, 19 nt, Homo sapiens
  misc_RNA (1)...(19): siRNA sense strand
ugacugaagcccaccacaa

SEQ ID NO: 407957 - RNA, 19 nt, Homo sapiens
  misc_RNA (1)...(19): siRNA sense strand
aauguagcguucuucaaug

SEQ ID NO: 407958 - RNA, 19 nt, Homo sapiens
  misc_RNA (1)...(19): siRNA sense strand
agagagaagcuggaacaaa

SEQ ID NO: 407959 - RNA, 19 nt, Homo sapiens
  misc_RNA (1)...(19): siRNA sense strand
gugcaaggagugugggaaa

SEQ ID NO: 407960 - RNA, 19 nt, Homo sapiens
  misc_RNA (1)...(19): siRNA sense strand
acacgggagagaagccuua

SEQ ID NO: 407961 - RNA, 19 nt, Homo sapiens
  misc_RNA (1)...(19): siRNA sense strand
gcuacaggauccucaagcu

SEQ ID NO: 407962 - RNA, 19 nt, Homo sapiens
  misc_RNA (1)...(19): siRNA sense strand
agucagaaaggaagcuuaa

SEQ ID NO: 407963 - RNA, 19 nt, Homo sapiens
  misc_RNA (1)...(19): siRNA sense strand
agaaaggaagcuuaauugu

SEQ ID NO: 407964 - RNA, 19 nt, Homo sapiens
  misc_RNA (1)...(19): siRNA sense strand
gguagucuaacguuacaug

SEQ ID NO: 407965 - RNA, 19 nt, Homo sapiens
  misc_RNA (1)...(19): siRNA sense strand
agagaagcuucaggaauca

SEQ ID NO: 407966 - RNA, 19 nt, Homo sapiens
  misc_RNA (1)...(19): siRNA sense strand
gaagacacuacaggaagau

SEQ ID NO: 407967 - RNA, 19 nt, Homo sapiens
  misc_RNA (1)...(19): siRNA sense strand
caggagagacacccuaucu

SEQ ID NO: 407968 - RNA, 19 nt, Homo sapiens
  misc_RNA (1)...(19): siRNA sense strand
gaagcccuauagaugugau

SEQ ID NO: 407969 - RNA, 19 nt, Homo sapiens
  misc_RNA (1)...(19): siRNA sense strand
ucuucaaugugaugacuga

SEQ ID NO: 407970 - RNA, 19 nt, Homo sapiens
  misc_RNA (1)...(19): siRNA sense strand
acacaucaacggauacaca

SEQ ID NO: 407971 - RNA, 19 nt, Homo sapiens
  misc_RNA (1)...(19): siRNA sense strand
gagaauccacacuggucaa

SEQ ID NO: 407972 - RNA, 19 nt, Homo sapiens
  misc_RNA (1)...(19): siRNA sense strand
ggauacacacgggagagaa

SEQ ID NO: 407973 - RNA, 19 nt, Homo sapiens
  misc_RNA (1)...(19): siRNA sense strand
cuacccugcuggacuguca

SEQ ID NO: 407974 - RNA, 19 nt, Homo sapiens
  misc_RNA (1)...(19): siRNA sense strand
gacacuacaggaagauuca

SEQ ID NO: 407975 - RNA, 19 nt, Homo sapiens
  misc_RNA (1)...(19): siRNA sense strand
guggugagaagcccuauag

SEQ ID NO: 407976 - RNA, 19 nt, Homo sapiens
  misc_RNA (1)...(19): siRNA sense strand
guagucuaacguuacauga

SEQ ID NO: 407977 - RNA, 19 nt, Homo sapiens
  misc_RNA (1)...(19): siRNA sense strand
aagauaugcccagaaugua

SEQ ID NO: 407978 - RNA, 19 nt, Homo sapiens
  misc_RNA (1)...(19): siRNA sense strand
cagaagagagaagcuggaa

SEQ ID NO: 407979 - RNA, 19 nt, Homo sapiens
  misc_RNA (1)...(19): siRNA sense strand
cugaagcccuaugccugua

SEQ ID NO: 407980 - RNA, 19 nt, Homo sapiens
  misc_RNA (1)...(19): siRNA sense strand
ggaagauaugcccagaaug

SEQ ID NO: 407981 - RNA, 19 nt, Homo sapiens
  misc_RNA (1)...(19): siRNA sense strand
aagcccaccacaaauauga

SEQ ID NO: 407982 - RNA, 19 nt, Homo sapiens
  misc_RNA (1)...(19): siRNA sense strand
gcuucaggaaucagaguaa

SEQ ID NO: 407983 - RNA, 19 nt, Homo sapiens
  misc_RNA (1)...(19): siRNA sense strand
aagguagucuaacguuaca

SEQ ID NO: 407984 - RNA, 19 nt, Homo sapiens
  misc_RNA (1)...(19): siRNA sense strand
aaagguagucuaacguuac

SEQ ID NO: 407985 - RNA, 19 nt, Homo sapiens
  misc_RNA (1)...(19): siRNA sense strand
ccaaaggcaaucuuguuac

SEQ ID NO: 407986 - RNA, 19 nt, Homo sapiens
  misc_RNA (1)...(19): siRNA sense strand
gauacacacgggagagaag

SEQ ID NO: 407987 - RNA, 19 nt, Homo sapiens
  misc_RNA (1)...(19): siRNA sense strand
ugugcuauuugucagagaa

SEQ ID NO: 407988 - RNA, 19 nt, Homo sapiens
  misc_RNA (1)...(19): siRNA sense strand
ucacaucagaguccacaca

SEQ ID NO: 407989 - RNA, 19 nt, Homo sapiens
  misc_RNA (1)...(19): siRNA sense strand
ggaacaaggugauguaaua

SEQ ID NO: 407990 - RNA, 19 nt, Homo sapiens
  misc_RNA (1)...(19): siRNA sense strand
uaagucagcucuaauugua

SEQ ID NO: 407991 - RNA, 19 nt, Homo sapiens
  misc_RNA (1)...(19): siRNA sense strand
gagaaacccuaucaaugua

SEQ ID NO: 407992 - RNA, 19 nt, Homo sapiens
  misc_RNA (1)...(19): siRNA sense strand
gagaaacacuuugaaugua

SEQ ID NO: 407993 - RNA, 19 nt, Homo sapiens
  misc_RNA (1)...(19): siRNA sense strand
ggagagaaaucuugucaau

SEQ ID NO: 407994 - RNA, 19 nt, Homo sapiens
  misc_RNA (1)...(19): siRNA sense strand
gagaaaaccuuaugaauga

SEQ ID NO: 407995 - RNA, 19 nt, Homo sapiens
  misc_RNA (1)...(19): siRNA sense strand
ggagaaacccuaucaaugu

SEQ ID NO: 407996 - RNA, 19 nt, Homo sapiens
  misc_RNA (1)...(19): siRNA sense strand
ggagaaacccuaugaaugu

SEQ ID NO: 407997 - RNA, 19 nt, Homo sapiens
  misc_RNA (1)...(19): siRNA sense strand
uaagucagcccucacauua

SEQ ID NO: 407998 - RNA, 19 nt, Homo sapiens
  misc_RNA (1)...(19): siRNA sense strand
gggaaauucuuuagccaua

SEQ ID NO: 407999 - RNA, 19 nt, Homo sapiens
  misc_RNA (1)...(19): siRNA sense strand
ggacaaucacuaugaauuu

SEQ ID NO: 408000 - RNA, 19 nt, Homo sapiens
  misc_RNA (1)...(19): siRNA sense strand
gagaagacauauaggagaa

SEQ ID NO: 408001 - RNA, 19 nt, Homo sapiens
  misc_RNA (1)...(19): siRNA sense strand
agagaaaucuugucaaugu

SEQ ID NO: 408002 - RNA, 19 nt, Homo sapiens
  misc_RNA (1)...(19): siRNA sense strand
ggagaaacccuacgaaugu

SEQ ID NO: 408003 - RNA, 19 nt, Homo sapiens
  misc_RNA (1)...(19): siRNA sense strand
ucagaaaggugauaaagga

SEQ ID NO: 408004 - RNA, 19 nt, Homo sapiens
  misc_RNA (1)...(19): siRNA sense strand
cagaauugguuaucaguaa

SEQ ID NO: 408005 - RNA, 19 nt, Homo sapiens
  misc_RNA (1)...(19): siRNA sense strand
gggagaacuuugugugaua

SEQ ID NO: 408006 - RNA, 19 nt, Homo sapiens
  misc_RNA (1)...(19): siRNA sense strand
gggaaauccuuuagugaaa

SEQ ID NO: 408007 - RNA, 19 nt, Homo sapiens
  misc_RNA (1)...(19): siRNA sense strand
guggaaaccuuaugaaugu

SEQ ID NO: 408008 - RNA, 19 nt, Homo sapiens
  misc_RNA (1)...(19): siRNA sense strand
gagaaacccuaugaaugua

SEQ ID NO: 408009 - RNA, 19 nt, Homo sapiens
  misc_RNA (1)...(19): siRNA sense strand
gaagucagaccucacagua

SEQ ID NO: 408010 - RNA, 19 nt, Homo sapiens
  misc_RNA (1)...(19): siRNA sense strand
gcagaaacccuuugcaugu

SEQ ID NO: 408011 - RNA, 19 nt, Homo sapiens
  misc_RNA (1)...(19): siRNA sense strand
ggaaacaggaggaagaauu

SEQ ID NO: 408012 - RNA, 19 nt, Homo sapiens
  misc_RNA (1)...(19): siRNA sense strand
ggaaauucuuuagccauaa

SEQ ID NO: 408013 - RNA, 19 nt, Homo sapiens
  misc_RNA (1)...(19): siRNA sense strand
caacaucagagaucacaua

SEQ ID NO: 408014 - RNA, 19 nt, Homo sapiens
  misc_RNA (1)...(19): siRNA sense strand
gagaaaucuugucaaugua

SEQ ID NO: 408015 - RNA, 19 nt, Homo sapiens
  misc_RNA (1)...(19): siRNA sense strand
gcacaaaucaucacucaca

SEQ ID NO: 408016 - RNA, 19 nt, Homo sapiens
  misc_RNA (1)...(19): siRNA sense strand
ggaauaauuucaggaggaa

SEQ ID NO: 408017 - RNA, 19 nt, Homo sapiens
  misc_RNA (1)...(19): siRNA sense strand
ggaaaccuuaugaauguua

SEQ ID NO: 408018 - RNA, 19 nt, Homo sapiens
  misc_RNA (1)...(19): siRNA sense strand
gaaacccuaugaauguuau

SEQ ID NO: 408019 - RNA, 19 nt, Homo sapiens
  misc_RNA (1)...(19): siRNA sense strand
caaaucaucacucacagua

SEQ ID NO: 408020 - RNA, 19 nt, Homo sapiens
  misc_RNA (1)...(19): siRNA sense strand
cuacgaaugucaugaaugu

SEQ ID NO: 408021 - RNA, 19 nt, Homo sapiens
  misc_RNA (1)...(19): siRNA sense strand
gaagaauucccaagccaaa

SEQ ID NO: 408022 - RNA, 19 nt, Homo sapiens
  misc_RNA (1)...(19): siRNA sense strand
caagucagccuccauaaug

SEQ ID NO: 408023 - RNA, 19 nt, Homo sapiens
  misc_RNA (1)...(19): siRNA sense strand
guacaucagagaagacaua

SEQ ID NO: 408024 - RNA, 19 nt, Homo sapiens
  misc_RNA (1)...(19): siRNA sense strand
ggagaaacccuaugaaugc

SEQ ID NO: 408025 - RNA, 19 nt, Homo sapiens
  misc_RNA (1)...(19): siRNA sense strand
gaagagagagaacgcagaa

SEQ ID NO: 408026 - RNA, 19 nt, Homo sapiens
  misc_RNA (1)...(19): siRNA sense strand
gcugaaacccuaugaaugu

SEQ ID NO: 408027 - RNA, 19 nt, Homo sapiens
  misc_RNA (1)...(19): siRNA sense strand
gaaacaggaggaagaauuc

SEQ ID NO: 408028 - RNA, 19 nt, Homo sapiens
  misc_RNA (1)...(19): siRNA sense strand
gaaaagcccuaugaaugua

SEQ ID NO: 408029 - RNA, 19 nt, Homo sapiens
  misc_RNA (1)...(19): siRNA sense strand
gaauucacauaggagauaa

SEQ ID NO: 408030 - RNA, 19 nt, Homo sapiens
  misc_RNA (1)...(19): siRNA sense strand
gagagaaacacuuugaaug

SEQ ID NO: 408031 - RNA, 19 nt, Homo sapiens
  misc_RNA (1)...(19): siRNA sense strand
cagaagagaauaacuguga

SEQ ID NO: 408032 - RNA, 19 nt, Homo sapiens
  misc_RNA (1)...(19): siRNA sense strand
caucagagaucacauacag

SEQ ID NO: 408033 - RNA, 19 nt, Homo sapiens
  misc_RNA (1)...(19): siRNA sense strand
gagaugugaugcuggagaa

SEQ ID NO: 408034 - RNA, 19 nt, Homo sapiens
  misc_RNA (1)...(19): siRNA sense strand
gagaacccauacacaagaa

SEQ ID NO: 408035 - RNA, 19 nt, Homo sapiens
  misc_RNA (1)...(19): siRNA sense strand
agucaaaccucacuaaaca

SEQ ID NO: 408036 - RNA, 19 nt, Homo sapiens
  misc_RNA (1)...(19): siRNA sense strand
gaaauucuuuagccauaag

SEQ ID NO: 408037 - RNA, 19 nt, Homo sapiens
  misc_RNA (1)...(19): siRNA sense strand
aaucugaccucacuaaaca

SEQ ID NO: 408038 - RNA, 19 nt, Homo sapiens
  misc_RNA (1)...(19): siRNA sense strand
ggaacacacugagucauca

SEQ ID NO: 408039 - RNA, 19 nt, Homo sapiens
  misc_RNA (1)...(19): siRNA sense strand
ggagaaagcccugaugaca

SEQ ID NO: 408040 - RNA, 19 nt, Homo sapiens
  misc_RNA (1)...(19): siRNA sense strand
gaaacccuaugaauguaau

SEQ ID NO: 408041 - RNA, 19 nt, Homo sapiens
  misc_RNA (1)...(19): siRNA sense strand
ucagagaauucacauagga

SEQ ID NO: 408042 - RNA, 19 nt, Homo sapiens
  misc_RNA (1)...(19): siRNA sense strand
gaaacccuaucaauguaau

SEQ ID NO: 408043 - RNA, 19 nt, Homo sapiens
  misc_RNA (1)...(19): siRNA sense strand
gaagagaauaacugugauu

SEQ ID NO: 408044 - RNA, 19 nt, Homo sapiens
  misc_RNA (1)...(19): siRNA sense strand
gaaguccacccuuucuaaa

SEQ ID NO: 408045 - RNA, 19 nt, Homo sapiens
  misc_RNA (1)...(19): siRNA sense strand
cauaaugccucagaguauu

SEQ ID NO: 408046 - RNA, 19 nt, Homo sapiens
  misc_RNA (1)...(19): siRNA sense strand
gaaugaguuucaacacugu

SEQ ID NO: 408047 - RNA, 19 nt, Homo sapiens
  misc_RNA (1)...(19): siRNA sense strand
ccacaagucagccuccaua

SEQ ID NO: 408048 - RNA, 19 nt, Homo sapiens
  misc_RNA (1)...(19): siRNA sense strand
gaaacccuaugaaugcaau

SEQ ID NO: 408049 - RNA, 19 nt, Homo sapiens
  misc_RNA (1)...(19): siRNA sense strand
gggagaaacccuaugaaug

SEQ ID NO: 408050 - RNA, 19 nt, Homo sapiens
  misc_RNA (1)...(19): siRNA sense strand
gggagaaacccuaugaaug

SEQ ID NO: 408051 - RNA, 19 nt, Homo sapiens
  misc_RNA (1)...(19): siRNA sense strand
gggagaaacccuaucaaug

SEQ ID NO: 408052 - RNA, 19 nt, Homo sapiens
  misc_RNA (1)...(19): siRNA sense strand
ggagaaaccuuuugaaugc

SEQ ID NO: 408053 - RNA, 19 nt, Homo sapiens
  misc_RNA (1)...(19): siRNA sense strand
caagggacaaucacuauga

SEQ ID NO: 408054 - RNA, 19 nt, Homo sapiens
  misc_RNA (1)...(19): siRNA sense strand
caucagauaucuccgucaa

SEQ ID NO: 408055 - RNA, 19 nt, Homo sapiens
  misc_RNA (1)...(19): siRNA sense strand
caucagagaagacauauag

SEQ ID NO: 408056 - RNA, 19 nt, Homo sapiens
  misc_RNA (1)...(19): siRNA sense strand
guacaucagagaacccaua

SEQ ID NO: 408057 - RNA, 19 nt, Homo sapiens
  misc_RNA (1)...(19): siRNA sense strand
gagaagagccauggaaaca

SEQ ID NO: 408058 - RNA, 19 nt, Homo sapiens
  misc_RNA (1)...(19): siRNA sense strand
ggagagaaacacuuugaau

SEQ ID NO: 408059 - RNA, 19 nt, Homo sapiens
  misc_RNA (1)...(19): siRNA sense strand
ggugaaagugggaauaauu

SEQ ID NO: 408060 - RNA, 19 nt, Homo sapiens
  misc_RNA (1)...(19): siRNA sense strand
ggguaucuaugaaacacua

SEQ ID NO: 408061 - RNA, 19 nt, Homo sapiens
  misc_RNA (1)...(19): siRNA sense strand
gggaaaaccuucugcuuga

SEQ ID NO: 408062 - RNA, 19 nt, Homo sapiens
  misc_RNA (1)...(19): siRNA sense strand
gaaaucugaccucacuaaa

SEQ ID NO: 408063 - RNA, 19 nt, Homo sapiens
  misc_RNA (1)...(19): siRNA sense strand
aaagagaggagccaagaaa

SEQ ID NO: 408064 - RNA, 19 nt, Homo sapiens
  misc_RNA (1)...(19): siRNA sense strand
gggagaaacccuacgaaug

SEQ ID NO: 408065 - RNA, 19 nt, Homo sapiens
  misc_RNA (1)...(19): siRNA sense strand
ugagaaaccuuuugaaugu

SEQ ID NO: 408066 - RNA, 19 nt, Homo sapiens
  misc_RNA (1)...(19): siRNA sense strand
gaacaagguagaacagaag

SEQ ID NO: 408067 - RNA, 19 nt, Homo sapiens
  misc_RNA (1)...(19): siRNA sense strand
gugaaagugggaauaauuu

SEQ ID NO: 408068 - RNA, 19 nt, Homo sapiens
  misc_RNA (1)...(19): siRNA sense strand
ggagucaguaucauuuaaa

SEQ ID NO: 408069 - RNA, 19 nt, Homo sapiens
  misc_RNA (1)...(19): siRNA sense strand
caaaucucauuguacauca

SEQ ID NO: 408070 - RNA, 19 nt, Homo sapiens
  misc_RNA (1)...(19): siRNA sense strand
gguggaaaccuuaugaaug

SEQ ID NO: 408071 - RNA, 19 nt, Homo sapiens
  misc_RNA (1)...(19): siRNA sense strand
gaaagagaggagccaagaa

SEQ ID NO: 408072 - RNA, 19 nt, Homo sapiens
  misc_RNA (1)...(19): siRNA sense strand
ggagaaaaccuuaugaaug

SEQ ID NO: 408073 - RNA, 19 nt, Homo sapiens
  misc_RNA (1)...(19): siRNA sense strand
aaucggaacuugcucaaca

SEQ ID NO: 408074 - RNA, 19 nt, Homo sapiens
  misc_RNA (1)...(19): siRNA sense strand
gcaaugaaugugggaaauu

SEQ ID NO: 408075 - RNA, 19 nt, Homo sapiens
  misc_RNA (1)...(19): siRNA sense strand
ggacuuauuuuccaugaga

SEQ ID NO: 408076 - RNA, 19 nt, Homo sapiens
  misc_RNA (1)...(19): siRNA sense strand
uaccagaagucacaacuca

SEQ ID NO: 408077 - RNA, 19 nt, Homo sapiens
  misc_RNA (1)...(19): siRNA sense strand
ucaacccucucucaacauu

SEQ ID NO: 408078 - RNA, 19 nt, Homo sapiens
  misc_RNA (1)...(19): siRNA sense strand
uacaguauaugucaggaaa

SEQ ID NO: 408079 - RNA, 19 nt, Homo sapiens
  misc_RNA (1)...(19): siRNA sense strand
ggagaacuuugugugauag

SEQ ID NO: 408080 - RNA, 19 nt, Homo sapiens
  misc_RNA (1)...(19): siRNA sense strand
agucaaaucucauuguaca

SEQ ID NO: 408081 - RNA, 19 nt, Homo sapiens
  misc_RNA (1)...(19): siRNA sense strand
ucagagaacccauacacaa

SEQ ID NO: 408082 - RNA, 19 nt, Homo sapiens
  misc_RNA (1)...(19): siRNA sense strand
caucagagaauucacauag

SEQ ID NO: 408083 - RNA, 19 nt, Homo sapiens
  misc_RNA (1)...(19): siRNA sense strand
caucagagaauucacauag

SEQ ID NO: 408084 - RNA, 19 nt, Homo sapiens
  misc_RNA (1)...(19): siRNA sense strand
gggacaaucacuaugaauu

SEQ ID NO: 408085 - RNA, 19 nt, Homo sapiens
  misc_RNA (1)...(19): siRNA sense strand
ugaaguccacccuuucuaa

SEQ ID NO: 408086 - RNA, 19 nt, Homo sapiens
  misc_RNA (1)...(19): siRNA sense strand
ggaaaagcccuaugaaugu

SEQ ID NO: 408087 - RNA, 19 nt, Homo sapiens
  misc_RNA (1)...(19): siRNA sense strand
ccaggagucaguaucauuu

SEQ ID NO: 408088 - RNA, 19 nt, Homo sapiens
  misc_RNA (1)...(19): siRNA sense strand
ccauaagucagcucuaauu

SEQ ID NO: 408089 - RNA, 19 nt, Homo sapiens
  misc_RNA (1)...(19): siRNA sense strand
gaaaugagguugaugauga

SEQ ID NO: 408090 - RNA, 19 nt, Homo sapiens
  misc_RNA (1)...(19): siRNA sense strand
gauauuagaugcccucuuu

SEQ ID NO: 408091 - RNA, 19 nt, Homo sapiens
  misc_RNA (1)...(19): siRNA sense strand
ggaccagucuucaguauaa

SEQ ID NO: 408092 - RNA, 19 nt, Homo sapiens
  misc_RNA (1)...(19): siRNA sense strand
ggacaucuaugcuaugaaa

SEQ ID NO: 408093 - RNA, 19 nt, Homo sapiens
  misc_RNA (1)...(19): siRNA sense strand
ggagcagucuuccaaauuu

SEQ ID NO: 408094 - RNA, 19 nt, Homo sapiens
  misc_RNA (1)...(19): siRNA sense strand
gaucaaaaguccucauuua

SEQ ID NO: 408095 - RNA, 19 nt, Homo sapiens
  misc_RNA (1)...(19): siRNA sense strand
gagaagaauucguggguuu

SEQ ID NO: 408096 - RNA, 19 nt, Homo sapiens
  misc_RNA (1)...(19): siRNA sense strand
ucaaugaccuggagaagaa

SEQ ID NO: 408097 - RNA, 19 nt, Homo sapiens
  misc_RNA (1)...(19): siRNA sense strand
ggacaacgcugaacucaac

SEQ ID NO: 408098 - RNA, 19 nt, Homo sapiens
  misc_RNA (1)...(19): siRNA sense strand
gaauuuagucggcgucuua

SEQ ID NO: 408099 - RNA, 19 nt, Homo sapiens
  misc_RNA (1)...(19): siRNA sense strand
cagcagaugucuccucuuu

SEQ ID NO: 408100 - RNA, 19 nt, Homo sapiens
  misc_RNA (1)...(19): siRNA sense strand
gagcagucuuccaaauuua

SEQ ID NO: 408101 - RNA, 19 nt, Homo sapiens
  misc_RNA (1)...(19): siRNA sense strand
ccaaaugucucgaauguca

SEQ ID NO: 408102 - RNA, 19 nt, Homo sapiens
  misc_RNA (1)...(19): siRNA sense strand
ggagugaucucuacgaauc

SEQ ID NO: 408103 - RNA, 19 nt, Homo sapiens
  misc_RNA (1)...(19): siRNA sense strand
ggaagagcaagccaaauua

SEQ ID NO: 408104 - RNA, 19 nt, Homo sapiens
  misc_RNA (1)...(19): siRNA sense strand
gaagaaaugagguugauga

SEQ ID NO: 408105 - RNA, 19 nt, Homo sapiens
  misc_RNA (1)...(19): siRNA sense strand
gaaaugacccgguuacauc

SEQ ID NO: 408106 - RNA, 19 nt, Homo sapiens
  misc_RNA (1)...(19): siRNA sense strand
gaugagaaaucccaguuug

SEQ ID NO: 408107 - RNA, 19 nt, Homo sapiens
  misc_RNA (1)...(19): siRNA sense strand
gaacaacauucguaacucu

SEQ ID NO: 408108 - RNA, 19 nt, Homo sapiens
  misc_RNA (1)...(19): siRNA sense strand
gaagaagaaggcuuuauug

SEQ ID NO: 408109 - RNA, 19 nt, Homo sapiens
  misc_RNA (1)...(19): siRNA sense strand
ugaaagugaugaagaagaa

SEQ ID NO: 408110 - RNA, 19 nt, Homo sapiens
  misc_RNA (1)...(19): siRNA sense strand
agaaagagcagcacuauga

SEQ ID NO: 408111 - RNA, 19 nt, Homo sapiens
  misc_RNA (1)...(19): siRNA sense strand
gaacagaaggcgaugauca

SEQ ID NO: 408112 - RNA, 19 nt, Homo sapiens
  misc_RNA (1)...(19): siRNA sense strand
gaacgagagaugcagcuua

SEQ ID NO: 408113 - RNA, 19 nt, Homo sapiens
  misc_RNA (1)...(19): siRNA sense strand
gaagugaaguggaccaucu

SEQ ID NO: 408114 - RNA, 19 nt, Homo sapiens
  misc_RNA (1)...(19): siRNA sense strand
guaccaggcucaaguggaa

SEQ ID NO: 408115 - RNA, 19 nt, Homo sapiens
  misc_RNA (1)...(19): siRNA sense strand
caacaaaccaaacucauug

SEQ ID NO: 408116 - RNA, 19 nt, Homo sapiens
  misc_RNA (1)...(19): siRNA sense strand
ggaagagcggaacauauua

SEQ ID NO: 408117 - RNA, 19 nt, Homo sapiens
  misc_RNA (1)...(19): siRNA sense strand
gaaacucccugcugaaacu

SEQ ID NO: 408118 - RNA, 19 nt, Homo sapiens
  misc_RNA (1)...(19): siRNA sense strand
ggaugaaggugcccaggaa

SEQ ID NO: 408119 - RNA, 19 nt, Homo sapiens
  misc_RNA (1)...(19): siRNA sense strand
gaacgcaugcaccacaaua

SEQ ID NO: 408120 - RNA, 19 nt, Homo sapiens
  misc_RNA (1)...(19): siRNA sense strand
gaacaugaaggcccaagaa

SEQ ID NO: 408121 - RNA, 19 nt, Homo sapiens
  misc_RNA (1)...(19): siRNA sense strand
gugaagaacugccguuugu

SEQ ID NO: 408122 - RNA, 19 nt, Homo sapiens
  misc_RNA (1)...(19): siRNA sense strand
caaacaagauggugaaugc

SEQ ID NO: 408123 - RNA, 19 nt, Homo sapiens
  misc_RNA (1)...(19): siRNA sense strand
agaaagaccuggcugacaa

SEQ ID NO: 408124 - RNA, 19 nt, Homo sapiens
  misc_RNA (1)...(19): siRNA sense strand
uuacauggcuccugaagug

SEQ ID NO: 408125 - RNA, 19 nt, Homo sapiens
  misc_RNA (1)...(19): siRNA sense strand
gaaguauuccgacaccaua

SEQ ID NO: 408126 - RNA, 19 nt, Homo sapiens
  misc_RNA (1)...(19): siRNA sense strand
gccagaaccuucaauaaca

SEQ ID NO: 408127 - RNA, 19 nt, Homo sapiens
  misc_RNA (1)...(19): siRNA sense strand
gaagugcaccugaaacaga

SEQ ID NO: 408128 - RNA, 19 nt, Homo sapiens
  misc_RNA (1)...(19): siRNA sense strand
caaagcagaugucccauac

SEQ ID NO: 408129 - RNA, 19 nt, Homo sapiens
  misc_RNA (1)...(19): siRNA sense strand
ggaacugucugaagccaau

SEQ ID NO: 408130 - RNA, 19 nt, Homo sapiens
  misc_RNA (1)...(19): siRNA sense strand
ggaaggugaugaccgucua

SEQ ID NO: 408131 - RNA, 19 nt, Homo sapiens
  misc_RNA (1)...(19): siRNA sense strand
ggaaggcacuauuucucaa

SEQ ID NO: 408132 - RNA, 19 nt, Homo sapiens
  misc_RNA (1)...(19): siRNA sense strand
acaucaagcugguggauuu

SEQ ID NO: 408133 - RNA, 19 nt, Homo sapiens
  misc_RNA (1)...(19): siRNA sense strand
gaacgagagcucaaacaga

SEQ ID NO: 408134 - RNA, 19 nt, Homo sapiens
  misc_RNA (1)...(19): siRNA sense strand
gcaagaagacggagugauc

SEQ ID NO: 408135 - RNA, 19 nt, Homo sapiens
  misc_RNA (1)...(19): siRNA sense strand
caucaagccugagaacauu

SEQ ID NO: 408136 - RNA, 19 nt, Homo sapiens
  misc_RNA (1)...(19): siRNA sense strand
ccuaugagaugauuuaugg

SEQ ID NO: 408137 - RNA, 19 nt, Homo sapiens
  misc_RNA (1)...(19): siRNA sense strand
guauccacuucaccaauua

SEQ ID NO: 408138 - RNA, 19 nt, Homo sapiens
  misc_RNA (1)...(19): siRNA sense strand
gaagagcggaacauauuau

SEQ ID NO: 408139 - RNA, 19 nt, Homo sapiens
  misc_RNA (1)...(19): siRNA sense strand
gcacagacgaucucaagug

SEQ ID NO: 408140 - RNA, 19 nt, Homo sapiens
  misc_RNA (1)...(19): siRNA sense strand
gaguguucguggauucuua

SEQ ID NO: 408141 - RNA, 19 nt, Homo sapiens
  misc_RNA (1)...(19): siRNA sense strand
ucagagcccugcagcugua

SEQ ID NO: 408142 - RNA, 19 nt, Homo sapiens
  misc_RNA (1)...(19): siRNA sense strand
aggaacaggucauggauuu

SEQ ID NO: 408143 - RNA, 19 nt, Homo sapiens
  misc_RNA (1)...(19): siRNA sense strand
gaacucaggcaacagaaau

SEQ ID NO: 408144 - RNA, 19 nt, Homo sapiens
  misc_RNA (1)...(19): siRNA sense strand
gccggaagcuccaagaaau

SEQ ID NO: 408145 - RNA, 19 nt, Homo sapiens
  misc_RNA (1)...(19): siRNA sense strand
aaagagagacugaaguuug

SEQ ID NO: 408146 - RNA, 19 nt, Homo sapiens
  misc_RNA (1)...(19): siRNA sense strand
ccucauaccaggauaaauu

SEQ ID NO: 408147 - RNA, 19 nt, Homo sapiens
  misc_RNA (1)...(19): siRNA sense strand
ccacgaauuuggaguguuc

SEQ ID NO: 408148 - RNA, 19 nt, Homo sapiens
  misc_RNA (1)...(19): siRNA sense strand
gaugaucaaugcuauggau

SEQ ID NO: 408149 - RNA, 19 nt, Homo sapiens
  misc_RNA (1)...(19): siRNA sense strand
gagcagcacuaugaggaaa

SEQ ID NO: 408150 - RNA, 19 nt, Homo sapiens
  misc_RNA (1)...(19): siRNA sense strand
aagacuagcuccauggaaa

SEQ ID NO: 408151 - RNA, 19 nt, Homo sapiens
  misc_RNA (1)...(19): siRNA sense strand
aagagagacugaaguuuga

SEQ ID NO: 408152 - RNA, 19 nt, Homo sapiens
  misc_RNA (1)...(19): siRNA sense strand
gggaaaccacccuuuauga

SEQ ID NO: 408153 - RNA, 19 nt, Homo sapiens
  misc_RNA (1)...(19): siRNA sense strand
caauauuccucaccgauuc

SEQ ID NO: 408154 - RNA, 19 nt, Homo sapiens
  misc_RNA (1)...(19): siRNA sense strand
ucaaagagcagaagcugaa

SEQ ID NO: 408155 - RNA, 19 nt, Homo sapiens
  misc_RNA (1)...(19): siRNA sense strand
gaaagagagacugaaguuu

SEQ ID NO: 408156 - RNA, 19 nt, Homo sapiens
  misc_RNA (1)...(19): siRNA sense strand
gauaugaggaccaguuaga

SEQ ID NO: 408157 - RNA, 19 nt, Homo sapiens
  misc_RNA (1)...(19): siRNA sense strand
cggcuugccugcugaauau

SEQ ID NO: 408158 - RNA, 19 nt, Homo sapiens
  misc_RNA (1)...(19): siRNA sense strand
gcaccaugcuggaggaaca

SEQ ID NO: 408159 - RNA, 19 nt, Homo sapiens
  misc_RNA (1)...(19): siRNA sense strand
cugaggagcucgaagagaa

SEQ ID NO: 408160 - RNA, 19 nt, Homo sapiens
  misc_RNA (1)...(19): siRNA sense strand
gcagugacuuucuugaucu

SEQ ID NO: 408161 - RNA, 19 nt, Homo sapiens
  misc_RNA (1)...(19): siRNA sense strand
ugaagaagaaggcuuuauu

SEQ ID NO: 408162 - RNA, 19 nt, Homo sapiens
  misc_RNA (1)...(19): siRNA sense strand
caacucacucgaaguaauu

SEQ ID NO: 408163 - RNA, 19 nt, Homo sapiens
  misc_RNA (1)...(19): siRNA sense strand
ggagaagcuacucaugaua

SEQ ID NO: 408164 - RNA, 19 nt, Homo sapiens
  misc_RNA (1)...(19): siRNA sense strand
ggucaccgccuuagaauca

SEQ ID NO: 408165 - RNA, 19 nt, Homo sapiens
  misc_RNA (1)...(19): siRNA sense strand
cuaugaaagugaugaagaa

SEQ ID NO: 408166 - RNA, 19 nt, Homo sapiens
  misc_RNA (1)...(19): siRNA sense strand
gaggaguacuugcuguguu

SEQ ID NO: 408167 - RNA, 19 nt, Homo sapiens
  misc_RNA (1)...(19): siRNA sense strand
cgacaucucacccaacauu

SEQ ID NO: 408168 - RNA, 19 nt, Homo sapiens
  misc_RNA (1)...(19): siRNA sense strand
ggagaacccucuacuugcu

SEQ ID NO: 408169 - RNA, 19 nt, Homo sapiens
  misc_RNA (1)...(19): siRNA sense strand
ggauguaucuauucauggu

SEQ ID NO: 408170 - RNA, 19 nt, Homo sapiens
  misc_RNA (1)...(19): siRNA sense strand
gagaugauuucugaacuca

SEQ ID NO: 408171 - RNA, 19 nt, Homo sapiens
  misc_RNA (1)...(19): siRNA sense strand
cuacgaaucugagcugaga

SEQ ID NO: 408172 - RNA, 19 nt, Homo sapiens
  misc_RNA (1)...(19): siRNA sense strand
agaaggagguggagcugaa

SEQ ID NO: 408173 - RNA, 19 nt, Homo sapiens
  misc_RNA (1)...(19): siRNA sense strand
gcagaugucuccucuuucc

SEQ ID NO: 408174 - RNA, 19 nt, Homo sapiens
  misc_RNA (1)...(19): siRNA sense strand
cggaacauauuaucucgaa

SEQ ID NO: 408175 - RNA, 19 nt, Homo sapiens
  misc_RNA (1)...(19): siRNA sense strand
gaagucagaagucuuguag

SEQ ID NO: 408176 - RNA, 19 nt, Homo sapiens
  misc_RNA (1)...(19): siRNA sense strand
gaugaaauccagcgcaaau

SEQ ID NO: 408177 - RNA, 19 nt, Homo sapiens
  misc_RNA (1)...(19): siRNA sense strand
ccaauuacaguaugccuuu

SEQ ID NO: 408178 - RNA, 19 nt, Homo sapiens
  misc_RNA (1)...(19): siRNA sense strand
guucacagcguucaucuga

SEQ ID NO: 408179 - RNA, 19 nt, Homo sapiens
  misc_RNA (1)...(19): siRNA sense strand
gaaggaguccggcacugaa

SEQ ID NO: 408180 - RNA, 19 nt, Homo sapiens
  misc_RNA (1)...(19): siRNA sense strand
caauuacaguauccucauu

SEQ ID NO: 408181 - RNA, 19 nt, Homo sapiens
  misc_RNA (1)...(19): siRNA sense strand
gcgcaaauuugaugcucuu

SEQ ID NO: 408182 - RNA, 19 nt, Homo sapiens
  misc_RNA (1)...(19): siRNA sense strand
ggaagagaccacagcagaa

SEQ ID NO: 408183 - RNA, 19 nt, Homo sapiens
  misc_RNA (1)...(19): siRNA sense strand
gaugacaccuccaauuuug

SEQ ID NO: 408184 - RNA, 19 nt, Homo sapiens
  misc_RNA (1)...(19): siRNA sense strand
ggucuuugcugccauccuu

SEQ ID NO: 408185 - RNA, 19 nt, Homo sapiens
  misc_RNA (1)...(19): siRNA sense strand
agcagaagcuggagacuga

SEQ ID NO: 408186 - RNA, 19 nt, Homo sapiens
  misc_RNA (1)...(19): siRNA sense strand
aaaucgacaugaagcagua

SEQ ID NO: 408187 - RNA, 19 nt, Homo sapiens
  misc_RNA (1)...(19): siRNA sense strand
gagaagcuacucaugauag

SEQ ID NO: 408188 - RNA, 19 nt, Homo sapiens
  misc_RNA (1)...(19): siRNA sense strand
caaaccaaacucauugauu

SEQ ID NO: 408189 - RNA, 19 nt, Homo sapiens
  misc_RNA (1)...(19): siRNA sense strand
gaagaaggaucccuguuug

SEQ ID NO: 408190 - RNA, 19 nt, Homo sapiens
  misc_RNA (1)...(19): siRNA sense strand
gcaagaagccgguagucua

SEQ ID NO: 408191 - RNA, 19 nt, Homo sapiens
  misc_RNA (1)...(19): siRNA sense strand
cgaagaaggaucccuguuu

SEQ ID NO: 408192 - RNA, 19 nt, Homo sapiens
  misc_RNA (1)...(19): siRNA sense strand
ggagguggaagacgaagaa

SEQ ID NO: 408193 - RNA, 19 nt, Homo sapiens
  misc_RNA (1)...(19): siRNA sense strand
gcagaucucccuccaguac

SEQ ID NO: 408194 - RNA, 19 nt, Homo sapiens
  misc_RNA (1)...(19): siRNA sense strand
gguggaagacgaagaagga

SEQ ID NO: 408195 - RNA, 19 nt, Homo sapiens
  misc_RNA (1)...(19): siRNA sense strand
gccacgugcuccaggauug

SEQ ID NO: 408196 - RNA, 19 nt, Homo sapiens
  misc_RNA (1)...(19): siRNA sense strand
uccaguaccucaagaacga

SEQ ID NO: 408197 - RNA, 19 nt, Homo sapiens
  misc_RNA (1)...(19): siRNA sense strand
gauggaaugcccuccuguu

SEQ ID NO: 408198 - RNA, 19 nt, Homo sapiens
  misc_RNA (1)...(19): siRNA sense strand
aacgacacguggaggcaua

SEQ ID NO: 408199 - RNA, 19 nt, Homo sapiens
  misc_RNA (1)...(19): siRNA sense strand
ucgacuggaucaacgagaa

SEQ ID NO: 408200 - RNA, 19 nt, Homo sapiens
  misc_RNA (1)...(19): siRNA sense strand
caucaagcuugcagagcau

SEQ ID NO: 408201 - RNA, 19 nt, Homo sapiens
  misc_RNA (1)...(19): siRNA sense strand
uguccucgcugcgcucuug

SEQ ID NO: 408202 - RNA, 19 nt, Homo sapiens
  misc_RNA (1)...(19): siRNA sense strand
cgacuggaucaacgagaaa

SEQ ID NO: 408203 - RNA, 19 nt, Homo sapiens
  misc_RNA (1)...(19): siRNA sense strand
agaaggaucccuguuugug

SEQ ID NO: 408204 - RNA, 19 nt, Homo sapiens
  misc_RNA (1)...(19): siRNA sense strand
gcccuccuguugcgcaaug

SEQ ID NO: 408205 - RNA, 19 nt, Homo sapiens
  misc_RNA (1)...(19): siRNA sense strand
ccgccuacaucgacuggau

SEQ ID NO: 408206 - RNA, 19 nt, Homo sapiens
  misc_RNA (1)...(19): siRNA sense strand
gcacacagucagucuacau

SEQ ID NO: 408207 - RNA, 19 nt, Homo sapiens
  misc_RNA (1)...(19): siRNA sense strand
ccaugaagaagcugaguga

SEQ ID NO: 408208 - RNA, 19 nt, Homo sapiens
  misc_RNA (1)...(19): siRNA sense strand
cgacgacugugagcugugu

SEQ ID NO: 408209 - RNA, 19 nt, Homo sapiens
  misc_RNA (1)...(19): siRNA sense strand
ugaggaccaucgcuaacga

SEQ ID NO: 408210 - RNA, 19 nt, Homo sapiens
  misc_RNA (1)...(19): siRNA sense strand
gagcacacagucagucuac

SEQ ID NO: 408211 - RNA, 19 nt, Homo sapiens
  misc_RNA (1)...(19): siRNA sense strand
acugugagcugugugugaa

SEQ ID NO: 408212 - RNA, 19 nt, Homo sapiens
  misc_RNA (1)...(19): siRNA sense strand
ucaagacccugaggaccau

SEQ ID NO: 408213 - RNA, 19 nt, Homo sapiens
  misc_RNA (1)...(19): siRNA sense strand
gugugaacguugcguguac

SEQ ID NO: 408214 - RNA, 19 nt, Homo sapiens
  misc_RNA (1)...(19): siRNA sense strand
gccaagaccucaacaauca

SEQ ID NO: 408215 - RNA, 19 nt, Homo sapiens
  misc_RNA (1)...(19): siRNA sense strand
acaggacccucaacaaaua

SEQ ID NO: 408216 - RNA, 19 nt, Homo sapiens
  misc_RNA (1)...(19): siRNA sense strand
ggaaccagauucagauuac

SEQ ID NO: 408217 - RNA, 19 nt, Homo sapiens
  misc_RNA (1)...(19): siRNA sense strand
gaacacaggacccucaaca

SEQ ID NO: 408218 - RNA, 19 nt, Homo sapiens
  misc_RNA (1)...(19): siRNA sense strand
auucagagcugucccagaa

SEQ ID NO: 408219 - RNA, 19 nt, Homo sapiens
  misc_RNA (1)...(19): siRNA sense strand
acacaggacccucaacaaa

SEQ ID NO: 408220 - RNA, 19 nt, Homo sapiens
  misc_RNA (1)...(19): siRNA sense strand
ccaccuguaucauccacua

SEQ ID NO: 408221 - RNA, 19 nt, Homo sapiens
  misc_RNA (1)...(19): siRNA sense strand
gugcagaccaccacagauu

SEQ ID NO: 408222 - RNA, 19 nt, Homo sapiens
  misc_RNA (1)...(19): siRNA sense strand
ggaggaaccagauucagau

SEQ ID NO: 408223 - RNA, 19 nt, Homo sapiens
  misc_RNA (1)...(19): siRNA sense strand
ucaaugacaccugcaagua

SEQ ID NO: 408224 - RNA, 19 nt, Homo sapiens
  misc_RNA (1)...(19): siRNA sense strand
gauguggccucugcaggaa

SEQ ID NO: 408225 - RNA, 19 nt, Homo sapiens
  misc_RNA (1)...(19): siRNA sense strand
caaugacaccugcaaguau

SEQ ID NO: 408226 - RNA, 19 nt, Homo sapiens
  misc_RNA (1)...(19): siRNA sense strand
gagcugcacuacgcaaauc

SEQ ID NO: 408227 - RNA, 19 nt, Homo sapiens
  misc_RNA (1)...(19): siRNA sense strand
gaaccagauucagauuaca

SEQ ID NO: 408228 - RNA, 19 nt, Homo sapiens
  misc_RNA (1)...(19): siRNA sense strand
ccuggaggauguuucagaa

SEQ ID NO: 408229 - RNA, 19 nt, Homo sapiens
  misc_RNA (1)...(19): siRNA sense strand
ggaggaggaaccagauuca

SEQ ID NO: 408230 - RNA, 19 nt, Homo sapiens
  misc_RNA (1)...(19): siRNA sense strand
caacaaucacaacugcauu

SEQ ID NO: 408231 - RNA, 19 nt, Homo sapiens
  misc_RNA (1)...(19): siRNA sense strand
aaucacaacugcauuucca

SEQ ID NO: 408232 - RNA, 19 nt, Homo sapiens
  misc_RNA (1)...(19): siRNA sense strand
aaacugaggagguggugaa

SEQ ID NO: 408233 - RNA, 19 nt, Homo sapiens
  misc_RNA (1)...(19): siRNA sense strand
uuuccuaugugacaagauu

SEQ ID NO: 408234 - RNA, 19 nt, Homo sapiens
  misc_RNA (1)...(19): siRNA sense strand
cacaggacccucaacaaau

SEQ ID NO: 408235 - RNA, 19 nt, Homo sapiens
  misc_RNA (1)...(19): siRNA sense strand
ccaaagggucagcaggaaa

SEQ ID NO: 408236 - RNA, 19 nt, Homo sapiens
  misc_RNA (1)...(19): siRNA sense strand
gaggaaccagauucagauu

SEQ ID NO: 408237 - RNA, 19 nt, Homo sapiens
  misc_RNA (1)...(19): siRNA sense strand
gggagguggagguggaaua

SEQ ID NO: 408238 - RNA, 19 nt, Homo sapiens
  misc_RNA (1)...(19): siRNA sense strand
ggccaagaccucaacaauc

SEQ ID NO: 408239 - RNA, 19 nt, Homo sapiens
  misc_RNA (1)...(19): siRNA sense strand
aaugacaccugcaaguauc

SEQ ID NO: 408240 - RNA, 19 nt, Homo sapiens
  misc_RNA (1)...(19): siRNA sense strand
cauuguugcugcuucuguu

SEQ ID NO: 408241 - RNA, 19 nt, Homo sapiens
  misc_RNA (1)...(19): siRNA sense strand
ccucggugguguuugauuc

SEQ ID NO: 408242 - RNA, 19 nt, Homo sapiens
  misc_RNA (1)...(19): siRNA sense strand
gauuacagugugauaagga

SEQ ID NO: 408243 - RNA, 19 nt, Homo sapiens
  misc_RNA (1)...(19): siRNA sense strand
cagugacccuggagaaucu

SEQ ID NO: 408244 - RNA, 19 nt, Homo sapiens
  misc_RNA (1)...(19): siRNA sense strand
gcagugucccuaugagaag

SEQ ID NO: 408245 - RNA, 19 nt, Homo sapiens
  misc_RNA (1)...(19): siRNA sense strand
gcauccaggaggaaacuga

SEQ ID NO: 408246 - RNA, 19 nt, Homo sapiens
  misc_RNA (1)...(19): siRNA sense strand
ucagauuacagugugauaa

SEQ ID NO: 408247 - RNA, 19 nt, Homo sapiens
  misc_RNA (1)...(19): siRNA sense strand
cugcuagccuggaggaugu

SEQ ID NO: 408248 - RNA, 19 nt, Homo sapiens
  misc_RNA (1)...(19): siRNA sense strand
gggaggaggaaccagauuc

SEQ ID NO: 408249 - RNA, 19 nt, Homo sapiens
  misc_RNA (1)...(19): siRNA sense strand
gauucagauuacaguguga

SEQ ID NO: 408250 - RNA, 19 nt, Homo sapiens
  misc_RNA (1)...(19): siRNA sense strand
aacaaucacaacugcauuu

SEQ ID NO: 408251 - RNA, 19 nt, Homo sapiens
  misc_RNA (1)...(19): siRNA sense strand
cugaggagguggugaacuc

SEQ ID NO: 408252 - RNA, 19 nt, Homo sapiens
  misc_RNA (1)...(19): siRNA sense strand
gcagaccaccacagauuuu

SEQ ID NO: 408253 - RNA, 19 nt, Homo sapiens
  misc_RNA (1)...(19): siRNA sense strand
aggaaccagauucagauua

SEQ ID NO: 408254 - RNA, 19 nt, Homo sapiens
  misc_RNA (1)...(19): siRNA sense strand
cggugguguuugauucuaa

SEQ ID NO: 408255 - RNA, 19 nt, Homo sapiens
  misc_RNA (1)...(19): siRNA sense strand
caaagggucagcaggaaaa

SEQ ID NO: 408256 - RNA, 19 nt, Homo sapiens
  misc_RNA (1)...(19): siRNA sense strand
cagauuacagugugauaag

SEQ ID NO: 408257 - RNA, 19 nt, Homo sapiens
  misc_RNA (1)...(19): siRNA sense strand
uaucauccacuacccuguu

SEQ ID NO: 408258 - RNA, 19 nt, Homo sapiens
  misc_RNA (1)...(19): siRNA sense strand
caagaccucaacaaucaca

SEQ ID NO: 408259 - RNA, 19 nt, Homo sapiens
  misc_RNA (1)...(19): siRNA sense strand
cggccaagaccucaacaau

SEQ ID NO: 408260 - RNA, 19 nt, Homo sapiens
  misc_RNA (1)...(19): siRNA sense strand
cagauucagauuacagugu

SEQ ID NO: 408261 - RNA, 19 nt, Homo sapiens
  misc_RNA (1)...(19): siRNA sense strand
ggagguggagguggaauac

SEQ ID NO: 408262 - RNA, 19 nt, Homo sapiens
  misc_RNA (1)...(19): siRNA sense strand
gaaaagccagcaccaccaa

SEQ ID NO: 408263 - RNA, 19 nt, Homo sapiens
  misc_RNA (1)...(19): siRNA sense strand
ucaacaaucacaacugcau

SEQ ID NO: 408264 - RNA, 19 nt, Homo sapiens
  misc_RNA (1)...(19): siRNA sense strand
gccaagaccucaacaauca

SEQ ID NO: 408265 - RNA, 19 nt, Homo sapiens
  misc_RNA (1)...(19): siRNA sense strand
acaggacccucaacaaaua

SEQ ID NO: 408266 - RNA, 19 nt, Homo sapiens
  misc_RNA (1)...(19): siRNA sense strand
ggaaccagauucagauuac

SEQ ID NO: 408267 - RNA, 19 nt, Homo sapiens
  misc_RNA (1)...(19): siRNA sense strand
gaacacaggacccucaaca

SEQ ID NO: 408268 - RNA, 19 nt, Homo sapiens
  misc_RNA (1)...(19): siRNA sense strand
auucagagcugucccagaa

SEQ ID NO: 408269 - RNA, 19 nt, Homo sapiens
  misc_RNA (1)...(19): siRNA sense strand
acacaggacccucaacaaa

SEQ ID NO: 408270 - RNA, 19 nt, Homo sapiens
  misc_RNA (1)...(19): siRNA sense strand
ccaccuguaucauccacua

SEQ ID NO: 408271 - RNA, 19 nt, Homo sapiens
  misc_RNA (1)...(19): siRNA sense strand
gugcagaccaccacagauu

SEQ ID NO: 408272 - RNA, 19 nt, Homo sapiens
  misc_RNA (1)...(19): siRNA sense strand
ggaggaaccagauucagau

SEQ ID NO: 408273 - RNA, 19 nt, Homo sapiens
  misc_RNA (1)...(19): siRNA sense strand
ucaaugacaccugcaagua

SEQ ID NO: 408274 - RNA, 19 nt, Homo sapiens
  misc_RNA (1)...(19): siRNA sense strand
gauguggccucugcaggaa

SEQ ID NO: 408275 - RNA, 19 nt, Homo sapiens
  misc_RNA (1)...(19): siRNA sense strand
caaugacaccugcaaguau

SEQ ID NO: 408276 - RNA, 19 nt, Homo sapiens
  misc_RNA (1)...(19): siRNA sense strand
gagcugcacuacgcaaauc

SEQ ID NO: 408277 - RNA, 19 nt, Homo sapiens
  misc_RNA (1)...(19): siRNA sense strand
gaaccagauucagauuaca

SEQ ID NO: 408278 - RNA, 19 nt, Homo sapiens
  misc_RNA (1)...(19): siRNA sense strand
ccuggaggauguuucagaa

SEQ ID NO: 408279 - RNA, 19 nt, Homo sapiens
  misc_RNA (1)...(19): siRNA sense strand
ggaggaggaaccagauuca

SEQ ID NO: 408280 - RNA, 19 nt, Homo sapiens
  misc_RNA (1)...(19): siRNA sense strand
caacaaucacaacugcauu

SEQ ID NO: 408281 - RNA, 19 nt, Homo sapiens
  misc_RNA (1)...(19): siRNA sense strand
aaucacaacugcauuucca

SEQ ID NO: 408282 - RNA, 19 nt, Homo sapiens
  misc_RNA (1)...(19): siRNA sense strand
aaacugaggagguggugaa

SEQ ID NO: 408283 - RNA, 19 nt, Homo sapiens
  misc_RNA (1)...(19): siRNA sense strand
uuuccuaugugacaagauu

SEQ ID NO: 408284 - RNA, 19 nt, Homo sapiens
  misc_RNA (1)...(19): siRNA sense strand
cacaggacccucaacaaau

SEQ ID NO: 408285 - RNA, 19 nt, Homo sapiens
  misc_RNA (1)...(19): siRNA sense strand
ccaaagggucagcaggaaa

SEQ ID NO: 408286 - RNA, 19 nt, Homo sapiens
  misc_RNA (1)...(19): siRNA sense strand
gaggaaccagauucagauu

SEQ ID NO: 408287 - RNA, 19 nt, Homo sapiens
  misc_RNA (1)...(19): siRNA sense strand
gggagguggagguggaaua

SEQ ID NO: 408288 - RNA, 19 nt, Homo sapiens
  misc_RNA (1)...(19): siRNA sense strand
ggccaagaccucaacaauc

SEQ ID NO: 408289 - RNA, 19 nt, Homo sapiens
  misc_RNA (1)...(19): siRNA sense strand
aaugacaccugcaaguauc

SEQ ID NO: 408290 - RNA, 19 nt, Homo sapiens
  misc_RNA (1)...(19): siRNA sense strand
cauuguugcugcuucuguu

SEQ ID NO: 408291 - RNA, 19 nt, Homo sapiens
  misc_RNA (1)...(19): siRNA sense strand
ccucggugguguuugauuc

SEQ ID NO: 408292 - RNA, 19 nt, Homo sapiens
  misc_RNA (1)...(19): siRNA sense strand
gauuacagugugauaagga

SEQ ID NO: 408293 - RNA, 19 nt, Homo sapiens
  misc_RNA (1)...(19): siRNA sense strand
cagugacccuggagaaucu

SEQ ID NO: 408294 - RNA, 19 nt, Homo sapiens
  misc_RNA (1)...(19): siRNA sense strand
gcagugucccuaugagaag

SEQ ID NO: 408295 - RNA, 19 nt, Homo sapiens
  misc_RNA (1)...(19): siRNA sense strand
gcauccaggaggaaacuga

SEQ ID NO: 408296 - RNA, 19 nt, Homo sapiens
  misc_RNA (1)...(19): siRNA sense strand
ucagauuacagugugauaa

SEQ ID NO: 408297 - RNA, 19 nt, Homo sapiens
  misc_RNA (1)...(19): siRNA sense strand
cugcuagccuggaggaugu

SEQ ID NO: 408298 - RNA, 19 nt, Homo sapiens
  misc_RNA (1)...(19): siRNA sense strand
gggaggaggaaccagauuc

SEQ ID NO: 408299 - RNA, 19 nt, Homo sapiens
  misc_RNA (1)...(19): siRNA sense strand
gauucagauuacaguguga

SEQ ID NO: 408300 - RNA, 19 nt, Homo sapiens
  misc_RNA (1)...(19): siRNA sense strand
aacaaucacaacugcauuu

SEQ ID NO: 408301 - RNA, 19 nt, Homo sapiens
  misc_RNA (1)...(19): siRNA sense strand
cugaggagguggugaacuc

SEQ ID NO: 408302 - RNA, 19 nt, Homo sapiens
  misc_RNA (1)...(19): siRNA sense strand
gcagaccaccacagauuuu

SEQ ID NO: 408303 - RNA, 19 nt, Homo sapiens
  misc_RNA (1)...(19): siRNA sense strand
aggaaccagauucagauua

SEQ ID NO: 408304 - RNA, 19 nt, Homo sapiens
  misc_RNA (1)...(19): siRNA sense strand
cggugguguuugauucuaa

SEQ ID NO: 408305 - RNA, 19 nt, Homo sapiens
  misc_RNA (1)...(19): siRNA sense strand
caaagggucagcaggaaaa

SEQ ID NO: 408306 - RNA, 19 nt, Homo sapiens
  misc_RNA (1)...(19): siRNA sense strand
cagauuacagugugauaag

SEQ ID NO: 408307 - RNA, 19 nt, Homo sapiens
  misc_RNA (1)...(19): siRNA sense strand
uaucauccacuacccuguu

SEQ ID NO: 408308 - RNA, 19 nt, Homo sapiens
  misc_RNA (1)...(19): siRNA sense strand
caagaccucaacaaucaca

SEQ ID NO: 408309 - RNA, 19 nt, Homo sapiens
  misc_RNA (1)...(19): siRNA sense strand
cggccaagaccucaacaau

SEQ ID NO: 408310 - RNA, 19 nt, Homo sapiens
  misc_RNA (1)...(19): siRNA sense strand
cagauucagauuacagugu

SEQ ID NO: 408311 - RNA, 19 nt, Homo sapiens
  misc_RNA (1)...(19): siRNA sense strand
ggagguggagguggaauac

SEQ ID NO: 408312 - RNA, 19 nt, Homo sapiens
  misc_RNA (1)...(19): siRNA sense strand
gaaaagccagcaccaccaa

SEQ ID NO: 408313 - RNA, 19 nt, Homo sapiens
  misc_RNA (1)...(19): siRNA sense strand
ucaacaaucacaacugcau

SEQ ID NO: 408314 - RNA, 19 nt, Homo sapiens
  misc_RNA (1)...(19): siRNA sense strand
gggcccagcuacaaagaaa

SEQ ID NO: 408315 - RNA, 19 nt, Homo sapiens
  misc_RNA (1)...(19): siRNA sense strand
uagcauccuucucgucuuu

SEQ ID NO: 408316 - RNA, 19 nt, Homo sapiens
  misc_RNA (1)...(19): siRNA sense strand
ggacaucccgguacuuugg

SEQ ID NO: 408317 - RNA, 19 nt, Homo sapiens
  misc_RNA (1)...(19): siRNA sense strand
cuucagaggucacuguaug

SEQ ID NO: 408318 - RNA, 19 nt, Homo sapiens
  misc_RNA (1)...(19): siRNA sense strand
ccaaaggcccuguguugug

SEQ ID NO: 408319 - RNA, 19 nt, Homo sapiens
  misc_RNA (1)...(19): siRNA sense strand
ugacuaugcugagcucaug

SEQ ID NO: 408320 - RNA, 19 nt, Homo sapiens
  misc_RNA (1)...(19): siRNA sense strand
ccucauggcagcugaaaga

SEQ ID NO: 408321 - RNA, 19 nt, Homo sapiens
  misc_RNA (1)...(19): siRNA sense strand
cugcugcccucgccucuuu

SEQ ID NO: 408322 - RNA, 19 nt, Homo sapiens
  misc_RNA (1)...(19): siRNA sense strand
gcauccuucucgucuuuga

SEQ ID NO: 408323 - RNA, 19 nt, Homo sapiens
  misc_RNA (1)...(19): siRNA sense strand
guguggagcugcugacagu

SEQ ID NO: 408324 - RNA, 19 nt, Homo sapiens
  misc_RNA (1)...(19): siRNA sense strand
gcuccugcuucuauuuguu

SEQ ID NO: 408325 - RNA, 19 nt, Homo sapiens
  misc_RNA (1)...(19): siRNA sense strand
gcauggacaucccgguacu

SEQ ID NO: 408326 - RNA, 19 nt, Homo sapiens
  misc_RNA (1)...(19): siRNA sense strand
ucacgggcuugaucagcaa

SEQ ID NO: 408327 - RNA, 19 nt, Homo sapiens
  misc_RNA (1)...(19): siRNA sense strand
ucuccuggcuccucaucuu

SEQ ID NO: 408328 - RNA, 19 nt, Homo sapiens
  misc_RNA (1)...(19): siRNA sense strand
gaccgucuccuccuugcuu

SEQ ID NO: 408329 - RNA, 19 nt, Homo sapiens
  misc_RNA (1)...(19): siRNA sense strand
gcucaugggccucaaacag

SEQ ID NO: 408330 - RNA, 19 nt, Homo sapiens
  misc_RNA (1)...(19): siRNA sense strand
gcaccggaguggaguucgu

SEQ ID NO: 408331 - RNA, 19 nt, Homo sapiens
  misc_RNA (1)...(19): siRNA sense strand
guggaguucgugcgcuuua

SEQ ID NO: 408332 - RNA, 19 nt, Homo sapiens
  misc_RNA (1)...(19): siRNA sense strand
gggcuccugcuucuauuug

SEQ ID NO: 408333 - RNA, 19 nt, Homo sapiens
  misc_RNA (1)...(19): siRNA sense strand
ccuccuugcuuuccuccuu

SEQ ID NO: 408334 - RNA, 19 nt, Homo sapiens
  misc_RNA (1)...(19): siRNA sense strand
cuccuugcuuuccuccuua

SEQ ID NO: 408335 - RNA, 19 nt, Homo sapiens
  misc_RNA (1)...(19): siRNA sense strand
acccaaaggcccuguguug

SEQ ID NO: 408336 - RNA, 19 nt, Homo sapiens
  misc_RNA (1)...(19): siRNA sense strand
ccucaucuuuagcauccuu

SEQ ID NO: 408337 - RNA, 19 nt, Homo sapiens
  misc_RNA (1)...(19): siRNA sense strand
ccucaaacagguauacuac

SEQ ID NO: 408338 - RNA, 19 nt, Homo sapiens
  misc_RNA (1)...(19): siRNA sense strand
gaaagagugaaggcaugga

SEQ ID NO: 408339 - RNA, 19 nt, Homo sapiens
  misc_RNA (1)...(19): siRNA sense strand
gccucaaacagguauacua

SEQ ID NO: 408340 - RNA, 19 nt, Homo sapiens
  misc_RNA (1)...(19): siRNA sense strand
caguaaagcuguagaguuc

SEQ ID NO: 408341 - RNA, 19 nt, Homo sapiens
  misc_RNA (1)...(19): siRNA sense strand
cagaaggugugcccagauu

SEQ ID NO: 408342 - RNA, 19 nt, Homo sapiens
  misc_RNA (1)...(19): siRNA sense strand
ggccacaucucaccuaagu

SEQ ID NO: 408343 - RNA, 19 nt, Homo sapiens
  misc_RNA (1)...(19): siRNA sense strand
ccacaucucaccuaaguca

SEQ ID NO: 408344 - RNA, 19 nt, Homo sapiens
  misc_RNA (1)...(19): siRNA sense strand
ucaagacgguggcccugaa

SEQ ID NO: 408345 - RNA, 19 nt, Homo sapiens
  misc_RNA (1)...(19): siRNA sense strand
ggucaucuguggccaggau

SEQ ID NO: 408346 - RNA, 19 nt, Homo sapiens
  misc_RNA (1)...(19): siRNA sense strand
ccaguaaagcuguagaguu

SEQ ID NO: 408347 - RNA, 19 nt, Homo sapiens
  misc_RNA (1)...(19): siRNA sense strand
guaaagcuguagaguucca

SEQ ID NO: 408348 - RNA, 19 nt, Homo sapiens
  misc_RNA (1)...(19): siRNA sense strand
gaaggugugcccagauuac

SEQ ID NO: 408349 - RNA, 19 nt, Homo sapiens
  misc_RNA (1)...(19): siRNA sense strand
caaagucgucugugucuac

SEQ ID NO: 408350 - RNA, 19 nt, Homo sapiens
  misc_RNA (1)...(19): siRNA sense strand
gcucccagcccuucaaagu

SEQ ID NO: 408351 - RNA, 19 nt, Homo sapiens
  misc_RNA (1)...(19): siRNA sense strand
ccagauuacaacuaccaua

SEQ ID NO: 408352 - RNA, 19 nt, Homo sapiens
  misc_RNA (1)...(19): siRNA sense strand
ggugcaggguagccucuau

SEQ ID NO: 408353 - RNA, 19 nt, Homo sapiens
  misc_RNA (1)...(19): siRNA sense strand
cagauuacaacuaccauag

SEQ ID NO: 408354 - RNA, 19 nt, Homo sapiens
  misc_RNA (1)...(19): siRNA sense strand
gugcccagauuacaacuac

SEQ ID NO: 408355 - RNA, 19 nt, Homo sapiens
  misc_RNA (1)...(19): siRNA sense strand
ucaaagucgucugugucua

SEQ ID NO: 408356 - RNA, 19 nt, Homo sapiens
  misc_RNA (1)...(19): siRNA sense strand
cagccaaggugaagaaaau

SEQ ID NO: 408357 - RNA, 19 nt, Homo sapiens
  misc_RNA (1)...(19): siRNA sense strand
cagggaaacaucuccauca

SEQ ID NO: 408358 - RNA, 19 nt, Homo sapiens
  misc_RNA (1)...(19): siRNA sense strand
cgacuucuacuccaacauc

SEQ ID NO: 408359 - RNA, 19 nt, Homo sapiens
  misc_RNA (1)...(19): siRNA sense strand
agaaggugugcccagauua

SEQ ID NO: 408360 - RNA, 19 nt, Homo sapiens
  misc_RNA (1)...(19): siRNA sense strand
gugucuacaucgccuucua

SEQ ID NO: 408361 - RNA, 19 nt, Homo sapiens
  misc_RNA (1)...(19): siRNA sense strand
gaccuucagcguccacuuc

SEQ ID NO: 408362 - RNA, 19 nt, Homo sapiens
  misc_RNA (1)...(19): siRNA sense strand
gcucgucacagggaagauu

SEQ ID NO: 408363 - RNA, 19 nt, Homo sapiens
  misc_RNA (1)...(19): siRNA sense strand
gacuucuacuccaacauca

SEQ ID NO: 408364 - RNA, 19 nt, Homo sapiens
  misc_RNA (1)...(19): siRNA sense strand
gccaaggccuccaaaaucu

SEQ ID NO: 408365 - RNA, 19 nt, Homo sapiens
  misc_RNA (1)...(19): siRNA sense strand
ccacgacccagccaagauc

SEQ ID NO: 408366 - RNA, 19 nt, Homo sapiens
  misc_RNA (1)...(19): siRNA sense strand
ggccaauuccacucuccua

SEQ ID NO: 408367 - RNA, 19 nt, Homo sapiens
  misc_RNA (1)...(19): siRNA sense strand
aacagcagaucuucaucga

SEQ ID NO: 408368 - RNA, 19 nt, Homo sapiens
  misc_RNA (1)...(19): siRNA sense strand
ccucagccaaggugaagaa

SEQ ID NO: 408369 - RNA, 19 nt, Homo sapiens
  misc_RNA (1)...(19): siRNA sense strand
aaacacaccuggaggcaaa

SEQ ID NO: 408370 - RNA, 19 nt, Homo sapiens
  misc_RNA (1)...(19): siRNA sense strand
uaagaggagugaagaaaga

SEQ ID NO: 408371 - RNA, 19 nt, Homo sapiens
  misc_RNA (1)...(19): siRNA sense strand
ggaagaagccagaggauuc

SEQ ID NO: 408372 - RNA, 19 nt, Homo sapiens
  misc_RNA (1)...(19): siRNA sense strand
gcaccaaaccugacuguga

SEQ ID NO: 408373 - RNA, 19 nt, Homo sapiens
  misc_RNA (1)...(19): siRNA sense strand
ggccaaguguguuccauaa

SEQ ID NO: 408374 - RNA, 19 nt, Homo sapiens
  misc_RNA (1)...(19): siRNA sense strand
ccaaggaaaugcccaagga

SEQ ID NO: 408375 - RNA, 19 nt, Homo sapiens
  misc_RNA (1)...(19): siRNA sense strand
gcaaggacucucccucuaa

SEQ ID NO: 408376 - RNA, 19 nt, Homo sapiens
  misc_RNA (1)...(19): siRNA sense strand
cgaaaggucuuagcaguca

SEQ ID NO: 408377 - RNA, 19 nt, Homo sapiens
  misc_RNA (1)...(19): siRNA sense strand
gaagcaggauggccuaguc

SEQ ID NO: 408378 - RNA, 19 nt, Homo sapiens
  misc_RNA (1)...(19): siRNA sense strand
auaaugaccugcuccgaaa

SEQ ID NO: 408379 - RNA, 19 nt, Homo sapiens
  misc_RNA (1)...(19): siRNA sense strand
gaagaaagaagacaagacu

SEQ ID NO: 408380 - RNA, 19 nt, Homo sapiens
  misc_RNA (1)...(19): siRNA sense strand
ggcaaggacucucccucua

SEQ ID NO: 408381 - RNA, 19 nt, Homo sapiens
  misc_RNA (1)...(19): siRNA sense strand
gcacucguguggaauacau

SEQ ID NO: 408382 - RNA, 19 nt, Homo sapiens
  misc_RNA (1)...(19): siRNA sense strand
ccacacacccuccuucaug

SEQ ID NO: 408383 - RNA, 19 nt, Homo sapiens
  misc_RNA (1)...(19): siRNA sense strand
caccaaaccugacugugau

SEQ ID NO: 408384 - RNA, 19 nt, Homo sapiens
  misc_RNA (1)...(19): siRNA sense strand
caaggacucucccucuaag

SEQ ID NO: 408385 - RNA, 19 nt, Homo sapiens
  misc_RNA (1)...(19): siRNA sense strand
ccaccuuccugcccaaguu

SEQ ID NO: 408386 - RNA, 19 nt, Homo sapiens
  misc_RNA (1)...(19): siRNA sense strand
gucugucgcuacuacaaua

SEQ ID NO: 408387 - RNA, 19 nt, Homo sapiens
  misc_RNA (1)...(19): siRNA sense strand
ggaaaccaaagccacaaug

SEQ ID NO: 408388 - RNA, 19 nt, Homo sapiens
  misc_RNA (1)...(19): siRNA sense strand
caugaucuccggcuaccua

SEQ ID NO: 408389 - RNA, 19 nt, Homo sapiens
  misc_RNA (1)...(19): siRNA sense strand
ccagguaccagacaaggaa

SEQ ID NO: 408390 - RNA, 19 nt, Homo sapiens
  misc_RNA (1)...(19): siRNA sense strand
gaucugcuucgccuuaguu

SEQ ID NO: 408391 - RNA, 19 nt, Homo sapiens
  misc_RNA (1)...(19): siRNA sense strand
gaaaccaaagccacaaugg

SEQ ID NO: 408392 - RNA, 19 nt, Homo sapiens
  misc_RNA (1)...(19): siRNA sense strand
gggaacacagccuugauug

SEQ ID NO: 408393 - RNA, 19 nt, Homo sapiens
  misc_RNA (1)...(19): siRNA sense strand
ccagaggauucccgagugu

SEQ ID NO: 408394 - RNA, 19 nt, Homo sapiens
  misc_RNA (1)...(19): siRNA sense strand
ggaacacagccuugauugu

SEQ ID NO: 408395 - RNA, 19 nt, Homo sapiens
  misc_RNA (1)...(19): siRNA sense strand
ugaggcagcaggacaaaga

SEQ ID NO: 408396 - RNA, 19 nt, Homo sapiens
  misc_RNA (1)...(19): siRNA sense strand
ccagcacucguguggaaua

SEQ ID NO: 408397 - RNA, 19 nt, Homo sapiens
  misc_RNA (1)...(19): siRNA sense strand
ccaguucauuaaagucuuc

SEQ ID NO: 408398 - RNA, 19 nt, Homo sapiens
  misc_RNA (1)...(19): siRNA sense strand
gggaagaagccagaggauu

SEQ ID NO: 408399 - RNA, 19 nt, Homo sapiens
  misc_RNA (1)...(19): siRNA sense strand
gaucuccggcuaccuaaag

SEQ ID NO: 408400 - RNA, 19 nt, Homo sapiens
  misc_RNA (1)...(19): siRNA sense strand
guucaucggccuccaguuc

SEQ ID NO: 408401 - RNA, 19 nt, Homo sapiens
  misc_RNA (1)...(19): siRNA sense strand
gaggagugaagaaagaaga

SEQ ID NO: 408402 - RNA, 19 nt, Homo sapiens
  misc_RNA (1)...(19): siRNA sense strand
gccugccgcucuucuuuau

SEQ ID NO: 408403 - RNA, 19 nt, Homo sapiens
  misc_RNA (1)...(19): siRNA sense strand
gugauccaguucauuaaag

SEQ ID NO: 408404 - RNA, 19 nt, Homo sapiens
  misc_RNA (1)...(19): siRNA sense strand
gggauccuguuugcaguga

SEQ ID NO: 408405 - RNA, 19 nt, Homo sapiens
  misc_RNA (1)...(19): siRNA sense strand
caccagcccugaggauaug

SEQ ID NO: 408406 - RNA, 19 nt, Homo sapiens
  misc_RNA (1)...(19): siRNA sense strand
gcaccgaccccgaaugauu

SEQ ID NO: 408407 - RNA, 19 nt, Homo sapiens
  misc_RNA (1)...(19): siRNA sense strand
caaagaggcaaggaccaaa

SEQ ID NO: 408408 - RNA, 19 nt, Homo sapiens
  misc_RNA (1)...(19): siRNA sense strand
ccuaagaggagugaagaaa

SEQ ID NO: 408409 - RNA, 19 nt, Homo sapiens
  misc_RNA (1)...(19): siRNA sense strand
cagccuugauuguguuugu

SEQ ID NO: 408410 - RNA, 19 nt, Homo sapiens
  misc_RNA (1)...(19): siRNA sense strand
gaggcaaggaccaaagaga

SEQ ID NO: 408411 - RNA, 19 nt, Homo sapiens
  misc_RNA (1)...(19): siRNA sense strand
ucaugacucucccgcacuu

SEQ ID NO: 408412 - RNA, 19 nt, Homo sapiens
  misc_RNA (1)...(19): siRNA sense strand
ggcaacugcucaagcuaca

SEQ ID NO: 408413 - RNA, 19 nt, Homo sapiens
  misc_RNA (1)...(19): siRNA sense strand
cagguucugugaucugcuu

SEQ ID NO: 408414 - RNA, 19 nt, Homo sapiens
  misc_RNA (1)...(19): siRNA sense strand
gggcauccaguucauguuc

SEQ ID NO: 408415 - RNA, 19 nt, Homo sapiens
  misc_RNA (1)...(19): siRNA sense strand
caaggaaaugcccaaggaa

SEQ ID NO: 408416 - RNA, 19 nt, Homo sapiens
  misc_RNA (1)...(19): siRNA sense strand
acacagaaacccagcaucu

SEQ ID NO: 408417 - RNA, 19 nt, Homo sapiens
  misc_RNA (1)...(19): siRNA sense strand
ugugaucugcuucgccuua

SEQ ID NO: 408418 - RNA, 19 nt, Homo sapiens
  misc_RNA (1)...(19): siRNA sense strand
aaacccagcaucugagugu

SEQ ID NO: 408419 - RNA, 19 nt, Homo sapiens
  misc_RNA (1)...(19): siRNA sense strand
ugauuguguuugugagcua

SEQ ID NO: 408420 - RNA, 19 nt, Homo sapiens
  misc_RNA (1)...(19): siRNA sense strand
acaucaagcuguucguucu

SEQ ID NO: 408421 - RNA, 19 nt, Homo sapiens
  misc_RNA (1)...(19): siRNA sense strand
caacugcucaagcuacaca

SEQ ID NO: 408422 - RNA, 19 nt, Homo sapiens
  misc_RNA (1)...(19): siRNA sense strand
aaggaaaugcccaaggaaa

SEQ ID NO: 408423 - RNA, 19 nt, Homo sapiens
  misc_RNA (1)...(19): siRNA sense strand
gauccagcccugccguaga

SEQ ID NO: 408424 - RNA, 19 nt, Homo sapiens
  misc_RNA (1)...(19): siRNA sense strand
caacaccagcccugaggau

SEQ ID NO: 408425 - RNA, 19 nt, Homo sapiens
  misc_RNA (1)...(19): siRNA sense strand
cagccugccgcucuucuuu

SEQ ID NO: 408426 - RNA, 19 nt, Homo sapiens
  misc_RNA (1)...(19): siRNA sense strand
ucuccuacaucgaugacuu

SEQ ID NO: 408427 - RNA, 19 nt, Homo sapiens
  misc_RNA (1)...(19): siRNA sense strand
ggauaugccacaggacuuc

SEQ ID NO: 408428 - RNA, 19 nt, Homo sapiens
  misc_RNA (1)...(19): siRNA sense strand
ucgaugacuuugcccacaa

SEQ ID NO: 408429 - RNA, 19 nt, Homo sapiens
  misc_RNA (1)...(19): siRNA sense strand
ugauccaguucauuaaagu

SEQ ID NO: 408430 - RNA, 19 nt, Homo sapiens
  misc_RNA (1)...(19): siRNA sense strand
aacgugagcuucaguuucg

SEQ ID NO: 408431 - RNA, 19 nt, Homo sapiens
  misc_RNA (1)...(19): siRNA sense strand
acaccagcccugaggauau

SEQ ID NO: 408432 - RNA, 19 nt, Homo sapiens
  misc_RNA (1)...(19): siRNA sense strand
uaguccagauugcaccaaa

SEQ ID NO: 408433 - RNA, 19 nt, Homo sapiens
  misc_RNA (1)...(19): siRNA sense strand
uggcgcagcucaugaucuc

SEQ ID NO: 408434 - RNA, 19 nt, Homo sapiens
  misc_RNA (1)...(19): siRNA sense strand
gagugaagaaagaagacaa

SEQ ID NO: 408435 - RNA, 19 nt, Homo sapiens
  misc_RNA (1)...(19): siRNA sense strand
cagguaugcuugucaucca

SEQ ID NO: 408436 - RNA, 19 nt, Homo sapiens
  misc_RNA (1)...(19): siRNA sense strand
ugcucaagcuacacagaaa

SEQ ID NO: 408437 - RNA, 19 nt, Homo sapiens
  misc_RNA (1)...(19): siRNA sense strand
gcugugggcauccaguuca

SEQ ID NO: 408438 - RNA, 19 nt, Homo sapiens
  misc_RNA (1)...(19): siRNA sense strand
ccagauugcgggcaucaca

SEQ ID NO: 408439 - RNA, 19 nt, Homo sapiens
  misc_RNA (1)...(19): siRNA sense strand
gauuguguuugugagcuau

SEQ ID NO: 408440 - RNA, 19 nt, Homo sapiens
  misc_RNA (1)...(19): siRNA sense strand
ugucgcuacuacaauaaug

SEQ ID NO: 408441 - RNA, 19 nt, Homo sapiens
  misc_RNA (1)...(19): siRNA sense strand
ggccuccaguucuucuuca

SEQ ID NO: 408442 - RNA, 19 nt, Homo sapiens
  misc_RNA (1)...(19): siRNA sense strand
ccauaccgcuacgacaaca

SEQ ID NO: 408443 - RNA, 19 nt, Homo sapiens
  misc_RNA (1)...(19): siRNA sense strand
gacgugcggccaagugugu

SEQ ID NO: 408444 - RNA, 19 nt, Homo sapiens
  misc_RNA (1)...(19): siRNA sense strand
acaaagaggcaaggaccaa

SEQ ID NO: 408445 - RNA, 19 nt, Homo sapiens
  misc_RNA (1)...(19): siRNA sense strand
ucaucggccuccaguucuu

SEQ ID NO: 408446 - RNA, 19 nt, Homo sapiens
  misc_RNA (1)...(19): siRNA sense strand
uggcaucuccuacaucgau

SEQ ID NO: 408447 - RNA, 19 nt, Homo sapiens
  misc_RNA (1)...(19): siRNA sense strand
gccucaugcugcgccuuua

SEQ ID NO: 408448 - RNA, 19 nt, Homo sapiens
  misc_RNA (1)...(19): siRNA sense strand
agaggauucccgaguguga

SEQ ID NO: 408449 - RNA, 19 nt, Homo sapiens
  misc_RNA (1)...(19): siRNA sense strand
gccacaaugggcacagaaa

SEQ ID NO: 408450 - RNA, 19 nt, Homo sapiens
  misc_RNA (1)...(19): siRNA sense strand
cuaagaggagugaagaaag

SEQ ID NO: 408451 - RNA, 19 nt, Homo sapiens
  misc_RNA (1)...(19): siRNA sense strand
gauggccuaguccagauug

SEQ ID NO: 408452 - RNA, 19 nt, Homo sapiens
  misc_RNA (1)...(19): siRNA sense strand
gggaguccacgaagaagca

SEQ ID NO: 408453 - RNA, 19 nt, Homo sapiens
  misc_RNA (1)...(19): siRNA sense strand
guggcuggguuuccucauc

SEQ ID NO: 408454 - RNA, 19 nt, Homo sapiens
  misc_RNA (1)...(19): siRNA sense strand
gaagagaacuuggugaauu

SEQ ID NO: 408455 - RNA, 19 nt, Homo sapiens
  misc_RNA (1)...(19): siRNA sense strand
aaagaggacuuaugcauuu

SEQ ID NO: 408456 - RNA, 19 nt, Homo sapiens
  misc_RNA (1)...(19): siRNA sense strand
caacaucgguucaauuagu

SEQ ID NO: 408457 - RNA, 19 nt, Homo sapiens
  misc_RNA (1)...(19): siRNA sense strand
gaaagaggacuuaugcauu

SEQ ID NO: 408458 - RNA, 19 nt, Homo sapiens
  misc_RNA (1)...(19): siRNA sense strand
cgacuacgauggaaacauu

SEQ ID NO: 408459 - RNA, 19 nt, Homo sapiens
  misc_RNA (1)...(19): siRNA sense strand
uggaaccucuggaguauua

SEQ ID NO: 408460 - RNA, 19 nt, Homo sapiens
  misc_RNA (1)...(19): siRNA sense strand
gaacugccguccugaugga

SEQ ID NO: 408461 - RNA, 19 nt, Homo sapiens
  misc_RNA (1)...(19): siRNA sense strand
acaggaaccuuaacaauag

SEQ ID NO: 408462 - RNA, 19 nt, Homo sapiens
  misc_RNA (1)...(19): siRNA sense strand
ggcaaacucuguugucuuc

SEQ ID NO: 408463 - RNA, 19 nt, Homo sapiens
  misc_RNA (1)...(19): siRNA sense strand
gaugacacuuugcuuauag

SEQ ID NO: 408464 - RNA, 19 nt, Homo sapiens
  misc_RNA (1)...(19): siRNA sense strand
gaacaucuggcaacaggaa

SEQ ID NO: 408465 - RNA, 19 nt, Homo sapiens
  misc_RNA (1)...(19): siRNA sense strand
acacuuugcuuauaguuga

SEQ ID NO: 408466 - RNA, 19 nt, Homo sapiens
  misc_RNA (1)...(19): siRNA sense strand
gucaacaucgguucaauua

SEQ ID NO: 408467 - RNA, 19 nt, Homo sapiens
  misc_RNA (1)...(19): siRNA sense strand
gauaaaggauacguuguuc

SEQ ID NO: 408468 - RNA, 19 nt, Homo sapiens
  misc_RNA (1)...(19): siRNA sense strand
uuagugaaguugggaaaua

SEQ ID NO: 408469 - RNA, 19 nt, Homo sapiens
  misc_RNA (1)...(19): siRNA sense strand
caacaggaaccuuaacaau

SEQ ID NO: 408470 - RNA, 19 nt, Homo sapiens
  misc_RNA (1)...(19): siRNA sense strand
acugauggaugaaguaauu

SEQ ID NO: 408471 - RNA, 19 nt, Homo sapiens
  misc_RNA (1)...(19): siRNA sense strand
ugaugacacuuugcuuaua

SEQ ID NO: 408472 - RNA, 19 nt, Homo sapiens
  misc_RNA (1)...(19): siRNA sense strand
uguaugagccgagcaguua

SEQ ID NO: 408473 - RNA, 19 nt, Homo sapiens
  misc_RNA (1)...(19): siRNA sense strand
gaguaugaaacccaaauaa

SEQ ID NO: 408474 - RNA, 19 nt, Homo sapiens
  misc_RNA (1)...(19): siRNA sense strand
caacuuccuuugcuguguu

SEQ ID NO: 408475 - RNA, 19 nt, Homo sapiens
  misc_RNA (1)...(19): siRNA sense strand
gagccgagcaguuacaaga

SEQ ID NO: 408476 - RNA, 19 nt, Homo sapiens
  misc_RNA (1)...(19): siRNA sense strand
aacaggaaccuuaacaaua

SEQ ID NO: 408477 - RNA, 19 nt, Homo sapiens
  misc_RNA (1)...(19): siRNA sense strand
guacaguugccugaaguua

SEQ ID NO: 408478 - RNA, 19 nt, Homo sapiens
  misc_RNA (1)...(19): siRNA sense strand
gaacuuggugaauucagaa

SEQ ID NO: 408479 - RNA, 19 nt, Homo sapiens
  misc_RNA (1)...(19): siRNA sense strand
aguaaucuguggaguuaaa

SEQ ID NO: 408480 - RNA, 19 nt, Homo sapiens
  misc_RNA (1)...(19): siRNA sense strand
ggaggaacaucuggcaaca

SEQ ID NO: 408481 - RNA, 19 nt, Homo sapiens
  misc_RNA (1)...(19): siRNA sense strand
gauacguuguuccuaaugu

SEQ ID NO: 408482 - RNA, 19 nt, Homo sapiens
  misc_RNA (1)...(19): siRNA sense strand
caacagaugccccugauaa

SEQ ID NO: 408483 - RNA, 19 nt, Homo sapiens
  misc_RNA (1)...(19): siRNA sense strand
aagagaacuuggugaauuc

SEQ ID NO: 408484 - RNA, 19 nt, Homo sapiens
  misc_RNA (1)...(19): siRNA sense strand
ugccugaaguuacuauaaa

SEQ ID NO: 408485 - RNA, 19 nt, Homo sapiens
  misc_RNA (1)...(19): siRNA sense strand
ucuauacugugaucucauu

SEQ ID NO: 408486 - RNA, 19 nt, Homo sapiens
  misc_RNA (1)...(19): siRNA sense strand
gcaacaggaaccuuaacaa

SEQ ID NO: 408487 - RNA, 19 nt, Homo sapiens
  misc_RNA (1)...(19): siRNA sense strand
ggaguuaaagcagaauuug

SEQ ID NO: 408488 - RNA, 19 nt, Homo sapiens
  misc_RNA (1)...(19): siRNA sense strand
cauugcagaugucauugaa

SEQ ID NO: 408489 - RNA, 19 nt, Homo sapiens
  misc_RNA (1)...(19): siRNA sense strand
gaaccacaacugucaacau

SEQ ID NO: 408490 - RNA, 19 nt, Homo sapiens
  misc_RNA (1)...(19): siRNA sense strand
caagacacaaagaaguuaa

SEQ ID NO: 408491 - RNA, 19 nt, Homo sapiens
  misc_RNA (1)...(19): siRNA sense strand
gagaacugccguccugaug

SEQ ID NO: 408492 - RNA, 19 nt, Homo sapiens
  misc_RNA (1)...(19): siRNA sense strand
cacagauaauucagaaaga

SEQ ID NO: 408493 - RNA, 19 nt, Homo sapiens
  misc_RNA (1)...(19): siRNA sense strand
ucacaaaccagguggaagu

SEQ ID NO: 408494 - RNA, 19 nt, Homo sapiens
  misc_RNA (1)...(19): siRNA sense strand
aacaucgguucaauuagua

SEQ ID NO: 408495 - RNA, 19 nt, Homo sapiens
  misc_RNA (1)...(19): siRNA sense strand
aaccacaacugucaacauc

SEQ ID NO: 408496 - RNA, 19 nt, Homo sapiens
  misc_RNA (1)...(19): siRNA sense strand
gcaguuacaagacacaaag

SEQ ID NO: 408497 - RNA, 19 nt, Homo sapiens
  misc_RNA (1)...(19): siRNA sense strand
gaaggcaaacucuguuguc

SEQ ID NO: 408498 - RNA, 19 nt, Homo sapiens
  misc_RNA (1)...(19): siRNA sense strand
ucacagauaauucagaaag

SEQ ID NO: 408499 - RNA, 19 nt, Homo sapiens
  misc_RNA (1)...(19): siRNA sense strand
ugauaaaggauacguuguu

SEQ ID NO: 408500 - RNA, 19 nt, Homo sapiens
  misc_RNA (1)...(19): siRNA sense strand
gaauucagaaccacaacug

SEQ ID NO: 408501 - RNA, 19 nt, Homo sapiens
  misc_RNA (1)...(19): siRNA sense strand
agaacuuggugaauucaga

SEQ ID NO: 408502 - RNA, 19 nt, Homo sapiens
  misc_RNA (1)...(19): siRNA sense strand
ggaagagaacuuggugaau

SEQ ID NO: 408503 - RNA, 19 nt, Homo sapiens
  misc_RNA (1)...(19): siRNA sense strand
uuggaugccugcacauuug

SEQ ID NO: 408504 - RNA, 19 nt, Homo sapiens
  misc_RNA (1)...(19): siRNA sense strand
cguggaaccucuggaguau

SEQ ID NO: 408505 - RNA, 19 nt, Homo sapiens
  misc_RNA (1)...(19): siRNA sense strand
aagcuugucuggguucuau

SEQ ID NO: 408506 - RNA, 19 nt, Homo sapiens
  misc_RNA (1)...(19): siRNA sense strand
uaacuggagcuaaacuuca

SEQ ID NO: 408507 - RNA, 19 nt, Homo sapiens
  misc_RNA (1)...(19): siRNA sense strand
gaggaaggcaaacucuguu

SEQ ID NO: 408508 - RNA, 19 nt, Homo sapiens
  misc_RNA (1)...(19): siRNA sense strand
gccugaaguuacuauaaau

SEQ ID NO: 408509 - RNA, 19 nt, Homo sapiens
  misc_RNA (1)...(19): siRNA sense strand
ucauuugccucgacuacga

SEQ ID NO: 408510 - RNA, 19 nt, Homo sapiens
  misc_RNA (1)...(19): siRNA sense strand
guucugcuuuagugaaguu

SEQ ID NO: 408511 - RNA, 19 nt, Homo sapiens
  misc_RNA (1)...(19): siRNA sense strand
acaagacacaaagaaguua

SEQ ID NO: 408512 - RNA, 19 nt, Homo sapiens
  misc_RNA (1)...(19): siRNA sense strand
ucagaaagaggacuuaugc

SEQ ID NO: 408513 - RNA, 19 nt, Homo sapiens
  misc_RNA (1)...(19): siRNA sense strand
aaacuucaggacuguauga

SEQ ID NO: 408514 - RNA, 19 nt, Homo sapiens
  misc_RNA (1)...(19): siRNA sense strand
ugggcuaacuggagcuaaa

SEQ ID NO: 408515 - RNA, 19 nt, Homo sapiens
  misc_RNA (1)...(19): siRNA sense strand
ggaaccuuaacaauaguaa

SEQ ID NO: 408516 - RNA, 19 nt, Homo sapiens
  misc_RNA (1)...(19): siRNA sense strand
gaaguugggaaauacuaca

SEQ ID NO: 408517 - RNA, 19 nt, Homo sapiens
  misc_RNA (1)...(19): siRNA sense strand
aaacugauggaugaaguaa

SEQ ID NO: 408518 - RNA, 19 nt, Homo sapiens
  misc_RNA (1)...(19): siRNA sense strand
uacaagacacaaagaaguu

SEQ ID NO: 408519 - RNA, 19 nt, Homo sapiens
  misc_RNA (1)...(19): siRNA sense strand
ggaaggcaaacucuguugu

SEQ ID NO: 408520 - RNA, 19 nt, Homo sapiens
  misc_RNA (1)...(19): siRNA sense strand
cugcacauuugcuuugcua

SEQ ID NO: 408521 - RNA, 19 nt, Homo sapiens
  misc_RNA (1)...(19): siRNA sense strand
guucuauacugugaucuca

SEQ ID NO: 408522 - RNA, 19 nt, Homo sapiens
  misc_RNA (1)...(19): siRNA sense strand
gccgagcaguuacaagaca

SEQ ID NO: 408523 - RNA, 19 nt, Homo sapiens
  misc_RNA (1)...(19): siRNA sense strand
gcagaugucauugaaaauu

SEQ ID NO: 408524 - RNA, 19 nt, Homo sapiens
  misc_RNA (1)...(19): siRNA sense strand
ccuuugcuguguuugauga

SEQ ID NO: 408525 - RNA, 19 nt, Homo sapiens
  misc_RNA (1)...(19): siRNA sense strand
ugucuggguucuauacugu

SEQ ID NO: 408526 - RNA, 19 nt, Homo sapiens
  misc_RNA (1)...(19): siRNA sense strand
agaaagaggacuuaugcau

SEQ ID NO: 408527 - RNA, 19 nt, Homo sapiens
  misc_RNA (1)...(19): siRNA sense strand
gaauuugcagcaccaucaa

SEQ ID NO: 408528 - RNA, 19 nt, Homo sapiens
  misc_RNA (1)...(19): siRNA sense strand
uggaugaaguaauuaagag

SEQ ID NO: 408529 - RNA, 19 nt, Homo sapiens
  misc_RNA (1)...(19): siRNA sense strand
gcuuauaguugacccuacu

SEQ ID NO: 408530 - RNA, 19 nt, Homo sapiens
  misc_RNA (1)...(19): siRNA sense strand
uuugaugacacuuugcuua

SEQ ID NO: 408531 - RNA, 19 nt, Homo sapiens
  misc_RNA (1)...(19): siRNA sense strand
acagauaauucagaaagag

SEQ ID NO: 408532 - RNA, 19 nt, Homo sapiens
  misc_RNA (1)...(19): siRNA sense strand
acaguugccugaaguuacu

SEQ ID NO: 408533 - RNA, 19 nt, Homo sapiens
  misc_RNA (1)...(19): siRNA sense strand
ugaggaaggcaaacucugu

SEQ ID NO: 408534 - RNA, 19 nt, Homo sapiens
  misc_RNA (1)...(19): siRNA sense strand
uuacaagacacaaagaagu

SEQ ID NO: 408535 - RNA, 19 nt, Homo sapiens
  misc_RNA (1)...(19): siRNA sense strand
uggaagagaacuuggugaa

SEQ ID NO: 408536 - RNA, 19 nt, Homo sapiens
  misc_RNA (1)...(19): siRNA sense strand
agaugguucugcuuuagug

SEQ ID NO: 408537 - RNA, 19 nt, Homo sapiens
  misc_RNA (1)...(19): siRNA sense strand
aaacucuguugucuucaca

SEQ ID NO: 408538 - RNA, 19 nt, Homo sapiens
  misc_RNA (1)...(19): siRNA sense strand
uauuacaggagauuucuga

SEQ ID NO: 408539 - RNA, 19 nt, Homo sapiens
  misc_RNA (1)...(19): siRNA sense strand
ggaguauuacaggagauuu

SEQ ID NO: 408540 - RNA, 19 nt, Homo sapiens
  misc_RNA (1)...(19): siRNA sense strand
gugaaguugggaaauacua

SEQ ID NO: 408541 - RNA, 19 nt, Homo sapiens
  misc_RNA (1)...(19): siRNA sense strand
gaguauuacaggagauuuc

SEQ ID NO: 408542 - RNA, 19 nt, Homo sapiens
  misc_RNA (1)...(19): siRNA sense strand
ccguggaaccucuggagua

SEQ ID NO: 408543 - RNA, 19 nt, Homo sapiens
  misc_RNA (1)...(19): siRNA sense strand
gaaccucuggaguauuaca

SEQ ID NO: 408544 - RNA, 19 nt, Homo sapiens
  misc_RNA (1)...(19): siRNA sense strand
agaguaugaaacccaaaua

SEQ ID NO: 408545 - RNA, 19 nt, Homo sapiens
  misc_RNA (1)...(19): siRNA sense strand
caaacucuguugucuucac

SEQ ID NO: 408546 - RNA, 19 nt, Homo sapiens
  misc_RNA (1)...(19): siRNA sense strand
agaauuugcagcaccauca

SEQ ID NO: 408547 - RNA, 19 nt, Homo sapiens
  misc_RNA (1)...(19): siRNA sense strand
uugcuuugcuagcggcuuu

SEQ ID NO: 408548 - RNA, 19 nt, Homo sapiens
  misc_RNA (1)...(19): siRNA sense strand
ggauacguuguuccuaaug

SEQ ID NO: 408549 - RNA, 19 nt, Homo sapiens
  misc_RNA (1)...(19): siRNA sense strand
ggaugaaguaauuaagagu

SEQ ID NO: 408550 - RNA, 19 nt, Homo sapiens
  misc_RNA (1)...(19): siRNA sense strand
ucuggcaacaggaaccuua

SEQ ID NO: 408551 - RNA, 19 nt, Homo sapiens
  misc_RNA (1)...(19): siRNA sense strand
gaaagcuugucuggguucu

SEQ ID NO: 408552 - RNA, 19 nt, Homo sapiens
  misc_RNA (1)...(19): siRNA sense strand
uugcagaugucauugaaaa

SEQ ID NO: 408553 - RNA, 19 nt, Homo sapiens
  misc_RNA (1)...(19): siRNA sense strand
cuaaacuucaggacuguau

SEQ ID NO: 408554 - RNA, 19 nt, Homo sapiens
  misc_RNA (1)...(19): siRNA sense strand
uaaugaagauucugaguga

SEQ ID NO: 408555 - RNA, 19 nt, Homo sapiens
  misc_RNA (1)...(19): siRNA sense strand
gcacugagagggcgauuga

SEQ ID NO: 408556 - RNA, 19 nt, Homo sapiens
  misc_RNA (1)...(19): siRNA sense strand
uugcagagcugaaagagaa

SEQ ID NO: 408557 - RNA, 19 nt, Homo sapiens
  misc_RNA (1)...(19): siRNA sense strand
agaggucacuucugccuuu

SEQ ID NO: 408558 - RNA, 19 nt, Homo sapiens
  misc_RNA (1)...(19): siRNA sense strand
gaaagagaagauagugcua

SEQ ID NO: 408559 - RNA, 19 nt, Homo sapiens
  misc_RNA (1)...(19): siRNA sense strand
ucuccagaguuacaaauaa

SEQ ID NO: 408560 - RNA, 19 nt, Homo sapiens
  misc_RNA (1)...(19): siRNA sense strand
cggcaucgcucacguugug

SEQ ID NO: 408561 - RNA, 19 nt, Homo sapiens
  misc_RNA (1)...(19): siRNA sense strand
guggucuucuccagaguua

SEQ ID NO: 408562 - RNA, 19 nt, Homo sapiens
  misc_RNA (1)...(19): siRNA sense strand
ggcaguacuuacaaccuuu

SEQ ID NO: 408563 - RNA, 19 nt, Homo sapiens
  misc_RNA (1)...(19): siRNA sense strand
aaauguuccucuaucagaa

SEQ ID NO: 408564 - RNA, 19 nt, Homo sapiens
  misc_RNA (1)...(19): siRNA sense strand
caaaggcaguacuuacaac

SEQ ID NO: 408565 - RNA, 19 nt, Homo sapiens
  misc_RNA (1)...(19): siRNA sense strand
gcuaacgcacaaucgcuua

SEQ ID NO: 408566 - RNA, 19 nt, Homo sapiens
  misc_RNA (1)...(19): siRNA sense strand
ucagagauggauauucaaa

SEQ ID NO: 408567 - RNA, 19 nt, Homo sapiens
  misc_RNA (1)...(19): siRNA sense strand
ucacuaaugaagauucuga

SEQ ID NO: 408568 - RNA, 19 nt, Homo sapiens
  misc_RNA (1)...(19): siRNA sense strand
cgauugaccaagcuucuuu

SEQ ID NO: 408569 - RNA, 19 nt, Homo sapiens
  misc_RNA (1)...(19): siRNA sense strand
ucaaaggcaguacuuacaa

SEQ ID NO: 408570 - RNA, 19 nt, Homo sapiens
  misc_RNA (1)...(19): siRNA sense strand
aaagagaagauagugcuaa

SEQ ID NO: 408571 - RNA, 19 nt, Homo sapiens
  misc_RNA (1)...(19): siRNA sense strand
aauggugugcuaucucuua

SEQ ID NO: 408572 - RNA, 19 nt, Homo sapiens
  misc_RNA (1)...(19): siRNA sense strand
ggugugcuaucucuuaaaa

SEQ ID NO: 408573 - RNA, 19 nt, Homo sapiens
  misc_RNA (1)...(19): siRNA sense strand
gagcugaaagagaagauag

SEQ ID NO: 408574 - RNA, 19 nt, Homo sapiens
  misc_RNA (1)...(19): siRNA sense strand
gggauacgcagguggugaa

SEQ ID NO: 408575 - RNA, 19 nt, Homo sapiens
  misc_RNA (1)...(19): siRNA sense strand
ccugagaggugcgcugugu

SEQ ID NO: 408576 - RNA, 19 nt, Homo sapiens
  misc_RNA (1)...(19): siRNA sense strand
cuuccuaguuggcauugaa

SEQ ID NO: 408577 - RNA, 19 nt, Homo sapiens
  misc_RNA (1)...(19): siRNA sense strand
ugaagauucugagugaagu

SEQ ID NO: 408578 - RNA, 19 nt, Homo sapiens
  misc_RNA (1)...(19): siRNA sense strand
aaagauugcagagcugaaa

SEQ ID NO: 408579 - RNA, 19 nt, Homo sapiens
  misc_RNA (1)...(19): siRNA sense strand
ucaaaauguuccucuauca

SEQ ID NO: 408580 - RNA, 19 nt, Homo sapiens
  misc_RNA (1)...(19): siRNA sense strand
gcacaaucgcuuaaaauca

SEQ ID NO: 408581 - RNA, 19 nt, Homo sapiens
  misc_RNA (1)...(19): siRNA sense strand
aggcaguacuuacaaccuu

SEQ ID NO: 408582 - RNA, 19 nt, Homo sapiens
  misc_RNA (1)...(19): siRNA sense strand
caaaagccauaguaaaugc

SEQ ID NO: 408583 - RNA, 19 nt, Homo sapiens
  misc_RNA (1)...(19): siRNA sense strand
uaacgcacaaucgcuuaaa

SEQ ID NO: 408584 - RNA, 19 nt, Homo sapiens
  misc_RNA (1)...(19): siRNA sense strand
ggucuucuccagaguuaca

SEQ ID NO: 408585 - RNA, 19 nt, Homo sapiens
  misc_RNA (1)...(19): siRNA sense strand
ggucacuucugccuuucca

SEQ ID NO: 408586 - RNA, 19 nt, Homo sapiens
  misc_RNA (1)...(19): siRNA sense strand
ucacucaaaggcaguacuu

SEQ ID NO: 408587 - RNA, 19 nt, Homo sapiens
  misc_RNA (1)...(19): siRNA sense strand
gaccaguccaagccagaaa

SEQ ID NO: 408588 - RNA, 19 nt, Homo sapiens
  misc_RNA (1)...(19): siRNA sense strand
gaagauucugagugaagug

SEQ ID NO: 408589 - RNA, 19 nt, Homo sapiens
  misc_RNA (1)...(19): siRNA sense strand
aagagaagauagugcuaac

SEQ ID NO: 408590 - RNA, 19 nt, Homo sapiens
  misc_RNA (1)...(19): siRNA sense strand
gcugaaagagaagauagug

SEQ ID NO: 408591 - RNA, 19 nt, Homo sapiens
  misc_RNA (1)...(19): siRNA sense strand
ugagaggugcgcuguguuc

SEQ ID NO: 408592 - RNA, 19 nt, Homo sapiens
  misc_RNA (1)...(19): siRNA sense strand
ugcccuggcugccuugaga

SEQ ID NO: 408593 - RNA, 19 nt, Homo sapiens
  misc_RNA (1)...(19): siRNA sense strand
ugagagggcgauugaccaa

SEQ ID NO: 408594 - RNA, 19 nt, Homo sapiens
  misc_RNA (1)...(19): siRNA sense strand
guuuccaucuguauucuac

SEQ ID NO: 408595 - RNA, 19 nt, Homo sapiens
  misc_RNA (1)...(19): siRNA sense strand
gaggucacuucugccuuuc

SEQ ID NO: 408596 - RNA, 19 nt, Homo sapiens
  misc_RNA (1)...(19): siRNA sense strand
gcagagcugaaagagaaga

SEQ ID NO: 408597 - RNA, 19 nt, Homo sapiens
  misc_RNA (1)...(19): siRNA sense strand
gaaagacaaucacaacuua

SEQ ID NO: 408598 - RNA, 19 nt, Homo sapiens
  misc_RNA (1)...(19): siRNA sense strand
gaaaggagacgaagguuca

SEQ ID NO: 408599 - RNA, 19 nt, Homo sapiens
  misc_RNA (1)...(19): siRNA sense strand
cuacaucaauccugaaaug

SEQ ID NO: 408600 - RNA, 19 nt, Homo sapiens
  misc_RNA (1)...(19): siRNA sense strand
gcagccaccugaaugugua

SEQ ID NO: 408601 - RNA, 19 nt, Homo sapiens
  misc_RNA (1)...(19): siRNA sense strand
agacgaagguucaacauca

SEQ ID NO: 408602 - RNA, 19 nt, Homo sapiens
  misc_RNA (1)...(19): siRNA sense strand
ccaaggagcggcagaagaa

SEQ ID NO: 408603 - RNA, 19 nt, Homo sapiens
  misc_RNA (1)...(19): siRNA sense strand
gaagaaagacaaucacaac

SEQ ID NO: 408604 - RNA, 19 nt, Homo sapiens
  misc_RNA (1)...(19): siRNA sense strand
ggagggcgaugugcuguga

SEQ ID NO: 408605 - RNA, 19 nt, Homo sapiens
  misc_RNA (1)...(19): siRNA sense strand
caaguuugcugcccacauc

SEQ ID NO: 408606 - RNA, 19 nt, Homo sapiens
  misc_RNA (1)...(19): siRNA sense strand
caacagugcucccaauagc

SEQ ID NO: 408607 - RNA, 19 nt, Homo sapiens
  misc_RNA (1)...(19): siRNA sense strand
gaagguucaacaucaauga

SEQ ID NO: 408608 - RNA, 19 nt, Homo sapiens
  misc_RNA (1)...(19): siRNA sense strand
ccacuucuguccaccaugu

SEQ ID NO: 408609 - RNA, 19 nt, Homo sapiens
  misc_RNA (1)...(19): siRNA sense strand
gacgaagguucaacaucaa

SEQ ID NO: 408610 - RNA, 19 nt, Homo sapiens
  misc_RNA (1)...(19): siRNA sense strand
ucaaggccucuguggauua

SEQ ID NO: 408611 - RNA, 19 nt, Homo sapiens
  misc_RNA (1)...(19): siRNA sense strand
gagagggaguuggaugaug

SEQ ID NO: 408612 - RNA, 19 nt, Homo sapiens
  misc_RNA (1)...(19): siRNA sense strand
ucaaugaccgcaucaagga

SEQ ID NO: 408613 - RNA, 19 nt, Homo sapiens
  misc_RNA (1)...(19): siRNA sense strand
gaaaugcagaugcccaaca

SEQ ID NO: 408614 - RNA, 19 nt, Homo sapiens
  misc_RNA (1)...(19): siRNA sense strand
gcaacagugcucccaauag

SEQ ID NO: 408615 - RNA, 19 nt, Homo sapiens
  misc_RNA (1)...(19): siRNA sense strand
agagggaguuggaugaugu

SEQ ID NO: 408616 - RNA, 19 nt, Homo sapiens
  misc_RNA (1)...(19): siRNA sense strand
agaaagacaaucacaacuu

SEQ ID NO: 408617 - RNA, 19 nt, Homo sapiens
  misc_RNA (1)...(19): siRNA sense strand
gccuggagaugaccaacaa

SEQ ID NO: 408618 - RNA, 19 nt, Homo sapiens
  misc_RNA (1)...(19): siRNA sense strand
cugcggaccugacccagaa

SEQ ID NO: 408619 - RNA, 19 nt, Homo sapiens
  misc_RNA (1)...(19): siRNA sense strand
agaaggaucuggaccucau

SEQ ID NO: 408620 - RNA, 19 nt, Homo sapiens
  misc_RNA (1)...(19): siRNA sense strand
gaagcgagagcucacagau

SEQ ID NO: 408621 - RNA, 19 nt, Homo sapiens
  misc_RNA (1)...(19): siRNA sense strand
ggcaacagugcucccaaua

SEQ ID NO: 408622 - RNA, 19 nt, Homo sapiens
  misc_RNA (1)...(19): siRNA sense strand
uggagaaucccacauccua

SEQ ID NO: 408623 - RNA, 19 nt, Homo sapiens
  misc_RNA (1)...(19): siRNA sense strand
uguugaaggugcaguccua

SEQ ID NO: 408624 - RNA, 19 nt, Homo sapiens
  misc_RNA (1)...(19): siRNA sense strand
guccuuggcuacaucaauc

SEQ ID NO: 408625 - RNA, 19 nt, Homo sapiens
  misc_RNA (1)...(19): siRNA sense strand
ggagcugccuagcgaagag

SEQ ID NO: 408626 - RNA, 19 nt, Homo sapiens
  misc_RNA (1)...(19): siRNA sense strand
gcuggccucugauccacuu

SEQ ID NO: 408627 - RNA, 19 nt, Homo sapiens
  misc_RNA (1)...(19): siRNA sense strand
ggcagaagaaagacaauca

SEQ ID NO: 408628 - RNA, 19 nt, Homo sapiens
  misc_RNA (1)...(19): siRNA sense strand
ccucaaggccucuguggau

SEQ ID NO: 408629 - RNA, 19 nt, Homo sapiens
  misc_RNA (1)...(19): siRNA sense strand
caaggccucuguggauuac

SEQ ID NO: 408630 - RNA, 19 nt, Homo sapiens
  misc_RNA (1)...(19): siRNA sense strand
agaagaaagacaaucacaa

SEQ ID NO: 408631 - RNA, 19 nt, Homo sapiens
  misc_RNA (1)...(19): siRNA sense strand
gagacgaagguucaacauc

SEQ ID NO: 408632 - RNA, 19 nt, Homo sapiens
  misc_RNA (1)...(19): siRNA sense strand
agaaggaccugcaaaaguc

SEQ ID NO: 408633 - RNA, 19 nt, Homo sapiens
  misc_RNA (1)...(19): siRNA sense strand
uggcaacagugcucccaau

SEQ ID NO: 408634 - RNA, 19 nt, Homo sapiens
  misc_RNA (1)...(19): siRNA sense strand
gggagcgcaugcagcaaca

SEQ ID NO: 408635 - RNA, 19 nt, Homo sapiens
  misc_RNA (1)...(19): siRNA sense strand
cagaagaaagacaaucaca

SEQ ID NO: 408636 - RNA, 19 nt, Homo sapiens
  misc_RNA (1)...(19): siRNA sense strand
gccaaggagcggcagaaga

SEQ ID NO: 408637 - RNA, 19 nt, Homo sapiens
  misc_RNA (1)...(19): siRNA sense strand
gcaucaaggaguugggaau

SEQ ID NO: 408638 - RNA, 19 nt, Homo sapiens
  misc_RNA (1)...(19): siRNA sense strand
ggagacgaagguucaacau

SEQ ID NO: 408639 - RNA, 19 nt, Homo sapiens
  misc_RNA (1)...(19): siRNA sense strand
guaccuguccgagaccuau

SEQ ID NO: 408640 - RNA, 19 nt, Homo sapiens
  misc_RNA (1)...(19): siRNA sense strand
caagggcaccauccucaag

SEQ ID NO: 408641 - RNA, 19 nt, Homo sapiens
  misc_RNA (1)...(19): siRNA sense strand
caucaaggaguugggaaug

SEQ ID NO: 408642 - RNA, 19 nt, Homo sapiens
  misc_RNA (1)...(19): siRNA sense strand
caucaaugaccgcaucaag

SEQ ID NO: 408643 - RNA, 19 nt, Homo sapiens
  misc_RNA (1)...(19): siRNA sense strand
uuaauugaaaggagacgaa

SEQ ID NO: 408644 - RNA, 19 nt, Homo sapiens
  misc_RNA (1)...(19): siRNA sense strand
ugcuaccgcuggccucuga

SEQ ID NO: 408645 - RNA, 19 nt, Homo sapiens
  misc_RNA (1)...(19): siRNA sense strand
gaaggaucuggaccucaug

SEQ ID NO: 408646 - RNA, 19 nt, Homo sapiens
  misc_RNA (1)...(19): siRNA sense strand
cccagcagguggugaagca

SEQ ID NO: 408647 - RNA, 19 nt, Homo sapiens
  misc_RNA (1)...(19): siRNA sense strand
cgaagguucaacaucaaug

SEQ ID NO: 408648 - RNA, 19 nt, Homo sapiens
  misc_RNA (1)...(19): siRNA sense strand
caaagaagcuaagcacauu

SEQ ID NO: 408649 - RNA, 19 nt, Homo sapiens
  misc_RNA (1)...(19): siRNA sense strand
guaaguuggugaucauuga

SEQ ID NO: 408650 - RNA, 19 nt, Homo sapiens
  misc_RNA (1)...(19): siRNA sense strand
ggaaauccaacucaaagaa

SEQ ID NO: 408651 - RNA, 19 nt, Homo sapiens
  misc_RNA (1)...(19): siRNA sense strand
gacaauugaugaccuggaa

SEQ ID NO: 408652 - RNA, 19 nt, Homo sapiens
  misc_RNA (1)...(19): siRNA sense strand
agagguggcucguaaguug

SEQ ID NO: 408653 - RNA, 19 nt, Homo sapiens
  misc_RNA (1)...(19): siRNA sense strand
gagagagguaugaagguua

SEQ ID NO: 408654 - RNA, 19 nt, Homo sapiens
  misc_RNA (1)...(19): siRNA sense strand
gguaugaagguuauugaaa

SEQ ID NO: 408655 - RNA, 19 nt, Homo sapiens
  misc_RNA (1)...(19): siRNA sense strand
cuaagcacauugcagaaga

SEQ ID NO: 408656 - RNA, 19 nt, Homo sapiens
  misc_RNA (1)...(19): siRNA sense strand
augaagagguggcucguaa

SEQ ID NO: 408657 - RNA, 19 nt, Homo sapiens
  misc_RNA (1)...(19): siRNA sense strand
gcucguaaguuggugauca

SEQ ID NO: 408658 - RNA, 19 nt, Homo sapiens
  misc_RNA (1)...(19): siRNA sense strand
ugagagagguaugaagguu

SEQ ID NO: 408659 - RNA, 19 nt, Homo sapiens
  misc_RNA (1)...(19): siRNA sense strand
gaaauccaacucaaagaag

SEQ ID NO: 408660 - RNA, 19 nt, Homo sapiens
  misc_RNA (1)...(19): siRNA sense strand
gaugagagugagagaggua

SEQ ID NO: 408661 - RNA, 19 nt, Homo sapiens
  misc_RNA (1)...(19): siRNA sense strand
gaagagguggcucguaagu

SEQ ID NO: 408662 - RNA, 19 nt, Homo sapiens
  misc_RNA (1)...(19): siRNA sense strand
agagagguaugaagguuau

SEQ ID NO: 408663 - RNA, 19 nt, Homo sapiens
  misc_RNA (1)...(19): siRNA sense strand
ccaggaaauccaacucaaa

SEQ ID NO: 408664 - RNA, 19 nt, Homo sapiens
  misc_RNA (1)...(19): siRNA sense strand
ucaaagaagcuaagcacau

SEQ ID NO: 408665 - RNA, 19 nt, Homo sapiens
  misc_RNA (1)...(19): siRNA sense strand
gagguaugaagguuauuga

SEQ ID NO: 408666 - RNA, 19 nt, Homo sapiens
  misc_RNA (1)...(19): siRNA sense strand
gagagugagagagguauga

SEQ ID NO: 408667 - RNA, 19 nt, Homo sapiens
  misc_RNA (1)...(19): siRNA sense strand
caauugaugaccuggaaga

SEQ ID NO: 408668 - RNA, 19 nt, Homo sapiens
  misc_RNA (1)...(19): siRNA sense strand
caggaaauccaacucaaag

SEQ ID NO: 408669 - RNA, 19 nt, Homo sapiens
  misc_RNA (1)...(19): siRNA sense strand
ggaacuccaggaaauccaa

SEQ ID NO: 408670 - RNA, 19 nt, Homo sapiens
  misc_RNA (1)...(19): siRNA sense strand
uaagcacauugcagaagag

SEQ ID NO: 408671 - RNA, 19 nt, Homo sapiens
  misc_RNA (1)...(19): siRNA sense strand
uccaggaaauccaacucaa

SEQ ID NO: 408672 - RNA, 19 nt, Homo sapiens
  misc_RNA (1)...(19): siRNA sense strand
uaaguuggugaucauugaa

SEQ ID NO: 408673 - RNA, 19 nt, Homo sapiens
  misc_RNA (1)...(19): siRNA sense strand
gcuaagcacauugcagaag

SEQ ID NO: 408674 - RNA, 19 nt, Homo sapiens
  misc_RNA (1)...(19): siRNA sense strand
caaagaagcuaagcacauu

SEQ ID NO: 408675 - RNA, 19 nt, Homo sapiens
  misc_RNA (1)...(19): siRNA sense strand
guaaguuggugaucauuga

SEQ ID NO: 408676 - RNA, 19 nt, Homo sapiens
  misc_RNA (1)...(19): siRNA sense strand
ggaaauccaacucaaagaa

SEQ ID NO: 408677 - RNA, 19 nt, Homo sapiens
  misc_RNA (1)...(19): siRNA sense strand
gacaauugaugaccuggaa

SEQ ID NO: 408678 - RNA, 19 nt, Homo sapiens
  misc_RNA (1)...(19): siRNA sense strand
agagguggcucguaaguug

SEQ ID NO: 408679 - RNA, 19 nt, Homo sapiens
  misc_RNA (1)...(19): siRNA sense strand
gagagagguaugaagguua

SEQ ID NO: 408680 - RNA, 19 nt, Homo sapiens
  misc_RNA (1)...(19): siRNA sense strand
gguaugaagguuauugaaa

SEQ ID NO: 408681 - RNA, 19 nt, Homo sapiens
  misc_RNA (1)...(19): siRNA sense strand
cuaagcacauugcagaaga

SEQ ID NO: 408682 - RNA, 19 nt, Homo sapiens
  misc_RNA (1)...(19): siRNA sense strand
augaagagguggcucguaa

SEQ ID NO: 408683 - RNA, 19 nt, Homo sapiens
  misc_RNA (1)...(19): siRNA sense strand
gcucguaaguuggugauca

SEQ ID NO: 408684 - RNA, 19 nt, Homo sapiens
  misc_RNA (1)...(19): siRNA sense strand
gaucauugaaggagacuug

SEQ ID NO: 408685 - RNA, 19 nt, Homo sapiens
  misc_RNA (1)...(19): siRNA sense strand
ugagagagguaugaagguu

SEQ ID NO: 408686 - RNA, 19 nt, Homo sapiens
  misc_RNA (1)...(19): siRNA sense strand
gaaauccaacucaaagaag

SEQ ID NO: 408687 - RNA, 19 nt, Homo sapiens
  misc_RNA (1)...(19): siRNA sense strand
agagagguaugaagguuau

SEQ ID NO: 408688 - RNA, 19 nt, Homo sapiens
  misc_RNA (1)...(19): siRNA sense strand
gaagagguggcucguaagu

SEQ ID NO: 408689 - RNA, 19 nt, Homo sapiens
  misc_RNA (1)...(19): siRNA sense strand
gaugagagugagagaggua

SEQ ID NO: 408690 - RNA, 19 nt, Homo sapiens
  misc_RNA (1)...(19): siRNA sense strand
gcagauaggaaguaugaag

SEQ ID NO: 408691 - RNA, 19 nt, Homo sapiens
  misc_RNA (1)...(19): siRNA sense strand
cagaagaggcagauaggaa

SEQ ID NO: 408692 - RNA, 19 nt, Homo sapiens
  misc_RNA (1)...(19): siRNA sense strand
agagacccgugcugaguuu

SEQ ID NO: 408693 - RNA, 19 nt, Homo sapiens
  misc_RNA (1)...(19): siRNA sense strand
ccaggaaauccaacucaaa

SEQ ID NO: 408694 - RNA, 19 nt, Homo sapiens
  misc_RNA (1)...(19): siRNA sense strand
gcagagacccgugcugagu

SEQ ID NO: 408695 - RNA, 19 nt, Homo sapiens
  misc_RNA (1)...(19): siRNA sense strand
ucaaagaagcuaagcacau

SEQ ID NO: 408696 - RNA, 19 nt, Homo sapiens
  misc_RNA (1)...(19): siRNA sense strand
gagguaugaagguuauuga

SEQ ID NO: 408697 - RNA, 19 nt, Homo sapiens
  misc_RNA (1)...(19): siRNA sense strand
cagauaggaaguaugaaga

SEQ ID NO: 408698 - RNA, 19 nt, Homo sapiens
  misc_RNA (1)...(19): siRNA sense strand
gagagugagagagguauga

SEQ ID NO: 408699 - RNA, 19 nt, Homo sapiens
  misc_RNA (1)...(19): siRNA sense strand
aggcagauaggaaguauga

SEQ ID NO: 408700 - RNA, 19 nt, Homo sapiens
  misc_RNA (1)...(19): siRNA sense strand
gaagaggcagauaggaagu

SEQ ID NO: 408701 - RNA, 19 nt, Homo sapiens
  misc_RNA (1)...(19): siRNA sense strand
caauugaugaccuggaaga

SEQ ID NO: 408702 - RNA, 19 nt, Homo sapiens
  misc_RNA (1)...(19): siRNA sense strand
caggaaauccaacucaaag

SEQ ID NO: 408703 - RNA, 19 nt, Homo sapiens
  misc_RNA (1)...(19): siRNA sense strand
ggaacuccaggaaauccaa

SEQ ID NO: 408704 - RNA, 19 nt, Homo sapiens
  misc_RNA (1)...(19): siRNA sense strand
gcagaagaggcagauagga

SEQ ID NO: 408705 - RNA, 19 nt, Homo sapiens
  misc_RNA (1)...(19): siRNA sense strand
gauucuuacugauaaacuc

SEQ ID NO: 408706 - RNA, 19 nt, Homo sapiens
  misc_RNA (1)...(19): siRNA sense strand
agaggcagauaggaaguau

SEQ ID NO: 408707 - RNA, 19 nt, Homo sapiens
  misc_RNA (1)...(19): siRNA sense strand
cagagacccgugcugaguu

SEQ ID NO: 408708 - RNA, 19 nt, Homo sapiens
  misc_RNA (1)...(19): siRNA sense strand
uaagcacauugcagaagag

SEQ ID NO: 408709 - RNA, 19 nt, Homo sapiens
  misc_RNA (1)...(19): siRNA sense strand
cauugaaggagacuuggaa

SEQ ID NO: 408710 - RNA, 19 nt, Homo sapiens
  misc_RNA (1)...(19): siRNA sense strand
uccaggaaauccaacucaa

SEQ ID NO: 408711 - RNA, 19 nt, Homo sapiens
  misc_RNA (1)...(19): siRNA sense strand
uaaguuggugaucauugaa

SEQ ID NO: 408712 - RNA, 19 nt, Homo sapiens
  misc_RNA (1)...(19): siRNA sense strand
gcuaagcacauugcagaag

SEQ ID NO: 408713 - RNA, 19 nt, Homo sapiens
  misc_RNA (1)...(19): siRNA sense strand
agagaucgguagccaagcu

SEQ ID NO: 408714 - RNA, 19 nt, Homo sapiens
  misc_RNA (1)...(19): siRNA sense strand
uuacugauaaacucaagga

SEQ ID NO: 408715 - RNA, 19 nt, Homo sapiens
  misc_RNA (1)...(19): siRNA sense strand
ggaaccagcucaucaagaa

SEQ ID NO: 408716 - RNA, 19 nt, Homo sapiens
  misc_RNA (1)...(19): siRNA sense strand
gaagaaggaggagcuggaa

SEQ ID NO: 408717 - RNA, 19 nt, Homo sapiens
  misc_RNA (1)...(19): siRNA sense strand
gcgaagagagagagcugua

SEQ ID NO: 408718 - RNA, 19 nt, Homo sapiens
  misc_RNA (1)...(19): siRNA sense strand
gaaaaccugcggagaauug

SEQ ID NO: 408719 - RNA, 19 nt, Homo sapiens
  misc_RNA (1)...(19): siRNA sense strand
gaauacagagaguggaauc

SEQ ID NO: 408720 - RNA, 19 nt, Homo sapiens
  misc_RNA (1)...(19): siRNA sense strand
ggaauccggagcucaucaa

SEQ ID NO: 408721 - RNA, 19 nt, Homo sapiens
  misc_RNA (1)...(19): siRNA sense strand
gagcucaucaagcccaaga

SEQ ID NO: 408722 - RNA, 19 nt, Homo sapiens
  misc_RNA (1)...(19): siRNA sense strand
cagaauacagagaguggaa

SEQ ID NO: 408723 - RNA, 19 nt, Homo sapiens
  misc_RNA (1)...(19): siRNA sense strand
gggaaaaccugcggagaau

SEQ ID NO: 408724 - RNA, 19 nt, Homo sapiens
  misc_RNA (1)...(19): siRNA sense strand
cagagaaggaagaggauca

SEQ ID NO: 408725 - RNA, 19 nt, Homo sapiens
  misc_RNA (1)...(19): siRNA sense strand
cagcucaucaagaagaaga

SEQ ID NO: 408726 - RNA, 19 nt, Homo sapiens
  misc_RNA (1)...(19): siRNA sense strand
gagggagcgggcagacauu

SEQ ID NO: 408727 - RNA, 19 nt, Homo sapiens
  misc_RNA (1)...(19): siRNA sense strand
gcucaucaagcccaagaag

SEQ ID NO: 408728 - RNA, 19 nt, Homo sapiens
  misc_RNA (1)...(19): siRNA sense strand
gaaccagcucaucaagaag

SEQ ID NO: 408729 - RNA, 19 nt, Homo sapiens
  misc_RNA (1)...(19): siRNA sense strand
cggcggaaccagcucauca

SEQ ID NO: 408730 - RNA, 19 nt, Homo sapiens
  misc_RNA (1)...(19): siRNA sense strand
acacugaccagcgaagaga

SEQ ID NO: 408731 - RNA, 19 nt, Homo sapiens
  misc_RNA (1)...(19): siRNA sense strand
gagaguaauuguuguguaa

SEQ ID NO: 408732 - RNA, 19 nt, Homo sapiens
  misc_RNA (1)...(19): siRNA sense strand
aaacaacagugaugcauuu

SEQ ID NO: 408733 - RNA, 19 nt, Homo sapiens
  misc_RNA (1)...(19): siRNA sense strand
ccaaauauucuacgacuua

SEQ ID NO: 408734 - RNA, 19 nt, Homo sapiens
  misc_RNA (1)...(19): siRNA sense strand
cggcggauaugauaaauuu

SEQ ID NO: 408735 - RNA, 19 nt, Homo sapiens
  misc_RNA (1)...(19): siRNA sense strand
ggucagcaguccaaauauu

SEQ ID NO: 408736 - RNA, 19 nt, Homo sapiens
  misc_RNA (1)...(19): siRNA sense strand
caaggacgauuucuacaug

SEQ ID NO: 408737 - RNA, 19 nt, Homo sapiens
  misc_RNA (1)...(19): siRNA sense strand
gcauguauaugacaauugg

SEQ ID NO: 408738 - RNA, 19 nt, Homo sapiens
  misc_RNA (1)...(19): siRNA sense strand
caaagcauguauaugacaa

SEQ ID NO: 408739 - RNA, 19 nt, Homo sapiens
  misc_RNA (1)...(19): siRNA sense strand
caacagugaugcauuuggu

SEQ ID NO: 408740 - RNA, 19 nt, Homo sapiens
  misc_RNA (1)...(19): siRNA sense strand
uugcaaagcauguauauga

SEQ ID NO: 408741 - RNA, 19 nt, Homo sapiens
  misc_RNA (1)...(19): siRNA sense strand
caggucagcaguccaaaua

SEQ ID NO: 408742 - RNA, 19 nt, Homo sapiens
  misc_RNA (1)...(19): siRNA sense strand
ugagaagacuggagagagu

SEQ ID NO: 408743 - RNA, 19 nt, Homo sapiens
  misc_RNA (1)...(19): siRNA sense strand
gaguaauuguuguguaauc

SEQ ID NO: 408744 - RNA, 19 nt, Homo sapiens
  misc_RNA (1)...(19): siRNA sense strand
cgauucugcuucugacauu

SEQ ID NO: 408745 - RNA, 19 nt, Homo sapiens
  misc_RNA (1)...(19): siRNA sense strand
agagaguaauuguugugua

SEQ ID NO: 408746 - RNA, 19 nt, Homo sapiens
  misc_RNA (1)...(19): siRNA sense strand
gcaaagcauguauaugaca

SEQ ID NO: 408747 - RNA, 19 nt, Homo sapiens
  misc_RNA (1)...(19): siRNA sense strand
ccaauggacugggaagaag

SEQ ID NO: 408748 - RNA, 19 nt, Homo sapiens
  misc_RNA (1)...(19): siRNA sense strand
gagaagacuggagagagua

SEQ ID NO: 408749 - RNA, 19 nt, Homo sapiens
  misc_RNA (1)...(19): siRNA sense strand
ggucagaggaaucgugaga

SEQ ID NO: 408750 - RNA, 19 nt, Homo sapiens
  misc_RNA (1)...(19): siRNA sense strand
gagcaggucagcaguccaa

SEQ ID NO: 408751 - RNA, 19 nt, Homo sapiens
  misc_RNA (1)...(19): siRNA sense strand
ucagaggaaucgugagaag

SEQ ID NO: 408752 - RNA, 19 nt, Homo sapiens
  misc_RNA (1)...(19): siRNA sense strand
ggagagaguaauuguugug

SEQ ID NO: 408753 - RNA, 19 nt, Homo sapiens
  misc_RNA (1)...(19): siRNA sense strand
ggacgauuucuacauggaa

SEQ ID NO: 408754 - RNA, 19 nt, Homo sapiens
  misc_RNA (1)...(19): siRNA sense strand
gauaaauuugcgccucauu

SEQ ID NO: 408755 - RNA, 19 nt, Homo sapiens
  misc_RNA (1)...(19): siRNA sense strand
uaucaaggacgauuucuac

SEQ ID NO: 408756 - RNA, 19 nt, Homo sapiens
  misc_RNA (1)...(19): siRNA sense strand
cuucugacauugcaaagca

SEQ ID NO: 408757 - RNA, 19 nt, Homo sapiens
  misc_RNA (1)...(19): siRNA sense strand
ugucacauuaggagcauua

SEQ ID NO: 408758 - RNA, 19 nt, Homo sapiens
  misc_RNA (1)...(19): siRNA sense strand
gccaauggacugggaagaa

SEQ ID NO: 408759 - RNA, 19 nt, Homo sapiens
  misc_RNA (1)...(19): siRNA sense strand
cuggagagaguaauuguug

SEQ ID NO: 408760 - RNA, 19 nt, Homo sapiens
  misc_RNA (1)...(19): siRNA sense strand
cuaacgauucugcuucuga

SEQ ID NO: 408761 - RNA, 19 nt, Homo sapiens
  misc_RNA (1)...(19): siRNA sense strand
gcaggucagcaguccaaau

SEQ ID NO: 408762 - RNA, 19 nt, Homo sapiens
  misc_RNA (1)...(19): siRNA sense strand
ucaaggacgauuucuacau

SEQ ID NO: 408763 - RNA, 19 nt, Homo sapiens
  misc_RNA (1)...(19): siRNA sense strand
agacauuaccagagccaaa

SEQ ID NO: 408764 - RNA, 19 nt, Homo sapiens
  misc_RNA (1)...(19): siRNA sense strand
cagcaguccaaauauucua

SEQ ID NO: 408765 - RNA, 19 nt, Homo sapiens
  misc_RNA (1)...(19): siRNA sense strand
gcggauaugauaaauuugc

SEQ ID NO: 408766 - RNA, 19 nt, Homo sapiens
  misc_RNA (1)...(19): siRNA sense strand
ucacauuaggagcauuaaa

SEQ ID NO: 408767 - RNA, 19 nt, Homo sapiens
  misc_RNA (1)...(19): siRNA sense strand
agaagacuggagagaguaa

SEQ ID NO: 408768 - RNA, 19 nt, Homo sapiens
  misc_RNA (1)...(19): siRNA sense strand
gucagcaguccaaauauuc

SEQ ID NO: 408769 - RNA, 19 nt, Homo sapiens
  misc_RNA (1)...(19): siRNA sense strand
gagagaguaauuguugugu

SEQ ID NO: 408770 - RNA, 19 nt, Homo sapiens
  misc_RNA (1)...(19): siRNA sense strand
caauggacugggaagaaga

SEQ ID NO: 408771 - RNA, 19 nt, Homo sapiens
  misc_RNA (1)...(19): siRNA sense strand
gauucugcuucugacauug

SEQ ID NO: 408772 - RNA, 19 nt, Homo sapiens
  misc_RNA (1)...(19): siRNA sense strand
gaacagauccggaagaaga

SEQ ID NO: 408773 - RNA, 19 nt, Homo sapiens
  misc_RNA (1)...(19): siRNA sense strand
gcuaacagcggcucaagaa

SEQ ID NO: 408774 - RNA, 19 nt, Homo sapiens
  misc_RNA (1)...(19): siRNA sense strand
ucacggagcuggccaucau

SEQ ID NO: 408775 - RNA, 19 nt, Homo sapiens
  misc_RNA (1)...(19): siRNA sense strand
gaagaacagauccggaaga

SEQ ID NO: 408776 - RNA, 19 nt, Homo sapiens
  misc_RNA (1)...(19): siRNA sense strand
cuaagcaagugccugguuu

SEQ ID NO: 408777 - RNA, 19 nt, Homo sapiens
  misc_RNA (1)...(19): siRNA sense strand
agaagaagauucggaaaca

SEQ ID NO: 408778 - RNA, 19 nt, Homo sapiens
  misc_RNA (1)...(19): siRNA sense strand
gaagaagaagauucggaaa

SEQ ID NO: 408779 - RNA, 19 nt, Homo sapiens
  misc_RNA (1)...(19): siRNA sense strand
aagaacagauccggaagaa

SEQ ID NO: 408780 - RNA, 19 nt, Homo sapiens
  misc_RNA (1)...(19): siRNA sense strand
uggaggcgcugcuguccua

SEQ ID NO: 408781 - RNA, 19 nt, Homo sapiens
  misc_RNA (1)...(19): siRNA sense strand
ccagauggacgcuuucaug

SEQ ID NO: 408782 - RNA, 19 nt, Homo sapiens
  misc_RNA (1)...(19): siRNA sense strand
gagaucaugcugcuagaga

SEQ ID NO: 408783 - RNA, 19 nt, Homo sapiens
  misc_RNA (1)...(19): siRNA sense strand
aacagcggcucaagaacua

SEQ ID NO: 408784 - RNA, 19 nt, Homo sapiens
  misc_RNA (1)...(19): siRNA sense strand
gcucaucgccaucaacauc

SEQ ID NO: 408785 - RNA, 19 nt, Homo sapiens
  misc_RNA (1)...(19): siRNA sense strand
cagaguguaucaccuucuu

SEQ ID NO: 408786 - RNA, 19 nt, Homo sapiens
  misc_RNA (1)...(19): siRNA sense strand
gaguguaucaccuucuuga

SEQ ID NO: 408787 - RNA, 19 nt, Homo sapiens
  misc_RNA (1)...(19): siRNA sense strand
ccagaucgcccuccugaag

SEQ ID NO: 408788 - RNA, 19 nt, Homo sapiens
  misc_RNA (1)...(19): siRNA sense strand
ggagcuggccaucaucuca

SEQ ID NO: 408789 - RNA, 19 nt, Homo sapiens
  misc_RNA (1)...(19): siRNA sense strand
uaacagcggcucaagaacu

SEQ ID NO: 408790 - RNA, 19 nt, Homo sapiens
  misc_RNA (1)...(19): siRNA sense strand
gcagugcguccuuucugaa

SEQ ID NO: 408791 - RNA, 19 nt, Homo sapiens
  misc_RNA (1)...(19): siRNA sense strand
gcuacaaccacgagacaga

SEQ ID NO: 408792 - RNA, 19 nt, Homo sapiens
  misc_RNA (1)...(19): siRNA sense strand
gcaacaaacgcuccuucuc

SEQ ID NO: 408793 - RNA, 19 nt, Homo sapiens
  misc_RNA (1)...(19): siRNA sense strand
gcuaagcaagugccugguu

SEQ ID NO: 408794 - RNA, 19 nt, Homo sapiens
  misc_RNA (1)...(19): siRNA sense strand
gaucguggacuucgcuaag

SEQ ID NO: 408795 - RNA, 19 nt, Homo sapiens
  misc_RNA (1)...(19): siRNA sense strand
ccugccagauggacgcuuu

SEQ ID NO: 408796 - RNA, 19 nt, Homo sapiens
  misc_RNA (1)...(19): siRNA sense strand
agacagaguguaucaccuu

SEQ ID NO: 408797 - RNA, 19 nt, Homo sapiens
  misc_RNA (1)...(19): siRNA sense strand
gagcagugcguccuuucug

SEQ ID NO: 408798 - RNA, 19 nt, Homo sapiens
  misc_RNA (1)...(19): siRNA sense strand
aggcgaggguguccagcua

SEQ ID NO: 408799 - RNA, 19 nt, Homo sapiens
  misc_RNA (1)...(19): siRNA sense strand
caucccagaucccgaagag

SEQ ID NO: 408800 - RNA, 19 nt, Homo sapiens
  misc_RNA (1)...(19): siRNA sense strand
gaucaugcugcuagagaca

SEQ ID NO: 408801 - RNA, 19 nt, Homo sapiens
  misc_RNA (1)...(19): siRNA sense strand
gcagguggaguucaucaac

SEQ ID NO: 408802 - RNA, 19 nt, Homo sapiens
  misc_RNA (1)...(19): siRNA sense strand
ggcauccacuaucgagauc

SEQ ID NO: 408803 - RNA, 19 nt, Homo sapiens
  misc_RNA (1)...(19): siRNA sense strand
accacgaguucccuggaua

SEQ ID NO: 408804 - RNA, 19 nt, Homo sapiens
  misc_RNA (1)...(19): siRNA sense strand
cuacagcaaggacgacuuc

SEQ ID NO: 408805 - RNA, 19 nt, Homo sapiens
  misc_RNA (1)...(19): siRNA sense strand
cuucuucacccacuguaaa

SEQ ID NO: 408806 - RNA, 19 nt, Homo sapiens
  misc_RNA (1)...(19): siRNA sense strand
gcaaggaggcagggaugag

SEQ ID NO: 408807 - RNA, 19 nt, Homo sapiens
  misc_RNA (1)...(19): siRNA sense strand
cauccacuaucgagaucau

SEQ ID NO: 408808 - RNA, 19 nt, Homo sapiens
  misc_RNA (1)...(19): siRNA sense strand
agcagugcguccuuucuga

SEQ ID NO: 408809 - RNA, 19 nt, Homo sapiens
  misc_RNA (1)...(19): siRNA sense strand
gcacucggagcaggucuuc

SEQ ID NO: 408810 - RNA, 19 nt, Homo sapiens
  misc_RNA (1)...(19): siRNA sense strand
caaccacgagacagagugu

SEQ ID NO: 408811 - RNA, 19 nt, Homo sapiens
  misc_RNA (1)...(19): siRNA sense strand
gcgcuacaaccacgagaca

SEQ ID NO: 408812 - RNA, 19 nt, Homo sapiens
  misc_RNA (1)...(19): siRNA sense strand
cugaaggcauccacuaucg

SEQ ID NO: 408813 - RNA, 19 nt, Homo sapiens
  misc_RNA (1)...(19): siRNA sense strand
cucaagaacuaaugaucca

SEQ ID NO: 408814 - RNA, 19 nt, Homo sapiens
  misc_RNA (1)...(19): siRNA sense strand
gcgaggguguccagcuaac

SEQ ID NO: 408815 - RNA, 19 nt, Homo sapiens
  misc_RNA (1)...(19): siRNA sense strand
ggagguuacuucaaugaug

SEQ ID NO: 408816 - RNA, 19 nt, Homo sapiens
  misc_RNA (1)...(19): siRNA sense strand
cgacagcgguggaaauauc

SEQ ID NO: 408817 - RNA, 19 nt, Homo sapiens
  misc_RNA (1)...(19): siRNA sense strand
ccaagaagccaaacucaga

SEQ ID NO: 408818 - RNA, 19 nt, Homo sapiens
  misc_RNA (1)...(19): siRNA sense strand
gagaucaccauucaacgua

SEQ ID NO: 408819 - RNA, 19 nt, Homo sapiens
  misc_RNA (1)...(19): siRNA sense strand
gagguuacuucaaugaugu

SEQ ID NO: 408820 - RNA, 19 nt, Homo sapiens
  misc_RNA (1)...(19): siRNA sense strand
aaucgugucucccaucgua

SEQ ID NO: 408821 - RNA, 19 nt, Homo sapiens
  misc_RNA (1)...(19): siRNA sense strand
gagcagcagccaguuauuu

SEQ ID NO: 408822 - RNA, 19 nt, Homo sapiens
  misc_RNA (1)...(19): siRNA sense strand
acucagauaucuacccaaa

SEQ ID NO: 408823 - RNA, 19 nt, Homo sapiens
  misc_RNA (1)...(19): siRNA sense strand
ucagauaucuacccaaagc

SEQ ID NO: 408824 - RNA, 19 nt, Homo sapiens
  misc_RNA (1)...(19): siRNA sense strand
gaucaccauucaacguaug

SEQ ID NO: 408825 - RNA, 19 nt, Homo sapiens
  misc_RNA (1)...(19): siRNA sense strand
caguggagguuacuucaau

SEQ ID NO: 408826 - RNA, 19 nt, Homo sapiens
  misc_RNA (1)...(19): siRNA sense strand
caacaguggagguuacuuc

SEQ ID NO: 408827 - RNA, 19 nt, Homo sapiens
  misc_RNA (1)...(19): siRNA sense strand
gaagccaaacucagauauc

SEQ ID NO: 408828 - RNA, 19 nt, Homo sapiens
  misc_RNA (1)...(19): siRNA sense strand
ggcgguggcuacuccaguu

SEQ ID NO: 408829 - RNA, 19 nt, Homo sapiens
  misc_RNA (1)...(19): siRNA sense strand
ggagaucaccauucaacgu

SEQ ID NO: 408830 - RNA, 19 nt, Homo sapiens
  misc_RNA (1)...(19): siRNA sense strand
gggagcagcagccaguuau

SEQ ID NO: 408831 - RNA, 19 nt, Homo sapiens
  misc_RNA (1)...(19): siRNA sense strand
gcagcagccaguuauuuca

SEQ ID NO: 408832 - RNA, 19 nt, Homo sapiens
  misc_RNA (1)...(19): siRNA sense strand
caggacccaugaaccagaa

SEQ ID NO: 408833 - RNA, 19 nt, Homo sapiens
  misc_RNA (1)...(19): siRNA sense strand
aaggcaauaugguagcaaa

SEQ ID NO: 408834 - RNA, 19 nt, Homo sapiens
  misc_RNA (1)...(19): siRNA sense strand
gcacgcccgaggucaaaga

SEQ ID NO: 408835 - RNA, 19 nt, Homo sapiens
  misc_RNA (1)...(19): siRNA sense strand
caagaagccaaacucagau

SEQ ID NO: 408836 - RNA, 19 nt, Homo sapiens
  misc_RNA (1)...(19): siRNA sense strand
gguggcuacuccaguuaug

SEQ ID NO: 408837 - RNA, 19 nt, Homo sapiens
  misc_RNA (1)...(19): siRNA sense strand
aagccaaacucagauaucu

SEQ ID NO: 408838 - RNA, 19 nt, Homo sapiens
  misc_RNA (1)...(19): siRNA sense strand
gcagccaguuauuucaaac

SEQ ID NO: 408839 - RNA, 19 nt, Homo sapiens
  misc_RNA (1)...(19): siRNA sense strand
ggagcagcagccaguuauu

SEQ ID NO: 408840 - RNA, 19 nt, Homo sapiens
  misc_RNA (1)...(19): siRNA sense strand
gccaaacucagauaucuac

SEQ ID NO: 408841 - RNA, 19 nt, Homo sapiens
  misc_RNA (1)...(19): siRNA sense strand
gucuugcguuccuguguuu

SEQ ID NO: 408842 - RNA, 19 nt, Homo sapiens
  misc_RNA (1)...(19): siRNA sense strand
caacacgcacgguggagau

SEQ ID NO: 408843 - RNA, 19 nt, Homo sapiens
  misc_RNA (1)...(19): siRNA sense strand
aagaagccaaacucagaua

SEQ ID NO: 408844 - RNA, 19 nt, Homo sapiens
  misc_RNA (1)...(19): siRNA sense strand
gcgguggcuacuccaguua

SEQ ID NO: 408845 - RNA, 19 nt, Homo sapiens
  misc_RNA (1)...(19): siRNA sense strand
uccagaaggcaauauggua

SEQ ID NO: 408846 - RNA, 19 nt, Homo sapiens
  misc_RNA (1)...(19): siRNA sense strand
cccgacagcgguggaaaua

SEQ ID NO: 408847 - RNA, 19 nt, Homo sapiens
  misc_RNA (1)...(19): siRNA sense strand
ugucuugcguuccuguguu

SEQ ID NO: 408848 - RNA, 19 nt, Homo sapiens
  misc_RNA (1)...(19): siRNA sense strand
cggcaacaguggagguuac

SEQ ID NO: 408849 - RNA, 19 nt, Homo sapiens
  misc_RNA (1)...(19): siRNA sense strand
cagcagccaguuauuucaa

SEQ ID NO: 408850 - RNA, 19 nt, Homo sapiens
  misc_RNA (1)...(19): siRNA sense strand
guggagguuacuucaauga

SEQ ID NO: 408851 - RNA, 19 nt, Homo sapiens
  misc_RNA (1)...(19): siRNA sense strand
agacuuugauuuggcagau

SEQ ID NO: 408852 - RNA, 19 nt, Homo sapiens
  misc_RNA (1)...(19): siRNA sense strand
acccugaacccaccaagaa

SEQ ID NO: 408853 - RNA, 19 nt, Homo sapiens
  misc_RNA (1)...(19): siRNA sense strand
gcaauccagaaggcaauau

SEQ ID NO: 408854 - RNA, 19 nt, Homo sapiens
  misc_RNA (1)...(19): siRNA sense strand
ccaccaagaagccaaacuc

SEQ ID NO: 408855 - RNA, 19 nt, Homo sapiens
  misc_RNA (1)...(19): siRNA sense strand
ugggagcagcagccaguua

SEQ ID NO: 408856 - RNA, 19 nt, Homo sapiens
  misc_RNA (1)...(19): siRNA sense strand
uauggcaacuccgacaaca

SEQ ID NO: 408857 - RNA, 19 nt, Homo sapiens
  misc_RNA (1)...(19): siRNA sense strand
ggaaagagccugccugucu

SEQ ID NO: 408858 - RNA, 19 nt, Homo sapiens
  misc_RNA (1)...(19): siRNA sense strand
ggacacaguuccucuggau

SEQ ID NO: 408859 - RNA, 19 nt, Homo sapiens
  misc_RNA (1)...(19): siRNA sense strand
gguauaagcaacagacuaa

SEQ ID NO: 408860 - RNA, 19 nt, Homo sapiens
  misc_RNA (1)...(19): siRNA sense strand
ggacaggaguaccagauca

SEQ ID NO: 408861 - RNA, 19 nt, Homo sapiens
  misc_RNA (1)...(19): siRNA sense strand
caaagacuccucaaagcua

SEQ ID NO: 408862 - RNA, 19 nt, Homo sapiens
  misc_RNA (1)...(19): siRNA sense strand
gaagacaucccaacaagag

SEQ ID NO: 408863 - RNA, 19 nt, Homo sapiens
  misc_RNA (1)...(19): siRNA sense strand
gcaaccaagucgugagaga

SEQ ID NO: 408864 - RNA, 19 nt, Homo sapiens
  misc_RNA (1)...(19): siRNA sense strand
ugacauggauggcuaccuu

SEQ ID NO: 408865 - RNA, 19 nt, Homo sapiens
  misc_RNA (1)...(19): siRNA sense strand
acacaguuccucuggauua

SEQ ID NO: 408866 - RNA, 19 nt, Homo sapiens
  misc_RNA (1)...(19): siRNA sense strand
ccaggaacccaucaaagua

SEQ ID NO: 408867 - RNA, 19 nt, Homo sapiens
  misc_RNA (1)...(19): siRNA sense strand
aaagcaacaucuacaguga

SEQ ID NO: 408868 - RNA, 19 nt, Homo sapiens
  misc_RNA (1)...(19): siRNA sense strand
caaaguagcaacccuaagu

SEQ ID NO: 408869 - RNA, 19 nt, Homo sapiens
  misc_RNA (1)...(19): siRNA sense strand
ggcaacaacuacucugaug

SEQ ID NO: 408870 - RNA, 19 nt, Homo sapiens
  misc_RNA (1)...(19): siRNA sense strand
ccacaagguuccaggagau

SEQ ID NO: 408871 - RNA, 19 nt, Homo sapiens
  misc_RNA (1)...(19): siRNA sense strand
gggcaaaagugucuguuaa

SEQ ID NO: 408872 - RNA, 19 nt, Homo sapiens
  misc_RNA (1)...(19): siRNA sense strand
ggucaaagacuccucaaag

SEQ ID NO: 408873 - RNA, 19 nt, Homo sapiens
  misc_RNA (1)...(19): siRNA sense strand
gaaugaggauuagccuuca

SEQ ID NO: 408874 - RNA, 19 nt, Homo sapiens
  misc_RNA (1)...(19): siRNA sense strand
caaagcuacucaagaccaa

SEQ ID NO: 408875 - RNA, 19 nt, Homo sapiens
  misc_RNA (1)...(19): siRNA sense strand
ccucaaagcuacucaagac

SEQ ID NO: 408876 - RNA, 19 nt, Homo sapiens
  misc_RNA (1)...(19): siRNA sense strand
ugagagauaagauuacuga

SEQ ID NO: 408877 - RNA, 19 nt, Homo sapiens
  misc_RNA (1)...(19): siRNA sense strand
gaagugccagagaguguaa

SEQ ID NO: 408878 - RNA, 19 nt, Homo sapiens
  misc_RNA (1)...(19): siRNA sense strand
guucuccucccaucaguua

SEQ ID NO: 408879 - RNA, 19 nt, Homo sapiens
  misc_RNA (1)...(19): siRNA sense strand
ggacuggaccacugacaug

SEQ ID NO: 408880 - RNA, 19 nt, Homo sapiens
  misc_RNA (1)...(19): siRNA sense strand
acaagagcaugucuacgaa

SEQ ID NO: 408881 - RNA, 19 nt, Homo sapiens
  misc_RNA (1)...(19): siRNA sense strand
cuucaagccugcggugaua

SEQ ID NO: 408882 - RNA, 19 nt, Homo sapiens
  misc_RNA (1)...(19): siRNA sense strand
caguuccucuggauuauga

SEQ ID NO: 408883 - RNA, 19 nt, Homo sapiens
  misc_RNA (1)...(19): siRNA sense strand
ccagaucaauggcaacuac

SEQ ID NO: 408884 - RNA, 19 nt, Homo sapiens
  misc_RNA (1)...(19): siRNA sense strand
caacgacucuggagaaacc

SEQ ID NO: 408885 - RNA, 19 nt, Homo sapiens
  misc_RNA (1)...(19): siRNA sense strand
gcaacaacuacucugauga

SEQ ID NO: 408886 - RNA, 19 nt, Homo sapiens
  misc_RNA (1)...(19): siRNA sense strand
acagcgacauugugaaguu

SEQ ID NO: 408887 - RNA, 19 nt, Homo sapiens
  misc_RNA (1)...(19): siRNA sense strand
ggaagacaucccaacaaga

SEQ ID NO: 408888 - RNA, 19 nt, Homo sapiens
  misc_RNA (1)...(19): siRNA sense strand
agauguaucccuccaauug

SEQ ID NO: 408889 - RNA, 19 nt, Homo sapiens
  misc_RNA (1)...(19): siRNA sense strand
cggaagacaucccaacaag

SEQ ID NO: 408890 - RNA, 19 nt, Homo sapiens
  misc_RNA (1)...(19): siRNA sense strand
gauguaucccuccaauuga

SEQ ID NO: 408891 - RNA, 19 nt, Homo sapiens
  misc_RNA (1)...(19): siRNA sense strand
cgacucaggcuccuauuuc

SEQ ID NO: 408892 - RNA, 19 nt, Homo sapiens
  misc_RNA (1)...(19): siRNA sense strand
gagccaacuucccagaauc

SEQ ID NO: 408893 - RNA, 19 nt, Homo sapiens
  misc_RNA (1)...(19): siRNA sense strand
gccaacgacucuggagaaa

SEQ ID NO: 408894 - RNA, 19 nt, Homo sapiens
  misc_RNA (1)...(19): siRNA sense strand
ggaagugccagagagugua

SEQ ID NO: 408895 - RNA, 19 nt, Homo sapiens
  misc_RNA (1)...(19): siRNA sense strand
gcucagacccugucaccau

SEQ ID NO: 408896 - RNA, 19 nt, Homo sapiens
  misc_RNA (1)...(19): siRNA sense strand
gaaaggggaugugaaucuu

SEQ ID NO: 408897 - RNA, 19 nt, Homo sapiens
  misc_RNA (1)...(19): siRNA sense strand
caacaacuacucugaugag

SEQ ID NO: 408898 - RNA, 19 nt, Homo sapiens
  misc_RNA (1)...(19): siRNA sense strand
cagcgacauugugaaguuu

SEQ ID NO: 408899 - RNA, 19 nt, Homo sapiens
  misc_RNA (1)...(19): siRNA sense strand
gagcagcacagcgacauug

SEQ ID NO: 408900 - RNA, 19 nt, Homo sapiens
  misc_RNA (1)...(19): siRNA sense strand
uaaccaggaacccaucaaa

SEQ ID NO: 408901 - RNA, 19 nt, Homo sapiens
  misc_RNA (1)...(19): siRNA sense strand
ugagccaacuucccagaau

SEQ ID NO: 408902 - RNA, 19 nt, Homo sapiens
  misc_RNA (1)...(19): siRNA sense strand
caacaucuacagugaagca

SEQ ID NO: 408903 - RNA, 19 nt, Homo sapiens
  misc_RNA (1)...(19): siRNA sense strand
aaaguagcaacccuaagua

SEQ ID NO: 408904 - RNA, 19 nt, Homo sapiens
  misc_RNA (1)...(19): siRNA sense strand
caagguuccaggagaugua

SEQ ID NO: 408905 - RNA, 19 nt, Homo sapiens
  misc_RNA (1)...(19): siRNA sense strand
aaucuucccugcaccuaug

SEQ ID NO: 408906 - RNA, 19 nt, Homo sapiens
  misc_RNA (1)...(19): siRNA sense strand
caccuacaaccaugacaua

SEQ ID NO: 408907 - RNA, 19 nt, Homo sapiens
  misc_RNA (1)...(19): siRNA sense strand
gucgugagagauaagauua

SEQ ID NO: 408908 - RNA, 19 nt, Homo sapiens
  misc_RNA (1)...(19): siRNA sense strand
ggccaacgacucuggagaa

SEQ ID NO: 408909 - RNA, 19 nt, Homo sapiens
  misc_RNA (1)...(19): siRNA sense strand
gaucuuacugggccugcua

SEQ ID NO: 408910 - RNA, 19 nt, Homo sapiens
  misc_RNA (1)...(19): siRNA sense strand
ccucccaucaguuauauuu

SEQ ID NO: 408911 - RNA, 19 nt, Homo sapiens
  misc_RNA (1)...(19): siRNA sense strand
aaccaagucgugagagaua

SEQ ID NO: 408912 - RNA, 19 nt, Homo sapiens
  misc_RNA (1)...(19): siRNA sense strand
ugagcuccguguccagaaa

SEQ ID NO: 408913 - RNA, 19 nt, Homo sapiens
  misc_RNA (1)...(19): siRNA sense strand
gucaaagacuccucaaagc

SEQ ID NO: 408914 - RNA, 19 nt, Homo sapiens
  misc_RNA (1)...(19): siRNA sense strand
ccaugaggguggccaucuu

SEQ ID NO: 408915 - RNA, 19 nt, Homo sapiens
  misc_RNA (1)...(19): siRNA sense strand
ugacaacuggcagcgguua

SEQ ID NO: 408916 - RNA, 19 nt, Homo sapiens
  misc_RNA (1)...(19): siRNA sense strand
gagauguaucccuccaauu

SEQ ID NO: 408917 - RNA, 19 nt, Homo sapiens
  misc_RNA (1)...(19): siRNA sense strand
guaacaggaccuuggaaag

SEQ ID NO: 408918 - RNA, 19 nt, Homo sapiens
  misc_RNA (1)...(19): siRNA sense strand
aacaagagcaugucuacga

SEQ ID NO: 408919 - RNA, 19 nt, Homo sapiens
  misc_RNA (1)...(19): siRNA sense strand
gcgacauugugaaguuugu

SEQ ID NO: 408920 - RNA, 19 nt, Homo sapiens
  misc_RNA (1)...(19): siRNA sense strand
gacucaggcuccuauuucu

SEQ ID NO: 408921 - RNA, 19 nt, Homo sapiens
  misc_RNA (1)...(19): siRNA sense strand
uagcaacccuaaguaccuu

SEQ ID NO: 408922 - RNA, 19 nt, Homo sapiens
  misc_RNA (1)...(19): siRNA sense strand
ccacuacacgugugaaguc

SEQ ID NO: 408923 - RNA, 19 nt, Homo sapiens
  misc_RNA (1)...(19): siRNA sense strand
ugagcacccuggagaugga

SEQ ID NO: 408924 - RNA, 19 nt, Homo sapiens
  misc_RNA (1)...(19): siRNA sense strand
gcaaggcuacacccaaguc

SEQ ID NO: 408925 - RNA, 19 nt, Homo sapiens
  misc_RNA (1)...(19): siRNA sense strand
gaaucuucccugcaccuau

SEQ ID NO: 408926 - RNA, 19 nt, Homo sapiens
  misc_RNA (1)...(19): siRNA sense strand
ccaacaagagcaugucuac

SEQ ID NO: 408927 - RNA, 19 nt, Homo sapiens
  misc_RNA (1)...(19): siRNA sense strand
ccagugaugagccaacuuc

SEQ ID NO: 408928 - RNA, 19 nt, Homo sapiens
  misc_RNA (1)...(19): siRNA sense strand
caggaacccaucaaaguag

SEQ ID NO: 408929 - RNA, 19 nt, Homo sapiens
  misc_RNA (1)...(19): siRNA sense strand
cacaguuccucuggauuau

SEQ ID NO: 408930 - RNA, 19 nt, Homo sapiens
  misc_RNA (1)...(19): siRNA sense strand
gcauaggacaggaguacca

SEQ ID NO: 408931 - RNA, 19 nt, Homo sapiens
  misc_RNA (1)...(19): siRNA sense strand
gcaccuacaaccaugacau

SEQ ID NO: 408932 - RNA, 19 nt, Homo sapiens
  misc_RNA (1)...(19): siRNA sense strand
ucccaucaguuauauuugg

SEQ ID NO: 408933 - RNA, 19 nt, Homo sapiens
  misc_RNA (1)...(19): siRNA sense strand
gggcaacaacuacucugau

SEQ ID NO: 408934 - RNA, 19 nt, Homo sapiens
  misc_RNA (1)...(19): siRNA sense strand
gaacccaucaaaguagcaa

SEQ ID NO: 408935 - RNA, 19 nt, Homo sapiens
  misc_RNA (1)...(19): siRNA sense strand
uguaacaggaccuuggaaa

SEQ ID NO: 408936 - RNA, 19 nt, Homo sapiens
  misc_RNA (1)...(19): siRNA sense strand
ggaaaggggaugugaaucu

SEQ ID NO: 408937 - RNA, 19 nt, Homo sapiens
  misc_RNA (1)...(19): siRNA sense strand
ugaaagcaacaucuacagu

SEQ ID NO: 408938 - RNA, 19 nt, Homo sapiens
  misc_RNA (1)...(19): siRNA sense strand
ucuccucccaucaguuaua

SEQ ID NO: 408939 - RNA, 19 nt, Homo sapiens
  misc_RNA (1)...(19): siRNA sense strand
gccaucauccucaucaucu

SEQ ID NO: 408940 - RNA, 19 nt, Homo sapiens
  misc_RNA (1)...(19): siRNA sense strand
ucaaagacuccucaaagcu

SEQ ID NO: 408941 - RNA, 19 nt, Homo sapiens
  misc_RNA (1)...(19): siRNA sense strand
gcacccuggagauggauga

SEQ ID NO: 408942 - RNA, 19 nt, Homo sapiens
  misc_RNA (1)...(19): siRNA sense strand
caaguggcugcuccaguga

SEQ ID NO: 408943 - RNA, 19 nt, Homo sapiens
  misc_RNA (1)...(19): siRNA sense strand
caaccaagucgugagagau

SEQ ID NO: 408944 - RNA, 19 nt, Homo sapiens
  misc_RNA (1)...(19): siRNA sense strand
augaguuucuggccacuga

SEQ ID NO: 408945 - RNA, 19 nt, Homo sapiens
  misc_RNA (1)...(19): siRNA sense strand
uccucuggauuaugaguuu

SEQ ID NO: 408946 - RNA, 19 nt, Homo sapiens
  misc_RNA (1)...(19): siRNA sense strand
ugaugagcccugcauagga

SEQ ID NO: 408947 - RNA, 19 nt, Homo sapiens
  misc_RNA (1)...(19): siRNA sense strand
gaaucugggcaacaacuac

SEQ ID NO: 408948 - RNA, 19 nt, Homo sapiens
  misc_RNA (1)...(19): siRNA sense strand
gaagcagccagggcacaug

SEQ ID NO: 408949 - RNA, 19 nt, Homo sapiens
  misc_RNA (1)...(19): siRNA sense strand
ugacucuucuggagaccau

SEQ ID NO: 408950 - RNA, 19 nt, Homo sapiens
  misc_RNA (1)...(19): siRNA sense strand
gaggauuagccuucaaugc

SEQ ID NO: 408951 - RNA, 19 nt, Homo sapiens
  misc_RNA (1)...(19): siRNA sense strand
agagaaagcuuaugaaugu

SEQ ID NO: 408952 - RNA, 19 nt, Homo sapiens
  misc_RNA (1)...(19): siRNA sense strand
gcacacaccuuacucaaca

SEQ ID NO: 408953 - RNA, 19 nt, Homo sapiens
  misc_RNA (1)...(19): siRNA sense strand
gaacaucagaauacucaua

SEQ ID NO: 408954 - RNA, 19 nt, Homo sapiens
  misc_RNA (1)...(19): siRNA sense strand
gcacucaucugacugaaca

SEQ ID NO: 408955 - RNA, 19 nt, Homo sapiens
  misc_RNA (1)...(19): siRNA sense strand
gaaauaaagguaaccgaaa

SEQ ID NO: 408956 - RNA, 19 nt, Homo sapiens
  misc_RNA (1)...(19): siRNA sense strand
ggagaaacccuaugauugu

SEQ ID NO: 408957 - RNA, 19 nt, Homo sapiens
  misc_RNA (1)...(19): siRNA sense strand
ggaaaggccuucaguuacu

SEQ ID NO: 408958 - RNA, 19 nt, Homo sapiens
  misc_RNA (1)...(19): siRNA sense strand
agagaaaccuuauaacugu

SEQ ID NO: 408959 - RNA, 19 nt, Homo sapiens
  misc_RNA (1)...(19): siRNA sense strand
guucaaaccuuguaacaca

SEQ ID NO: 408960 - RNA, 19 nt, Homo sapiens
  misc_RNA (1)...(19): siRNA sense strand
guggaaaggccuucaguua

SEQ ID NO: 408961 - RNA, 19 nt, Homo sapiens
  misc_RNA (1)...(19): siRNA sense strand
gcuagaaaguugggaauau

SEQ ID NO: 408962 - RNA, 19 nt, Homo sapiens
  misc_RNA (1)...(19): siRNA sense strand
agccagagcucccaucuaa

SEQ ID NO: 408963 - RNA, 19 nt, Homo sapiens
  misc_RNA (1)...(19): siRNA sense strand
gcucaucccuuacucaaca

SEQ ID NO: 408964 - RNA, 19 nt, Homo sapiens
  misc_RNA (1)...(19): siRNA sense strand
ggaauaugaaggcaguuua

SEQ ID NO: 408965 - RNA, 19 nt, Homo sapiens
  misc_RNA (1)...(19): siRNA sense strand
gagaaaccuuauaacugua

SEQ ID NO: 408966 - RNA, 19 nt, Homo sapiens
  misc_RNA (1)...(19): siRNA sense strand
ggagagcauucaaccagaa

SEQ ID NO: 408967 - RNA, 19 nt, Homo sapiens
  misc_RNA (1)...(19): siRNA sense strand
gagaacacauacuggagaa

SEQ ID NO: 408968 - RNA, 19 nt, Homo sapiens
  misc_RNA (1)...(19): siRNA sense strand
gggagaaacccuaugauug

SEQ ID NO: 408969 - RNA, 19 nt, Homo sapiens
  misc_RNA (1)...(19): siRNA sense strand
gcucugcucucaacaaaca

SEQ ID NO: 408970 - RNA, 19 nt, Homo sapiens
  misc_RNA (1)...(19): siRNA sense strand
gagagaaaccuuauaacug

SEQ ID NO: 408971 - RNA, 19 nt, Homo sapiens
  misc_RNA (1)...(19): siRNA sense strand
cgacauuguucaucucuug

SEQ ID NO: 408972 - RNA, 19 nt, Homo sapiens
  misc_RNA (1)...(19): siRNA sense strand
cagcauaagagaauucaua

SEQ ID NO: 408973 - RNA, 19 nt, Homo sapiens
  misc_RNA (1)...(19): siRNA sense strand
gacauaaucuacucucauc

SEQ ID NO: 408974 - RNA, 19 nt, Homo sapiens
  misc_RNA (1)...(19): siRNA sense strand
gggagaagcccuauaagug

SEQ ID NO: 408975 - RNA, 19 nt, Homo sapiens
  misc_RNA (1)...(19): siRNA sense strand
ggucaucccuugcucaaca

SEQ ID NO: 408976 - RNA, 19 nt, Homo sapiens
  misc_RNA (1)...(19): siRNA sense strand
aaagaagcaucaaacagaa

SEQ ID NO: 408977 - RNA, 19 nt, Homo sapiens
  misc_RNA (1)...(19): siRNA sense strand
gagacugcauccuggcaua

SEQ ID NO: 408978 - RNA, 19 nt, Homo sapiens
  misc_RNA (1)...(19): siRNA sense strand
gcgagaagccauacacuug

SEQ ID NO: 408979 - RNA, 19 nt, Homo sapiens
  misc_RNA (1)...(19): siRNA sense strand
auacacaccuggucucuau

SEQ ID NO: 408980 - RNA, 19 nt, Homo sapiens
  misc_RNA (1)...(19): siRNA sense strand
gaauucaaacccaguuaaa

SEQ ID NO: 408981 - RNA, 19 nt, Homo sapiens
  misc_RNA (1)...(19): siRNA sense strand
agagcuaucuccagaggua

SEQ ID NO: 408982 - RNA, 19 nt, Homo sapiens
  misc_RNA (1)...(19): siRNA sense strand
guucaucucuugcucaaca

SEQ ID NO: 408983 - RNA, 19 nt, Homo sapiens
  misc_RNA (1)...(19): siRNA sense strand
gagaaagcuuaugaaugua

SEQ ID NO: 408984 - RNA, 19 nt, Homo sapiens
  misc_RNA (1)...(19): siRNA sense strand
uguaaugaaugcagaaaga

SEQ ID NO: 408985 - RNA, 19 nt, Homo sapiens
  misc_RNA (1)...(19): siRNA sense strand
ggagagaaaccuuauaacu

SEQ ID NO: 408986 - RNA, 19 nt, Homo sapiens
  misc_RNA (1)...(19): siRNA sense strand
caagaaccaucuccagaag

SEQ ID NO: 408987 - RNA, 19 nt, Homo sapiens
  misc_RNA (1)...(19): siRNA sense strand
agaacgaccuuacaagugu

SEQ ID NO: 408988 - RNA, 19 nt, Homo sapiens
  misc_RNA (1)...(19): siRNA sense strand
gggaaaaccuucaguuaug

SEQ ID NO: 408989 - RNA, 19 nt, Homo sapiens
  misc_RNA (1)...(19): siRNA sense strand
ugaaggcaguuuagagaga

SEQ ID NO: 408990 - RNA, 19 nt, Homo sapiens
  misc_RNA (1)...(19): siRNA sense strand
aguuaucucucaaaccuua

SEQ ID NO: 408991 - RNA, 19 nt, Homo sapiens
  misc_RNA (1)...(19): siRNA sense strand
ccaaaggaaauaaagguaa

SEQ ID NO: 408992 - RNA, 19 nt, Homo sapiens
  misc_RNA (1)...(19): siRNA sense strand
ugaugugauuucccaguua

SEQ ID NO: 408993 - RNA, 19 nt, Homo sapiens
  misc_RNA (1)...(19): siRNA sense strand
ggagagaaacccuaucagu

SEQ ID NO: 408994 - RNA, 19 nt, Homo sapiens
  misc_RNA (1)...(19): siRNA sense strand
caagagaaagcuuaugaau

SEQ ID NO: 408995 - RNA, 19 nt, Homo sapiens
  misc_RNA (1)...(19): siRNA sense strand
gagaaacccuaugauugug

SEQ ID NO: 408996 - RNA, 19 nt, Homo sapiens
  misc_RNA (1)...(19): siRNA sense strand
ccagagaggccacuuuaug

SEQ ID NO: 408997 - RNA, 19 nt, Homo sapiens
  misc_RNA (1)...(19): siRNA sense strand
gcaucaaacagaauucaaa

SEQ ID NO: 408998 - RNA, 19 nt, Homo sapiens
  misc_RNA (1)...(19): siRNA sense strand
gaucauggagccaagcauu

SEQ ID NO: 408999 - RNA, 19 nt, Homo sapiens
  misc_RNA (1)...(19): siRNA sense strand
gagaacgaccuuacaagug

SEQ ID NO: 409000 - RNA, 19 nt, Homo sapiens
  misc_RNA (1)...(19): siRNA sense strand
ggagaacgaccuuacaagu

SEQ ID NO: 409001 - RNA, 19 nt, Homo sapiens
  misc_RNA (1)...(19): siRNA sense strand
gaauucauacuggagauaa

SEQ ID NO: 409002 - RNA, 19 nt, Homo sapiens
  misc_RNA (1)...(19): siRNA sense strand
caacagacacugccaaagg

SEQ ID NO: 409003 - RNA, 19 nt, Homo sapiens
  misc_RNA (1)...(19): siRNA sense strand
guacgaaugcaaugaaugu

SEQ ID NO: 409004 - RNA, 19 nt, Homo sapiens
  misc_RNA (1)...(19): siRNA sense strand
caaaggaaauaaagguaac

SEQ ID NO: 409005 - RNA, 19 nt, Homo sapiens
  misc_RNA (1)...(19): siRNA sense strand
cagcauaggaagauccaua

SEQ ID NO: 409006 - RNA, 19 nt, Homo sapiens
  misc_RNA (1)...(19): siRNA sense strand
cagcaucagagaauucaua

SEQ ID NO: 409007 - RNA, 19 nt, Homo sapiens
  misc_RNA (1)...(19): siRNA sense strand
caacaucggagaauucaca

SEQ ID NO: 409008 - RNA, 19 nt, Homo sapiens
  misc_RNA (1)...(19): siRNA sense strand
gagcacauaucucauucag

SEQ ID NO: 409009 - RNA, 19 nt, Homo sapiens
  misc_RNA (1)...(19): siRNA sense strand
ccagagcacauaucucauu

SEQ ID NO: 409010 - RNA, 19 nt, Homo sapiens
  misc_RNA (1)...(19): siRNA sense strand
aaccagaacauacaccuua

SEQ ID NO: 409011 - RNA, 19 nt, Homo sapiens
  misc_RNA (1)...(19): siRNA sense strand
gaugugauuucccaguuag

SEQ ID NO: 409012 - RNA, 19 nt, Homo sapiens
  misc_RNA (1)...(19): siRNA sense strand
caucaaagaauucauacug

SEQ ID NO: 409013 - RNA, 19 nt, Homo sapiens
  misc_RNA (1)...(19): siRNA sense strand
caucaaagaauucauacug

SEQ ID NO: 409014 - RNA, 19 nt, Homo sapiens
  misc_RNA (1)...(19): siRNA sense strand
gagccaagcauuccaguag

SEQ ID NO: 409015 - RNA, 19 nt, Homo sapiens
  misc_RNA (1)...(19): siRNA sense strand
cuagaaaguugggaauaug

SEQ ID NO: 409016 - RNA, 19 nt, Homo sapiens
  misc_RNA (1)...(19): siRNA sense strand
ggaaaauccuucagauauc

SEQ ID NO: 409017 - RNA, 19 nt, Homo sapiens
  misc_RNA (1)...(19): siRNA sense strand
ggaguucaucucuugcuaa

SEQ ID NO: 409018 - RNA, 19 nt, Homo sapiens
  misc_RNA (1)...(19): siRNA sense strand
guccaucucuuacucaaca

SEQ ID NO: 409019 - RNA, 19 nt, Homo sapiens
  misc_RNA (1)...(19): siRNA sense strand
ggacagagccauggaucau

SEQ ID NO: 409020 - RNA, 19 nt, Homo sapiens
  misc_RNA (1)...(19): siRNA sense strand
uaacucagcaucaacgaau

SEQ ID NO: 409021 - RNA, 19 nt, Homo sapiens
  misc_RNA (1)...(19): siRNA sense strand
agagaaacccuaucagugu

SEQ ID NO: 409022 - RNA, 19 nt, Homo sapiens
  misc_RNA (1)...(19): siRNA sense strand
gaaaauucauacuggagaa

SEQ ID NO: 409023 - RNA, 19 nt, Homo sapiens
  misc_RNA (1)...(19): siRNA sense strand
gaugugauaguggacuuua

SEQ ID NO: 409024 - RNA, 19 nt, Homo sapiens
  misc_RNA (1)...(19): siRNA sense strand
caaugugaguucaaaccuu

SEQ ID NO: 409025 - RNA, 19 nt, Homo sapiens
  misc_RNA (1)...(19): siRNA sense strand
gaaaagacaauacccaguu

SEQ ID NO: 409026 - RNA, 19 nt, Homo sapiens
  misc_RNA (1)...(19): siRNA sense strand
gaauaugaaggcaguuuag

SEQ ID NO: 409027 - RNA, 19 nt, Homo sapiens
  misc_RNA (1)...(19): siRNA sense strand
ggacuuuacccaggaagaa

SEQ ID NO: 409028 - RNA, 19 nt, Homo sapiens
  misc_RNA (1)...(19): siRNA sense strand
caucagagaauucauacug

SEQ ID NO: 409029 - RNA, 19 nt, Homo sapiens
  misc_RNA (1)...(19): siRNA sense strand
gagaggccacuuuauggaa

SEQ ID NO: 409030 - RNA, 19 nt, Homo sapiens
  misc_RNA (1)...(19): siRNA sense strand
uuacacagcauaagagaau

SEQ ID NO: 409031 - RNA, 19 nt, Homo sapiens
  misc_RNA (1)...(19): siRNA sense strand
ggagaauucacacgagaga

SEQ ID NO: 409032 - RNA, 19 nt, Homo sapiens
  misc_RNA (1)...(19): siRNA sense strand
ggacauaaucuacucucau

SEQ ID NO: 409033 - RNA, 19 nt, Homo sapiens
  misc_RNA (1)...(19): siRNA sense strand
cuauaggacuccaaguuuc

SEQ ID NO: 409034 - RNA, 19 nt, Homo sapiens
  misc_RNA (1)...(19): siRNA sense strand
aaacucauacucaagagaa

SEQ ID NO: 409035 - RNA, 19 nt, Homo sapiens
  misc_RNA (1)...(19): siRNA sense strand
ucaguuaucucucaaaccu

SEQ ID NO: 409036 - RNA, 19 nt, Homo sapiens
  misc_RNA (1)...(19): siRNA sense strand
caucagagaacacauacug

SEQ ID NO: 409037 - RNA, 19 nt, Homo sapiens
  misc_RNA (1)...(19): siRNA sense strand
ggagcacucaucugacuga

SEQ ID NO: 409038 - RNA, 19 nt, Homo sapiens
  misc_RNA (1)...(19): siRNA sense strand
ccauauaaaugugaucagu

SEQ ID NO: 409039 - RNA, 19 nt, Homo sapiens
  misc_RNA (1)...(19): siRNA sense strand
agagaugauucuuggaguu

SEQ ID NO: 409040 - RNA, 19 nt, Homo sapiens
  misc_RNA (1)...(19): siRNA sense strand
gaguucaucucuugcuaag

SEQ ID NO: 409041 - RNA, 19 nt, Homo sapiens
  misc_RNA (1)...(19): siRNA sense strand
uaaagaaugugggaaagcu

SEQ ID NO: 409042 - RNA, 19 nt, Homo sapiens
  misc_RNA (1)...(19): siRNA sense strand
ucuauaggacuccaaguuu

SEQ ID NO: 409043 - RNA, 19 nt, Homo sapiens
  misc_RNA (1)...(19): siRNA sense strand
ucagaggacccaucuuguu

SEQ ID NO: 409044 - RNA, 19 nt, Homo sapiens
  misc_RNA (1)...(19): siRNA sense strand
acaagaaccaucuccagaa

SEQ ID NO: 409045 - RNA, 19 nt, Homo sapiens
  misc_RNA (1)...(19): siRNA sense strand
gccaaaggaaauaaaggua

SEQ ID NO: 409046 - RNA, 19 nt, Homo sapiens
  misc_RNA (1)...(19): siRNA sense strand
cagagcacauaucucauuc

SEQ ID NO: 409047 - RNA, 19 nt, Homo sapiens
  misc_RNA (1)...(19): siRNA sense strand
auacaggagccaagccuua

SEQ ID NO: 409048 - RNA, 19 nt, Homo sapiens
  misc_RNA (1)...(19): siRNA sense strand
aguuaugguucaucccuua

SEQ ID NO: 409049 - RNA, 19 nt, Homo sapiens
  misc_RNA (1)...(19): siRNA sense strand
agaauucacacgagagaaa

SEQ ID NO: 409050 - RNA, 19 nt, Homo sapiens
  misc_RNA (1)...(19): siRNA sense strand
agauaucgcucugcucuca

SEQ ID NO: 409051 - RNA, 19 nt, Homo sapiens
  misc_RNA (1)...(19): siRNA sense strand
ggaaagagguuuggagcaa

SEQ ID NO: 409052 - RNA, 19 nt, Homo sapiens
  misc_RNA (1)...(19): siRNA sense strand
gcaaauggcugugaucuac

SEQ ID NO: 409053 - RNA, 19 nt, Homo sapiens
  misc_RNA (1)...(19): siRNA sense strand
ggaagaaaccauacaaaug

SEQ ID NO: 409054 - RNA, 19 nt, Homo sapiens
  misc_RNA (1)...(19): siRNA sense strand
gaagaaaccauacaaaugc

SEQ ID NO: 409055 - RNA, 19 nt, Homo sapiens
  misc_RNA (1)...(19): siRNA sense strand
gcgagaagcccuacaaaug

SEQ ID NO: 409056 - RNA, 19 nt, Homo sapiens
  misc_RNA (1)...(19): siRNA sense strand
ggugagaccuuugcauuug

SEQ ID NO: 409057 - RNA, 19 nt, Homo sapiens
  misc_RNA (1)...(19): siRNA sense strand
gaugagcucuucggacaaa

SEQ ID NO: 409058 - RNA, 19 nt, Homo sapiens
  misc_RNA (1)...(19): siRNA sense strand
agagagaccuuaucagugu

SEQ ID NO: 409059 - RNA, 19 nt, Homo sapiens
  misc_RNA (1)...(19): siRNA sense strand
ggagagagaccuuaucagu

SEQ ID NO: 409060 - RNA, 19 nt, Homo sapiens
  misc_RNA (1)...(19): siRNA sense strand
gcucagcccucacgcaaca

SEQ ID NO: 409061 - RNA, 19 nt, Homo sapiens
  misc_RNA (1)...(19): siRNA sense strand
gauccacacugggaagaaa

SEQ ID NO: 409062 - RNA, 19 nt, Homo sapiens
  misc_RNA (1)...(19): siRNA sense strand
gggaagaaaccauacaaau

SEQ ID NO: 409063 - RNA, 19 nt, Homo sapiens
  misc_RNA (1)...(19): siRNA sense strand
gauccacacccuaaagaaa

SEQ ID NO: 409064 - RNA, 19 nt, Homo sapiens
  misc_RNA (1)...(19): siRNA sense strand
gacaaaccuuccuccagaa

SEQ ID NO: 409065 - RNA, 19 nt, Homo sapiens
  misc_RNA (1)...(19): siRNA sense strand
gagagaccuuaucagugua

SEQ ID NO: 409066 - RNA, 19 nt, Homo sapiens
  misc_RNA (1)...(19): siRNA sense strand
ccagagcuccucccucauu

SEQ ID NO: 409067 - RNA, 19 nt, Homo sapiens
  misc_RNA (1)...(19): siRNA sense strand
gggaaugcgggaaagauuu

SEQ ID NO: 409068 - RNA, 19 nt, Homo sapiens
  misc_RNA (1)...(19): siRNA sense strand
aaacacgagagaauucaua

SEQ ID NO: 409069 - RNA, 19 nt, Homo sapiens
  misc_RNA (1)...(19): siRNA sense strand
gaagauccacacccuaaag

SEQ ID NO: 409070 - RNA, 19 nt, Homo sapiens
  misc_RNA (1)...(19): siRNA sense strand
gugagaccuuugcauuuga

SEQ ID NO: 409071 - RNA, 19 nt, Homo sapiens
  misc_RNA (1)...(19): siRNA sense strand
cggaagauccacacccuaa

SEQ ID NO: 409072 - RNA, 19 nt, Homo sapiens
  misc_RNA (1)...(19): siRNA sense strand
aaaccuuccuccagaaauc

SEQ ID NO: 409073 - RNA, 19 nt, Homo sapiens
  misc_RNA (1)...(19): siRNA sense strand
ggaagauccacacccuaaa

SEQ ID NO: 409074 - RNA, 19 nt, Homo sapiens
  misc_RNA (1)...(19): siRNA sense strand
cagcaugugucagauaauc

SEQ ID NO: 409075 - RNA, 19 nt, Homo sapiens
  misc_RNA (1)...(19): siRNA sense strand
gaccucagcaugugucaga

SEQ ID NO: 409076 - RNA, 19 nt, Homo sapiens
  misc_RNA (1)...(19): siRNA sense strand
gcaccggucagcccucauu

SEQ ID NO: 409077 - RNA, 19 nt, Homo sapiens
  misc_RNA (1)...(19): siRNA sense strand
ccagagcuccaaccucauu

SEQ ID NO: 409078 - RNA, 19 nt, Homo sapiens
  misc_RNA (1)...(19): siRNA sense strand
ggaccuaacgcaccucaca

SEQ ID NO: 409079 - RNA, 19 nt, Homo sapiens
  misc_RNA (1)...(19): siRNA sense strand
aaauggcugugaucuacaa

SEQ ID NO: 409080 - RNA, 19 nt, Homo sapiens
  misc_RNA (1)...(19): siRNA sense strand
acacugggaagaaaccaua

SEQ ID NO: 409081 - RNA, 19 nt, Homo sapiens
  misc_RNA (1)...(19): siRNA sense strand
cagagcuccucccucauug

SEQ ID NO: 409082 - RNA, 19 nt, Homo sapiens
  misc_RNA (1)...(19): siRNA sense strand
cgagaagcccuacaaaugc

SEQ ID NO: 409083 - RNA, 19 nt, Homo sapiens
  misc_RNA (1)...(19): siRNA sense strand
cgaagaaaaugaugauuac

SEQ ID NO: 409084 - RNA, 19 nt, Homo sapiens
  misc_RNA (1)...(19): siRNA sense strand
cucagcaugugucagauaa

SEQ ID NO: 409085 - RNA, 19 nt, Homo sapiens
  misc_RNA (1)...(19): siRNA sense strand
gaaccagaccccaggauga

SEQ ID NO: 409086 - RNA, 19 nt, Homo sapiens
  misc_RNA (1)...(19): siRNA sense strand
gacccacacuggcgagaag

SEQ ID NO: 409087 - RNA, 19 nt, Homo sapiens
  misc_RNA (1)...(19): siRNA sense strand
cagguuagagucacaacaa

SEQ ID NO: 409088 - RNA, 19 nt, Homo sapiens
  misc_RNA (1)...(19): siRNA sense strand
caggagagagaccuuauca

SEQ ID NO: 409089 - RNA, 19 nt, Homo sapiens
  misc_RNA (1)...(19): siRNA sense strand
gauaauccacagugaagag

SEQ ID NO: 409090 - RNA, 19 nt, Homo sapiens
  misc_RNA (1)...(19): siRNA sense strand
gaacagguuagagucacaa

SEQ ID NO: 409091 - RNA, 19 nt, Homo sapiens
  misc_RNA (1)...(19): siRNA sense strand
caagcccuguucagcauca

SEQ ID NO: 409092 - RNA, 19 nt, Homo sapiens
  misc_RNA (1)...(19): siRNA sense strand
gucagauaauccacaguga

SEQ ID NO: 409093 - RNA, 19 nt, Homo sapiens
  misc_RNA (1)...(19): siRNA sense strand
uccaugcgauugugcagaa

SEQ ID NO: 409094 - RNA, 19 nt, Homo sapiens
  misc_RNA (1)...(19): siRNA sense strand
cagauaauccacagugaag

SEQ ID NO: 409095 - RNA, 19 nt, Homo sapiens
  misc_RNA (1)...(19): siRNA sense strand
ucagauaauccacagugaa

SEQ ID NO: 409096 - RNA, 19 nt, Homo sapiens
  misc_RNA (1)...(19): siRNA sense strand
cuacaaaugccagaagugu

SEQ ID NO: 409097 - RNA, 19 nt, Homo sapiens
  misc_RNA (1)...(19): siRNA sense strand
uggcugugaucuacaagga

SEQ ID NO: 409098 - RNA, 19 nt, Homo sapiens
  misc_RNA (1)...(19): siRNA sense strand
uaaggaaugugggaaaucc

SEQ ID NO: 409099 - RNA, 19 nt, Homo sapiens
  misc_RNA (1)...(19): siRNA sense strand
ccaggaugaugagcucuuc

SEQ ID NO: 409100 - RNA, 19 nt, Homo sapiens
  misc_RNA (1)...(19): siRNA sense strand
gauucgccaucagaagauu

SEQ ID NO: 409101 - RNA, 19 nt, Homo sapiens
  misc_RNA (1)...(19): siRNA sense strand
ccucagcaugugucagaua

SEQ ID NO: 409102 - RNA, 19 nt, Homo sapiens
  misc_RNA (1)...(19): siRNA sense strand
gccaucagaagauucauuc

SEQ ID NO: 409103 - RNA, 19 nt, Homo sapiens
  misc_RNA (1)...(19): siRNA sense strand
ggcgagaagcccuacaaau

SEQ ID NO: 409104 - RNA, 19 nt, Homo sapiens
  misc_RNA (1)...(19): siRNA sense strand
gaaugugggaaauccuuca

SEQ ID NO: 409105 - RNA, 19 nt, Homo sapiens
  misc_RNA (1)...(19): siRNA sense strand
uguaaggaaugugggaaau

SEQ ID NO: 409106 - RNA, 19 nt, Homo sapiens
  misc_RNA (1)...(19): siRNA sense strand
ggagcuccagccucagaaa

SEQ ID NO: 409107 - RNA, 19 nt, Homo sapiens
  misc_RNA (1)...(19): siRNA sense strand
gagcaaauggcugugaucu

SEQ ID NO: 409108 - RNA, 19 nt, Homo sapiens
  misc_RNA (1)...(19): siRNA sense strand
gugcagggaaugcgggaaa

SEQ ID NO: 409109 - RNA, 19 nt, Homo sapiens
  misc_RNA (1)...(19): siRNA sense strand
gagcccaguccaugcgauu

SEQ ID NO: 409110 - RNA, 19 nt, Homo sapiens
  misc_RNA (1)...(19): siRNA sense strand
gcgauugugcagaaacaga

SEQ ID NO: 409111 - RNA, 19 nt, Homo sapiens
  misc_RNA (1)...(19): siRNA sense strand
ccauacaaaugcgaugagu

SEQ ID NO: 409112 - RNA, 19 nt, Homo sapiens
  misc_RNA (1)...(19): siRNA sense strand
gcagggaaugcgggaaaga

SEQ ID NO: 409113 - RNA, 19 nt, Homo sapiens
  misc_RNA (1)...(19): siRNA sense strand
ccagagagaagcccuacgu

SEQ ID NO: 409114 - RNA, 19 nt, Homo sapiens
  misc_RNA (1)...(19): siRNA sense strand
ucacgagugcgaucucugu

SEQ ID NO: 409115 - RNA, 19 nt, Homo sapiens
  misc_RNA (1)...(19): siRNA sense strand
gagccagcaucggaagauc

SEQ ID NO: 409116 - RNA, 19 nt, Homo sapiens
  misc_RNA (1)...(19): siRNA sense strand
ugagaacagguuagaguca

SEQ ID NO: 409117 - RNA, 19 nt, Homo sapiens
  misc_RNA (1)...(19): siRNA sense strand
gaggggaauuucaguuugu

SEQ ID NO: 409118 - RNA, 19 nt, Homo sapiens
  misc_RNA (1)...(19): siRNA sense strand
caaaccuuccuccagaaau

SEQ ID NO: 409119 - RNA, 19 nt, Homo sapiens
  misc_RNA (1)...(19): siRNA sense strand
acaaaccuuccuccagaaa

SEQ ID NO: 409120 - RNA, 19 nt, Homo sapiens
  misc_RNA (1)...(19): siRNA sense strand
guaaggaaugugggaaauc

SEQ ID NO: 409121 - RNA, 19 nt, Homo sapiens
  misc_RNA (1)...(19): siRNA sense strand
gaauccacaccggcaagaa

SEQ ID NO: 409122 - RNA, 19 nt, Homo sapiens
  misc_RNA (1)...(19): siRNA sense strand
ccuguucagcaucaaagua

SEQ ID NO: 409123 - RNA, 19 nt, Homo sapiens
  misc_RNA (1)...(19): siRNA sense strand
uggugagaccuuugcauuu

SEQ ID NO: 409124 - RNA, 19 nt, Homo sapiens
  misc_RNA (1)...(19): siRNA sense strand
aauccgaccucagcaugug

SEQ ID NO: 409125 - RNA, 19 nt, Homo sapiens
  misc_RNA (1)...(19): siRNA sense strand
cuacgagugcugucagugu

SEQ ID NO: 409126 - RNA, 19 nt, Homo sapiens
  misc_RNA (1)...(19): siRNA sense strand
gcacaagaguugauacaua

SEQ ID NO: 409127 - RNA, 19 nt, Homo sapiens
  misc_RNA (1)...(19): siRNA sense strand
gaaagaaaccugcaacuug

SEQ ID NO: 409128 - RNA, 19 nt, Homo sapiens
  misc_RNA (1)...(19): siRNA sense strand
gggaaaagcuucagaguua

SEQ ID NO: 409129 - RNA, 19 nt, Homo sapiens
  misc_RNA (1)...(19): siRNA sense strand
gggaaaagcuuuagucaua

SEQ ID NO: 409130 - RNA, 19 nt, Homo sapiens
  misc_RNA (1)...(19): siRNA sense strand
gcucugaucuuauuaaaca

SEQ ID NO: 409131 - RNA, 19 nt, Homo sapiens
  misc_RNA (1)...(19): siRNA sense strand
gagagaagcccuuuaaaug

SEQ ID NO: 409132 - RNA, 19 nt, Homo sapiens
  misc_RNA (1)...(19): siRNA sense strand
cacaagaguugauacauaa

SEQ ID NO: 409133 - RNA, 19 nt, Homo sapiens
  misc_RNA (1)...(19): siRNA sense strand
gagaagcccuuuaaaugug

SEQ ID NO: 409134 - RNA, 19 nt, Homo sapiens
  misc_RNA (1)...(19): siRNA sense strand
gagagaaacccuauaaaug

SEQ ID NO: 409135 - RNA, 19 nt, Homo sapiens
  misc_RNA (1)...(19): siRNA sense strand
agaagacucucuacaauga

SEQ ID NO: 409136 - RNA, 19 nt, Homo sapiens
  misc_RNA (1)...(19): siRNA sense strand
gaaaugaucauccuauauc

SEQ ID NO: 409137 - RNA, 19 nt, Homo sapiens
  misc_RNA (1)...(19): siRNA sense strand
ugucaucucucuaggguua

SEQ ID NO: 409138 - RNA, 19 nt, Homo sapiens
  misc_RNA (1)...(19): siRNA sense strand
ggagagaaacccuauaaau

SEQ ID NO: 409139 - RNA, 19 nt, Homo sapiens
  misc_RNA (1)...(19): siRNA sense strand
uagaaguggugaaagaaua

SEQ ID NO: 409140 - RNA, 19 nt, Homo sapiens
  misc_RNA (1)...(19): siRNA sense strand
aaagaaaccugcaacuugu

SEQ ID NO: 409141 - RNA, 19 nt, Homo sapiens
  misc_RNA (1)...(19): siRNA sense strand
ggagagaagcccuuuaaau

SEQ ID NO: 409142 - RNA, 19 nt, Homo sapiens
  misc_RNA (1)...(19): siRNA sense strand
ugaggaaaguuaccaugua

SEQ ID NO: 409143 - RNA, 19 nt, Homo sapiens
  misc_RNA (1)...(19): siRNA sense strand
gcaccuggccuaccaugua

SEQ ID NO: 409144 - RNA, 19 nt, Homo sapiens
  misc_RNA (1)...(19): siRNA sense strand
uaacacaaaucuacacaca

SEQ ID NO: 409145 - RNA, 19 nt, Homo sapiens
  misc_RNA (1)...(19): siRNA sense strand
gaggaagaguggcaauuau

SEQ ID NO: 409146 - RNA, 19 nt, Homo sapiens
  misc_RNA (1)...(19): siRNA sense strand
ggagaaaccuuuuaagugu

SEQ ID NO: 409147 - RNA, 19 nt, Homo sapiens
  misc_RNA (1)...(19): siRNA sense strand
gacaggagguuuagaugga

SEQ ID NO: 409148 - RNA, 19 nt, Homo sapiens
  misc_RNA (1)...(19): siRNA sense strand
gaucgagccuucuuagaca

SEQ ID NO: 409149 - RNA, 19 nt, Homo sapiens
  misc_RNA (1)...(19): siRNA sense strand
auucagaacucccaccuua

SEQ ID NO: 409150 - RNA, 19 nt, Homo sapiens
  misc_RNA (1)...(19): siRNA sense strand
ggaguucagaucuuaauaa

SEQ ID NO: 409151 - RNA, 19 nt, Homo sapiens
  misc_RNA (1)...(19): siRNA sense strand
gagaaacccuauaaauguc

SEQ ID NO: 409152 - RNA, 19 nt, Homo sapiens
  misc_RNA (1)...(19): siRNA sense strand
gaacucccaccuuauuaaa

SEQ ID NO: 409153 - RNA, 19 nt, Homo sapiens
  misc_RNA (1)...(19): siRNA sense strand
gaggaaaguuaccauguag

SEQ ID NO: 409154 - RNA, 19 nt, Homo sapiens
  misc_RNA (1)...(19): siRNA sense strand
gaaucuaagcugucuguuu

SEQ ID NO: 409155 - RNA, 19 nt, Homo sapiens
  misc_RNA (1)...(19): siRNA sense strand
acacaaaucuacacacaca

SEQ ID NO: 409156 - RNA, 19 nt, Homo sapiens
  misc_RNA (1)...(19): siRNA sense strand
ggaaaugaucauccuauau

SEQ ID NO: 409157 - RNA, 19 nt, Homo sapiens
  misc_RNA (1)...(19): siRNA sense strand
ggaagcaugucuagugucu

SEQ ID NO: 409158 - RNA, 19 nt, Homo sapiens
  misc_RNA (1)...(19): siRNA sense strand
gaaauggcaucgagcuuuu

SEQ ID NO: 409159 - RNA, 19 nt, Homo sapiens
  misc_RNA (1)...(19): siRNA sense strand
caacuaggcuuggcacagu

SEQ ID NO: 409160 - RNA, 19 nt, Homo sapiens
  misc_RNA (1)...(19): siRNA sense strand
ccacagcugucaugaucaa

SEQ ID NO: 409161 - RNA, 19 nt, Homo sapiens
  misc_RNA (1)...(19): siRNA sense strand
agagaaacccuauaaaugu

SEQ ID NO: 409162 - RNA, 19 nt, Homo sapiens
  misc_RNA (1)...(19): siRNA sense strand
caucagaaauacaaacauc

SEQ ID NO: 409163 - RNA, 19 nt, Homo sapiens
  misc_RNA (1)...(19): siRNA sense strand
caugacccaucaaggaaua

SEQ ID NO: 409164 - RNA, 19 nt, Homo sapiens
  misc_RNA (1)...(19): siRNA sense strand
uggaaaugaucauccuaua

SEQ ID NO: 409165 - RNA, 19 nt, Homo sapiens
  misc_RNA (1)...(19): siRNA sense strand
ucucuaggguuaaagcuaa

SEQ ID NO: 409166 - RNA, 19 nt, Homo sapiens
  misc_RNA (1)...(19): siRNA sense strand
gaucauccuauaucuguuu

SEQ ID NO: 409167 - RNA, 19 nt, Homo sapiens
  misc_RNA (1)...(19): siRNA sense strand
ccucuuugcuccuuccuuu

SEQ ID NO: 409168 - RNA, 19 nt, Homo sapiens
  misc_RNA (1)...(19): siRNA sense strand
gaugagauuccuuuagcua

SEQ ID NO: 409169 - RNA, 19 nt, Homo sapiens
  misc_RNA (1)...(19): siRNA sense strand
ucuagugucuccaaacuga

SEQ ID NO: 409170 - RNA, 19 nt, Homo sapiens
  misc_RNA (1)...(19): siRNA sense strand
ugaggaagaguggcaauua

SEQ ID NO: 409171 - RNA, 19 nt, Homo sapiens
  misc_RNA (1)...(19): siRNA sense strand
aaaugaaaguguagugaug

SEQ ID NO: 409172 - RNA, 19 nt, Homo sapiens
  misc_RNA (1)...(19): siRNA sense strand
gcaggugcuuugaggcauu

SEQ ID NO: 409173 - RNA, 19 nt, Homo sapiens
  misc_RNA (1)...(19): siRNA sense strand
gaaauacaaacaucaggau

SEQ ID NO: 409174 - RNA, 19 nt, Homo sapiens
  misc_RNA (1)...(19): siRNA sense strand
caggagagaagcccuuuaa

SEQ ID NO: 409175 - RNA, 19 nt, Homo sapiens
  misc_RNA (1)...(19): siRNA sense strand
ggcaaguacuaaacuauag

SEQ ID NO: 409176 - RNA, 19 nt, Homo sapiens
  misc_RNA (1)...(19): siRNA sense strand
ucagaacucccaccuuauu

SEQ ID NO: 409177 - RNA, 19 nt, Homo sapiens
  misc_RNA (1)...(19): siRNA sense strand
ggaaaagcuuuagucauaa

SEQ ID NO: 409178 - RNA, 19 nt, Homo sapiens
  misc_RNA (1)...(19): siRNA sense strand
caaugugacaggagguuua

SEQ ID NO: 409179 - RNA, 19 nt, Homo sapiens
  misc_RNA (1)...(19): siRNA sense strand
caccuggccuaccauguaa

SEQ ID NO: 409180 - RNA, 19 nt, Homo sapiens
  misc_RNA (1)...(19): siRNA sense strand
gaaaguguagugaugagau

SEQ ID NO: 409181 - RNA, 19 nt, Homo sapiens
  misc_RNA (1)...(19): siRNA sense strand
aaucuaagcugucuguuuu

SEQ ID NO: 409182 - RNA, 19 nt, Homo sapiens
  misc_RNA (1)...(19): siRNA sense strand
gaaugaaaauugcccagaa

SEQ ID NO: 409183 - RNA, 19 nt, Homo sapiens
  misc_RNA (1)...(19): siRNA sense strand
guaaacaagagcuuccaaa

SEQ ID NO: 409184 - RNA, 19 nt, Homo sapiens
  misc_RNA (1)...(19): siRNA sense strand
guagugaugagauuccuuu

SEQ ID NO: 409185 - RNA, 19 nt, Homo sapiens
  misc_RNA (1)...(19): siRNA sense strand
cagaacucccaccuuauua

SEQ ID NO: 409186 - RNA, 19 nt, Homo sapiens
  misc_RNA (1)...(19): siRNA sense strand
gcaagagaaacuuuaguag

SEQ ID NO: 409187 - RNA, 19 nt, Homo sapiens
  misc_RNA (1)...(19): siRNA sense strand
aaaguguagugaugagauu

SEQ ID NO: 409188 - RNA, 19 nt, Homo sapiens
  misc_RNA (1)...(19): siRNA sense strand
ccauguagagcuugacuuu

SEQ ID NO: 409189 - RNA, 19 nt, Homo sapiens
  misc_RNA (1)...(19): siRNA sense strand
cagaaacuccacagaagaa

SEQ ID NO: 409190 - RNA, 19 nt, Homo sapiens
  misc_RNA (1)...(19): siRNA sense strand
guuauucucuaggcaacua

SEQ ID NO: 409191 - RNA, 19 nt, Homo sapiens
  misc_RNA (1)...(19): siRNA sense strand
gaaacccuauaaaugucaa

SEQ ID NO: 409192 - RNA, 19 nt, Homo sapiens
  misc_RNA (1)...(19): siRNA sense strand
uugaagauguggcugugua

SEQ ID NO: 409193 - RNA, 19 nt, Homo sapiens
  misc_RNA (1)...(19): siRNA sense strand
cauccuauaucuguuucua

SEQ ID NO: 409194 - RNA, 19 nt, Homo sapiens
  misc_RNA (1)...(19): siRNA sense strand
agagaagcccuuuaaaugu

SEQ ID NO: 409195 - RNA, 19 nt, Homo sapiens
  misc_RNA (1)...(19): siRNA sense strand
acacacacaccaaagaauu

SEQ ID NO: 409196 - RNA, 19 nt, Homo sapiens
  misc_RNA (1)...(19): siRNA sense strand
uaaugcaggauaucuauga

SEQ ID NO: 409197 - RNA, 19 nt, Homo sapiens
  misc_RNA (1)...(19): siRNA sense strand
uagaguuuguugacauuug

SEQ ID NO: 409198 - RNA, 19 nt, Homo sapiens
  misc_RNA (1)...(19): siRNA sense strand
ggaaaauccuggugauaca

SEQ ID NO: 409199 - RNA, 19 nt, Homo sapiens
  misc_RNA (1)...(19): siRNA sense strand
aaaugacacuggaaaugau

SEQ ID NO: 409200 - RNA, 19 nt, Homo sapiens
  misc_RNA (1)...(19): siRNA sense strand
ggaaaguuaccauguagag

SEQ ID NO: 409201 - RNA, 19 nt, Homo sapiens
  misc_RNA (1)...(19): siRNA sense strand
gaagauguggcuguguauu

SEQ ID NO: 409202 - RNA, 19 nt, Homo sapiens
  misc_RNA (1)...(19): siRNA sense strand
ugagauuccuuuagcuauc

SEQ ID NO: 409203 - RNA, 19 nt, Homo sapiens
  misc_RNA (1)...(19): siRNA sense strand
gugaugagauuccuuuagc

SEQ ID NO: 409204 - RNA, 19 nt, Homo sapiens
  misc_RNA (1)...(19): siRNA sense strand
uaugaggcacccaaugaua

SEQ ID NO: 409205 - RNA, 19 nt, Homo sapiens
  misc_RNA (1)...(19): siRNA sense strand
aguuagcucugaucuuauu

SEQ ID NO: 409206 - RNA, 19 nt, Homo sapiens
  misc_RNA (1)...(19): siRNA sense strand
uggcaaguacuaaacuaua

SEQ ID NO: 409207 - RNA, 19 nt, Homo sapiens
  misc_RNA (1)...(19): siRNA sense strand
ccagaaacuccacagaaga

SEQ ID NO: 409208 - RNA, 19 nt, Homo sapiens
  misc_RNA (1)...(19): siRNA sense strand
agaaauggcaucgagcuuu

SEQ ID NO: 409209 - RNA, 19 nt, Homo sapiens
  misc_RNA (1)...(19): siRNA sense strand
cuggugagcuguuauuucu

SEQ ID NO: 409210 - RNA, 19 nt, Homo sapiens
  misc_RNA (1)...(19): siRNA sense strand
agaguuuguugacauuuga

SEQ ID NO: 409211 - RNA, 19 nt, Homo sapiens
  misc_RNA (1)...(19): siRNA sense strand
cccuaaaucuuguacuguu

SEQ ID NO: 409212 - RNA, 19 nt, Homo sapiens
  misc_RNA (1)...(19): siRNA sense strand
ggguacauguuacacuuca

SEQ ID NO: 409213 - RNA, 19 nt, Homo sapiens
  misc_RNA (1)...(19): siRNA sense strand
gaagaagggaagcaugucu

SEQ ID NO: 409214 - RNA, 19 nt, Homo sapiens
  misc_RNA (1)...(19): siRNA sense strand
acacaggugagcagccuua

SEQ ID NO: 409215 - RNA, 19 nt, Homo sapiens
  misc_RNA (1)...(19): siRNA sense strand
agaagcccuuuaaauguga

SEQ ID NO: 409216 - RNA, 19 nt, Homo sapiens
  misc_RNA (1)...(19): siRNA sense strand
ugaaguggcaaguacuaaa

SEQ ID NO: 409217 - RNA, 19 nt, Homo sapiens
  misc_RNA (1)...(19): siRNA sense strand
cuauaucuguuucuacauc

SEQ ID NO: 409218 - RNA, 19 nt, Homo sapiens
  misc_RNA (1)...(19): siRNA sense strand
aagauguggcuguguauuu

SEQ ID NO: 409219 - RNA, 19 nt, Homo sapiens
  misc_RNA (1)...(19): siRNA sense strand
auguagagcuugacuuuag

SEQ ID NO: 409220 - RNA, 19 nt, Homo sapiens
  misc_RNA (1)...(19): siRNA sense strand
caccagaaacuccacagaa

SEQ ID NO: 409221 - RNA, 19 nt, Homo sapiens
  misc_RNA (1)...(19): siRNA sense strand
ugcaagagaaacuuuagua

SEQ ID NO: 409222 - RNA, 19 nt, Homo sapiens
  misc_RNA (1)...(19): siRNA sense strand
caagagcuuccaaaacuua

SEQ ID NO: 409223 - RNA, 19 nt, Homo sapiens
  misc_RNA (1)...(19): siRNA sense strand
gaaaauugcccagaaaaca

SEQ ID NO: 409224 - RNA, 19 nt, Homo sapiens
  misc_RNA (1)...(19): siRNA sense strand
uaagcugucuguuuuauuc

SEQ ID NO: 409225 - RNA, 19 nt, Homo sapiens
  misc_RNA (1)...(19): siRNA sense strand
uccuuuagcuaucuaucua

SEQ ID NO: 409226 - RNA, 19 nt, Homo sapiens
  misc_RNA (1)...(19): siRNA sense strand
aaccagagcucaucccuua

SEQ ID NO: 409227 - RNA, 19 nt, Homo sapiens
  misc_RNA (1)...(19): siRNA sense strand
gagaagccauauaaaugua

SEQ ID NO: 409228 - RNA, 19 nt, Homo sapiens
  misc_RNA (1)...(19): siRNA sense strand
gagagaagccuuacaagug

SEQ ID NO: 409229 - RNA, 19 nt, Homo sapiens
  misc_RNA (1)...(19): siRNA sense strand
gagagaagcccuacagaug

SEQ ID NO: 409230 - RNA, 19 nt, Homo sapiens
  misc_RNA (1)...(19): siRNA sense strand
gagagaagcccuacgaaug

SEQ ID NO: 409231 - RNA, 19 nt, Homo sapiens
  misc_RNA (1)...(19): siRNA sense strand
gggaaauucuucagugaga

SEQ ID NO: 409232 - RNA, 19 nt, Homo sapiens
  misc_RNA (1)...(19): siRNA sense strand
gggagaagccauauaaaug

SEQ ID NO: 409233 - RNA, 19 nt, Homo sapiens
  misc_RNA (1)...(19): siRNA sense strand
ggagaagccauauaaaugu

SEQ ID NO: 409234 - RNA, 19 nt, Homo sapiens
  misc_RNA (1)...(19): siRNA sense strand
gagaaagccuucagugacu

SEQ ID NO: 409235 - RNA, 19 nt, Homo sapiens
  misc_RNA (1)...(19): siRNA sense strand
gagaagcccuacagaugug

SEQ ID NO: 409236 - RNA, 19 nt, Homo sapiens
  misc_RNA (1)...(19): siRNA sense strand
gggagaagcccuacaagug

SEQ ID NO: 409237 - RNA, 19 nt, Homo sapiens
  misc_RNA (1)...(19): siRNA sense strand
gggagaagcccuacagaug

SEQ ID NO: 409238 - RNA, 19 nt, Homo sapiens
  misc_RNA (1)...(19): siRNA sense strand
ggagaagcccuacagaugu

SEQ ID NO: 409239 - RNA, 19 nt, Homo sapiens
  misc_RNA (1)...(19): siRNA sense strand
ccagugaccuugagaagag

SEQ ID NO: 409240 - RNA, 19 nt, Homo sapiens
  misc_RNA (1)...(19): siRNA sense strand
gugcaaaccucacaaacca

SEQ ID NO: 409241 - RNA, 19 nt, Homo sapiens
  misc_RNA (1)...(19): siRNA sense strand
gugcaaaccucacgaacca

SEQ ID NO: 409242 - RNA, 19 nt, Homo sapiens
  misc_RNA (1)...(19): siRNA sense strand
ggagagaagccuuacaagu

SEQ ID NO: 409243 - RNA, 19 nt, Homo sapiens
  misc_RNA (1)...(19): siRNA sense strand
gggagaaacccuacaagug

SEQ ID NO: 409244 - RNA, 19 nt, Homo sapiens
  misc_RNA (1)...(19): siRNA sense strand
gagaagcccuacagaugca

SEQ ID NO: 409245 - RNA, 19 nt, Homo sapiens
  misc_RNA (1)...(19): siRNA sense strand
cuacuaggacuuccaguuu

SEQ ID NO: 409246 - RNA, 19 nt, Homo sapiens
  misc_RNA (1)...(19): siRNA sense strand
ccauaugcauguaaugaau

SEQ ID NO: 409247 - RNA, 19 nt, Homo sapiens
  misc_RNA (1)...(19): siRNA sense strand
gaacucggaaauccugaaa

SEQ ID NO: 409248 - RNA, 19 nt, Homo sapiens
  misc_RNA (1)...(19): siRNA sense strand
ggagagaagcccuaugagu

SEQ ID NO: 409249 - RNA, 19 nt, Homo sapiens
  misc_RNA (1)...(19): siRNA sense strand
ggagagaagcccuacgaau

SEQ ID NO: 409250 - RNA, 19 nt, Homo sapiens
  misc_RNA (1)...(19): siRNA sense strand
cagcaucagagaauucaua

SEQ ID NO: 409251 - RNA, 19 nt, Homo sapiens
  misc_RNA (1)...(19): siRNA sense strand
ggagagaagcccuacagau

SEQ ID NO: 409252 - RNA, 19 nt, Homo sapiens
  misc_RNA (1)...(19): siRNA sense strand
gagcaagcccuuucugaag

SEQ ID NO: 409253 - RNA, 19 nt, Homo sapiens
  misc_RNA (1)...(19): siRNA sense strand
gagcucaucucucauucag

SEQ ID NO: 409254 - RNA, 19 nt, Homo sapiens
  misc_RNA (1)...(19): siRNA sense strand
gagccacacuggagagaag

SEQ ID NO: 409255 - RNA, 19 nt, Homo sapiens
  misc_RNA (1)...(19): siRNA sense strand
gugggaaauucuucaguga

SEQ ID NO: 409256 - RNA, 19 nt, Homo sapiens
  misc_RNA (1)...(19): siRNA sense strand
gcagugugacgguagcuuu

SEQ ID NO: 409257 - RNA, 19 nt, Homo sapiens
  misc_RNA (1)...(19): siRNA sense strand
ggcaaagccuucaguuacu

SEQ ID NO: 409258 - RNA, 19 nt, Homo sapiens
  misc_RNA (1)...(19): siRNA sense strand
caagacccauguguagaga

SEQ ID NO: 409259 - RNA, 19 nt, Homo sapiens
  misc_RNA (1)...(19): siRNA sense strand
guaaugaaugugggaaauu

SEQ ID NO: 409260 - RNA, 19 nt, Homo sapiens
  misc_RNA (1)...(19): siRNA sense strand
gugagaaagccuucaguga

SEQ ID NO: 409261 - RNA, 19 nt, Homo sapiens
  misc_RNA (1)...(19): siRNA sense strand
gcaaaaccauaugcaugua

SEQ ID NO: 409262 - RNA, 19 nt, Homo sapiens
  misc_RNA (1)...(19): siRNA sense strand
guggcaaagccuucaguua

SEQ ID NO: 409263 - RNA, 19 nt, Homo sapiens
  misc_RNA (1)...(19): siRNA sense strand
gagaagcccuacgaaugca

SEQ ID NO: 409264 - RNA, 19 nt, Homo sapiens
  misc_RNA (1)...(19): siRNA sense strand
ugagugugguaaagcguuu

SEQ ID NO: 409265 - RNA, 19 nt, Homo sapiens
  misc_RNA (1)...(19): siRNA sense strand
gauucacacuggagagaag

SEQ ID NO: 409266 - RNA, 19 nt, Homo sapiens
  misc_RNA (1)...(19): siRNA sense strand
gcgugaaacccuacgaaug

SEQ ID NO: 409267 - RNA, 19 nt, Homo sapiens
  misc_RNA (1)...(19): siRNA sense strand
agacccauguguagagaug

SEQ ID NO: 409268 - RNA, 19 nt, Homo sapiens
  misc_RNA (1)...(19): siRNA sense strand
gcucugccuucguuagaca

SEQ ID NO: 409269 - RNA, 19 nt, Homo sapiens
  misc_RNA (1)...(19): siRNA sense strand
ggaaaacacaggagaggaa

SEQ ID NO: 409270 - RNA, 19 nt, Homo sapiens
  misc_RNA (1)...(19): siRNA sense strand
acacuggagagaagccuua

SEQ ID NO: 409271 - RNA, 19 nt, Homo sapiens
  misc_RNA (1)...(19): siRNA sense strand
uggcaaagccuucaguuac

SEQ ID NO: 409272 - RNA, 19 nt, Homo sapiens
  misc_RNA (1)...(19): siRNA sense strand
acaccgagagcuucaagaa

SEQ ID NO: 409273 - RNA, 19 nt, Homo sapiens
  misc_RNA (1)...(19): siRNA sense strand
gaauucauaccggagagaa

SEQ ID NO: 409274 - RNA, 19 nt, Homo sapiens
  misc_RNA (1)...(19): siRNA sense strand
ggaccagugaccuugagaa

SEQ ID NO: 409275 - RNA, 19 nt, Homo sapiens
  misc_RNA (1)...(19): siRNA sense strand
ugacugcucagcucuuguu

SEQ ID NO: 409276 - RNA, 19 nt, Homo sapiens
  misc_RNA (1)...(19): siRNA sense strand
gaacccacaccggagagaa

SEQ ID NO: 409277 - RNA, 19 nt, Homo sapiens
  misc_RNA (1)...(19): siRNA sense strand
agagcaagcccuuucugaa

SEQ ID NO: 409278 - RNA, 19 nt, Homo sapiens
  misc_RNA (1)...(19): siRNA sense strand
uguaaugaaugugggaaau

SEQ ID NO: 409279 - RNA, 19 nt, Homo sapiens
  misc_RNA (1)...(19): siRNA sense strand
uuacuguucuucccuuucu

SEQ ID NO: 409280 - RNA, 19 nt, Homo sapiens
  misc_RNA (1)...(19): siRNA sense strand
gcaagcccuuucugaagcu

SEQ ID NO: 409281 - RNA, 19 nt, Homo sapiens
  misc_RNA (1)...(19): siRNA sense strand
cuggagagaagcccuauga

SEQ ID NO: 409282 - RNA, 19 nt, Homo sapiens
  misc_RNA (1)...(19): siRNA sense strand
gcccucauucggcaucaua

SEQ ID NO: 409283 - RNA, 19 nt, Homo sapiens
  misc_RNA (1)...(19): siRNA sense strand
ucacagagcaaaaccauau

SEQ ID NO: 409284 - RNA, 19 nt, Homo sapiens
  misc_RNA (1)...(19): siRNA sense strand
cuacagaugcagcgagugu

SEQ ID NO: 409285 - RNA, 19 nt, Homo sapiens
  misc_RNA (1)...(19): siRNA sense strand
ccuuacaagugcagugaau

SEQ ID NO: 409286 - RNA, 19 nt, Homo sapiens
  misc_RNA (1)...(19): siRNA sense strand
cgugaaacccuacgaaugc

SEQ ID NO: 409287 - RNA, 19 nt, Homo sapiens
  misc_RNA (1)...(19): siRNA sense strand
uguaaugagugugguaaag

SEQ ID NO: 409288 - RNA, 19 nt, Homo sapiens
  misc_RNA (1)...(19): siRNA sense strand
aaacacaggagaggaagga

SEQ ID NO: 409289 - RNA, 19 nt, Homo sapiens
  misc_RNA (1)...(19): siRNA sense strand
ccaagacccauguguagag

SEQ ID NO: 409290 - RNA, 19 nt, Homo sapiens
  misc_RNA (1)...(19): siRNA sense strand
ccucauucggcaucauaua

SEQ ID NO: 409291 - RNA, 19 nt, Homo sapiens
  misc_RNA (1)...(19): siRNA sense strand
ccacauucuucagcagugu

SEQ ID NO: 409292 - RNA, 19 nt, Homo sapiens
  misc_RNA (1)...(19): siRNA sense strand
uuacaagugcagugaaugu

SEQ ID NO: 409293 - RNA, 19 nt, Homo sapiens
  misc_RNA (1)...(19): siRNA sense strand
uacuaggacuuccaguuuc

SEQ ID NO: 409294 - RNA, 19 nt, Homo sapiens
  misc_RNA (1)...(19): siRNA sense strand
gaaauccugaaaccucaca

SEQ ID NO: 409295 - RNA, 19 nt, Homo sapiens
  misc_RNA (1)...(19): siRNA sense strand
accgagagcuucaagaacu

SEQ ID NO: 409296 - RNA, 19 nt, Homo sapiens
  misc_RNA (1)...(19): siRNA sense strand
cacaggagaggaaggaaug

SEQ ID NO: 409297 - RNA, 19 nt, Homo sapiens
  misc_RNA (1)...(19): siRNA sense strand
gaaaguccaggagccuugu

SEQ ID NO: 409298 - RNA, 19 nt, Homo sapiens
  misc_RNA (1)...(19): siRNA sense strand
ccagagcucaucccuuagu

SEQ ID NO: 409299 - RNA, 19 nt, Homo sapiens
  misc_RNA (1)...(19): siRNA sense strand
gaccagugaccuugagaag

SEQ ID NO: 409300 - RNA, 19 nt, Homo sapiens
  misc_RNA (1)...(19): siRNA sense strand
uuagucagcaucagagaau

SEQ ID NO: 409301 - RNA, 19 nt, Homo sapiens
  misc_RNA (1)...(19): siRNA sense strand
ccuuaugaguguaaugagu

SEQ ID NO: 409302 - RNA, 19 nt, Homo sapiens
  misc_RNA (1)...(19): siRNA sense strand
caccagagcaagcccuuuc

SEQ ID NO: 409303 - RNA, 19 nt, Homo sapiens
  misc_RNA (1)...(19): siRNA sense strand
cauucggcaucauauaauc

SEQ ID NO: 409304 - RNA, 19 nt, Homo sapiens
  misc_RNA (1)...(19): siRNA sense strand
cucauucggcaucauauaa

SEQ ID NO: 409305 - RNA, 19 nt, Homo sapiens
  misc_RNA (1)...(19): siRNA sense strand
ggcugcuggucuccucaua

SEQ ID NO: 409306 - RNA, 19 nt, Homo sapiens
  misc_RNA (1)...(19): siRNA sense strand
cagcucuuguucagcauca

SEQ ID NO: 409307 - RNA, 19 nt, Homo sapiens
  misc_RNA (1)...(19): siRNA sense strand
agacacacaccgagagcuu

SEQ ID NO: 409308 - RNA, 19 nt, Homo sapiens
  misc_RNA (1)...(19): siRNA sense strand
cagcucugccuucguuaga

SEQ ID NO: 409309 - RNA, 19 nt, Homo sapiens
  misc_RNA (1)...(19): siRNA sense strand
gugaaacccuacgaaugca

SEQ ID NO: 409310 - RNA, 19 nt, Homo sapiens
  misc_RNA (1)...(19): siRNA sense strand
ccacgggaccagugaccuu

SEQ ID NO: 409311 - RNA, 19 nt, Homo sapiens
  misc_RNA (1)...(19): siRNA sense strand
uauaauccacaccggagaa

SEQ ID NO: 409312 - RNA, 19 nt, Homo sapiens
  misc_RNA (1)...(19): siRNA sense strand
caaaccaucagaggacuca

SEQ ID NO: 409313 - RNA, 19 nt, Homo sapiens
  misc_RNA (1)...(19): siRNA sense strand
uuacugcgcagcguucauu

SEQ ID NO: 409314 - RNA, 19 nt, Homo sapiens
  misc_RNA (1)...(19): siRNA sense strand
agagaagcccuacgaaugc

SEQ ID NO: 409315 - RNA, 19 nt, Homo sapiens
  misc_RNA (1)...(19): siRNA sense strand
aaccauaugcauguaauga

SEQ ID NO: 409316 - RNA, 19 nt, Homo sapiens
  misc_RNA (1)...(19): siRNA sense strand
gaguguaaugaguguggua

SEQ ID NO: 409317 - RNA, 19 nt, Homo sapiens
  misc_RNA (1)...(19): siRNA sense strand
acagagagugcccguggaa

SEQ ID NO: 409318 - RNA, 19 nt, Homo sapiens
  misc_RNA (1)...(19): siRNA sense strand
guucagcaucagagaauuc

SEQ ID NO: 409319 - RNA, 19 nt, Homo sapiens
  misc_RNA (1)...(19): siRNA sense strand
acagaugcagcgaguguga

SEQ ID NO: 409320 - RNA, 19 nt, Homo sapiens
  misc_RNA (1)...(19): siRNA sense strand
ggauucacacuggagagaa

SEQ ID NO: 409321 - RNA, 19 nt, Homo sapiens
  misc_RNA (1)...(19): siRNA sense strand
gaauguggcaaagccuuca

SEQ ID NO: 409322 - RNA, 19 nt, Homo sapiens
  misc_RNA (1)...(19): siRNA sense strand
uguaaugaauguggcaaag

SEQ ID NO: 409323 - RNA, 19 nt, Homo sapiens
  misc_RNA (1)...(19): siRNA sense strand
cugcucagcucuuguucag

SEQ ID NO: 409324 - RNA, 19 nt, Homo sapiens
  misc_RNA (1)...(19): siRNA sense strand
cuacgaaugcagcgagugu

SEQ ID NO: 409325 - RNA, 19 nt, Homo sapiens
  misc_RNA (1)...(19): siRNA sense strand
cuacgaaugcagcgacugu

SEQ ID NO: 409326 - RNA, 19 nt, Homo sapiens
  misc_RNA (1)...(19): siRNA sense strand
cagcagagcuccuuaaaua

SEQ ID NO: 409327 - RNA, 19 nt, Homo sapiens
  misc_RNA (1)...(19): siRNA sense strand
guaauaaacucuucacauc

SEQ ID NO: 409328 - RNA, 19 nt, Homo sapiens
  misc_RNA (1)...(19): siRNA sense strand
gaucuccucuuguaauaaa

SEQ ID NO: 409329 - RNA, 19 nt, Homo sapiens
  misc_RNA (1)...(19): siRNA sense strand
cgagagaccuuuccuuugu

SEQ ID NO: 409330 - RNA, 19 nt, Homo sapiens
  misc_RNA (1)...(19): siRNA sense strand
ggugaacucuggaaucuug

SEQ ID NO: 409331 - RNA, 19 nt, Homo sapiens
  misc_RNA (1)...(19): siRNA sense strand
gcaccucccugcuaauaau

SEQ ID NO: 409332 - RNA, 19 nt, Homo sapiens
  misc_RNA (1)...(19): siRNA sense strand
gcagagcuccuuaaauaug

SEQ ID NO: 409333 - RNA, 19 nt, Homo sapiens
  misc_RNA (1)...(19): siRNA sense strand
gggcaaaccuucgccaaga

SEQ ID NO: 409334 - RNA, 19 nt, Homo sapiens
  misc_RNA (1)...(19): siRNA sense strand
ucuggaaucuugacuauug

SEQ ID NO: 409335 - RNA, 19 nt, Homo sapiens
  misc_RNA (1)...(19): siRNA sense strand
gauagugucucucuucucu

SEQ ID NO: 409336 - RNA, 19 nt, Homo sapiens
  misc_RNA (1)...(19): siRNA sense strand
agaaacaccugcaggaugu

SEQ ID NO: 409337 - RNA, 19 nt, Homo sapiens
  misc_RNA (1)...(19): siRNA sense strand
ugggaucucuggacucuuu

SEQ ID NO: 409338 - RNA, 19 nt, Homo sapiens
  misc_RNA (1)...(19): siRNA sense strand
ccgaucuccucuuguaaua

SEQ ID NO: 409339 - RNA, 19 nt, Homo sapiens
  misc_RNA (1)...(19): siRNA sense strand
ggaccuucaccaccucuua

SEQ ID NO: 409340 - RNA, 19 nt, Homo sapiens
  misc_RNA (1)...(19): siRNA sense strand
ugaagacgcacaugguuaa

SEQ ID NO: 409341 - RNA, 19 nt, Homo sapiens
  misc_RNA (1)...(19): siRNA sense strand
ccaagaagcaccagcugaa

SEQ ID NO: 409342 - RNA, 19 nt, Homo sapiens
  misc_RNA (1)...(19): siRNA sense strand
caagaagacauuuaucaca

SEQ ID NO: 409343 - RNA, 19 nt, Homo sapiens
  misc_RNA (1)...(19): siRNA sense strand
ggaaggcugugggaaaucu

SEQ ID NO: 409344 - RNA, 19 nt, Homo sapiens
  misc_RNA (1)...(19): siRNA sense strand
ggcgagagaccuuuccuuu

SEQ ID NO: 409345 - RNA, 19 nt, Homo sapiens
  misc_RNA (1)...(19): siRNA sense strand
cagcgacccuccucaaagu

SEQ ID NO: 409346 - RNA, 19 nt, Homo sapiens
  misc_RNA (1)...(19): siRNA sense strand
ggcaaaccuucgccaagaa

SEQ ID NO: 409347 - RNA, 19 nt, Homo sapiens
  misc_RNA (1)...(19): siRNA sense strand
gggcaccucccugcuaaua

SEQ ID NO: 409348 - RNA, 19 nt, Homo sapiens
  misc_RNA (1)...(19): siRNA sense strand
gagagaccuuuccuuugug

SEQ ID NO: 409349 - RNA, 19 nt, Homo sapiens
  misc_RNA (1)...(19): siRNA sense strand
gaccugcuguugcgcuuug

SEQ ID NO: 409350 - RNA, 19 nt, Homo sapiens
  misc_RNA (1)...(19): siRNA sense strand
gccagaggcccuucaaaug

SEQ ID NO: 409351 - RNA, 19 nt, Homo sapiens
  misc_RNA (1)...(19): siRNA sense strand
aaacagugucucagaacua

SEQ ID NO: 409352 - RNA, 19 nt, Homo sapiens
  misc_RNA (1)...(19): siRNA sense strand
gacagaaugaucucaguga

SEQ ID NO: 409353 - RNA, 19 nt, Homo sapiens
  misc_RNA (1)...(19): siRNA sense strand
uagugucucucuucucuga

SEQ ID NO: 409354 - RNA, 19 nt, Homo sapiens
  misc_RNA (1)...(19): siRNA sense strand
gcgagagaccuuuccuuug

SEQ ID NO: 409355 - RNA, 19 nt, Homo sapiens
  misc_RNA (1)...(19): siRNA sense strand
gcacagucacuauccacaa

SEQ ID NO: 409356 - RNA, 19 nt, Homo sapiens
  misc_RNA (1)...(19): siRNA sense strand
guggaaggcugugggaaau

SEQ ID NO: 409357 - RNA, 19 nt, Homo sapiens
  misc_RNA (1)...(19): siRNA sense strand
ugcccgaucuccucuugua

SEQ ID NO: 409358 - RNA, 19 nt, Homo sapiens
  misc_RNA (1)...(19): siRNA sense strand
aauaaacucuucacaucca

SEQ ID NO: 409359 - RNA, 19 nt, Homo sapiens
  misc_RNA (1)...(19): siRNA sense strand
ggacacagcauuggugaac

SEQ ID NO: 409360 - RNA, 19 nt, Homo sapiens
  misc_RNA (1)...(19): siRNA sense strand
cuauugauguggcuucugu

SEQ ID NO: 409361 - RNA, 19 nt, Homo sapiens
  misc_RNA (1)...(19): siRNA sense strand
gcaagaagacauuuaucac

SEQ ID NO: 409362 - RNA, 19 nt, Homo sapiens
  misc_RNA (1)...(19): siRNA sense strand
aaucuugacuauugaugug

SEQ ID NO: 409363 - RNA, 19 nt, Homo sapiens
  misc_RNA (1)...(19): siRNA sense strand
ggugggccaggaucucuua

SEQ ID NO: 409364 - RNA, 19 nt, Homo sapiens
  misc_RNA (1)...(19): siRNA sense strand
cagcagcccaggugucuga

SEQ ID NO: 409365 - RNA, 19 nt, Homo sapiens
  misc_RNA (1)...(19): siRNA sense strand
agagaccuuuccuuuguga

SEQ ID NO: 409366 - RNA, 19 nt, Homo sapiens
  misc_RNA (1)...(19): siRNA sense strand
cagagcuccuuaaauaugg

SEQ ID NO: 409367 - RNA, 19 nt, Homo sapiens
  misc_RNA (1)...(19): siRNA sense strand
guccaggcguggugcugua

SEQ ID NO: 409368 - RNA, 19 nt, Homo sapiens
  misc_RNA (1)...(19): siRNA sense strand
gaaucuugacuauugaugu

SEQ ID NO: 409369 - RNA, 19 nt, Homo sapiens
  misc_RNA (1)...(19): siRNA sense strand
acacccagcagugaacuua

SEQ ID NO: 409370 - RNA, 19 nt, Homo sapiens
  misc_RNA (1)...(19): siRNA sense strand
gaagacgcacaugguuaaa

SEQ ID NO: 409371 - RNA, 19 nt, Homo sapiens
  misc_RNA (1)...(19): siRNA sense strand
ugcaggauguggacacuug

SEQ ID NO: 409372 - RNA, 19 nt, Homo sapiens
  misc_RNA (1)...(19): siRNA sense strand
cuacauucacuccaagaaa

SEQ ID NO: 409373 - RNA, 19 nt, Homo sapiens
  misc_RNA (1)...(19): siRNA sense strand
gcugcaagaagacauuuau

SEQ ID NO: 409374 - RNA, 19 nt, Homo sapiens
  misc_RNA (1)...(19): siRNA sense strand
ugaaaacagugucucagaa

SEQ ID NO: 409375 - RNA, 19 nt, Homo sapiens
  misc_RNA (1)...(19): siRNA sense strand
gcuuugacacccagcagua

SEQ ID NO: 409376 - RNA, 19 nt, Homo sapiens
  misc_RNA (1)...(19): siRNA sense strand
acucuggaaucuugacuau

SEQ ID NO: 409377 - RNA, 19 nt, Homo sapiens
  misc_RNA (1)...(19): siRNA sense strand
ggauguggacacuuggaaa

SEQ ID NO: 409378 - RNA, 19 nt, Homo sapiens
  misc_RNA (1)...(19): siRNA sense strand
agaagacauuuaucacagu

SEQ ID NO: 409379 - RNA, 19 nt, Homo sapiens
  misc_RNA (1)...(19): siRNA sense strand
acacccagcaguaagcuaa

SEQ ID NO: 409380 - RNA, 19 nt, Homo sapiens
  misc_RNA (1)...(19): siRNA sense strand
gaccuuuccuuugugacuu

SEQ ID NO: 409381 - RNA, 19 nt, Homo sapiens
  misc_RNA (1)...(19): siRNA sense strand
ccagaggcccuucaaaugc

SEQ ID NO: 409382 - RNA, 19 nt, Homo sapiens
  misc_RNA (1)...(19): siRNA sense strand
caguacuucugcugcauug

SEQ ID NO: 409383 - RNA, 19 nt, Homo sapiens
  misc_RNA (1)...(19): siRNA sense strand
ggcuguggcuggaacuuca

SEQ ID NO: 409384 - RNA, 19 nt, Homo sapiens
  misc_RNA (1)...(19): siRNA sense strand
caagaaacaccugcaggau

SEQ ID NO: 409385 - RNA, 19 nt, Homo sapiens
  misc_RNA (1)...(19): siRNA sense strand
ucgagcacccuuugugaaa

SEQ ID NO: 409386 - RNA, 19 nt, Homo sapiens
  misc_RNA (1)...(19): siRNA sense strand
aaauucaccugcggaguca

SEQ ID NO: 409387 - RNA, 19 nt, Homo sapiens
  misc_RNA (1)...(19): siRNA sense strand
cagaaugaucucagugaug

SEQ ID NO: 409388 - RNA, 19 nt, Homo sapiens
  misc_RNA (1)...(19): siRNA sense strand
acagaaugaucucagugau

SEQ ID NO: 409389 - RNA, 19 nt, Homo sapiens
  misc_RNA (1)...(19): siRNA sense strand
uacauucacuccaagaaac

SEQ ID NO: 409390 - RNA, 19 nt, Homo sapiens
  misc_RNA (1)...(19): siRNA sense strand
guucaugugcccuguggaa

SEQ ID NO: 409391 - RNA, 19 nt, Homo sapiens
  misc_RNA (1)...(19): siRNA sense strand
gacgaugaccggagguuca

SEQ ID NO: 409392 - RNA, 19 nt, Homo sapiens
  misc_RNA (1)...(19): siRNA sense strand
acacagcauuggugaacuc

SEQ ID NO: 409393 - RNA, 19 nt, Homo sapiens
  misc_RNA (1)...(19): siRNA sense strand
gggccaggaucucuuagcu

SEQ ID NO: 409394 - RNA, 19 nt, Homo sapiens
  misc_RNA (1)...(19): siRNA sense strand
cuggauaccucucucuuuu

SEQ ID NO: 409395 - RNA, 19 nt, Homo sapiens
  misc_RNA (1)...(19): siRNA sense strand
ggaaucuugacuauugaug

SEQ ID NO: 409396 - RNA, 19 nt, Homo sapiens
  misc_RNA (1)...(19): siRNA sense strand
ugcaagaagacauuuauca

SEQ ID NO: 409397 - RNA, 19 nt, Homo sapiens
  misc_RNA (1)...(19): siRNA sense strand
gccaugagcaggagaacuc

SEQ ID NO: 409398 - RNA, 19 nt, Homo sapiens
  misc_RNA (1)...(19): siRNA sense strand
gugucucucuucucugaug

SEQ ID NO: 409399 - RNA, 19 nt, Homo sapiens
  misc_RNA (1)...(19): siRNA sense strand
guugcccgaucuccucuug

SEQ ID NO: 409400 - RNA, 19 nt, Homo sapiens
  misc_RNA (1)...(19): siRNA sense strand
gcuaacaguggacacagau

SEQ ID NO: 409401 - RNA, 19 nt, Homo sapiens
  misc_RNA (1)...(19): siRNA sense strand
aagaagcaccagcugaaga

SEQ ID NO: 409402 - RNA, 19 nt, Homo sapiens
  misc_RNA (1)...(19): siRNA sense strand
augaagacgcacaugguua

SEQ ID NO: 409403 - RNA, 19 nt, Homo sapiens
  misc_RNA (1)...(19): siRNA sense strand
cauccaagcacagcaugaa

SEQ ID NO: 409404 - RNA, 19 nt, Homo sapiens
  misc_RNA (1)...(19): siRNA sense strand
ccucaaggcgcacaugaag

SEQ ID NO: 409405 - RNA, 19 nt, Homo sapiens
  misc_RNA (1)...(19): siRNA sense strand
agaagcaccagcugaagau

SEQ ID NO: 409406 - RNA, 19 nt, Homo sapiens
  misc_RNA (1)...(19): siRNA sense strand
uguggaaggcugugggaaa

SEQ ID NO: 409407 - RNA, 19 nt, Homo sapiens
  misc_RNA (1)...(19): siRNA sense strand
caaugcagcaggaaaccau

SEQ ID NO: 409408 - RNA, 19 nt, Homo sapiens
  misc_RNA (1)...(19): siRNA sense strand
ccagcgacccuccucaaag

SEQ ID NO: 409409 - RNA, 19 nt, Homo sapiens
  misc_RNA (1)...(19): siRNA sense strand
gacaguacuucugcugcau

SEQ ID NO: 409410 - RNA, 19 nt, Homo sapiens
  misc_RNA (1)...(19): siRNA sense strand
ccagccagagacagaauga

SEQ ID NO: 409411 - RNA, 19 nt, Homo sapiens
  misc_RNA (1)...(19): siRNA sense strand
ucagcuagaagcagcaaau

SEQ ID NO: 409412 - RNA, 19 nt, Homo sapiens
  misc_RNA (1)...(19): siRNA sense strand
cagcuagaagcagcaaauu

SEQ ID NO: 409413 - RNA, 19 nt, Homo sapiens
  misc_RNA (1)...(19): siRNA sense strand
ggacucuuuggccaugaaa

SEQ ID NO: 409414 - RNA, 19 nt, Homo sapiens
  misc_RNA (1)...(19): siRNA sense strand
ggcaccucccugcuaauaa

SEQ ID NO: 409415 - RNA, 19 nt, Homo sapiens
  misc_RNA (1)...(19): siRNA sense strand
cacagucacuauccacaac

SEQ ID NO: 409416 - RNA, 19 nt, Homo sapiens
  misc_RNA (1)...(19): siRNA sense strand
gaaaggccguucaaaugua

SEQ ID NO: 409417 - RNA, 19 nt, Homo sapiens
  misc_RNA (1)...(19): siRNA sense strand
gaacagcucucuccagaca

SEQ ID NO: 409418 - RNA, 19 nt, Homo sapiens
  misc_RNA (1)...(19): siRNA sense strand
ucaagugucugauauguaa

SEQ ID NO: 409419 - RNA, 19 nt, Homo sapiens
  misc_RNA (1)...(19): siRNA sense strand
ucacauugcuucccacuuu

SEQ ID NO: 409420 - RNA, 19 nt, Homo sapiens
  misc_RNA (1)...(19): siRNA sense strand
gaaauuacccugacuaucu

SEQ ID NO: 409421 - RNA, 19 nt, Homo sapiens
  misc_RNA (1)...(19): siRNA sense strand
acacaggacugaaaucuuu

SEQ ID NO: 409422 - RNA, 19 nt, Homo sapiens
  misc_RNA (1)...(19): siRNA sense strand
gauguuggcugcaccauga

SEQ ID NO: 409423 - RNA, 19 nt, Homo sapiens
  misc_RNA (1)...(19): siRNA sense strand
ccacagaauucaacaaguu

SEQ ID NO: 409424 - RNA, 19 nt, Homo sapiens
  misc_RNA (1)...(19): siRNA sense strand
gagaucacccugaccauua

SEQ ID NO: 409425 - RNA, 19 nt, Homo sapiens
  misc_RNA (1)...(19): siRNA sense strand
ggaaagaguuuuacuguga

SEQ ID NO: 409426 - RNA, 19 nt, Homo sapiens
  misc_RNA (1)...(19): siRNA sense strand
gaacacuaauuaugccuau

SEQ ID NO: 409427 - RNA, 19 nt, Homo sapiens
  misc_RNA (1)...(19): siRNA sense strand
gcagauugauccaagcauu

SEQ ID NO: 409428 - RNA, 19 nt, Homo sapiens
  misc_RNA (1)...(19): siRNA sense strand
gaaguggauucacguauuc

SEQ ID NO: 409429 - RNA, 19 nt, Homo sapiens
  misc_RNA (1)...(19): siRNA sense strand
caacacaucagaucccaua

SEQ ID NO: 409430 - RNA, 19 nt, Homo sapiens
  misc_RNA (1)...(19): siRNA sense strand
gcacaagguucccaguuuc

SEQ ID NO: 409431 - RNA, 19 nt, Homo sapiens
  misc_RNA (1)...(19): siRNA sense strand
gaggaggguuuccgaacua

SEQ ID NO: 409432 - RNA, 19 nt, Homo sapiens
  misc_RNA (1)...(19): siRNA sense strand
gaaccaauccucauaacug

SEQ ID NO: 409433 - RNA, 19 nt, Homo sapiens
  misc_RNA (1)...(19): siRNA sense strand
gcaugaagccuuauaagug

SEQ ID NO: 409434 - RNA, 19 nt, Homo sapiens
  misc_RNA (1)...(19): siRNA sense strand
gcacauggccacacauaug

SEQ ID NO: 409435 - RNA, 19 nt, Homo sapiens
  misc_RNA (1)...(19): siRNA sense strand
gagccaagcccuucaaaug

SEQ ID NO: 409436 - RNA, 19 nt, Homo sapiens
  misc_RNA (1)...(19): siRNA sense strand
gaaagacacacaugcaguu

SEQ ID NO: 409437 - RNA, 19 nt, Homo sapiens
  misc_RNA (1)...(19): siRNA sense strand
guuccaaacuuccauaaau

SEQ ID NO: 409438 - RNA, 19 nt, Homo sapiens
  misc_RNA (1)...(19): siRNA sense strand
ggaggagacagcccaguua

SEQ ID NO: 409439 - RNA, 19 nt, Homo sapiens
  misc_RNA (1)...(19): siRNA sense strand
guccugaggucaucacuuu

SEQ ID NO: 409440 - RNA, 19 nt, Homo sapiens
  misc_RNA (1)...(19): siRNA sense strand
gcucaaagcacacaucaga

SEQ ID NO: 409441 - RNA, 19 nt, Homo sapiens
  misc_RNA (1)...(19): siRNA sense strand
gcagauagaccauacaagu

SEQ ID NO: 409442 - RNA, 19 nt, Homo sapiens
  misc_RNA (1)...(19): siRNA sense strand
ugugaaaucugucuacuau

SEQ ID NO: 409443 - RNA, 19 nt, Homo sapiens
  misc_RNA (1)...(19): siRNA sense strand
gauccuaccugcccugugu

SEQ ID NO: 409444 - RNA, 19 nt, Homo sapiens
  misc_RNA (1)...(19): siRNA sense strand
ggaagaggcuuuguuucug

SEQ ID NO: 409445 - RNA, 19 nt, Homo sapiens
  misc_RNA (1)...(19): siRNA sense strand
cagaguggcuagucucaaa

SEQ ID NO: 409446 - RNA, 19 nt, Homo sapiens
  misc_RNA (1)...(19): siRNA sense strand
ccauaaaugugaaaucugu

SEQ ID NO: 409447 - RNA, 19 nt, Homo sapiens
  misc_RNA (1)...(19): siRNA sense strand
ggcacaagguucccaguuu

SEQ ID NO: 409448 - RNA, 19 nt, Homo sapiens
  misc_RNA (1)...(19): siRNA sense strand
uguaacaacucgcuugauu

SEQ ID NO: 409449 - RNA, 19 nt, Homo sapiens
  misc_RNA (1)...(19): siRNA sense strand
caagaaugguccuaccuau

SEQ ID NO: 409450 - RNA, 19 nt, Homo sapiens
  misc_RNA (1)...(19): siRNA sense strand
cacaugcaguuucauuaua

SEQ ID NO: 409451 - RNA, 19 nt, Homo sapiens
  misc_RNA (1)...(19): siRNA sense strand
gguccuaccuauaacugua

SEQ ID NO: 409452 - RNA, 19 nt, Homo sapiens
  misc_RNA (1)...(19): siRNA sense strand
agaaugguccuaccuauaa

SEQ ID NO: 409453 - RNA, 19 nt, Homo sapiens
  misc_RNA (1)...(19): siRNA sense strand
ugaaaucugucuacuaucu

SEQ ID NO: 409454 - RNA, 19 nt, Homo sapiens
  misc_RNA (1)...(19): siRNA sense strand
caugaagccuuauaagugu

SEQ ID NO: 409455 - RNA, 19 nt, Homo sapiens
  misc_RNA (1)...(19): siRNA sense strand
ccucauaacugacuuaggu

SEQ ID NO: 409456 - RNA, 19 nt, Homo sapiens
  misc_RNA (1)...(19): siRNA sense strand
caaguacaaggucuuauaa

SEQ ID NO: 409457 - RNA, 19 nt, Homo sapiens
  misc_RNA (1)...(19): siRNA sense strand
agaaguggauucacguauu

SEQ ID NO: 409458 - RNA, 19 nt, Homo sapiens
  misc_RNA (1)...(19): siRNA sense strand
gaagaaagacacacaugca

SEQ ID NO: 409459 - RNA, 19 nt, Homo sapiens
  misc_RNA (1)...(19): siRNA sense strand
gcacguagaccaguuugaa

SEQ ID NO: 409460 - RNA, 19 nt, Homo sapiens
  misc_RNA (1)...(19): siRNA sense strand
gaauucaaccugacacuuc

SEQ ID NO: 409461 - RNA, 19 nt, Homo sapiens
  misc_RNA (1)...(19): siRNA sense strand
gaaggaggagacauuugua

SEQ ID NO: 409462 - RNA, 19 nt, Homo sapiens
  misc_RNA (1)...(19): siRNA sense strand
ucaacaaguucuacagaga

SEQ ID NO: 409463 - RNA, 19 nt, Homo sapiens
  misc_RNA (1)...(19): siRNA sense strand
ucaaguacaaggucuuaua

SEQ ID NO: 409464 - RNA, 19 nt, Homo sapiens
  misc_RNA (1)...(19): siRNA sense strand
ccucggagcugaaggaaca

SEQ ID NO: 409465 - RNA, 19 nt, Homo sapiens
  misc_RNA (1)...(19): siRNA sense strand
gaggagacauuuguaugga

SEQ ID NO: 409466 - RNA, 19 nt, Homo sapiens
  misc_RNA (1)...(19): siRNA sense strand
gcacacaucagaacacaca

SEQ ID NO: 409467 - RNA, 19 nt, Homo sapiens
  misc_RNA (1)...(19): siRNA sense strand
ccagauguuuccagcguuu

SEQ ID NO: 409468 - RNA, 19 nt, Homo sapiens
  misc_RNA (1)...(19): siRNA sense strand
uaacaacucgcuugauuca

SEQ ID NO: 409469 - RNA, 19 nt, Homo sapiens
  misc_RNA (1)...(19): siRNA sense strand
uaacaggacaguuugauca

SEQ ID NO: 409470 - RNA, 19 nt, Homo sapiens
  misc_RNA (1)...(19): siRNA sense strand
gaaggacugcagccuguaa

SEQ ID NO: 409471 - RNA, 19 nt, Homo sapiens
  misc_RNA (1)...(19): siRNA sense strand
ccacacauaugagcaugaa

SEQ ID NO: 409472 - RNA, 19 nt, Homo sapiens
  misc_RNA (1)...(19): siRNA sense strand
ggagucaucccaagaggaa

SEQ ID NO: 409473 - RNA, 19 nt, Homo sapiens
  misc_RNA (1)...(19): siRNA sense strand
gagaaaagccauacaaaug

SEQ ID NO: 409474 - RNA, 19 nt, Homo sapiens
  misc_RNA (1)...(19): siRNA sense strand
ccuagaaggcauccaguua

SEQ ID NO: 409475 - RNA, 19 nt, Homo sapiens
  misc_RNA (1)...(19): siRNA sense strand
agacacacaugcaguuuca

SEQ ID NO: 409476 - RNA, 19 nt, Homo sapiens
  misc_RNA (1)...(19): siRNA sense strand
cuacagagacugcucaugu

SEQ ID NO: 409477 - RNA, 19 nt, Homo sapiens
  misc_RNA (1)...(19): siRNA sense strand
caggacaguuugaucagaa

SEQ ID NO: 409478 - RNA, 19 nt, Homo sapiens
  misc_RNA (1)...(19): siRNA sense strand
gauagaccauacaaguguu

SEQ ID NO: 409479 - RNA, 19 nt, Homo sapiens
  misc_RNA (1)...(19): siRNA sense strand
caaccugacacuucauaaa

SEQ ID NO: 409480 - RNA, 19 nt, Homo sapiens
  misc_RNA (1)...(19): siRNA sense strand
cccaagagcuucaagaaac

SEQ ID NO: 409481 - RNA, 19 nt, Homo sapiens
  misc_RNA (1)...(19): siRNA sense strand
gcuucccacuuuaaacaua

SEQ ID NO: 409482 - RNA, 19 nt, Homo sapiens
  misc_RNA (1)...(19): siRNA sense strand
acucagaggucaagaaugg

SEQ ID NO: 409483 - RNA, 19 nt, Homo sapiens
  misc_RNA (1)...(19): siRNA sense strand
gcggagaacacuaauuaug

SEQ ID NO: 409484 - RNA, 19 nt, Homo sapiens
  misc_RNA (1)...(19): siRNA sense strand
gacagaaggaggagacauu

SEQ ID NO: 409485 - RNA, 19 nt, Homo sapiens
  misc_RNA (1)...(19): siRNA sense strand
ccaguuaacgcgacacauu

SEQ ID NO: 409486 - RNA, 19 nt, Homo sapiens
  misc_RNA (1)...(19): siRNA sense strand
gacguuaccucuucaacag

SEQ ID NO: 409487 - RNA, 19 nt, Homo sapiens
  misc_RNA (1)...(19): siRNA sense strand
gaccugaccgugucucuga

SEQ ID NO: 409488 - RNA, 19 nt, Homo sapiens
  misc_RNA (1)...(19): siRNA sense strand
gcaacgccuucuccacgaa

SEQ ID NO: 409489 - RNA, 19 nt, Homo sapiens
  misc_RNA (1)...(19): siRNA sense strand
agacuucacuaaauugcaa

SEQ ID NO: 409490 - RNA, 19 nt, Homo sapiens
  misc_RNA (1)...(19): siRNA sense strand
ugaaugcggagaacacuaa

SEQ ID NO: 409491 - RNA, 19 nt, Homo sapiens
  misc_RNA (1)...(19): siRNA sense strand
cacauugcuucccacuuua

SEQ ID NO: 409492 - RNA, 19 nt, Homo sapiens
  misc_RNA (1)...(19): siRNA sense strand
acacaggaguuagaccuuu

SEQ ID NO: 409493 - RNA, 19 nt, Homo sapiens
  misc_RNA (1)...(19): siRNA sense strand
aagaagaagucaccguuuc

SEQ ID NO: 409494 - RNA, 19 nt, Homo sapiens
  misc_RNA (1)...(19): siRNA sense strand
caguuaacgcgacacauua

SEQ ID NO: 409495 - RNA, 19 nt, Homo sapiens
  misc_RNA (1)...(19): siRNA sense strand
aacauuacguugcagauug

SEQ ID NO: 409496 - RNA, 19 nt, Homo sapiens
  misc_RNA (1)...(19): siRNA sense strand
gaaaagccauacaaaugug

SEQ ID NO: 409497 - RNA, 19 nt, Homo sapiens
  misc_RNA (1)...(19): siRNA sense strand
gcguucagcugcagugugu

SEQ ID NO: 409498 - RNA, 19 nt, Homo sapiens
  misc_RNA (1)...(19): siRNA sense strand
gcacugcagacccacauga

SEQ ID NO: 409499 - RNA, 19 nt, Homo sapiens
  misc_RNA (1)...(19): siRNA sense strand
cauaucagcaagaugcaua

SEQ ID NO: 409500 - RNA, 19 nt, Homo sapiens
  misc_RNA (1)...(19): siRNA sense strand
aaccaauccucauaacuga

SEQ ID NO: 409501 - RNA, 19 nt, Homo sapiens
  misc_RNA (1)...(19): siRNA sense strand
cccaagaccucacucaagu

SEQ ID NO: 409502 - RNA, 19 nt, Homo sapiens
  misc_RNA (1)...(19): siRNA sense strand
gcgccacggugucagagaa

SEQ ID NO: 409503 - RNA, 19 nt, Homo sapiens
  misc_RNA (1)...(19): siRNA sense strand
agaaaugcaucacggaagu

SEQ ID NO: 409504 - RNA, 19 nt, Homo sapiens
  misc_RNA (1)...(19): siRNA sense strand
ggaggaagaggaagaacau

SEQ ID NO: 409505 - RNA, 19 nt, Homo sapiens
  misc_RNA (1)...(19): siRNA sense strand
ugacccagauggaguuuua

SEQ ID NO: 409506 - RNA, 19 nt, Homo sapiens
  misc_RNA (1)...(19): siRNA sense strand
ggaggagacauuuguaugg

SEQ ID NO: 409507 - RNA, 19 nt, Homo sapiens
  misc_RNA (1)...(19): siRNA sense strand
gaaggcauccaguuacagu

SEQ ID NO: 409508 - RNA, 19 nt, Homo sapiens
  misc_RNA (1)...(19): siRNA sense strand
gaaagaguuuuacugugaa

SEQ ID NO: 409509 - RNA, 19 nt, Homo sapiens
  misc_RNA (1)...(19): siRNA sense strand
ggugaggcauguucgaauc

SEQ ID NO: 409510 - RNA, 19 nt, Homo sapiens
  misc_RNA (1)...(19): siRNA sense strand
gagcugaaggaacacauga

SEQ ID NO: 409511 - RNA, 19 nt, Homo sapiens
  misc_RNA (1)...(19): siRNA sense strand
agaucacccugaccauuaa

SEQ ID NO: 409512 - RNA, 19 nt, Homo sapiens
  misc_RNA (1)...(19): siRNA sense strand
aaacauacggaauuaagga

SEQ ID NO: 409513 - RNA, 19 nt, Homo sapiens
  misc_RNA (1)...(19): siRNA sense strand
uacagagacugcucauguu

SEQ ID NO: 409514 - RNA, 19 nt, Homo sapiens
  misc_RNA (1)...(19): siRNA sense strand
caaacuuccauaaauguga

SEQ ID NO: 409515 - RNA, 19 nt, Homo sapiens
  misc_RNA (1)...(19): siRNA sense strand
uagaaggcauccaguuaca

SEQ ID NO: 409516 - RNA, 19 nt, Homo sapiens
  misc_RNA (1)...(19): siRNA sense strand
gaaagaaagagauguguua

SEQ ID NO: 409517 - RNA, 19 nt, Homo sapiens
  misc_RNA (1)...(19): siRNA sense strand
gcacgcaccuucucuguga

SEQ ID NO: 409518 - RNA, 19 nt, Homo sapiens
  misc_RNA (1)...(19): siRNA sense strand
gaaagugacuccagagaca

SEQ ID NO: 409519 - RNA, 19 nt, Homo sapiens
  misc_RNA (1)...(19): siRNA sense strand
gaggaaagguguuauccaa

SEQ ID NO: 409520 - RNA, 19 nt, Homo sapiens
  misc_RNA (1)...(19): siRNA sense strand
gcagaguuguugaugagua

SEQ ID NO: 409521 - RNA, 19 nt, Homo sapiens
  misc_RNA (1)...(19): siRNA sense strand
aaagcuaacuccagaauug

SEQ ID NO: 409522 - RNA, 19 nt, Homo sapiens
  misc_RNA (1)...(19): siRNA sense strand
gcacauggcggcacuguug

SEQ ID NO: 409523 - RNA, 19 nt, Homo sapiens
  misc_RNA (1)...(19): siRNA sense strand
gcaauaagagaaagaaaga

SEQ ID NO: 409524 - RNA, 19 nt, Homo sapiens
  misc_RNA (1)...(19): siRNA sense strand
ccaaaguucugaaagauca

SEQ ID NO: 409525 - RNA, 19 nt, Homo sapiens
  misc_RNA (1)...(19): siRNA sense strand
caacugguuuaaaguauga

SEQ ID NO: 409526 - RNA, 19 nt, Homo sapiens
  misc_RNA (1)...(19): siRNA sense strand
guacggacacugaggaaua

SEQ ID NO: 409527 - RNA, 19 nt, Homo sapiens
  misc_RNA (1)...(19): siRNA sense strand
ugacagagaugaccuaaaa

SEQ ID NO: 409528 - RNA, 19 nt, Homo sapiens
  misc_RNA (1)...(19): siRNA sense strand
gcccaagucuuuccacuau

SEQ ID NO: 409529 - RNA, 19 nt, Homo sapiens
  misc_RNA (1)...(19): siRNA sense strand
ccaagucuuuccacuauga

SEQ ID NO: 409530 - RNA, 19 nt, Homo sapiens
  misc_RNA (1)...(19): siRNA sense strand
gcaccgagcccuucacuuc

SEQ ID NO: 409531 - RNA, 19 nt, Homo sapiens
  misc_RNA (1)...(19): siRNA sense strand
ggaaucugcccaagucuuu

SEQ ID NO: 409532 - RNA, 19 nt, Homo sapiens
  misc_RNA (1)...(19): siRNA sense strand
cagaguggcuggaagaaug

SEQ ID NO: 409533 - RNA, 19 nt, Homo sapiens
  misc_RNA (1)...(19): siRNA sense strand
gaaccggccaucaaaugua

SEQ ID NO: 409534 - RNA, 19 nt, Homo sapiens
  misc_RNA (1)...(19): siRNA sense strand
gcacaggcaauaagagaaa

SEQ ID NO: 409535 - RNA, 19 nt, Homo sapiens
  misc_RNA (1)...(19): siRNA sense strand
ggacaaaaccuccaaaguu

SEQ ID NO: 409536 - RNA, 19 nt, Homo sapiens
  misc_RNA (1)...(19): siRNA sense strand
gaagugcacacaccucauu

SEQ ID NO: 409537 - RNA, 19 nt, Homo sapiens
  misc_RNA (1)...(19): siRNA sense strand
cucaaacgcuggacuauga

SEQ ID NO: 409538 - RNA, 19 nt, Homo sapiens
  misc_RNA (1)...(19): siRNA sense strand
acacguuucuccacucuuu

SEQ ID NO: 409539 - RNA, 19 nt, Homo sapiens
  misc_RNA (1)...(19): siRNA sense strand
ugaggcagauucaguauag

SEQ ID NO: 409540 - RNA, 19 nt, Homo sapiens
  misc_RNA (1)...(19): siRNA sense strand
gaaacagaaugaaguagcu

SEQ ID NO: 409541 - RNA, 19 nt, Homo sapiens
  misc_RNA (1)...(19): siRNA sense strand
ggauguguguuugcaauug

SEQ ID NO: 409542 - RNA, 19 nt, Homo sapiens
  misc_RNA (1)...(19): siRNA sense strand
ugucagaaguucauugaug

SEQ ID NO: 409543 - RNA, 19 nt, Homo sapiens
  misc_RNA (1)...(19): siRNA sense strand
agaaugaaguagcuaaugu

SEQ ID NO: 409544 - RNA, 19 nt, Homo sapiens
  misc_RNA (1)...(19): siRNA sense strand
agaaagagauguguuacug

SEQ ID NO: 409545 - RNA, 19 nt, Homo sapiens
  misc_RNA (1)...(19): siRNA sense strand
aggcauagauguucacaau

SEQ ID NO: 409546 - RNA, 19 nt, Homo sapiens
  misc_RNA (1)...(19): siRNA sense strand
gacaaaaccuccaaaguuc

SEQ ID NO: 409547 - RNA, 19 nt, Homo sapiens
  misc_RNA (1)...(19): siRNA sense strand
ccaaugcagugcuguuuag

SEQ ID NO: 409548 - RNA, 19 nt, Homo sapiens
  misc_RNA (1)...(19): siRNA sense strand
gaaagguguuauccaagca

SEQ ID NO: 409549 - RNA, 19 nt, Homo sapiens
  misc_RNA (1)...(19): siRNA sense strand
guucacagcauauuauuuc

SEQ ID NO: 409550 - RNA, 19 nt, Homo sapiens
  misc_RNA (1)...(19): siRNA sense strand
gugacuggauuuguugaua

SEQ ID NO: 409551 - RNA, 19 nt, Homo sapiens
  misc_RNA (1)...(19): siRNA sense strand
gcgccacacuugagucaga

SEQ ID NO: 409552 - RNA, 19 nt, Homo sapiens
  misc_RNA (1)...(19): siRNA sense strand
caaaagagccagaauugaa

SEQ ID NO: 409553 - RNA, 19 nt, Homo sapiens
  misc_RNA (1)...(19): siRNA sense strand
caaauauacggguuaucua

SEQ ID NO: 409554 - RNA, 19 nt, Homo sapiens
  misc_RNA (1)...(19): siRNA sense strand
gaguuugucggaaauaauu

SEQ ID NO: 409555 - RNA, 19 nt, Homo sapiens
  misc_RNA (1)...(19): siRNA sense strand
cagcuuggaagaauccuua

SEQ ID NO: 409556 - RNA, 19 nt, Homo sapiens
  misc_RNA (1)...(19): siRNA sense strand
cagguucaacaguauauua

SEQ ID NO: 409557 - RNA, 19 nt, Homo sapiens
  misc_RNA (1)...(19): siRNA sense strand
ccuccaaaguucugaaaga

SEQ ID NO: 409558 - RNA, 19 nt, Homo sapiens
  misc_RNA (1)...(19): siRNA sense strand
uauccaagcagccaucuuu

SEQ ID NO: 409559 - RNA, 19 nt, Homo sapiens
  misc_RNA (1)...(19): siRNA sense strand
cacaggcgcugcagcauca

SEQ ID NO: 409560 - RNA, 19 nt, Homo sapiens
  misc_RNA (1)...(19): siRNA sense strand
ccaacugguuuaaaguaug

SEQ ID NO: 409561 - RNA, 19 nt, Homo sapiens
  misc_RNA (1)...(19): siRNA sense strand
gcacacguuucuccacucu

SEQ ID NO: 409562 - RNA, 19 nt, Homo sapiens
  misc_RNA (1)...(19): siRNA sense strand
guugaugaguauaagacua

SEQ ID NO: 409563 - RNA, 19 nt, Homo sapiens
  misc_RNA (1)...(19): siRNA sense strand
cagcauauuauuucuguga

SEQ ID NO: 409564 - RNA, 19 nt, Homo sapiens
  misc_RNA (1)...(19): siRNA sense strand
gcaacacaguccucaucug

SEQ ID NO: 409565 - RNA, 19 nt, Homo sapiens
  misc_RNA (1)...(19): siRNA sense strand
ucagacagcgccacacuug

SEQ ID NO: 409566 - RNA, 19 nt, Homo sapiens
  misc_RNA (1)...(19): siRNA sense strand
acacugaggaauauuacua

SEQ ID NO: 409567 - RNA, 19 nt, Homo sapiens
  misc_RNA (1)...(19): siRNA sense strand
cagaguuguugaugaguau

SEQ ID NO: 409568 - RNA, 19 nt, Homo sapiens
  misc_RNA (1)...(19): siRNA sense strand
gcgacauucuucugggaaa

SEQ ID NO: 409569 - RNA, 19 nt, Homo sapiens
  misc_RNA (1)...(19): siRNA sense strand
gaggauacccugugucaac

SEQ ID NO: 409570 - RNA, 19 nt, Homo sapiens
  misc_RNA (1)...(19): siRNA sense strand
ugacuggauuuguugauag

SEQ ID NO: 409571 - RNA, 19 nt, Homo sapiens
  misc_RNA (1)...(19): siRNA sense strand
uguuugcaauugcggauua

SEQ ID NO: 409572 - RNA, 19 nt, Homo sapiens
  misc_RNA (1)...(19): siRNA sense strand
aaaagugucugcagaguug

SEQ ID NO: 409573 - RNA, 19 nt, Homo sapiens
  misc_RNA (1)...(19): siRNA sense strand
gccaaugcagugcuguuua

SEQ ID NO: 409574 - RNA, 19 nt, Homo sapiens
  misc_RNA (1)...(19): siRNA sense strand
ccaaauauacggguuaucu

SEQ ID NO: 409575 - RNA, 19 nt, Homo sapiens
  misc_RNA (1)...(19): siRNA sense strand
gaggaaagccauguucaca

SEQ ID NO: 409576 - RNA, 19 nt, Homo sapiens
  misc_RNA (1)...(19): siRNA sense strand
ucauuuaugccgagaauau

SEQ ID NO: 409577 - RNA, 19 nt, Homo sapiens
  misc_RNA (1)...(19): siRNA sense strand
gaaggcaaucguagagugu

SEQ ID NO: 409578 - RNA, 19 nt, Homo sapiens
  misc_RNA (1)...(19): siRNA sense strand
ggacauacaaaugccaaug

SEQ ID NO: 409579 - RNA, 19 nt, Homo sapiens
  misc_RNA (1)...(19): siRNA sense strand
cagcagggacauacaaaug

SEQ ID NO: 409580 - RNA, 19 nt, Homo sapiens
  misc_RNA (1)...(19): siRNA sense strand
gcagaucucucagcaaccu

SEQ ID NO: 409581 - RNA, 19 nt, Homo sapiens
  misc_RNA (1)...(19): siRNA sense strand
gaaguacuuuucucuuuca

SEQ ID NO: 409582 - RNA, 19 nt, Homo sapiens
  misc_RNA (1)...(19): siRNA sense strand
ccaguggcuuggcgacauu

SEQ ID NO: 409583 - RNA, 19 nt, Homo sapiens
  misc_RNA (1)...(19): siRNA sense strand
uaagagaaagaaagagaug

SEQ ID NO: 409584 - RNA, 19 nt, Homo sapiens
  misc_RNA (1)...(19): siRNA sense strand
gccaaagaguggaggauac

SEQ ID NO: 409585 - RNA, 19 nt, Homo sapiens
  misc_RNA (1)...(19): siRNA sense strand
ccagaggcauagauguuca

SEQ ID NO: 409586 - RNA, 19 nt, Homo sapiens
  misc_RNA (1)...(19): siRNA sense strand
ccuggaaucugcccaaguc

SEQ ID NO: 409587 - RNA, 19 nt, Homo sapiens
  misc_RNA (1)...(19): siRNA sense strand
agccagaauugaagacgua

SEQ ID NO: 409588 - RNA, 19 nt, Homo sapiens
  misc_RNA (1)...(19): siRNA sense strand
aagacuaccucccaaacug

SEQ ID NO: 409589 - RNA, 19 nt, Homo sapiens
  misc_RNA (1)...(19): siRNA sense strand
cagcagaugcaaagucaga

SEQ ID NO: 409590 - RNA, 19 nt, Homo sapiens
  misc_RNA (1)...(19): siRNA sense strand
ggugucagaaguucauuga

SEQ ID NO: 409591 - RNA, 19 nt, Homo sapiens
  misc_RNA (1)...(19): siRNA sense strand
cguaccaccucccacuaaa

SEQ ID NO: 409592 - RNA, 19 nt, Homo sapiens
  misc_RNA (1)...(19): siRNA sense strand
gaaugaaguagcuaauguc

SEQ ID NO: 409593 - RNA, 19 nt, Homo sapiens
  misc_RNA (1)...(19): siRNA sense strand
gcuaauguccagccuucuu

SEQ ID NO: 409594 - RNA, 19 nt, Homo sapiens
  misc_RNA (1)...(19): siRNA sense strand
gcuuggagaguucccuuaa

SEQ ID NO: 409595 - RNA, 19 nt, Homo sapiens
  misc_RNA (1)...(19): siRNA sense strand
ucacucaaacgcuggacua

SEQ ID NO: 409596 - RNA, 19 nt, Homo sapiens
  misc_RNA (1)...(19): siRNA sense strand
ccauguucacagcauauua

SEQ ID NO: 409597 - RNA, 19 nt, Homo sapiens
  misc_RNA (1)...(19): siRNA sense strand
cggacacugaggaauauua

SEQ ID NO: 409598 - RNA, 19 nt, Homo sapiens
  misc_RNA (1)...(19): siRNA sense strand
uguccagccuucuuccaaa

SEQ ID NO: 409599 - RNA, 19 nt, Homo sapiens
  misc_RNA (1)...(19): siRNA sense strand
ccaaacugaaacagaauga

SEQ ID NO: 409600 - RNA, 19 nt, Homo sapiens
  misc_RNA (1)...(19): siRNA sense strand
cagagaugaccuaaaauua

SEQ ID NO: 409601 - RNA, 19 nt, Homo sapiens
  misc_RNA (1)...(19): siRNA sense strand
cauguucacagcauauuau

SEQ ID NO: 409602 - RNA, 19 nt, Homo sapiens
  misc_RNA (1)...(19): siRNA sense strand
cucccaaacugaaacagaa

SEQ ID NO: 409603 - RNA, 19 nt, Homo sapiens
  misc_RNA (1)...(19): siRNA sense strand
gaguuguugaugaguauaa

SEQ ID NO: 409604 - RNA, 19 nt, Homo sapiens
  misc_RNA (1)...(19): siRNA sense strand
uuagaugcuuggagaguuc

SEQ ID NO: 409605 - RNA, 19 nt, Homo sapiens
  misc_RNA (1)...(19): siRNA sense strand
ggacacugaggaauauuac

SEQ ID NO: 409606 - RNA, 19 nt, Homo sapiens
  misc_RNA (1)...(19): siRNA sense strand
ucgaguuugucggaaauaa

SEQ ID NO: 409607 - RNA, 19 nt, Homo sapiens
  misc_RNA (1)...(19): siRNA sense strand
aaacugaaacagaaugaag

SEQ ID NO: 409608 - RNA, 19 nt, Homo sapiens
  misc_RNA (1)...(19): siRNA sense strand
caacagcagccaccaccau

SEQ ID NO: 409609 - RNA, 19 nt, Homo sapiens
  misc_RNA (1)...(19): siRNA sense strand
cgauuucugucgugaagca

SEQ ID NO: 409610 - RNA, 19 nt, Homo sapiens
  misc_RNA (1)...(19): siRNA sense strand
uacggacacugaggaauau

SEQ ID NO: 409611 - RNA, 19 nt, Homo sapiens
  misc_RNA (1)...(19): siRNA sense strand
gcauauuauuucugugacu

SEQ ID NO: 409612 - RNA, 19 nt, Homo sapiens
  misc_RNA (1)...(19): siRNA sense strand
cugguuaaacacagucuua

SEQ ID NO: 409613 - RNA, 19 nt, Homo sapiens
  misc_RNA (1)...(19): siRNA sense strand
gagaaagaaagagaugugu

SEQ ID NO: 409614 - RNA, 19 nt, Homo sapiens
  misc_RNA (1)...(19): siRNA sense strand
guccucaucuguaaagaac

SEQ ID NO: 409615 - RNA, 19 nt, Homo sapiens
  misc_RNA (1)...(19): siRNA sense strand
ggcgauuucugucgugaag

SEQ ID NO: 409616 - RNA, 19 nt, Homo sapiens
  misc_RNA (1)...(19): siRNA sense strand
gaaauggucuguacaauau

SEQ ID NO: 409617 - RNA, 19 nt, Homo sapiens
  misc_RNA (1)...(19): siRNA sense strand
gaaagaaccugaaggaaca

SEQ ID NO: 409618 - RNA, 19 nt, Homo sapiens
  misc_RNA (1)...(19): siRNA sense strand
ggauuuaccuuguucuaua

SEQ ID NO: 409619 - RNA, 19 nt, Homo sapiens
  misc_RNA (1)...(19): siRNA sense strand
aaacagagcugcuucauca

SEQ ID NO: 409620 - RNA, 19 nt, Homo sapiens
  misc_RNA (1)...(19): siRNA sense strand
gaagagcacuccagacuca

SEQ ID NO: 409621 - RNA, 19 nt, Homo sapiens
  misc_RNA (1)...(19): siRNA sense strand
ggaaauggucuguacaaua

SEQ ID NO: 409622 - RNA, 19 nt, Homo sapiens
  misc_RNA (1)...(19): siRNA sense strand
gaaggaacaucucaugaau

SEQ ID NO: 409623 - RNA, 19 nt, Homo sapiens
  misc_RNA (1)...(19): siRNA sense strand
ccucaaacgucuaccauua

SEQ ID NO: 409624 - RNA, 19 nt, Homo sapiens
  misc_RNA (1)...(19): siRNA sense strand
gaaacuaccucgucuagca

SEQ ID NO: 409625 - RNA, 19 nt, Homo sapiens
  misc_RNA (1)...(19): siRNA sense strand
ccaaggauaucaucaguug

SEQ ID NO: 409626 - RNA, 19 nt, Homo sapiens
  misc_RNA (1)...(19): siRNA sense strand
ccaaugaaaugguuauaug

SEQ ID NO: 409627 - RNA, 19 nt, Homo sapiens
  misc_RNA (1)...(19): siRNA sense strand
gaagaagaagcauuuguuu

SEQ ID NO: 409628 - RNA, 19 nt, Homo sapiens
  misc_RNA (1)...(19): siRNA sense strand
aggaacaucucaugaauuu

SEQ ID NO: 409629 - RNA, 19 nt, Homo sapiens
  misc_RNA (1)...(19): siRNA sense strand
gcaaagaagauuaucaguu

SEQ ID NO: 409630 - RNA, 19 nt, Homo sapiens
  misc_RNA (1)...(19): siRNA sense strand
guaauucacugguccacaa

SEQ ID NO: 409631 - RNA, 19 nt, Homo sapiens
  misc_RNA (1)...(19): siRNA sense strand
aagcagacauuacccuaua

SEQ ID NO: 409632 - RNA, 19 nt, Homo sapiens
  misc_RNA (1)...(19): siRNA sense strand
ggaaucaauuucagagaau

SEQ ID NO: 409633 - RNA, 19 nt, Homo sapiens
  misc_RNA (1)...(19): siRNA sense strand
gaaaggaccaaaugccaaa

SEQ ID NO: 409634 - RNA, 19 nt, Homo sapiens
  misc_RNA (1)...(19): siRNA sense strand
ggaaguaagcaauggcaua

SEQ ID NO: 409635 - RNA, 19 nt, Homo sapiens
  misc_RNA (1)...(19): siRNA sense strand
cuaaagaacuccauuacca

SEQ ID NO: 409636 - RNA, 19 nt, Homo sapiens
  misc_RNA (1)...(19): siRNA sense strand
ugaccaagcugucuuuaca

SEQ ID NO: 409637 - RNA, 19 nt, Homo sapiens
  misc_RNA (1)...(19): siRNA sense strand
ucacacaccucauauugau

SEQ ID NO: 409638 - RNA, 19 nt, Homo sapiens
  misc_RNA (1)...(19): siRNA sense strand
ugaaagauaugagcauguu

SEQ ID NO: 409639 - RNA, 19 nt, Homo sapiens
  misc_RNA (1)...(19): siRNA sense strand
gcacaccuaugccuuuaca

SEQ ID NO: 409640 - RNA, 19 nt, Homo sapiens
  misc_RNA (1)...(19): siRNA sense strand
ugagggaacugcacauuca

SEQ ID NO: 409641 - RNA, 19 nt, Homo sapiens
  misc_RNA (1)...(19): siRNA sense strand
gaacugcacauucauccaa

SEQ ID NO: 409642 - RNA, 19 nt, Homo sapiens
  misc_RNA (1)...(19): siRNA sense strand
acucagaacucagaaauug

SEQ ID NO: 409643 - RNA, 19 nt, Homo sapiens
  misc_RNA (1)...(19): siRNA sense strand
agaaaggcauccaaaccua

SEQ ID NO: 409644 - RNA, 19 nt, Homo sapiens
  misc_RNA (1)...(19): siRNA sense strand
ggauggacauaaagccaaa

SEQ ID NO: 409645 - RNA, 19 nt, Homo sapiens
  misc_RNA (1)...(19): siRNA sense strand
ggaaaggugcaguaucuug

SEQ ID NO: 409646 - RNA, 19 nt, Homo sapiens
  misc_RNA (1)...(19): siRNA sense strand
gguuauaugugacaagugu

SEQ ID NO: 409647 - RNA, 19 nt, Homo sapiens
  misc_RNA (1)...(19): siRNA sense strand
ugacaaguguggccaagga

SEQ ID NO: 409648 - RNA, 19 nt, Homo sapiens
  misc_RNA (1)...(19): siRNA sense strand
caaccuaaguguuauucau

SEQ ID NO: 409649 - RNA, 19 nt, Homo sapiens
  misc_RNA (1)...(19): siRNA sense strand
caucauauuugaagacagu

SEQ ID NO: 409650 - RNA, 19 nt, Homo sapiens
  misc_RNA (1)...(19): siRNA sense strand
gauaaggaaucaauuucag

SEQ ID NO: 409651 - RNA, 19 nt, Homo sapiens
  misc_RNA (1)...(19): siRNA sense strand
uagcacaccuaugccuuua

SEQ ID NO: 409652 - RNA, 19 nt, Homo sapiens
  misc_RNA (1)...(19): siRNA sense strand
gcaaauguaagcagugguu

SEQ ID NO: 409653 - RNA, 19 nt, Homo sapiens
  misc_RNA (1)...(19): siRNA sense strand
aaagccagcauguaaauuu

SEQ ID NO: 409654 - RNA, 19 nt, Homo sapiens
  misc_RNA (1)...(19): siRNA sense strand
gaagacaguucuaaauccu

SEQ ID NO: 409655 - RNA, 19 nt, Homo sapiens
  misc_RNA (1)...(19): siRNA sense strand
gaaaggugcaguaucuugu

SEQ ID NO: 409656 - RNA, 19 nt, Homo sapiens
  misc_RNA (1)...(19): siRNA sense strand
cauccaaaccuauaucuga

SEQ ID NO: 409657 - RNA, 19 nt, Homo sapiens
  misc_RNA (1)...(19): siRNA sense strand
ggagacugguauuugaaga

SEQ ID NO: 409658 - RNA, 19 nt, Homo sapiens
  misc_RNA (1)...(19): siRNA sense strand
ucaagaagaguauucagaa

SEQ ID NO: 409659 - RNA, 19 nt, Homo sapiens
  misc_RNA (1)...(19): siRNA sense strand
gcacgucgggugacacuug

SEQ ID NO: 409660 - RNA, 19 nt, Homo sapiens
  misc_RNA (1)...(19): siRNA sense strand
caucuaaagaacuccauua

SEQ ID NO: 409661 - RNA, 19 nt, Homo sapiens
  misc_RNA (1)...(19): siRNA sense strand
gaacucaacacagagauuc

SEQ ID NO: 409662 - RNA, 19 nt, Homo sapiens
  misc_RNA (1)...(19): siRNA sense strand
ucagaacucagaaauugua

SEQ ID NO: 409663 - RNA, 19 nt, Homo sapiens
  misc_RNA (1)...(19): siRNA sense strand
gaaaggcauccaaaccuau

SEQ ID NO: 409664 - RNA, 19 nt, Homo sapiens
  misc_RNA (1)...(19): siRNA sense strand
ccacaagcggucuccuuua

SEQ ID NO: 409665 - RNA, 19 nt, Homo sapiens
  misc_RNA (1)...(19): siRNA sense strand
ccaauguccagcaguguua

SEQ ID NO: 409666 - RNA, 19 nt, Homo sapiens
  misc_RNA (1)...(19): siRNA sense strand
cauauugauuccaguguga

SEQ ID NO: 409667 - RNA, 19 nt, Homo sapiens
  misc_RNA (1)...(19): siRNA sense strand
cagagcugcuucaucauau

SEQ ID NO: 409668 - RNA, 19 nt, Homo sapiens
  misc_RNA (1)...(19): siRNA sense strand
ccaaaccuauaucugauuc

SEQ ID NO: 409669 - RNA, 19 nt, Homo sapiens
  misc_RNA (1)...(19): siRNA sense strand
caccaaauguggcuuucaa

SEQ ID NO: 409670 - RNA, 19 nt, Homo sapiens
  misc_RNA (1)...(19): siRNA sense strand
gccaaagcauugcaaguca

SEQ ID NO: 409671 - RNA, 19 nt, Homo sapiens
  misc_RNA (1)...(19): siRNA sense strand
caagaagaguauucagaag

SEQ ID NO: 409672 - RNA, 19 nt, Homo sapiens
  misc_RNA (1)...(19): siRNA sense strand
gauaucaucaguuguguca

SEQ ID NO: 409673 - RNA, 19 nt, Homo sapiens
  misc_RNA (1)...(19): siRNA sense strand
cuuagcagaucaggaguua

SEQ ID NO: 409674 - RNA, 19 nt, Homo sapiens
  misc_RNA (1)...(19): siRNA sense strand
gaucuuggccugcugcaau

SEQ ID NO: 409675 - RNA, 19 nt, Homo sapiens
  misc_RNA (1)...(19): siRNA sense strand
ggauaaggaaucaauuuca

SEQ ID NO: 409676 - RNA, 19 nt, Homo sapiens
  misc_RNA (1)...(19): siRNA sense strand
gaaguaagcaauggcauag

SEQ ID NO: 409677 - RNA, 19 nt, Homo sapiens
  misc_RNA (1)...(19): siRNA sense strand
gauuacaagaccauguuua

SEQ ID NO: 409678 - RNA, 19 nt, Homo sapiens
  misc_RNA (1)...(19): siRNA sense strand
gaacuugagcuuaugacau

SEQ ID NO: 409679 - RNA, 19 nt, Homo sapiens
  misc_RNA (1)...(19): siRNA sense strand
ccagugugauugauucaga

SEQ ID NO: 409680 - RNA, 19 nt, Homo sapiens
  misc_RNA (1)...(19): siRNA sense strand
gagcugcuucaucauauuu

SEQ ID NO: 409681 - RNA, 19 nt, Homo sapiens
  misc_RNA (1)...(19): siRNA sense strand
ugaauaacuuagcagauca

SEQ ID NO: 409682 - RNA, 19 nt, Homo sapiens
  misc_RNA (1)...(19): siRNA sense strand
ugaaggaacaucucaugaa

SEQ ID NO: 409683 - RNA, 19 nt, Homo sapiens
  misc_RNA (1)...(19): siRNA sense strand
ccuggagacugguauuuga

SEQ ID NO: 409684 - RNA, 19 nt, Homo sapiens
  misc_RNA (1)...(19): siRNA sense strand
caauaugucaagaagagua

SEQ ID NO: 409685 - RNA, 19 nt, Homo sapiens
  misc_RNA (1)...(19): siRNA sense strand
gggugacacuugauggaaa

SEQ ID NO: 409686 - RNA, 19 nt, Homo sapiens
  misc_RNA (1)...(19): siRNA sense strand
uacaauaugucaagaagag

SEQ ID NO: 409687 - RNA, 19 nt, Homo sapiens
  misc_RNA (1)...(19): siRNA sense strand
gauuuaccuuguucuauag

SEQ ID NO: 409688 - RNA, 19 nt, Homo sapiens
  misc_RNA (1)...(19): siRNA sense strand
cuagcuagauggucagaug

SEQ ID NO: 409689 - RNA, 19 nt, Homo sapiens
  misc_RNA (1)...(19): siRNA sense strand
aguaagcaauggcauagaa

SEQ ID NO: 409690 - RNA, 19 nt, Homo sapiens
  misc_RNA (1)...(19): siRNA sense strand
cagaagcucccaaugaaau

SEQ ID NO: 409691 - RNA, 19 nt, Homo sapiens
  misc_RNA (1)...(19): siRNA sense strand
ugcaguaucuuguggaaug

SEQ ID NO: 409692 - RNA, 19 nt, Homo sapiens
  misc_RNA (1)...(19): siRNA sense strand
ucaaucaucuaaagaacuc

SEQ ID NO: 409693 - RNA, 19 nt, Homo sapiens
  misc_RNA (1)...(19): siRNA sense strand
cagagaauccuacuuugga

SEQ ID NO: 409694 - RNA, 19 nt, Homo sapiens
  misc_RNA (1)...(19): siRNA sense strand
ucaaacgucuaccauuaca

SEQ ID NO: 409695 - RNA, 19 nt, Homo sapiens
  misc_RNA (1)...(19): siRNA sense strand
ucaugaggcuugugugcaa

SEQ ID NO: 409696 - RNA, 19 nt, Homo sapiens
  misc_RNA (1)...(19): siRNA sense strand
gaagcagacauuacccuau

SEQ ID NO: 409697 - RNA, 19 nt, Homo sapiens
  misc_RNA (1)...(19): siRNA sense strand
gcacauucauccaauaccu

SEQ ID NO: 409698 - RNA, 19 nt, Homo sapiens
  misc_RNA (1)...(19): siRNA sense strand
ccaccuggcccauauacaa

SEQ ID NO: 409699 - RNA, 19 nt, Homo sapiens
  misc_RNA (1)...(19): siRNA sense strand
ccauuacaguggguagaua

SEQ ID NO: 409700 - RNA, 19 nt, Homo sapiens
  misc_RNA (1)...(19): siRNA sense strand
acagagcugcuucaucaua

SEQ ID NO: 409701 - RNA, 19 nt, Homo sapiens
  misc_RNA (1)...(19): siRNA sense strand
guaagcagugguuucauga

SEQ ID NO: 409702 - RNA, 19 nt, Homo sapiens
  misc_RNA (1)...(19): siRNA sense strand
gggaaauggucuguacaau

SEQ ID NO: 409703 - RNA, 19 nt, Homo sapiens
  misc_RNA (1)...(19): siRNA sense strand
gaaacagagcugcuucauc

SEQ ID NO: 409704 - RNA, 19 nt, Homo sapiens
  misc_RNA (1)...(19): siRNA sense strand
aggaaucaauuucagagaa

SEQ ID NO: 409705 - RNA, 19 nt, Homo sapiens
  misc_RNA (1)...(19): siRNA sense strand
gggaaagaaauaaagaaga

SEQ ID NO: 409706 - RNA, 19 nt, Homo sapiens
  misc_RNA (1)...(19): siRNA sense strand
gaaaugguuauaugugaca

SEQ ID NO: 409707 - RNA, 19 nt, Homo sapiens
  misc_RNA (1)...(19): siRNA sense strand
uguaagcagugguuucaug

SEQ ID NO: 409708 - RNA, 19 nt, Homo sapiens
  misc_RNA (1)...(19): siRNA sense strand
caacucaaucaucuaaaga

SEQ ID NO: 409709 - RNA, 19 nt, Homo sapiens
  misc_RNA (1)...(19): siRNA sense strand
agaagaagaagcauuuguu

SEQ ID NO: 409710 - RNA, 19 nt, Homo sapiens
  misc_RNA (1)...(19): siRNA sense strand
guuuaugucugggaaagaa

SEQ ID NO: 409711 - RNA, 19 nt, Homo sapiens
  misc_RNA (1)...(19): siRNA sense strand
uacaagaccauguuuaugu

SEQ ID NO: 409712 - RNA, 19 nt, Homo sapiens
  misc_RNA (1)...(19): siRNA sense strand
cuuuacaaccuaaguguua

SEQ ID NO: 409713 - RNA, 19 nt, Homo sapiens
  misc_RNA (1)...(19): siRNA sense strand
uuucagagaauccuacuuu

SEQ ID NO: 409714 - RNA, 19 nt, Homo sapiens
  misc_RNA (1)...(19): siRNA sense strand
cugaauaacuuagcagauc

SEQ ID NO: 409715 - RNA, 19 nt, Homo sapiens
  misc_RNA (1)...(19): siRNA sense strand
gaugaaggcaaagaagauu

SEQ ID NO: 409716 - RNA, 19 nt, Homo sapiens
  misc_RNA (1)...(19): siRNA sense strand
caagggcguuuaucaguuu

SEQ ID NO: 409717 - RNA, 19 nt, Homo sapiens
  misc_RNA (1)...(19): siRNA sense strand
gauguugacugcuauguag

SEQ ID NO: 409718 - RNA, 19 nt, Homo sapiens
  misc_RNA (1)...(19): siRNA sense strand
gagaaacgaagaagcagua

SEQ ID NO: 409719 - RNA, 19 nt, Homo sapiens
  misc_RNA (1)...(19): siRNA sense strand
ggaacaccaucuacagaga

SEQ ID NO: 409720 - RNA, 19 nt, Homo sapiens
  misc_RNA (1)...(19): siRNA sense strand
gcagggcaguccacuccua

SEQ ID NO: 409721 - RNA, 19 nt, Homo sapiens
  misc_RNA (1)...(19): siRNA sense strand
ucacagcucucacccagau

SEQ ID NO: 409722 - RNA, 19 nt, Homo sapiens
  misc_RNA (1)...(19): siRNA sense strand
guaccgggcugaagucaag

SEQ ID NO: 409723 - RNA, 19 nt, Homo sapiens
  misc_RNA (1)...(19): siRNA sense strand
gaacaccaucuacagagaa

SEQ ID NO: 409724 - RNA, 19 nt, Homo sapiens
  misc_RNA (1)...(19): siRNA sense strand
ucaagggcguuuaucaguu

SEQ ID NO: 409725 - RNA, 19 nt, Homo sapiens
  misc_RNA (1)...(19): siRNA sense strand
gugaaguucucccuggauu

SEQ ID NO: 409726 - RNA, 19 nt, Homo sapiens
  misc_RNA (1)...(19): siRNA sense strand
gcgagacgauugcccuguu

SEQ ID NO: 409727 - RNA, 19 nt, Homo sapiens
  misc_RNA (1)...(19): siRNA sense strand
gagcggaagaccuuaauag

SEQ ID NO: 409728 - RNA, 19 nt, Homo sapiens
  misc_RNA (1)...(19): siRNA sense strand
gcgaugagccucccauucu

SEQ ID NO: 409729 - RNA, 19 nt, Homo sapiens
  misc_RNA (1)...(19): siRNA sense strand
uuaauagccgagucucuua

SEQ ID NO: 409730 - RNA, 19 nt, Homo sapiens
  misc_RNA (1)...(19): siRNA sense strand
ggaggccacuacgauguug

SEQ ID NO: 409731 - RNA, 19 nt, Homo sapiens
  misc_RNA (1)...(19): siRNA sense strand
guaaugaguuuuccaccuu

SEQ ID NO: 409732 - RNA, 19 nt, Homo sapiens
  misc_RNA (1)...(19): siRNA sense strand
gaaguucucccuggauuac

SEQ ID NO: 409733 - RNA, 19 nt, Homo sapiens
  misc_RNA (1)...(19): siRNA sense strand
gagcagggcgugaaguucu

SEQ ID NO: 409734 - RNA, 19 nt, Homo sapiens
  misc_RNA (1)...(19): siRNA sense strand
ugaaguucucccuggauua

SEQ ID NO: 409735 - RNA, 19 nt, Homo sapiens
  misc_RNA (1)...(19): siRNA sense strand
cuacgauguugacugcuau

SEQ ID NO: 409736 - RNA, 19 nt, Homo sapiens
  misc_RNA (1)...(19): siRNA sense strand
cagcuucagucaggugcua

SEQ ID NO: 409737 - RNA, 19 nt, Homo sapiens
  misc_RNA (1)...(19): siRNA sense strand
acuacgauguugacugcua

SEQ ID NO: 409738 - RNA, 19 nt, Homo sapiens
  misc_RNA (1)...(19): siRNA sense strand
uugcuucaguaaugaguuu

SEQ ID NO: 409739 - RNA, 19 nt, Homo sapiens
  misc_RNA (1)...(19): siRNA sense strand
cgagacgauugcccuguuc

SEQ ID NO: 409740 - RNA, 19 nt, Homo sapiens
  misc_RNA (1)...(19): siRNA sense strand
gucaggugcuacuguugaa

SEQ ID NO: 409741 - RNA, 19 nt, Homo sapiens
  misc_RNA (1)...(19): siRNA sense strand
cgauguugacugcuaugua

SEQ ID NO: 409742 - RNA, 19 nt, Homo sapiens
  misc_RNA (1)...(19): siRNA sense strand
acagagaaacgaagaagca

SEQ ID NO: 409743 - RNA, 19 nt, Homo sapiens
  misc_RNA (1)...(19): siRNA sense strand
aacaccaucuacagagaaa

SEQ ID NO: 409744 - RNA, 19 nt, Homo sapiens
  misc_RNA (1)...(19): siRNA sense strand
ugaagucaagggcguuuau

SEQ ID NO: 409745 - RNA, 19 nt, Homo sapiens
  misc_RNA (1)...(19): siRNA sense strand
ucacguaccgggcugaagu

SEQ ID NO: 409746 - RNA, 19 nt, Homo sapiens
  misc_RNA (1)...(19): siRNA sense strand
ccuucgagcugccggacaa

SEQ ID NO: 409747 - RNA, 19 nt, Homo sapiens
  misc_RNA (1)...(19): siRNA sense strand
cgagcggaagaccuuaaua

SEQ ID NO: 409748 - RNA, 19 nt, Homo sapiens
  misc_RNA (1)...(19): siRNA sense strand
gucaagggcguuuaucagu

SEQ ID NO: 409749 - RNA, 19 nt, Homo sapiens
  misc_RNA (1)...(19): siRNA sense strand
gaagucaagggcguuuauc

SEQ ID NO: 409750 - RNA, 19 nt, Homo sapiens
  misc_RNA (1)...(19): siRNA sense strand
cgaugagccucccauucuc

SEQ ID NO: 409751 - RNA, 19 nt, Homo sapiens
  misc_RNA (1)...(19): siRNA sense strand
cuuaauagccgagucucuu

SEQ ID NO: 409752 - RNA, 19 nt, Homo sapiens
  misc_RNA (1)...(19): siRNA sense strand
ggagcagggcgugaaguuc

SEQ ID NO: 409753 - RNA, 19 nt, Homo sapiens
  misc_RNA (1)...(19): siRNA sense strand
agaaggagcuggaacagau

SEQ ID NO: 409754 - RNA, 19 nt, Homo sapiens
  misc_RNA (1)...(19): siRNA sense strand
ugacugagcgaguugauuu

SEQ ID NO: 409755 - RNA, 19 nt, Homo sapiens
  misc_RNA (1)...(19): siRNA sense strand
gaagagagaccagaacaag

SEQ ID NO: 409756 - RNA, 19 nt, Homo sapiens
  misc_RNA (1)...(19): siRNA sense strand
gcucguagacuaugggaaa

SEQ ID NO: 409757 - RNA, 19 nt, Homo sapiens
  misc_RNA (1)...(19): siRNA sense strand
ucaaggaccugcucaucga

SEQ ID NO: 409758 - RNA, 19 nt, Homo sapiens
  misc_RNA (1)...(19): siRNA sense strand
ugggauggcucguagacua

SEQ ID NO: 409759 - RNA, 19 nt, Homo sapiens
  misc_RNA (1)...(19): siRNA sense strand
ggugauggcuucucugacu

SEQ ID NO: 409760 - RNA, 19 nt, Homo sapiens
  misc_RNA (1)...(19): siRNA sense strand
caccugaccuggaagcuau

SEQ ID NO: 409761 - RNA, 19 nt, Homo sapiens
  misc_RNA (1)...(19): siRNA sense strand
uggaacagauggaagacuu

SEQ ID NO: 409762 - RNA, 19 nt, Homo sapiens
  misc_RNA (1)...(19): siRNA sense strand
ugagcgaguugauuucaca

SEQ ID NO: 409763 - RNA, 19 nt, Homo sapiens
  misc_RNA (1)...(19): siRNA sense strand
uggccucccuccucaagaa

SEQ ID NO: 409764 - RNA, 19 nt, Homo sapiens
  misc_RNA (1)...(19): siRNA sense strand
gcucaucgagguuuacaag

SEQ ID NO: 409765 - RNA, 19 nt, Homo sapiens
  misc_RNA (1)...(19): siRNA sense strand
ucaagaaggagcuggaaca

SEQ ID NO: 409766 - RNA, 19 nt, Homo sapiens
  misc_RNA (1)...(19): siRNA sense strand
gaaggagcuggaacagaug

SEQ ID NO: 409767 - RNA, 19 nt, Homo sapiens
  misc_RNA (1)...(19): siRNA sense strand
uggacuugcuggccaucua

SEQ ID NO: 409768 - RNA, 19 nt, Homo sapiens
  misc_RNA (1)...(19): siRNA sense strand
agagagaccagaacaaguc

SEQ ID NO: 409769 - RNA, 19 nt, Homo sapiens
  misc_RNA (1)...(19): siRNA sense strand
ggaaucgcgagcugaagga

SEQ ID NO: 409770 - RNA, 19 nt, Homo sapiens
  misc_RNA (1)...(19): siRNA sense strand
caggugauggcuucucuga

SEQ ID NO: 409771 - RNA, 19 nt, Homo sapiens
  misc_RNA (1)...(19): siRNA sense strand
gggauggcucguagacuau

SEQ ID NO: 409772 - RNA, 19 nt, Homo sapiens
  misc_RNA (1)...(19): siRNA sense strand
ccaccugaccuggaagcua

SEQ ID NO: 409773 - RNA, 19 nt, Homo sapiens
  misc_RNA (1)...(19): siRNA sense strand
ggcaggugauggcuucucu

SEQ ID NO: 409774 - RNA, 19 nt, Homo sapiens
  misc_RNA (1)...(19): siRNA sense strand
cuggaugacugagcgaguu

SEQ ID NO: 409775 - RNA, 19 nt, Homo sapiens
  misc_RNA (1)...(19): siRNA sense strand
ggaaaugaauguagauugu

SEQ ID NO: 409776 - RNA, 19 nt, Homo sapiens
  misc_RNA (1)...(19): siRNA sense strand
caagaaggccugccaauuu

SEQ ID NO: 409777 - RNA, 19 nt, Homo sapiens
  misc_RNA (1)...(19): siRNA sense strand
ggccugaucuuacucauuu

SEQ ID NO: 409778 - RNA, 19 nt, Homo sapiens
  misc_RNA (1)...(19): siRNA sense strand
gaacaggccugaucuuacu

SEQ ID NO: 409779 - RNA, 19 nt, Homo sapiens
  misc_RNA (1)...(19): siRNA sense strand
aagaaggccugccaauuua

SEQ ID NO: 409780 - RNA, 19 nt, Homo sapiens
  misc_RNA (1)...(19): siRNA sense strand
gaccaucagucccuauaua

SEQ ID NO: 409781 - RNA, 19 nt, Homo sapiens
  misc_RNA (1)...(19): siRNA sense strand
gaaccggauuguaggcuuu

SEQ ID NO: 409782 - RNA, 19 nt, Homo sapiens
  misc_RNA (1)...(19): siRNA sense strand
uuacagacguggugaagaa

SEQ ID NO: 409783 - RNA, 19 nt, Homo sapiens
  misc_RNA (1)...(19): siRNA sense strand
gggcaaaggcgucauaaau

SEQ ID NO: 409784 - RNA, 19 nt, Homo sapiens
  misc_RNA (1)...(19): siRNA sense strand
gaagguuuccugcaaaguu

SEQ ID NO: 409785 - RNA, 19 nt, Homo sapiens
  misc_RNA (1)...(19): siRNA sense strand
uuuaagcgcuccuuccuaa

SEQ ID NO: 409786 - RNA, 19 nt, Homo sapiens
  misc_RNA (1)...(19): siRNA sense strand
gcaaacugacucacguuaa

SEQ ID NO: 409787 - RNA, 19 nt, Homo sapiens
  misc_RNA (1)...(19): siRNA sense strand
gaagggcaaaggcgucaua

SEQ ID NO: 409788 - RNA, 19 nt, Homo sapiens
  misc_RNA (1)...(19): siRNA sense strand
ggaagaagaggaggagaaa

SEQ ID NO: 409789 - RNA, 19 nt, Homo sapiens
  misc_RNA (1)...(19): siRNA sense strand
gcaaugaggaugaggacaa

SEQ ID NO: 409790 - RNA, 19 nt, Homo sapiens
  misc_RNA (1)...(19): siRNA sense strand
gcccauagccuuaacuuca

SEQ ID NO: 409791 - RNA, 19 nt, Homo sapiens
  misc_RNA (1)...(19): siRNA sense strand
ggaggaagcagaagaagag

SEQ ID NO: 409792 - RNA, 19 nt, Homo sapiens
  misc_RNA (1)...(19): siRNA sense strand
uggcagaaauugcagauca

SEQ ID NO: 409793 - RNA, 19 nt, Homo sapiens
  misc_RNA (1)...(19): siRNA sense strand
gacauccgauccaucaguu

SEQ ID NO: 409794 - RNA, 19 nt, Homo sapiens
  misc_RNA (1)...(19): siRNA sense strand
ggcaaaggcgucauaaaug

SEQ ID NO: 409795 - RNA, 19 nt, Homo sapiens
  misc_RNA (1)...(19): siRNA sense strand
caaacugacucacguuaac

SEQ ID NO: 409796 - RNA, 19 nt, Homo sapiens
  misc_RNA (1)...(19): siRNA sense strand
ggagaaagaagaggaggaa

SEQ ID NO: 409797 - RNA, 19 nt, Homo sapiens
  misc_RNA (1)...(19): siRNA sense strand
gaacuacuuagcagaugaa

SEQ ID NO: 409798 - RNA, 19 nt, Homo sapiens
  misc_RNA (1)...(19): siRNA sense strand
gaaagaagaggaggaagag

SEQ ID NO: 409799 - RNA, 19 nt, Homo sapiens
  misc_RNA (1)...(19): siRNA sense strand
uaacuucaacuucaacguu

SEQ ID NO: 409800 - RNA, 19 nt, Homo sapiens
  misc_RNA (1)...(19): siRNA sense strand
aagaggaaaugaauguaga

SEQ ID NO: 409801 - RNA, 19 nt, Homo sapiens
  misc_RNA (1)...(19): siRNA sense strand
cauccuuuccuuacaguua

SEQ ID NO: 409802 - RNA, 19 nt, Homo sapiens
  misc_RNA (1)...(19): siRNA sense strand
ucagagaggugaugaaaau

SEQ ID NO: 409803 - RNA, 19 nt, Homo sapiens
  misc_RNA (1)...(19): siRNA sense strand
gaaccagaacuacuuagca

SEQ ID NO: 409804 - RNA, 19 nt, Homo sapiens
  misc_RNA (1)...(19): siRNA sense strand
ggcaguacuucauccaaga

SEQ ID NO: 409805 - RNA, 19 nt, Homo sapiens
  misc_RNA (1)...(19): siRNA sense strand
gagauccugugaagguuuc

SEQ ID NO: 409806 - RNA, 19 nt, Homo sapiens
  misc_RNA (1)...(19): siRNA sense strand
ccgaacaggccugaucuua

SEQ ID NO: 409807 - RNA, 19 nt, Homo sapiens
  misc_RNA (1)...(19): siRNA sense strand
aagaagaggaggagaaaga

SEQ ID NO: 409808 - RNA, 19 nt, Homo sapiens
  misc_RNA (1)...(19): siRNA sense strand
ggagauccugugaagguuu

SEQ ID NO: 409809 - RNA, 19 nt, Homo sapiens
  misc_RNA (1)...(19): siRNA sense strand
gaucuuacucauuuacuuc

SEQ ID NO: 409810 - RNA, 19 nt, Homo sapiens
  misc_RNA (1)...(19): siRNA sense strand
uuacaguuaucgcuacaga

SEQ ID NO: 409811 - RNA, 19 nt, Homo sapiens
  misc_RNA (1)...(19): siRNA sense strand
ggcaaacugacucacguua

SEQ ID NO: 409812 - RNA, 19 nt, Homo sapiens
  misc_RNA (1)...(19): siRNA sense strand
gcuuggagauccugugaag

SEQ ID NO: 409813 - RNA, 19 nt, Homo sapiens
  misc_RNA (1)...(19): siRNA sense strand
acacuuggcagcauuaugu

SEQ ID NO: 409814 - RNA, 19 nt, Homo sapiens
  misc_RNA (1)...(19): siRNA sense strand
cuacuuagcagaugaagag

SEQ ID NO: 409815 - RNA, 19 nt, Homo sapiens
  misc_RNA (1)...(19): siRNA sense strand
cccugaacauagaaacuua

SEQ ID NO: 409816 - RNA, 19 nt, Homo sapiens
  misc_RNA (1)...(19): siRNA sense strand
ccagagagaaggauguuuc

SEQ ID NO: 409817 - RNA, 19 nt, Homo sapiens
  misc_RNA (1)...(19): siRNA sense strand
ggaggaagagggucaaggu

SEQ ID NO: 409818 - RNA, 19 nt, Homo sapiens
  misc_RNA (1)...(19): siRNA sense strand
caagaggaaaugaauguag

SEQ ID NO: 409819 - RNA, 19 nt, Homo sapiens
  misc_RNA (1)...(19): siRNA sense strand
agaacuacuuagcagauga

SEQ ID NO: 409820 - RNA, 19 nt, Homo sapiens
  misc_RNA (1)...(19): siRNA sense strand
gagcuuggagauccuguga

SEQ ID NO: 409821 - RNA, 19 nt, Homo sapiens
  misc_RNA (1)...(19): siRNA sense strand
aauugcagaucaugaguga

SEQ ID NO: 409822 - RNA, 19 nt, Homo sapiens
  misc_RNA (1)...(19): siRNA sense strand
gaaauugcagaucaugagu

SEQ ID NO: 409823 - RNA, 19 nt, Homo sapiens
  misc_RNA (1)...(19): siRNA sense strand
agaaagaagaggaggaaga

SEQ ID NO: 409824 - RNA, 19 nt, Homo sapiens
  misc_RNA (1)...(19): siRNA sense strand
uggcagcauuaugugauua

SEQ ID NO: 409825 - RNA, 19 nt, Homo sapiens
  misc_RNA (1)...(19): siRNA sense strand
cccauagccuuaacuucaa

SEQ ID NO: 409826 - RNA, 19 nt, Homo sapiens
  misc_RNA (1)...(19): siRNA sense strand
ugugaagguuuccugcaaa

SEQ ID NO: 409827 - RNA, 19 nt, Homo sapiens
  misc_RNA (1)...(19): siRNA sense strand
aagaugaaccggauuguag

SEQ ID NO: 409828 - RNA, 19 nt, Homo sapiens
  misc_RNA (1)...(19): siRNA sense strand
cuaaagaugaaccggauug

SEQ ID NO: 409829 - RNA, 19 nt, Homo sapiens
  misc_RNA (1)...(19): siRNA sense strand
acaagaaggccugccaauu

SEQ ID NO: 409830 - RNA, 19 nt, Homo sapiens
  misc_RNA (1)...(19): siRNA sense strand
gcagaaauugcagaucaug

SEQ ID NO: 409831 - RNA, 19 nt, Homo sapiens
  misc_RNA (1)...(19): siRNA sense strand
aaagaugaaccggauugua

SEQ ID NO: 409832 - RNA, 19 nt, Homo sapiens
  misc_RNA (1)...(19): siRNA sense strand
gaaaugaauguagauuguc

SEQ ID NO: 409833 - RNA, 19 nt, Homo sapiens
  misc_RNA (1)...(19): siRNA sense strand
gaggaaaugaauguagauu

SEQ ID NO: 409834 - RNA, 19 nt, Homo sapiens
  misc_RNA (1)...(19): siRNA sense strand
agccuuaacuucaacuuca

SEQ ID NO: 409835 - RNA, 19 nt, Homo sapiens
  misc_RNA (1)...(19): siRNA sense strand
ccugugggauccagagaga

SEQ ID NO: 409836 - RNA, 19 nt, Homo sapiens
  misc_RNA (1)...(19): siRNA sense strand
gcuccauccuuuccuuaca

SEQ ID NO: 409837 - RNA, 19 nt, Homo sapiens
  misc_RNA (1)...(19): siRNA sense strand
gugggcaggguaaucuuua

SEQ ID NO: 409838 - RNA, 19 nt, Homo sapiens
  misc_RNA (1)...(19): siRNA sense strand
ugaagaggaggaagcagaa

SEQ ID NO: 409839 - RNA, 19 nt, Homo sapiens
  misc_RNA (1)...(19): siRNA sense strand
cagaacuacuuagcagaug

SEQ ID NO: 409840 - RNA, 19 nt, Homo sapiens
  misc_RNA (1)...(19): siRNA sense strand
gaagaggaggagaaagaag

SEQ ID NO: 409841 - RNA, 19 nt, Homo sapiens
  misc_RNA (1)...(19): siRNA sense strand
aacuucaacuucaacguuu

SEQ ID NO: 409842 - RNA, 19 nt, Homo sapiens
  misc_RNA (1)...(19): siRNA sense strand
cugcauguacacacuauuu

SEQ ID NO: 409843 - RNA, 19 nt, Homo sapiens
  misc_RNA (1)...(19): siRNA sense strand
gugaagguuuccugcaaag

SEQ ID NO: 409844 - RNA, 19 nt, Homo sapiens
  misc_RNA (1)...(19): siRNA sense strand
gaaggccugccaauuuaag

SEQ ID NO: 409845 - RNA, 19 nt, Homo sapiens
  misc_RNA (1)...(19): siRNA sense strand
caaugaggaugaggacaag

SEQ ID NO: 409846 - RNA, 19 nt, Homo sapiens
  misc_RNA (1)...(19): siRNA sense strand
gggcuccauccuuuccuua

SEQ ID NO: 409847 - RNA, 19 nt, Homo sapiens
  misc_RNA (1)...(19): siRNA sense strand
ucuuuacccugaacauaga

SEQ ID NO: 409848 - RNA, 19 nt, Homo sapiens
  misc_RNA (1)...(19): siRNA sense strand
ccagaacuacuuagcagau

SEQ ID NO: 409849 - RNA, 19 nt, Homo sapiens
  misc_RNA (1)...(19): siRNA sense strand
ggcagaaauugcagaucau

SEQ ID NO: 409850 - RNA, 19 nt, Homo sapiens
  misc_RNA (1)...(19): siRNA sense strand
aagcgcuccuuccuaaaga

SEQ ID NO: 409851 - RNA, 19 nt, Homo sapiens
  misc_RNA (1)...(19): siRNA sense strand
gacaagaaggccugccaau

SEQ ID NO: 409852 - RNA, 19 nt, Homo sapiens
  misc_RNA (1)...(19): siRNA sense strand
ggaggaggaggaagaagag

SEQ ID NO: 409853 - RNA, 19 nt, Homo sapiens
  misc_RNA (1)...(19): siRNA sense strand
uauaaugacagucuucaag

SEQ ID NO: 409854 - RNA, 19 nt, Homo sapiens
  misc_RNA (1)...(19): siRNA sense strand
uuucugaacccgacacuug

SEQ ID NO: 409855 - RNA, 19 nt, Homo sapiens
  misc_RNA (1)...(19): siRNA sense strand
aagcgaaccagaacuacuu

SEQ ID NO: 409856 - RNA, 19 nt, Homo sapiens
  misc_RNA (1)...(19): siRNA sense strand
ugacucacguuaacuacac

SEQ ID NO: 409857 - RNA, 19 nt, Homo sapiens
  misc_RNA (1)...(19): siRNA sense strand
aagaggaggagaaagaaga

SEQ ID NO: 409858 - RNA, 19 nt, Homo sapiens
  misc_RNA (1)...(19): siRNA sense strand
ugaucacccucugcaugua

SEQ ID NO: 409859 - RNA, 19 nt, Homo sapiens
  misc_RNA (1)...(19): siRNA sense strand
gugaucacccucugcaugu

SEQ ID NO: 409860 - RNA, 19 nt, Homo sapiens
  misc_RNA (1)...(19): siRNA sense strand
cagaaauugcagaucauga

SEQ ID NO: 409861 - RNA, 19 nt, Homo sapiens
  misc_RNA (1)...(19): siRNA sense strand
cggaugaagcgaaccagaa

SEQ ID NO: 409862 - RNA, 19 nt, Homo sapiens
  misc_RNA (1)...(19): siRNA sense strand
aaugacauccgauccauca

SEQ ID NO: 409863 - RNA, 19 nt, Homo sapiens
  misc_RNA (1)...(19): siRNA sense strand
aagguuuccugcaaaguuc

SEQ ID NO: 409864 - RNA, 19 nt, Homo sapiens
  misc_RNA (1)...(19): siRNA sense strand
gaagcgaaccagaacuacu

SEQ ID NO: 409865 - RNA, 19 nt, Homo sapiens
  misc_RNA (1)...(19): siRNA sense strand
uaagcgcuccuuccuaaag

SEQ ID NO: 409866 - RNA, 19 nt, Homo sapiens
  misc_RNA (1)...(19): siRNA sense strand
gcauguacacacuauuucu

SEQ ID NO: 409867 - RNA, 19 nt, Homo sapiens
  misc_RNA (1)...(19): siRNA sense strand
cgaacaggccugaucuuac

SEQ ID NO: 409868 - RNA, 19 nt, Homo sapiens
  misc_RNA (1)...(19): siRNA sense strand
ggaugaagcgaaccagaac

SEQ ID NO: 409869 - RNA, 19 nt, Homo sapiens
  misc_RNA (1)...(19): siRNA sense strand
gccuuaacuucaacuucaa

SEQ ID NO: 409870 - RNA, 19 nt, Homo sapiens
  misc_RNA (1)...(19): siRNA sense strand
aaucuuuacccugaacaua

SEQ ID NO: 409871 - RNA, 19 nt, Homo sapiens
  misc_RNA (1)...(19): siRNA sense strand
gcuccuuccuaaagaacug

SEQ ID NO: 409872 - RNA, 19 nt, Homo sapiens
  misc_RNA (1)...(19): siRNA sense strand
ucaagaggaaaugaaugua

SEQ ID NO: 409873 - RNA, 19 nt, Homo sapiens
  misc_RNA (1)...(19): siRNA sense strand
gcaguacuucauccaagau

SEQ ID NO: 409874 - RNA, 19 nt, Homo sapiens
  misc_RNA (1)...(19): siRNA sense strand
acccagagucggcuucuuu

SEQ ID NO: 409875 - RNA, 19 nt, Homo sapiens
  misc_RNA (1)...(19): siRNA sense strand
gcaaaucacuuacuucuuc

SEQ ID NO: 409876 - RNA, 19 nt, Homo sapiens
  misc_RNA (1)...(19): siRNA sense strand
ggagagacguugacuuuga

SEQ ID NO: 409877 - RNA, 19 nt, Homo sapiens
  misc_RNA (1)...(19): siRNA sense strand
caaaugggcuugauaagau

SEQ ID NO: 409878 - RNA, 19 nt, Homo sapiens
  misc_RNA (1)...(19): siRNA sense strand
auaaagcccuucagaaaua

SEQ ID NO: 409879 - RNA, 19 nt, Homo sapiens
  misc_RNA (1)...(19): siRNA sense strand
caacagauaucucuugcaa

SEQ ID NO: 409880 - RNA, 19 nt, Homo sapiens
  misc_RNA (1)...(19): siRNA sense strand
ggagaaauuugaagagaug

SEQ ID NO: 409881 - RNA, 19 nt, Homo sapiens
  misc_RNA (1)...(19): siRNA sense strand
gaagagaugauucaacaaa

SEQ ID NO: 409882 - RNA, 19 nt, Homo sapiens
  misc_RNA (1)...(19): siRNA sense strand
caacacaaaugguuagaau

SEQ ID NO: 409883 - RNA, 19 nt, Homo sapiens
  misc_RNA (1)...(19): siRNA sense strand
ggaaauaagaugaucauug

SEQ ID NO: 409884 - RNA, 19 nt, Homo sapiens
  misc_RNA (1)...(19): siRNA sense strand
caaaugauaugaagcaaca

SEQ ID NO: 409885 - RNA, 19 nt, Homo sapiens
  misc_RNA (1)...(19): siRNA sense strand
ggaggacacuaaacugauu

SEQ ID NO: 409886 - RNA, 19 nt, Homo sapiens
  misc_RNA (1)...(19): siRNA sense strand
uggagaaucugaagaauga

SEQ ID NO: 409887 - RNA, 19 nt, Homo sapiens
  misc_RNA (1)...(19): siRNA sense strand
gcaacagcaugucauagaa

SEQ ID NO: 409888 - RNA, 19 nt, Homo sapiens
  misc_RNA (1)...(19): siRNA sense strand
gaccgcaagucccgucuua

SEQ ID NO: 409889 - RNA, 19 nt, Homo sapiens
  misc_RNA (1)...(19): siRNA sense strand
ccucaagucucauauaaug

SEQ ID NO: 409890 - RNA, 19 nt, Homo sapiens
  misc_RNA (1)...(19): siRNA sense strand
gggcuuugcuggucuugua

SEQ ID NO: 409891 - RNA, 19 nt, Homo sapiens
  misc_RNA (1)...(19): siRNA sense strand
gcccucaagucucauauaa

SEQ ID NO: 409892 - RNA, 19 nt, Homo sapiens
  misc_RNA (1)...(19): siRNA sense strand
ugaccucugucgaagauua

SEQ ID NO: 409893 - RNA, 19 nt, Homo sapiens
  misc_RNA (1)...(19): siRNA sense strand
gaagcaacagcaugucaua

SEQ ID NO: 409894 - RNA, 19 nt, Homo sapiens
  misc_RNA (1)...(19): siRNA sense strand
gcggagagacguugacuuu

SEQ ID NO: 409895 - RNA, 19 nt, Homo sapiens
  misc_RNA (1)...(19): siRNA sense strand
acagauaucucuugcaaca

SEQ ID NO: 409896 - RNA, 19 nt, Homo sapiens
  misc_RNA (1)...(19): siRNA sense strand
gacguugacuuugagcuua

SEQ ID NO: 409897 - RNA, 19 nt, Homo sapiens
  misc_RNA (1)...(19): siRNA sense strand
gaaacgaucccuucacgau

SEQ ID NO: 409898 - RNA, 19 nt, Homo sapiens
  misc_RNA (1)...(19): siRNA sense strand
gcaaauacaaugagaacau

SEQ ID NO: 409899 - RNA, 19 nt, Homo sapiens
  misc_RNA (1)...(19): siRNA sense strand
ggacaaaugauaugaagca

SEQ ID NO: 409900 - RNA, 19 nt, Homo sapiens
  misc_RNA (1)...(19): siRNA sense strand
ggaugugacuguaacuaau

SEQ ID NO: 409901 - RNA, 19 nt, Homo sapiens
  misc_RNA (1)...(19): siRNA sense strand
gaccaaaugggcuugauaa

SEQ ID NO: 409902 - RNA, 19 nt, Homo sapiens
  misc_RNA (1)...(19): siRNA sense strand
gaucagcgauagcguccuu

SEQ ID NO: 409903 - RNA, 19 nt, Homo sapiens
  misc_RNA (1)...(19): siRNA sense strand
gaagauugaugacauucgu

SEQ ID NO: 409904 - RNA, 19 nt, Homo sapiens
  misc_RNA (1)...(19): siRNA sense strand
caaaguagaaggcaaagug

SEQ ID NO: 409905 - RNA, 19 nt, Homo sapiens
  misc_RNA (1)...(19): siRNA sense strand
ugaagcaaaucacuuacuu

SEQ ID NO: 409906 - RNA, 19 nt, Homo sapiens
  misc_RNA (1)...(19): siRNA sense strand
acacaaaugguuagaauga

SEQ ID NO: 409907 - RNA, 19 nt, Homo sapiens
  misc_RNA (1)...(19): siRNA sense strand
gguaggaggaccugaaauu

SEQ ID NO: 409908 - RNA, 19 nt, Homo sapiens
  misc_RNA (1)...(19): siRNA sense strand
uuauaaagcccuucagaaa

SEQ ID NO: 409909 - RNA, 19 nt, Homo sapiens
  misc_RNA (1)...(19): siRNA sense strand
cuccagagcuguaaccauu

SEQ ID NO: 409910 - RNA, 19 nt, Homo sapiens
  misc_RNA (1)...(19): siRNA sense strand
gcaaaggcuguagcaaaua

SEQ ID NO: 409911 - RNA, 19 nt, Homo sapiens
  misc_RNA (1)...(19): siRNA sense strand
gauaagaugaugguggaua

SEQ ID NO: 409912 - RNA, 19 nt, Homo sapiens
  misc_RNA (1)...(19): siRNA sense strand
caaaggcuguagcaaauac

SEQ ID NO: 409913 - RNA, 19 nt, Homo sapiens
  misc_RNA (1)...(19): siRNA sense strand
gagaugaacccugcucuug

SEQ ID NO: 409914 - RNA, 19 nt, Homo sapiens
  misc_RNA (1)...(19): siRNA sense strand
ggaccaaaugggcuugaua

SEQ ID NO: 409915 - RNA, 19 nt, Homo sapiens
  misc_RNA (1)...(19): siRNA sense strand
caaauacaaugagaacauc

SEQ ID NO: 409916 - RNA, 19 nt, Homo sapiens
  misc_RNA (1)...(19): siRNA sense strand
ccagacaggugaaggagau

SEQ ID NO: 409917 - RNA, 19 nt, Homo sapiens
  misc_RNA (1)...(19): siRNA sense strand
gccaccaucuuaagcauga

SEQ ID NO: 409918 - RNA, 19 nt, Homo sapiens
  misc_RNA (1)...(19): siRNA sense strand
auaagaugaugguggauaa

SEQ ID NO: 409919 - RNA, 19 nt, Homo sapiens
  misc_RNA (1)...(19): siRNA sense strand
gcgauagcguccuuguuga

SEQ ID NO: 409920 - RNA, 19 nt, Homo sapiens
  misc_RNA (1)...(19): siRNA sense strand
ccaaaugggcuugauaaga

SEQ ID NO: 409921 - RNA, 19 nt, Homo sapiens
  misc_RNA (1)...(19): siRNA sense strand
uagcguccuuguugacaua

SEQ ID NO: 409922 - RNA, 19 nt, Homo sapiens
  misc_RNA (1)...(19): siRNA sense strand
guacaggagaucucauuug

SEQ ID NO: 409923 - RNA, 19 nt, Homo sapiens
  misc_RNA (1)...(19): siRNA sense strand
caacagcaugucauagaaa

SEQ ID NO: 409924 - RNA, 19 nt, Homo sapiens
  misc_RNA (1)...(19): siRNA sense strand
gggaugugacuguaacuaa

SEQ ID NO: 409925 - RNA, 19 nt, Homo sapiens
  misc_RNA (1)...(19): siRNA sense strand
acaaugagaacaucacuug

SEQ ID NO: 409926 - RNA, 19 nt, Homo sapiens
  misc_RNA (1)...(19): siRNA sense strand
gaccugaaauugagcugau

SEQ ID NO: 409927 - RNA, 19 nt, Homo sapiens
  misc_RNA (1)...(19): siRNA sense strand
uaaagagacuggugcuaac

SEQ ID NO: 409928 - RNA, 19 nt, Homo sapiens
  misc_RNA (1)...(19): siRNA sense strand
gaagauugcaauucucaca

SEQ ID NO: 409929 - RNA, 19 nt, Homo sapiens
  misc_RNA (1)...(19): siRNA sense strand
uagaagaagcggagcaauu

SEQ ID NO: 409930 - RNA, 19 nt, Homo sapiens
  misc_RNA (1)...(19): siRNA sense strand
ccaagucucaggaugauga

SEQ ID NO: 409931 - RNA, 19 nt, Homo sapiens
  misc_RNA (1)...(19): siRNA sense strand
uuaaagagacuggugcuaa

SEQ ID NO: 409932 - RNA, 19 nt, Homo sapiens
  misc_RNA (1)...(19): siRNA sense strand
uaagaacuccagagcugua

SEQ ID NO: 409933 - RNA, 19 nt, Homo sapiens
  misc_RNA (1)...(19): siRNA sense strand
caaaucacuuacuucuuca

SEQ ID NO: 409934 - RNA, 19 nt, Homo sapiens
  misc_RNA (1)...(19): siRNA sense strand
agaagaagcggagcaauug

SEQ ID NO: 409935 - RNA, 19 nt, Homo sapiens
  misc_RNA (1)...(19): siRNA sense strand
ugaaucccauccagacuau

SEQ ID NO: 409936 - RNA, 19 nt, Homo sapiens
  misc_RNA (1)...(19): siRNA sense strand
gccaagaggcggauaagug

SEQ ID NO: 409937 - RNA, 19 nt, Homo sapiens
  misc_RNA (1)...(19): siRNA sense strand
ucucacauguccauuugaa

SEQ ID NO: 409938 - RNA, 19 nt, Homo sapiens
  misc_RNA (1)...(19): siRNA sense strand
uggcugagauugcugugaa

SEQ ID NO: 409939 - RNA, 19 nt, Homo sapiens
  misc_RNA (1)...(19): siRNA sense strand
uauaaagcccuucagaaau

SEQ ID NO: 409940 - RNA, 19 nt, Homo sapiens
  misc_RNA (1)...(19): siRNA sense strand
gaggacacuaaacugauua

SEQ ID NO: 409941 - RNA, 19 nt, Homo sapiens
  misc_RNA (1)...(19): siRNA sense strand
gagagacguugacuuugag

SEQ ID NO: 409942 - RNA, 19 nt, Homo sapiens
  misc_RNA (1)...(19): siRNA sense strand
uaagcaugauggauguuga

SEQ ID NO: 409943 - RNA, 19 nt, Homo sapiens
  misc_RNA (1)...(19): siRNA sense strand
ggaugugaccucugucgaa

SEQ ID NO: 409944 - RNA, 19 nt, Homo sapiens
  misc_RNA (1)...(19): siRNA sense strand
ugaaugccguccucacugu

SEQ ID NO: 409945 - RNA, 19 nt, Homo sapiens
  misc_RNA (1)...(19): siRNA sense strand
gcuggugccuuguuagaag

SEQ ID NO: 409946 - RNA, 19 nt, Homo sapiens
  misc_RNA (1)...(19): siRNA sense strand
agauaucucuugcaacaca

SEQ ID NO: 409947 - RNA, 19 nt, Homo sapiens
  misc_RNA (1)...(19): siRNA sense strand
agcaaaggcuguagcaaau

SEQ ID NO: 409948 - RNA, 19 nt, Homo sapiens
  misc_RNA (1)...(19): siRNA sense strand
gauuauaaagcccuucaga

SEQ ID NO: 409949 - RNA, 19 nt, Homo sapiens
  misc_RNA (1)...(19): siRNA sense strand
uacaggagaucucauuugg

SEQ ID NO: 409950 - RNA, 19 nt, Homo sapiens
  misc_RNA (1)...(19): siRNA sense strand
uaggaggaccugaaauuga

SEQ ID NO: 409951 - RNA, 19 nt, Homo sapiens
  misc_RNA (1)...(19): siRNA sense strand
guaggaggaccugaaauug

SEQ ID NO: 409952 - RNA, 19 nt, Homo sapiens
  misc_RNA (1)...(19): siRNA sense strand
gcaauucucacauguccau

SEQ ID NO: 409953 - RNA, 19 nt, Homo sapiens
  misc_RNA (1)...(19): siRNA sense strand
gaacaccuggacaagauca

SEQ ID NO: 409954 - RNA, 19 nt, Homo sapiens
  misc_RNA (1)...(19): siRNA sense strand
gaugugacuguaacuaaug

SEQ ID NO: 409955 - RNA, 19 nt, Homo sapiens
  misc_RNA (1)...(19): siRNA sense strand
aaggagaaauuugaagaga

SEQ ID NO: 409956 - RNA, 19 nt, Homo sapiens
  misc_RNA (1)...(19): siRNA sense strand
uaucaaaguagaaggcaaa

SEQ ID NO: 409957 - RNA, 19 nt, Homo sapiens
  misc_RNA (1)...(19): siRNA sense strand
ucaggaugaugaaauugga

SEQ ID NO: 409958 - RNA, 19 nt, Homo sapiens
  misc_RNA (1)...(19): siRNA sense strand
gaagaugcgaagauugcaa

SEQ ID NO: 409959 - RNA, 19 nt, Homo sapiens
  misc_RNA (1)...(19): siRNA sense strand
uugaacaccuggacaagau

SEQ ID NO: 409960 - RNA, 19 nt, Homo sapiens
  misc_RNA (1)...(19): siRNA sense strand
cgacagauggcugagauug

SEQ ID NO: 409961 - RNA, 19 nt, Homo sapiens
  misc_RNA (1)...(19): siRNA sense strand
agaacaguaugccaugaga

SEQ ID NO: 409962 - RNA, 19 nt, Homo sapiens
  misc_RNA (1)...(19): siRNA sense strand
gauugcaauucucacaugu

SEQ ID NO: 409963 - RNA, 19 nt, Homo sapiens
  misc_RNA (1)...(19): siRNA sense strand
gcgaagauugcaauucuca

SEQ ID NO: 409964 - RNA, 19 nt, Homo sapiens
  misc_RNA (1)...(19): siRNA sense strand
ggcauucacccaaucagaa

SEQ ID NO: 409965 - RNA, 19 nt, Homo sapiens
  misc_RNA (1)...(19): siRNA sense strand
gaaccucauccgcgauaau

SEQ ID NO: 409966 - RNA, 19 nt, Homo sapiens
  misc_RNA (1)...(19): siRNA sense strand
ggaaccucauccgcgauaa

SEQ ID NO: 409967 - RNA, 19 nt, Homo sapiens
  misc_RNA (1)...(19): siRNA sense strand
caaagcauaagcuggaugu

SEQ ID NO: 409968 - RNA, 19 nt, Homo sapiens
  misc_RNA (1)...(19): siRNA sense strand
gacccucgccuucgaugaa

SEQ ID NO: 409969 - RNA, 19 nt, Homo sapiens
  misc_RNA (1)...(19): siRNA sense strand
ccuggcuggugccuuguua

SEQ ID NO: 409970 - RNA, 19 nt, Homo sapiens
  misc_RNA (1)...(19): siRNA sense strand
ugucauagaaaccuugauu

SEQ ID NO: 409971 - RNA, 19 nt, Homo sapiens
  misc_RNA (1)...(19): siRNA sense strand
gcccuuuccucaucaucaa

SEQ ID NO: 409972 - RNA, 19 nt, Homo sapiens
  misc_RNA (1)...(19): siRNA sense strand
gacaaaugauaugaagcaa

SEQ ID NO: 409973 - RNA, 19 nt, Homo sapiens
  misc_RNA (1)...(19): siRNA sense strand
ggagaugaacccugcucuu

SEQ ID NO: 409974 - RNA, 19 nt, Homo sapiens
  misc_RNA (1)...(19): siRNA sense strand
aaaccacgcugggcuccaa

SEQ ID NO: 409975 - RNA, 19 nt, Homo sapiens
  misc_RNA (1)...(19): siRNA sense strand
gaggaaagcauccaggaaa

SEQ ID NO: 409976 - RNA, 19 nt, Homo sapiens
  misc_RNA (1)...(19): siRNA sense strand
ggaaagcauccaggaaaua

SEQ ID NO: 409977 - RNA, 19 nt, Homo sapiens
  misc_RNA (1)...(19): siRNA sense strand
ggaaugaagaagaggauuu

SEQ ID NO: 409978 - RNA, 19 nt, Homo sapiens
  misc_RNA (1)...(19): siRNA sense strand
cagaacaacugcuacaucu

SEQ ID NO: 409979 - RNA, 19 nt, Homo sapiens
  misc_RNA (1)...(19): siRNA sense strand
cgggccagcuguauacaua

SEQ ID NO: 409980 - RNA, 19 nt, Homo sapiens
  misc_RNA (1)...(19): siRNA sense strand
caacaguggcguauaggaa

SEQ ID NO: 409981 - RNA, 19 nt, Homo sapiens
  misc_RNA (1)...(19): siRNA sense strand
gaaugaagaagaggauuug

SEQ ID NO: 409982 - RNA, 19 nt, Homo sapiens
  misc_RNA (1)...(19): siRNA sense strand
ugaagaagaggauuuggaa

SEQ ID NO: 409983 - RNA, 19 nt, Homo sapiens
  misc_RNA (1)...(19): siRNA sense strand
gaaagcauccaggaaauac

SEQ ID NO: 409984 - RNA, 19 nt, Homo sapiens
  misc_RNA (1)...(19): siRNA sense strand
gcacccaccugaagaucca

SEQ ID NO: 409985 - RNA, 19 nt, Homo sapiens
  misc_RNA (1)...(19): siRNA sense strand
aagcaacaguggcguauag

SEQ ID NO: 409986 - RNA, 19 nt, Homo sapiens
  misc_RNA (1)...(19): siRNA sense strand
ggaggaaagcauccaggaa

SEQ ID NO: 409987 - RNA, 19 nt, Homo sapiens
  misc_RNA (1)...(19): siRNA sense strand
ucccuucccugcacuguuu

SEQ ID NO: 409988 - RNA, 19 nt, Homo sapiens
  misc_RNA (1)...(19): siRNA sense strand
gggaccaguucuacaagga

SEQ ID NO: 409989 - RNA, 19 nt, Homo sapiens
  misc_RNA (1)...(19): siRNA sense strand
gaagcaacaguggcguaua

SEQ ID NO: 409990 - RNA, 19 nt, Homo sapiens
  misc_RNA (1)...(19): siRNA sense strand
aagaagaggauuuggaaga

SEQ ID NO: 409991 - RNA, 19 nt, Homo sapiens
  misc_RNA (1)...(19): siRNA sense strand
agaagaagggaaugaagaa

SEQ ID NO: 409992 - RNA, 19 nt, Homo sapiens
  misc_RNA (1)...(19): siRNA sense strand
caggaaauacagaggguuu

SEQ ID NO: 409993 - RNA, 19 nt, Homo sapiens
  misc_RNA (1)...(19): siRNA sense strand
uagaagaagggaaugaaga

SEQ ID NO: 409994 - RNA, 19 nt, Homo sapiens
  misc_RNA (1)...(19): siRNA sense strand
agaagggaaugaagaagag

SEQ ID NO: 409995 - RNA, 19 nt, Homo sapiens
  misc_RNA (1)...(19): siRNA sense strand
ggaccaguucuacaaggaa

SEQ ID NO: 409996 - RNA, 19 nt, Homo sapiens
  misc_RNA (1)...(19): siRNA sense strand
ggaagcaacaguggcguau

SEQ ID NO: 409997 - RNA, 19 nt, Homo sapiens
  misc_RNA (1)...(19): siRNA sense strand
cgaaaggacaggacuagag

SEQ ID NO: 409998 - RNA, 19 nt, Homo sapiens
  misc_RNA (1)...(19): siRNA sense strand
gagcacugccggaguuaca

SEQ ID NO: 409999 - RNA, 19 nt, Homo sapiens
  misc_RNA (1)...(19): siRNA sense strand
aggaaagcauccaggaaau

SEQ ID NO: 410000 - RNA, 19 nt, Homo sapiens
  misc_RNA (1)...(19): siRNA sense strand
gcaacaguggcguauagga

SEQ ID NO: 410001 - RNA, 19 nt, Homo sapiens
  misc_RNA (1)...(19): siRNA sense strand
agaagaggauuuggaagag

SEQ ID NO: 410002 - RNA, 19 nt, Homo sapiens
  misc_RNA (1)...(19): siRNA sense strand
ggauuuggaagaggauauu

SEQ ID NO: 410003 - RNA, 19 nt, Homo sapiens
  misc_RNA (1)...(19): siRNA sense strand
ccagaacaacugcuacauc

SEQ ID NO: 410004 - RNA, 19 nt, Homo sapiens
  misc_RNA (1)...(19): siRNA sense strand
gaagaagggaaugaagaag

SEQ ID NO: 410005 - RNA, 19 nt, Homo sapiens
  misc_RNA (1)...(19): siRNA sense strand
ggaagugggaagcaacagu

SEQ ID NO: 410006 - RNA, 19 nt, Homo sapiens
  misc_RNA (1)...(19): siRNA sense strand
ggugggaagugggaagcaa

SEQ ID NO: 410007 - RNA, 19 nt, Homo sapiens
  misc_RNA (1)...(19): siRNA sense strand
aagaagggaaugaagaaga

SEQ ID NO: 410008 - RNA, 19 nt, Homo sapiens
  misc_RNA (1)...(19): siRNA sense strand
ggagauaaaaccugaagug

SEQ ID NO: 410009 - RNA, 19 nt, Homo sapiens
  misc_RNA (1)...(19): siRNA sense strand
guagaagaagggaaugaag

SEQ ID NO: 410010 - RNA, 19 nt, Homo sapiens
  misc_RNA (1)...(19): siRNA sense strand
gauauucccaagcgaaagg

SEQ ID NO: 410011 - RNA, 19 nt, Homo sapiens
  misc_RNA (1)...(19): siRNA sense strand
aggauggguucaccucaga

SEQ ID NO: 410012 - RNA, 19 nt, Homo sapiens
  misc_RNA (1)...(19): siRNA sense strand
aaauguagaagaagggaau

SEQ ID NO: 410013 - RNA, 19 nt, Homo sapiens
  misc_RNA (1)...(19): siRNA sense strand
gauggguucaccucagaga

SEQ ID NO: 410014 - RNA, 19 nt, Homo sapiens
  misc_RNA (1)...(19): siRNA sense strand
ccuucccucugccgugaua

SEQ ID NO: 410015 - RNA, 19 nt, Homo sapiens
  misc_RNA (1)...(19): siRNA sense strand
auugagcacugccggaguu

SEQ ID NO: 410016 - RNA, 19 nt, Homo sapiens
  misc_RNA (1)...(19): siRNA sense strand
aacaguggcguauaggaaa

SEQ ID NO: 410017 - RNA, 19 nt, Homo sapiens
  misc_RNA (1)...(19): siRNA sense strand
gcccugagcuaauuucuga

SEQ ID NO: 410018 - RNA, 19 nt, Homo sapiens
  misc_RNA (1)...(19): siRNA sense strand
gaaaguaacaagaggaaau

SEQ ID NO: 410019 - RNA, 19 nt, Homo sapiens
  misc_RNA (1)...(19): siRNA sense strand
ggauugcccugagcuaauu

SEQ ID NO: 410020 - RNA, 19 nt, Homo sapiens
  misc_RNA (1)...(19): siRNA sense strand
caaguggaauaucuacuga

SEQ ID NO: 410021 - RNA, 19 nt, Homo sapiens
  misc_RNA (1)...(19): siRNA sense strand
uggaauaucuacugaagug

SEQ ID NO: 410022 - RNA, 19 nt, Homo sapiens
  misc_RNA (1)...(19): siRNA sense strand
cuaaugaaauggaaagaca

SEQ ID NO: 410023 - RNA, 19 nt, Homo sapiens
  misc_RNA (1)...(19): siRNA sense strand
agaugaagcugaccugguu

SEQ ID NO: 410024 - RNA, 19 nt, Homo sapiens
  misc_RNA (1)...(19): siRNA sense strand
gaaggagggugaaaauaau

SEQ ID NO: 410025 - RNA, 19 nt, Homo sapiens
  misc_RNA (1)...(19): siRNA sense strand
gggagaagucagaaaguaa

SEQ ID NO: 410026 - RNA, 19 nt, Homo sapiens
  misc_RNA (1)...(19): siRNA sense strand
gagagcagagcaaugauau

SEQ ID NO: 410027 - RNA, 19 nt, Homo sapiens
  misc_RNA (1)...(19): siRNA sense strand
gcggacagcugacaguucu

SEQ ID NO: 410028 - RNA, 19 nt, Homo sapiens
  misc_RNA (1)...(19): siRNA sense strand
gaaauggaaagacacagau

SEQ ID NO: 410029 - RNA, 19 nt, Homo sapiens
  misc_RNA (1)...(19): siRNA sense strand
gaaagacacagaugaagcu

SEQ ID NO: 410030 - RNA, 19 nt, Homo sapiens
  misc_RNA (1)...(19): siRNA sense strand
agagagagcagagcaauga

SEQ ID NO: 410031 - RNA, 19 nt, Homo sapiens
  misc_RNA (1)...(19): siRNA sense strand
agauuccuguggugauuua

SEQ ID NO: 410032 - RNA, 19 nt, Homo sapiens
  misc_RNA (1)...(19): siRNA sense strand
gaagcugaccugguucuug

SEQ ID NO: 410033 - RNA, 19 nt, Homo sapiens
  misc_RNA (1)...(19): siRNA sense strand
guaacaagaggaaauccaa

SEQ ID NO: 410034 - RNA, 19 nt, Homo sapiens
  misc_RNA (1)...(19): siRNA sense strand
agggagaagucagaaagua

SEQ ID NO: 410035 - RNA, 19 nt, Homo sapiens
  misc_RNA (1)...(19): siRNA sense strand
gagaaagaaacagcaaaga

SEQ ID NO: 410036 - RNA, 19 nt, Homo sapiens
  misc_RNA (1)...(19): siRNA sense strand
aggaguauguuguggagaa

SEQ ID NO: 410037 - RNA, 19 nt, Homo sapiens
  misc_RNA (1)...(19): siRNA sense strand
gcacaauacuugggaaccu

SEQ ID NO: 410038 - RNA, 19 nt, Homo sapiens
  misc_RNA (1)...(19): siRNA sense strand
gugaaauguccacaaauug

SEQ ID NO: 410039 - RNA, 19 nt, Homo sapiens
  misc_RNA (1)...(19): siRNA sense strand
gaagucagaaaguaacaag

SEQ ID NO: 410040 - RNA, 19 nt, Homo sapiens
  misc_RNA (1)...(19): siRNA sense strand
ugaaggagggugaaaauaa

SEQ ID NO: 410041 - RNA, 19 nt, Homo sapiens
  misc_RNA (1)...(19): siRNA sense strand
cugaggagcacaauacuug

SEQ ID NO: 410042 - RNA, 19 nt, Homo sapiens
  misc_RNA (1)...(19): siRNA sense strand
caaaagaagcuaaugugaa

SEQ ID NO: 410043 - RNA, 19 nt, Homo sapiens
  misc_RNA (1)...(19): siRNA sense strand
gcaaaagaagcuaauguga

SEQ ID NO: 410044 - RNA, 19 nt, Homo sapiens
  misc_RNA (1)...(19): siRNA sense strand
cagaggaugaggaggagua

SEQ ID NO: 410045 - RNA, 19 nt, Homo sapiens
  misc_RNA (1)...(19): siRNA sense strand
ggacaaguggaauaucuac

SEQ ID NO: 410046 - RNA, 19 nt, Homo sapiens
  misc_RNA (1)...(19): siRNA sense strand
ugaaauggaaagacacaga

SEQ ID NO: 410047 - RNA, 19 nt, Homo sapiens
  misc_RNA (1)...(19): siRNA sense strand
gagcagagcaaugauaucg

SEQ ID NO: 410048 - RNA, 19 nt, Homo sapiens
  misc_RNA (1)...(19): siRNA sense strand
agagagcagagcaaugaua

SEQ ID NO: 410049 - RNA, 19 nt, Homo sapiens
  misc_RNA (1)...(19): siRNA sense strand
uuaagggacaaguggaaua

SEQ ID NO: 410050 - RNA, 19 nt, Homo sapiens
  misc_RNA (1)...(19): siRNA sense strand
ggacagcugacaguucuuc

SEQ ID NO: 410051 - RNA, 19 nt, Homo sapiens
  misc_RNA (1)...(19): siRNA sense strand
ggagaagucagaaaguaac

SEQ ID NO: 410052 - RNA, 19 nt, Homo sapiens
  misc_RNA (1)...(19): siRNA sense strand
agaaacagcaaagagcuaa

SEQ ID NO: 410053 - RNA, 19 nt, Homo sapiens
  misc_RNA (1)...(19): siRNA sense strand
cuagacaggcgcgugguua

SEQ ID NO: 410054 - RNA, 19 nt, Homo sapiens
  misc_RNA (1)...(19): siRNA sense strand
cagaaaguaacaagaggaa

SEQ ID NO: 410055 - RNA, 19 nt, Homo sapiens
  misc_RNA (1)...(19): siRNA sense strand
uaagggacaaguggaauau

SEQ ID NO: 410056 - RNA, 19 nt, Homo sapiens
  misc_RNA (1)...(19): siRNA sense strand
gaagaugaaggagggugaa

SEQ ID NO: 410057 - RNA, 19 nt, Homo sapiens
  misc_RNA (1)...(19): siRNA sense strand
aauaucuacugaaguggaa

SEQ ID NO: 410058 - RNA, 19 nt, Homo sapiens
  misc_RNA (1)...(19): siRNA sense strand
gggacaaguggaauaucua

SEQ ID NO: 410059 - RNA, 19 nt, Homo sapiens
  misc_RNA (1)...(19): siRNA sense strand
gaugaggaggaguauguug

SEQ ID NO: 410060 - RNA, 19 nt, Homo sapiens
  misc_RNA (1)...(19): siRNA sense strand
ucucaaacagugccgauga

SEQ ID NO: 410061 - RNA, 19 nt, Homo sapiens
  misc_RNA (1)...(19): siRNA sense strand
ggugauuuaauguuccuaa

SEQ ID NO: 410062 - RNA, 19 nt, Homo sapiens
  misc_RNA (1)...(19): siRNA sense strand
cagcugacaguucuucuuc

SEQ ID NO: 410063 - RNA, 19 nt, Homo sapiens
  misc_RNA (1)...(19): siRNA sense strand
aagaagcuaaugugaaaug

SEQ ID NO: 410064 - RNA, 19 nt, Homo sapiens
  misc_RNA (1)...(19): siRNA sense strand
agaaagaaacagcaaagag

SEQ ID NO: 410065 - RNA, 19 nt, Homo sapiens
  misc_RNA (1)...(19): siRNA sense strand
ggaguauguuguggagaag

SEQ ID NO: 410066 - RNA, 19 nt, Homo sapiens
  misc_RNA (1)...(19): siRNA sense strand
aaagagaaagaaacagcaa

SEQ ID NO: 410067 - RNA, 19 nt, Homo sapiens
  misc_RNA (1)...(19): siRNA sense strand
gaagcuaaugugaaauguc

SEQ ID NO: 410068 - RNA, 19 nt, Homo sapiens
  misc_RNA (1)...(19): siRNA sense strand
aacaagaggaaauccaauu

SEQ ID NO: 410069 - RNA, 19 nt, Homo sapiens
  misc_RNA (1)...(19): siRNA sense strand
uaacaagaggaaauccaau

SEQ ID NO: 410070 - RNA, 19 nt, Homo sapiens
  misc_RNA (1)...(19): siRNA sense strand
auaauaaacccagggagaa

SEQ ID NO: 410071 - RNA, 19 nt, Homo sapiens
  misc_RNA (1)...(19): siRNA sense strand
aguauaagaagaugaagga

SEQ ID NO: 410072 - RNA, 19 nt, Homo sapiens
  misc_RNA (1)...(19): siRNA sense strand
uagacaggcgcgugguuaa

SEQ ID NO: 410073 - RNA, 19 nt, Homo sapiens
  misc_RNA (1)...(19): siRNA sense strand
ccagggagaagucagaaag

SEQ ID NO: 410074 - RNA, 19 nt, Homo sapiens
  misc_RNA (1)...(19): siRNA sense strand
gguuaagggacaaguggaa

SEQ ID NO: 410075 - RNA, 19 nt, Homo sapiens
  misc_RNA (1)...(19): siRNA sense strand
gagaagucagaaaguaaca

SEQ ID NO: 410076 - RNA, 19 nt, Homo sapiens
  misc_RNA (1)...(19): siRNA sense strand
aguggaauaucuacugaag

SEQ ID NO: 410077 - RNA, 19 nt, Homo sapiens
  misc_RNA (1)...(19): siRNA sense strand
ggaaaacaaagagaaagaa

SEQ ID NO: 410078 - RNA, 19 nt, Homo sapiens
  misc_RNA (1)...(19): siRNA sense strand
acaaguggaauaucuacug

SEQ ID NO: 410079 - RNA, 19 nt, Homo sapiens
  misc_RNA (1)...(19): siRNA sense strand
aaagagagagcagagcaau

SEQ ID NO: 410080 - RNA, 19 nt, Homo sapiens
  misc_RNA (1)...(19): siRNA sense strand
aagaaacagcaaagagcua

SEQ ID NO: 410081 - RNA, 19 nt, Homo sapiens
  misc_RNA (1)...(19): siRNA sense strand
agggacaaguggaauaucu

SEQ ID NO: 410082 - RNA, 19 nt, Homo sapiens
  misc_RNA (1)...(19): siRNA sense strand
aauggaaagacacagauga

SEQ ID NO: 410083 - RNA, 19 nt, Homo sapiens
  misc_RNA (1)...(19): siRNA sense strand
gauagcauuuuaugaagag

SEQ ID NO: 410084 - RNA, 19 nt, Homo sapiens
  misc_RNA (1)...(19): siRNA sense strand
agagaaagaaacagcaaag

SEQ ID NO: 410085 - RNA, 19 nt, Homo sapiens
  misc_RNA (1)...(19): siRNA sense strand
ggaugaggaggaguauguu

SEQ ID NO: 410086 - RNA, 19 nt, Homo sapiens
  misc_RNA (1)...(19): siRNA sense strand
ggaaacagaugaugugaaa

SEQ ID NO: 410087 - RNA, 19 nt, Homo sapiens
  misc_RNA (1)...(19): siRNA sense strand
gaacuuagagcccagauua

SEQ ID NO: 410088 - RNA, 19 nt, Homo sapiens
  misc_RNA (1)...(19): siRNA sense strand
guaaggaccuccaaagaaa

SEQ ID NO: 410089 - RNA, 19 nt, Homo sapiens
  misc_RNA (1)...(19): siRNA sense strand
ugacauagcuuccucagaa

SEQ ID NO: 410090 - RNA, 19 nt, Homo sapiens
  misc_RNA (1)...(19): siRNA sense strand
gaacauuauuugccuauga

SEQ ID NO: 410091 - RNA, 19 nt, Homo sapiens
  misc_RNA (1)...(19): siRNA sense strand
ggagauaauccauuugaua

SEQ ID NO: 410092 - RNA, 19 nt, Homo sapiens
  misc_RNA (1)...(19): siRNA sense strand
gaaaucaucaggaauguga

SEQ ID NO: 410093 - RNA, 19 nt, Homo sapiens
  misc_RNA (1)...(19): siRNA sense strand
ggaaaggcaugggaaugua

SEQ ID NO: 410094 - RNA, 19 nt, Homo sapiens
  misc_RNA (1)...(19): siRNA sense strand
gaaagugggagauauuauu

SEQ ID NO: 410095 - RNA, 19 nt, Homo sapiens
  misc_RNA (1)...(19): siRNA sense strand
gagaagacaaugagaagua

SEQ ID NO: 410096 - RNA, 19 nt, Homo sapiens
  misc_RNA (1)...(19): siRNA sense strand
ccaagaagcgucaguguaa

SEQ ID NO: 410097 - RNA, 19 nt, Homo sapiens
  misc_RNA (1)...(19): siRNA sense strand
gagcccagauuauugaauu

SEQ ID NO: 410098 - RNA, 19 nt, Homo sapiens
  misc_RNA (1)...(19): siRNA sense strand
aaucaaagcuaaaguggaa

SEQ ID NO: 410099 - RNA, 19 nt, Homo sapiens
  misc_RNA (1)...(19): siRNA sense strand
uaccaaagccaguaauuua

SEQ ID NO: 410100 - RNA, 19 nt, Homo sapiens
  misc_RNA (1)...(19): siRNA sense strand
gaaaagauuuggaagaaga

SEQ ID NO: 410101 - RNA, 19 nt, Homo sapiens
  misc_RNA (1)...(19): siRNA sense strand
gaagagaagacaaugagaa

SEQ ID NO: 410102 - RNA, 19 nt, Homo sapiens
  misc_RNA (1)...(19): siRNA sense strand
ggagaaaucaucaggaaug

SEQ ID NO: 410103 - RNA, 19 nt, Homo sapiens
  misc_RNA (1)...(19): siRNA sense strand
gguaacagaugauggugaa

SEQ ID NO: 410104 - RNA, 19 nt, Homo sapiens
  misc_RNA (1)...(19): siRNA sense strand
gaauguucccugacaauuu

SEQ ID NO: 410105 - RNA, 19 nt, Homo sapiens
  misc_RNA (1)...(19): siRNA sense strand
caaagccaguaauuuauug

SEQ ID NO: 410106 - RNA, 19 nt, Homo sapiens
  misc_RNA (1)...(19): siRNA sense strand
gaaggaguauuuccagaca

SEQ ID NO: 410107 - RNA, 19 nt, Homo sapiens
  misc_RNA (1)...(19): siRNA sense strand
ggaguggaacccugaauaa

SEQ ID NO: 410108 - RNA, 19 nt, Homo sapiens
  misc_RNA (1)...(19): siRNA sense strand
gaagccaucugaauuaaaa

SEQ ID NO: 410109 - RNA, 19 nt, Homo sapiens
  misc_RNA (1)...(19): siRNA sense strand
ggaaguuucuagcauuuca

SEQ ID NO: 410110 - RNA, 19 nt, Homo sapiens
  misc_RNA (1)...(19): siRNA sense strand
ccagauaaaugaacuugau

SEQ ID NO: 410111 - RNA, 19 nt, Homo sapiens
  misc_RNA (1)...(19): siRNA sense strand
ggaauuggauuuggagaca

SEQ ID NO: 410112 - RNA, 19 nt, Homo sapiens
  misc_RNA (1)...(19): siRNA sense strand
gaagaagagaagacaauga

SEQ ID NO: 410113 - RNA, 19 nt, Homo sapiens
  misc_RNA (1)...(19): siRNA sense strand
uccaaagccugaacugaua

SEQ ID NO: 410114 - RNA, 19 nt, Homo sapiens
  misc_RNA (1)...(19): siRNA sense strand
ggaaauagagaagcugaaa

SEQ ID NO: 410115 - RNA, 19 nt, Homo sapiens
  misc_RNA (1)...(19): siRNA sense strand
aaucaacacuggaacagaa

SEQ ID NO: 410116 - RNA, 19 nt, Homo sapiens
  misc_RNA (1)...(19): siRNA sense strand
guggaacccugaauaacaa

SEQ ID NO: 410117 - RNA, 19 nt, Homo sapiens
  misc_RNA (1)...(19): siRNA sense strand
acaagaacauccaguagug

SEQ ID NO: 410118 - RNA, 19 nt, Homo sapiens
  misc_RNA (1)...(19): siRNA sense strand
agacggaauucaaggauga

SEQ ID NO: 410119 - RNA, 19 nt, Homo sapiens
  misc_RNA (1)...(19): siRNA sense strand
cugcagagaagaaauauuu

SEQ ID NO: 410120 - RNA, 19 nt, Homo sapiens
  misc_RNA (1)...(19): siRNA sense strand
ccugaagccaucugaauua

SEQ ID NO: 410121 - RNA, 19 nt, Homo sapiens
  misc_RNA (1)...(19): siRNA sense strand
caagaagcgucaguguaaa

SEQ ID NO: 410122 - RNA, 19 nt, Homo sapiens
  misc_RNA (1)...(19): siRNA sense strand
gugaaagaauuagagguaa

SEQ ID NO: 410123 - RNA, 19 nt, Homo sapiens
  misc_RNA (1)...(19): siRNA sense strand
gaaggcugguggaguggaa

SEQ ID NO: 410124 - RNA, 19 nt, Homo sapiens
  misc_RNA (1)...(19): siRNA sense strand
gaacuuaaugguaaagaag

SEQ ID NO: 410125 - RNA, 19 nt, Homo sapiens
  misc_RNA (1)...(19): siRNA sense strand
agaagacaaugagaaguaa

SEQ ID NO: 410126 - RNA, 19 nt, Homo sapiens
  misc_RNA (1)...(19): siRNA sense strand
gaauuguugugcauuguag

SEQ ID NO: 410127 - RNA, 19 nt, Homo sapiens
  misc_RNA (1)...(19): siRNA sense strand
gagaaaucaucaggaaugu

SEQ ID NO: 410128 - RNA, 19 nt, Homo sapiens
  misc_RNA (1)...(19): siRNA sense strand
gacauagcuuccucagaaa

SEQ ID NO: 410129 - RNA, 19 nt, Homo sapiens
  misc_RNA (1)...(19): siRNA sense strand
guaugacuaugaugcugua

SEQ ID NO: 410130 - RNA, 19 nt, Homo sapiens
  misc_RNA (1)...(19): siRNA sense strand
ccacaagucccacccaaga

SEQ ID NO: 410131 - RNA, 19 nt, Homo sapiens
  misc_RNA (1)...(19): siRNA sense strand
ccagauuauugaauuguug

SEQ ID NO: 410132 - RNA, 19 nt, Homo sapiens
  misc_RNA (1)...(19): siRNA sense strand
ccaaagccaguaauuuauu

SEQ ID NO: 410133 - RNA, 19 nt, Homo sapiens
  misc_RNA (1)...(19): siRNA sense strand
aaagagagacggaauucaa

SEQ ID NO: 410134 - RNA, 19 nt, Homo sapiens
  misc_RNA (1)...(19): siRNA sense strand
aagcuaaaguggaaacaga

SEQ ID NO: 410135 - RNA, 19 nt, Homo sapiens
  misc_RNA (1)...(19): siRNA sense strand
aacuaaagcuagauucuga

SEQ ID NO: 410136 - RNA, 19 nt, Homo sapiens
  misc_RNA (1)...(19): siRNA sense strand
cgaacuuaaugguaaagaa

SEQ ID NO: 410137 - RNA, 19 nt, Homo sapiens
  misc_RNA (1)...(19): siRNA sense strand
aauuagagguaacagauga

SEQ ID NO: 410138 - RNA, 19 nt, Homo sapiens
  misc_RNA (1)...(19): siRNA sense strand
gcgaaaagauuuggaagaa

SEQ ID NO: 410139 - RNA, 19 nt, Homo sapiens
  misc_RNA (1)...(19): siRNA sense strand
uuauugagaucuucuggaa

SEQ ID NO: 410140 - RNA, 19 nt, Homo sapiens
  misc_RNA (1)...(19): siRNA sense strand
gaacugauagcugcagaga

SEQ ID NO: 410141 - RNA, 19 nt, Homo sapiens
  misc_RNA (1)...(19): siRNA sense strand
gaguauuuccagacaauuu

SEQ ID NO: 410142 - RNA, 19 nt, Homo sapiens
  misc_RNA (1)...(19): siRNA sense strand
ccaaagaugccuggaagaa

SEQ ID NO: 410143 - RNA, 19 nt, Homo sapiens
  misc_RNA (1)...(19): siRNA sense strand
gagcugaaagugggagaua

SEQ ID NO: 410144 - RNA, 19 nt, Homo sapiens
  misc_RNA (1)...(19): siRNA sense strand
caauuuugcuguccagaua

SEQ ID NO: 410145 - RNA, 19 nt, Homo sapiens
  misc_RNA (1)...(19): siRNA sense strand
gggcgaacuuaaugguaaa

SEQ ID NO: 410146 - RNA, 19 nt, Homo sapiens
  misc_RNA (1)...(19): siRNA sense strand
ggacaagaacauccaguag

SEQ ID NO: 410147 - RNA, 19 nt, Homo sapiens
  misc_RNA (1)...(19): siRNA sense strand
uaaugaagagguagaagaa

SEQ ID NO: 410148 - RNA, 19 nt, Homo sapiens
  misc_RNA (1)...(19): siRNA sense strand
ggacuguuucccucaaauu

SEQ ID NO: 410149 - RNA, 19 nt, Homo sapiens
  misc_RNA (1)...(19): siRNA sense strand
gauacaugcuacucuccaa

SEQ ID NO: 410150 - RNA, 19 nt, Homo sapiens
  misc_RNA (1)...(19): siRNA sense strand
gaacuaaaugggagaagag

SEQ ID NO: 410151 - RNA, 19 nt, Homo sapiens
  misc_RNA (1)...(19): siRNA sense strand
uuaagaagaagaccaagaa

SEQ ID NO: 410152 - RNA, 19 nt, Homo sapiens
  misc_RNA (1)...(19): siRNA sense strand
acugauagcugcagagaag

SEQ ID NO: 410153 - RNA, 19 nt, Homo sapiens
  misc_RNA (1)...(19): siRNA sense strand
cuaugaagguacuaaugaa

SEQ ID NO: 410154 - RNA, 19 nt, Homo sapiens
  misc_RNA (1)...(19): siRNA sense strand
gaaagaauuagagguaaca

SEQ ID NO: 410155 - RNA, 19 nt, Homo sapiens
  misc_RNA (1)...(19): siRNA sense strand
gcugaaagugggagauauu

SEQ ID NO: 410156 - RNA, 19 nt, Homo sapiens
  misc_RNA (1)...(19): siRNA sense strand
ccaggacgauucagaaacu

SEQ ID NO: 410157 - RNA, 19 nt, Homo sapiens
  misc_RNA (1)...(19): siRNA sense strand
gcaugggaauguagcaagu

SEQ ID NO: 410158 - RNA, 19 nt, Homo sapiens
  misc_RNA (1)...(19): siRNA sense strand
gccaguaauuuauugagau

SEQ ID NO: 410159 - RNA, 19 nt, Homo sapiens
  misc_RNA (1)...(19): siRNA sense strand
ugaagguacuaaugaagau

SEQ ID NO: 410160 - RNA, 19 nt, Homo sapiens
  misc_RNA (1)...(19): siRNA sense strand
caacgaauaagcaccuaug

SEQ ID NO: 410161 - RNA, 19 nt, Homo sapiens
  misc_RNA (1)...(19): siRNA sense strand
ggaagaagagaagacaaug

SEQ ID NO: 410162 - RNA, 19 nt, Homo sapiens
  misc_RNA (1)...(19): siRNA sense strand
ugugaaagaauuagaggua

SEQ ID NO: 410163 - RNA, 19 nt, Homo sapiens
  misc_RNA (1)...(19): siRNA sense strand
aauguucccugacaauuuc

SEQ ID NO: 410164 - RNA, 19 nt, Homo sapiens
  misc_RNA (1)...(19): siRNA sense strand
aaagcuagauucugaacag

SEQ ID NO: 410165 - RNA, 19 nt, Homo sapiens
  misc_RNA (1)...(19): siRNA sense strand
gagccaguaucaaaacuaa

SEQ ID NO: 410166 - RNA, 19 nt, Homo sapiens
  misc_RNA (1)...(19): siRNA sense strand
ccaguaauuuauugagauc

SEQ ID NO: 410167 - RNA, 19 nt, Homo sapiens
  misc_RNA (1)...(19): siRNA sense strand
gcuggaaggagaacuaaau

SEQ ID NO: 410168 - RNA, 19 nt, Homo sapiens
  misc_RNA (1)...(19): siRNA sense strand
uaaggagacuggagaagcu

SEQ ID NO: 410169 - RNA, 19 nt, Homo sapiens
  misc_RNA (1)...(19): siRNA sense strand
ccuaugaagguacuaauga

SEQ ID NO: 410170 - RNA, 19 nt, Homo sapiens
  misc_RNA (1)...(19): siRNA sense strand
ugacuaugaugcuguacau

SEQ ID NO: 410171 - RNA, 19 nt, Homo sapiens
  misc_RNA (1)...(19): siRNA sense strand
gaaaggcaugggaauguag

SEQ ID NO: 410172 - RNA, 19 nt, Homo sapiens
  misc_RNA (1)...(19): siRNA sense strand
acaaugagaaguaaucuag

SEQ ID NO: 410173 - RNA, 19 nt, Homo sapiens
  misc_RNA (1)...(19): siRNA sense strand
uugacuauauuguggagua

SEQ ID NO: 410174 - RNA, 19 nt, Homo sapiens
  misc_RNA (1)...(19): siRNA sense strand
cugaagccaucugaauuaa

SEQ ID NO: 410175 - RNA, 19 nt, Homo sapiens
  misc_RNA (1)...(19): siRNA sense strand
gaaguuaccaaaagaagaa

SEQ ID NO: 410176 - RNA, 19 nt, Homo sapiens
  misc_RNA (1)...(19): siRNA sense strand
agacuuugauucacuuaca

SEQ ID NO: 410177 - RNA, 19 nt, Homo sapiens
  misc_RNA (1)...(19): siRNA sense strand
uagcugcagagaagaaaua

SEQ ID NO: 410178 - RNA, 19 nt, Homo sapiens
  misc_RNA (1)...(19): siRNA sense strand
ugguaaagaaggaguauuu

SEQ ID NO: 410179 - RNA, 19 nt, Homo sapiens
  misc_RNA (1)...(19): siRNA sense strand
guagugaaacagaagagaa

SEQ ID NO: 410180 - RNA, 19 nt, Homo sapiens
  misc_RNA (1)...(19): siRNA sense strand
gaauuagagguaacagaug

SEQ ID NO: 410181 - RNA, 19 nt, Homo sapiens
  misc_RNA (1)...(19): siRNA sense strand
gaacccugaauaacaaguu

SEQ ID NO: 410182 - RNA, 19 nt, Homo sapiens
  misc_RNA (1)...(19): siRNA sense strand
aggaugaacuggagcugaa

SEQ ID NO: 410183 - RNA, 19 nt, Homo sapiens
  misc_RNA (1)...(19): siRNA sense strand
gggaaaggcaugggaaugu

SEQ ID NO: 410184 - RNA, 19 nt, Homo sapiens
  misc_RNA (1)...(19): siRNA sense strand
aagcuguccugucuucuug

SEQ ID NO: 410185 - RNA, 19 nt, Homo sapiens
  misc_RNA (1)...(19): siRNA sense strand
ucagaaaacuugcuucauc

SEQ ID NO: 410186 - RNA, 19 nt, Homo sapiens
  misc_RNA (1)...(19): siRNA sense strand
ccacgguucuccagcaaga

SEQ ID NO: 410187 - RNA, 19 nt, Homo sapiens
  misc_RNA (1)...(19): siRNA sense strand
gcguugcccuucacuaaga

SEQ ID NO: 410188 - RNA, 19 nt, Homo sapiens
  misc_RNA (1)...(19): siRNA sense strand
ucaaggaggugcgcuucuu

SEQ ID NO: 410189 - RNA, 19 nt, Homo sapiens
  misc_RNA (1)...(19): siRNA sense strand
gacauggacguguuugaug

SEQ ID NO: 410190 - RNA, 19 nt, Homo sapiens
  misc_RNA (1)...(19): siRNA sense strand
ccaccugccuccugcucuu

SEQ ID NO: 410191 - RNA, 19 nt, Homo sapiens
  misc_RNA (1)...(19): siRNA sense strand
gaccugaugcgcucuaucu

SEQ ID NO: 410192 - RNA, 19 nt, Homo sapiens
  misc_RNA (1)...(19): siRNA sense strand
ccugaugcgcucuaucuuu

SEQ ID NO: 410193 - RNA, 19 nt, Homo sapiens
  misc_RNA (1)...(19): siRNA sense strand
cgacauggacguguuugau

SEQ ID NO: 410194 - RNA, 19 nt, Homo sapiens
  misc_RNA (1)...(19): siRNA sense strand
cguguuugaugccuacaug

SEQ ID NO: 410195 - RNA, 19 nt, Homo sapiens
  misc_RNA (1)...(19): siRNA sense strand
cauacuucgucuaggaaug

SEQ ID NO: 410196 - RNA, 19 nt, Homo sapiens
  misc_RNA (1)...(19): siRNA sense strand
cugaugcgcucuaucuuuu

SEQ ID NO: 410197 - RNA, 19 nt, Homo sapiens
  misc_RNA (1)...(19): siRNA sense strand
cgacgucuucuaccugaug

SEQ ID NO: 410198 - RNA, 19 nt, Homo sapiens
  misc_RNA (1)...(19): siRNA sense strand
acgcguugcccuucacuaa

SEQ ID NO: 410199 - RNA, 19 nt, Homo sapiens
  misc_RNA (1)...(19): siRNA sense strand
caaggaggugcgcuucuuc

SEQ ID NO: 410200 - RNA, 19 nt, Homo sapiens
  misc_RNA (1)...(19): siRNA sense strand
uuccauacuucgucuagga

SEQ ID NO: 410201 - RNA, 19 nt, Homo sapiens
  misc_RNA (1)...(19): siRNA sense strand
gccacguggugcucaagga

SEQ ID NO: 410202 - RNA, 19 nt, Homo sapiens
  misc_RNA (1)...(19): siRNA sense strand
ggaggugcgcuucuucaac

SEQ ID NO: 410203 - RNA, 19 nt, Homo sapiens
  misc_RNA (1)...(19): siRNA sense strand
gauacuggcacgcgacaac

SEQ ID NO: 410204 - RNA, 19 nt, Homo sapiens
  misc_RNA (1)...(19): siRNA sense strand
ccacgguucuccagcaaga

SEQ ID NO: 410205 - RNA, 19 nt, Homo sapiens
  misc_RNA (1)...(19): siRNA sense strand
gcguugcccuucacuaaga

SEQ ID NO: 410206 - RNA, 19 nt, Homo sapiens
  misc_RNA (1)...(19): siRNA sense strand
ucaaggaggugcgcuucuu

SEQ ID NO: 410207 - RNA, 19 nt, Homo sapiens
  misc_RNA (1)...(19): siRNA sense strand
gacauggacguguuugaug

SEQ ID NO: 410208 - RNA, 19 nt, Homo sapiens
  misc_RNA (1)...(19): siRNA sense strand
ccaccugccuccugcucuu

SEQ ID NO: 410209 - RNA, 19 nt, Homo sapiens
  misc_RNA (1)...(19): siRNA sense strand
gaccugaugcgcucuaucu

SEQ ID NO: 410210 - RNA, 19 nt, Homo sapiens
  misc_RNA (1)...(19): siRNA sense strand
ccugaugcgcucuaucuuu

SEQ ID NO: 410211 - RNA, 19 nt, Homo sapiens
  misc_RNA (1)...(19): siRNA sense strand
cgacauggacguguuugau

SEQ ID NO: 410212 - RNA, 19 nt, Homo sapiens
  misc_RNA (1)...(19): siRNA sense strand
cguguuugaugccuacaug

SEQ ID NO: 410213 - RNA, 19 nt, Homo sapiens
  misc_RNA (1)...(19): siRNA sense strand
cauacuucgucuaggaaug

SEQ ID NO: 410214 - RNA, 19 nt, Homo sapiens
  misc_RNA (1)...(19): siRNA sense strand
cugaugcgcucuaucuuuu

SEQ ID NO: 410215 - RNA, 19 nt, Homo sapiens
  misc_RNA (1)...(19): siRNA sense strand
cgacgucuucuaccugaug

SEQ ID NO: 410216 - RNA, 19 nt, Homo sapiens
  misc_RNA (1)...(19): siRNA sense strand
acgcguugcccuucacuaa

SEQ ID NO: 410217 - RNA, 19 nt, Homo sapiens
  misc_RNA (1)...(19): siRNA sense strand
caaggaggugcgcuucuuc

SEQ ID NO: 410218 - RNA, 19 nt, Homo sapiens
  misc_RNA (1)...(19): siRNA sense strand
uuccauacuucgucuagga

SEQ ID NO: 410219 - RNA, 19 nt, Homo sapiens
  misc_RNA (1)...(19): siRNA sense strand
gccacguggugcucaagga

SEQ ID NO: 410220 - RNA, 19 nt, Homo sapiens
  misc_RNA (1)...(19): siRNA sense strand
ggaggugcgcuucuucaac

SEQ ID NO: 410221 - RNA, 19 nt, Homo sapiens
  misc_RNA (1)...(19): siRNA sense strand
gauacuggcacgcgacaac

SEQ ID NO: 410222 - RNA, 19 nt, Homo sapiens
  misc_RNA (1)...(19): siRNA sense strand
gcagagagcuuugcuuuua

SEQ ID NO: 410223 - RNA, 19 nt, Homo sapiens
  misc_RNA (1)...(19): siRNA sense strand
ugaagucgcuugagaaaga

SEQ ID NO: 410224 - RNA, 19 nt, Homo sapiens
  misc_RNA (1)...(19): siRNA sense strand
caggugagguccagagaua

SEQ ID NO: 410225 - RNA, 19 nt, Homo sapiens
  misc_RNA (1)...(19): siRNA sense strand
ggaagaggaugaugaggau

SEQ ID NO: 410226 - RNA, 19 nt, Homo sapiens
  misc_RNA (1)...(19): siRNA sense strand
uugagaaccugcagaaaua

SEQ ID NO: 410227 - RNA, 19 nt, Homo sapiens
  misc_RNA (1)...(19): siRNA sense strand
gagcugaagucgcuugaga

SEQ ID NO: 410228 - RNA, 19 nt, Homo sapiens
  misc_RNA (1)...(19): siRNA sense strand
gaaaggauucuucuucuca

SEQ ID NO: 410229 - RNA, 19 nt, Homo sapiens
  misc_RNA (1)...(19): siRNA sense strand
aagaagagaucgagguuga

SEQ ID NO: 410230 - RNA, 19 nt, Homo sapiens
  misc_RNA (1)...(19): siRNA sense strand
cagaagagcccacagagaa

SEQ ID NO: 410231 - RNA, 19 nt, Homo sapiens
  misc_RNA (1)...(19): siRNA sense strand
gaugccaccugaugcagua

SEQ ID NO: 410232 - RNA, 19 nt, Homo sapiens
  misc_RNA (1)...(19): siRNA sense strand
ccagagauauauccagaga

SEQ ID NO: 410233 - RNA, 19 nt, Homo sapiens
  misc_RNA (1)...(19): siRNA sense strand
caacuggccacuccaaauu

SEQ ID NO: 410234 - RNA, 19 nt, Homo sapiens
  misc_RNA (1)...(19): siRNA sense strand
ccaaggcgcuggugcaaca

SEQ ID NO: 410235 - RNA, 19 nt, Homo sapiens
  misc_RNA (1)...(19): siRNA sense strand
ccacaagauugccaaacaa

SEQ ID NO: 410236 - RNA, 19 nt, Homo sapiens
  misc_RNA (1)...(19): siRNA sense strand
agaaauugcuggccaagau

SEQ ID NO: 410237 - RNA, 19 nt, Homo sapiens
  misc_RNA (1)...(19): siRNA sense strand
ggacacaccagaagaccaa

SEQ ID NO: 410238 - RNA, 19 nt, Homo sapiens
  misc_RNA (1)...(19): siRNA sense strand
ggacacaggaccacaagau

SEQ ID NO: 410239 - RNA, 19 nt, Homo sapiens
  misc_RNA (1)...(19): siRNA sense strand
aaacagagcgagagagaug

SEQ ID NO: 410240 - RNA, 19 nt, Homo sapiens
  misc_RNA (1)...(19): siRNA sense strand
cagaggacaucgccaagga

SEQ ID NO: 410241 - RNA, 19 nt, Homo sapiens
  misc_RNA (1)...(19): siRNA sense strand
ggugagguccagagauaua

SEQ ID NO: 410242 - RNA, 19 nt, Homo sapiens
  misc_RNA (1)...(19): siRNA sense strand
gcugggaccuccuccuguu

SEQ ID NO: 410243 - RNA, 19 nt, Homo sapiens
  misc_RNA (1)...(19): siRNA sense strand
caccagagcagacccauga

SEQ ID NO: 410244 - RNA, 19 nt, Homo sapiens
  misc_RNA (1)...(19): siRNA sense strand
gaagucgcuugagaaagaa

SEQ ID NO: 410245 - RNA, 19 nt, Homo sapiens
  misc_RNA (1)...(19): siRNA sense strand
gaggaccacuucauuacag

SEQ ID NO: 410246 - RNA, 19 nt, Homo sapiens
  misc_RNA (1)...(19): siRNA sense strand
gaucgagguugaggaggaa

SEQ ID NO: 410247 - RNA, 19 nt, Homo sapiens
  misc_RNA (1)...(19): siRNA sense strand
accagaagaccaagauuua

SEQ ID NO: 410248 - RNA, 19 nt, Homo sapiens
  misc_RNA (1)...(19): siRNA sense strand
ccacagcagccgcuucuga

SEQ ID NO: 410249 - RNA, 19 nt, Homo sapiens
  misc_RNA (1)...(19): siRNA sense strand
gcugaagucgcuugagaaa

SEQ ID NO: 410250 - RNA, 19 nt, Homo sapiens
  misc_RNA (1)...(19): siRNA sense strand
gaggacaucgccaaggaaa

SEQ ID NO: 410251 - RNA, 19 nt, Homo sapiens
  misc_RNA (1)...(19): siRNA sense strand
gcgcucaacccgccucaaa

SEQ ID NO: 410252 - RNA, 19 nt, Homo sapiens
  misc_RNA (1)...(19): siRNA sense strand
gaaauugcuggccaagaug

SEQ ID NO: 410253 - RNA, 19 nt, Homo sapiens
  misc_RNA (1)...(19): siRNA sense strand
caccagaagaccaagauuu

SEQ ID NO: 410254 - RNA, 19 nt, Homo sapiens
  misc_RNA (1)...(19): siRNA sense strand
agccaaagcugcagaagca

SEQ ID NO: 410255 - RNA, 19 nt, Homo sapiens
  misc_RNA (1)...(19): siRNA sense strand
agacaaugccuguggaaga

SEQ ID NO: 410256 - RNA, 19 nt, Homo sapiens
  misc_RNA (1)...(19): siRNA sense strand
agaagcagguccagacaca

SEQ ID NO: 410257 - RNA, 19 nt, Homo sapiens
  misc_RNA (1)...(19): siRNA sense strand
ggaugacaguaccgaaaca

SEQ ID NO: 410258 - RNA, 19 nt, Homo sapiens
  misc_RNA (1)...(19): siRNA sense strand
ccacagcaacacuggguaa

SEQ ID NO: 410259 - RNA, 19 nt, Homo sapiens
  misc_RNA (1)...(19): siRNA sense strand
acacaggaccacaagauug

SEQ ID NO: 410260 - RNA, 19 nt, Homo sapiens
  misc_RNA (1)...(19): siRNA sense strand
gaaaacagagcgagagaga

SEQ ID NO: 410261 - RNA, 19 nt, Homo sapiens
  misc_RNA (1)...(19): siRNA sense strand
gcauggaagagauucagaa

SEQ ID NO: 410262 - RNA, 19 nt, Homo sapiens
  misc_RNA (1)...(19): siRNA sense strand
ggcuauaucugccgcaucu

SEQ ID NO: 410263 - RNA, 19 nt, Homo sapiens
  misc_RNA (1)...(19): siRNA sense strand
cccaagugcugccacgauu

SEQ ID NO: 410264 - RNA, 19 nt, Homo sapiens
  misc_RNA (1)...(19): siRNA sense strand
ggaagggcucggagaccua

SEQ ID NO: 410265 - RNA, 19 nt, Homo sapiens
  misc_RNA (1)...(19): siRNA sense strand
gcaggugcagccacaggua

SEQ ID NO: 410266 - RNA, 19 nt, Homo sapiens
  misc_RNA (1)...(19): siRNA sense strand
ccaugaacccuucccaguu

SEQ ID NO: 410267 - RNA, 19 nt, Homo sapiens
  misc_RNA (1)...(19): siRNA sense strand
gacacaggaccacaagauu

SEQ ID NO: 410268 - RNA, 19 nt, Homo sapiens
  misc_RNA (1)...(19): siRNA sense strand
gggagaaugugaaaacaga

SEQ ID NO: 410269 - RNA, 19 nt, Homo sapiens
  misc_RNA (1)...(19): siRNA sense strand
ggauucuucuucucagaca

SEQ ID NO: 410270 - RNA, 19 nt, Homo sapiens
  misc_RNA (1)...(19): siRNA sense strand
cgaaaggauucuucuucuc

SEQ ID NO: 410271 - RNA, 19 nt, Homo sapiens
  misc_RNA (1)...(19): siRNA sense strand
gacaaugccuguggaagac

SEQ ID NO: 410272 - RNA, 19 nt, Homo sapiens
  misc_RNA (1)...(19): siRNA sense strand
cgacccuucugcaccguuu

SEQ ID NO: 410273 - RNA, 19 nt, Homo sapiens
  misc_RNA (1)...(19): siRNA sense strand
caaauuugcaacaguucuu

SEQ ID NO: 410274 - RNA, 19 nt, Homo sapiens
  misc_RNA (1)...(19): siRNA sense strand
gaugugggagaaugugaaa

SEQ ID NO: 410275 - RNA, 19 nt, Homo sapiens
  misc_RNA (1)...(19): siRNA sense strand
caagucagcauggaagaga

SEQ ID NO: 410276 - RNA, 19 nt, Homo sapiens
  misc_RNA (1)...(19): siRNA sense strand
gcacccaagucagcaugga

SEQ ID NO: 410277 - RNA, 19 nt, Homo sapiens
  misc_RNA (1)...(19): siRNA sense strand
ucgaaaggauucuucuucu

SEQ ID NO: 410278 - RNA, 19 nt, Homo sapiens
  misc_RNA (1)...(19): siRNA sense strand
cagcgcaggugucaguaca

SEQ ID NO: 410279 - RNA, 19 nt, Homo sapiens
  misc_RNA (1)...(19): siRNA sense strand
ugaagaagagaucgagguu

SEQ ID NO: 410280 - RNA, 19 nt, Homo sapiens
  misc_RNA (1)...(19): siRNA sense strand
ugaagaagaggaagaggau

SEQ ID NO: 410281 - RNA, 19 nt, Homo sapiens
  misc_RNA (1)...(19): siRNA sense strand
gcaggacacaggaccacaa

SEQ ID NO: 410282 - RNA, 19 nt, Homo sapiens
  misc_RNA (1)...(19): siRNA sense strand
gggacguccuggagacaga

SEQ ID NO: 410283 - RNA, 19 nt, Homo sapiens
  misc_RNA (1)...(19): siRNA sense strand
uaagcaggcccuccaguuc

SEQ ID NO: 410284 - RNA, 19 nt, Homo sapiens
  misc_RNA (1)...(19): siRNA sense strand
cugcagagagcuuugcuuu

SEQ ID NO: 410285 - RNA, 19 nt, Homo sapiens
  misc_RNA (1)...(19): siRNA sense strand
ggagaugccaccugaugca

SEQ ID NO: 410286 - RNA, 19 nt, Homo sapiens
  misc_RNA (1)...(19): siRNA sense strand
ugaugaggaugaagaagag

SEQ ID NO: 410287 - RNA, 19 nt, Homo sapiens
  misc_RNA (1)...(19): siRNA sense strand
ggaugaugaggaugaagaa

SEQ ID NO: 410288 - RNA, 19 nt, Homo sapiens
  misc_RNA (1)...(19): siRNA sense strand
aagaagaggaagaggauga

SEQ ID NO: 410289 - RNA, 19 nt, Homo sapiens
  misc_RNA (1)...(19): siRNA sense strand
ggauggacacaccagaaga

SEQ ID NO: 410290 - RNA, 19 nt, Homo sapiens
  misc_RNA (1)...(19): siRNA sense strand
cgagggugaugaagaagag

SEQ ID NO: 410291 - RNA, 19 nt, Homo sapiens
  misc_RNA (1)...(19): siRNA sense strand
cuccaaauuugcaacaguu

SEQ ID NO: 410292 - RNA, 19 nt, Homo sapiens
  misc_RNA (1)...(19): siRNA sense strand
ccagagcaaacaccaguug

SEQ ID NO: 410293 - RNA, 19 nt, Homo sapiens
  misc_RNA (1)...(19): siRNA sense strand
guaccgaaacagacacaga

SEQ ID NO: 410294 - RNA, 19 nt, Homo sapiens
  misc_RNA (1)...(19): siRNA sense strand
caaugccuguggaagacaa

SEQ ID NO: 410295 - RNA, 19 nt, Homo sapiens
  misc_RNA (1)...(19): siRNA sense strand
gcccaacacccaggacaaa

SEQ ID NO: 410296 - RNA, 19 nt, Homo sapiens
  misc_RNA (1)...(19): siRNA sense strand
ggaguuccaggaccacaug

SEQ ID NO: 410297 - RNA, 19 nt, Homo sapiens
  misc_RNA (1)...(19): siRNA sense strand
gcagaagcagguccagaca

SEQ ID NO: 410298 - RNA, 19 nt, Homo sapiens
  misc_RNA (1)...(19): siRNA sense strand
cuaagcaggcccuccaguu

SEQ ID NO: 410299 - RNA, 19 nt, Homo sapiens
  misc_RNA (1)...(19): siRNA sense strand
gcaucugccacaaguucua

SEQ ID NO: 410300 - RNA, 19 nt, Homo sapiens
  misc_RNA (1)...(19): siRNA sense strand
ucagaagagcccacagaga

SEQ ID NO: 410301 - RNA, 19 nt, Homo sapiens
  misc_RNA (1)...(19): siRNA sense strand
gaagaggaagaggaugaug

SEQ ID NO: 410302 - RNA, 19 nt, Homo sapiens
  misc_RNA (1)...(19): siRNA sense strand
uaccagcacucccucuaag

SEQ ID NO: 410303 - RNA, 19 nt, Homo sapiens
  misc_RNA (1)...(19): siRNA sense strand
guacagccacaggcacauu

SEQ ID NO: 410304 - RNA, 19 nt, Homo sapiens
  misc_RNA (1)...(19): siRNA sense strand
gacaguaccgaaacagaca

SEQ ID NO: 410305 - RNA, 19 nt, Homo sapiens
  misc_RNA (1)...(19): siRNA sense strand
cuaccagcacucccucuaa

SEQ ID NO: 410306 - RNA, 19 nt, Homo sapiens
  misc_RNA (1)...(19): siRNA sense strand
aggcagagccgcugaagca

SEQ ID NO: 410307 - RNA, 19 nt, Homo sapiens
  misc_RNA (1)...(19): siRNA sense strand
acuuagugcugcaacagaa

SEQ ID NO: 410308 - RNA, 19 nt, Homo sapiens
  misc_RNA (1)...(19): siRNA sense strand
ggaaccuccagggcaguua

SEQ ID NO: 410309 - RNA, 19 nt, Homo sapiens
  misc_RNA (1)...(19): siRNA sense strand
aagaggaugaugaggauga

SEQ ID NO: 410310 - RNA, 19 nt, Homo sapiens
  misc_RNA (1)...(19): siRNA sense strand
aagaggaagaggaugauga

SEQ ID NO: 410311 - RNA, 19 nt, Homo sapiens
  misc_RNA (1)...(19): siRNA sense strand
ccugccagcucuacuacau

SEQ ID NO: 410312 - RNA, 19 nt, Homo sapiens
  misc_RNA (1)...(19): siRNA sense strand
gcuaccagcacucccucua

SEQ ID NO: 410313 - RNA, 19 nt, Homo sapiens
  misc_RNA (1)...(19): siRNA sense strand
gccuagaugugggagaaug

SEQ ID NO: 410314 - RNA, 19 nt, Homo sapiens
  misc_RNA (1)...(19): siRNA sense strand
ggaggcagagccacagaag

SEQ ID NO: 410315 - RNA, 19 nt, Homo sapiens
  misc_RNA (1)...(19): siRNA sense strand
ccacaacuggccacuccaa

SEQ ID NO: 410316 - RNA, 19 nt, Homo sapiens
  misc_RNA (1)...(19): siRNA sense strand
gaaccugcagaaauacaag

SEQ ID NO: 410317 - RNA, 19 nt, Homo sapiens
  misc_RNA (1)...(19): siRNA sense strand
cacagcagccgcuucugaa

SEQ ID NO: 410318 - RNA, 19 nt, Homo sapiens
  misc_RNA (1)...(19): siRNA sense strand
accacaagauugccaaaca

SEQ ID NO: 410319 - RNA, 19 nt, Homo sapiens
  misc_RNA (1)...(19): siRNA sense strand
ggaccacaagauugccaaa

SEQ ID NO: 410320 - RNA, 19 nt, Homo sapiens
  misc_RNA (1)...(19): siRNA sense strand
uuugagaaccugcagaaau

SEQ ID NO: 410321 - RNA, 19 nt, Homo sapiens
  misc_RNA (1)...(19): siRNA sense strand
gagaaccugcagaaauaca

SEQ ID NO: 410322 - RNA, 19 nt, Homo sapiens
  misc_RNA (1)...(19): siRNA sense strand
gcacgcaccugccacagau

SEQ ID NO: 410323 - RNA, 19 nt, Homo sapiens
  misc_RNA (1)...(19): siRNA sense strand
ugagcgagaucuacaaguu

SEQ ID NO: 410324 - RNA, 19 nt, Homo sapiens
  misc_RNA (1)...(19): siRNA sense strand
gccacaaccucuccuucaa

SEQ ID NO: 410325 - RNA, 19 nt, Homo sapiens
  misc_RNA (1)...(19): siRNA sense strand
gaucuacaaguucaucaug

SEQ ID NO: 410326 - RNA, 19 nt, Homo sapiens
  misc_RNA (1)...(19): siRNA sense strand
gcuucaaggugcuuaaguc

SEQ ID NO: 410327 - RNA, 19 nt, Homo sapiens
  misc_RNA (1)...(19): siRNA sense strand
acgcagcgcuggcagaaca

SEQ ID NO: 410328 - RNA, 19 nt, Homo sapiens
  misc_RNA (1)...(19): siRNA sense strand
caacgacugcuucaucaag

SEQ ID NO: 410329 - RNA, 19 nt, Homo sapiens
  misc_RNA (1)...(19): siRNA sense strand
caaacagccaccagccaaa

SEQ ID NO: 410330 - RNA, 19 nt, Homo sapiens
  misc_RNA (1)...(19): siRNA sense strand
ccaccuugcucucgaacuc

SEQ ID NO: 410331 - RNA, 19 nt, Homo sapiens
  misc_RNA (1)...(19): siRNA sense strand
gagcgagaucuacaaguuc

SEQ ID NO: 410332 - RNA, 19 nt, Homo sapiens
  misc_RNA (1)...(19): siRNA sense strand
ucuacaaguucaucaugga

SEQ ID NO: 410333 - RNA, 19 nt, Homo sapiens
  misc_RNA (1)...(19): siRNA sense strand
acaucucgcugaccgcuau

SEQ ID NO: 410334 - RNA, 19 nt, Homo sapiens
  misc_RNA (1)...(19): siRNA sense strand
aacgacugcuucaucaaga

SEQ ID NO: 410335 - RNA, 19 nt, Homo sapiens
  misc_RNA (1)...(19): siRNA sense strand
acacguacagcgaccagaa

SEQ ID NO: 410336 - RNA, 19 nt, Homo sapiens
  misc_RNA (1)...(19): siRNA sense strand
gcugcaagcgcuucaaggu

SEQ ID NO: 410337 - RNA, 19 nt, Homo sapiens
  misc_RNA (1)...(19): siRNA sense strand
agaacagucugcgccacaa

SEQ ID NO: 410338 - RNA, 19 nt, Homo sapiens
  misc_RNA (1)...(19): siRNA sense strand
agcgagaucuacaaguuca

SEQ ID NO: 410339 - RNA, 19 nt, Homo sapiens
  misc_RNA (1)...(19): siRNA sense strand
uucaacgacugcuucauca

SEQ ID NO: 410340 - RNA, 19 nt, Homo sapiens
  misc_RNA (1)...(19): siRNA sense strand
gcggggacauguucgagaa

SEQ ID NO: 410341 - RNA, 19 nt, Homo sapiens
  misc_RNA (1)...(19): siRNA sense strand
gaacagcauccgccacaau

SEQ ID NO: 410342 - RNA, 19 nt, Homo sapiens
  misc_RNA (1)...(19): siRNA sense strand
ccgcagacauguucgacaa

SEQ ID NO: 410343 - RNA, 19 nt, Homo sapiens
  misc_RNA (1)...(19): siRNA sense strand
gcaaguggcagaacagcau

SEQ ID NO: 410344 - RNA, 19 nt, Homo sapiens
  misc_RNA (1)...(19): siRNA sense strand
gccacaaucucacgcucaa

SEQ ID NO: 410345 - RNA, 19 nt, Homo sapiens
  misc_RNA (1)...(19): siRNA sense strand
cuucaucaccgaacgcuuu

SEQ ID NO: 410346 - RNA, 19 nt, Homo sapiens
  misc_RNA (1)...(19): siRNA sense strand
ccgaacgcuuugccuucua

SEQ ID NO: 410347 - RNA, 19 nt, Homo sapiens
  misc_RNA (1)...(19): siRNA sense strand
gcuggagcgcuaccuguga

SEQ ID NO: 410348 - RNA, 19 nt, Homo sapiens
  misc_RNA (1)...(19): siRNA sense strand
cgaacgcuuugccuucuac

SEQ ID NO: 410349 - RNA, 19 nt, Homo sapiens
  misc_RNA (1)...(19): siRNA sense strand
gaaccugcagccggagcua

SEQ ID NO: 410350 - RNA, 19 nt, Homo sapiens
  misc_RNA (1)...(19): siRNA sense strand
ccgcgcaaguggcagaaca

SEQ ID NO: 410351 - RNA, 19 nt, Homo sapiens
  misc_RNA (1)...(19): siRNA sense strand
aaccagagaugaccuucaa

SEQ ID NO: 410352 - RNA, 19 nt, Homo sapiens
  misc_RNA (1)...(19): siRNA sense strand
gagcugauccugaguacca

SEQ ID NO: 410353 - RNA, 19 nt, Homo sapiens
  misc_RNA (1)...(19): siRNA sense strand
gaccaggugcacuucuaua

SEQ ID NO: 410354 - RNA, 19 nt, Homo sapiens
  misc_RNA (1)...(19): siRNA sense strand
ccagagaugaccuucaauc

SEQ ID NO: 410355 - RNA, 19 nt, Homo sapiens
  misc_RNA (1)...(19): siRNA sense strand
aaaccugacugcccaagcu

SEQ ID NO: 410356 - RNA, 19 nt, Homo sapiens
  misc_RNA (1)...(19): siRNA sense strand
ugaagcagcacccguugug

SEQ ID NO: 410357 - RNA, 19 nt, Homo sapiens
  misc_RNA (1)...(19): siRNA sense strand
gagacacaauaucaaaaug

SEQ ID NO: 410358 - RNA, 19 nt, Homo sapiens
  misc_RNA (1)...(19): siRNA sense strand
ccacaugccaaccagagau

SEQ ID NO: 410359 - RNA, 19 nt, Homo sapiens
  misc_RNA (1)...(19): siRNA sense strand
ggagacacaauaucaaaau

SEQ ID NO: 410360 - RNA, 19 nt, Homo sapiens
  misc_RNA (1)...(19): siRNA sense strand
gcuggagacacaauaucaa

SEQ ID NO: 410361 - RNA, 19 nt, Homo sapiens
  misc_RNA (1)...(19): siRNA sense strand
cuggagacacaauaucaaa

SEQ ID NO: 410362 - RNA, 19 nt, Homo sapiens
  misc_RNA (1)...(19): siRNA sense strand
ucaauccugguccaacuga

SEQ ID NO: 410363 - RNA, 19 nt, Homo sapiens
  misc_RNA (1)...(19): siRNA sense strand
aaagccugcuggagacaca

SEQ ID NO: 410364 - RNA, 19 nt, Homo sapiens
  misc_RNA (1)...(19): siRNA sense strand
ggacaagauuccuuauaua

SEQ ID NO: 410365 - RNA, 19 nt, Homo sapiens
  misc_RNA (1)...(19): siRNA sense strand
gauggaaagucguauguua

SEQ ID NO: 410366 - RNA, 19 nt, Homo sapiens
  misc_RNA (1)...(19): siRNA sense strand
gaagaaacuccuaaagaua

SEQ ID NO: 410367 - RNA, 19 nt, Homo sapiens
  misc_RNA (1)...(19): siRNA sense strand
gaccacagcuguagauuug

SEQ ID NO: 410368 - RNA, 19 nt, Homo sapiens
  misc_RNA (1)...(19): siRNA sense strand
ggacacggaugaagagaaa

SEQ ID NO: 410369 - RNA, 19 nt, Homo sapiens
  misc_RNA (1)...(19): siRNA sense strand
gaaugugucugaaggaauu

SEQ ID NO: 410370 - RNA, 19 nt, Homo sapiens
  misc_RNA (1)...(19): siRNA sense strand
gaauuagccugcaacauga

SEQ ID NO: 410371 - RNA, 19 nt, Homo sapiens
  misc_RNA (1)...(19): siRNA sense strand
acacugagcuccauaaaga

SEQ ID NO: 410372 - RNA, 19 nt, Homo sapiens
  misc_RNA (1)...(19): siRNA sense strand
ggaaagucguauguuauua

SEQ ID NO: 410373 - RNA, 19 nt, Homo sapiens
  misc_RNA (1)...(19): siRNA sense strand
ggaauuagccugcaacaug

SEQ ID NO: 410374 - RNA, 19 nt, Homo sapiens
  misc_RNA (1)...(19): siRNA sense strand
agaagagucugcucaguua

SEQ ID NO: 410375 - RNA, 19 nt, Homo sapiens
  misc_RNA (1)...(19): siRNA sense strand
gaauaggcgucuacaagaa

SEQ ID NO: 410376 - RNA, 19 nt, Homo sapiens
  misc_RNA (1)...(19): siRNA sense strand
gcagagcucuucagaauac

SEQ ID NO: 410377 - RNA, 19 nt, Homo sapiens
  misc_RNA (1)...(19): siRNA sense strand
ggacuuggaacaccauuua

SEQ ID NO: 410378 - RNA, 19 nt, Homo sapiens
  misc_RNA (1)...(19): siRNA sense strand
aaacagaaguugauugaug

SEQ ID NO: 410379 - RNA, 19 nt, Homo sapiens
  misc_RNA (1)...(19): siRNA sense strand
gaaguuguaugcuuggaaa

SEQ ID NO: 410380 - RNA, 19 nt, Homo sapiens
  misc_RNA (1)...(19): siRNA sense strand
gagaugagccuaccaguga

SEQ ID NO: 410381 - RNA, 19 nt, Homo sapiens
  misc_RNA (1)...(19): siRNA sense strand
gacaugcacuuauuagauu

SEQ ID NO: 410382 - RNA, 19 nt, Homo sapiens
  misc_RNA (1)...(19): siRNA sense strand
auaaagaacuugccauuga

SEQ ID NO: 410383 - RNA, 19 nt, Homo sapiens
  misc_RNA (1)...(19): siRNA sense strand
gagaugggccucuuucuaa

SEQ ID NO: 410384 - RNA, 19 nt, Homo sapiens
  misc_RNA (1)...(19): siRNA sense strand
ugaagaaacuccuaaagau

SEQ ID NO: 410385 - RNA, 19 nt, Homo sapiens
  misc_RNA (1)...(19): siRNA sense strand
gaguggaucuggugaugua

SEQ ID NO: 410386 - RNA, 19 nt, Homo sapiens
  misc_RNA (1)...(19): siRNA sense strand
ggacagacagugcuuuaaa

SEQ ID NO: 410387 - RNA, 19 nt, Homo sapiens
  misc_RNA (1)...(19): siRNA sense strand
gcuguaagccggauacuuu

SEQ ID NO: 410388 - RNA, 19 nt, Homo sapiens
  misc_RNA (1)...(19): siRNA sense strand
gcagauuuguucucaguug

SEQ ID NO: 410389 - RNA, 19 nt, Homo sapiens
  misc_RNA (1)...(19): siRNA sense strand
gaaguugauugaugcagaa

SEQ ID NO: 410390 - RNA, 19 nt, Homo sapiens
  misc_RNA (1)...(19): siRNA sense strand
gacaaacacugaaauagca

SEQ ID NO: 410391 - RNA, 19 nt, Homo sapiens
  misc_RNA (1)...(19): siRNA sense strand
aaacuacccuaucuacaaa

SEQ ID NO: 410392 - RNA, 19 nt, Homo sapiens
  misc_RNA (1)...(19): siRNA sense strand
uaaagaacuugccauugaa

SEQ ID NO: 410393 - RNA, 19 nt, Homo sapiens
  misc_RNA (1)...(19): siRNA sense strand
gcaguugucauccuuagua

SEQ ID NO: 410394 - RNA, 19 nt, Homo sapiens
  misc_RNA (1)...(19): siRNA sense strand
gcccuuggauuauuaaaga

SEQ ID NO: 410395 - RNA, 19 nt, Homo sapiens
  misc_RNA (1)...(19): siRNA sense strand
gccaaggaauugauaagaa

SEQ ID NO: 410396 - RNA, 19 nt, Homo sapiens
  misc_RNA (1)...(19): siRNA sense strand
guagagaaauaccgcauuc

SEQ ID NO: 410397 - RNA, 19 nt, Homo sapiens
  misc_RNA (1)...(19): siRNA sense strand
acacugaaauagcaaacua

SEQ ID NO: 410398 - RNA, 19 nt, Homo sapiens
  misc_RNA (1)...(19): siRNA sense strand
gaacauucccagcccauga

SEQ ID NO: 410399 - RNA, 19 nt, Homo sapiens
  misc_RNA (1)...(19): siRNA sense strand
caaacuacccuaucuacaa

SEQ ID NO: 410400 - RNA, 19 nt, Homo sapiens
  misc_RNA (1)...(19): siRNA sense strand
guggaagccuuaaggauga

SEQ ID NO: 410401 - RNA, 19 nt, Homo sapiens
  misc_RNA (1)...(19): siRNA sense strand
agaaagagacgcucaagaa

SEQ ID NO: 410402 - RNA, 19 nt, Homo sapiens
  misc_RNA (1)...(19): siRNA sense strand
ggagaugggccucuuucua

SEQ ID NO: 410403 - RNA, 19 nt, Homo sapiens
  misc_RNA (1)...(19): siRNA sense strand
gaaagugaaucagaaagag

SEQ ID NO: 410404 - RNA, 19 nt, Homo sapiens
  misc_RNA (1)...(19): siRNA sense strand
ggaaagugaaucagaaaga

SEQ ID NO: 410405 - RNA, 19 nt, Homo sapiens
  misc_RNA (1)...(19): siRNA sense strand
cauuaacccugugccauua

SEQ ID NO: 410406 - RNA, 19 nt, Homo sapiens
  misc_RNA (1)...(19): siRNA sense strand
caaagggagagaaagaaua

SEQ ID NO: 410407 - RNA, 19 nt, Homo sapiens
  misc_RNA (1)...(19): siRNA sense strand
gagaauaggcgucuacaag

SEQ ID NO: 410408 - RNA, 19 nt, Homo sapiens
  misc_RNA (1)...(19): siRNA sense strand
uggacaagauuccuuauau

SEQ ID NO: 410409 - RNA, 19 nt, Homo sapiens
  misc_RNA (1)...(19): siRNA sense strand
ccaagaagacgugguuuaa

SEQ ID NO: 410410 - RNA, 19 nt, Homo sapiens
  misc_RNA (1)...(19): siRNA sense strand
ccaaacagaaguugauuga

SEQ ID NO: 410411 - RNA, 19 nt, Homo sapiens
  misc_RNA (1)...(19): siRNA sense strand
uuaaagacuucgaaagaug

SEQ ID NO: 410412 - RNA, 19 nt, Homo sapiens
  misc_RNA (1)...(19): siRNA sense strand
gaacacugagcuccauaaa

SEQ ID NO: 410413 - RNA, 19 nt, Homo sapiens
  misc_RNA (1)...(19): siRNA sense strand
ugagagaaauggagcuaga

SEQ ID NO: 410414 - RNA, 19 nt, Homo sapiens
  misc_RNA (1)...(19): siRNA sense strand
ccaaggagguuuuagauga

SEQ ID NO: 410415 - RNA, 19 nt, Homo sapiens
  misc_RNA (1)...(19): siRNA sense strand
agacagugcuuuaaacuac

SEQ ID NO: 410416 - RNA, 19 nt, Homo sapiens
  misc_RNA (1)...(19): siRNA sense strand
gaagaagagucugcucagu

SEQ ID NO: 410417 - RNA, 19 nt, Homo sapiens
  misc_RNA (1)...(19): siRNA sense strand
ggugauguauccaaagaau

SEQ ID NO: 410418 - RNA, 19 nt, Homo sapiens
  misc_RNA (1)...(19): siRNA sense strand
gaaaagauguacgaaauag

SEQ ID NO: 410419 - RNA, 19 nt, Homo sapiens
  misc_RNA (1)...(19): siRNA sense strand
gcacuuauuagauuuggaa

SEQ ID NO: 410420 - RNA, 19 nt, Homo sapiens
  misc_RNA (1)...(19): siRNA sense strand
ucaguugagugaaagauug

SEQ ID NO: 410421 - RNA, 19 nt, Homo sapiens
  misc_RNA (1)...(19): siRNA sense strand
aaagggagagaaagaauaa

SEQ ID NO: 410422 - RNA, 19 nt, Homo sapiens
  misc_RNA (1)...(19): siRNA sense strand
ccaaggaauugauaagaag

SEQ ID NO: 410423 - RNA, 19 nt, Homo sapiens
  misc_RNA (1)...(19): siRNA sense strand
aaaaggagcuugugaaaag

SEQ ID NO: 410424 - RNA, 19 nt, Homo sapiens
  misc_RNA (1)...(19): siRNA sense strand
caacaaagaagggcgugua

SEQ ID NO: 410425 - RNA, 19 nt, Homo sapiens
  misc_RNA (1)...(19): siRNA sense strand
agaggaagauaaugaugaa

SEQ ID NO: 410426 - RNA, 19 nt, Homo sapiens
  misc_RNA (1)...(19): siRNA sense strand
uacaaccacuuccuggaua

SEQ ID NO: 410427 - RNA, 19 nt, Homo sapiens
  misc_RNA (1)...(19): siRNA sense strand
guugauugaugcagaagaa

SEQ ID NO: 410428 - RNA, 19 nt, Homo sapiens
  misc_RNA (1)...(19): siRNA sense strand
uaagagauaccgcucagaa

SEQ ID NO: 410429 - RNA, 19 nt, Homo sapiens
  misc_RNA (1)...(19): siRNA sense strand
augcagagcucuucagaau

SEQ ID NO: 410430 - RNA, 19 nt, Homo sapiens
  misc_RNA (1)...(19): siRNA sense strand
ggggagaacuguugucaaa

SEQ ID NO: 410431 - RNA, 19 nt, Homo sapiens
  misc_RNA (1)...(19): siRNA sense strand
gcuguagauuugguaauaa

SEQ ID NO: 410432 - RNA, 19 nt, Homo sapiens
  misc_RNA (1)...(19): siRNA sense strand
gcagcaaacaacuaauaaa

SEQ ID NO: 410433 - RNA, 19 nt, Homo sapiens
  misc_RNA (1)...(19): siRNA sense strand
gugcagcaaacaacuaaua

SEQ ID NO: 410434 - RNA, 19 nt, Homo sapiens
  misc_RNA (1)...(19): siRNA sense strand
gccggauacuuuacaguuu

SEQ ID NO: 410435 - RNA, 19 nt, Homo sapiens
  misc_RNA (1)...(19): siRNA sense strand
gccaagaagacgugguuua

SEQ ID NO: 410436 - RNA, 19 nt, Homo sapiens
  misc_RNA (1)...(19): siRNA sense strand
gaaagaugaccugcuguug

SEQ ID NO: 410437 - RNA, 19 nt, Homo sapiens
  misc_RNA (1)...(19): siRNA sense strand
gcaaagggagagaaagaau

SEQ ID NO: 410438 - RNA, 19 nt, Homo sapiens
  misc_RNA (1)...(19): siRNA sense strand
uaaacuacgccaaggaauu

SEQ ID NO: 410439 - RNA, 19 nt, Homo sapiens
  misc_RNA (1)...(19): siRNA sense strand
agaagccagugucagauuu

SEQ ID NO: 410440 - RNA, 19 nt, Homo sapiens
  misc_RNA (1)...(19): siRNA sense strand
ucacaccaguggccgauga

SEQ ID NO: 410441 - RNA, 19 nt, Homo sapiens
  misc_RNA (1)...(19): siRNA sense strand
ggaggccgaguguaagaua

SEQ ID NO: 410442 - RNA, 19 nt, Homo sapiens
  misc_RNA (1)...(19): siRNA sense strand
gauuugagcgggagaauag

SEQ ID NO: 410443 - RNA, 19 nt, Homo sapiens
  misc_RNA (1)...(19): siRNA sense strand
gaagauuagucagaagaag

SEQ ID NO: 410444 - RNA, 19 nt, Homo sapiens
  misc_RNA (1)...(19): siRNA sense strand
gagauaccgcucagaagaa

SEQ ID NO: 410445 - RNA, 19 nt, Homo sapiens
  misc_RNA (1)...(19): siRNA sense strand
augaagagauugguuauug

SEQ ID NO: 410446 - RNA, 19 nt, Homo sapiens
  misc_RNA (1)...(19): siRNA sense strand
cgaagcaguugucauccuu

SEQ ID NO: 410447 - RNA, 19 nt, Homo sapiens
  misc_RNA (1)...(19): siRNA sense strand
ggagaacuguugucaaaau

SEQ ID NO: 410448 - RNA, 19 nt, Homo sapiens
  misc_RNA (1)...(19): siRNA sense strand
gaaagucguauguuauuac

SEQ ID NO: 410449 - RNA, 19 nt, Homo sapiens
  misc_RNA (1)...(19): siRNA sense strand
gaagaugaugguaaagguu

SEQ ID NO: 410450 - RNA, 19 nt, Homo sapiens
  misc_RNA (1)...(19): siRNA sense strand
uaccuucucugugucuuua

SEQ ID NO: 410451 - RNA, 19 nt, Homo sapiens
  misc_RNA (1)...(19): siRNA sense strand
gaagaggaagauaaugaug

SEQ ID NO: 410452 - RNA, 19 nt, Homo sapiens
  misc_RNA (1)...(19): siRNA sense strand
ggacacaggaggagaugga

SEQ ID NO: 410453 - RNA, 19 nt, Homo sapiens
  misc_RNA (1)...(19): siRNA sense strand
gaaauaccgcauucuuauc

SEQ ID NO: 410454 - RNA, 19 nt, Homo sapiens
  misc_RNA (1)...(19): siRNA sense strand
gaaccucuccugaguggau

SEQ ID NO: 410455 - RNA, 19 nt, Homo sapiens
  misc_RNA (1)...(19): siRNA sense strand
gugcaguucccaaagauaa

SEQ ID NO: 410456 - RNA, 19 nt, Homo sapiens
  misc_RNA (1)...(19): siRNA sense strand
uaagauacaggacuuggaa

SEQ ID NO: 410457 - RNA, 19 nt, Homo sapiens
  misc_RNA (1)...(19): siRNA sense strand
aaagaugaccugcuguuga

SEQ ID NO: 410458 - RNA, 19 nt, Homo sapiens
  misc_RNA (1)...(19): siRNA sense strand
ggauauaagccuugaagca

SEQ ID NO: 410459 - RNA, 19 nt, Homo sapiens
  misc_RNA (1)...(19): siRNA sense strand
agaagaugaugaagaggaa

SEQ ID NO: 410460 - RNA, 19 nt, Homo sapiens
  misc_RNA (1)...(19): siRNA sense strand
agugaaaccuggacaagga

SEQ ID NO: 410461 - RNA, 19 nt, Homo sapiens
  misc_RNA (1)...(19): siRNA sense strand
gaagcaguugucauccuua

SEQ ID NO: 410462 - RNA, 19 nt, Homo sapiens
  misc_RNA (1)...(19): siRNA sense strand
gaaagagacgcucaagaac

SEQ ID NO: 410463 - RNA, 19 nt, Homo sapiens
  misc_RNA (1)...(19): siRNA sense strand
uaaagacuucgaaagauga

SEQ ID NO: 410464 - RNA, 19 nt, Homo sapiens
  misc_RNA (1)...(19): siRNA sense strand
cagcagaccugaugacuua

SEQ ID NO: 410465 - RNA, 19 nt, Homo sapiens
  misc_RNA (1)...(19): siRNA sense strand
gaacagcacuaugaguauu

SEQ ID NO: 410466 - RNA, 19 nt, Homo sapiens
  misc_RNA (1)...(19): siRNA sense strand
uggaacagcuuaagauuga

SEQ ID NO: 410467 - RNA, 19 nt, Homo sapiens
  misc_RNA (1)...(19): siRNA sense strand
gugaacagcacuaugagua

SEQ ID NO: 410468 - RNA, 19 nt, Homo sapiens
  misc_RNA (1)...(19): siRNA sense strand
cuucugugcucuccucuga

SEQ ID NO: 410469 - RNA, 19 nt, Homo sapiens
  misc_RNA (1)...(19): siRNA sense strand
gguggaacagcuuaagauu

SEQ ID NO: 410470 - RNA, 19 nt, Homo sapiens
  misc_RNA (1)...(19): siRNA sense strand
gaacagcuuaagauugaag

SEQ ID NO: 410471 - RNA, 19 nt, Homo sapiens
  misc_RNA (1)...(19): siRNA sense strand
gcagcagaccugaugacuu

SEQ ID NO: 410472 - RNA, 19 nt, Homo sapiens
  misc_RNA (1)...(19): siRNA sense strand
ccugaugacuuacugugau

SEQ ID NO: 410473 - RNA, 19 nt, Homo sapiens
  misc_RNA (1)...(19): siRNA sense strand
ggaacagcuuaagauugaa

SEQ ID NO: 410474 - RNA, 19 nt, Homo sapiens
  misc_RNA (1)...(19): siRNA sense strand
ccggugaacagcacuauga

SEQ ID NO: 410475 - RNA, 19 nt, Homo sapiens
  misc_RNA (1)...(19): siRNA sense strand
guggaacagcuuaagauug

SEQ ID NO: 410476 - RNA, 19 nt, Homo sapiens
  misc_RNA (1)...(19): siRNA sense strand
gccagcuugugucggauaa

SEQ ID NO: 410477 - RNA, 19 nt, Homo sapiens
  misc_RNA (1)...(19): siRNA sense strand
caagaugguggaacagcuu

SEQ ID NO: 410478 - RNA, 19 nt, Homo sapiens
  misc_RNA (1)...(19): siRNA sense strand
ugaacagcacuaugaguau

SEQ ID NO: 410479 - RNA, 19 nt, Homo sapiens
  misc_RNA (1)...(19): siRNA sense strand
cagcuugugucggauaaag

SEQ ID NO: 410480 - RNA, 19 nt, Homo sapiens
  misc_RNA (1)...(19): siRNA sense strand
cacgcaagaugguggaaca

SEQ ID NO: 410481 - RNA, 19 nt, Homo sapiens
  misc_RNA (1)...(19): siRNA sense strand
ggcagcagcagaccugaug

SEQ ID NO: 410482 - RNA, 19 nt, Homo sapiens
  misc_RNA (1)...(19): siRNA sense strand
gugaugcccacgccuguga

SEQ ID NO: 410483 - RNA, 19 nt, Homo sapiens
  misc_RNA (1)...(19): siRNA sense strand
cugaugacuuacugugaug

SEQ ID NO: 410484 - RNA, 19 nt, Homo sapiens
  misc_RNA (1)...(19): siRNA sense strand
gaagaaaccuugaagaaag

SEQ ID NO: 410485 - RNA, 19 nt, Homo sapiens
  misc_RNA (1)...(19): siRNA sense strand
gaaggaaggugauacaaug

SEQ ID NO: 410486 - RNA, 19 nt, Homo sapiens
  misc_RNA (1)...(19): siRNA sense strand
gaagaaauuuggaaggauu

SEQ ID NO: 410487 - RNA, 19 nt, Homo sapiens
  misc_RNA (1)...(19): siRNA sense strand
ggagccaucucuacauaua

SEQ ID NO: 410488 - RNA, 19 nt, Homo sapiens
  misc_RNA (1)...(19): siRNA sense strand
gagaaacagugaugguuaa

SEQ ID NO: 410489 - RNA, 19 nt, Homo sapiens
  misc_RNA (1)...(19): siRNA sense strand
uaauguagguggagaguuu

SEQ ID NO: 410490 - RNA, 19 nt, Homo sapiens
  misc_RNA (1)...(19): siRNA sense strand
ggagaaacagugaugguua

SEQ ID NO: 410491 - RNA, 19 nt, Homo sapiens
  misc_RNA (1)...(19): siRNA sense strand
gauuugaugucgucuuuaa

SEQ ID NO: 410492 - RNA, 19 nt, Homo sapiens
  misc_RNA (1)...(19): siRNA sense strand
ccaaaguuguggaaaguaa

SEQ ID NO: 410493 - RNA, 19 nt, Homo sapiens
  misc_RNA (1)...(19): siRNA sense strand
ggaagaaaccuugaagaaa

SEQ ID NO: 410494 - RNA, 19 nt, Homo sapiens
  misc_RNA (1)...(19): siRNA sense strand
ggacaacgcacuccauuuc

SEQ ID NO: 410495 - RNA, 19 nt, Homo sapiens
  misc_RNA (1)...(19): siRNA sense strand
caaaguuguuggagcagua

SEQ ID NO: 410496 - RNA, 19 nt, Homo sapiens
  misc_RNA (1)...(19): siRNA sense strand
gcaguagggucugaugaaa

SEQ ID NO: 410497 - RNA, 19 nt, Homo sapiens
  misc_RNA (1)...(19): siRNA sense strand
gaagaaagcgucuccugau

SEQ ID NO: 410498 - RNA, 19 nt, Homo sapiens
  misc_RNA (1)...(19): siRNA sense strand
ggaaggugauacaaugaug

SEQ ID NO: 410499 - RNA, 19 nt, Homo sapiens
  misc_RNA (1)...(19): siRNA sense strand
gaaagcgucuccugauggu

SEQ ID NO: 410500 - RNA, 19 nt, Homo sapiens
  misc_RNA (1)...(19): siRNA sense strand
guggagccaucucuacaua

SEQ ID NO: 410501 - RNA, 19 nt, Homo sapiens
  misc_RNA (1)...(19): siRNA sense strand
ugaaggacuugcugaaaug

SEQ ID NO: 410502 - RNA, 19 nt, Homo sapiens
  misc_RNA (1)...(19): siRNA sense strand
gcugaaaggagauaauuug

SEQ ID NO: 410503 - RNA, 19 nt, Homo sapiens
  misc_RNA (1)...(19): siRNA sense strand
ggaaagaucuggaaaagcu

SEQ ID NO: 410504 - RNA, 19 nt, Homo sapiens
  misc_RNA (1)...(19): siRNA sense strand
gcucaagggcugcaaaguu

SEQ ID NO: 410505 - RNA, 19 nt, Homo sapiens
  misc_RNA (1)...(19): siRNA sense strand
gcaaguggccaaaguugug

SEQ ID NO: 410506 - RNA, 19 nt, Homo sapiens
  misc_RNA (1)...(19): siRNA sense strand
gaagcacuuuguuggcuau

SEQ ID NO: 410507 - RNA, 19 nt, Homo sapiens
  misc_RNA (1)...(19): siRNA sense strand
aaacagugaugguuaaugc

SEQ ID NO: 410508 - RNA, 19 nt, Homo sapiens
  misc_RNA (1)...(19): siRNA sense strand
ugaaaucuguggugugaag

SEQ ID NO: 410509 - RNA, 19 nt, Homo sapiens
  misc_RNA (1)...(19): siRNA sense strand
cucaagggcugcaaaguug

SEQ ID NO: 410510 - RNA, 19 nt, Homo sapiens
  misc_RNA (1)...(19): siRNA sense strand
agacauggacccugaagaa

SEQ ID NO: 410511 - RNA, 19 nt, Homo sapiens
  misc_RNA (1)...(19): siRNA sense strand
ggagagguccugcuugaag

SEQ ID NO: 410512 - RNA, 19 nt, Homo sapiens
  misc_RNA (1)...(19): siRNA sense strand
ggaagacaauagugaaagc

SEQ ID NO: 410513 - RNA, 19 nt, Homo sapiens
  misc_RNA (1)...(19): siRNA sense strand
uggauuugaugucgucuuu

SEQ ID NO: 410514 - RNA, 19 nt, Homo sapiens
  misc_RNA (1)...(19): siRNA sense strand
gacaauagugaaagcauga

SEQ ID NO: 410515 - RNA, 19 nt, Homo sapiens
  misc_RNA (1)...(19): siRNA sense strand
cuugaaaucugugguguga

SEQ ID NO: 410516 - RNA, 19 nt, Homo sapiens
  misc_RNA (1)...(19): siRNA sense strand
cugaaggacuugcugaaau

SEQ ID NO: 410517 - RNA, 19 nt, Homo sapiens
  misc_RNA (1)...(19): siRNA sense strand
gaugucgucuuuaacuaca

SEQ ID NO: 410518 - RNA, 19 nt, Homo sapiens
  misc_RNA (1)...(19): siRNA sense strand
caacgcacuccauuucuga

SEQ ID NO: 410519 - RNA, 19 nt, Homo sapiens
  misc_RNA (1)...(19): siRNA sense strand
ggccaaaguuguggaaagu

SEQ ID NO: 410520 - RNA, 19 nt, Homo sapiens
  misc_RNA (1)...(19): siRNA sense strand
aagcgucuccugaugguua

SEQ ID NO: 410521 - RNA, 19 nt, Homo sapiens
  misc_RNA (1)...(19): siRNA sense strand
uggaagaaaccuugaagaa

SEQ ID NO: 410522 - RNA, 19 nt, Homo sapiens
  misc_RNA (1)...(19): siRNA sense strand
uaauagugacuuugaguug

SEQ ID NO: 410523 - RNA, 19 nt, Homo sapiens
  misc_RNA (1)...(19): siRNA sense strand
aagaaagcgucuccugaug

SEQ ID NO: 410524 - RNA, 19 nt, Homo sapiens
  misc_RNA (1)...(19): siRNA sense strand
uggaaaagcugcugacaga

SEQ ID NO: 410525 - RNA, 19 nt, Homo sapiens
  misc_RNA (1)...(19): siRNA sense strand
aauagugacuuugaguuga

SEQ ID NO: 410526 - RNA, 19 nt, Homo sapiens
  misc_RNA (1)...(19): siRNA sense strand
acacaauaccacugucuuu

SEQ ID NO: 410527 - RNA, 19 nt, Homo sapiens
  misc_RNA (1)...(19): siRNA sense strand
gcagcaaguggccaaaguu

SEQ ID NO: 410528 - RNA, 19 nt, Homo sapiens
  misc_RNA (1)...(19): siRNA sense strand
ggaaugcugaaaggagaua

SEQ ID NO: 410529 - RNA, 19 nt, Homo sapiens
  misc_RNA (1)...(19): siRNA sense strand
caccguggaucccuacaug

SEQ ID NO: 410530 - RNA, 19 nt, Homo sapiens
  misc_RNA (1)...(19): siRNA sense strand
gaaacagugaugguuaaug

SEQ ID NO: 410531 - RNA, 19 nt, Homo sapiens
  misc_RNA (1)...(19): siRNA sense strand
ugugaaggguggagaaaca

SEQ ID NO: 410532 - RNA, 19 nt, Homo sapiens
  misc_RNA (1)...(19): siRNA sense strand
ggaaggauugccauaugug

SEQ ID NO: 410533 - RNA, 19 nt, Homo sapiens
  misc_RNA (1)...(19): siRNA sense strand
cauggacccugaagaagca

SEQ ID NO: 410534 - RNA, 19 nt, Homo sapiens
  misc_RNA (1)...(19): siRNA sense strand
uuuguuggcuauccuacua

SEQ ID NO: 410535 - RNA, 19 nt, Homo sapiens
  misc_RNA (1)...(19): siRNA sense strand
ucggccagaugaagaaauu

SEQ ID NO: 410536 - RNA, 19 nt, Homo sapiens
  misc_RNA (1)...(19): siRNA sense strand
gagccaucucuacauauaa

SEQ ID NO: 410537 - RNA, 19 nt, Homo sapiens
  misc_RNA (1)...(19): siRNA sense strand
gacgguagagucuuuggaa

SEQ ID NO: 410538 - RNA, 19 nt, Homo sapiens
  misc_RNA (1)...(19): siRNA sense strand
uggaaggauugccauaugu

SEQ ID NO: 410539 - RNA, 19 nt, Homo sapiens
  misc_RNA (1)...(19): siRNA sense strand
agaguggccagacacaaua

SEQ ID NO: 410540 - RNA, 19 nt, Homo sapiens
  misc_RNA (1)...(19): siRNA sense strand
ugaagaaauuuggaaggau

SEQ ID NO: 410541 - RNA, 19 nt, Homo sapiens
  misc_RNA (1)...(19): siRNA sense strand
gagcaguagggucugauga

SEQ ID NO: 410542 - RNA, 19 nt, Homo sapiens
  misc_RNA (1)...(19): siRNA sense strand
caaaguuguggaaaguaaa

SEQ ID NO: 410543 - RNA, 19 nt, Homo sapiens
  misc_RNA (1)...(19): siRNA sense strand
ugaaggaaggugauacaau

SEQ ID NO: 410544 - RNA, 19 nt, Homo sapiens
  misc_RNA (1)...(19): siRNA sense strand
auagugacuuugaguugaa

SEQ ID NO: 410545 - RNA, 19 nt, Homo sapiens
  misc_RNA (1)...(19): siRNA sense strand
aaaaggaacuauuguacug

SEQ ID NO: 410546 - RNA, 19 nt, Homo sapiens
  misc_RNA (1)...(19): siRNA sense strand
ggcagcaaguggccaaagu

SEQ ID NO: 410547 - RNA, 19 nt, Homo sapiens
  misc_RNA (1)...(19): siRNA sense strand
ggccagaugaagaaauuug

SEQ ID NO: 410548 - RNA, 19 nt, Homo sapiens
  misc_RNA (1)...(19): siRNA sense strand
ggagauaauuuggggaaga

SEQ ID NO: 410549 - RNA, 19 nt, Homo sapiens
  misc_RNA (1)...(19): siRNA sense strand
auggagagguccugcuuga

SEQ ID NO: 410550 - RNA, 19 nt, Homo sapiens
  misc_RNA (1)...(19): siRNA sense strand
ggaauauaucauugaagga

SEQ ID NO: 410551 - RNA, 19 nt, Homo sapiens
  misc_RNA (1)...(19): siRNA sense strand
uuggaaggauugccauaug

SEQ ID NO: 410552 - RNA, 19 nt, Homo sapiens
  misc_RNA (1)...(19): siRNA sense strand
cagcaaguggccaaaguug

SEQ ID NO: 410553 - RNA, 19 nt, Homo sapiens
  misc_RNA (1)...(19): siRNA sense strand
acaacgcacuccauuucug

SEQ ID NO: 410554 - RNA, 19 nt, Homo sapiens
  misc_RNA (1)...(19): siRNA sense strand
ucaggagcuucgcauggaa

SEQ ID NO: 410555 - RNA, 19 nt, Homo sapiens
  misc_RNA (1)...(19): siRNA sense strand
cagaguggccagacacaau

SEQ ID NO: 410556 - RNA, 19 nt, Homo sapiens
  misc_RNA (1)...(19): siRNA sense strand
gaugggaaagaucuggaaa

SEQ ID NO: 410557 - RNA, 19 nt, Homo sapiens
  misc_RNA (1)...(19): siRNA sense strand
ugaaggauuugaaaacaug

SEQ ID NO: 410558 - RNA, 19 nt, Homo sapiens
  misc_RNA (1)...(19): siRNA sense strand
gaaaagcugcugacagagu

SEQ ID NO: 410559 - RNA, 19 nt, Homo sapiens
  misc_RNA (1)...(19): siRNA sense strand
augaagaaauuuggaagga

SEQ ID NO: 410560 - RNA, 19 nt, Homo sapiens
  misc_RNA (1)...(19): siRNA sense strand
cagaugaagaaauuuggaa

SEQ ID NO: 410561 - RNA, 19 nt, Homo sapiens
  misc_RNA (1)...(19): siRNA sense strand
uugaugucgucuuuaacua

SEQ ID NO: 410562 - RNA, 19 nt, Homo sapiens
  misc_RNA (1)...(19): siRNA sense strand
cuaauagugacuuugaguu

SEQ ID NO: 410563 - RNA, 19 nt, Homo sapiens
  misc_RNA (1)...(19): siRNA sense strand
gaagacaauagugaaagca

SEQ ID NO: 410564 - RNA, 19 nt, Homo sapiens
  misc_RNA (1)...(19): siRNA sense strand
gcugaaaugggucuuagag

SEQ ID NO: 410565 - RNA, 19 nt, Homo sapiens
  misc_RNA (1)...(19): siRNA sense strand
gcacuuuguuggcuauccu

SEQ ID NO: 410566 - RNA, 19 nt, Homo sapiens
  misc_RNA (1)...(19): siRNA sense strand
cugaagaagcacuuuguug

SEQ ID NO: 410567 - RNA, 19 nt, Homo sapiens
  misc_RNA (1)...(19): siRNA sense strand
ggauuugaugucgucuuua

SEQ ID NO: 410568 - RNA, 19 nt, Homo sapiens
  misc_RNA (1)...(19): siRNA sense strand
caagggcugcaaaguuguu

SEQ ID NO: 410569 - RNA, 19 nt, Homo sapiens
  misc_RNA (1)...(19): siRNA sense strand
cuacuuuggccuacuugaa

SEQ ID NO: 410570 - RNA, 19 nt, Homo sapiens
  misc_RNA (1)...(19): siRNA sense strand
cacaauaccacugucuuug

SEQ ID NO: 410571 - RNA, 19 nt, Homo sapiens
  misc_RNA (1)...(19): siRNA sense strand
ccagacacaauaccacugu

SEQ ID NO: 410572 - RNA, 19 nt, Homo sapiens
  misc_RNA (1)...(19): siRNA sense strand
uacuuuggccuacuugaaa

SEQ ID NO: 410573 - RNA, 19 nt, Homo sapiens
  misc_RNA (1)...(19): siRNA sense strand
guuaucggccagaugaaga

SEQ ID NO: 410574 - RNA, 19 nt, Homo sapiens
  misc_RNA (1)...(19): siRNA sense strand
cugaugguuaugauuguua

SEQ ID NO: 410575 - RNA, 19 nt, Homo sapiens
  misc_RNA (1)...(19): siRNA sense strand
uggccuacuugaaaucugu

SEQ ID NO: 410576 - RNA, 19 nt, Homo sapiens
  misc_RNA (1)...(19): siRNA sense strand
gggaagacaauagugaaag

SEQ ID NO: 410577 - RNA, 19 nt, Homo sapiens
  misc_RNA (1)...(19): siRNA sense strand
aagaaaccuugaagaaagc

SEQ ID NO: 410578 - RNA, 19 nt, Homo sapiens
  misc_RNA (1)...(19): siRNA sense strand
gccaaaguuguggaaagua

SEQ ID NO: 410579 - RNA, 19 nt, Homo sapiens
  misc_RNA (1)...(19): siRNA sense strand
uccaguacaaggaauauau

SEQ ID NO: 410580 - RNA, 19 nt, Homo sapiens
  misc_RNA (1)...(19): siRNA sense strand
aaauccaguacaaggaaua

SEQ ID NO: 410581 - RNA, 19 nt, Homo sapiens
  misc_RNA (1)...(19): siRNA sense strand
gauaauguagguggagagu

SEQ ID NO: 410582 - RNA, 19 nt, Homo sapiens
  misc_RNA (1)...(19): siRNA sense strand
uggccaaaguuguggaaag

SEQ ID NO: 410583 - RNA, 19 nt, Homo sapiens
  misc_RNA (1)...(19): siRNA sense strand
ggagcaguagggucugaug

SEQ ID NO: 410584 - RNA, 19 nt, Homo sapiens
  misc_RNA (1)...(19): siRNA sense strand
gaagagguuucuaagauua

SEQ ID NO: 410585 - RNA, 19 nt, Homo sapiens
  misc_RNA (1)...(19): siRNA sense strand
gaaacagccugaugaagaa

SEQ ID NO: 410586 - RNA, 19 nt, Homo sapiens
  misc_RNA (1)...(19): siRNA sense strand
uaagagagcuccaguaauc

SEQ ID NO: 410587 - RNA, 19 nt, Homo sapiens
  misc_RNA (1)...(19): siRNA sense strand
gcaagaagauuguauuagu

SEQ ID NO: 410588 - RNA, 19 nt, Homo sapiens
  misc_RNA (1)...(19): siRNA sense strand
gagcauagcugaaucaaaa

SEQ ID NO: 410589 - RNA, 19 nt, Homo sapiens
  misc_RNA (1)...(19): siRNA sense strand
caaaggagcacagauguua

SEQ ID NO: 410590 - RNA, 19 nt, Homo sapiens
  misc_RNA (1)...(19): siRNA sense strand
gcacagauguuacgggaau

SEQ ID NO: 410591 - RNA, 19 nt, Homo sapiens
  misc_RNA (1)...(19): siRNA sense strand
gaacucaucccacgguuaa

SEQ ID NO: 410592 - RNA, 19 nt, Homo sapiens
  misc_RNA (1)...(19): siRNA sense strand
gggauaacauucaugcuaa

SEQ ID NO: 410593 - RNA, 19 nt, Homo sapiens
  misc_RNA (1)...(19): siRNA sense strand
gaagugagaccagaugaua

SEQ ID NO: 410594 - RNA, 19 nt, Homo sapiens
  misc_RNA (1)...(19): siRNA sense strand
ggaaguauccacauugaaa

SEQ ID NO: 410595 - RNA, 19 nt, Homo sapiens
  misc_RNA (1)...(19): siRNA sense strand
uaauuucccuucucugaua

SEQ ID NO: 410596 - RNA, 19 nt, Homo sapiens
  misc_RNA (1)...(19): siRNA sense strand
ggaggaagcugagcaacuu

SEQ ID NO: 410597 - RNA, 19 nt, Homo sapiens
  misc_RNA (1)...(19): siRNA sense strand
caagaacccugggccuuua

SEQ ID NO: 410598 - RNA, 19 nt, Homo sapiens
  misc_RNA (1)...(19): siRNA sense strand
ggaccagguuucucaguuu

SEQ ID NO: 410599 - RNA, 19 nt, Homo sapiens
  misc_RNA (1)...(19): siRNA sense strand
gaagauggcauaugugguu

SEQ ID NO: 410600 - RNA, 19 nt, Homo sapiens
  misc_RNA (1)...(19): siRNA sense strand
gaagagauguguggacuag

SEQ ID NO: 410601 - RNA, 19 nt, Homo sapiens
  misc_RNA (1)...(19): siRNA sense strand
acagauggcucuaaagcua

SEQ ID NO: 410602 - RNA, 19 nt, Homo sapiens
  misc_RNA (1)...(19): siRNA sense strand
ggacaauucuuuaugacau

SEQ ID NO: 410603 - RNA, 19 nt, Homo sapiens
  misc_RNA (1)...(19): siRNA sense strand
gcaguuacuugcugaucua

SEQ ID NO: 410604 - RNA, 19 nt, Homo sapiens
  misc_RNA (1)...(19): siRNA sense strand
gcagcacccucuuuaaaug

SEQ ID NO: 410605 - RNA, 19 nt, Homo sapiens
  misc_RNA (1)...(19): siRNA sense strand
ucacucggcucuccaauug

SEQ ID NO: 410606 - RNA, 19 nt, Homo sapiens
  misc_RNA (1)...(19): siRNA sense strand
ccaaaguuguuucuaaaga

SEQ ID NO: 410607 - RNA, 19 nt, Homo sapiens
  misc_RNA (1)...(19): siRNA sense strand
gcagaggaauugaaaccaa

SEQ ID NO: 410608 - RNA, 19 nt, Homo sapiens
  misc_RNA (1)...(19): siRNA sense strand
cgaagagguuucuaagauu

SEQ ID NO: 410609 - RNA, 19 nt, Homo sapiens
  misc_RNA (1)...(19): siRNA sense strand
uuagaaggcuccagaaaug

SEQ ID NO: 410610 - RNA, 19 nt, Homo sapiens
  misc_RNA (1)...(19): siRNA sense strand
acaaagagguauucaguuc

SEQ ID NO: 410611 - RNA, 19 nt, Homo sapiens
  misc_RNA (1)...(19): siRNA sense strand
guacaagauuugcagagaa

SEQ ID NO: 410612 - RNA, 19 nt, Homo sapiens
  misc_RNA (1)...(19): siRNA sense strand
aaacaugaauggagugaga

SEQ ID NO: 410613 - RNA, 19 nt, Homo sapiens
  misc_RNA (1)...(19): siRNA sense strand
cuaaagaaauuccaguaga

SEQ ID NO: 410614 - RNA, 19 nt, Homo sapiens
  misc_RNA (1)...(19): siRNA sense strand
ccaaggaaguauccacauu

SEQ ID NO: 410615 - RNA, 19 nt, Homo sapiens
  misc_RNA (1)...(19): siRNA sense strand
ugauaaagauggacauuca

SEQ ID NO: 410616 - RNA, 19 nt, Homo sapiens
  misc_RNA (1)...(19): siRNA sense strand
gagaaaagauguagugaug

SEQ ID NO: 410617 - RNA, 19 nt, Homo sapiens
  misc_RNA (1)...(19): siRNA sense strand
caagaagauuguauuagug

SEQ ID NO: 410618 - RNA, 19 nt, Homo sapiens
  misc_RNA (1)...(19): siRNA sense strand
aaacugauguacucuauag

SEQ ID NO: 410619 - RNA, 19 nt, Homo sapiens
  misc_RNA (1)...(19): siRNA sense strand
gaaugacaaucaaauacug

SEQ ID NO: 410620 - RNA, 19 nt, Homo sapiens
  misc_RNA (1)...(19): siRNA sense strand
ccacaagaaugacaaucaa

SEQ ID NO: 410621 - RNA, 19 nt, Homo sapiens
  misc_RNA (1)...(19): siRNA sense strand
gaucucaccuggauuggau

SEQ ID NO: 410622 - RNA, 19 nt, Homo sapiens
  misc_RNA (1)...(19): siRNA sense strand
aaacggaccacaagaauga

SEQ ID NO: 410623 - RNA, 19 nt, Homo sapiens
  misc_RNA (1)...(19): siRNA sense strand
gcaaacugaugaacagaca

SEQ ID NO: 410624 - RNA, 19 nt, Homo sapiens
  misc_RNA (1)...(19): siRNA sense strand
gagaauaugagauagaguu

SEQ ID NO: 410625 - RNA, 19 nt, Homo sapiens
  misc_RNA (1)...(19): siRNA sense strand
caaaggaugugguuauacu

SEQ ID NO: 410626 - RNA, 19 nt, Homo sapiens
  misc_RNA (1)...(19): siRNA sense strand
caggagaguuccagcguuu

SEQ ID NO: 410627 - RNA, 19 nt, Homo sapiens
  misc_RNA (1)...(19): siRNA sense strand
ucgaagagguuucuaagau

SEQ ID NO: 410628 - RNA, 19 nt, Homo sapiens
  misc_RNA (1)...(19): siRNA sense strand
ugaaaccaauggacacuga

SEQ ID NO: 410629 - RNA, 19 nt, Homo sapiens
  misc_RNA (1)...(19): siRNA sense strand
acaggacaauucuuuauga

SEQ ID NO: 410630 - RNA, 19 nt, Homo sapiens
  misc_RNA (1)...(19): siRNA sense strand
uaaagaaauuccaguagag

SEQ ID NO: 410631 - RNA, 19 nt, Homo sapiens
  misc_RNA (1)...(19): siRNA sense strand
cuacuacucugaccaagga

SEQ ID NO: 410632 - RNA, 19 nt, Homo sapiens
  misc_RNA (1)...(19): siRNA sense strand
cagaaugguugcaagaguu

SEQ ID NO: 410633 - RNA, 19 nt, Homo sapiens
  misc_RNA (1)...(19): siRNA sense strand
ugaaaucuaucaguaccua

SEQ ID NO: 410634 - RNA, 19 nt, Homo sapiens
  misc_RNA (1)...(19): siRNA sense strand
caacaggacaauucuuuau

SEQ ID NO: 410635 - RNA, 19 nt, Homo sapiens
  misc_RNA (1)...(19): siRNA sense strand
agaaacagccugaugaaga

SEQ ID NO: 410636 - RNA, 19 nt, Homo sapiens
  misc_RNA (1)...(19): siRNA sense strand
ugaaacugauguacucuau

SEQ ID NO: 410637 - RNA, 19 nt, Homo sapiens
  misc_RNA (1)...(19): siRNA sense strand
uaggagagccagaaacuuu

SEQ ID NO: 410638 - RNA, 19 nt, Homo sapiens
  misc_RNA (1)...(19): siRNA sense strand
uaaagcaaguguaguugau

SEQ ID NO: 410639 - RNA, 19 nt, Homo sapiens
  misc_RNA (1)...(19): siRNA sense strand
ugaaauuguugaagcgaaa

SEQ ID NO: 410640 - RNA, 19 nt, Homo sapiens
  misc_RNA (1)...(19): siRNA sense strand
uacaagauuugcagagaaa

SEQ ID NO: 410641 - RNA, 19 nt, Homo sapiens
  misc_RNA (1)...(19): siRNA sense strand
gcccaagucuccaucacaa

SEQ ID NO: 410642 - RNA, 19 nt, Homo sapiens
  misc_RNA (1)...(19): siRNA sense strand
agaugaagauggcauaugu

SEQ ID NO: 410643 - RNA, 19 nt, Homo sapiens
  misc_RNA (1)...(19): siRNA sense strand
gaagaaacggaccacaaga

SEQ ID NO: 410644 - RNA, 19 nt, Homo sapiens
  misc_RNA (1)...(19): siRNA sense strand
ggcgagagauguauucagu

SEQ ID NO: 410645 - RNA, 19 nt, Homo sapiens
  misc_RNA (1)...(19): siRNA sense strand
gcuaauuucccuucucuga

SEQ ID NO: 410646 - RNA, 19 nt, Homo sapiens
  misc_RNA (1)...(19): siRNA sense strand
cagccuggauuacugcuuu

SEQ ID NO: 410647 - RNA, 19 nt, Homo sapiens
  misc_RNA (1)...(19): siRNA sense strand
acuccuaccuccaaaguuu

SEQ ID NO: 410648 - RNA, 19 nt, Homo sapiens
  misc_RNA (1)...(19): siRNA sense strand
uauggaagaccuuggguua

SEQ ID NO: 410649 - RNA, 19 nt, Homo sapiens
  misc_RNA (1)...(19): siRNA sense strand
gcaaauaguaguguuguca

SEQ ID NO: 410650 - RNA, 19 nt, Homo sapiens
  misc_RNA (1)...(19): siRNA sense strand
guuacuugcugaucuauuc

SEQ ID NO: 410651 - RNA, 19 nt, Homo sapiens
  misc_RNA (1)...(19): siRNA sense strand
gaaacugauguacucuaua

SEQ ID NO: 410652 - RNA, 19 nt, Homo sapiens
  misc_RNA (1)...(19): siRNA sense strand
gaagauauugaaacugaug

SEQ ID NO: 410653 - RNA, 19 nt, Homo sapiens
  misc_RNA (1)...(19): siRNA sense strand
gaccuuggguuauggaaca

SEQ ID NO: 410654 - RNA, 19 nt, Homo sapiens
  misc_RNA (1)...(19): siRNA sense strand
gucccaaaguuguuucuaa

SEQ ID NO: 410655 - RNA, 19 nt, Homo sapiens
  misc_RNA (1)...(19): siRNA sense strand
ugaugggacuccuuuaguu

SEQ ID NO: 410656 - RNA, 19 nt, Homo sapiens
  misc_RNA (1)...(19): siRNA sense strand
agaaauguaugacgaugga

SEQ ID NO: 410657 - RNA, 19 nt, Homo sapiens
  misc_RNA (1)...(19): siRNA sense strand
gaaaauggcagaggaauug

SEQ ID NO: 410658 - RNA, 19 nt, Homo sapiens
  misc_RNA (1)...(19): siRNA sense strand
gaaacggaccacaagaaug

SEQ ID NO: 410659 - RNA, 19 nt, Homo sapiens
  misc_RNA (1)...(19): siRNA sense strand
gaccagguuucucaguuug

SEQ ID NO: 410660 - RNA, 19 nt, Homo sapiens
  misc_RNA (1)...(19): siRNA sense strand
ccuccaaaguuuauacuau

SEQ ID NO: 410661 - RNA, 19 nt, Homo sapiens
  misc_RNA (1)...(19): siRNA sense strand
caauggacacugauaaaga

SEQ ID NO: 410662 - RNA, 19 nt, Homo sapiens
  misc_RNA (1)...(19): siRNA sense strand
acaaucaaauacugaguga

SEQ ID NO: 410663 - RNA, 19 nt, Homo sapiens
  misc_RNA (1)...(19): siRNA sense strand
ccagaaaugggaauuaaau

SEQ ID NO: 410664 - RNA, 19 nt, Homo sapiens
  misc_RNA (1)...(19): siRNA sense strand
ccucaucaauacagcagua

SEQ ID NO: 410665 - RNA, 19 nt, Homo sapiens
  misc_RNA (1)...(19): siRNA sense strand
caaaggaagauccacagaa

SEQ ID NO: 410666 - RNA, 19 nt, Homo sapiens
  misc_RNA (1)...(19): siRNA sense strand
ggauaacauucaugcuaau

SEQ ID NO: 410667 - RNA, 19 nt, Homo sapiens
  misc_RNA (1)...(19): siRNA sense strand
guauccacauugaaacgua

SEQ ID NO: 410668 - RNA, 19 nt, Homo sapiens
  misc_RNA (1)...(19): siRNA sense strand
gccaaauggugacaaggaa

SEQ ID NO: 410669 - RNA, 19 nt, Homo sapiens
  misc_RNA (1)...(19): siRNA sense strand
ccaacaggacaauucuuua

SEQ ID NO: 410670 - RNA, 19 nt, Homo sapiens
  misc_RNA (1)...(19): siRNA sense strand
gaucuauucuaccuuccuu

SEQ ID NO: 410671 - RNA, 19 nt, Homo sapiens
  misc_RNA (1)...(19): siRNA sense strand
ggaaggauuuuauggaaga

SEQ ID NO: 410672 - RNA, 19 nt, Homo sapiens
  misc_RNA (1)...(19): siRNA sense strand
ccuggaggauuugcaguua

SEQ ID NO: 410673 - RNA, 19 nt, Homo sapiens
  misc_RNA (1)...(19): siRNA sense strand
cagugacccuggaggauuu

SEQ ID NO: 410674 - RNA, 19 nt, Homo sapiens
  misc_RNA (1)...(19): siRNA sense strand
gaagcugagcaacuuauga

SEQ ID NO: 410675 - RNA, 19 nt, Homo sapiens
  misc_RNA (1)...(19): siRNA sense strand
gcucuaaagcuagcauuaa

SEQ ID NO: 410676 - RNA, 19 nt, Homo sapiens
  misc_RNA (1)...(19): siRNA sense strand
guccacagauggcucuaaa

SEQ ID NO: 410677 - RNA, 19 nt, Homo sapiens
  misc_RNA (1)...(19): siRNA sense strand
gcuucuaccuggaauugaa

SEQ ID NO: 410678 - RNA, 19 nt, Homo sapiens
  misc_RNA (1)...(19): siRNA sense strand
caaggaaguauccacauug

SEQ ID NO: 410679 - RNA, 19 nt, Homo sapiens
  misc_RNA (1)...(19): siRNA sense strand
gccaacaggacaauucuuu

SEQ ID NO: 410680 - RNA, 19 nt, Homo sapiens
  misc_RNA (1)...(19): siRNA sense strand
gcagugaugaagauauuga

SEQ ID NO: 410681 - RNA, 19 nt, Homo sapiens
  misc_RNA (1)...(19): siRNA sense strand
ugaaggcagugaugaagau

SEQ ID NO: 410682 - RNA, 19 nt, Homo sapiens
  misc_RNA (1)...(19): siRNA sense strand
aaaggaagauccacagaac

SEQ ID NO: 410683 - RNA, 19 nt, Homo sapiens
  misc_RNA (1)...(19): siRNA sense strand
ucccaaaguuguuucuaaa

SEQ ID NO: 410684 - RNA, 19 nt, Homo sapiens
  misc_RNA (1)...(19): siRNA sense strand
ggccacagcuuucaaaucg

SEQ ID NO: 410685 - RNA, 19 nt, Homo sapiens
  misc_RNA (1)...(19): siRNA sense strand
gggagcagcaccucuacua

SEQ ID NO: 410686 - RNA, 19 nt, Homo sapiens
  misc_RNA (1)...(19): siRNA sense strand
gcagcaaacgggcauuguu

SEQ ID NO: 410687 - RNA, 19 nt, Homo sapiens
  misc_RNA (1)...(19): siRNA sense strand
cagcaaacgggcauuguug

SEQ ID NO: 410688 - RNA, 19 nt, Homo sapiens
  misc_RNA (1)...(19): siRNA sense strand
uaucacaccggccuccaua

SEQ ID NO: 410689 - RNA, 19 nt, Homo sapiens
  misc_RNA (1)...(19): siRNA sense strand
cauacuggaugcacuucug

SEQ ID NO: 410690 - RNA, 19 nt, Homo sapiens
  misc_RNA (1)...(19): siRNA sense strand
cgccauacccgcugaagga

SEQ ID NO: 410691 - RNA, 19 nt, Homo sapiens
  misc_RNA (1)...(19): siRNA sense strand
ggggcgacguggacaauaa

SEQ ID NO: 410692 - RNA, 19 nt, Homo sapiens
  misc_RNA (1)...(19): siRNA sense strand
cgacguggacaauaaugug

SEQ ID NO: 410693 - RNA, 19 nt, Homo sapiens
  misc_RNA (1)...(19): siRNA sense strand
ggaaguccccguaguggaa

SEQ ID NO: 410694 - RNA, 19 nt, Homo sapiens
  misc_RNA (1)...(19): siRNA sense strand
gaggagcccgugaacaucu

SEQ ID NO: 410695 - RNA, 19 nt, Homo sapiens
  misc_RNA (1)...(19): siRNA sense strand
ccauacgggccacagcuuu

SEQ ID NO: 410696 - RNA, 19 nt, Homo sapiens
  misc_RNA (1)...(19): siRNA sense strand
uggaggagcccgugaacau

SEQ ID NO: 410697 - RNA, 19 nt, Homo sapiens
  misc_RNA (1)...(19): siRNA sense strand
ggaggagcccgugaacauc

SEQ ID NO: 410698 - RNA, 19 nt, Homo sapiens
  misc_RNA (1)...(19): siRNA sense strand
aaccggacaucaaggaucu

SEQ ID NO: 410699 - RNA, 19 nt, Homo sapiens
  misc_RNA (1)...(19): siRNA sense strand
caucgugcacccacaguuc

SEQ ID NO: 410700 - RNA, 19 nt, Homo sapiens
  misc_RNA (1)...(19): siRNA sense strand
gggccacagcuuucaaauc

SEQ ID NO: 410701 - RNA, 19 nt, Homo sapiens
  misc_RNA (1)...(19): siRNA sense strand
ccacugugaucaacuacua

SEQ ID NO: 410702 - RNA, 19 nt, Homo sapiens
  misc_RNA (1)...(19): siRNA sense strand
agacguagcugaagucaca

SEQ ID NO: 410703 - RNA, 19 nt, Homo sapiens
  misc_RNA (1)...(19): siRNA sense strand
ggucucacaucuccacuga

SEQ ID NO: 410704 - RNA, 19 nt, Homo sapiens
  misc_RNA (1)...(19): siRNA sense strand
gccaggagauuucaaccaa

SEQ ID NO: 410705 - RNA, 19 nt, Homo sapiens
  misc_RNA (1)...(19): siRNA sense strand
acaucaagcugacauauca

SEQ ID NO: 410706 - RNA, 19 nt, Homo sapiens
  misc_RNA (1)...(19): siRNA sense strand
gcagaagcaugcuaagaac

SEQ ID NO: 410707 - RNA, 19 nt, Homo sapiens
  misc_RNA (1)...(19): siRNA sense strand
caacagugcagcccaguga

SEQ ID NO: 410708 - RNA, 19 nt, Homo sapiens
  misc_RNA (1)...(19): siRNA sense strand
gaagacgggcagaagauga

SEQ ID NO: 410709 - RNA, 19 nt, Homo sapiens
  misc_RNA (1)...(19): siRNA sense strand
ggcagaagcaugcuaagaa

SEQ ID NO: 410710 - RNA, 19 nt, Homo sapiens
  misc_RNA (1)...(19): siRNA sense strand
caagcugacauaucaagua

SEQ ID NO: 410711 - RNA, 19 nt, Homo sapiens
  misc_RNA (1)...(19): siRNA sense strand
ggagaagacgggcagaaga

SEQ ID NO: 410712 - RNA, 19 nt, Homo sapiens
  misc_RNA (1)...(19): siRNA sense strand
uauaugggcuggccuugga

SEQ ID NO: 410713 - RNA, 19 nt, Homo sapiens
  misc_RNA (1)...(19): siRNA sense strand
ggaggcagaagcaugcuaa

SEQ ID NO: 410714 - RNA, 19 nt, Homo sapiens
  misc_RNA (1)...(19): siRNA sense strand
cggaagaggugguauugca

SEQ ID NO: 410715 - RNA, 19 nt, Homo sapiens
  misc_RNA (1)...(19): siRNA sense strand
agcaaguccuggauaauuu

SEQ ID NO: 410716 - RNA, 19 nt, Homo sapiens
  misc_RNA (1)...(19): siRNA sense strand
cagcaaguccuggauaauu

SEQ ID NO: 410717 - RNA, 19 nt, Homo sapiens
  misc_RNA (1)...(19): siRNA sense strand
gagaagacgggcagaagau

SEQ ID NO: 410718 - RNA, 19 nt, Homo sapiens
  misc_RNA (1)...(19): siRNA sense strand
aagcugacauaucaaguau

SEQ ID NO: 410719 - RNA, 19 nt, Homo sapiens
  misc_RNA (1)...(19): siRNA sense strand
cauaccaucuauucagaga

SEQ ID NO: 410720 - RNA, 19 nt, Homo sapiens
  misc_RNA (1)...(19): siRNA sense strand
ccggauggaugcagaagug

SEQ ID NO: 410721 - RNA, 19 nt, Homo sapiens
  misc_RNA (1)...(19): siRNA sense strand
ugugguggauggcaacgua

SEQ ID NO: 410722 - RNA, 19 nt, Homo sapiens
  misc_RNA (1)...(19): siRNA sense strand
guccacaccuucucucaca

SEQ ID NO: 410723 - RNA, 19 nt, Homo sapiens
  misc_RNA (1)...(19): siRNA sense strand
ggaccuaccauggagaaga

SEQ ID NO: 410724 - RNA, 19 nt, Homo sapiens
  misc_RNA (1)...(19): siRNA sense strand
ggaccuguauggguuccaa

SEQ ID NO: 410725 - RNA, 19 nt, Homo sapiens
  misc_RNA (1)...(19): siRNA sense strand
caccuucucucacaucaag

SEQ ID NO: 410726 - RNA, 19 nt, Homo sapiens
  misc_RNA (1)...(19): siRNA sense strand
gcaaguccuggauaauuuc

SEQ ID NO: 410727 - RNA, 19 nt, Homo sapiens
  misc_RNA (1)...(19): siRNA sense strand
aguccuggauaauuucuuu

SEQ ID NO: 410728 - RNA, 19 nt, Homo sapiens
  misc_RNA (1)...(19): siRNA sense strand
aaacgggaccuaccaugga

SEQ ID NO: 410729 - RNA, 19 nt, Homo sapiens
  misc_RNA (1)...(19): siRNA sense strand
gggcagaagaugagaugga

SEQ ID NO: 410730 - RNA, 19 nt, Homo sapiens
  misc_RNA (1)...(19): siRNA sense strand
agacccagguugccacugu

SEQ ID NO: 410731 - RNA, 19 nt, Homo sapiens
  misc_RNA (1)...(19): siRNA sense strand
gaccuaccauggagaagac

SEQ ID NO: 410732 - RNA, 19 nt, Homo sapiens
  misc_RNA (1)...(19): siRNA sense strand
gaagcaugcuaagaacaac

SEQ ID NO: 410733 - RNA, 19 nt, Homo sapiens
  misc_RNA (1)...(19): siRNA sense strand
ccaagcagccauggagcua

SEQ ID NO: 410734 - RNA, 19 nt, Homo sapiens
  misc_RNA (1)...(19): siRNA sense strand
uggaggaggugaaucaacu

SEQ ID NO: 410735 - RNA, 19 nt, Homo sapiens
  misc_RNA (1)...(19): siRNA sense strand
agaagcaugcuaagaacaa

SEQ ID NO: 410736 - RNA, 19 nt, Homo sapiens
  misc_RNA (1)...(19): siRNA sense strand
uggcaggacugugggaguu

SEQ ID NO: 410737 - RNA, 19 nt, Homo sapiens
  misc_RNA (1)...(19): siRNA sense strand
gaaggugguagaggagcua

SEQ ID NO: 410738 - RNA, 19 nt, Homo sapiens
  misc_RNA (1)...(19): siRNA sense strand
aggccucugucuccucaua

SEQ ID NO: 410739 - RNA, 19 nt, Homo sapiens
  misc_RNA (1)...(19): siRNA sense strand
gaaguggucacaggaagca

SEQ ID NO: 410740 - RNA, 19 nt, Homo sapiens
  misc_RNA (1)...(19): siRNA sense strand
ugacgcaggaggaauuuca

SEQ ID NO: 410741 - RNA, 19 nt, Homo sapiens
  misc_RNA (1)...(19): siRNA sense strand
cccagcagcacccuuguuu

SEQ ID NO: 410742 - RNA, 19 nt, Homo sapiens
  misc_RNA (1)...(19): siRNA sense strand
ggccugggcuacuauucuc

SEQ ID NO: 410743 - RNA, 19 nt, Homo sapiens
  misc_RNA (1)...(19): siRNA sense strand
cauugccucuaucgccuuu

SEQ ID NO: 410744 - RNA, 19 nt, Homo sapiens
  misc_RNA (1)...(19): siRNA sense strand
ucacaucaagcugacauau

SEQ ID NO: 410745 - RNA, 19 nt, Homo sapiens
  misc_RNA (1)...(19): siRNA sense strand
cucauaccaucuauucaga

SEQ ID NO: 410746 - RNA, 19 nt, Homo sapiens
  misc_RNA (1)...(19): siRNA sense strand
uugccacugugaucaacua

SEQ ID NO: 410747 - RNA, 19 nt, Homo sapiens
  misc_RNA (1)...(19): siRNA sense strand
cuacacagcuggggccauu

SEQ ID NO: 410748 - RNA, 19 nt, Homo sapiens
  misc_RNA (1)...(19): siRNA sense strand
gagaaacgggaccuaccau

SEQ ID NO: 410749 - RNA, 19 nt, Homo sapiens
  misc_RNA (1)...(19): siRNA sense strand
ugugggccaucaugaggaa

SEQ ID NO: 410750 - RNA, 19 nt, Homo sapiens
  misc_RNA (1)...(19): siRNA sense strand
ccaagccuucugccuguga

SEQ ID NO: 410751 - RNA, 19 nt, Homo sapiens
  misc_RNA (1)...(19): siRNA sense strand
gccggaagaggugguauug

SEQ ID NO: 410752 - RNA, 19 nt, Homo sapiens
  misc_RNA (1)...(19): siRNA sense strand
ccagagaguggagcaggaa

SEQ ID NO: 410753 - RNA, 19 nt, Homo sapiens
  misc_RNA (1)...(19): siRNA sense strand
gagcucggaaggugguaga

SEQ ID NO: 410754 - RNA, 19 nt, Homo sapiens
  misc_RNA (1)...(19): siRNA sense strand
cagaagagcugaucaaguc

SEQ ID NO: 410755 - RNA, 19 nt, Homo sapiens
  misc_RNA (1)...(19): siRNA sense strand
ucaagaagcuggaggucaa

SEQ ID NO: 410756 - RNA, 19 nt, Homo sapiens
  misc_RNA (1)...(19): siRNA sense strand
gagaagacgcgccucaaga

SEQ ID NO: 410757 - RNA, 19 nt, Homo sapiens
  misc_RNA (1)...(19): siRNA sense strand
gcaagcugcuggagaaggu

SEQ ID NO: 410758 - RNA, 19 nt, Homo sapiens
  misc_RNA (1)...(19): siRNA sense strand
ggacgaagcgguggagguu

SEQ ID NO: 410759 - RNA, 19 nt, Homo sapiens
  misc_RNA (1)...(19): siRNA sense strand
gcgagaaccuggagaagac

SEQ ID NO: 410760 - RNA, 19 nt, Homo sapiens
  misc_RNA (1)...(19): siRNA sense strand
ccaaggagaagauggagaa

SEQ ID NO: 410761 - RNA, 19 nt, Homo sapiens
  misc_RNA (1)...(19): siRNA sense strand
caagagcgacagcgacuga

SEQ ID NO: 410762 - RNA, 19 nt, Homo sapiens
  misc_RNA (1)...(19): siRNA sense strand
gcaauacggugagcaagcu

SEQ ID NO: 410763 - RNA, 19 nt, Homo sapiens
  misc_RNA (1)...(19): siRNA sense strand
gcucaaggccaccgagaug

SEQ ID NO: 410764 - RNA, 19 nt, Homo sapiens
  misc_RNA (1)...(19): siRNA sense strand
acgaagcgguggagguuga

SEQ ID NO: 410765 - RNA, 19 nt, Homo sapiens
  misc_RNA (1)...(19): siRNA sense strand
ggagaagacgcgccucaag

SEQ ID NO: 410766 - RNA, 19 nt, Homo sapiens
  misc_RNA (1)...(19): siRNA sense strand
agacgucgcgggacaaguu

SEQ ID NO: 410767 - RNA, 19 nt, Homo sapiens
  misc_RNA (1)...(19): siRNA sense strand
gggacaaguugcgcaaauc

SEQ ID NO: 410768 - RNA, 19 nt, Homo sapiens
  misc_RNA (1)...(19): siRNA sense strand
gaucuaccaggaugaagug

SEQ ID NO: 410769 - RNA, 19 nt, Homo sapiens
  misc_RNA (1)...(19): siRNA sense strand
uggagaagcgcaugaacaa

SEQ ID NO: 410770 - RNA, 19 nt, Homo sapiens
  misc_RNA (1)...(19): siRNA sense strand
cuaccaggaugaagugaag

SEQ ID NO: 410771 - RNA, 19 nt, Homo sapiens
  misc_RNA (1)...(19): siRNA sense strand
agacgcgccucaagaccaa

SEQ ID NO: 410772 - RNA, 19 nt, Homo sapiens
  misc_RNA (1)...(19): siRNA sense strand
cgggacaaguugcgcaaau

SEQ ID NO: 410773 - RNA, 19 nt, Homo sapiens
  misc_RNA (1)...(19): siRNA sense strand
uuaaagucaugaucuacca

SEQ ID NO: 410774 - RNA, 19 nt, Homo sapiens
  misc_RNA (1)...(19): siRNA sense strand
aggagaagauggagaagac

SEQ ID NO: 410775 - RNA, 19 nt, Homo sapiens
  misc_RNA (1)...(19): siRNA sense strand
gguggagguugaggagguu

SEQ ID NO: 410776 - RNA, 19 nt, Homo sapiens
  misc_RNA (1)...(19): siRNA sense strand
ggagguugaggagguuauu

SEQ ID NO: 410777 - RNA, 19 nt, Homo sapiens
  misc_RNA (1)...(19): siRNA sense strand
gcgcguggacgacuucaag

SEQ ID NO: 410778 - RNA, 19 nt, Homo sapiens
  misc_RNA (1)...(19): siRNA sense strand
ucaagucggaccaggugaa

SEQ ID NO: 410779 - RNA, 19 nt, Homo sapiens
  misc_RNA (1)...(19): siRNA sense strand
ggacaaguugcgcaaaucc

SEQ ID NO: 410780 - RNA, 19 nt, Homo sapiens
  misc_RNA (1)...(19): siRNA sense strand
gcguggacgacuucaagaa

SEQ ID NO: 410781 - RNA, 19 nt, Homo sapiens
  misc_RNA (1)...(19): siRNA sense strand
cgagcaauacggugagcaa

SEQ ID NO: 410782 - RNA, 19 nt, Homo sapiens
  misc_RNA (1)...(19): siRNA sense strand
acaaguugcgcaaauccuu

SEQ ID NO: 410783 - RNA, 19 nt, Homo sapiens
  misc_RNA (1)...(19): siRNA sense strand
gaagacgucgcgggacaag

SEQ ID NO: 410784 - RNA, 19 nt, Homo sapiens
  misc_RNA (1)...(19): siRNA sense strand
uggagaaggugcgcaaggu

SEQ ID NO: 410785 - RNA, 19 nt, Homo sapiens
  misc_RNA (1)...(19): siRNA sense strand
gcacaggcaucaaguucua

SEQ ID NO: 410786 - RNA, 19 nt, Homo sapiens
  misc_RNA (1)...(19): siRNA sense strand
cagcagagguuguccauga

SEQ ID NO: 410787 - RNA, 19 nt, Homo sapiens
  misc_RNA (1)...(19): siRNA sense strand
gaccucaccugcuuaauug

SEQ ID NO: 410788 - RNA, 19 nt, Homo sapiens
  misc_RNA (1)...(19): siRNA sense strand
ccacuguccuguccauuga

SEQ ID NO: 410789 - RNA, 19 nt, Homo sapiens
  misc_RNA (1)...(19): siRNA sense strand
ggccgacgcucuucagcua

SEQ ID NO: 410790 - RNA, 19 nt, Homo sapiens
  misc_RNA (1)...(19): siRNA sense strand
gccauugucugcaacuuug

SEQ ID NO: 410791 - RNA, 19 nt, Homo sapiens
  misc_RNA (1)...(19): siRNA sense strand
gcuggugucugacuucuuc

SEQ ID NO: 410792 - RNA, 19 nt, Homo sapiens
  misc_RNA (1)...(19): siRNA sense strand
gaggaacuuuggaggaaau

SEQ ID NO: 410793 - RNA, 19 nt, Homo sapiens
  misc_RNA (1)...(19): siRNA sense strand
gaacuuuggaggaaauugu

SEQ ID NO: 410794 - RNA, 19 nt, Homo sapiens
  misc_RNA (1)...(19): siRNA sense strand
ccagggcugugucuccuuu

SEQ ID NO: 410795 - RNA, 19 nt, Homo sapiens
  misc_RNA (1)...(19): siRNA sense strand
ccaagaggcugcguguugu

SEQ ID NO: 410796 - RNA, 19 nt, Homo sapiens
  misc_RNA (1)...(19): siRNA sense strand
ugaccucaccugcuuaauu

SEQ ID NO: 410797 - RNA, 19 nt, Homo sapiens
  misc_RNA (1)...(19): siRNA sense strand
caggaguucugucucuuug

SEQ ID NO: 410798 - RNA, 19 nt, Homo sapiens
  misc_RNA (1)...(19): siRNA sense strand
ccacggagcugggcaucau

SEQ ID NO: 410799 - RNA, 19 nt, Homo sapiens
  misc_RNA (1)...(19): siRNA sense strand
ggaacgacuuucagauggu

SEQ ID NO: 410800 - RNA, 19 nt, Homo sapiens
  misc_RNA (1)...(19): siRNA sense strand
ggugcaagcuuggguguca

SEQ ID NO: 410801 - RNA, 19 nt, Homo sapiens
  misc_RNA (1)...(19): siRNA sense strand
caacgguucccuugauuuc

SEQ ID NO: 410802 - RNA, 19 nt, Homo sapiens
  misc_RNA (1)...(19): siRNA sense strand
gaccugggcuguggugcaa

SEQ ID NO: 410803 - RNA, 19 nt, Homo sapiens
  misc_RNA (1)...(19): siRNA sense strand
cgacgcucuucagcuauua

SEQ ID NO: 410804 - RNA, 19 nt, Homo sapiens
  misc_RNA (1)...(19): siRNA sense strand
aagcuugggugucaucuca

SEQ ID NO: 410805 - RNA, 19 nt, Homo sapiens
  misc_RNA (1)...(19): siRNA sense strand
gcaucaaguucuacuccau

SEQ ID NO: 410806 - RNA, 19 nt, Homo sapiens
  misc_RNA (1)...(19): siRNA sense strand
caucagcaguggccuggau

SEQ ID NO: 410807 - RNA, 19 nt, Homo sapiens
  misc_RNA (1)...(19): siRNA sense strand
gagcugggaacgacuuuca

SEQ ID NO: 410808 - RNA, 19 nt, Homo sapiens
  misc_RNA (1)...(19): siRNA sense strand
ggaguucugucucuuugcu

SEQ ID NO: 410809 - RNA, 19 nt, Homo sapiens
  misc_RNA (1)...(19): siRNA sense strand
ucaccucccuuaccuguac

SEQ ID NO: 410810 - RNA, 19 nt, Homo sapiens
  misc_RNA (1)...(19): siRNA sense strand
ccgacgcucuucagcuauu

SEQ ID NO: 410811 - RNA, 19 nt, Homo sapiens
  misc_RNA (1)...(19): siRNA sense strand
gagcucagccugguguaug

SEQ ID NO: 410812 - RNA, 19 nt, Homo sapiens
  misc_RNA (1)...(19): siRNA sense strand
gaugucaccucccuuaccu

SEQ ID NO: 410813 - RNA, 19 nt, Homo sapiens
  misc_RNA (1)...(19): siRNA sense strand
cccaagaggcugcguguug

SEQ ID NO: 410814 - RNA, 19 nt, Homo sapiens
  misc_RNA (1)...(19): siRNA sense strand
cuucagcuauuacaacauc

SEQ ID NO: 410815 - RNA, 19 nt, Homo sapiens
  misc_RNA (1)...(19): siRNA sense strand
gacccugccuucuccaucu

SEQ ID NO: 410816 - RNA, 19 nt, Homo sapiens
  misc_RNA (1)...(19): siRNA sense strand
ucacacuggccaagaggua

SEQ ID NO: 410817 - RNA, 19 nt, Homo sapiens
  misc_RNA (1)...(19): siRNA sense strand
gcuugggugucaucucaga

SEQ ID NO: 410818 - RNA, 19 nt, Homo sapiens
  misc_RNA (1)...(19): siRNA sense strand
ccaggaguucugucucuuu

SEQ ID NO: 410819 - RNA, 19 nt, Homo sapiens
  misc_RNA (1)...(19): siRNA sense strand
ggacucgugcugccucuuc

SEQ ID NO: 410820 - RNA, 19 nt, Homo sapiens
  misc_RNA (1)...(19): siRNA sense strand
ggagcuagcagaccugaac

SEQ ID NO: 410821 - RNA, 19 nt, Homo sapiens
  misc_RNA (1)...(19): siRNA sense strand
caucaaguucuacuccauu

SEQ ID NO: 410822 - RNA, 19 nt, Homo sapiens
  misc_RNA (1)...(19): siRNA sense strand
ugaggaacuuuggaggaaa

SEQ ID NO: 410823 - RNA, 19 nt, Homo sapiens
  misc_RNA (1)...(19): siRNA sense strand
ggagagcugggaacgacuu

SEQ ID NO: 410824 - RNA, 19 nt, Homo sapiens
  misc_RNA (1)...(19): siRNA sense strand
cagcacaggcaucaaguuc

SEQ ID NO: 410825 - RNA, 19 nt, Homo sapiens
  misc_RNA (1)...(19): siRNA sense strand
uuaccgcucugguguucuu

SEQ ID NO: 410826 - RNA, 19 nt, Homo sapiens
  misc_RNA (1)...(19): siRNA sense strand
ggugugggacgccauugaa

SEQ ID NO: 410827 - RNA, 19 nt, Homo sapiens
  misc_RNA (1)...(19): siRNA sense strand
gcagcacaggcaucaaguu

SEQ ID NO: 410828 - RNA, 19 nt, Homo sapiens
  misc_RNA (1)...(19): siRNA sense strand
cauuaccgcucugguguuc

SEQ ID NO: 410829 - RNA, 19 nt, Homo sapiens
  misc_RNA (1)...(19): siRNA sense strand
gcacaccaagaacccauca

SEQ ID NO: 410830 - RNA, 19 nt, Homo sapiens
  misc_RNA (1)...(19): siRNA sense strand
uguaccaccuccuguguca

SEQ ID NO: 410831 - RNA, 19 nt, Homo sapiens
  misc_RNA (1)...(19): siRNA sense strand
gaggcugcguguugucuac

SEQ ID NO: 410832 - RNA, 19 nt, Homo sapiens
  misc_RNA (1)...(19): siRNA sense strand
aaacuacggggaccuguua

SEQ ID NO: 410833 - RNA, 19 nt, Homo sapiens
  misc_RNA (1)...(19): siRNA sense strand
ugucugacuucuuccuuca

SEQ ID NO: 410834 - RNA, 19 nt, Homo sapiens
  misc_RNA (1)...(19): siRNA sense strand
ggaggugugggacgccauu

SEQ ID NO: 410835 - RNA, 19 nt, Homo sapiens
  misc_RNA (1)...(19): siRNA sense strand
gcugggaacgacuuucaga

SEQ ID NO: 410836 - RNA, 19 nt, Homo sapiens
  misc_RNA (1)...(19): siRNA sense strand
uggcaccguugucuggauu

SEQ ID NO: 410837 - RNA, 19 nt, Homo sapiens
  misc_RNA (1)...(19): siRNA sense strand
ugacggaacagagcccauu

SEQ ID NO: 410838 - RNA, 19 nt, Homo sapiens
  misc_RNA (1)...(19): siRNA sense strand
ccaagaccacacacugaga

SEQ ID NO: 410839 - RNA, 19 nt, Homo sapiens
  misc_RNA (1)...(19): siRNA sense strand
guacagcagcagcgacaca

SEQ ID NO: 410840 - RNA, 19 nt, Homo sapiens
  misc_RNA (1)...(19): siRNA sense strand
cuuaauugacaccaacuuu

SEQ ID NO: 410841 - RNA, 19 nt, Homo sapiens
  misc_RNA (1)...(19): siRNA sense strand
auggagacgucacgcugua

SEQ ID NO: 410842 - RNA, 19 nt, Homo sapiens
  misc_RNA (1)...(19): siRNA sense strand
augaggaacuuuggaggaa

SEQ ID NO: 410843 - RNA, 19 nt, Homo sapiens
  misc_RNA (1)...(19): siRNA sense strand
gcauuaccgcucugguguu

SEQ ID NO: 410844 - RNA, 19 nt, Homo sapiens
  misc_RNA (1)...(19): siRNA sense strand
ugacuucuuccuucagaug

SEQ ID NO: 410845 - RNA, 19 nt, Homo sapiens
  misc_RNA (1)...(19): siRNA sense strand
gcccugugcacaccaagaa

SEQ ID NO: 410846 - RNA, 19 nt, Homo sapiens
  misc_RNA (1)...(19): siRNA sense strand
ucacguugcagccgucuuc

SEQ ID NO: 410847 - RNA, 19 nt, Homo sapiens
  misc_RNA (1)...(19): siRNA sense strand
acgguucccuugauuucuu

SEQ ID NO: 410848 - RNA, 19 nt, Homo sapiens
  misc_RNA (1)...(19): siRNA sense strand
agccugaccucaccugcuu

SEQ ID NO: 410849 - RNA, 19 nt, Homo sapiens
  misc_RNA (1)...(19): siRNA sense strand
ggagacgucacgcuguaca

SEQ ID NO: 410850 - RNA, 19 nt, Homo sapiens
  misc_RNA (1)...(19): siRNA sense strand
gcuauuacaacaucacacu

SEQ ID NO: 410851 - RNA, 19 nt, Homo sapiens
  misc_RNA (1)...(19): siRNA sense strand
gcauccugguauacacaga

SEQ ID NO: 410852 - RNA, 19 nt, Homo sapiens
  misc_RNA (1)...(19): siRNA sense strand
ccucugugcuggagaagcu

SEQ ID NO: 410853 - RNA, 19 nt, Homo sapiens
  misc_RNA (1)...(19): siRNA sense strand
ugggaacgacuuucagaug

SEQ ID NO: 410854 - RNA, 19 nt, Homo sapiens
  misc_RNA (1)...(19): siRNA sense strand
gagagcugggaacgacuuu

SEQ ID NO: 410855 - RNA, 19 nt, Homo sapiens
  misc_RNA (1)...(19): siRNA sense strand
gcugcguguugucuacuuc

SEQ ID NO: 410856 - RNA, 19 nt, Homo sapiens
  misc_RNA (1)...(19): siRNA sense strand
gcuggacaacgcugccauu

SEQ ID NO: 410857 - RNA, 19 nt, Homo sapiens
  misc_RNA (1)...(19): siRNA sense strand
gcuggccaguggaggacaa

SEQ ID NO: 410858 - RNA, 19 nt, Homo sapiens
  misc_RNA (1)...(19): siRNA sense strand
gcggccaccucauggacau

SEQ ID NO: 410859 - RNA, 19 nt, Homo sapiens
  misc_RNA (1)...(19): siRNA sense strand
ccaccggcaucgucuuggu

SEQ ID NO: 410860 - RNA, 19 nt, Homo sapiens
  misc_RNA (1)...(19): siRNA sense strand
gcucuucagcuauuacaac

SEQ ID NO: 410861 - RNA, 19 nt, Homo sapiens
  misc_RNA (1)...(19): siRNA sense strand
gaagaacccucauuucauu

SEQ ID NO: 410862 - RNA, 19 nt, Homo sapiens
  misc_RNA (1)...(19): siRNA sense strand
caagacagcugaaccuuug

SEQ ID NO: 410863 - RNA, 19 nt, Homo sapiens
  misc_RNA (1)...(19): siRNA sense strand
gcagugacaugaugaugaa

SEQ ID NO: 410864 - RNA, 19 nt, Homo sapiens
  misc_RNA (1)...(19): siRNA sense strand
cagaggugcuugucacuuu

SEQ ID NO: 410865 - RNA, 19 nt, Homo sapiens
  misc_RNA (1)...(19): siRNA sense strand
cagcugaaccuuugaaauu

SEQ ID NO: 410866 - RNA, 19 nt, Homo sapiens
  misc_RNA (1)...(19): siRNA sense strand
caagaucaguaugaaauug

SEQ ID NO: 410867 - RNA, 19 nt, Homo sapiens
  misc_RNA (1)...(19): siRNA sense strand
ccaaaguugugauuccaaa

SEQ ID NO: 410868 - RNA, 19 nt, Homo sapiens
  misc_RNA (1)...(19): siRNA sense strand
ggaagaacccucauuucau

SEQ ID NO: 410869 - RNA, 19 nt, Homo sapiens
  misc_RNA (1)...(19): siRNA sense strand
gcaacucccugaccauuuu

SEQ ID NO: 410870 - RNA, 19 nt, Homo sapiens
  misc_RNA (1)...(19): siRNA sense strand
gaaccacacucagacucaa

SEQ ID NO: 410871 - RNA, 19 nt, Homo sapiens
  misc_RNA (1)...(19): siRNA sense strand
gugacaugaugaugaagua

SEQ ID NO: 410872 - RNA, 19 nt, Homo sapiens
  misc_RNA (1)...(19): siRNA sense strand
ccaccugccucaccaacaa

SEQ ID NO: 410873 - RNA, 19 nt, Homo sapiens
  misc_RNA (1)...(19): siRNA sense strand
gcaaccagcccuuuacaca

SEQ ID NO: 410874 - RNA, 19 nt, Homo sapiens
  misc_RNA (1)...(19): siRNA sense strand
acagccaccucuuggauuu

SEQ ID NO: 410875 - RNA, 19 nt, Homo sapiens
  misc_RNA (1)...(19): siRNA sense strand
gcaacgaguucaagaucag

SEQ ID NO: 410876 - RNA, 19 nt, Homo sapiens
  misc_RNA (1)...(19): siRNA sense strand
ccuccgaugugaauacuga

SEQ ID NO: 410877 - RNA, 19 nt, Homo sapiens
  misc_RNA (1)...(19): siRNA sense strand
cagacucacuugucacuca

SEQ ID NO: 410878 - RNA, 19 nt, Homo sapiens
  misc_RNA (1)...(19): siRNA sense strand
gcaccaaaguugugauucc

SEQ ID NO: 410879 - RNA, 19 nt, Homo sapiens
  misc_RNA (1)...(19): siRNA sense strand
gccacaaccuucguaguga

SEQ ID NO: 410880 - RNA, 19 nt, Homo sapiens
  misc_RNA (1)...(19): siRNA sense strand
gaaauucccaaagaagaga

SEQ ID NO: 410881 - RNA, 19 nt, Homo sapiens
  misc_RNA (1)...(19): siRNA sense strand
ccaagacagcugaaccuuu

SEQ ID NO: 410882 - RNA, 19 nt, Homo sapiens
  misc_RNA (1)...(19): siRNA sense strand
caagcucuccuaccacauu

SEQ ID NO: 410883 - RNA, 19 nt, Homo sapiens
  misc_RNA (1)...(19): siRNA sense strand
agaagaagguccagcaacu

SEQ ID NO: 410884 - RNA, 19 nt, Homo sapiens
  misc_RNA (1)...(19): siRNA sense strand
aaccagcccuuuacacaga

SEQ ID NO: 410885 - RNA, 19 nt, Homo sapiens
  misc_RNA (1)...(19): siRNA sense strand
gaaacucugccacaaccuu

SEQ ID NO: 410886 - RNA, 19 nt, Homo sapiens
  misc_RNA (1)...(19): siRNA sense strand
acaggaagaacccucauuu

SEQ ID NO: 410887 - RNA, 19 nt, Homo sapiens
  misc_RNA (1)...(19): siRNA sense strand
ucgaggaugugaugcaguu

SEQ ID NO: 410888 - RNA, 19 nt, Homo sapiens
  misc_RNA (1)...(19): siRNA sense strand
gguuaucucagccguguuu

SEQ ID NO: 410889 - RNA, 19 nt, Homo sapiens
  misc_RNA (1)...(19): siRNA sense strand
ugaaguacaugggccugaa

SEQ ID NO: 410890 - RNA, 19 nt, Homo sapiens
  misc_RNA (1)...(19): siRNA sense strand
ggaaccacacucagacuca

SEQ ID NO: 410891 - RNA, 19 nt, Homo sapiens
  misc_RNA (1)...(19): siRNA sense strand
cgcgaugccucucgacuga

SEQ ID NO: 410892 - RNA, 19 nt, Homo sapiens
  misc_RNA (1)...(19): siRNA sense strand
caguuuguaucuacuugaa

SEQ ID NO: 410893 - RNA, 19 nt, Homo sapiens
  misc_RNA (1)...(19): siRNA sense strand
gggaacagcauacccucaa

SEQ ID NO: 410894 - RNA, 19 nt, Homo sapiens
  misc_RNA (1)...(19): siRNA sense strand
aggaagaacccucauuuca

SEQ ID NO: 410895 - RNA, 19 nt, Homo sapiens
  misc_RNA (1)...(19): siRNA sense strand
guuuguaucuacuugaaca

SEQ ID NO: 410896 - RNA, 19 nt, Homo sapiens
  misc_RNA (1)...(19): siRNA sense strand
aaacugucuuggaacauca

SEQ ID NO: 410897 - RNA, 19 nt, Homo sapiens
  misc_RNA (1)...(19): siRNA sense strand
aauggacucugccucaaau

SEQ ID NO: 410898 - RNA, 19 nt, Homo sapiens
  misc_RNA (1)...(19): siRNA sense strand
caauggacucugccucaaa

SEQ ID NO: 410899 - RNA, 19 nt, Homo sapiens
  misc_RNA (1)...(19): siRNA sense strand
gaguucaagaucaguauga

SEQ ID NO: 410900 - RNA, 19 nt, Homo sapiens
  misc_RNA (1)...(19): siRNA sense strand
gcagccuccuggcaccaaa

SEQ ID NO: 410901 - RNA, 19 nt, Homo sapiens
  misc_RNA (1)...(19): siRNA sense strand
gggcguaaaccaggaaaga

SEQ ID NO: 410902 - RNA, 19 nt, Homo sapiens
  misc_RNA (1)...(19): siRNA sense strand
caccaucgccuucccacaa

SEQ ID NO: 410903 - RNA, 19 nt, Homo sapiens
  misc_RNA (1)...(19): siRNA sense strand
gaggaugugaugcaguuug

SEQ ID NO: 410904 - RNA, 19 nt, Homo sapiens
  misc_RNA (1)...(19): siRNA sense strand
ucaauggacucugccucaa

SEQ ID NO: 410905 - RNA, 19 nt, Homo sapiens
  misc_RNA (1)...(19): siRNA sense strand
ggagaaacucugccacaac

SEQ ID NO: 410906 - RNA, 19 nt, Homo sapiens
  misc_RNA (1)...(19): siRNA sense strand
gaacccucauuucauuugc

SEQ ID NO: 410907 - RNA, 19 nt, Homo sapiens
  misc_RNA (1)...(19): siRNA sense strand
aaaugggaaugaagcuaga

SEQ ID NO: 410908 - RNA, 19 nt, Homo sapiens
  misc_RNA (1)...(19): siRNA sense strand
caacaguuuguaucuacuu

SEQ ID NO: 410909 - RNA, 19 nt, Homo sapiens
  misc_RNA (1)...(19): siRNA sense strand
gaagcagggcaaguucuga

SEQ ID NO: 410910 - RNA, 19 nt, Homo sapiens
  misc_RNA (1)...(19): siRNA sense strand
uacacagacucacuuguca

SEQ ID NO: 410911 - RNA, 19 nt, Homo sapiens
  misc_RNA (1)...(19): siRNA sense strand
uggagaaacucugccacaa

SEQ ID NO: 410912 - RNA, 19 nt, Homo sapiens
  misc_RNA (1)...(19): siRNA sense strand
aaaguugugauuccaaaga

SEQ ID NO: 410913 - RNA, 19 nt, Homo sapiens
  misc_RNA (1)...(19): siRNA sense strand
ccaagcaacgaguucaaga

SEQ ID NO: 410914 - RNA, 19 nt, Homo sapiens
  misc_RNA (1)...(19): siRNA sense strand
caaccuucguagugacaau

SEQ ID NO: 410915 - RNA, 19 nt, Homo sapiens
  misc_RNA (1)...(19): siRNA sense strand
ggaacagcauacccucaac

SEQ ID NO: 410916 - RNA, 19 nt, Homo sapiens
  misc_RNA (1)...(19): siRNA sense strand
uauccugccuccgauguga

SEQ ID NO: 410917 - RNA, 19 nt, Homo sapiens
  misc_RNA (1)...(19): siRNA sense strand
gcuaaauggagcagagaug

SEQ ID NO: 410918 - RNA, 19 nt, Homo sapiens
  misc_RNA (1)...(19): siRNA sense strand
gacagucgaggaugugaug

SEQ ID NO: 410919 - RNA, 19 nt, Homo sapiens
  misc_RNA (1)...(19): siRNA sense strand
gacaggaagaacccucauu

SEQ ID NO: 410920 - RNA, 19 nt, Homo sapiens
  misc_RNA (1)...(19): siRNA sense strand
gcugcgcagugacaugaug

SEQ ID NO: 410921 - RNA, 19 nt, Homo sapiens
  misc_RNA (1)...(19): siRNA sense strand
cagcaacucccugaccauu

SEQ ID NO: 410922 - RNA, 19 nt, Homo sapiens
  misc_RNA (1)...(19): siRNA sense strand
gaagaagguccagcaacuc

SEQ ID NO: 410923 - RNA, 19 nt, Homo sapiens
  misc_RNA (1)...(19): siRNA sense strand
cccaacaguuuguaucuac

SEQ ID NO: 410924 - RNA, 19 nt, Homo sapiens
  misc_RNA (1)...(19): siRNA sense strand
gggcugguguuccuugacu

SEQ ID NO: 410925 - RNA, 19 nt, Homo sapiens
  misc_RNA (1)...(19): siRNA sense strand
aaguugugauuccaaagaa

SEQ ID NO: 410926 - RNA, 19 nt, Homo sapiens
  misc_RNA (1)...(19): siRNA sense strand
ggacacccaagacccuaau

SEQ ID NO: 410927 - RNA, 19 nt, Homo sapiens
  misc_RNA (1)...(19): siRNA sense strand
caagcaacgaguucaagau

SEQ ID NO: 410928 - RNA, 19 nt, Homo sapiens
  misc_RNA (1)...(19): siRNA sense strand
guagugacaaucuguuugg

SEQ ID NO: 410929 - RNA, 19 nt, Homo sapiens
  misc_RNA (1)...(19): siRNA sense strand
uaagaagaagguccagcaa

SEQ ID NO: 410930 - RNA, 19 nt, Homo sapiens
  misc_RNA (1)...(19): siRNA sense strand
aaagaagagaggucccaaa

SEQ ID NO: 410931 - RNA, 19 nt, Homo sapiens
  misc_RNA (1)...(19): siRNA sense strand
acacccaagacccuaauuu

SEQ ID NO: 410932 - RNA, 19 nt, Homo sapiens
  misc_RNA (1)...(19): siRNA sense strand
caggaagaacccucauuuc

SEQ ID NO: 410933 - RNA, 19 nt, Homo sapiens
  misc_RNA (1)...(19): siRNA sense strand
gcguaaaccaggaaagaag

SEQ ID NO: 410934 - RNA, 19 nt, Homo sapiens
  misc_RNA (1)...(19): siRNA sense strand
cacccaagacccuaauuuc

SEQ ID NO: 410935 - RNA, 19 nt, Homo sapiens
  misc_RNA (1)...(19): siRNA sense strand
caaaucccaccaaccuugu

SEQ ID NO: 410936 - RNA, 19 nt, Homo sapiens
  misc_RNA (1)...(19): siRNA sense strand
uuacacagacucacuuguc

SEQ ID NO: 410937 - RNA, 19 nt, Homo sapiens
  misc_RNA (1)...(19): siRNA sense strand
caccacauccaccuguauu

SEQ ID NO: 410938 - RNA, 19 nt, Homo sapiens
  misc_RNA (1)...(19): siRNA sense strand
gcacaggaccccaggaaca

SEQ ID NO: 410939 - RNA, 19 nt, Homo sapiens
  misc_RNA (1)...(19): siRNA sense strand
gacaugaugaugaaguaca

SEQ ID NO: 410940 - RNA, 19 nt, Homo sapiens
  misc_RNA (1)...(19): siRNA sense strand
ggaaaccucggacuuugcu

SEQ ID NO: 410941 - RNA, 19 nt, Homo sapiens
  misc_RNA (1)...(19): siRNA sense strand
ucccacaacuucuucaaaa

SEQ ID NO: 410942 - RNA, 19 nt, Homo sapiens
  misc_RNA (1)...(19): siRNA sense strand
cgaugccucucgacugagu

SEQ ID NO: 410943 - RNA, 19 nt, Homo sapiens
  misc_RNA (1)...(19): siRNA sense strand
cugguugacucagcugaaa

SEQ ID NO: 410944 - RNA, 19 nt, Homo sapiens
  misc_RNA (1)...(19): siRNA sense strand
ugaaauucccaaagaagag

SEQ ID NO: 410945 - RNA, 19 nt, Homo sapiens
  misc_RNA (1)...(19): siRNA sense strand
gaugggagcgacaacaaaa

SEQ ID NO: 410946 - RNA, 19 nt, Homo sapiens
  misc_RNA (1)...(19): siRNA sense strand
ggccaugguggugagguua

SEQ ID NO: 410947 - RNA, 19 nt, Homo sapiens
  misc_RNA (1)...(19): siRNA sense strand
gaaguacaugggccugaag

SEQ ID NO: 410948 - RNA, 19 nt, Homo sapiens
  misc_RNA (1)...(19): siRNA sense strand
ucacugccauagaguacag

SEQ ID NO: 410949 - RNA, 19 nt, Homo sapiens
  misc_RNA (1)...(19): siRNA sense strand
ucaacagcaucaccuacgu

SEQ ID NO: 410950 - RNA, 19 nt, Homo sapiens
  misc_RNA (1)...(19): siRNA sense strand
cuacagccaccucuuggau

SEQ ID NO: 410951 - RNA, 19 nt, Homo sapiens
  misc_RNA (1)...(19): siRNA sense strand
aggaugugaugcaguuugu

SEQ ID NO: 410952 - RNA, 19 nt, Homo sapiens
  misc_RNA (1)...(19): siRNA sense strand
cguggacagucgaggaugu

SEQ ID NO: 410953 - RNA, 19 nt, Homo sapiens
  misc_RNA (1)...(19): siRNA sense strand
gaucaguaugaaauuggaa

SEQ ID NO: 410954 - RNA, 19 nt, Homo sapiens
  misc_RNA (1)...(19): siRNA sense strand
gcugaaccuuugaaauucc

SEQ ID NO: 410955 - RNA, 19 nt, Homo sapiens
  misc_RNA (1)...(19): siRNA sense strand
cgaugugaauacugagaag

SEQ ID NO: 410956 - RNA, 19 nt, Homo sapiens
  misc_RNA (1)...(19): siRNA sense strand
caccaaaguugugauucca

SEQ ID NO: 410957 - RNA, 19 nt, Homo sapiens
  misc_RNA (1)...(19): siRNA sense strand
ccuccuggcaccaaaguug

SEQ ID NO: 410958 - RNA, 19 nt, Homo sapiens
  misc_RNA (1)...(19): siRNA sense strand
ggcugaaugcgucuucuug

SEQ ID NO: 410959 - RNA, 19 nt, Homo sapiens
  misc_RNA (1)...(19): siRNA sense strand
gcugaagcagggcaaguuc

SEQ ID NO: 410960 - RNA, 19 nt, Homo sapiens
  misc_RNA (1)...(19): siRNA sense strand
cacucaagcucuccuacca

SEQ ID NO: 410961 - RNA, 19 nt, Homo sapiens
  misc_RNA (1)...(19): siRNA sense strand
gaaagaaggucaagugugu

SEQ ID NO: 410962 - RNA, 19 nt, Homo sapiens
  misc_RNA (1)...(19): siRNA sense strand
gaauaugugugucuucuga

SEQ ID NO: 410963 - RNA, 19 nt, Homo sapiens
  misc_RNA (1)...(19): siRNA sense strand
gaaccaccuugucuucaaa

SEQ ID NO: 410964 - RNA, 19 nt, Homo sapiens
  misc_RNA (1)...(19): siRNA sense strand
guaaaccuguccugaaaga

SEQ ID NO: 410965 - RNA, 19 nt, Homo sapiens
  misc_RNA (1)...(19): siRNA sense strand
gaggaaaccaucacugaaa

SEQ ID NO: 410966 - RNA, 19 nt, Homo sapiens
  misc_RNA (1)...(19): siRNA sense strand
acagaaagaucaccaucaa

SEQ ID NO: 410967 - RNA, 19 nt, Homo sapiens
  misc_RNA (1)...(19): siRNA sense strand
ggagugagcgccaccuuga

SEQ ID NO: 410968 - RNA, 19 nt, Homo sapiens
  misc_RNA (1)...(19): siRNA sense strand
gaggagaaauugaggaaac

SEQ ID NO: 410969 - RNA, 19 nt, Homo sapiens
  misc_RNA (1)...(19): siRNA sense strand
aaccaucacugaaagcuuu

SEQ ID NO: 410970 - RNA, 19 nt, Homo sapiens
  misc_RNA (1)...(19): siRNA sense strand
ggauggguauuccagaaga

SEQ ID NO: 410971 - RNA, 19 nt, Homo sapiens
  misc_RNA (1)...(19): siRNA sense strand
cuucuaggcuucacacuug

SEQ ID NO: 410972 - RNA, 19 nt, Homo sapiens
  misc_RNA (1)...(19): siRNA sense strand
gaaauauuccagcguuguu

SEQ ID NO: 410973 - RNA, 19 nt, Homo sapiens
  misc_RNA (1)...(19): siRNA sense strand
acugaaagcuuugguaaug

SEQ ID NO: 410974 - RNA, 19 nt, Homo sapiens
  misc_RNA (1)...(19): siRNA sense strand
cuguaaaccuguccugaaa

SEQ ID NO: 410975 - RNA, 19 nt, Homo sapiens
  misc_RNA (1)...(19): siRNA sense strand
guaccaagcauaggagaaa

SEQ ID NO: 410976 - RNA, 19 nt, Homo sapiens
  misc_RNA (1)...(19): siRNA sense strand
gaaauugaggaaaccauca

SEQ ID NO: 410977 - RNA, 19 nt, Homo sapiens
  misc_RNA (1)...(19): siRNA sense strand
ucacugaaagcuuugguaa

SEQ ID NO: 410978 - RNA, 19 nt, Homo sapiens
  misc_RNA (1)...(19): siRNA sense strand
ugaaagcuuugguaaugau

SEQ ID NO: 410979 - RNA, 19 nt, Homo sapiens
  misc_RNA (1)...(19): siRNA sense strand
gaauaaguaccagaccauu

SEQ ID NO: 410980 - RNA, 19 nt, Homo sapiens
  misc_RNA (1)...(19): siRNA sense strand
gauggguauuccagaagaa

SEQ ID NO: 410981 - RNA, 19 nt, Homo sapiens
  misc_RNA (1)...(19): siRNA sense strand
agacacuucugguccaaga

SEQ ID NO: 410982 - RNA, 19 nt, Homo sapiens
  misc_RNA (1)...(19): siRNA sense strand
agaaccaccuugucuucaa

SEQ ID NO: 410983 - RNA, 19 nt, Homo sapiens
  misc_RNA (1)...(19): siRNA sense strand
ggaauaaguaccagaccau

SEQ ID NO: 410984 - RNA, 19 nt, Homo sapiens
  misc_RNA (1)...(19): siRNA sense strand
aaaaggcucucauggacua

SEQ ID NO: 410985 - RNA, 19 nt, Homo sapiens
  misc_RNA (1)...(19): siRNA sense strand
auaaguaccagaccauuga

SEQ ID NO: 410986 - RNA, 19 nt, Homo sapiens
  misc_RNA (1)...(19): siRNA sense strand
guaaugaucauagcaccuu

SEQ ID NO: 410987 - RNA, 19 nt, Homo sapiens
  misc_RNA (1)...(19): siRNA sense strand
gcuucacacuugucagaga

SEQ ID NO: 410988 - RNA, 19 nt, Homo sapiens
  misc_RNA (1)...(19): siRNA sense strand
gaugaguacugcgcuaguc

SEQ ID NO: 410989 - RNA, 19 nt, Homo sapiens
  misc_RNA (1)...(19): siRNA sense strand
ucaggauuguguugugcua

SEQ ID NO: 410990 - RNA, 19 nt, Homo sapiens
  misc_RNA (1)...(19): siRNA sense strand
agacugugccucaggauug

SEQ ID NO: 410991 - RNA, 19 nt, Homo sapiens
  misc_RNA (1)...(19): siRNA sense strand
gagcuacccgggucuuugu

SEQ ID NO: 410992 - RNA, 19 nt, Homo sapiens
  misc_RNA (1)...(19): siRNA sense strand
caucaagccaguaauucuu

SEQ ID NO: 410993 - RNA, 19 nt, Homo sapiens
  misc_RNA (1)...(19): siRNA sense strand
cagaagaaccaccuugucu

SEQ ID NO: 410994 - RNA, 19 nt, Homo sapiens
  misc_RNA (1)...(19): siRNA sense strand
ucucauggacuagaaauau

SEQ ID NO: 410995 - RNA, 19 nt, Homo sapiens
  misc_RNA (1)...(19): siRNA sense strand
ggagcuacccgggucuuug

SEQ ID NO: 410996 - RNA, 19 nt, Homo sapiens
  misc_RNA (1)...(19): siRNA sense strand
caccaucaagccaguaauu

SEQ ID NO: 410997 - RNA, 19 nt, Homo sapiens
  misc_RNA (1)...(19): siRNA sense strand
cucauggacuagaaauauu

SEQ ID NO: 410998 - RNA, 19 nt, Homo sapiens
  misc_RNA (1)...(19): siRNA sense strand
cugaaagcuuugguaauga

SEQ ID NO: 410999 - RNA, 19 nt, Homo sapiens
  misc_RNA (1)...(19): siRNA sense strand
aaauauuccagcguuguua

SEQ ID NO: 411000 - RNA, 19 nt, Homo sapiens
  misc_RNA (1)...(19): siRNA sense strand
ugaggaaaccaucacugaa

SEQ ID NO: 411001 - RNA, 19 nt, Homo sapiens
  misc_RNA (1)...(19): siRNA sense strand
caaguguguaccaagcaua

SEQ ID NO: 411002 - RNA, 19 nt, Homo sapiens
  misc_RNA (1)...(19): siRNA sense strand
ucacaccaaaggacaagaa

SEQ ID NO: 411003 - RNA, 19 nt, Homo sapiens
  misc_RNA (1)...(19): siRNA sense strand
guggagaaggucugucuug

SEQ ID NO: 411004 - RNA, 19 nt, Homo sapiens
  misc_RNA (1)...(19): siRNA sense strand
gaaggucaaguguguacca

SEQ ID NO: 411005 - RNA, 19 nt, Homo sapiens
  misc_RNA (1)...(19): siRNA sense strand
ccugaaagaaggucaagug

SEQ ID NO: 411006 - RNA, 19 nt, Homo sapiens
  misc_RNA (1)...(19): siRNA sense strand
accagaccauugacaacua

SEQ ID NO: 411007 - RNA, 19 nt, Homo sapiens
  misc_RNA (1)...(19): siRNA sense strand
ccagaccauugacaacuac

SEQ ID NO: 411008 - RNA, 19 nt, Homo sapiens
  misc_RNA (1)...(19): siRNA sense strand
aggaaaccaucacugaaag

SEQ ID NO: 411009 - RNA, 19 nt, Homo sapiens
  misc_RNA (1)...(19): siRNA sense strand
aaaccuguccugaaagaag

SEQ ID NO: 411010 - RNA, 19 nt, Homo sapiens
  misc_RNA (1)...(19): siRNA sense strand
caccaaaggacaagaaggu

SEQ ID NO: 411011 - RNA, 19 nt, Homo sapiens
  misc_RNA (1)...(19): siRNA sense strand
ucaaguguguaccaagcau

SEQ ID NO: 411012 - RNA, 19 nt, Homo sapiens
  misc_RNA (1)...(19): siRNA sense strand
aauaaguaccagaccauug

SEQ ID NO: 411013 - RNA, 19 nt, Homo sapiens
  misc_RNA (1)...(19): siRNA sense strand
gacugugccucaggauugu

SEQ ID NO: 411014 - RNA, 19 nt, Homo sapiens
  misc_RNA (1)...(19): siRNA sense strand
uugaggaaaccaucacuga

SEQ ID NO: 411015 - RNA, 19 nt, Homo sapiens
  misc_RNA (1)...(19): siRNA sense strand
ucuguaaaccuguccugaa

SEQ ID NO: 411016 - RNA, 19 nt, Homo sapiens
  misc_RNA (1)...(19): siRNA sense strand
gguccaagaucuguaaacc

SEQ ID NO: 411017 - RNA, 19 nt, Homo sapiens
  misc_RNA (1)...(19): siRNA sense strand
aggauuguguugugcuaga

SEQ ID NO: 411018 - RNA, 19 nt, Homo sapiens
  misc_RNA (1)...(19): siRNA sense strand
uggaauaugugugucuucu

SEQ ID NO: 411019 - RNA, 19 nt, Homo sapiens
  misc_RNA (1)...(19): siRNA sense strand
aaauguaucacaccaaagg

SEQ ID NO: 411020 - RNA, 19 nt, Homo sapiens
  misc_RNA (1)...(19): siRNA sense strand
cacccaggcucugcaguca

SEQ ID NO: 411021 - RNA, 19 nt, Homo sapiens
  misc_RNA (1)...(19): siRNA sense strand
gaaaccaucacugaaagcu

SEQ ID NO: 411022 - RNA, 19 nt, Homo sapiens
  misc_RNA (1)...(19): siRNA sense strand
ggaauaugugugucuucug

SEQ ID NO: 411023 - RNA, 19 nt, Homo sapiens
  misc_RNA (1)...(19): siRNA sense strand
acucgguucucaauuccaa

SEQ ID NO: 411024 - RNA, 19 nt, Homo sapiens
  misc_RNA (1)...(19): siRNA sense strand
gaaagcuuugguaaugauc

SEQ ID NO: 411025 - RNA, 19 nt, Homo sapiens
  misc_RNA (1)...(19): siRNA sense strand
ccgaggagaaauugaggaa

SEQ ID NO: 411026 - RNA, 19 nt, Homo sapiens
  misc_RNA (1)...(19): siRNA sense strand
ccaacgcuaucaagaaccu

SEQ ID NO: 411027 - RNA, 19 nt, Homo sapiens
  misc_RNA (1)...(19): siRNA sense strand
ccagaagaaccaccuuguc

SEQ ID NO: 411028 - RNA, 19 nt, Homo sapiens
  misc_RNA (1)...(19): siRNA sense strand
ucaauuccaacgcuaucaa

SEQ ID NO: 411029 - RNA, 19 nt, Homo sapiens
  misc_RNA (1)...(19): siRNA sense strand
gaaaagagguuuaugauga

SEQ ID NO: 411030 - RNA, 19 nt, Homo sapiens
  misc_RNA (1)...(19): siRNA sense strand
ggacuucgcccacgucaua

SEQ ID NO: 411031 - RNA, 19 nt, Homo sapiens
  misc_RNA (1)...(19): siRNA sense strand
ggagagcgaugagaaagaa

SEQ ID NO: 411032 - RNA, 19 nt, Homo sapiens
  misc_RNA (1)...(19): siRNA sense strand
caaggaagaugcacugauc

SEQ ID NO: 411033 - RNA, 19 nt, Homo sapiens
  misc_RNA (1)...(19): siRNA sense strand
gcaagaagcaccaucacaa

SEQ ID NO: 411034 - RNA, 19 nt, Homo sapiens
  misc_RNA (1)...(19): siRNA sense strand
aggcaaaccuuauuacuau

SEQ ID NO: 411035 - RNA, 19 nt, Homo sapiens
  misc_RNA (1)...(19): siRNA sense strand
ucaauagucugcuggagaa

SEQ ID NO: 411036 - RNA, 19 nt, Homo sapiens
  misc_RNA (1)...(19): siRNA sense strand
ccaccuggauggagcuaua

SEQ ID NO: 411037 - RNA, 19 nt, Homo sapiens
  misc_RNA (1)...(19): siRNA sense strand
acaagaggcugcagggaaa

SEQ ID NO: 411038 - RNA, 19 nt, Homo sapiens
  misc_RNA (1)...(19): siRNA sense strand
gcaaggagagcgaugagaa

SEQ ID NO: 411039 - RNA, 19 nt, Homo sapiens
  misc_RNA (1)...(19): siRNA sense strand
gaagcugccuuucgaagca

SEQ ID NO: 411040 - RNA, 19 nt, Homo sapiens
  misc_RNA (1)...(19): siRNA sense strand
gagugaagauugugaugug

SEQ ID NO: 411041 - RNA, 19 nt, Homo sapiens
  misc_RNA (1)...(19): siRNA sense strand
ggaaugguaccuccgauga

SEQ ID NO: 411042 - RNA, 19 nt, Homo sapiens
  misc_RNA (1)...(19): siRNA sense strand
gaagacacaagucgaauag

SEQ ID NO: 411043 - RNA, 19 nt, Homo sapiens
  misc_RNA (1)...(19): siRNA sense strand
gaucauggccuucggaaag

SEQ ID NO: 411044 - RNA, 19 nt, Homo sapiens
  misc_RNA (1)...(19): siRNA sense strand
cgaauaguccugagaguga

SEQ ID NO: 411045 - RNA, 19 nt, Homo sapiens
  misc_RNA (1)...(19): siRNA sense strand
ggacacaggcaaaccuuau

SEQ ID NO: 411046 - RNA, 19 nt, Homo sapiens
  misc_RNA (1)...(19): siRNA sense strand
ggaaagccaagaaaccaaa

SEQ ID NO: 411047 - RNA, 19 nt, Homo sapiens
  misc_RNA (1)...(19): siRNA sense strand
cagggcagcugcacucuau

SEQ ID NO: 411048 - RNA, 19 nt, Homo sapiens
  misc_RNA (1)...(19): siRNA sense strand
agcaguaccucauggauaa

SEQ ID NO: 411049 - RNA, 19 nt, Homo sapiens
  misc_RNA (1)...(19): siRNA sense strand
ucacaagcguucccacuca

SEQ ID NO: 411050 - RNA, 19 nt, Homo sapiens
  misc_RNA (1)...(19): siRNA sense strand
gaugaguagugucaacuuc

SEQ ID NO: 411051 - RNA, 19 nt, Homo sapiens
  misc_RNA (1)...(19): siRNA sense strand
gacagacccugaggagaaa

SEQ ID NO: 411052 - RNA, 19 nt, Homo sapiens
  misc_RNA (1)...(19): siRNA sense strand
gaacauggacaaggaagau

SEQ ID NO: 411053 - RNA, 19 nt, Homo sapiens
  misc_RNA (1)...(19): siRNA sense strand
cuacaaugcugacgacaag

SEQ ID NO: 411054 - RNA, 19 nt, Homo sapiens
  misc_RNA (1)...(19): siRNA sense strand
agacagacccugaggagaa

SEQ ID NO: 411055 - RNA, 19 nt, Homo sapiens
  misc_RNA (1)...(19): siRNA sense strand
ggcaaaccuuauuacuaua

SEQ ID NO: 411056 - RNA, 19 nt, Homo sapiens
  misc_RNA (1)...(19): siRNA sense strand
ugaagauugugauguguug

SEQ ID NO: 411057 - RNA, 19 nt, Homo sapiens
  misc_RNA (1)...(19): siRNA sense strand
aagcugaccuucaauaguc

SEQ ID NO: 411058 - RNA, 19 nt, Homo sapiens
  misc_RNA (1)...(19): siRNA sense strand
acacaggcaaaccuuauua

SEQ ID NO: 411059 - RNA, 19 nt, Homo sapiens
  misc_RNA (1)...(19): siRNA sense strand
ucacacagauaccaggaau

SEQ ID NO: 411060 - RNA, 19 nt, Homo sapiens
  misc_RNA (1)...(19): siRNA sense strand
cagggaagcugccuuucga

SEQ ID NO: 411061 - RNA, 19 nt, Homo sapiens
  misc_RNA (1)...(19): siRNA sense strand
caaugucccuggaaagagu

SEQ ID NO: 411062 - RNA, 19 nt, Homo sapiens
  misc_RNA (1)...(19): siRNA sense strand
agacacaagucgaauaguc

SEQ ID NO: 411063 - RNA, 19 nt, Homo sapiens
  misc_RNA (1)...(19): siRNA sense strand
caggcaaaccuuauuacua

SEQ ID NO: 411064 - RNA, 19 nt, Homo sapiens
  misc_RNA (1)...(19): siRNA sense strand
caaagcaggcauucaagga

SEQ ID NO: 411065 - RNA, 19 nt, Homo sapiens
  misc_RNA (1)...(19): siRNA sense strand
gaagaucauuaaggacauc

SEQ ID NO: 411066 - RNA, 19 nt, Homo sapiens
  misc_RNA (1)...(19): siRNA sense strand
cagcacugauguccgcuuu

SEQ ID NO: 411067 - RNA, 19 nt, Homo sapiens
  misc_RNA (1)...(19): siRNA sense strand
cagcaguaccucauggaua

SEQ ID NO: 411068 - RNA, 19 nt, Homo sapiens
  misc_RNA (1)...(19): siRNA sense strand
gggaacaggccaugaagau

SEQ ID NO: 411069 - RNA, 19 nt, Homo sapiens
  misc_RNA (1)...(19): siRNA sense strand
caaggagagcgaugagaaa

SEQ ID NO: 411070 - RNA, 19 nt, Homo sapiens
  misc_RNA (1)...(19): siRNA sense strand
ccgaaagcauggcaggaaa

SEQ ID NO: 411071 - RNA, 19 nt, Homo sapiens
  misc_RNA (1)...(19): siRNA sense strand
gcacugauguccgcuuugc

SEQ ID NO: 411072 - RNA, 19 nt, Homo sapiens
  misc_RNA (1)...(19): siRNA sense strand
gcaauauccaggcccuaaa

SEQ ID NO: 411073 - RNA, 19 nt, Homo sapiens
  misc_RNA (1)...(19): siRNA sense strand
acaucaagcugaccuucaa

SEQ ID NO: 411074 - RNA, 19 nt, Homo sapiens
  misc_RNA (1)...(19): siRNA sense strand
gcgcaucuacuacuacaau

SEQ ID NO: 411075 - RNA, 19 nt, Homo sapiens
  misc_RNA (1)...(19): siRNA sense strand
ggaucuggaugaccuagag

SEQ ID NO: 411076 - RNA, 19 nt, Homo sapiens
  misc_RNA (1)...(19): siRNA sense strand
gcuuuggaaucaagaagga

SEQ ID NO: 411077 - RNA, 19 nt, Homo sapiens
  misc_RNA (1)...(19): siRNA sense strand
agaagacacaagucgaaua

SEQ ID NO: 411078 - RNA, 19 nt, Homo sapiens
  misc_RNA (1)...(19): siRNA sense strand
gccagcaccuccacaccaa

SEQ ID NO: 411079 - RNA, 19 nt, Homo sapiens
  misc_RNA (1)...(19): siRNA sense strand
ccaagaaggagaaggaaca

SEQ ID NO: 411080 - RNA, 19 nt, Homo sapiens
  misc_RNA (1)...(19): siRNA sense strand
gggagaaggaggagaagga

SEQ ID NO: 411081 - RNA, 19 nt, Homo sapiens
  misc_RNA (1)...(19): siRNA sense strand
gggcagaacagaccuuugg

SEQ ID NO: 411082 - RNA, 19 nt, Homo sapiens
  misc_RNA (1)...(19): siRNA sense strand
gcgaugagaaagaacaaga

SEQ ID NO: 411083 - RNA, 19 nt, Homo sapiens
  misc_RNA (1)...(19): siRNA sense strand
gaaaagaagaucauuaagg

SEQ ID NO: 411084 - RNA, 19 nt, Homo sapiens
  misc_RNA (1)...(19): siRNA sense strand
gauguccgcuuugccaaca

SEQ ID NO: 411085 - RNA, 19 nt, Homo sapiens
  misc_RNA (1)...(19): siRNA sense strand
gcacgauuccaugaugaaa

SEQ ID NO: 411086 - RNA, 19 nt, Homo sapiens
  misc_RNA (1)...(19): siRNA sense strand
gggcgcaucuacuacuaca

SEQ ID NO: 411087 - RNA, 19 nt, Homo sapiens
  misc_RNA (1)...(19): siRNA sense strand
gcagaacauggacaaggaa

SEQ ID NO: 411088 - RNA, 19 nt, Homo sapiens
  misc_RNA (1)...(19): siRNA sense strand
ggaacaggccaugaagaug

SEQ ID NO: 411089 - RNA, 19 nt, Homo sapiens
  misc_RNA (1)...(19): siRNA sense strand
ggacagggagcuccaacag

SEQ ID NO: 411090 - RNA, 19 nt, Homo sapiens
  misc_RNA (1)...(19): siRNA sense strand
caagaagcaccaucacaag

SEQ ID NO: 411091 - RNA, 19 nt, Homo sapiens
  misc_RNA (1)...(19): siRNA sense strand
gcaggaaaggcaagaagca

SEQ ID NO: 411092 - RNA, 19 nt, Homo sapiens
  misc_RNA (1)...(19): siRNA sense strand
ggacgcaggcaacaucaag

SEQ ID NO: 411093 - RNA, 19 nt, Homo sapiens
  misc_RNA (1)...(19): siRNA sense strand
uauaacaaccagaguaaag

SEQ ID NO: 411094 - RNA, 19 nt, Homo sapiens
  misc_RNA (1)...(19): siRNA sense strand
cagaaagugagcugaguga

SEQ ID NO: 411095 - RNA, 19 nt, Homo sapiens
  misc_RNA (1)...(19): siRNA sense strand
cgagggcccuauggaguga

SEQ ID NO: 411096 - RNA, 19 nt, Homo sapiens
  misc_RNA (1)...(19): siRNA sense strand
gaugggaugaguaguguca

SEQ ID NO: 411097 - RNA, 19 nt, Homo sapiens
  misc_RNA (1)...(19): siRNA sense strand
agucagagaccaccagcua

SEQ ID NO: 411098 - RNA, 19 nt, Homo sapiens
  misc_RNA (1)...(19): siRNA sense strand
ccagcgugcucaaguccaa

SEQ ID NO: 411099 - RNA, 19 nt, Homo sapiens
  misc_RNA (1)...(19): siRNA sense strand
cagcaguucuggacagcau

SEQ ID NO: 411100 - RNA, 19 nt, Homo sapiens
  misc_RNA (1)...(19): siRNA sense strand
ggaguugaaggcacgauuc

SEQ ID NO: 411101 - RNA, 19 nt, Homo sapiens
  misc_RNA (1)...(19): siRNA sense strand
ggaggaaucaaagccagaa

SEQ ID NO: 411102 - RNA, 19 nt, Homo sapiens
  misc_RNA (1)...(19): siRNA sense strand
ggaggaggaggaaucaaag

SEQ ID NO: 411103 - RNA, 19 nt, Homo sapiens
  misc_RNA (1)...(19): siRNA sense strand
caccaccacucacacagau

SEQ ID NO: 411104 - RNA, 19 nt, Homo sapiens
  misc_RNA (1)...(19): siRNA sense strand
gaaggcacgauuccaugau

SEQ ID NO: 411105 - RNA, 19 nt, Homo sapiens
  misc_RNA (1)...(19): siRNA sense strand
ugcagaacauggacaagga

SEQ ID NO: 411106 - RNA, 19 nt, Homo sapiens
  misc_RNA (1)...(19): siRNA sense strand
aaugguaccuccgaugaug

SEQ ID NO: 411107 - RNA, 19 nt, Homo sapiens
  misc_RNA (1)...(19): siRNA sense strand
ugccuaaacugagugagaa

SEQ ID NO: 411108 - RNA, 19 nt, Homo sapiens
  misc_RNA (1)...(19): siRNA sense strand
ggagugaagauugugaugu

SEQ ID NO: 411109 - RNA, 19 nt, Homo sapiens
  misc_RNA (1)...(19): siRNA sense strand
ugaaggcacgauuccauga

SEQ ID NO: 411110 - RNA, 19 nt, Homo sapiens
  misc_RNA (1)...(19): siRNA sense strand
gagcacauccgagcuuugg

SEQ ID NO: 411111 - RNA, 19 nt, Homo sapiens
  misc_RNA (1)...(19): siRNA sense strand
gaggagcacauccgagcuu

SEQ ID NO: 411112 - RNA, 19 nt, Homo sapiens
  misc_RNA (1)...(19): siRNA sense strand
gacacaggcaaaccuuauu

SEQ ID NO: 411113 - RNA, 19 nt, Homo sapiens
  misc_RNA (1)...(19): siRNA sense strand
acuauaacaaccagaguaa

SEQ ID NO: 411114 - RNA, 19 nt, Homo sapiens
  misc_RNA (1)...(19): siRNA sense strand
agagaagacacaagucgaa

SEQ ID NO: 411115 - RNA, 19 nt, Homo sapiens
  misc_RNA (1)...(19): siRNA sense strand
gaaugguaccuccgaugau

SEQ ID NO: 411116 - RNA, 19 nt, Homo sapiens
  misc_RNA (1)...(19): siRNA sense strand
agagggagcgggagaagga

SEQ ID NO: 411117 - RNA, 19 nt, Homo sapiens
  misc_RNA (1)...(19): siRNA sense strand
caagcugaccuucaauagu

SEQ ID NO: 411118 - RNA, 19 nt, Homo sapiens
  misc_RNA (1)...(19): siRNA sense strand
gucccaaugucccuggaaa

SEQ ID NO: 411119 - RNA, 19 nt, Homo sapiens
  misc_RNA (1)...(19): siRNA sense strand
gcaggaggaggaggaauca

SEQ ID NO: 411120 - RNA, 19 nt, Homo sapiens
  misc_RNA (1)...(19): siRNA sense strand
ggaaucaaagccagaacca

SEQ ID NO: 411121 - RNA, 19 nt, Homo sapiens
  misc_RNA (1)...(19): siRNA sense strand
ugagaaagaacaagaacag

SEQ ID NO: 411122 - RNA, 19 nt, Homo sapiens
  misc_RNA (1)...(19): siRNA sense strand
gagaagacacaagucgaau

SEQ ID NO: 411123 - RNA, 19 nt, Homo sapiens
  misc_RNA (1)...(19): siRNA sense strand
aaacuaagaagagaagaca

SEQ ID NO: 411124 - RNA, 19 nt, Homo sapiens
  misc_RNA (1)...(19): siRNA sense strand
ggacauccuuaaggugaac

SEQ ID NO: 411125 - RNA, 19 nt, Homo sapiens
  misc_RNA (1)...(19): siRNA sense strand
gggcagcugcacucuaugu

SEQ ID NO: 411126 - RNA, 19 nt, Homo sapiens
  misc_RNA (1)...(19): siRNA sense strand
gaccaucagcugcagaaca

SEQ ID NO: 411127 - RNA, 19 nt, Homo sapiens
  misc_RNA (1)...(19): siRNA sense strand
uacagugccuugccuaaac

SEQ ID NO: 411128 - RNA, 19 nt, Homo sapiens
  misc_RNA (1)...(19): siRNA sense strand
aaagcaggcauucaaggaa

SEQ ID NO: 411129 - RNA, 19 nt, Homo sapiens
  misc_RNA (1)...(19): siRNA sense strand
gauaugaucuguuuaguga

SEQ ID NO: 411130 - RNA, 19 nt, Homo sapiens
  misc_RNA (1)...(19): siRNA sense strand
cagagaagcuggauaagaa

SEQ ID NO: 411131 - RNA, 19 nt, Homo sapiens
  misc_RNA (1)...(19): siRNA sense strand
gaaacauugugaagacaua

SEQ ID NO: 411132 - RNA, 19 nt, Homo sapiens
  misc_RNA (1)...(19): siRNA sense strand
gcagguauguuuauuccua

SEQ ID NO: 411133 - RNA, 19 nt, Homo sapiens
  misc_RNA (1)...(19): siRNA sense strand
ggaaaugaguccaaagaga

SEQ ID NO: 411134 - RNA, 19 nt, Homo sapiens
  misc_RNA (1)...(19): siRNA sense strand
ucaaggauaugaucuguuu

SEQ ID NO: 411135 - RNA, 19 nt, Homo sapiens
  misc_RNA (1)...(19): siRNA sense strand
ggaaggauaucuguucaaa

SEQ ID NO: 411136 - RNA, 19 nt, Homo sapiens
  misc_RNA (1)...(19): siRNA sense strand
uaacguagaugcugcaaau

SEQ ID NO: 411137 - RNA, 19 nt, Homo sapiens
  misc_RNA (1)...(19): siRNA sense strand
ggaaugauguuauaaaucg

SEQ ID NO: 411138 - RNA, 19 nt, Homo sapiens
  misc_RNA (1)...(19): siRNA sense strand
gcaaauaaacaguucauga

SEQ ID NO: 411139 - RNA, 19 nt, Homo sapiens
  misc_RNA (1)...(19): siRNA sense strand
gaaaugaguccaaagagaa

SEQ ID NO: 411140 - RNA, 19 nt, Homo sapiens
  misc_RNA (1)...(19): siRNA sense strand
gaacuuggacccuacauga

SEQ ID NO: 411141 - RNA, 19 nt, Homo sapiens
  misc_RNA (1)...(19): siRNA sense strand
cagggaugauucuaaauua

SEQ ID NO: 411142 - RNA, 19 nt, Homo sapiens
  misc_RNA (1)...(19): siRNA sense strand
gagcauagcuguggaagca

SEQ ID NO: 411143 - RNA, 19 nt, Homo sapiens
  misc_RNA (1)...(19): siRNA sense strand
gagaggaaauuuguggaua

SEQ ID NO: 411144 - RNA, 19 nt, Homo sapiens
  misc_RNA (1)...(19): siRNA sense strand
gaaaagaggcugagcauuu

SEQ ID NO: 411145 - RNA, 19 nt, Homo sapiens
  misc_RNA (1)...(19): siRNA sense strand
gauaagaaaucaucuccau

SEQ ID NO: 411146 - RNA, 19 nt, Homo sapiens
  misc_RNA (1)...(19): siRNA sense strand
ggacauauuucgugauuuu

SEQ ID NO: 411147 - RNA, 19 nt, Homo sapiens
  misc_RNA (1)...(19): siRNA sense strand
caaauggcauccaauaauc

SEQ ID NO: 411148 - RNA, 19 nt, Homo sapiens
  misc_RNA (1)...(19): siRNA sense strand
acacauagcccucgauuau

SEQ ID NO: 411149 - RNA, 19 nt, Homo sapiens
  misc_RNA (1)...(19): siRNA sense strand
ccagcaagauucacagaaa

SEQ ID NO: 411150 - RNA, 19 nt, Homo sapiens
  misc_RNA (1)...(19): siRNA sense strand
gaaggaggcauauaucaga

SEQ ID NO: 411151 - RNA, 19 nt, Homo sapiens
  misc_RNA (1)...(19): siRNA sense strand
gagcgacgauucugcuuug

SEQ ID NO: 411152 - RNA, 19 nt, Homo sapiens
  misc_RNA (1)...(19): siRNA sense strand
gauuaugugcuucagauua

SEQ ID NO: 411153 - RNA, 19 nt, Homo sapiens
  misc_RNA (1)...(19): siRNA sense strand
gaggaaauuuguggauaaa

SEQ ID NO: 411154 - RNA, 19 nt, Homo sapiens
  misc_RNA (1)...(19): siRNA sense strand
gaagaagccaccaacauuc

SEQ ID NO: 411155 - RNA, 19 nt, Homo sapiens
  misc_RNA (1)...(19): siRNA sense strand
ggaaucagaaggacuuuau

SEQ ID NO: 411156 - RNA, 19 nt, Homo sapiens
  misc_RNA (1)...(19): siRNA sense strand
ugaagaagccaccaacauu

SEQ ID NO: 411157 - RNA, 19 nt, Homo sapiens
  misc_RNA (1)...(19): siRNA sense strand
agaggaaauuuguggauaa

SEQ ID NO: 411158 - RNA, 19 nt, Homo sapiens
  misc_RNA (1)...(19): siRNA sense strand
caaaauauguggagaggaa

SEQ ID NO: 411159 - RNA, 19 nt, Homo sapiens
  misc_RNA (1)...(19): siRNA sense strand
gagguggucucgccaacaa

SEQ ID NO: 411160 - RNA, 19 nt, Homo sapiens
  misc_RNA (1)...(19): siRNA sense strand
caggacauauuucgugauu

SEQ ID NO: 411161 - RNA, 19 nt, Homo sapiens
  misc_RNA (1)...(19): siRNA sense strand
gcaccaugccaccgucuua

SEQ ID NO: 411162 - RNA, 19 nt, Homo sapiens
  misc_RNA (1)...(19): siRNA sense strand
gcacagcuucaguaacuuu

SEQ ID NO: 411163 - RNA, 19 nt, Homo sapiens
  misc_RNA (1)...(19): siRNA sense strand
ccaaauggcauccaauaau

SEQ ID NO: 411164 - RNA, 19 nt, Homo sapiens
  misc_RNA (1)...(19): siRNA sense strand
uagcaagaaugaaugaaga

SEQ ID NO: 411165 - RNA, 19 nt, Homo sapiens
  misc_RNA (1)...(19): siRNA sense strand
gaagcuggauaagaaauca

SEQ ID NO: 411166 - RNA, 19 nt, Homo sapiens
  misc_RNA (1)...(19): siRNA sense strand
gaucagaaauccuaaaauc

SEQ ID NO: 411167 - RNA, 19 nt, Homo sapiens
  misc_RNA (1)...(19): siRNA sense strand
caaagaaacaaacaacaug

SEQ ID NO: 411168 - RNA, 19 nt, Homo sapiens
  misc_RNA (1)...(19): siRNA sense strand
acacagggcagguauguuu

SEQ ID NO: 411169 - RNA, 19 nt, Homo sapiens
  misc_RNA (1)...(19): siRNA sense strand
guaaugaugcugucguuga

SEQ ID NO: 411170 - RNA, 19 nt, Homo sapiens
  misc_RNA (1)...(19): siRNA sense strand
gcucuuuggugacguguga

SEQ ID NO: 411171 - RNA, 19 nt, Homo sapiens
  misc_RNA (1)...(19): siRNA sense strand
gagacaaguuugaccaagu

SEQ ID NO: 411172 - RNA, 19 nt, Homo sapiens
  misc_RNA (1)...(19): siRNA sense strand
caaacucagagaucaauuu

SEQ ID NO: 411173 - RNA, 19 nt, Homo sapiens
  misc_RNA (1)...(19): siRNA sense strand
acacaauccuguugccaaa

SEQ ID NO: 411174 - RNA, 19 nt, Homo sapiens
  misc_RNA (1)...(19): siRNA sense strand
agacaaguuugaccaaguu

SEQ ID NO: 411175 - RNA, 19 nt, Homo sapiens
  misc_RNA (1)...(19): siRNA sense strand
gacgugaacugggccaauu

SEQ ID NO: 411176 - RNA, 19 nt, Homo sapiens
  misc_RNA (1)...(19): siRNA sense strand
ccagagaaacuaaaucguu

SEQ ID NO: 411177 - RNA, 19 nt, Homo sapiens
  misc_RNA (1)...(19): siRNA sense strand
ugauauagucaccuuguua

SEQ ID NO: 411178 - RNA, 19 nt, Homo sapiens
  misc_RNA (1)...(19): siRNA sense strand
aaucagagaagcuggauaa

SEQ ID NO: 411179 - RNA, 19 nt, Homo sapiens
  misc_RNA (1)...(19): siRNA sense strand
uauagggcgucauaugaaa

SEQ ID NO: 411180 - RNA, 19 nt, Homo sapiens
  misc_RNA (1)...(19): siRNA sense strand
gaaggagaaaggcaagauu

SEQ ID NO: 411181 - RNA, 19 nt, Homo sapiens
  misc_RNA (1)...(19): siRNA sense strand
aaaguucagucagaaguaa

SEQ ID NO: 411182 - RNA, 19 nt, Homo sapiens
  misc_RNA (1)...(19): siRNA sense strand
gaaacaaacaacaugaagu

SEQ ID NO: 411183 - RNA, 19 nt, Homo sapiens
  misc_RNA (1)...(19): siRNA sense strand
acucagagaucaauuuaag

SEQ ID NO: 411184 - RNA, 19 nt, Homo sapiens
  misc_RNA (1)...(19): siRNA sense strand
aagaaugaaugaagagaug

SEQ ID NO: 411185 - RNA, 19 nt, Homo sapiens
  misc_RNA (1)...(19): siRNA sense strand
gagaaggaggcauauauca

SEQ ID NO: 411186 - RNA, 19 nt, Homo sapiens
  misc_RNA (1)...(19): siRNA sense strand
gacaggagaaggaggcaua

SEQ ID NO: 411187 - RNA, 19 nt, Homo sapiens
  misc_RNA (1)...(19): siRNA sense strand
uuaugaagcuaauguggaa

SEQ ID NO: 411188 - RNA, 19 nt, Homo sapiens
  misc_RNA (1)...(19): siRNA sense strand
guucagaccaguauugcua

SEQ ID NO: 411189 - RNA, 19 nt, Homo sapiens
  misc_RNA (1)...(19): siRNA sense strand
gagcucugaugauggaaga

SEQ ID NO: 411190 - RNA, 19 nt, Homo sapiens
  misc_RNA (1)...(19): siRNA sense strand
ccagggaugauucuaaauu

SEQ ID NO: 411191 - RNA, 19 nt, Homo sapiens
  misc_RNA (1)...(19): siRNA sense strand
aaacaaagcgacaccacuu

SEQ ID NO: 411192 - RNA, 19 nt, Homo sapiens
  misc_RNA (1)...(19): siRNA sense strand
caaaguucagucagaagua

SEQ ID NO: 411193 - RNA, 19 nt, Homo sapiens
  misc_RNA (1)...(19): siRNA sense strand
gcccaaaguucagucagaa

SEQ ID NO: 411194 - RNA, 19 nt, Homo sapiens
  misc_RNA (1)...(19): siRNA sense strand
cagggcagcuuuggaagaa

SEQ ID NO: 411195 - RNA, 19 nt, Homo sapiens
  misc_RNA (1)...(19): siRNA sense strand
aaagagaaauggagcaaaa

SEQ ID NO: 411196 - RNA, 19 nt, Homo sapiens
  misc_RNA (1)...(19): siRNA sense strand
cagcaagauucacagaaau

SEQ ID NO: 411197 - RNA, 19 nt, Homo sapiens
  misc_RNA (1)...(19): siRNA sense strand
ugaaacuuaucaggacaua

SEQ ID NO: 411198 - RNA, 19 nt, Homo sapiens
  misc_RNA (1)...(19): siRNA sense strand
ccaaucaacaugccacuga

SEQ ID NO: 411199 - RNA, 19 nt, Homo sapiens
  misc_RNA (1)...(19): siRNA sense strand
gagcaucugcccaaaguuc

SEQ ID NO: 411200 - RNA, 19 nt, Homo sapiens
  misc_RNA (1)...(19): siRNA sense strand
gagagaagggugaugaauc

SEQ ID NO: 411201 - RNA, 19 nt, Homo sapiens
  misc_RNA (1)...(19): siRNA sense strand
auaaacaguucaugaaugg

SEQ ID NO: 411202 - RNA, 19 nt, Homo sapiens
  misc_RNA (1)...(19): siRNA sense strand
uggcagaauuggaacuaaa

SEQ ID NO: 411203 - RNA, 19 nt, Homo sapiens
  misc_RNA (1)...(19): siRNA sense strand
uugauaagcuugugaaacu

SEQ ID NO: 411204 - RNA, 19 nt, Homo sapiens
  misc_RNA (1)...(19): siRNA sense strand
gauaagcuugugaaacuug

SEQ ID NO: 411205 - RNA, 19 nt, Homo sapiens
  misc_RNA (1)...(19): siRNA sense strand
gccaagaagcaauuugaaa

SEQ ID NO: 411206 - RNA, 19 nt, Homo sapiens
  misc_RNA (1)...(19): siRNA sense strand
uaaaucguuuccagcaaga

SEQ ID NO: 411207 - RNA, 19 nt, Homo sapiens
  misc_RNA (1)...(19): siRNA sense strand
gugcuaaugucaaccaaag

SEQ ID NO: 411208 - RNA, 19 nt, Homo sapiens
  misc_RNA (1)...(19): siRNA sense strand
gaauggugcuaaugucaac

SEQ ID NO: 411209 - RNA, 19 nt, Homo sapiens
  misc_RNA (1)...(19): siRNA sense strand
caaagcgacaccacuuauu

SEQ ID NO: 411210 - RNA, 19 nt, Homo sapiens
  misc_RNA (1)...(19): siRNA sense strand
ggagaaggaggcauauauc

SEQ ID NO: 411211 - RNA, 19 nt, Homo sapiens
  misc_RNA (1)...(19): siRNA sense strand
gaagaugacuggggauuuc

SEQ ID NO: 411212 - RNA, 19 nt, Homo sapiens
  misc_RNA (1)...(19): siRNA sense strand
ccaaguacaaagaaacaaa

SEQ ID NO: 411213 - RNA, 19 nt, Homo sapiens
  misc_RNA (1)...(19): siRNA sense strand
aaggugauguggcagaauu

SEQ ID NO: 411214 - RNA, 19 nt, Homo sapiens
  misc_RNA (1)...(19): siRNA sense strand
gcacacagggcagguaugu

SEQ ID NO: 411215 - RNA, 19 nt, Homo sapiens
  misc_RNA (1)...(19): siRNA sense strand
uaaaauggcugaggcuuug

SEQ ID NO: 411216 - RNA, 19 nt, Homo sapiens
  misc_RNA (1)...(19): siRNA sense strand
guacgaucuuuaacuuuag

SEQ ID NO: 411217 - RNA, 19 nt, Homo sapiens
  misc_RNA (1)...(19): siRNA sense strand
guccaaagagaaauuauug

SEQ ID NO: 411218 - RNA, 19 nt, Homo sapiens
  misc_RNA (1)...(19): siRNA sense strand
aagccuagauucuggaaau

SEQ ID NO: 411219 - RNA, 19 nt, Homo sapiens
  misc_RNA (1)...(19): siRNA sense strand
cgacugugguaguugaaga

SEQ ID NO: 411220 - RNA, 19 nt, Homo sapiens
  misc_RNA (1)...(19): siRNA sense strand
ggaucuuggugcacaguug

SEQ ID NO: 411221 - RNA, 19 nt, Homo sapiens
  misc_RNA (1)...(19): siRNA sense strand
ucaaagaugccaagaagca

SEQ ID NO: 411222 - RNA, 19 nt, Homo sapiens
  misc_RNA (1)...(19): siRNA sense strand
cagguauguuuauuccuaa

SEQ ID NO: 411223 - RNA, 19 nt, Homo sapiens
  misc_RNA (1)...(19): siRNA sense strand
auccaggacuucagcuuua

SEQ ID NO: 411224 - RNA, 19 nt, Homo sapiens
  misc_RNA (1)...(19): siRNA sense strand
gacaaagacaggagaagga

SEQ ID NO: 411225 - RNA, 19 nt, Homo sapiens
  misc_RNA (1)...(19): siRNA sense strand
agacauagagcgacgauuc

SEQ ID NO: 411226 - RNA, 19 nt, Homo sapiens
  misc_RNA (1)...(19): siRNA sense strand
gcaaugccuucaaaacuug

SEQ ID NO: 411227 - RNA, 19 nt, Homo sapiens
  misc_RNA (1)...(19): siRNA sense strand
ggacagccaggugaugaaa

SEQ ID NO: 411228 - RNA, 19 nt, Homo sapiens
  misc_RNA (1)...(19): siRNA sense strand
gugaguuccuccuacagaa

SEQ ID NO: 411229 - RNA, 19 nt, Homo sapiens
  misc_RNA (1)...(19): siRNA sense strand
ggaaugggcuugcaaaguu

SEQ ID NO: 411230 - RNA, 19 nt, Homo sapiens
  misc_RNA (1)...(19): siRNA sense strand
gagauucugugaagcauua

SEQ ID NO: 411231 - RNA, 19 nt, Homo sapiens
  misc_RNA (1)...(19): siRNA sense strand
ggaaacauaugaauucuuc

SEQ ID NO: 411232 - RNA, 19 nt, Homo sapiens
  misc_RNA (1)...(19): siRNA sense strand
gcacaagggugacuauaau

SEQ ID NO: 411233 - RNA, 19 nt, Homo sapiens
  misc_RNA (1)...(19): siRNA sense strand
ggcaagaacucaauugauu

SEQ ID NO: 411234 - RNA, 19 nt, Homo sapiens
  misc_RNA (1)...(19): siRNA sense strand
gaacugaaaccuagugaaa

SEQ ID NO: 411235 - RNA, 19 nt, Homo sapiens
  misc_RNA (1)...(19): siRNA sense strand
cagagcagcuuuaccauuu

SEQ ID NO: 411236 - RNA, 19 nt, Homo sapiens
  misc_RNA (1)...(19): siRNA sense strand
gaacuaugaugggauauug

SEQ ID NO: 411237 - RNA, 19 nt, Homo sapiens
  misc_RNA (1)...(19): siRNA sense strand
gaaagaacgaggaauauug

SEQ ID NO: 411238 - RNA, 19 nt, Homo sapiens
  misc_RNA (1)...(19): siRNA sense strand
cgaggaauauugugaaauu

SEQ ID NO: 411239 - RNA, 19 nt, Homo sapiens
  misc_RNA (1)...(19): siRNA sense strand
agaagaauguggaaugaua

SEQ ID NO: 411240 - RNA, 19 nt, Homo sapiens
  misc_RNA (1)...(19): siRNA sense strand
ccaaugaacuggcuaaaca

SEQ ID NO: 411241 - RNA, 19 nt, Homo sapiens
  misc_RNA (1)...(19): siRNA sense strand
ggacaaaugcagcugguua

SEQ ID NO: 411242 - RNA, 19 nt, Homo sapiens
  misc_RNA (1)...(19): siRNA sense strand
gauguaaguucuucaguga

SEQ ID NO: 411243 - RNA, 19 nt, Homo sapiens
  misc_RNA (1)...(19): siRNA sense strand
gcaaauaccgucaaacaga

SEQ ID NO: 411244 - RNA, 19 nt, Homo sapiens
  misc_RNA (1)...(19): siRNA sense strand
ggacagauccaagacuuua

SEQ ID NO: 411245 - RNA, 19 nt, Homo sapiens
  misc_RNA (1)...(19): siRNA sense strand
gaacagaacaauggaauga

SEQ ID NO: 411246 - RNA, 19 nt, Homo sapiens
  misc_RNA (1)...(19): siRNA sense strand
gcaagaacucaauugauua

SEQ ID NO: 411247 - RNA, 19 nt, Homo sapiens
  misc_RNA (1)...(19): siRNA sense strand
ggaaugauacugugagaaa

SEQ ID NO: 411248 - RNA, 19 nt, Homo sapiens
  misc_RNA (1)...(19): siRNA sense strand
gagcagcccugacauggaa

SEQ ID NO: 411249 - RNA, 19 nt, Homo sapiens
  misc_RNA (1)...(19): siRNA sense strand
acagggaaauugcauauaa

SEQ ID NO: 411250 - RNA, 19 nt, Homo sapiens
  misc_RNA (1)...(19): siRNA sense strand
gcagccaccuaaccaauuu

SEQ ID NO: 411251 - RNA, 19 nt, Homo sapiens
  misc_RNA (1)...(19): siRNA sense strand
caagagauaaccaacuuua

SEQ ID NO: 411252 - RNA, 19 nt, Homo sapiens
  misc_RNA (1)...(19): siRNA sense strand
cagcugcuauugacuauaa

SEQ ID NO: 411253 - RNA, 19 nt, Homo sapiens
  misc_RNA (1)...(19): siRNA sense strand
gcaagcugguugacacuaa

SEQ ID NO: 411254 - RNA, 19 nt, Homo sapiens
  misc_RNA (1)...(19): siRNA sense strand
caaauaccgucaaacagaa

SEQ ID NO: 411255 - RNA, 19 nt, Homo sapiens
  misc_RNA (1)...(19): siRNA sense strand
ugaaucagcuggcucagaa

SEQ ID NO: 411256 - RNA, 19 nt, Homo sapiens
  misc_RNA (1)...(19): siRNA sense strand
gaacauacaaauaccuuga

SEQ ID NO: 411257 - RNA, 19 nt, Homo sapiens
  misc_RNA (1)...(19): siRNA sense strand
agaaggagauguuagagaa

SEQ ID NO: 411258 - RNA, 19 nt, Homo sapiens
  misc_RNA (1)...(19): siRNA sense strand
uggcauaucucuucacuau

SEQ ID NO: 411259 - RNA, 19 nt, Homo sapiens
  misc_RNA (1)...(19): siRNA sense strand
acagaacaauggaaugaua

SEQ ID NO: 411260 - RNA, 19 nt, Homo sapiens
  misc_RNA (1)...(19): siRNA sense strand
ggacucaccauguauauau

SEQ ID NO: 411261 - RNA, 19 nt, Homo sapiens
  misc_RNA (1)...(19): siRNA sense strand
aaagaaagaacgaggaaua

SEQ ID NO: 411262 - RNA, 19 nt, Homo sapiens
  misc_RNA (1)...(19): siRNA sense strand
cgacaaacgugccgcauca

SEQ ID NO: 411263 - RNA, 19 nt, Homo sapiens
  misc_RNA (1)...(19): siRNA sense strand
uaagaagaauguggaauga

SEQ ID NO: 411264 - RNA, 19 nt, Homo sapiens
  misc_RNA (1)...(19): siRNA sense strand
gauauucucuggaguuugg

SEQ ID NO: 411265 - RNA, 19 nt, Homo sapiens
  misc_RNA (1)...(19): siRNA sense strand
cauauaaacuuccaaaucg

SEQ ID NO: 411266 - RNA, 19 nt, Homo sapiens
  misc_RNA (1)...(19): siRNA sense strand
caauagcacuucaacacuu

SEQ ID NO: 411267 - RNA, 19 nt, Homo sapiens
  misc_RNA (1)...(19): siRNA sense strand
uaagagcuauggaacagaa

SEQ ID NO: 411268 - RNA, 19 nt, Homo sapiens
  misc_RNA (1)...(19): siRNA sense strand
cgaagucugugguuuauca

SEQ ID NO: 411269 - RNA, 19 nt, Homo sapiens
  misc_RNA (1)...(19): siRNA sense strand
gaacgaccaugcccuaagg

SEQ ID NO: 411270 - RNA, 19 nt, Homo sapiens
  misc_RNA (1)...(19): siRNA sense strand
cgagggaacugacagcuau

SEQ ID NO: 411271 - RNA, 19 nt, Homo sapiens
  misc_RNA (1)...(19): siRNA sense strand
gaacucgaggcaccacuua

SEQ ID NO: 411272 - RNA, 19 nt, Homo sapiens
  misc_RNA (1)...(19): siRNA sense strand
ccuguuaccuucauuauuc

SEQ ID NO: 411273 - RNA, 19 nt, Homo sapiens
  misc_RNA (1)...(19): siRNA sense strand
caugauaccucaccauaca

SEQ ID NO: 411274 - RNA, 19 nt, Homo sapiens
  misc_RNA (1)...(19): siRNA sense strand
gcagcucuaccuaauguua

SEQ ID NO: 411275 - RNA, 19 nt, Homo sapiens
  misc_RNA (1)...(19): siRNA sense strand
agauggcguucaugaauua

SEQ ID NO: 411276 - RNA, 19 nt, Homo sapiens
  misc_RNA (1)...(19): siRNA sense strand
gggauaaaguggccucaga

SEQ ID NO: 411277 - RNA, 19 nt, Homo sapiens
  misc_RNA (1)...(19): siRNA sense strand
gaacgaggaauauugugaa

SEQ ID NO: 411278 - RNA, 19 nt, Homo sapiens
  misc_RNA (1)...(19): siRNA sense strand
ggagcuccaucacaaagaa

SEQ ID NO: 411279 - RNA, 19 nt, Homo sapiens
  misc_RNA (1)...(19): siRNA sense strand
gcucuucugugucuucuug

SEQ ID NO: 411280 - RNA, 19 nt, Homo sapiens
  misc_RNA (1)...(19): siRNA sense strand
agagaacuaugaugggaua

SEQ ID NO: 411281 - RNA, 19 nt, Homo sapiens
  misc_RNA (1)...(19): siRNA sense strand
ggaacugccucauaucucu

SEQ ID NO: 411282 - RNA, 19 nt, Homo sapiens
  misc_RNA (1)...(19): siRNA sense strand
gacuugaggacuagaauua

SEQ ID NO: 411283 - RNA, 19 nt, Homo sapiens
  misc_RNA (1)...(19): siRNA sense strand
ggacggaugacaagauuug

SEQ ID NO: 411284 - RNA, 19 nt, Homo sapiens
  misc_RNA (1)...(19): siRNA sense strand
gaaugggcuugcaaaguug

SEQ ID NO: 411285 - RNA, 19 nt, Homo sapiens
  misc_RNA (1)...(19): siRNA sense strand
gaaagcaauuguggacuca

SEQ ID NO: 411286 - RNA, 19 nt, Homo sapiens
  misc_RNA (1)...(19): siRNA sense strand
ggaguccucuaugugguua

SEQ ID NO: 411287 - RNA, 19 nt, Homo sapiens
  misc_RNA (1)...(19): siRNA sense strand
guacuggauuuguggugua

SEQ ID NO: 411288 - RNA, 19 nt, Homo sapiens
  misc_RNA (1)...(19): siRNA sense strand
aaauuugacuugaggacua

SEQ ID NO: 411289 - RNA, 19 nt, Homo sapiens
  misc_RNA (1)...(19): siRNA sense strand
aauagcacuucaacacuua

SEQ ID NO: 411290 - RNA, 19 nt, Homo sapiens
  misc_RNA (1)...(19): siRNA sense strand
gcgaggccauaauuaacua

SEQ ID NO: 411291 - RNA, 19 nt, Homo sapiens
  misc_RNA (1)...(19): siRNA sense strand
caaauaccuugaaguccaa

SEQ ID NO: 411292 - RNA, 19 nt, Homo sapiens
  misc_RNA (1)...(19): siRNA sense strand
acacagagucguauaagaa

SEQ ID NO: 411293 - RNA, 19 nt, Homo sapiens
  misc_RNA (1)...(19): siRNA sense strand
aaacagaacagcaggaaug

SEQ ID NO: 411294 - RNA, 19 nt, Homo sapiens
  misc_RNA (1)...(19): siRNA sense strand
gaacaagcacauacugcaa

SEQ ID NO: 411295 - RNA, 19 nt, Homo sapiens
  misc_RNA (1)...(19): siRNA sense strand
caacgugggagacuguaua

SEQ ID NO: 411296 - RNA, 19 nt, Homo sapiens
  misc_RNA (1)...(19): siRNA sense strand
ugauggugcugucuucuuu

SEQ ID NO: 411297 - RNA, 19 nt, Homo sapiens
  misc_RNA (1)...(19): siRNA sense strand
uuagccagcugaauccaua

SEQ ID NO: 411298 - RNA, 19 nt, Homo sapiens
  misc_RNA (1)...(19): siRNA sense strand
gugcagcucuaccuaaugu

SEQ ID NO: 411299 - RNA, 19 nt, Homo sapiens
  misc_RNA (1)...(19): siRNA sense strand
cagggaaauugcauauaaa

SEQ ID NO: 411300 - RNA, 19 nt, Homo sapiens
  misc_RNA (1)...(19): siRNA sense strand
caaccaguaucaguauauu

SEQ ID NO: 411301 - RNA, 19 nt, Homo sapiens
  misc_RNA (1)...(19): siRNA sense strand
gcacuucaacacuuaauca

SEQ ID NO: 411302 - RNA, 19 nt, Homo sapiens
  misc_RNA (1)...(19): siRNA sense strand
gaagguuauucuauagauc

SEQ ID NO: 411303 - RNA, 19 nt, Homo sapiens
  misc_RNA (1)...(19): siRNA sense strand
gcagagcagcuuuaccauu

SEQ ID NO: 411304 - RNA, 19 nt, Homo sapiens
  misc_RNA (1)...(19): siRNA sense strand
cagugaagaugaugcuauu

SEQ ID NO: 411305 - RNA, 19 nt, Homo sapiens
  misc_RNA (1)...(19): siRNA sense strand
cuacagagugaccgaaaua

SEQ ID NO: 411306 - RNA, 19 nt, Homo sapiens
  misc_RNA (1)...(19): siRNA sense strand
ucugagaccugaagcuuug

SEQ ID NO: 411307 - RNA, 19 nt, Homo sapiens
  misc_RNA (1)...(19): siRNA sense strand
cugcuagucuugccaauga

SEQ ID NO: 411308 - RNA, 19 nt, Homo sapiens
  misc_RNA (1)...(19): siRNA sense strand
ucaagacaaugaaagugaa

SEQ ID NO: 411309 - RNA, 19 nt, Homo sapiens
  misc_RNA (1)...(19): siRNA sense strand
gaauuauccugugaagguu

SEQ ID NO: 411310 - RNA, 19 nt, Homo sapiens
  misc_RNA (1)...(19): siRNA sense strand
gccaaacaacaacauauaa

SEQ ID NO: 411311 - RNA, 19 nt, Homo sapiens
  misc_RNA (1)...(19): siRNA sense strand
gcccugacauggaagaaga

SEQ ID NO: 411312 - RNA, 19 nt, Homo sapiens
  misc_RNA (1)...(19): siRNA sense strand
acaagcaugcccaaucuua

SEQ ID NO: 411313 - RNA, 19 nt, Homo sapiens
  misc_RNA (1)...(19): siRNA sense strand
ggauacaagugccauggau

SEQ ID NO: 411314 - RNA, 19 nt, Homo sapiens
  misc_RNA (1)...(19): siRNA sense strand
ggaccuguuaccuucauua

SEQ ID NO: 411315 - RNA, 19 nt, Homo sapiens
  misc_RNA (1)...(19): siRNA sense strand
cagagugaccgaaauacua

SEQ ID NO: 411316 - RNA, 19 nt, Homo sapiens
  misc_RNA (1)...(19): siRNA sense strand
guauauugcugcaguggau

SEQ ID NO: 411317 - RNA, 19 nt, Homo sapiens
  misc_RNA (1)...(19): siRNA sense strand
uccauacacucuucgauuu

SEQ ID NO: 411318 - RNA, 19 nt, Homo sapiens
  misc_RNA (1)...(19): siRNA sense strand
gaggaaagacugauaucga

SEQ ID NO: 411319 - RNA, 19 nt, Homo sapiens
  misc_RNA (1)...(19): siRNA sense strand
guaccgauacuuuaauaga

SEQ ID NO: 411320 - RNA, 19 nt, Homo sapiens
  misc_RNA (1)...(19): siRNA sense strand
uaacaaagaaggguguauu

SEQ ID NO: 411321 - RNA, 19 nt, Homo sapiens
  misc_RNA (1)...(19): siRNA sense strand
uaucucaggugacaucaau

SEQ ID NO: 411322 - RNA, 19 nt, Homo sapiens
  misc_RNA (1)...(19): siRNA sense strand
uaaagaguccagccgagua

SEQ ID NO: 411323 - RNA, 19 nt, Homo sapiens
  misc_RNA (1)...(19): siRNA sense strand
uaaaguggccucagacaca

SEQ ID NO: 411324 - RNA, 19 nt, Homo sapiens
  misc_RNA (1)...(19): siRNA sense strand
ugagauugauggagcaguu

SEQ ID NO: 411325 - RNA, 19 nt, Homo sapiens
  misc_RNA (1)...(19): siRNA sense strand
ggagguagcagcagugaag

SEQ ID NO: 411326 - RNA, 19 nt, Homo sapiens
  misc_RNA (1)...(19): siRNA sense strand
gaucauuucagaauuagug

SEQ ID NO: 411327 - RNA, 19 nt, Homo sapiens
  misc_RNA (1)...(19): siRNA sense strand
caaaguugguguucaucau

SEQ ID NO: 411328 - RNA, 19 nt, Homo sapiens
  misc_RNA (1)...(19): siRNA sense strand
gggcaauagugaugguuau

SEQ ID NO: 411329 - RNA, 19 nt, Homo sapiens
  misc_RNA (1)...(19): siRNA sense strand
ccacagaucuccaggauua

SEQ ID NO: 411330 - RNA, 19 nt, Homo sapiens
  misc_RNA (1)...(19): siRNA sense strand
gagaagagauugugcugaa

SEQ ID NO: 411331 - RNA, 19 nt, Homo sapiens
  misc_RNA (1)...(19): siRNA sense strand
gaauuuaggucggauguuu

SEQ ID NO: 411332 - RNA, 19 nt, Homo sapiens
  misc_RNA (1)...(19): siRNA sense strand
acaaggaacuggcaaauau

SEQ ID NO: 411333 - RNA, 19 nt, Homo sapiens
  misc_RNA (1)...(19): siRNA sense strand
uggcaaagcucaagaagaa

SEQ ID NO: 411334 - RNA, 19 nt, Homo sapiens
  misc_RNA (1)...(19): siRNA sense strand
gaagaacccagaagaguuu

SEQ ID NO: 411335 - RNA, 19 nt, Homo sapiens
  misc_RNA (1)...(19): siRNA sense strand
gaaauggcuucucaggauu

SEQ ID NO: 411336 - RNA, 19 nt, Homo sapiens
  misc_RNA (1)...(19): siRNA sense strand
gauaccaucuugaacuuga

SEQ ID NO: 411337 - RNA, 19 nt, Homo sapiens
  misc_RNA (1)...(19): siRNA sense strand
gcccaucacucucaacaaa

SEQ ID NO: 411338 - RNA, 19 nt, Homo sapiens
  misc_RNA (1)...(19): siRNA sense strand
gcucugaguucucccauga

SEQ ID NO: 411339 - RNA, 19 nt, Homo sapiens
  misc_RNA (1)...(19): siRNA sense strand
gccaucagcuuaaucauuc

SEQ ID NO: 411340 - RNA, 19 nt, Homo sapiens
  misc_RNA (1)...(19): siRNA sense strand
cagaacaucuucaaagcaa

SEQ ID NO: 411341 - RNA, 19 nt, Homo sapiens
  misc_RNA (1)...(19): siRNA sense strand
ucaaacagauacacggaaa

SEQ ID NO: 411342 - RNA, 19 nt, Homo sapiens
  misc_RNA (1)...(19): siRNA sense strand
caacaacgccaucaagaau

SEQ ID NO: 411343 - RNA, 19 nt, Homo sapiens
  misc_RNA (1)...(19): siRNA sense strand
cagacgaccuucagccuaa

SEQ ID NO: 411344 - RNA, 19 nt, Homo sapiens
  misc_RNA (1)...(19): siRNA sense strand
ggacacagaagucaccaaa

SEQ ID NO: 411345 - RNA, 19 nt, Homo sapiens
  misc_RNA (1)...(19): siRNA sense strand
ccaucacucucaacaaauu

SEQ ID NO: 411346 - RNA, 19 nt, Homo sapiens
  misc_RNA (1)...(19): siRNA sense strand
ugaagaaguugauccuaau

SEQ ID NO: 411347 - RNA, 19 nt, Homo sapiens
  misc_RNA (1)...(19): siRNA sense strand
gcaaagcucaagaagaaga

SEQ ID NO: 411348 - RNA, 19 nt, Homo sapiens
  misc_RNA (1)...(19): siRNA sense strand
ucaacgcccugaagacuga

SEQ ID NO: 411349 - RNA, 19 nt, Homo sapiens
  misc_RNA (1)...(19): siRNA sense strand
uugaagaaguugauccuaa

SEQ ID NO: 411350 - RNA, 19 nt, Homo sapiens
  misc_RNA (1)...(19): siRNA sense strand
agacaacuuugccagguuu

SEQ ID NO: 411351 - RNA, 19 nt, Homo sapiens
  misc_RNA (1)...(19): siRNA sense strand
uggcaaauaucagaucaaa

SEQ ID NO: 411352 - RNA, 19 nt, Homo sapiens
  misc_RNA (1)...(19): siRNA sense strand
caggauuucuuucaacguu

SEQ ID NO: 411353 - RNA, 19 nt, Homo sapiens
  misc_RNA (1)...(19): siRNA sense strand
acaacgccaucaagaauga

SEQ ID NO: 411354 - RNA, 19 nt, Homo sapiens
  misc_RNA (1)...(19): siRNA sense strand
guaaggaagccguuucuca

SEQ ID NO: 411355 - RNA, 19 nt, Homo sapiens
  misc_RNA (1)...(19): siRNA sense strand
gcacuugggugugguaacu

SEQ ID NO: 411356 - RNA, 19 nt, Homo sapiens
  misc_RNA (1)...(19): siRNA sense strand
gaacccagaagaguuuaaa

SEQ ID NO: 411357 - RNA, 19 nt, Homo sapiens
  misc_RNA (1)...(19): siRNA sense strand
caaguugcucuucaucuuu

SEQ ID NO: 411358 - RNA, 19 nt, Homo sapiens
  misc_RNA (1)...(19): siRNA sense strand
cgugggagcuggaaucauc

SEQ ID NO: 411359 - RNA, 19 nt, Homo sapiens
  misc_RNA (1)...(19): siRNA sense strand
ggaacuggcaaauaucaga

SEQ ID NO: 411360 - RNA, 19 nt, Homo sapiens
  misc_RNA (1)...(19): siRNA sense strand
ggucggauguuuaucuuuu

SEQ ID NO: 411361 - RNA, 19 nt, Homo sapiens
  misc_RNA (1)...(19): siRNA sense strand
gaacaucuucaaagcaaag

SEQ ID NO: 411362 - RNA, 19 nt, Homo sapiens
  misc_RNA (1)...(19): siRNA sense strand
gcugugaaccugcugaguu

SEQ ID NO: 411363 - RNA, 19 nt, Homo sapiens
  misc_RNA (1)...(19): siRNA sense strand
ucagagauuaugugaauug

SEQ ID NO: 411364 - RNA, 19 nt, Homo sapiens
  misc_RNA (1)...(19): siRNA sense strand
caagaucauuggauuuggu

SEQ ID NO: 411365 - RNA, 19 nt, Homo sapiens
  misc_RNA (1)...(19): siRNA sense strand
acacagaagucaccaaagc

SEQ ID NO: 411366 - RNA, 19 nt, Homo sapiens
  misc_RNA (1)...(19): siRNA sense strand
gacauugacuuuggacaca

SEQ ID NO: 411367 - RNA, 19 nt, Homo sapiens
  misc_RNA (1)...(19): siRNA sense strand
ccgaauugcuggugauuac

SEQ ID NO: 411368 - RNA, 19 nt, Homo sapiens
  misc_RNA (1)...(19): siRNA sense strand
aagcagaucggcuaccuuu

SEQ ID NO: 411369 - RNA, 19 nt, Homo sapiens
  misc_RNA (1)...(19): siRNA sense strand
acgagaaccuggucaaagu

SEQ ID NO: 411370 - RNA, 19 nt, Homo sapiens
  misc_RNA (1)...(19): siRNA sense strand
gugauuacgugagugaaga

SEQ ID NO: 411371 - RNA, 19 nt, Homo sapiens
  misc_RNA (1)...(19): siRNA sense strand
ggccaucagcuuaaucauu

SEQ ID NO: 411372 - RNA, 19 nt, Homo sapiens
  misc_RNA (1)...(19): siRNA sense strand
aaugguguguuguuugaaa

SEQ ID NO: 411373 - RNA, 19 nt, Homo sapiens
  misc_RNA (1)...(19): siRNA sense strand
gaucaacaacgccaucaag

SEQ ID NO: 411374 - RNA, 19 nt, Homo sapiens
  misc_RNA (1)...(19): siRNA sense strand
caccaaagccaagaucauu

SEQ ID NO: 411375 - RNA, 19 nt, Homo sapiens
  misc_RNA (1)...(19): siRNA sense strand
gcagcagguggucaacaua

SEQ ID NO: 411376 - RNA, 19 nt, Homo sapiens
  misc_RNA (1)...(19): siRNA sense strand
ucaacaacgccaucaagaa

SEQ ID NO: 411377 - RNA, 19 nt, Homo sapiens
  misc_RNA (1)...(19): siRNA sense strand
ggacuacaccugguaugug

SEQ ID NO: 411378 - RNA, 19 nt, Homo sapiens
  misc_RNA (1)...(19): siRNA sense strand
ggauuugguucugcacuuc

SEQ ID NO: 411379 - RNA, 19 nt, Homo sapiens
  misc_RNA (1)...(19): siRNA sense strand
ucauucagaucgucaucaa

SEQ ID NO: 411380 - RNA, 19 nt, Homo sapiens
  misc_RNA (1)...(19): siRNA sense strand
gcacagaagaacccagaag

SEQ ID NO: 411381 - RNA, 19 nt, Homo sapiens
  misc_RNA (1)...(19): siRNA sense strand
gaagaaguugauccuaauc

SEQ ID NO: 411382 - RNA, 19 nt, Homo sapiens
  misc_RNA (1)...(19): siRNA sense strand
gcagaacaucuucaaagca

SEQ ID NO: 411383 - RNA, 19 nt, Homo sapiens
  misc_RNA (1)...(19): siRNA sense strand
gaaaaccagcugcuucaaa

SEQ ID NO: 411384 - RNA, 19 nt, Homo sapiens
  misc_RNA (1)...(19): siRNA sense strand
uggccgagaugcugagcua

SEQ ID NO: 411385 - RNA, 19 nt, Homo sapiens
  misc_RNA (1)...(19): siRNA sense strand
agaagaacccagaagaguu

SEQ ID NO: 411386 - RNA, 19 nt, Homo sapiens
  misc_RNA (1)...(19): siRNA sense strand
gcucuugauggcuauagua

SEQ ID NO: 411387 - RNA, 19 nt, Homo sapiens
  misc_RNA (1)...(19): siRNA sense strand
aagcaaagcacccaaugga

SEQ ID NO: 411388 - RNA, 19 nt, Homo sapiens
  misc_RNA (1)...(19): siRNA sense strand
caaagcaaagcacccaaug

SEQ ID NO: 411389 - RNA, 19 nt, Homo sapiens
  misc_RNA (1)...(19): siRNA sense strand
gaaccgcccaagucgaaga

SEQ ID NO: 411390 - RNA, 19 nt, Homo sapiens
  misc_RNA (1)...(19): siRNA sense strand
gaacuggcaaauaucagau

SEQ ID NO: 411391 - RNA, 19 nt, Homo sapiens
  misc_RNA (1)...(19): siRNA sense strand
uggauaccaucuugaacuu

SEQ ID NO: 411392 - RNA, 19 nt, Homo sapiens
  misc_RNA (1)...(19): siRNA sense strand
gugcagaacaucuucaaag

SEQ ID NO: 411393 - RNA, 19 nt, Homo sapiens
  misc_RNA (1)...(19): siRNA sense strand
caacauucaguucagguau

SEQ ID NO: 411394 - RNA, 19 nt, Homo sapiens
  misc_RNA (1)...(19): siRNA sense strand
uggugcaccugcucaauga

SEQ ID NO: 411395 - RNA, 19 nt, Homo sapiens
  misc_RNA (1)...(19): siRNA sense strand
gaaccugcaagcccagaug

SEQ ID NO: 411396 - RNA, 19 nt, Homo sapiens
  misc_RNA (1)...(19): siRNA sense strand
ggaagcaguugagcaaucc

SEQ ID NO: 411397 - RNA, 19 nt, Homo sapiens
  misc_RNA (1)...(19): siRNA sense strand
ggauauccgcaacuguaaa

SEQ ID NO: 411398 - RNA, 19 nt, Homo sapiens
  misc_RNA (1)...(19): siRNA sense strand
uaaacaaggaacuggcaaa

SEQ ID NO: 411399 - RNA, 19 nt, Homo sapiens
  misc_RNA (1)...(19): siRNA sense strand
cgaccgugcuggaggagau

SEQ ID NO: 411400 - RNA, 19 nt, Homo sapiens
  misc_RNA (1)...(19): siRNA sense strand
gauccgaauugcuggugau

SEQ ID NO: 411401 - RNA, 19 nt, Homo sapiens
  misc_RNA (1)...(19): siRNA sense strand
agaaguacgcgguggacua

SEQ ID NO: 411402 - RNA, 19 nt, Homo sapiens
  misc_RNA (1)...(19): siRNA sense strand
aaaguacgucugcaaguug

SEQ ID NO: 411403 - RNA, 19 nt, Homo sapiens
  misc_RNA (1)...(19): siRNA sense strand
ugagugaagagguguggua

SEQ ID NO: 411404 - RNA, 19 nt, Homo sapiens
  misc_RNA (1)...(19): siRNA sense strand
gaaguacgcgguggacuac

SEQ ID NO: 411405 - RNA, 19 nt, Homo sapiens
  misc_RNA (1)...(19): siRNA sense strand
gagaccauccugaacaaag

SEQ ID NO: 411406 - RNA, 19 nt, Homo sapiens
  misc_RNA (1)...(19): siRNA sense strand
ggaaucauccacacgaaaa

SEQ ID NO: 411407 - RNA, 19 nt, Homo sapiens
  misc_RNA (1)...(19): siRNA sense strand
aaaaccagcugcuucaaau

SEQ ID NO: 411408 - RNA, 19 nt, Homo sapiens
  misc_RNA (1)...(19): siRNA sense strand
gaggugugguaccgaguca

SEQ ID NO: 411409 - RNA, 19 nt, Homo sapiens
  misc_RNA (1)...(19): siRNA sense strand
cuucgaggccaucagcuua

SEQ ID NO: 411410 - RNA, 19 nt, Homo sapiens
  misc_RNA (1)...(19): siRNA sense strand
cagaagaacccagaagagu

SEQ ID NO: 411411 - RNA, 19 nt, Homo sapiens
  misc_RNA (1)...(19): siRNA sense strand
uggaagcaguugagcaauc

SEQ ID NO: 411412 - RNA, 19 nt, Homo sapiens
  misc_RNA (1)...(19): siRNA sense strand
gcuccuggcuccgaagaca

SEQ ID NO: 411413 - RNA, 19 nt, Homo sapiens
  misc_RNA (1)...(19): siRNA sense strand
ccaccuacaucaaguucgu

SEQ ID NO: 411414 - RNA, 19 nt, Homo sapiens
  misc_RNA (1)...(19): siRNA sense strand
ugacuacuccauccgagaa

SEQ ID NO: 411415 - RNA, 19 nt, Homo sapiens
  misc_RNA (1)...(19): siRNA sense strand
uggagaccauccugaacaa

SEQ ID NO: 411416 - RNA, 19 nt, Homo sapiens
  misc_RNA (1)...(19): siRNA sense strand
ucacgcugcgcacaaguaa

SEQ ID NO: 411417 - RNA, 19 nt, Homo sapiens
  misc_RNA (1)...(19): siRNA sense strand
auccuaauccugcgaauuu

SEQ ID NO: 411418 - RNA, 19 nt, Homo sapiens
  misc_RNA (1)...(19): siRNA sense strand
gaagucaccaaagccaaga

SEQ ID NO: 411419 - RNA, 19 nt, Homo sapiens
  misc_RNA (1)...(19): siRNA sense strand
gcaauccacagcaggaagu

SEQ ID NO: 411420 - RNA, 19 nt, Homo sapiens
  misc_RNA (1)...(19): siRNA sense strand
caacuuugccagguuuguu

SEQ ID NO: 411421 - RNA, 19 nt, Homo sapiens
  misc_RNA (1)...(19): siRNA sense strand
gaggccaucagcuuaauca

SEQ ID NO: 411422 - RNA, 19 nt, Homo sapiens
  misc_RNA (1)...(19): siRNA sense strand
aagaaccgcccaagucgaa

SEQ ID NO: 411423 - RNA, 19 nt, Homo sapiens
  misc_RNA (1)...(19): siRNA sense strand
caaguaaggaagccguuuc

SEQ ID NO: 411424 - RNA, 19 nt, Homo sapiens
  misc_RNA (1)...(19): siRNA sense strand
guuggaagcaguugagcaa

SEQ ID NO: 411425 - RNA, 19 nt, Homo sapiens
  misc_RNA (1)...(19): siRNA sense strand
cgccaguccucaacauuca

SEQ ID NO: 411426 - RNA, 19 nt, Homo sapiens
  misc_RNA (1)...(19): siRNA sense strand
uugccagguuuguuuguaa

SEQ ID NO: 411427 - RNA, 19 nt, Homo sapiens
  misc_RNA (1)...(19): siRNA sense strand
cugcugaguucaaacagau

SEQ ID NO: 411428 - RNA, 19 nt, Homo sapiens
  misc_RNA (1)...(19): siRNA sense strand
gcgccaguccucaacauuc

SEQ ID NO: 411429 - RNA, 19 nt, Homo sapiens
  misc_RNA (1)...(19): siRNA sense strand
ggaaacccuucaaauaguu

SEQ ID NO: 411430 - RNA, 19 nt, Homo sapiens
  misc_RNA (1)...(19): siRNA sense strand
acaggaaacccuucaaaua

SEQ ID NO: 411431 - RNA, 19 nt, Homo sapiens
  misc_RNA (1)...(19): siRNA sense strand
ucacaggucuauaugagaa

SEQ ID NO: 411432 - RNA, 19 nt, Homo sapiens
  misc_RNA (1)...(19): siRNA sense strand
ggucagaugucagguuuga

SEQ ID NO: 411433 - RNA, 19 nt, Homo sapiens
  misc_RNA (1)...(19): siRNA sense strand
gcagggaacagaacaguga

SEQ ID NO: 411434 - RNA, 19 nt, Homo sapiens
  misc_RNA (1)...(19): siRNA sense strand
ggaggugucauacgcauaa

SEQ ID NO: 411435 - RNA, 19 nt, Homo sapiens
  misc_RNA (1)...(19): siRNA sense strand
ggagagagcgugaccuugu

SEQ ID NO: 411436 - RNA, 19 nt, Homo sapiens
  misc_RNA (1)...(19): siRNA sense strand
caggaaacccuucaaauag

SEQ ID NO: 411437 - RNA, 19 nt, Homo sapiens
  misc_RNA (1)...(19): siRNA sense strand
caucacaggucuauaugag

SEQ ID NO: 411438 - RNA, 19 nt, Homo sapiens
  misc_RNA (1)...(19): siRNA sense strand
gaacauuccaggccgacuu

SEQ ID NO: 411439 - RNA, 19 nt, Homo sapiens
  misc_RNA (1)...(19): siRNA sense strand
ggaggaaccuacagaugcu

SEQ ID NO: 411440 - RNA, 19 nt, Homo sapiens
  misc_RNA (1)...(19): siRNA sense strand
gcagggaccuacagaugcu

SEQ ID NO: 411441 - RNA, 19 nt, Homo sapiens
  misc_RNA (1)...(19): siRNA sense strand
ggugaaaucagaagagaca

SEQ ID NO: 411442 - RNA, 19 nt, Homo sapiens
  misc_RNA (1)...(19): siRNA sense strand
uaugacauguaccaucuau

SEQ ID NO: 411443 - RNA, 19 nt, Homo sapiens
  misc_RNA (1)...(19): siRNA sense strand
gagcuccuaugacauguac

SEQ ID NO: 411444 - RNA, 19 nt, Homo sapiens
  misc_RNA (1)...(19): siRNA sense strand
gagagagcgugaccuuguc

SEQ ID NO: 411445 - RNA, 19 nt, Homo sapiens
  misc_RNA (1)...(19): siRNA sense strand
agacagucauccugcaaug

SEQ ID NO: 411446 - RNA, 19 nt, Homo sapiens
  misc_RNA (1)...(19): siRNA sense strand
ucaaauaguuggccuucac

SEQ ID NO: 411447 - RNA, 19 nt, Homo sapiens
  misc_RNA (1)...(19): siRNA sense strand
aggaaacccuucaaauagu

SEQ ID NO: 411448 - RNA, 19 nt, Homo sapiens
  misc_RNA (1)...(19): siRNA sense strand
ucacaggaaacccuucaaa

SEQ ID NO: 411449 - RNA, 19 nt, Homo sapiens
  misc_RNA (1)...(19): siRNA sense strand
ccuaugacauguaccaucu

SEQ ID NO: 411450 - RNA, 19 nt, Homo sapiens
  misc_RNA (1)...(19): siRNA sense strand
ucccggagcuccuaugaca

SEQ ID NO: 411451 - RNA, 19 nt, Homo sapiens
  misc_RNA (1)...(19): siRNA sense strand
caaggucaacggaacauuc

SEQ ID NO: 411452 - RNA, 19 nt, Homo sapiens
  misc_RNA (1)...(19): siRNA sense strand
gaaacccuucaaauaguug

SEQ ID NO: 411453 - RNA, 19 nt, Homo sapiens
  misc_RNA (1)...(19): siRNA sense strand
acagaugcuucggcucuuu

SEQ ID NO: 411454 - RNA, 19 nt, Homo sapiens
  misc_RNA (1)...(19): siRNA sense strand
ccacggaggaaccuacaga

SEQ ID NO: 411455 - RNA, 19 nt, Homo sapiens
  misc_RNA (1)...(19): siRNA sense strand
caauguuggucagauguca

SEQ ID NO: 411456 - RNA, 19 nt, Homo sapiens
  misc_RNA (1)...(19): siRNA sense strand
uuggucagaugucagguuu

SEQ ID NO: 411457 - RNA, 19 nt, Homo sapiens
  misc_RNA (1)...(19): siRNA sense strand
acagucauccugcaauguu

SEQ ID NO: 411458 - RNA, 19 nt, Homo sapiens
  misc_RNA (1)...(19): siRNA sense strand
ggacacuuugcaccucauu

SEQ ID NO: 411459 - RNA, 19 nt, Homo sapiens
  misc_RNA (1)...(19): siRNA sense strand
ggagcuccuaugacaugua

SEQ ID NO: 411460 - RNA, 19 nt, Homo sapiens
  misc_RNA (1)...(19): siRNA sense strand
ggauucugaugaacaagac

SEQ ID NO: 411461 - RNA, 19 nt, Homo sapiens
  misc_RNA (1)...(19): siRNA sense strand
cacaggaaacccuucaaau

SEQ ID NO: 411462 - RNA, 19 nt, Homo sapiens
  misc_RNA (1)...(19): siRNA sense strand
cuacagaugcuacgguucu

SEQ ID NO: 411463 - RNA, 19 nt, Homo sapiens
  misc_RNA (1)...(19): siRNA sense strand
caggagagagcgugaccuu

SEQ ID NO: 411464 - RNA, 19 nt, Homo sapiens
  misc_RNA (1)...(19): siRNA sense strand
ccggagcuccuaugacaug

SEQ ID NO: 411465 - RNA, 19 nt, Homo sapiens
  misc_RNA (1)...(19): siRNA sense strand
gagacagucauccugcaau

SEQ ID NO: 411466 - RNA, 19 nt, Homo sapiens
  misc_RNA (1)...(19): siRNA sense strand
cagucauccugcaauguug

SEQ ID NO: 411467 - RNA, 19 nt, Homo sapiens
  misc_RNA (1)...(19): siRNA sense strand
cugcaauguuggucagaug

SEQ ID NO: 411468 - RNA, 19 nt, Homo sapiens
  misc_RNA (1)...(19): siRNA sense strand
gugacccacugcuuguuuc

SEQ ID NO: 411469 - RNA, 19 nt, Homo sapiens
  misc_RNA (1)...(19): siRNA sense strand
ugacauguaccaucuaucc

SEQ ID NO: 411470 - RNA, 19 nt, Homo sapiens
  misc_RNA (1)...(19): siRNA sense strand
gggaacagaacagugaaca

SEQ ID NO: 411471 - RNA, 19 nt, Homo sapiens
  misc_RNA (1)...(19): siRNA sense strand
gagagaaugugaccuuguc

SEQ ID NO: 411472 - RNA, 19 nt, Homo sapiens
  misc_RNA (1)...(19): siRNA sense strand
gcaggaaccuacagaugcu

SEQ ID NO: 411473 - RNA, 19 nt, Homo sapiens
  misc_RNA (1)...(19): siRNA sense strand
ggagggaccuacagaugcu

SEQ ID NO: 411474 - RNA, 19 nt, Homo sapiens
  misc_RNA (1)...(19): siRNA sense strand
ggugaaaucagaagagaca

SEQ ID NO: 411475 - RNA, 19 nt, Homo sapiens
  misc_RNA (1)...(19): siRNA sense strand
agacagucauccugcaaug

SEQ ID NO: 411476 - RNA, 19 nt, Homo sapiens
  misc_RNA (1)...(19): siRNA sense strand
gugauccacugcuuguuuc

SEQ ID NO: 411477 - RNA, 19 nt, Homo sapiens
  misc_RNA (1)...(19): siRNA sense strand
ggagagaaugugaccuugu

SEQ ID NO: 411478 - RNA, 19 nt, Homo sapiens
  misc_RNA (1)...(19): siRNA sense strand
cagcaucaacggaacauuc

SEQ ID NO: 411479 - RNA, 19 nt, Homo sapiens
  misc_RNA (1)...(19): siRNA sense strand
acagaugcuucggcucuuu

SEQ ID NO: 411480 - RNA, 19 nt, Homo sapiens
  misc_RNA (1)...(19): siRNA sense strand
caggagagaaugugaccuu

SEQ ID NO: 411481 - RNA, 19 nt, Homo sapiens
  misc_RNA (1)...(19): siRNA sense strand
acagucauccugcaauguu

SEQ ID NO: 411482 - RNA, 19 nt, Homo sapiens
  misc_RNA (1)...(19): siRNA sense strand
caaggccaacuucuccauu

SEQ ID NO: 411483 - RNA, 19 nt, Homo sapiens
  misc_RNA (1)...(19): siRNA sense strand
cuacagaugcuacgguucu

SEQ ID NO: 411484 - RNA, 19 nt, Homo sapiens
  misc_RNA (1)...(19): siRNA sense strand
gagacagucauccugcaau

SEQ ID NO: 411485 - RNA, 19 nt, Homo sapiens
  misc_RNA (1)...(19): siRNA sense strand
cagucauccugcaauguug

SEQ ID NO: 411486 - RNA, 19 nt, Homo sapiens
  misc_RNA (1)...(19): siRNA sense strand
gagagaaugugaccuuguc

SEQ ID NO: 411487 - RNA, 19 nt, Homo sapiens
  misc_RNA (1)...(19): siRNA sense strand
gcaggaaccuacagaugcu

SEQ ID NO: 411488 - RNA, 19 nt, Homo sapiens
  misc_RNA (1)...(19): siRNA sense strand
ggagggaccuacagaugcu

SEQ ID NO: 411489 - RNA, 19 nt, Homo sapiens
  misc_RNA (1)...(19): siRNA sense strand
ggugaaaucagaagagaca

SEQ ID NO: 411490 - RNA, 19 nt, Homo sapiens
  misc_RNA (1)...(19): siRNA sense strand
agacagucauccugcaaug

SEQ ID NO: 411491 - RNA, 19 nt, Homo sapiens
  misc_RNA (1)...(19): siRNA sense strand
ccagacaccuacauguucu

SEQ ID NO: 411492 - RNA, 19 nt, Homo sapiens
  misc_RNA (1)...(19): siRNA sense strand
gugauccacugcuuguuuc

SEQ ID NO: 411493 - RNA, 19 nt, Homo sapiens
  misc_RNA (1)...(19): siRNA sense strand
ggagagaaugugaccuugu

SEQ ID NO: 411494 - RNA, 19 nt, Homo sapiens
  misc_RNA (1)...(19): siRNA sense strand
cagcaucaacggaacauuc

SEQ ID NO: 411495 - RNA, 19 nt, Homo sapiens
  misc_RNA (1)...(19): siRNA sense strand
acagaugcuucggcucuuu

SEQ ID NO: 411496 - RNA, 19 nt, Homo sapiens
  misc_RNA (1)...(19): siRNA sense strand
caggagagaaugugaccuu

SEQ ID NO: 411497 - RNA, 19 nt, Homo sapiens
  misc_RNA (1)...(19): siRNA sense strand
acagucauccugcaauguu

SEQ ID NO: 411498 - RNA, 19 nt, Homo sapiens
  misc_RNA (1)...(19): siRNA sense strand
caaggccaacuucuccauu

SEQ ID NO: 411499 - RNA, 19 nt, Homo sapiens
  misc_RNA (1)...(19): siRNA sense strand
cuacagaugcuacgguucu

SEQ ID NO: 411500 - RNA, 19 nt, Homo sapiens
  misc_RNA (1)...(19): siRNA sense strand
gagacagucauccugcaau

SEQ ID NO: 411501 - RNA, 19 nt, Homo sapiens
  misc_RNA (1)...(19): siRNA sense strand
cagucauccugcaauguug

SEQ ID NO: 411502 - RNA, 19 nt, Homo sapiens
  misc_RNA (1)...(19): siRNA sense strand
ggagguggauuauuugaug

SEQ ID NO: 411503 - RNA, 19 nt, Homo sapiens
  misc_RNA (1)...(19): siRNA sense strand
gaaacacucucagaugcua

SEQ ID NO: 411504 - RNA, 19 nt, Homo sapiens
  misc_RNA (1)...(19): siRNA sense strand
gaugacauguuugaagaua

SEQ ID NO: 411505 - RNA, 19 nt, Homo sapiens
  misc_RNA (1)...(19): siRNA sense strand
ggacaaagagguaguggaa

SEQ ID NO: 411506 - RNA, 19 nt, Homo sapiens
  misc_RNA (1)...(19): siRNA sense strand
gaggaaauaugguuacuac

SEQ ID NO: 411507 - RNA, 19 nt, Homo sapiens
  misc_RNA (1)...(19): siRNA sense strand
ggaaauaugguuacuacau

SEQ ID NO: 411508 - RNA, 19 nt, Homo sapiens
  misc_RNA (1)...(19): siRNA sense strand
gaaggccuuucacaaguug

SEQ ID NO: 411509 - RNA, 19 nt, Homo sapiens
  misc_RNA (1)...(19): siRNA sense strand
gaaguaccacccugacaaa

SEQ ID NO: 411510 - RNA, 19 nt, Homo sapiens
  misc_RNA (1)...(19): siRNA sense strand
ugacauguuugaagauaug

SEQ ID NO: 411511 - RNA, 19 nt, Homo sapiens
  misc_RNA (1)...(19): siRNA sense strand
caacgaagaggaaauaugg

SEQ ID NO: 411512 - RNA, 19 nt, Homo sapiens
  misc_RNA (1)...(19): siRNA sense strand
caagaaggccuuucacaag

SEQ ID NO: 411513 - RNA, 19 nt, Homo sapiens
  misc_RNA (1)...(19): siRNA sense strand
gagcagucauuuaacuuca

SEQ ID NO: 411514 - RNA, 19 nt, Homo sapiens
  misc_RNA (1)...(19): siRNA sense strand
gguaaaggacaaagaggua

SEQ ID NO: 411515 - RNA, 19 nt, Homo sapiens
  misc_RNA (1)...(19): siRNA sense strand
acaaagagguaguggaagu

SEQ ID NO: 411516 - RNA, 19 nt, Homo sapiens
  misc_RNA (1)...(19): siRNA sense strand
guagacaaaggcaucauuu

SEQ ID NO: 411517 - RNA, 19 nt, Homo sapiens
  misc_RNA (1)...(19): siRNA sense strand
acaaaggcaucauuuccaa

SEQ ID NO: 411518 - RNA, 19 nt, Homo sapiens
  misc_RNA (1)...(19): siRNA sense strand
cgaagaggaaauaugguua

SEQ ID NO: 411519 - RNA, 19 nt, Homo sapiens
  misc_RNA (1)...(19): siRNA sense strand
caucagagcgccaaaucaa

SEQ ID NO: 411520 - RNA, 19 nt, Homo sapiens
  misc_RNA (1)...(19): siRNA sense strand
gcagucauuuaacuucaau

SEQ ID NO: 411521 - RNA, 19 nt, Homo sapiens
  misc_RNA (1)...(19): siRNA sense strand
gaagcaaaauucagagaga

SEQ ID NO: 411522 - RNA, 19 nt, Homo sapiens
  misc_RNA (1)...(19): siRNA sense strand
gagguggauuauuugauga

SEQ ID NO: 411523 - RNA, 19 nt, Homo sapiens
  misc_RNA (1)...(19): siRNA sense strand
cuacauacacugacuguuc

SEQ ID NO: 411524 - RNA, 19 nt, Homo sapiens
  misc_RNA (1)...(19): siRNA sense strand
ucaagaaggccuuucacaa

SEQ ID NO: 411525 - RNA, 19 nt, Homo sapiens
  misc_RNA (1)...(19): siRNA sense strand
ggcaucauuuccaagaauu

SEQ ID NO: 411526 - RNA, 19 nt, Homo sapiens
  misc_RNA (1)...(19): siRNA sense strand
aagaaggccuuucacaagu

SEQ ID NO: 411527 - RNA, 19 nt, Homo sapiens
  misc_RNA (1)...(19): siRNA sense strand
gacugucacucaacgaaga

SEQ ID NO: 411528 - RNA, 19 nt, Homo sapiens
  misc_RNA (1)...(19): siRNA sense strand
agaaggccuuucacaaguu

SEQ ID NO: 411529 - RNA, 19 nt, Homo sapiens
  misc_RNA (1)...(19): siRNA sense strand
ucagagcgccaaaucaaga

SEQ ID NO: 411530 - RNA, 19 nt, Homo sapiens
  misc_RNA (1)...(19): siRNA sense strand
uggauuauuugaugacaug

SEQ ID NO: 411531 - RNA, 19 nt, Homo sapiens
  misc_RNA (1)...(19): siRNA sense strand
ggauggugguuccaguaga

SEQ ID NO: 411532 - RNA, 19 nt, Homo sapiens
  misc_RNA (1)...(19): siRNA sense strand
acaaguuggccaugaagua

SEQ ID NO: 411533 - RNA, 19 nt, Homo sapiens
  misc_RNA (1)...(19): siRNA sense strand
acucucagaugcuaauaga

SEQ ID NO: 411534 - RNA, 19 nt, Homo sapiens
  misc_RNA (1)...(19): siRNA sense strand
gaagaggaaauaugguuac

SEQ ID NO: 411535 - RNA, 19 nt, Homo sapiens
  misc_RNA (1)...(19): siRNA sense strand
uugaugacauguuugaaga

SEQ ID NO: 411536 - RNA, 19 nt, Homo sapiens
  misc_RNA (1)...(19): siRNA sense strand
aauuaauucuggccucaaa

SEQ ID NO: 411537 - RNA, 19 nt, Homo sapiens
  misc_RNA (1)...(19): siRNA sense strand
uacauacacugacuguuca

SEQ ID NO: 411538 - RNA, 19 nt, Homo sapiens
  misc_RNA (1)...(19): siRNA sense strand
ugaaguaccacccugacaa

SEQ ID NO: 411539 - RNA, 19 nt, Homo sapiens
  misc_RNA (1)...(19): siRNA sense strand
ccaaucagcauacaguaca

SEQ ID NO: 411540 - RNA, 19 nt, Homo sapiens
  misc_RNA (1)...(19): siRNA sense strand
uaugaaacacucucagaug

SEQ ID NO: 411541 - RNA, 19 nt, Homo sapiens
  misc_RNA (1)...(19): siRNA sense strand
ggacacagugcuuuuacua

SEQ ID NO: 411542 - RNA, 19 nt, Homo sapiens
  misc_RNA (1)...(19): siRNA sense strand
guuugaagauauggagaaa

SEQ ID NO: 411543 - RNA, 19 nt, Homo sapiens
  misc_RNA (1)...(19): siRNA sense strand
gagagauugcagaagcaua

SEQ ID NO: 411544 - RNA, 19 nt, Homo sapiens
  misc_RNA (1)...(19): siRNA sense strand
gaagauauggagaaaaugu

SEQ ID NO: 411545 - RNA, 19 nt, Homo sapiens
  misc_RNA (1)...(19): siRNA sense strand
cauaugaaacacucucaga

SEQ ID NO: 411546 - RNA, 19 nt, Homo sapiens
  misc_RNA (1)...(19): siRNA sense strand
gauggugguuccaguagac

SEQ ID NO: 411547 - RNA, 19 nt, Homo sapiens
  misc_RNA (1)...(19): siRNA sense strand
aaaggcaucauuuccaaga

SEQ ID NO: 411548 - RNA, 19 nt, Homo sapiens
  misc_RNA (1)...(19): siRNA sense strand
uaagagcccggaugcugaa

SEQ ID NO: 411549 - RNA, 19 nt, Homo sapiens
  misc_RNA (1)...(19): siRNA sense strand
gacaaaggcaucauuucca

SEQ ID NO: 411550 - RNA, 19 nt, Homo sapiens
  misc_RNA (1)...(19): siRNA sense strand
agagauugcagaagcauau

SEQ ID NO: 411551 - RNA, 19 nt, Homo sapiens
  misc_RNA (1)...(19): siRNA sense strand
caaagagguaguggaaguu

SEQ ID NO: 411552 - RNA, 19 nt, Homo sapiens
  misc_RNA (1)...(19): siRNA sense strand
ccagucaauuuucaucuuu

SEQ ID NO: 411553 - RNA, 19 nt, Homo sapiens
  misc_RNA (1)...(19): siRNA sense strand
gcaucauuuccaagaauuu

SEQ ID NO: 411554 - RNA, 19 nt, Homo sapiens
  misc_RNA (1)...(19): siRNA sense strand
cuacuaugauaucuuaggu

SEQ ID NO: 411555 - RNA, 19 nt, Homo sapiens
  misc_RNA (1)...(19): siRNA sense strand
gauugcagaagcauaugaa

SEQ ID NO: 411556 - RNA, 19 nt, Homo sapiens
  misc_RNA (1)...(19): siRNA sense strand
cugcaggacugucacucaa

SEQ ID NO: 411557 - RNA, 19 nt, Homo sapiens
  misc_RNA (1)...(19): siRNA sense strand
cagagagauugcagaagca

SEQ ID NO: 411558 - RNA, 19 nt, Homo sapiens
  misc_RNA (1)...(19): siRNA sense strand
acucaacgaagaggaaaua

SEQ ID NO: 411559 - RNA, 19 nt, Homo sapiens
  misc_RNA (1)...(19): siRNA sense strand
uaucuuaggugugccaaaa

SEQ ID NO: 411560 - RNA, 19 nt, Homo sapiens
  misc_RNA (1)...(19): siRNA sense strand
caggauggugguuccagua

SEQ ID NO: 411561 - RNA, 19 nt, Homo sapiens
  misc_RNA (1)...(19): siRNA sense strand
gcuaauagacgaaaagagu

SEQ ID NO: 411562 - RNA, 19 nt, Homo sapiens
  misc_RNA (1)...(19): siRNA sense strand
ugcagaagcauaugaaaca

SEQ ID NO: 411563 - RNA, 19 nt, Homo sapiens
  misc_RNA (1)...(19): siRNA sense strand
gcagaagcauaugaaacac

SEQ ID NO: 411564 - RNA, 19 nt, Homo sapiens
  misc_RNA (1)...(19): siRNA sense strand
ucaacgaagaggaaauaug

SEQ ID NO: 411565 - RNA, 19 nt, Homo sapiens
  misc_RNA (1)...(19): siRNA sense strand
gcaucagagcgccaaauca

SEQ ID NO: 411566 - RNA, 19 nt, Homo sapiens
  misc_RNA (1)...(19): siRNA sense strand
aggcaucauuuccaagaau

SEQ ID NO: 411567 - RNA, 19 nt, Homo sapiens
  misc_RNA (1)...(19): siRNA sense strand
uuucacaaguuggccauga

SEQ ID NO: 411568 - RNA, 19 nt, Homo sapiens
  misc_RNA (1)...(19): siRNA sense strand
ccaaaucaagaaggccuuu

SEQ ID NO: 411569 - RNA, 19 nt, Homo sapiens
  misc_RNA (1)...(19): siRNA sense strand
ggugguuccaguagacaaa

SEQ ID NO: 411570 - RNA, 19 nt, Homo sapiens
  misc_RNA (1)...(19): siRNA sense strand
ugauacacuuggacacagu

SEQ ID NO: 411571 - RNA, 19 nt, Homo sapiens
  misc_RNA (1)...(19): siRNA sense strand
caaguuggccaugaaguac

SEQ ID NO: 411572 - RNA, 19 nt, Homo sapiens
  misc_RNA (1)...(19): siRNA sense strand
cuaccaaucagcauacagu

SEQ ID NO: 411573 - RNA, 19 nt, Homo sapiens
  misc_RNA (1)...(19): siRNA sense strand
ugagcagucauuuaacuuc

SEQ ID NO: 411574 - RNA, 19 nt, Homo sapiens
  misc_RNA (1)...(19): siRNA sense strand
acgaagaggaaauaugguu

SEQ ID NO: 411575 - RNA, 19 nt, Homo sapiens
  misc_RNA (1)...(19): siRNA sense strand
gacucuaccaaucagcaua

SEQ ID NO: 411576 - RNA, 19 nt, Homo sapiens
  misc_RNA (1)...(19): siRNA sense strand
guaugaagcuauuguagaa

SEQ ID NO: 411577 - RNA, 19 nt, Homo sapiens
  misc_RNA (1)...(19): siRNA sense strand
ggagaagcgugcugaauag

SEQ ID NO: 411578 - RNA, 19 nt, Homo sapiens
  misc_RNA (1)...(19): siRNA sense strand
gaaguaugaagcuauugua

SEQ ID NO: 411579 - RNA, 19 nt, Homo sapiens
  misc_RNA (1)...(19): siRNA sense strand
gaaaugaaagagaaguaug

SEQ ID NO: 411580 - RNA, 19 nt, Homo sapiens
  misc_RNA (1)...(19): siRNA sense strand
guugguagccuuauaugaa

SEQ ID NO: 411581 - RNA, 19 nt, Homo sapiens
  misc_RNA (1)...(19): siRNA sense strand
agagaaguaugaagcuauu

SEQ ID NO: 411582 - RNA, 19 nt, Homo sapiens
  misc_RNA (1)...(19): siRNA sense strand
uaacagugcuuuggauuuu

SEQ ID NO: 411583 - RNA, 19 nt, Homo sapiens
  misc_RNA (1)...(19): siRNA sense strand
aaagagaaguaugaagcua

SEQ ID NO: 411584 - RNA, 19 nt, Homo sapiens
  misc_RNA (1)...(19): siRNA sense strand
gccuagaacuggccgaaau

SEQ ID NO: 411585 - RNA, 19 nt, Homo sapiens
  misc_RNA (1)...(19): siRNA sense strand
aggagaagcgugcugaaua

SEQ ID NO: 411586 - RNA, 19 nt, Homo sapiens
  misc_RNA (1)...(19): siRNA sense strand
agaacuggccgaaaugaaa

SEQ ID NO: 411587 - RNA, 19 nt, Homo sapiens
  misc_RNA (1)...(19): siRNA sense strand
gaacuggccgaaaugaaag

SEQ ID NO: 411588 - RNA, 19 nt, Homo sapiens
  misc_RNA (1)...(19): siRNA sense strand
caaagcuugcucaguauga

SEQ ID NO: 411589 - RNA, 19 nt, Homo sapiens
  misc_RNA (1)...(19): siRNA sense strand
gaaagagaaguaugaagcu

SEQ ID NO: 411590 - RNA, 19 nt, Homo sapiens
  misc_RNA (1)...(19): siRNA sense strand
uuuaaagcaucacuuagga

SEQ ID NO: 411591 - RNA, 19 nt, Homo sapiens
  misc_RNA (1)...(19): siRNA sense strand
gaagcuauuguagaagaaa

SEQ ID NO: 411592 - RNA, 19 nt, Homo sapiens
  misc_RNA (1)...(19): siRNA sense strand
cuaacagugcuuuggauuu

SEQ ID NO: 411593 - RNA, 19 nt, Homo sapiens
  misc_RNA (1)...(19): siRNA sense strand
uggccgaaaugaaagagaa

SEQ ID NO: 411594 - RNA, 19 nt, Homo sapiens
  misc_RNA (1)...(19): siRNA sense strand
cgaaaugaaagagaaguau

SEQ ID NO: 411595 - RNA, 19 nt, Homo sapiens
  misc_RNA (1)...(19): siRNA sense strand
ugaagcuauuguagaagaa

SEQ ID NO: 411596 - RNA, 19 nt, Homo sapiens
  misc_RNA (1)...(19): siRNA sense strand
uccagaaaauccagaaaua

SEQ ID NO: 411597 - RNA, 19 nt, Homo sapiens
  misc_RNA (1)...(19): siRNA sense strand
aaagcuugcucaguaugaa

SEQ ID NO: 411598 - RNA, 19 nt, Homo sapiens
  misc_RNA (1)...(19): siRNA sense strand
gugagcaguuccggaggua

SEQ ID NO: 411599 - RNA, 19 nt, Homo sapiens
  misc_RNA (1)...(19): siRNA sense strand
augaagcuauuguagaaga

SEQ ID NO: 411600 - RNA, 19 nt, Homo sapiens
  misc_RNA (1)...(19): siRNA sense strand
gaggagaagcgugcugaau

SEQ ID NO: 411601 - RNA, 19 nt, Homo sapiens
  misc_RNA (1)...(19): siRNA sense strand
agagcucguucgccuagaa

SEQ ID NO: 411602 - RNA, 19 nt, Homo sapiens
  misc_RNA (1)...(19): siRNA sense strand
gguguugguagccuuauau

SEQ ID NO: 411603 - RNA, 19 nt, Homo sapiens
  misc_RNA (1)...(19): siRNA sense strand
ccgaaaugaaagagaagua

SEQ ID NO: 411604 - RNA, 19 nt, Homo sapiens
  misc_RNA (1)...(19): siRNA sense strand
cagaaaauccagaaauaga

SEQ ID NO: 411605 - RNA, 19 nt, Homo sapiens
  misc_RNA (1)...(19): siRNA sense strand
acucgaagcgugagcaguu

SEQ ID NO: 411606 - RNA, 19 nt, Homo sapiens
  misc_RNA (1)...(19): siRNA sense strand
uggacacgcugaccaaggu

SEQ ID NO: 411607 - RNA, 19 nt, Homo sapiens
  misc_RNA (1)...(19): siRNA sense strand
ggaggagaagcgugcugaa

SEQ ID NO: 411608 - RNA, 19 nt, Homo sapiens
  misc_RNA (1)...(19): siRNA sense strand
ccuaacagugcuuuggauu

SEQ ID NO: 411609 - RNA, 19 nt, Homo sapiens
  misc_RNA (1)...(19): siRNA sense strand
aagagaaguaugaagcuau

SEQ ID NO: 411610 - RNA, 19 nt, Homo sapiens
  misc_RNA (1)...(19): siRNA sense strand
agaaguaugaagcuauugu

SEQ ID NO: 411611 - RNA, 19 nt, Homo sapiens
  misc_RNA (1)...(19): siRNA sense strand
ggaaaggaauuaucacaua

SEQ ID NO: 411612 - RNA, 19 nt, Homo sapiens
  misc_RNA (1)...(19): siRNA sense strand
ggacauaaaucucaacuug

SEQ ID NO: 411613 - RNA, 19 nt, Homo sapiens
  misc_RNA (1)...(19): siRNA sense strand
cgucguagcugaugucuua

SEQ ID NO: 411614 - RNA, 19 nt, Homo sapiens
  misc_RNA (1)...(19): siRNA sense strand
gaacagagauacauuucga

SEQ ID NO: 411615 - RNA, 19 nt, Homo sapiens
  misc_RNA (1)...(19): siRNA sense strand
gagaagauauucaaagaga

SEQ ID NO: 411616 - RNA, 19 nt, Homo sapiens
  misc_RNA (1)...(19): siRNA sense strand
gagaagacauccuguguug

SEQ ID NO: 411617 - RNA, 19 nt, Homo sapiens
  misc_RNA (1)...(19): siRNA sense strand
gaagaaacuuggccuccua

SEQ ID NO: 411618 - RNA, 19 nt, Homo sapiens
  misc_RNA (1)...(19): siRNA sense strand
caacaacucuagucgcuuu

SEQ ID NO: 411619 - RNA, 19 nt, Homo sapiens
  misc_RNA (1)...(19): siRNA sense strand
gcaggaacauguuugcuuu

SEQ ID NO: 411620 - RNA, 19 nt, Homo sapiens
  misc_RNA (1)...(19): siRNA sense strand
ggacuuugauuccagguuu

SEQ ID NO: 411621 - RNA, 19 nt, Homo sapiens
  misc_RNA (1)...(19): siRNA sense strand
gaagaugccagaccaguuu

SEQ ID NO: 411622 - RNA, 19 nt, Homo sapiens
  misc_RNA (1)...(19): siRNA sense strand
gaagacauccuguguugaa

SEQ ID NO: 411623 - RNA, 19 nt, Homo sapiens
  misc_RNA (1)...(19): siRNA sense strand
gaagaacagagauacauuu

SEQ ID NO: 411624 - RNA, 19 nt, Homo sapiens
  misc_RNA (1)...(19): siRNA sense strand
gcgggagaauuguagauua

SEQ ID NO: 411625 - RNA, 19 nt, Homo sapiens
  misc_RNA (1)...(19): siRNA sense strand
gaguugcaguuaacaauuu

SEQ ID NO: 411626 - RNA, 19 nt, Homo sapiens
  misc_RNA (1)...(19): siRNA sense strand
gauauugacuggauagaca

SEQ ID NO: 411627 - RNA, 19 nt, Homo sapiens
  misc_RNA (1)...(19): siRNA sense strand
acaauucccuggauuacua

SEQ ID NO: 411628 - RNA, 19 nt, Homo sapiens
  misc_RNA (1)...(19): siRNA sense strand
gaaucagucuggaugugua

SEQ ID NO: 411629 - RNA, 19 nt, Homo sapiens
  misc_RNA (1)...(19): siRNA sense strand
gagaaugccuggacuugau

SEQ ID NO: 411630 - RNA, 19 nt, Homo sapiens
  misc_RNA (1)...(19): siRNA sense strand
gacaauugcuggcagagaa

SEQ ID NO: 411631 - RNA, 19 nt, Homo sapiens
  misc_RNA (1)...(19): siRNA sense strand
ggaacccgauccuucgaua

SEQ ID NO: 411632 - RNA, 19 nt, Homo sapiens
  misc_RNA (1)...(19): siRNA sense strand
gaggaugguugcacaaaga

SEQ ID NO: 411633 - RNA, 19 nt, Homo sapiens
  misc_RNA (1)...(19): siRNA sense strand
gaagaaagagaaagagaga

SEQ ID NO: 411634 - RNA, 19 nt, Homo sapiens
  misc_RNA (1)...(19): siRNA sense strand
ggaagauauugacuggaua

SEQ ID NO: 411635 - RNA, 19 nt, Homo sapiens
  misc_RNA (1)...(19): siRNA sense strand
gcucgacgcuguuugaugu

SEQ ID NO: 411636 - RNA, 19 nt, Homo sapiens
  misc_RNA (1)...(19): siRNA sense strand
gaagaaacaggaagaggaa

SEQ ID NO: 411637 - RNA, 19 nt, Homo sapiens
  misc_RNA (1)...(19): siRNA sense strand
ugaacgagcuauucuugaa

SEQ ID NO: 411638 - RNA, 19 nt, Homo sapiens
  misc_RNA (1)...(19): siRNA sense strand
ggaguuugcauuuauguuu

SEQ ID NO: 411639 - RNA, 19 nt, Homo sapiens
  misc_RNA (1)...(19): siRNA sense strand
gaagaacaguccgaagaug

SEQ ID NO: 411640 - RNA, 19 nt, Homo sapiens
  misc_RNA (1)...(19): siRNA sense strand
ggaagaagaaagagaaaga

SEQ ID NO: 411641 - RNA, 19 nt, Homo sapiens
  misc_RNA (1)...(19): siRNA sense strand
gcuggaacaugaagaaaga

SEQ ID NO: 411642 - RNA, 19 nt, Homo sapiens
  misc_RNA (1)...(19): siRNA sense strand
cgaaagcacuaaauugauc

SEQ ID NO: 411643 - RNA, 19 nt, Homo sapiens
  misc_RNA (1)...(19): siRNA sense strand
cgacaaagccauugaaagu

SEQ ID NO: 411644 - RNA, 19 nt, Homo sapiens
  misc_RNA (1)...(19): siRNA sense strand
aauacgcucucuucacuua

SEQ ID NO: 411645 - RNA, 19 nt, Homo sapiens
  misc_RNA (1)...(19): siRNA sense strand
gagaauccuuggaacagaa

SEQ ID NO: 411646 - RNA, 19 nt, Homo sapiens
  misc_RNA (1)...(19): siRNA sense strand
gggaagauauugacuggau

SEQ ID NO: 411647 - RNA, 19 nt, Homo sapiens
  misc_RNA (1)...(19): siRNA sense strand
caaccaggauaccuugaaa

SEQ ID NO: 411648 - RNA, 19 nt, Homo sapiens
  misc_RNA (1)...(19): siRNA sense strand
caggauaccuugaaaugug

SEQ ID NO: 411649 - RNA, 19 nt, Homo sapiens
  misc_RNA (1)...(19): siRNA sense strand
gacagacuauggucaggua

SEQ ID NO: 411650 - RNA, 19 nt, Homo sapiens
  misc_RNA (1)...(19): siRNA sense strand
gaacucggaugugguggaa

SEQ ID NO: 411651 - RNA, 19 nt, Homo sapiens
  misc_RNA (1)...(19): siRNA sense strand
gaagaacgcgcucaaacug

SEQ ID NO: 411652 - RNA, 19 nt, Homo sapiens
  misc_RNA (1)...(19): siRNA sense strand
caugaaagguggccugaug

SEQ ID NO: 411653 - RNA, 19 nt, Homo sapiens
  misc_RNA (1)...(19): siRNA sense strand
uggcagggcuggaacauga

SEQ ID NO: 411654 - RNA, 19 nt, Homo sapiens
  misc_RNA (1)...(19): siRNA sense strand
ggacuugauugagaagaaa

SEQ ID NO: 411655 - RNA, 19 nt, Homo sapiens
  misc_RNA (1)...(19): siRNA sense strand
cgacaucuuuggauuugaa

SEQ ID NO: 411656 - RNA, 19 nt, Homo sapiens
  misc_RNA (1)...(19): siRNA sense strand
gacaaucagugaccaggaa

SEQ ID NO: 411657 - RNA, 19 nt, Homo sapiens
  misc_RNA (1)...(19): siRNA sense strand
ggagaugcaccacuggaua

SEQ ID NO: 411658 - RNA, 19 nt, Homo sapiens
  misc_RNA (1)...(19): siRNA sense strand
cuggagaggugcaauauga

SEQ ID NO: 411659 - RNA, 19 nt, Homo sapiens
  misc_RNA (1)...(19): siRNA sense strand
acgagaaacuucaggagua

SEQ ID NO: 411660 - RNA, 19 nt, Homo sapiens
  misc_RNA (1)...(19): siRNA sense strand
gggcacagguuuccuucaa

SEQ ID NO: 411661 - RNA, 19 nt, Homo sapiens
  misc_RNA (1)...(19): siRNA sense strand
ggauuagugugggaagaua

SEQ ID NO: 411662 - RNA, 19 nt, Homo sapiens
  misc_RNA (1)...(19): siRNA sense strand
agagauacauuucgagaug

SEQ ID NO: 411663 - RNA, 19 nt, Homo sapiens
  misc_RNA (1)...(19): siRNA sense strand
cauggaagcuuucggcaau

SEQ ID NO: 411664 - RNA, 19 nt, Homo sapiens
  misc_RNA (1)...(19): siRNA sense strand
ccagugaggugguggaugu

SEQ ID NO: 411665 - RNA, 19 nt, Homo sapiens
  misc_RNA (1)...(19): siRNA sense strand
gaacacauccucucuuuug

SEQ ID NO: 411666 - RNA, 19 nt, Homo sapiens
  misc_RNA (1)...(19): siRNA sense strand
gucgagggauucucaagua

SEQ ID NO: 411667 - RNA, 19 nt, Homo sapiens
  misc_RNA (1)...(19): siRNA sense strand
gaggaggacccauacauga

SEQ ID NO: 411668 - RNA, 19 nt, Homo sapiens
  misc_RNA (1)...(19): siRNA sense strand
ggaggaagaagaaagagaa

SEQ ID NO: 411669 - RNA, 19 nt, Homo sapiens
  misc_RNA (1)...(19): siRNA sense strand
gaaacgggaggaagaagaa

SEQ ID NO: 411670 - RNA, 19 nt, Homo sapiens
  misc_RNA (1)...(19): siRNA sense strand
gcuaagagaaagccgauuu

SEQ ID NO: 411671 - RNA, 19 nt, Homo sapiens
  misc_RNA (1)...(19): siRNA sense strand
gaccagcgaugacucuuca

SEQ ID NO: 411672 - RNA, 19 nt, Homo sapiens
  misc_RNA (1)...(19): siRNA sense strand
ggaggaaauuucagggaau

SEQ ID NO: 411673 - RNA, 19 nt, Homo sapiens
  misc_RNA (1)...(19): siRNA sense strand
guccaugucugacccaauu

SEQ ID NO: 411674 - RNA, 19 nt, Homo sapiens
  misc_RNA (1)...(19): siRNA sense strand
gagaugcaccacuggauaa

SEQ ID NO: 411675 - RNA, 19 nt, Homo sapiens
  misc_RNA (1)...(19): siRNA sense strand
gaagaggacuuugauucca

SEQ ID NO: 411676 - RNA, 19 nt, Homo sapiens
  misc_RNA (1)...(19): siRNA sense strand
cgaagaccguguacaacaa

SEQ ID NO: 411677 - RNA, 19 nt, Homo sapiens
  misc_RNA (1)...(19): siRNA sense strand
acaaagaggugaagaacag

SEQ ID NO: 411678 - RNA, 19 nt, Homo sapiens
  misc_RNA (1)...(19): siRNA sense strand
gaauauagccgggaaggau

SEQ ID NO: 411679 - RNA, 19 nt, Homo sapiens
  misc_RNA (1)...(19): siRNA sense strand
caauggacgugaugcaguu

SEQ ID NO: 411680 - RNA, 19 nt, Homo sapiens
  misc_RNA (1)...(19): siRNA sense strand
ucaacagucuuuggaauug

SEQ ID NO: 411681 - RNA, 19 nt, Homo sapiens
  misc_RNA (1)...(19): siRNA sense strand
ggacagcaggaacauguuu

SEQ ID NO: 411682 - RNA, 19 nt, Homo sapiens
  misc_RNA (1)...(19): siRNA sense strand
ggucagguauucacuuaca

SEQ ID NO: 411683 - RNA, 19 nt, Homo sapiens
  misc_RNA (1)...(19): siRNA sense strand
gaagaaacgggaggaagaa

SEQ ID NO: 411684 - RNA, 19 nt, Homo sapiens
  misc_RNA (1)...(19): siRNA sense strand
gcggcuccaucauguauaa

SEQ ID NO: 411685 - RNA, 19 nt, Homo sapiens
  misc_RNA (1)...(19): siRNA sense strand
auaaagugcugaugaggaa

SEQ ID NO: 411686 - RNA, 19 nt, Homo sapiens
  misc_RNA (1)...(19): siRNA sense strand
gaacgagcuauucuugaaa

SEQ ID NO: 411687 - RNA, 19 nt, Homo sapiens
  misc_RNA (1)...(19): siRNA sense strand
gauagacaauggagaaugc

SEQ ID NO: 411688 - RNA, 19 nt, Homo sapiens
  misc_RNA (1)...(19): siRNA sense strand
ucaaguaucucaaguucca

SEQ ID NO: 411689 - RNA, 19 nt, Homo sapiens
  misc_RNA (1)...(19): siRNA sense strand
acaccaagcugcucaacga

SEQ ID NO: 411690 - RNA, 19 nt, Homo sapiens
  misc_RNA (1)...(19): siRNA sense strand
acgcuaagcuccucuaauc

SEQ ID NO: 411691 - RNA, 19 nt, Homo sapiens
  misc_RNA (1)...(19): siRNA sense strand
gcaaugcgaagaccgugua

SEQ ID NO: 411692 - RNA, 19 nt, Homo sapiens
  misc_RNA (1)...(19): siRNA sense strand
uaucucaaguuccaucuga

SEQ ID NO: 411693 - RNA, 19 nt, Homo sapiens
  misc_RNA (1)...(19): siRNA sense strand
ccaagcugauguacuuuga

SEQ ID NO: 411694 - RNA, 19 nt, Homo sapiens
  misc_RNA (1)...(19): siRNA sense strand
ggaagaagcgcugguuugu

SEQ ID NO: 411695 - RNA, 19 nt, Homo sapiens
  misc_RNA (1)...(19): siRNA sense strand
caacucagaggucagauug

SEQ ID NO: 411696 - RNA, 19 nt, Homo sapiens
  misc_RNA (1)...(19): siRNA sense strand
gaagacccuuucaggacuu

SEQ ID NO: 411697 - RNA, 19 nt, Homo sapiens
  misc_RNA (1)...(19): siRNA sense strand
ggacucacugcauuccuua

SEQ ID NO: 411698 - RNA, 19 nt, Homo sapiens
  misc_RNA (1)...(19): siRNA sense strand
ggaggaaguucgggaagug

SEQ ID NO: 411699 - RNA, 19 nt, Homo sapiens
  misc_RNA (1)...(19): siRNA sense strand
ccacagacagcaccuuauu

SEQ ID NO: 411700 - RNA, 19 nt, Homo sapiens
  misc_RNA (1)...(19): siRNA sense strand
gaguuugcauuuauguuug

SEQ ID NO: 411701 - RNA, 19 nt, Homo sapiens
  misc_RNA (1)...(19): siRNA sense strand
ccaucaagauauucaauuc

SEQ ID NO: 411702 - RNA, 19 nt, Homo sapiens
  misc_RNA (1)...(19): siRNA sense strand
gaagauauucaaagagaca

SEQ ID NO: 411703 - RNA, 19 nt, Homo sapiens
  misc_RNA (1)...(19): siRNA sense strand
agacccaacucguuuguga

SEQ ID NO: 411704 - RNA, 19 nt, Homo sapiens
  misc_RNA (1)...(19): siRNA sense strand
gacuuuaucuacgaucuuu

SEQ ID NO: 411705 - RNA, 19 nt, Homo sapiens
  misc_RNA (1)...(19): siRNA sense strand
gagauacauuucgagauga

SEQ ID NO: 411706 - RNA, 19 nt, Homo sapiens
  misc_RNA (1)...(19): siRNA sense strand
gcucaaagacaaaggcuau

SEQ ID NO: 411707 - RNA, 19 nt, Homo sapiens
  misc_RNA (1)...(19): siRNA sense strand
gaggaaauuucagggaaug

SEQ ID NO: 411708 - RNA, 19 nt, Homo sapiens
  misc_RNA (1)...(19): siRNA sense strand
ugacauccacggucuauug

SEQ ID NO: 411709 - RNA, 19 nt, Homo sapiens
  misc_RNA (1)...(19): siRNA sense strand
acagucagcaugcgaauaa

SEQ ID NO: 411710 - RNA, 19 nt, Homo sapiens
  misc_RNA (1)...(19): siRNA sense strand
gcugauugauucugugugu

SEQ ID NO: 411711 - RNA, 19 nt, Homo sapiens
  misc_RNA (1)...(19): siRNA sense strand
acacagauguauuucguuu

SEQ ID NO: 411712 - RNA, 19 nt, Homo sapiens
  misc_RNA (1)...(19): siRNA sense strand
ccaagaugcuggccaauca

SEQ ID NO: 411713 - RNA, 19 nt, Homo sapiens
  misc_RNA (1)...(19): siRNA sense strand
gcugauggcuccacucuca

SEQ ID NO: 411714 - RNA, 19 nt, Homo sapiens
  misc_RNA (1)...(19): siRNA sense strand
ggacaaaccagucgagugu

SEQ ID NO: 411715 - RNA, 19 nt, Homo sapiens
  misc_RNA (1)...(19): siRNA sense strand
gcauguaccuggccacugu

SEQ ID NO: 411716 - RNA, 19 nt, Homo sapiens
  misc_RNA (1)...(19): siRNA sense strand
gcuaaacccuuucaucuac

SEQ ID NO: 411717 - RNA, 19 nt, Homo sapiens
  misc_RNA (1)...(19): siRNA sense strand
gcagcagcaucuccucuuu

SEQ ID NO: 411718 - RNA, 19 nt, Homo sapiens
  misc_RNA (1)...(19): siRNA sense strand
cauccuggcuucuuauaug

SEQ ID NO: 411719 - RNA, 19 nt, Homo sapiens
  misc_RNA (1)...(19): siRNA sense strand
gauggccuaugaccacuuu

SEQ ID NO: 411720 - RNA, 19 nt, Homo sapiens
  misc_RNA (1)...(19): siRNA sense strand
gcaccaucauugcugugua

SEQ ID NO: 411721 - RNA, 19 nt, Homo sapiens
  misc_RNA (1)...(19): siRNA sense strand
gaugcuggccaaucacaua

SEQ ID NO: 411722 - RNA, 19 nt, Homo sapiens
  misc_RNA (1)...(19): siRNA sense strand
uagcugugauggccuauga

SEQ ID NO: 411723 - RNA, 19 nt, Homo sapiens
  misc_RNA (1)...(19): siRNA sense strand
ucacacagauguauuucgu

SEQ ID NO: 411724 - RNA, 19 nt, Homo sapiens
  misc_RNA (1)...(19): siRNA sense strand
gcugguugcuggauuaugg

SEQ ID NO: 411725 - RNA, 19 nt, Homo sapiens
  misc_RNA (1)...(19): siRNA sense strand
ucguggacauggacaauuu

SEQ ID NO: 411726 - RNA, 19 nt, Homo sapiens
  misc_RNA (1)...(19): siRNA sense strand
cauggacaauuuccuccua

SEQ ID NO: 411727 - RNA, 19 nt, Homo sapiens
  misc_RNA (1)...(19): siRNA sense strand
gaggaacagguacuugaaa

SEQ ID NO: 411728 - RNA, 19 nt, Homo sapiens
  misc_RNA (1)...(19): siRNA sense strand
cagcaucuccucuuugugu

SEQ ID NO: 411729 - RNA, 19 nt, Homo sapiens
  misc_RNA (1)...(19): siRNA sense strand
cacuauggcuacuguguug

SEQ ID NO: 411730 - RNA, 19 nt, Homo sapiens
  misc_RNA (1)...(19): siRNA sense strand
gaaagacacuauggcuacu

SEQ ID NO: 411731 - RNA, 19 nt, Homo sapiens
  misc_RNA (1)...(19): siRNA sense strand
guagugacucccaugcuaa

SEQ ID NO: 411732 - RNA, 19 nt, Homo sapiens
  misc_RNA (1)...(19): siRNA sense strand
gacaucugcuucuccuuca

SEQ ID NO: 411733 - RNA, 19 nt, Homo sapiens
  misc_RNA (1)...(19): siRNA sense strand
caccaucauugcuguguau

SEQ ID NO: 411734 - RNA, 19 nt, Homo sapiens
  misc_RNA (1)...(19): siRNA sense strand
gaaggucccauccacaaag

SEQ ID NO: 411735 - RNA, 19 nt, Homo sapiens
  misc_RNA (1)...(19): siRNA sense strand
ccugcugguugcuggauua

SEQ ID NO: 411736 - RNA, 19 nt, Homo sapiens
  misc_RNA (1)...(19): siRNA sense strand
caaccugaauguccuucug

SEQ ID NO: 411737 - RNA, 19 nt, Homo sapiens
  misc_RNA (1)...(19): siRNA sense strand
aguagugacucccaugcua

SEQ ID NO: 411738 - RNA, 19 nt, Homo sapiens
  misc_RNA (1)...(19): siRNA sense strand
ugccaucacucacuucuuc

SEQ ID NO: 411739 - RNA, 19 nt, Homo sapiens
  misc_RNA (1)...(19): siRNA sense strand
cauccuguccguaagcaua

SEQ ID NO: 411740 - RNA, 19 nt, Homo sapiens
  misc_RNA (1)...(19): siRNA sense strand
caucauugcuguguauuuu

SEQ ID NO: 411741 - RNA, 19 nt, Homo sapiens
  misc_RNA (1)...(19): siRNA sense strand
acaaugccaucacucacuu

SEQ ID NO: 411742 - RNA, 19 nt, Homo sapiens
  misc_RNA (1)...(19): siRNA sense strand
cagacacacaccucaauga

SEQ ID NO: 411743 - RNA, 19 nt, Homo sapiens
  misc_RNA (1)...(19): siRNA sense strand
cagcugagaaagacacuau

SEQ ID NO: 411744 - RNA, 19 nt, Homo sapiens
  misc_RNA (1)...(19): siRNA sense strand
aaacucuccugcucagaca

SEQ ID NO: 411745 - RNA, 19 nt, Homo sapiens
  misc_RNA (1)...(19): siRNA sense strand
caccugcacuguccugaag

SEQ ID NO: 411746 - RNA, 19 nt, Homo sapiens
  misc_RNA (1)...(19): siRNA sense strand
uggcuacuguguuguauac

SEQ ID NO: 411747 - RNA, 19 nt, Homo sapiens
  misc_RNA (1)...(19): siRNA sense strand
acaaaccagucgagugucu

SEQ ID NO: 411748 - RNA, 19 nt, Homo sapiens
  misc_RNA (1)...(19): siRNA sense strand
gaggucauaauccuuagug

SEQ ID NO: 411749 - RNA, 19 nt, Homo sapiens
  misc_RNA (1)...(19): siRNA sense strand
uuugcauccuggcuucuua

SEQ ID NO: 411750 - RNA, 19 nt, Homo sapiens
  misc_RNA (1)...(19): siRNA sense strand
ugaggaacagguacuugaa

SEQ ID NO: 411751 - RNA, 19 nt, Homo sapiens
  misc_RNA (1)...(19): siRNA sense strand
agacucagaccaucuccuu

SEQ ID NO: 411752 - RNA, 19 nt, Homo sapiens
  misc_RNA (1)...(19): siRNA sense strand
ugaaggucccauccacaaa

SEQ ID NO: 411753 - RNA, 19 nt, Homo sapiens
  misc_RNA (1)...(19): siRNA sense strand
gcucagacacacaccucaa

SEQ ID NO: 411754 - RNA, 19 nt, Homo sapiens
  misc_RNA (1)...(19): siRNA sense strand
cagacaaugccaucacuca

SEQ ID NO: 411755 - RNA, 19 nt, Homo sapiens
  misc_RNA (1)...(19): siRNA sense strand
cuaaacccuuucaucuaca

SEQ ID NO: 411756 - RNA, 19 nt, Homo sapiens
  misc_RNA (1)...(19): siRNA sense strand
aggaacagguacuugaaag

SEQ ID NO: 411757 - RNA, 19 nt, Homo sapiens
  misc_RNA (1)...(19): siRNA sense strand
gcagggugguguuuucugu

SEQ ID NO: 411758 - RNA, 19 nt, Homo sapiens
  misc_RNA (1)...(19): siRNA sense strand
cauuacacagcaaagauga

SEQ ID NO: 411759 - RNA, 19 nt, Homo sapiens
  misc_RNA (1)...(19): siRNA sense strand
ggaacagguacuugaaagg

SEQ ID NO: 411760 - RNA, 19 nt, Homo sapiens
  misc_RNA (1)...(19): siRNA sense strand
aagacacuauggcuacugu

SEQ ID NO: 411761 - RNA, 19 nt, Homo sapiens
  misc_RNA (1)...(19): siRNA sense strand
gcugagaaagacacuaugg

SEQ ID NO: 411762 - RNA, 19 nt, Homo sapiens
  misc_RNA (1)...(19): siRNA sense strand
ggaaccugcucaucauccu

SEQ ID NO: 411763 - RNA, 19 nt, Homo sapiens
  misc_RNA (1)...(19): siRNA sense strand
cagcagcaucuccucuuug

SEQ ID NO: 411764 - RNA, 19 nt, Homo sapiens
  misc_RNA (1)...(19): siRNA sense strand
gcauccuggcuucuuauau

SEQ ID NO: 411765 - RNA, 19 nt, Homo sapiens
  misc_RNA (1)...(19): siRNA sense strand
gacaaugccaucacucacu

SEQ ID NO: 411766 - RNA, 19 nt, Homo sapiens
  misc_RNA (1)...(19): siRNA sense strand
agcagcaucuccucuuugu

SEQ ID NO: 411767 - RNA, 19 nt, Homo sapiens
  misc_RNA (1)...(19): siRNA sense strand
ugcuaaacccuuucaucua

SEQ ID NO: 411768 - RNA, 19 nt, Homo sapiens
  misc_RNA (1)...(19): siRNA sense strand
ccaucauugcuguguauuu

SEQ ID NO: 411769 - RNA, 19 nt, Homo sapiens
  misc_RNA (1)...(19): siRNA sense strand
acaaagggaagguggaaag

SEQ ID NO: 411770 - RNA, 19 nt, Homo sapiens
  misc_RNA (1)...(19): siRNA sense strand
agucgagugucuccgaguu

SEQ ID NO: 411771 - RNA, 19 nt, Homo sapiens
  misc_RNA (1)...(19): siRNA sense strand
acagauguauuucguuuuc

SEQ ID NO: 411772 - RNA, 19 nt, Homo sapiens
  misc_RNA (1)...(19): siRNA sense strand
cugaggaacagguacuuga

SEQ ID NO: 411773 - RNA, 19 nt, Homo sapiens
  misc_RNA (1)...(19): siRNA sense strand
cuauggcuacuguguugua

SEQ ID NO: 411774 - RNA, 19 nt, Homo sapiens
  misc_RNA (1)...(19): siRNA sense strand
ucagcaaccugucuuuugu

SEQ ID NO: 411775 - RNA, 19 nt, Homo sapiens
  misc_RNA (1)...(19): siRNA sense strand
guauuucguuuucauguuc

SEQ ID NO: 411776 - RNA, 19 nt, Homo sapiens
  misc_RNA (1)...(19): siRNA sense strand
ggacaauuuccuccuagcu

SEQ ID NO: 411777 - RNA, 19 nt, Homo sapiens
  misc_RNA (1)...(19): siRNA sense strand
ucagacacacaccucaaug

SEQ ID NO: 411778 - RNA, 19 nt, Homo sapiens
  misc_RNA (1)...(19): siRNA sense strand
ccaaugaggucaaucacuu

SEQ ID NO: 411779 - RNA, 19 nt, Homo sapiens
  misc_RNA (1)...(19): siRNA sense strand
gaagagaugcagccaguug

SEQ ID NO: 411780 - RNA, 19 nt, Homo sapiens
  misc_RNA (1)...(19): siRNA sense strand
ggaccgcuguugcugaguu

SEQ ID NO: 411781 - RNA, 19 nt, Homo sapiens
  misc_RNA (1)...(19): siRNA sense strand
ucccacaaguccacaauuu

SEQ ID NO: 411782 - RNA, 19 nt, Homo sapiens
  misc_RNA (1)...(19): siRNA sense strand
ugaccgccauggccuauga

SEQ ID NO: 411783 - RNA, 19 nt, Homo sapiens
  misc_RNA (1)...(19): siRNA sense strand
gaggcuggguucaguggaa

SEQ ID NO: 411784 - RNA, 19 nt, Homo sapiens
  misc_RNA (1)...(19): siRNA sense strand
gcagccaguugucuuugug

SEQ ID NO: 411785 - RNA, 19 nt, Homo sapiens
  misc_RNA (1)...(19): siRNA sense strand
aauguugggucgucucuug

SEQ ID NO: 411786 - RNA, 19 nt, Homo sapiens
  misc_RNA (1)...(19): siRNA sense strand
gaagcugggaccaauagga

SEQ ID NO: 411787 - RNA, 19 nt, Homo sapiens
  misc_RNA (1)...(19): siRNA sense strand
gaugcagccaguugucuuu

SEQ ID NO: 411788 - RNA, 19 nt, Homo sapiens
  misc_RNA (1)...(19): siRNA sense strand
ucaguggaaucuucagaca

SEQ ID NO: 411789 - RNA, 19 nt, Homo sapiens
  misc_RNA (1)...(19): siRNA sense strand
aguccacaauuuccuauga

SEQ ID NO: 411790 - RNA, 19 nt, Homo sapiens
  misc_RNA (1)...(19): siRNA sense strand
uagcugcugugcugcaaau

SEQ ID NO: 411791 - RNA, 19 nt, Homo sapiens
  misc_RNA (1)...(19): siRNA sense strand
ugaggucaaucacuucuac

SEQ ID NO: 411792 - RNA, 19 nt, Homo sapiens
  misc_RNA (1)...(19): siRNA sense strand
ucucccagcucuucuucuu

SEQ ID NO: 411793 - RNA, 19 nt, Homo sapiens
  misc_RNA (1)...(19): siRNA sense strand
ucacuguuccugcaauguu

SEQ ID NO: 411794 - RNA, 19 nt, Homo sapiens
  misc_RNA (1)...(19): siRNA sense strand
aguggaaucuucagacaag

SEQ ID NO: 411795 - RNA, 19 nt, Homo sapiens
  misc_RNA (1)...(19): siRNA sense strand
acaggugucuucagcuaca

SEQ ID NO: 411796 - RNA, 19 nt, Homo sapiens
  misc_RNA (1)...(19): siRNA sense strand
cuacugggccuagugcaaa

SEQ ID NO: 411797 - RNA, 19 nt, Homo sapiens
  misc_RNA (1)...(19): siRNA sense strand
ggucaaucacuucuacugu

SEQ ID NO: 411798 - RNA, 19 nt, Homo sapiens
  misc_RNA (1)...(19): siRNA sense strand
cuacagcacccgcaugagu

SEQ ID NO: 411799 - RNA, 19 nt, Homo sapiens
  misc_RNA (1)...(19): siRNA sense strand
guccuaugcccauguggua

SEQ ID NO: 411800 - RNA, 19 nt, Homo sapiens
  misc_RNA (1)...(19): siRNA sense strand
aaucuucagacaaggauaa

SEQ ID NO: 411801 - RNA, 19 nt, Homo sapiens
  misc_RNA (1)...(19): siRNA sense strand
uggcugggauggacugcuu

SEQ ID NO: 411802 - RNA, 19 nt, Homo sapiens
  misc_RNA (1)...(19): siRNA sense strand
cagaagcugggaccaauag

SEQ ID NO: 411803 - RNA, 19 nt, Homo sapiens
  misc_RNA (1)...(19): siRNA sense strand
cauccuggcagccgucuug

SEQ ID NO: 411804 - RNA, 19 nt, Homo sapiens
  misc_RNA (1)...(19): siRNA sense strand
ugaacccacuuaucuacag

SEQ ID NO: 411805 - RNA, 19 nt, Homo sapiens
  misc_RNA (1)...(19): siRNA sense strand
gcugaacccacuuaucuac

SEQ ID NO: 411806 - RNA, 19 nt, Homo sapiens
  misc_RNA (1)...(19): siRNA sense strand
gguagcugcugugcugcaa

SEQ ID NO: 411807 - RNA, 19 nt, Homo sapiens
  misc_RNA (1)...(19): siRNA sense strand
ggaaucuucagacaaggau

SEQ ID NO: 411808 - RNA, 19 nt, Homo sapiens
  misc_RNA (1)...(19): siRNA sense strand
cacuguuccugcaauguug

SEQ ID NO: 411809 - RNA, 19 nt, Homo sapiens
  misc_RNA (1)...(19): siRNA sense strand
aucuacagccucagaaaua

SEQ ID NO: 411810 - RNA, 19 nt, Homo sapiens
  misc_RNA (1)...(19): siRNA sense strand
uguccacgcucaacuucug

SEQ ID NO: 411811 - RNA, 19 nt, Homo sapiens
  misc_RNA (1)...(19): siRNA sense strand
gggccuagugcaaacagaa

SEQ ID NO: 411812 - RNA, 19 nt, Homo sapiens
  misc_RNA (1)...(19): siRNA sense strand
acaaguccacaauuuccua

SEQ ID NO: 411813 - RNA, 19 nt, Homo sapiens
  misc_RNA (1)...(19): siRNA sense strand
gaccgcuguugcugaguuc

SEQ ID NO: 411814 - RNA, 19 nt, Homo sapiens
  misc_RNA (1)...(19): siRNA sense strand
uggguucaguggaaucuuc

SEQ ID NO: 411815 - RNA, 19 nt, Homo sapiens
  misc_RNA (1)...(19): siRNA sense strand
gauguaucacugucacugu

SEQ ID NO: 411816 - RNA, 19 nt, Homo sapiens
  misc_RNA (1)...(19): siRNA sense strand
uaucuacagccucagaaau

SEQ ID NO: 411817 - RNA, 19 nt, Homo sapiens
  misc_RNA (1)...(19): siRNA sense strand
ccagcacccaacucaauga

SEQ ID NO: 411818 - RNA, 19 nt, Homo sapiens
  misc_RNA (1)...(19): siRNA sense strand
gggcuugugccuucaccaa

SEQ ID NO: 411819 - RNA, 19 nt, Homo sapiens
  misc_RNA (1)...(19): siRNA sense strand
caaguccacaauuuccuau

SEQ ID NO: 411820 - RNA, 19 nt, Homo sapiens
  misc_RNA (1)...(19): siRNA sense strand
caacuucuguggccccaau

SEQ ID NO: 411821 - RNA, 19 nt, Homo sapiens
  misc_RNA (1)...(19): siRNA sense strand
ucacuguggugggcaucuu

SEQ ID NO: 411822 - RNA, 19 nt, Homo sapiens
  misc_RNA (1)...(19): siRNA sense strand
cuucaucaguguguccuau

SEQ ID NO: 411823 - RNA, 19 nt, Homo sapiens
  misc_RNA (1)...(19): siRNA sense strand
ccacaaguccacaauuucc

SEQ ID NO: 411824 - RNA, 19 nt, Homo sapiens
  misc_RNA (1)...(19): siRNA sense strand
uguagcagcagccuucaug

SEQ ID NO: 411825 - RNA, 19 nt, Homo sapiens
  misc_RNA (1)...(19): siRNA sense strand
caaugaggucaaucacuuc

SEQ ID NO: 411826 - RNA, 19 nt, Homo sapiens
  misc_RNA (1)...(19): siRNA sense strand
gaaacucauggagccagaa

SEQ ID NO: 411827 - RNA, 19 nt, Homo sapiens
  misc_RNA (1)...(19): siRNA sense strand
caaaguugcucuaaagaaa

SEQ ID NO: 411828 - RNA, 19 nt, Homo sapiens
  misc_RNA (1)...(19): siRNA sense strand
ugaaugagcuuguaguguu

SEQ ID NO: 411829 - RNA, 19 nt, Homo sapiens
  misc_RNA (1)...(19): siRNA sense strand
caaggugucuucccuauuc

SEQ ID NO: 411830 - RNA, 19 nt, Homo sapiens
  misc_RNA (1)...(19): siRNA sense strand
gaaugagcuuguaguguuu

SEQ ID NO: 411831 - RNA, 19 nt, Homo sapiens
  misc_RNA (1)...(19): siRNA sense strand
gaauaaggacgucaaaguu

SEQ ID NO: 411832 - RNA, 19 nt, Homo sapiens
  misc_RNA (1)...(19): siRNA sense strand
ccaauaaccuugucaacca

SEQ ID NO: 411833 - RNA, 19 nt, Homo sapiens
  misc_RNA (1)...(19): siRNA sense strand
ugacucagcucuucuucuu

SEQ ID NO: 411834 - RNA, 19 nt, Homo sapiens
  misc_RNA (1)...(19): siRNA sense strand
ugauaaggcucaacucuca

SEQ ID NO: 411835 - RNA, 19 nt, Homo sapiens
  misc_RNA (1)...(19): siRNA sense strand
ggaauaaggacgucaaagu

SEQ ID NO: 411836 - RNA, 19 nt, Homo sapiens
  misc_RNA (1)...(19): siRNA sense strand
gcugaugagcuuugucuua

SEQ ID NO: 411837 - RNA, 19 nt, Homo sapiens
  misc_RNA (1)...(19): siRNA sense strand
ccacauaauugcaguuucu

SEQ ID NO: 411838 - RNA, 19 nt, Homo sapiens
  misc_RNA (1)...(19): siRNA sense strand
cugaugagcuuugucuuaa

SEQ ID NO: 411839 - RNA, 19 nt, Homo sapiens
  misc_RNA (1)...(19): siRNA sense strand
gcucaacccauuaauuuau

SEQ ID NO: 411840 - RNA, 19 nt, Homo sapiens
  misc_RNA (1)...(19): siRNA sense strand
cgucaaaguugcucuaaag

SEQ ID NO: 411841 - RNA, 19 nt, Homo sapiens
  misc_RNA (1)...(19): siRNA sense strand
uaacuuguccuucauagau

SEQ ID NO: 411842 - RNA, 19 nt, Homo sapiens
  misc_RNA (1)...(19): siRNA sense strand
cagcucuucuucuuucuuu

SEQ ID NO: 411843 - RNA, 19 nt, Homo sapiens
  misc_RNA (1)...(19): siRNA sense strand
ugucagcaauggcguauga

SEQ ID NO: 411844 - RNA, 19 nt, Homo sapiens
  misc_RNA (1)...(19): siRNA sense strand
ccacacagcgugcaugaug

SEQ ID NO: 411845 - RNA, 19 nt, Homo sapiens
  misc_RNA (1)...(19): siRNA sense strand
gagcauucauguaccucaa

SEQ ID NO: 411846 - RNA, 19 nt, Homo sapiens
  misc_RNA (1)...(19): siRNA sense strand
gcuauguggccaucuguaa

SEQ ID NO: 411847 - RNA, 19 nt, Homo sapiens
  misc_RNA (1)...(19): siRNA sense strand
ggcaaggugucuucccuau

SEQ ID NO: 411848 - RNA, 19 nt, Homo sapiens
  misc_RNA (1)...(19): siRNA sense strand
gagcuuguaguguuuguug

SEQ ID NO: 411849 - RNA, 19 nt, Homo sapiens
  misc_RNA (1)...(19): siRNA sense strand
guaacccacuguuguacau

SEQ ID NO: 411850 - RNA, 19 nt, Homo sapiens
  misc_RNA (1)...(19): siRNA sense strand
ggucaggagcauucaugua

SEQ ID NO: 411851 - RNA, 19 nt, Homo sapiens
  misc_RNA (1)...(19): siRNA sense strand
ucaaaguugcucuaaagaa

SEQ ID NO: 411852 - RNA, 19 nt, Homo sapiens
  misc_RNA (1)...(19): siRNA sense strand
uaauugcaguuucucuguu

SEQ ID NO: 411853 - RNA, 19 nt, Homo sapiens
  misc_RNA (1)...(19): siRNA sense strand
auuuauagccugaggaaua

SEQ ID NO: 411854 - RNA, 19 nt, Homo sapiens
  misc_RNA (1)...(19): siRNA sense strand
acucagcucuucuucuuuc

SEQ ID NO: 411855 - RNA, 19 nt, Homo sapiens
  misc_RNA (1)...(19): siRNA sense strand
ggacgucaaaguugcucua

SEQ ID NO: 411856 - RNA, 19 nt, Homo sapiens
  misc_RNA (1)...(19): siRNA sense strand
uccagcaucuuccacauug

SEQ ID NO: 411857 - RNA, 19 nt, Homo sapiens
  misc_RNA (1)...(19): siRNA sense strand
gcaaggugucuucccuauu

SEQ ID NO: 411858 - RNA, 19 nt, Homo sapiens
  misc_RNA (1)...(19): siRNA sense strand
cugcagcucccacauaauu

SEQ ID NO: 411859 - RNA, 19 nt, Homo sapiens
  misc_RNA (1)...(19): siRNA sense strand
ccaaaaugcugaugagcuu

SEQ ID NO: 411860 - RNA, 19 nt, Homo sapiens
  misc_RNA (1)...(19): siRNA sense strand
aauaaggacgucaaaguug

SEQ ID NO: 411861 - RNA, 19 nt, Homo sapiens
  misc_RNA (1)...(19): siRNA sense strand
ugaugagcuuugucuuaaa

SEQ ID NO: 411862 - RNA, 19 nt, Homo sapiens
  misc_RNA (1)...(19): siRNA sense strand
caaacccuuuucucuuuua

SEQ ID NO: 411863 - RNA, 19 nt, Homo sapiens
  misc_RNA (1)...(19): siRNA sense strand
acagucaccaucuucauuu

SEQ ID NO: 411864 - RNA, 19 nt, Homo sapiens
  misc_RNA (1)...(19): siRNA sense strand
gggaaccugggcuugauaa

SEQ ID NO: 411865 - RNA, 19 nt, Homo sapiens
  misc_RNA (1)...(19): siRNA sense strand
gaauuccuccuucgugaca

SEQ ID NO: 411866 - RNA, 19 nt, Homo sapiens
  misc_RNA (1)...(19): siRNA sense strand
ugucuucccuauucuauac

SEQ ID NO: 411867 - RNA, 19 nt, Homo sapiens
  misc_RNA (1)...(19): siRNA sense strand
augcucaacccauuaauuu

SEQ ID NO: 411868 - RNA, 19 nt, Homo sapiens
  misc_RNA (1)...(19): siRNA sense strand
gcccaugcucaacccauua

SEQ ID NO: 411869 - RNA, 19 nt, Homo sapiens
  misc_RNA (1)...(19): siRNA sense strand
agaagaacagcaucuccua

SEQ ID NO: 411870 - RNA, 19 nt, Homo sapiens
  misc_RNA (1)...(19): siRNA sense strand
gcaccagcaccuaugugaa

SEQ ID NO: 411871 - RNA, 19 nt, Homo sapiens
  misc_RNA (1)...(19): siRNA sense strand
gaccuucugugccaauaac

SEQ ID NO: 411872 - RNA, 19 nt, Homo sapiens
  misc_RNA (1)...(19): siRNA sense strand
caccagcaccuaugugaau

SEQ ID NO: 411873 - RNA, 19 nt, Homo sapiens
  misc_RNA (1)...(19): siRNA sense strand
gaggaauaaggacgucaaa

SEQ ID NO: 411874 - RNA, 19 nt, Homo sapiens
  misc_RNA (1)...(19): siRNA sense strand
uaauuuauagccugaggaa

SEQ ID NO: 411875 - RNA, 19 nt, Homo sapiens
  misc_RNA (1)...(19): siRNA sense strand
caguuucucuguucuuugg

SEQ ID NO: 411876 - RNA, 19 nt, Homo sapiens
  misc_RNA (1)...(19): siRNA sense strand
cuauguacuucuuccucua

SEQ ID NO: 411877 - RNA, 19 nt, Homo sapiens
  misc_RNA (1)...(19): siRNA sense strand
uauaacuuguccuucauag

SEQ ID NO: 411878 - RNA, 19 nt, Homo sapiens
  misc_RNA (1)...(19): siRNA sense strand
cauuuccuaugcucucauu

SEQ ID NO: 411879 - RNA, 19 nt, Homo sapiens
  misc_RNA (1)...(19): siRNA sense strand
uguacuucuuccucuauaa

SEQ ID NO: 411880 - RNA, 19 nt, Homo sapiens
  misc_RNA (1)...(19): siRNA sense strand
gcauucauguaccucaaac

SEQ ID NO: 411881 - RNA, 19 nt, Homo sapiens
  misc_RNA (1)...(19): siRNA sense strand
gcuucuacguggucacugu

SEQ ID NO: 411882 - RNA, 19 nt, Homo sapiens
  misc_RNA (1)...(19): siRNA sense strand
cuaugugaaugagcuugua

SEQ ID NO: 411883 - RNA, 19 nt, Homo sapiens
  misc_RNA (1)...(19): siRNA sense strand
guguaugacucagcucuuc

SEQ ID NO: 411884 - RNA, 19 nt, Homo sapiens
  misc_RNA (1)...(19): siRNA sense strand
ucuguaacccacuguugua

SEQ ID NO: 411885 - RNA, 19 nt, Homo sapiens
  misc_RNA (1)...(19): siRNA sense strand
accugcagcucccacauaa

SEQ ID NO: 411886 - RNA, 19 nt, Homo sapiens
  misc_RNA (1)...(19): siRNA sense strand
caccugcagcucccacaua

SEQ ID NO: 411887 - RNA, 19 nt, Homo sapiens
  misc_RNA (1)...(19): siRNA sense strand
ucaccaucuucauuuccua

SEQ ID NO: 411888 - RNA, 19 nt, Homo sapiens
  misc_RNA (1)...(19): siRNA sense strand
guugugggcauugauauug

SEQ ID NO: 411889 - RNA, 19 nt, Homo sapiens
  misc_RNA (1)...(19): siRNA sense strand
guuguugugggcauugaua

SEQ ID NO: 411890 - RNA, 19 nt, Homo sapiens
  misc_RNA (1)...(19): siRNA sense strand
caugcucaacccauuaauu

SEQ ID NO: 411891 - RNA, 19 nt, Homo sapiens
  misc_RNA (1)...(19): siRNA sense strand
cacagucaccaucuucauu

SEQ ID NO: 411892 - RNA, 19 nt, Homo sapiens
  misc_RNA (1)...(19): siRNA sense strand
cucuauaacuuguccuuca

SEQ ID NO: 411893 - RNA, 19 nt, Homo sapiens
  misc_RNA (1)...(19): siRNA sense strand
gcaguuucucuguucuuug

SEQ ID NO: 411894 - RNA, 19 nt, Homo sapiens
  misc_RNA (1)...(19): siRNA sense strand
cuauaacuuguccuucaua

SEQ ID NO: 411895 - RNA, 19 nt, Homo sapiens
  misc_RNA (1)...(19): siRNA sense strand
cucaaacccuuuucucuuu

SEQ ID NO: 411896 - RNA, 19 nt, Homo sapiens
  misc_RNA (1)...(19): siRNA sense strand
ugcaguuucucuguucuuu

SEQ ID NO: 411897 - RNA, 19 nt, Homo sapiens
  misc_RNA (1)...(19): siRNA sense strand
gugaccuucugugccaaua

SEQ ID NO: 411898 - RNA, 19 nt, Homo sapiens
  misc_RNA (1)...(19): siRNA sense strand
ggcuugauaacccugauaa

SEQ ID NO: 411899 - RNA, 19 nt, Homo sapiens
  misc_RNA (1)...(19): siRNA sense strand
gucaggagcauucauguac

SEQ ID NO: 411900 - RNA, 19 nt, Homo sapiens
  misc_RNA (1)...(19): siRNA sense strand
ccagcaucuuccacauuga

SEQ ID NO: 411901 - RNA, 19 nt, Homo sapiens
  misc_RNA (1)...(19): siRNA sense strand
gcccacacagcgugcauga

SEQ ID NO: 411902 - RNA, 19 nt, Homo sapiens
  misc_RNA (1)...(19): siRNA sense strand
gggcuugauaacccugaua

SEQ ID NO: 411903 - RNA, 19 nt, Homo sapiens
  misc_RNA (1)...(19): siRNA sense strand
ucaaacccuuuucucuuuu

SEQ ID NO: 411904 - RNA, 19 nt, Homo sapiens
  misc_RNA (1)...(19): siRNA sense strand
gcacaccccuauguacuuc

SEQ ID NO: 411905 - RNA, 19 nt, Homo sapiens
  misc_RNA (1)...(19): siRNA sense strand
gcuuguaguguuuguuguu

SEQ ID NO: 411906 - RNA, 19 nt, Homo sapiens
  misc_RNA (1)...(19): siRNA sense strand
ucuauaacuuguccuucau

SEQ ID NO: 411907 - RNA, 19 nt, Homo sapiens
  misc_RNA (1)...(19): siRNA sense strand
caucuguaacccacuguug

SEQ ID NO: 411908 - RNA, 19 nt, Homo sapiens
  misc_RNA (1)...(19): siRNA sense strand
guuuauccucgcaggcuua

SEQ ID NO: 411909 - RNA, 19 nt, Homo sapiens
  misc_RNA (1)...(19): siRNA sense strand
uguaguguuuguuguugug

SEQ ID NO: 411910 - RNA, 19 nt, Homo sapiens
  misc_RNA (1)...(19): siRNA sense strand
ggugucuucccuauucuau

SEQ ID NO: 411911 - RNA, 19 nt, Homo sapiens
  misc_RNA (1)...(19): siRNA sense strand
aauugcaguuucucuguuc

SEQ ID NO: 411912 - RNA, 19 nt, Homo sapiens
  misc_RNA (1)...(19): siRNA sense strand
guaugacucagcucuucuu

SEQ ID NO: 411913 - RNA, 19 nt, Homo sapiens
  misc_RNA (1)...(19): siRNA sense strand
acuuguccuucauagauuu

SEQ ID NO: 411914 - RNA, 19 nt, Homo sapiens
  misc_RNA (1)...(19): siRNA sense strand
cagucaccaucuucauuuc

SEQ ID NO: 411915 - RNA, 19 nt, Homo sapiens
  misc_RNA (1)...(19): siRNA sense strand
guacuucuuccucuauaac

SEQ ID NO: 411916 - RNA, 19 nt, Homo sapiens
  misc_RNA (1)...(19): siRNA sense strand
ugucaaccacuacaugugu

SEQ ID NO: 411917 - RNA, 19 nt, Homo sapiens
  misc_RNA (1)...(19): siRNA sense strand
ggaugaaucugaccucuau

SEQ ID NO: 411918 - RNA, 19 nt, Homo sapiens
  misc_RNA (1)...(19): siRNA sense strand
ugaccaagcugcagaauuc

SEQ ID NO: 411919 - RNA, 19 nt, Homo sapiens
  misc_RNA (1)...(19): siRNA sense strand
ggaaaggucgcaccaagag

SEQ ID NO: 411920 - RNA, 19 nt, Homo sapiens
  misc_RNA (1)...(19): siRNA sense strand
ucuauagccuggcccauuc

SEQ ID NO: 411921 - RNA, 19 nt, Homo sapiens
  misc_RNA (1)...(19): siRNA sense strand
gaaaggucgcaccaagaga

SEQ ID NO: 411922 - RNA, 19 nt, Homo sapiens
  misc_RNA (1)...(19): siRNA sense strand
ccaagcugcagaauucaga

SEQ ID NO: 411923 - RNA, 19 nt, Homo sapiens
  misc_RNA (1)...(19): siRNA sense strand
cggaaaggucgcaccaaga

SEQ ID NO: 411924 - RNA, 19 nt, Homo sapiens
  misc_RNA (1)...(19): siRNA sense strand
gagaagcugcugccaacac

SEQ ID NO: 411925 - RNA, 19 nt, Homo sapiens
  misc_RNA (1)...(19): siRNA sense strand
caaagcaacuguuaucaga

SEQ ID NO: 411926 - RNA, 19 nt, Homo sapiens
  misc_RNA (1)...(19): siRNA sense strand
gcacaaagcaacuguuauc

SEQ ID NO: 411927 - RNA, 19 nt, Homo sapiens
  misc_RNA (1)...(19): siRNA sense strand
ggaggaauuuggcuacaau

SEQ ID NO: 411928 - RNA, 19 nt, Homo sapiens
  misc_RNA (1)...(19): siRNA sense strand
ggacccaaccucaaugaaa

SEQ ID NO: 411929 - RNA, 19 nt, Homo sapiens
  misc_RNA (1)...(19): siRNA sense strand
aaacuacuaugcaagaaug

SEQ ID NO: 411930 - RNA, 19 nt, Homo sapiens
  misc_RNA (1)...(19): siRNA sense strand
agacgaagcgcaaguauga

SEQ ID NO: 411931 - RNA, 19 nt, Homo sapiens
  misc_RNA (1)...(19): siRNA sense strand
gugcacaaagcaacuguua

SEQ ID NO: 411932 - RNA, 19 nt, Homo sapiens
  misc_RNA (1)...(19): siRNA sense strand
cacagaaacuacuaugcaa

SEQ ID NO: 411933 - RNA, 19 nt, Homo sapiens
  misc_RNA (1)...(19): siRNA sense strand
gaaacuacuaugcaagaau

SEQ ID NO: 411934 - RNA, 19 nt, Homo sapiens
  misc_RNA (1)...(19): siRNA sense strand
gacccaaccucaaugaaac

SEQ ID NO: 411935 - RNA, 19 nt, Homo sapiens
  misc_RNA (1)...(19): siRNA sense strand
gcuaggagccgugaacuuc

SEQ ID NO: 411936 - RNA, 19 nt, Homo sapiens
  misc_RNA (1)...(19): siRNA sense strand
gccgugaacuucuuugucu

SEQ ID NO: 411937 - RNA, 19 nt, Homo sapiens
  misc_RNA (1)...(19): siRNA sense strand
ucucuagcaucaacacauu

SEQ ID NO: 411938 - RNA, 19 nt, Homo sapiens
  misc_RNA (1)...(19): siRNA sense strand
gcagagacacagaaacuac

SEQ ID NO: 411939 - RNA, 19 nt, Homo sapiens
  misc_RNA (1)...(19): siRNA sense strand
cagaaacuacuaugcaaga

SEQ ID NO: 411940 - RNA, 19 nt, Homo sapiens
  misc_RNA (1)...(19): siRNA sense strand
ggaaggcagccacaaugga

SEQ ID NO: 411941 - RNA, 19 nt, Homo sapiens
  misc_RNA (1)...(19): siRNA sense strand
aagacacgcucaugacugu

SEQ ID NO: 411942 - RNA, 19 nt, Homo sapiens
  misc_RNA (1)...(19): siRNA sense strand
ucaccaagaccauggaaga

SEQ ID NO: 411943 - RNA, 19 nt, Homo sapiens
  misc_RNA (1)...(19): siRNA sense strand
ucaaggugaugcacaagca

SEQ ID NO: 411944 - RNA, 19 nt, Homo sapiens
  misc_RNA (1)...(19): siRNA sense strand
gcaucaacaccuauaagug

SEQ ID NO: 411945 - RNA, 19 nt, Homo sapiens
  misc_RNA (1)...(19): siRNA sense strand
ggaauuuggcuacaaugca

SEQ ID NO: 411946 - RNA, 19 nt, Homo sapiens
  misc_RNA (1)...(19): siRNA sense strand
cauugugucugguggcuau

SEQ ID NO: 411947 - RNA, 19 nt, Homo sapiens
  misc_RNA (1)...(19): siRNA sense strand
cugcugcucuuccacaaug

SEQ ID NO: 411948 - RNA, 19 nt, Homo sapiens
  misc_RNA (1)...(19): siRNA sense strand
caacuguuaucagaacgau

SEQ ID NO: 411949 - RNA, 19 nt, Homo sapiens
  misc_RNA (1)...(19): siRNA sense strand
acacagaaacuacuaugca

SEQ ID NO: 411950 - RNA, 19 nt, Homo sapiens
  misc_RNA (1)...(19): siRNA sense strand
ggaagacacgcucaugacu

SEQ ID NO: 411951 - RNA, 19 nt, Homo sapiens
  misc_RNA (1)...(19): siRNA sense strand
gggcauugcuggagaaaag

SEQ ID NO: 411952 - RNA, 19 nt, Homo sapiens
  misc_RNA (1)...(19): siRNA sense strand
agaaacuacuaugcaagaa

SEQ ID NO: 411953 - RNA, 19 nt, Homo sapiens
  misc_RNA (1)...(19): siRNA sense strand
gagacgaagcgcaaguaug

SEQ ID NO: 411954 - RNA, 19 nt, Homo sapiens
  misc_RNA (1)...(19): siRNA sense strand
acuguuaucagaacgauuu

SEQ ID NO: 411955 - RNA, 19 nt, Homo sapiens
  misc_RNA (1)...(19): siRNA sense strand
gagaaaaguuugacaucgu

SEQ ID NO: 411956 - RNA, 19 nt, Homo sapiens
  misc_RNA (1)...(19): siRNA sense strand
uaggagccgugaacuucuu

SEQ ID NO: 411957 - RNA, 19 nt, Homo sapiens
  misc_RNA (1)...(19): siRNA sense strand
aagcaacuguuaucagaac

SEQ ID NO: 411958 - RNA, 19 nt, Homo sapiens
  misc_RNA (1)...(19): siRNA sense strand
ccacaauggagaucccuau

SEQ ID NO: 411959 - RNA, 19 nt, Homo sapiens
  misc_RNA (1)...(19): siRNA sense strand
gacacgcucaugacuguga

SEQ ID NO: 411960 - RNA, 19 nt, Homo sapiens
  misc_RNA (1)...(19): siRNA sense strand
caaugcagagacacagaaa

SEQ ID NO: 411961 - RNA, 19 nt, Homo sapiens
  misc_RNA (1)...(19): siRNA sense strand
gugaacuucuuugucucua

SEQ ID NO: 411962 - RNA, 19 nt, Homo sapiens
  misc_RNA (1)...(19): siRNA sense strand
ggcaucaacaccuauaagu

SEQ ID NO: 411963 - RNA, 19 nt, Homo sapiens
  misc_RNA (1)...(19): siRNA sense strand
ccaucaagcucaaguuccu

SEQ ID NO: 411964 - RNA, 19 nt, Homo sapiens
  misc_RNA (1)...(19): siRNA sense strand
gaagcgcaaguaugagagu

SEQ ID NO: 411965 - RNA, 19 nt, Homo sapiens
  misc_RNA (1)...(19): siRNA sense strand
ugcacugggugaugccuuu

SEQ ID NO: 411966 - RNA, 19 nt, Homo sapiens
  misc_RNA (1)...(19): siRNA sense strand
gugagacgaagcgcaagua

SEQ ID NO: 411967 - RNA, 19 nt, Homo sapiens
  misc_RNA (1)...(19): siRNA sense strand
ggacacguggucgacuuga

SEQ ID NO: 411968 - RNA, 19 nt, Homo sapiens
  misc_RNA (1)...(19): siRNA sense strand
uaugaugccuaccgaacag

SEQ ID NO: 411969 - RNA, 19 nt, Homo sapiens
  misc_RNA (1)...(19): siRNA sense strand
uggcuacaaugcagagaca

SEQ ID NO: 411970 - RNA, 19 nt, Homo sapiens
  misc_RNA (1)...(19): siRNA sense strand
agagacacagaaacuacua

SEQ ID NO: 411971 - RNA, 19 nt, Homo sapiens
  misc_RNA (1)...(19): siRNA sense strand
acacguggucgacuugaga

SEQ ID NO: 411972 - RNA, 19 nt, Homo sapiens
  misc_RNA (1)...(19): siRNA sense strand
gggaaggcagccacaaugg

SEQ ID NO: 411973 - RNA, 19 nt, Homo sapiens
  misc_RNA (1)...(19): siRNA sense strand
gagacacagaaacuacuau

SEQ ID NO: 411974 - RNA, 19 nt, Homo sapiens
  misc_RNA (1)...(19): siRNA sense strand
gggcaucaacaccuauaag

SEQ ID NO: 411975 - RNA, 19 nt, Homo sapiens
  misc_RNA (1)...(19): siRNA sense strand
gaaacccuccuggcuagag

SEQ ID NO: 411976 - RNA, 19 nt, Homo sapiens
  misc_RNA (1)...(19): siRNA sense strand
ggccaucaagcucaaguuc

SEQ ID NO: 411977 - RNA, 19 nt, Homo sapiens
  misc_RNA (1)...(19): siRNA sense strand
ugaacuucuuugucucuag

SEQ ID NO: 411978 - RNA, 19 nt, Homo sapiens
  misc_RNA (1)...(19): siRNA sense strand
agacacagaaacuacuaug

SEQ ID NO: 411979 - RNA, 19 nt, Homo sapiens
  misc_RNA (1)...(19): siRNA sense strand
ucucacagcaccacuccuu

SEQ ID NO: 411980 - RNA, 19 nt, Homo sapiens
  misc_RNA (1)...(19): siRNA sense strand
gcaacuguuaucagaacga

SEQ ID NO: 411981 - RNA, 19 nt, Homo sapiens
  misc_RNA (1)...(19): siRNA sense strand
caucgggacaaguaugaga

SEQ ID NO: 411982 - RNA, 19 nt, Homo sapiens
  misc_RNA (1)...(19): siRNA sense strand
gaugauggccgauauguac

SEQ ID NO: 411983 - RNA, 19 nt, Homo sapiens
  misc_RNA (1)...(19): siRNA sense strand
ggaccgaugugucucuaag

SEQ ID NO: 411984 - RNA, 19 nt, Homo sapiens
  misc_RNA (1)...(19): siRNA sense strand
gccgauauguacaacagaa

SEQ ID NO: 411985 - RNA, 19 nt, Homo sapiens
  misc_RNA (1)...(19): siRNA sense strand
gaugaagagcugaugaaga

SEQ ID NO: 411986 - RNA, 19 nt, Homo sapiens
  misc_RNA (1)...(19): siRNA sense strand
gauauguacaacagaauga

SEQ ID NO: 411987 - RNA, 19 nt, Homo sapiens
  misc_RNA (1)...(19): siRNA sense strand
augaagagcugaugaagag

SEQ ID NO: 411988 - RNA, 19 nt, Homo sapiens
  misc_RNA (1)...(19): siRNA sense strand
accgaugugucucuaagua

SEQ ID NO: 411989 - RNA, 19 nt, Homo sapiens
  misc_RNA (1)...(19): siRNA sense strand
gagaugauggccgauaugu

SEQ ID NO: 411990 - RNA, 19 nt, Homo sapiens
  misc_RNA (1)...(19): siRNA sense strand
uggagaugauggccgauau

SEQ ID NO: 411991 - RNA, 19 nt, Homo sapiens
  misc_RNA (1)...(19): siRNA sense strand
ggagaugauggccgauaug

SEQ ID NO: 411992 - RNA, 19 nt, Homo sapiens
  misc_RNA (1)...(19): siRNA sense strand
cgauauguacaacagaaug

SEQ ID NO: 411993 - RNA, 19 nt, Homo sapiens
  misc_RNA (1)...(19): siRNA sense strand
gagcuggagguggagauga

SEQ ID NO: 411994 - RNA, 19 nt, Homo sapiens
  misc_RNA (1)...(19): siRNA sense strand
ggaugaagagcugaugaag

SEQ ID NO: 411995 - RNA, 19 nt, Homo sapiens
  misc_RNA (1)...(19): siRNA sense strand
gagcucugggccugcauga

SEQ ID NO: 411996 - RNA, 19 nt, Homo sapiens
  misc_RNA (1)...(19): siRNA sense strand
guagaccgcuucauugaca

SEQ ID NO: 411997 - RNA, 19 nt, Homo sapiens
  misc_RNA (1)...(19): siRNA sense strand
cagcagaaggcgcaguuua

SEQ ID NO: 411998 - RNA, 19 nt, Homo sapiens
  misc_RNA (1)...(19): siRNA sense strand
ggauaaauguguggagaag

SEQ ID NO: 411999 - RNA, 19 nt, Homo sapiens
  misc_RNA (1)...(19): siRNA sense strand
ccuagacucucgcacugaa

SEQ ID NO: 412000 - RNA, 19 nt, Homo sapiens
  misc_RNA (1)...(19): siRNA sense strand
acaggugcaucacuucaug

SEQ ID NO: 412001 - RNA, 19 nt, Homo sapiens
  misc_RNA (1)...(19): siRNA sense strand
guguagaccgcuucauuga

SEQ ID NO: 412002 - RNA, 19 nt, Homo sapiens
  misc_RNA (1)...(19): siRNA sense strand
gggauaaauguguggagaa

SEQ ID NO: 412003 - RNA, 19 nt, Homo sapiens
  misc_RNA (1)...(19): siRNA sense strand
gcagaaggcgcaguuuacu

SEQ ID NO: 412004 - RNA, 19 nt, Homo sapiens
  misc_RNA (1)...(19): siRNA sense strand
uugcccagauuguacagaa

SEQ ID NO: 412005 - RNA, 19 nt, Homo sapiens
  misc_RNA (1)...(19): siRNA sense strand
uguguagaccgcuucauug

SEQ ID NO: 412006 - RNA, 19 nt, Homo sapiens
  misc_RNA (1)...(19): siRNA sense strand
ccagucgguuugcccagau

SEQ ID NO: 412007 - RNA, 19 nt, Homo sapiens
  misc_RNA (1)...(19): siRNA sense strand
gccaucaccagucgguuug

SEQ ID NO: 412008 - RNA, 19 nt, Homo sapiens
  misc_RNA (1)...(19): siRNA sense strand
ggaaagcccucgagcaugu

SEQ ID NO: 412009 - RNA, 19 nt, Homo sapiens
  misc_RNA (1)...(19): siRNA sense strand
cgagaaagaugaugaggaa

SEQ ID NO: 412010 - RNA, 19 nt, Homo sapiens
  misc_RNA (1)...(19): siRNA sense strand
caaaugacccuguggauga

SEQ ID NO: 412011 - RNA, 19 nt, Homo sapiens
  misc_RNA (1)...(19): siRNA sense strand
ggaagaaccugaagaugcu

SEQ ID NO: 412012 - RNA, 19 nt, Homo sapiens
  misc_RNA (1)...(19): siRNA sense strand
agaaggagaugauggagaa

SEQ ID NO: 412013 - RNA, 19 nt, Homo sapiens
  misc_RNA (1)...(19): siRNA sense strand
ggauuuaaauuccaugauc

SEQ ID NO: 412014 - RNA, 19 nt, Homo sapiens
  misc_RNA (1)...(19): siRNA sense strand
gggagaacauuccuacaga

SEQ ID NO: 412015 - RNA, 19 nt, Homo sapiens
  misc_RNA (1)...(19): siRNA sense strand
agagaaauaucguauggaa

SEQ ID NO: 412016 - RNA, 19 nt, Homo sapiens
  misc_RNA (1)...(19): siRNA sense strand
gcucggaaccuuaucauga

SEQ ID NO: 412017 - RNA, 19 nt, Homo sapiens
  misc_RNA (1)...(19): siRNA sense strand
gcaaagggagaaagaagaa

SEQ ID NO: 412018 - RNA, 19 nt, Homo sapiens
  misc_RNA (1)...(19): siRNA sense strand
ugaagaacaucgcaaauac

SEQ ID NO: 412019 - RNA, 19 nt, Homo sapiens
  misc_RNA (1)...(19): siRNA sense strand
gagaagauugggcagcuua

SEQ ID NO: 412020 - RNA, 19 nt, Homo sapiens
  misc_RNA (1)...(19): siRNA sense strand
ccaauuacgaugaguuuaa

SEQ ID NO: 412021 - RNA, 19 nt, Homo sapiens
  misc_RNA (1)...(19): siRNA sense strand
ggagaaagaagaaauagag

SEQ ID NO: 412022 - RNA, 19 nt, Homo sapiens
  misc_RNA (1)...(19): siRNA sense strand
ggaggaugcugacaguugu

SEQ ID NO: 412023 - RNA, 19 nt, Homo sapiens
  misc_RNA (1)...(19): siRNA sense strand
gaaagaugaugaggaagca

SEQ ID NO: 412024 - RNA, 19 nt, Homo sapiens
  misc_RNA (1)...(19): siRNA sense strand
uggcaaggcuggagaccua

SEQ ID NO: 412025 - RNA, 19 nt, Homo sapiens
  misc_RNA (1)...(19): siRNA sense strand
ggacauucgugcaaagaag

SEQ ID NO: 412026 - RNA, 19 nt, Homo sapiens
  misc_RNA (1)...(19): siRNA sense strand
gaaguuggcagaagucaca

SEQ ID NO: 412027 - RNA, 19 nt, Homo sapiens
  misc_RNA (1)...(19): siRNA sense strand
ggaacacucugauggacau

SEQ ID NO: 412028 - RNA, 19 nt, Homo sapiens
  misc_RNA (1)...(19): siRNA sense strand
ugaagaugcuagaaucaug

SEQ ID NO: 412029 - RNA, 19 nt, Homo sapiens
  misc_RNA (1)...(19): siRNA sense strand
ccaaggacaucgccaacug

SEQ ID NO: 412030 - RNA, 19 nt, Homo sapiens
  misc_RNA (1)...(19): siRNA sense strand
acaaguagcucggaaccuu

SEQ ID NO: 412031 - RNA, 19 nt, Homo sapiens
  misc_RNA (1)...(19): siRNA sense strand
uaaaugacaccaauuacga

SEQ ID NO: 412032 - RNA, 19 nt, Homo sapiens
  misc_RNA (1)...(19): siRNA sense strand
gagcguggaugcccugaag

SEQ ID NO: 412033 - RNA, 19 nt, Homo sapiens
  misc_RNA (1)...(19): siRNA sense strand
aaacggacauucgugcaaa

SEQ ID NO: 412034 - RNA, 19 nt, Homo sapiens
  misc_RNA (1)...(19): siRNA sense strand
uggcagaagucacagaaga

SEQ ID NO: 412035 - RNA, 19 nt, Homo sapiens
  misc_RNA (1)...(19): siRNA sense strand
ggaaaagucucgucugaag

SEQ ID NO: 412036 - RNA, 19 nt, Homo sapiens
  misc_RNA (1)...(19): siRNA sense strand
acacgcagaugguggagaa

SEQ ID NO: 412037 - RNA, 19 nt, Homo sapiens
  misc_RNA (1)...(19): siRNA sense strand
ggaaugacgccaggacuga

SEQ ID NO: 412038 - RNA, 19 nt, Homo sapiens
  misc_RNA (1)...(19): siRNA sense strand
ggaucuaaaugacaccaau

SEQ ID NO: 412039 - RNA, 19 nt, Homo sapiens
  misc_RNA (1)...(19): siRNA sense strand
gauggaggaugcugacagu

SEQ ID NO: 412040 - RNA, 19 nt, Homo sapiens
  misc_RNA (1)...(19): siRNA sense strand
aaggcuaccugacggauuu

SEQ ID NO: 412041 - RNA, 19 nt, Homo sapiens
  misc_RNA (1)...(19): siRNA sense strand
aaggauggaugaaagaaga

SEQ ID NO: 412042 - RNA, 19 nt, Homo sapiens
  misc_RNA (1)...(19): siRNA sense strand
gggagccucuucucaagug

SEQ ID NO: 412043 - RNA, 19 nt, Homo sapiens
  misc_RNA (1)...(19): siRNA sense strand
gaagaacaucgcaaauaca

SEQ ID NO: 412044 - RNA, 19 nt, Homo sapiens
  misc_RNA (1)...(19): siRNA sense strand
ggaggaagaucggaagcau

SEQ ID NO: 412045 - RNA, 19 nt, Homo sapiens
  misc_RNA (1)...(19): siRNA sense strand
caaguggacccuacgagaa

SEQ ID NO: 412046 - RNA, 19 nt, Homo sapiens
  misc_RNA (1)...(19): siRNA sense strand
ccaccgcacugugaagauu

SEQ ID NO: 412047 - RNA, 19 nt, Homo sapiens
  misc_RNA (1)...(19): siRNA sense strand
cgucaugcgugccgugauu

SEQ ID NO: 412048 - RNA, 19 nt, Homo sapiens
  misc_RNA (1)...(19): siRNA sense strand
gaaacggacauucgugcaa

SEQ ID NO: 412049 - RNA, 19 nt, Homo sapiens
  misc_RNA (1)...(19): siRNA sense strand
caaguagcucggaaccuua

SEQ ID NO: 412050 - RNA, 19 nt, Homo sapiens
  misc_RNA (1)...(19): siRNA sense strand
caggugagcuggacaugag

SEQ ID NO: 412051 - RNA, 19 nt, Homo sapiens
  misc_RNA (1)...(19): siRNA sense strand
gaagaagaaaccguuccua

SEQ ID NO: 412052 - RNA, 19 nt, Homo sapiens
  misc_RNA (1)...(19): siRNA sense strand
gaggaagaucggaagcaua

SEQ ID NO: 412053 - RNA, 19 nt, Homo sapiens
  misc_RNA (1)...(19): siRNA sense strand
agaagucacugggaagcua

SEQ ID NO: 412054 - RNA, 19 nt, Homo sapiens
  misc_RNA (1)...(19): siRNA sense strand
gagagaaccauaccucagu

SEQ ID NO: 412055 - RNA, 19 nt, Homo sapiens
  misc_RNA (1)...(19): siRNA sense strand
cugaagaacaucgcaaaua

SEQ ID NO: 412056 - RNA, 19 nt, Homo sapiens
  misc_RNA (1)...(19): siRNA sense strand
ugaagaagugugagcauga

SEQ ID NO: 412057 - RNA, 19 nt, Homo sapiens
  misc_RNA (1)...(19): siRNA sense strand
gagaaagaagaaauagaga

SEQ ID NO: 412058 - RNA, 19 nt, Homo sapiens
  misc_RNA (1)...(19): siRNA sense strand
gagcuggacaugaggaaga

SEQ ID NO: 412059 - RNA, 19 nt, Homo sapiens
  misc_RNA (1)...(19): siRNA sense strand
aaagaaagacgggagcaaa

SEQ ID NO: 412060 - RNA, 19 nt, Homo sapiens
  misc_RNA (1)...(19): siRNA sense strand
gaagaagugugagcaugac

SEQ ID NO: 412061 - RNA, 19 nt, Homo sapiens
  misc_RNA (1)...(19): siRNA sense strand
cccaagcuguggaugauga

SEQ ID NO: 412062 - RNA, 19 nt, Homo sapiens
  misc_RNA (1)...(19): siRNA sense strand
cgacgaggaucuaaaugac

SEQ ID NO: 412063 - RNA, 19 nt, Homo sapiens
  misc_RNA (1)...(19): siRNA sense strand
gagcaaagggagaaagaag

SEQ ID NO: 412064 - RNA, 19 nt, Homo sapiens
  misc_RNA (1)...(19): siRNA sense strand
gaucuaaaugacaccaauu

SEQ ID NO: 412065 - RNA, 19 nt, Homo sapiens
  misc_RNA (1)...(19): siRNA sense strand
gaaccauaccucaguggau

SEQ ID NO: 412066 - RNA, 19 nt, Homo sapiens
  misc_RNA (1)...(19): siRNA sense strand
uggaugcccugaagaagug

SEQ ID NO: 412067 - RNA, 19 nt, Homo sapiens
  misc_RNA (1)...(19): siRNA sense strand
caucgcaaauacacucaug

SEQ ID NO: 412068 - RNA, 19 nt, Homo sapiens
  misc_RNA (1)...(19): siRNA sense strand
caaacucgguucgcuugug

SEQ ID NO: 412069 - RNA, 19 nt, Homo sapiens
  misc_RNA (1)...(19): siRNA sense strand
auagagaaauaucguaugg

SEQ ID NO: 412070 - RNA, 19 nt, Homo sapiens
  misc_RNA (1)...(19): siRNA sense strand
ggagaagauugggcagcuu

SEQ ID NO: 412071 - RNA, 19 nt, Homo sapiens
  misc_RNA (1)...(19): siRNA sense strand
gaacccacgcuaugagaag

SEQ ID NO: 412072 - RNA, 19 nt, Homo sapiens
  misc_RNA (1)...(19): siRNA sense strand
gcugggagccucuucucaa

SEQ ID NO: 412073 - RNA, 19 nt, Homo sapiens
  misc_RNA (1)...(19): siRNA sense strand
ugucaggauuuacaucaga

SEQ ID NO: 412074 - RNA, 19 nt, Homo sapiens
  misc_RNA (1)...(19): siRNA sense strand
ugacgacgaggaucuaaau

SEQ ID NO: 412075 - RNA, 19 nt, Homo sapiens
  misc_RNA (1)...(19): siRNA sense strand
gaagcuggaguccgagaau

SEQ ID NO: 412076 - RNA, 19 nt, Homo sapiens
  misc_RNA (1)...(19): siRNA sense strand
ugauugggauugggauuga

SEQ ID NO: 412077 - RNA, 19 nt, Homo sapiens
  misc_RNA (1)...(19): siRNA sense strand
ccaacgguguggagaucaa

SEQ ID NO: 412078 - RNA, 19 nt, Homo sapiens
  misc_RNA (1)...(19): siRNA sense strand
agaggaaguuggcagaagu

SEQ ID NO: 412079 - RNA, 19 nt, Homo sapiens
  misc_RNA (1)...(19): siRNA sense strand
ccaacuggcagaagaagau

SEQ ID NO: 412080 - RNA, 19 nt, Homo sapiens
  misc_RNA (1)...(19): siRNA sense strand
gcaguucucagaccucaag

SEQ ID NO: 412081 - RNA, 19 nt, Homo sapiens
  misc_RNA (1)...(19): siRNA sense strand
ugacaccaauuacgaugag

SEQ ID NO: 412082 - RNA, 19 nt, Homo sapiens
  misc_RNA (1)...(19): siRNA sense strand
cucggaaccuuaucaugaa

SEQ ID NO: 412083 - RNA, 19 nt, Homo sapiens
  misc_RNA (1)...(19): siRNA sense strand
ggaacccacgcuaugagaa

SEQ ID NO: 412084 - RNA, 19 nt, Homo sapiens
  misc_RNA (1)...(19): siRNA sense strand
gauaaaaggauggaugaaa

SEQ ID NO: 412085 - RNA, 19 nt, Homo sapiens
  misc_RNA (1)...(19): siRNA sense strand
gcuggaagaaccugaagau

SEQ ID NO: 412086 - RNA, 19 nt, Homo sapiens
  misc_RNA (1)...(19): siRNA sense strand
caccaauuacgaugaguuu

SEQ ID NO: 412087 - RNA, 19 nt, Homo sapiens
  misc_RNA (1)...(19): siRNA sense strand
ugacggauuuaaauuccau

SEQ ID NO: 412088 - RNA, 19 nt, Homo sapiens
  misc_RNA (1)...(19): siRNA sense strand
caagcgaggaacacucuga

SEQ ID NO: 412089 - RNA, 19 nt, Homo sapiens
  misc_RNA (1)...(19): siRNA sense strand
ggucuuaacacacccuauc

SEQ ID NO: 412090 - RNA, 19 nt, Homo sapiens
  misc_RNA (1)...(19): siRNA sense strand
caauuuggaggucuuaaca

SEQ ID NO: 412091 - RNA, 19 nt, Homo sapiens
  misc_RNA (1)...(19): siRNA sense strand
gggagaaagaagaaauaga

SEQ ID NO: 412092 - RNA, 19 nt, Homo sapiens
  misc_RNA (1)...(19): siRNA sense strand
ggccuucuucuacaaguuu

SEQ ID NO: 412093 - RNA, 19 nt, Homo sapiens
  misc_RNA (1)...(19): siRNA sense strand
uggagugggugcaagacaa

SEQ ID NO: 412094 - RNA, 19 nt, Homo sapiens
  misc_RNA (1)...(19): siRNA sense strand
gacccuacgagaaagauga

SEQ ID NO: 412095 - RNA, 19 nt, Homo sapiens
  misc_RNA (1)...(19): siRNA sense strand
ggacuaaacacuccauacc

SEQ ID NO: 412096 - RNA, 19 nt, Homo sapiens
  misc_RNA (1)...(19): siRNA sense strand
ggcagaagucacagaagaa

SEQ ID NO: 412097 - RNA, 19 nt, Homo sapiens
  misc_RNA (1)...(19): siRNA sense strand
gggagcaaagggagaaaga

SEQ ID NO: 412098 - RNA, 19 nt, Homo sapiens
  misc_RNA (1)...(19): siRNA sense strand
ccacaaugcccuggagugu

SEQ ID NO: 412099 - RNA, 19 nt, Homo sapiens
  misc_RNA (1)...(19): siRNA sense strand
ggccaacgguguggagauc

SEQ ID NO: 412100 - RNA, 19 nt, Homo sapiens
  misc_RNA (1)...(19): siRNA sense strand
ucgguucgcuuguggaaag

SEQ ID NO: 412101 - RNA, 19 nt, Homo sapiens
  misc_RNA (1)...(19): siRNA sense strand
acacggaggagacaucaau

SEQ ID NO: 412102 - RNA, 19 nt, Homo sapiens
  misc_RNA (1)...(19): siRNA sense strand
cgaggaacacucugaugga

SEQ ID NO: 412103 - RNA, 19 nt, Homo sapiens
  misc_RNA (1)...(19): siRNA sense strand
gcagaagucacagaagaag

SEQ ID NO: 412104 - RNA, 19 nt, Homo sapiens
  misc_RNA (1)...(19): siRNA sense strand
ggagcaaagggagaaagaa

SEQ ID NO: 412105 - RNA, 19 nt, Homo sapiens
  misc_RNA (1)...(19): siRNA sense strand
ggaagcauaccuggaugga

SEQ ID NO: 412106 - RNA, 19 nt, Homo sapiens
  misc_RNA (1)...(19): siRNA sense strand
aagggagaaagaagaaaua

SEQ ID NO: 412107 - RNA, 19 nt, Homo sapiens
  misc_RNA (1)...(19): siRNA sense strand
aaagggagaaagaagaaau

SEQ ID NO: 412108 - RNA, 19 nt, Homo sapiens
  misc_RNA (1)...(19): siRNA sense strand
caaguacacucgugauauc

SEQ ID NO: 412109 - RNA, 19 nt, Homo sapiens
  misc_RNA (1)...(19): siRNA sense strand
guacacucgugauaucuau

SEQ ID NO: 412110 - RNA, 19 nt, Homo sapiens
  misc_RNA (1)...(19): siRNA sense strand
auaaagagcuccucaucuc

SEQ ID NO: 412111 - RNA, 19 nt, Homo sapiens
  misc_RNA (1)...(19): siRNA sense strand
ccgccugguucuucguuua

SEQ ID NO: 412112 - RNA, 19 nt, Homo sapiens
  misc_RNA (1)...(19): siRNA sense strand
ggucaccucuaccaaguac

SEQ ID NO: 412113 - RNA, 19 nt, Homo sapiens
  misc_RNA (1)...(19): siRNA sense strand
ccaaguacacucgugauau

SEQ ID NO: 412114 - RNA, 19 nt, Homo sapiens
  misc_RNA (1)...(19): siRNA sense strand
gcucuggguuggcaucuac

SEQ ID NO: 412115 - RNA, 19 nt, Homo sapiens
  misc_RNA (1)...(19): siRNA sense strand
cucgugauaucuauaaaga

SEQ ID NO: 412116 - RNA, 19 nt, Homo sapiens
  misc_RNA (1)...(19): siRNA sense strand
acacucgugauaucuauaa

SEQ ID NO: 412117 - RNA, 19 nt, Homo sapiens
  misc_RNA (1)...(19): siRNA sense strand
agauauaccagcccaguga

SEQ ID NO: 412118 - RNA, 19 nt, Homo sapiens
  misc_RNA (1)...(19): siRNA sense strand
gaggccaugagcagauaua

SEQ ID NO: 412119 - RNA, 19 nt, Homo sapiens
  misc_RNA (1)...(19): siRNA sense strand
ucgaggccaugagcagaua

SEQ ID NO: 412120 - RNA, 19 nt, Homo sapiens
  misc_RNA (1)...(19): siRNA sense strand
caucugaccguggugcuuu

SEQ ID NO: 412121 - RNA, 19 nt, Homo sapiens
  misc_RNA (1)...(19): siRNA sense strand
gccaugagcagauauacca

SEQ ID NO: 412122 - RNA, 19 nt, Homo sapiens
  misc_RNA (1)...(19): siRNA sense strand
gauauaccagcccagugaa

SEQ ID NO: 412123 - RNA, 19 nt, Homo sapiens
  misc_RNA (1)...(19): siRNA sense strand
cuauaaagagcuccucauc

SEQ ID NO: 412124 - RNA, 19 nt, Homo sapiens
  misc_RNA (1)...(19): siRNA sense strand
uauaaagagcuccucaucu

SEQ ID NO: 412125 - RNA, 19 nt, Homo sapiens
  misc_RNA (1)...(19): siRNA sense strand
gagcuccucaucuccuuag

SEQ ID NO: 412126 - RNA, 19 nt, Homo sapiens
  misc_RNA (1)...(19): siRNA sense strand
gcucauagcucaggccuua

SEQ ID NO: 412127 - RNA, 19 nt, Homo sapiens
  misc_RNA (1)...(19): siRNA sense strand
caggacagaucaucagaaa

SEQ ID NO: 412128 - RNA, 19 nt, Homo sapiens
  misc_RNA (1)...(19): siRNA sense strand
ucaaaggccuugguucuga

SEQ ID NO: 412129 - RNA, 19 nt, Homo sapiens
  misc_RNA (1)...(19): siRNA sense strand
ggaugccuauuaccaguuu

SEQ ID NO: 412130 - RNA, 19 nt, Homo sapiens
  misc_RNA (1)...(19): siRNA sense strand
cagaucaccuuguggaaga

SEQ ID NO: 412131 - RNA, 19 nt, Homo sapiens
  misc_RNA (1)...(19): siRNA sense strand
cugcagaucuugugacaga

SEQ ID NO: 412132 - RNA, 19 nt, Homo sapiens
  misc_RNA (1)...(19): siRNA sense strand
agaaacagaucaccuugug

SEQ ID NO: 412133 - RNA, 19 nt, Homo sapiens
  misc_RNA (1)...(19): siRNA sense strand
gagcuugaauucggaguga

SEQ ID NO: 412134 - RNA, 19 nt, Homo sapiens
  misc_RNA (1)...(19): siRNA sense strand
ggagauggcgaugcucaua

SEQ ID NO: 412135 - RNA, 19 nt, Homo sapiens
  misc_RNA (1)...(19): siRNA sense strand
gagagagguuuccuucaca

SEQ ID NO: 412136 - RNA, 19 nt, Homo sapiens
  misc_RNA (1)...(19): siRNA sense strand
ccacagucaucaucagaga

SEQ ID NO: 412137 - RNA, 19 nt, Homo sapiens
  misc_RNA (1)...(19): siRNA sense strand
gcagaucuugugacagaaa

SEQ ID NO: 412138 - RNA, 19 nt, Homo sapiens
  misc_RNA (1)...(19): siRNA sense strand
cgagagagguuuccuucac

SEQ ID NO: 412139 - RNA, 19 nt, Homo sapiens
  misc_RNA (1)...(19): siRNA sense strand
uacagacgauuaacuaugg

SEQ ID NO: 412140 - RNA, 19 nt, Homo sapiens
  misc_RNA (1)...(19): siRNA sense strand
ggacagaucaucagaaaag

SEQ ID NO: 412141 - RNA, 19 nt, Homo sapiens
  misc_RNA (1)...(19): siRNA sense strand
gcaauuuugugcacagauu

SEQ ID NO: 412142 - RNA, 19 nt, Homo sapiens
  misc_RNA (1)...(19): siRNA sense strand
gacagaaacagaucaccuu

SEQ ID NO: 412143 - RNA, 19 nt, Homo sapiens
  misc_RNA (1)...(19): siRNA sense strand
gcgguuagcauuggauuug

SEQ ID NO: 412144 - RNA, 19 nt, Homo sapiens
  misc_RNA (1)...(19): siRNA sense strand
aacaucagcugcagaucuu

SEQ ID NO: 412145 - RNA, 19 nt, Homo sapiens
  misc_RNA (1)...(19): siRNA sense strand
gcaggacagaucaucagaa

SEQ ID NO: 412146 - RNA, 19 nt, Homo sapiens
  misc_RNA (1)...(19): siRNA sense strand
uggauuugcuguucgacaa

SEQ ID NO: 412147 - RNA, 19 nt, Homo sapiens
  misc_RNA (1)...(19): siRNA sense strand
ccuuacagacgauuaacua

SEQ ID NO: 412148 - RNA, 19 nt, Homo sapiens
  misc_RNA (1)...(19): siRNA sense strand
gauuugcuguucgacaaga

SEQ ID NO: 412149 - RNA, 19 nt, Homo sapiens
  misc_RNA (1)...(19): siRNA sense strand
gcgggaugaugagaaguga

SEQ ID NO: 412150 - RNA, 19 nt, Homo sapiens
  misc_RNA (1)...(19): siRNA sense strand
aaacaucagcugcagaucu

SEQ ID NO: 412151 - RNA, 19 nt, Homo sapiens
  misc_RNA (1)...(19): siRNA sense strand
gcaucgugauagacacuuc

SEQ ID NO: 412152 - RNA, 19 nt, Homo sapiens
  misc_RNA (1)...(19): siRNA sense strand
uuacagacgauuaacuaug

SEQ ID NO: 412153 - RNA, 19 nt, Homo sapiens
  misc_RNA (1)...(19): siRNA sense strand
ucaccuuguggaagauuua

SEQ ID NO: 412154 - RNA, 19 nt, Homo sapiens
  misc_RNA (1)...(19): siRNA sense strand
acagguucauugcagaaga

SEQ ID NO: 412155 - RNA, 19 nt, Homo sapiens
  misc_RNA (1)...(19): siRNA sense strand
gagauggcgaugcucauag

SEQ ID NO: 412156 - RNA, 19 nt, Homo sapiens
  misc_RNA (1)...(19): siRNA sense strand
gacggcaccugcaauuuug

SEQ ID NO: 412157 - RNA, 19 nt, Homo sapiens
  misc_RNA (1)...(19): siRNA sense strand
cgacggcaccugcaauuuu

SEQ ID NO: 412158 - RNA, 19 nt, Homo sapiens
  misc_RNA (1)...(19): siRNA sense strand
gcuugaauucggagugauu

SEQ ID NO: 412159 - RNA, 19 nt, Homo sapiens
  misc_RNA (1)...(19): siRNA sense strand
cugcgacccugaagcuguu

SEQ ID NO: 412160 - RNA, 19 nt, Homo sapiens
  misc_RNA (1)...(19): siRNA sense strand
gacuguggcgguuagcauu

SEQ ID NO: 412161 - RNA, 19 nt, Homo sapiens
  misc_RNA (1)...(19): siRNA sense strand
ccuuguggaagauuuaauu

SEQ ID NO: 412162 - RNA, 19 nt, Homo sapiens
  misc_RNA (1)...(19): siRNA sense strand
caggcggcaucgugauaga

SEQ ID NO: 412163 - RNA, 19 nt, Homo sapiens
  misc_RNA (1)...(19): siRNA sense strand
ucucaaaggccuugguucu

SEQ ID NO: 412164 - RNA, 19 nt, Homo sapiens
  misc_RNA (1)...(19): siRNA sense strand
ggacgaaccugaucucuua

SEQ ID NO: 412165 - RNA, 19 nt, Homo sapiens
  misc_RNA (1)...(19): siRNA sense strand
ccaaauaucucaucaacaa

SEQ ID NO: 412166 - RNA, 19 nt, Homo sapiens
  misc_RNA (1)...(19): siRNA sense strand
agaaaucgcugucgccuua

SEQ ID NO: 412167 - RNA, 19 nt, Homo sapiens
  misc_RNA (1)...(19): siRNA sense strand
ggcuuucgcucuaagauua

SEQ ID NO: 412168 - RNA, 19 nt, Homo sapiens
  misc_RNA (1)...(19): siRNA sense strand
cuagcaauaucaaccauua

SEQ ID NO: 412169 - RNA, 19 nt, Homo sapiens
  misc_RNA (1)...(19): siRNA sense strand
aaccugaucucuuauacua

SEQ ID NO: 412170 - RNA, 19 nt, Homo sapiens
  misc_RNA (1)...(19): siRNA sense strand
guacugaucauucuauuuc

SEQ ID NO: 412171 - RNA, 19 nt, Homo sapiens
  misc_RNA (1)...(19): siRNA sense strand
aaccuucccucuacacuua

SEQ ID NO: 412172 - RNA, 19 nt, Homo sapiens
  misc_RNA (1)...(19): siRNA sense strand
ccacccaacuaucuauaaa

SEQ ID NO: 412173 - RNA, 19 nt, Homo sapiens
  misc_RNA (1)...(19): siRNA sense strand
ucuguucgcuucauucauu

SEQ ID NO: 412174 - RNA, 19 nt, Homo sapiens
  misc_RNA (1)...(19): siRNA sense strand
cuuaucaucuucacaauuc

SEQ ID NO: 412175 - RNA, 19 nt, Homo sapiens
  misc_RNA (1)...(19): siRNA sense strand
gaaaccaucagccuacuca

SEQ ID NO: 412176 - RNA, 19 nt, Homo sapiens
  misc_RNA (1)...(19): siRNA sense strand
ccauuaaccuucccucuac

SEQ ID NO: 412177 - RNA, 19 nt, Homo sapiens
  misc_RNA (1)...(19): siRNA sense strand
ccucuacacuuaucaucuu

SEQ ID NO: 412178 - RNA, 19 nt, Homo sapiens
  misc_RNA (1)...(19): siRNA sense strand
cgccuaaccgcuaacauua

SEQ ID NO: 412179 - RNA, 19 nt, Homo sapiens
  misc_RNA (1)...(19): siRNA sense strand
ugcccuagcccacuucuua

SEQ ID NO: 412180 - RNA, 19 nt, Homo sapiens
  misc_RNA (1)...(19): siRNA sense strand
ccuacucauucaaccaaua

SEQ ID NO: 412181 - RNA, 19 nt, Homo sapiens
  misc_RNA (1)...(19): siRNA sense strand
acacuuaucaucuucacaa

SEQ ID NO: 412182 - RNA, 19 nt, Homo sapiens
  misc_RNA (1)...(19): siRNA sense strand
ccugaucucuuauacuagu

SEQ ID NO: 412183 - RNA, 19 nt, Homo sapiens
  misc_RNA (1)...(19): siRNA sense strand
auuauaggcuuucgcucua

SEQ ID NO: 412184 - RNA, 19 nt, Homo sapiens
  misc_RNA (1)...(19): siRNA sense strand
guuauuaucgaaaccauca

SEQ ID NO: 412185 - RNA, 19 nt, Homo sapiens
  misc_RNA (1)...(19): siRNA sense strand
caaccacccaacuaucuau

SEQ ID NO: 412186 - RNA, 19 nt, Homo sapiens
  misc_RNA (1)...(19): siRNA sense strand
cgaaccugaucucuuauac

SEQ ID NO: 412187 - RNA, 19 nt, Homo sapiens
  misc_RNA (1)...(19): siRNA sense strand
gaaaaucuguucgcuucau

SEQ ID NO: 412188 - RNA, 19 nt, Homo sapiens
  misc_RNA (1)...(19): siRNA sense strand
caguacugaucauucuauu

SEQ ID NO: 412189 - RNA, 19 nt, Homo sapiens
  misc_RNA (1)...(19): siRNA sense strand
ccaaccacccaacuaucua

SEQ ID NO: 412190 - RNA, 19 nt, Homo sapiens
  misc_RNA (1)...(19): siRNA sense strand
gcgccacccuagcaauauc

SEQ ID NO: 412191 - RNA, 19 nt, Homo sapiens
  misc_RNA (1)...(19): siRNA sense strand
acaccaaccacccaacuau

SEQ ID NO: 412192 - RNA, 19 nt, Homo sapiens
  misc_RNA (1)...(19): siRNA sense strand
aagcgccacccuagcaaua

SEQ ID NO: 412193 - RNA, 19 nt, Homo sapiens
  misc_RNA (1)...(19): siRNA sense strand
ggaagcgccacccuagcaa

SEQ ID NO: 412194 - RNA, 19 nt, Homo sapiens
  misc_RNA (1)...(19): siRNA sense strand
ccuaaccgcuaacauuacu

SEQ ID NO: 412195 - RNA, 19 nt, Homo sapiens
  misc_RNA (1)...(19): siRNA sense strand
gaaccugaucucuuauacu

SEQ ID NO: 412196 - RNA, 19 nt, Homo sapiens
  misc_RNA (1)...(19): siRNA sense strand
ccaucagccuacucauuca

SEQ ID NO: 412197 - RNA, 19 nt, Homo sapiens
  misc_RNA (1)...(19): siRNA sense strand
gcccacuucuuaccacaag

SEQ ID NO: 412198 - RNA, 19 nt, Homo sapiens
  misc_RNA (1)...(19): siRNA sense strand
gaagcgccacccuagcaau

SEQ ID NO: 412199 - RNA, 19 nt, Homo sapiens
  misc_RNA (1)...(19): siRNA sense strand
gaaaucgcugucgccuuaa

SEQ ID NO: 412200 - RNA, 19 nt, Homo sapiens
  misc_RNA (1)...(19): siRNA sense strand
uuauaggcuuucgcucuaa

SEQ ID NO: 412201 - RNA, 19 nt, Homo sapiens
  misc_RNA (1)...(19): siRNA sense strand
cuccaaauaucucaucaac

SEQ ID NO: 412202 - RNA, 19 nt, Homo sapiens
  misc_RNA (1)...(19): siRNA sense strand
gccucuaccugcacgacaa

SEQ ID NO: 412203 - RNA, 19 nt, Homo sapiens
  misc_RNA (1)...(19): siRNA sense strand
acgccuaaccgcuaacauu

SEQ ID NO: 412204 - RNA, 19 nt, Homo sapiens
  misc_RNA (1)...(19): siRNA sense strand
uaaccuucccucuacacuu

SEQ ID NO: 412205 - RNA, 19 nt, Homo sapiens
  misc_RNA (1)...(19): siRNA sense strand
aaccaucagccuacucauu

SEQ ID NO: 412206 - RNA, 19 nt, Homo sapiens
  misc_RNA (1)...(19): siRNA sense strand
aaaucgcugucgccuuaau

SEQ ID NO: 412207 - RNA, 19 nt, Homo sapiens
  misc_RNA (1)...(19): siRNA sense strand
ccguacgccuaaccgcuaa

SEQ ID NO: 412208 - RNA, 19 nt, Homo sapiens
  misc_RNA (1)...(19): siRNA sense strand
gaaccaaaaugaacgaaaa

SEQ ID NO: 412209 - RNA, 19 nt, Homo sapiens
  misc_RNA (1)...(19): siRNA sense strand
uaacaaacccugagaacca

SEQ ID NO: 412210 - RNA, 19 nt, Homo sapiens
  misc_RNA (1)...(19): siRNA sense strand
ucuguucgcuucauucauu

SEQ ID NO: 412211 - RNA, 19 nt, Homo sapiens
  misc_RNA (1)...(19): siRNA sense strand
ccauacuccuuacacuauu

SEQ ID NO: 412212 - RNA, 19 nt, Homo sapiens
  misc_RNA (1)...(19): siRNA sense strand
gaaaaucuguucgcuucau

SEQ ID NO: 412213 - RNA, 19 nt, Homo sapiens
  misc_RNA (1)...(19): siRNA sense strand
cauacuccuuacacuauuc

SEQ ID NO: 412214 - RNA, 19 nt, Homo sapiens
  misc_RNA (1)...(19): siRNA sense strand
cccauacuccuuacacuau

SEQ ID NO: 412215 - RNA, 19 nt, Homo sapiens
  misc_RNA (1)...(19): siRNA sense strand
aacaaacccugagaaccaa

SEQ ID NO: 412216 - RNA, 19 nt, Homo sapiens
  misc_RNA (1)...(19): siRNA sense strand
ccucaucacccaacuaaaa

SEQ ID NO: 412217 - RNA, 19 nt, Homo sapiens
  misc_RNA (1)...(19): siRNA sense strand
cuuacacuauuccucauca

SEQ ID NO: 412218 - RNA, 19 nt, Homo sapiens
  misc_RNA (1)...(19): siRNA sense strand
gaagaacccguauacauaa

SEQ ID NO: 412219 - RNA, 19 nt, Homo sapiens
  misc_RNA (1)...(19): siRNA sense strand
cgaagaacccguauacaua

SEQ ID NO: 412220 - RNA, 19 nt, Homo sapiens
  misc_RNA (1)...(19): siRNA sense strand
gaagcaauaugaaaugauc

SEQ ID NO: 412221 - RNA, 19 nt, Homo sapiens
  misc_RNA (1)...(19): siRNA sense strand
ggucugagcuaugauauca

SEQ ID NO: 412222 - RNA, 19 nt, Homo sapiens
  misc_RNA (1)...(19): siRNA sense strand
caaagacauuggaacacua

SEQ ID NO: 412223 - RNA, 19 nt, Homo sapiens
  misc_RNA (1)...(19): siRNA sense strand
gguauggucugagcuauga

SEQ ID NO: 412224 - RNA, 19 nt, Homo sapiens
  misc_RNA (1)...(19): siRNA sense strand
gaagaacccuccauaaacc

SEQ ID NO: 412225 - RNA, 19 nt, Homo sapiens
  misc_RNA (1)...(19): siRNA sense strand
gcccaugcauuuguaauaa

SEQ ID NO: 412226 - RNA, 19 nt, Homo sapiens
  misc_RNA (1)...(19): siRNA sense strand
ggaacacuauaccuauuau

SEQ ID NO: 412227 - RNA, 19 nt, Homo sapiens
  misc_RNA (1)...(19): siRNA sense strand
ucuguaggcucauucauuu

SEQ ID NO: 412228 - RNA, 19 nt, Homo sapiens
  misc_RNA (1)...(19): siRNA sense strand
gauaucaauuggcuuccua

SEQ ID NO: 412229 - RNA, 19 nt, Homo sapiens
  misc_RNA (1)...(19): siRNA sense strand
cuaccaggcuucggaauaa

SEQ ID NO: 412230 - RNA, 19 nt, Homo sapiens
  misc_RNA (1)...(19): siRNA sense strand
uagaagaacccuccauaaa

SEQ ID NO: 412231 - RNA, 19 nt, Homo sapiens
  misc_RNA (1)...(19): siRNA sense strand
caccauauauuuacaguag

SEQ ID NO: 412232 - RNA, 19 nt, Homo sapiens
  misc_RNA (1)...(19): siRNA sense strand
guagaagaacccuccauaa

SEQ ID NO: 412233 - RNA, 19 nt, Homo sapiens
  misc_RNA (1)...(19): siRNA sense strand
cgucacagcccaugcauuu

SEQ ID NO: 412234 - RNA, 19 nt, Homo sapiens
  misc_RNA (1)...(19): siRNA sense strand
cgcaugagcuggaguccua

SEQ ID NO: 412235 - RNA, 19 nt, Homo sapiens
  misc_RNA (1)...(19): siRNA sense strand
gcguaaaucuaacuuucuu

SEQ ID NO: 412236 - RNA, 19 nt, Homo sapiens
  misc_RNA (1)...(19): siRNA sense strand
ccauuuggauacauaggua

SEQ ID NO: 412237 - RNA, 19 nt, Homo sapiens
  misc_RNA (1)...(19): siRNA sense strand
caucauaggaggcuucauu

SEQ ID NO: 412238 - RNA, 19 nt, Homo sapiens
  misc_RNA (1)...(19): siRNA sense strand
agaaccauuuggauacaua

SEQ ID NO: 412239 - RNA, 19 nt, Homo sapiens
  misc_RNA (1)...(19): siRNA sense strand
ccacaaagacauuggaaca

SEQ ID NO: 412240 - RNA, 19 nt, Homo sapiens
  misc_RNA (1)...(19): siRNA sense strand
gaaaaguccuaauaguaga

SEQ ID NO: 412241 - RNA, 19 nt, Homo sapiens
  misc_RNA (1)...(19): siRNA sense strand
ggaacagguugaacagucu

SEQ ID NO: 412242 - RNA, 19 nt, Homo sapiens
  misc_RNA (1)...(19): siRNA sense strand
gugagcacaccauauauuu

SEQ ID NO: 412243 - RNA, 19 nt, Homo sapiens
  misc_RNA (1)...(19): siRNA sense strand
ccauaaaccuggagugacu

SEQ ID NO: 412244 - RNA, 19 nt, Homo sapiens
  misc_RNA (1)...(19): siRNA sense strand
ccacuauguccuaucaaua

SEQ ID NO: 412245 - RNA, 19 nt, Homo sapiens
  misc_RNA (1)...(19): siRNA sense strand
aacauaagcuucugacucu

SEQ ID NO: 412246 - RNA, 19 nt, Homo sapiens
  misc_RNA (1)...(19): siRNA sense strand
ccacggaagcaauaugaaa

SEQ ID NO: 412247 - RNA, 19 nt, Homo sapiens
  misc_RNA (1)...(19): siRNA sense strand
ccauauauuuacaguagga

SEQ ID NO: 412248 - RNA, 19 nt, Homo sapiens
  misc_RNA (1)...(19): siRNA sense strand
gagcacaccauauauuuac

SEQ ID NO: 412249 - RNA, 19 nt, Homo sapiens
  misc_RNA (1)...(19): siRNA sense strand
guaacgaccacaucuacaa

SEQ ID NO: 412250 - RNA, 19 nt, Homo sapiens
  misc_RNA (1)...(19): siRNA sense strand
uaacagaccgcaaccucaa

SEQ ID NO: 412251 - RNA, 19 nt, Homo sapiens
  misc_RNA (1)...(19): siRNA sense strand
caucauaaucggaggcuuu

SEQ ID NO: 412252 - RNA, 19 nt, Homo sapiens
  misc_RNA (1)...(19): siRNA sense strand
cauaguaauacccaucaua

SEQ ID NO: 412253 - RNA, 19 nt, Homo sapiens
  misc_RNA (1)...(19): siRNA sense strand
gcgaaaaguccuaauagua

SEQ ID NO: 412254 - RNA, 19 nt, Homo sapiens
  misc_RNA (1)...(19): siRNA sense strand
ugagcacaccauauauuua

SEQ ID NO: 412255 - RNA, 19 nt, Homo sapiens
  misc_RNA (1)...(19): siRNA sense strand
caucuucuccuuacaccua

SEQ ID NO: 412256 - RNA, 19 nt, Homo sapiens
  misc_RNA (1)...(19): siRNA sense strand
gcauaaacaacauaagcuu

SEQ ID NO: 412257 - RNA, 19 nt, Homo sapiens
  misc_RNA (1)...(19): siRNA sense strand
gagcuaugauaucaauugg

SEQ ID NO: 412258 - RNA, 19 nt, Homo sapiens
  misc_RNA (1)...(19): siRNA sense strand
cggcguaaaucuaacuuuc

SEQ ID NO: 412259 - RNA, 19 nt, Homo sapiens
  misc_RNA (1)...(19): siRNA sense strand
gaggagaccccauucuaua

SEQ ID NO: 412260 - RNA, 19 nt, Homo sapiens
  misc_RNA (1)...(19): siRNA sense strand
ccaccggcgucaaaguauu

SEQ ID NO: 412261 - RNA, 19 nt, Homo sapiens
  misc_RNA (1)...(19): siRNA sense strand
gaagcgaaaaguccuaaua

SEQ ID NO: 412262 - RNA, 19 nt, Homo sapiens
  misc_RNA (1)...(19): siRNA sense strand
cggaagcaauaugaaauga

SEQ ID NO: 412263 - RNA, 19 nt, Homo sapiens
  misc_RNA (1)...(19): siRNA sense strand
gaacagguugaacagucua

SEQ ID NO: 412264 - RNA, 19 nt, Homo sapiens
  misc_RNA (1)...(19): siRNA sense strand
uggaacacuauaccuauua

SEQ ID NO: 412265 - RNA, 19 nt, Homo sapiens
  misc_RNA (1)...(19): siRNA sense strand
gaggcuucauucacugauu

SEQ ID NO: 412266 - RNA, 19 nt, Homo sapiens
  misc_RNA (1)...(19): siRNA sense strand
gccauaacccaauaccaaa

SEQ ID NO: 412267 - RNA, 19 nt, Homo sapiens
  misc_RNA (1)...(19): siRNA sense strand
aaaccuggagugacuauau

SEQ ID NO: 412268 - RNA, 19 nt, Homo sapiens
  misc_RNA (1)...(19): siRNA sense strand
ccaugcauuuguaauaauc

SEQ ID NO: 412269 - RNA, 19 nt, Homo sapiens
  misc_RNA (1)...(19): siRNA sense strand
agaagaacccuccauaaac

SEQ ID NO: 412270 - RNA, 19 nt, Homo sapiens
  misc_RNA (1)...(19): siRNA sense strand
aaagaaccauuuggauaca

SEQ ID NO: 412271 - RNA, 19 nt, Homo sapiens
  misc_RNA (1)...(19): siRNA sense strand
uaacuuacuacuccggaaa

SEQ ID NO: 412272 - RNA, 19 nt, Homo sapiens
  misc_RNA (1)...(19): siRNA sense strand
guaauacccaucauaaucg

SEQ ID NO: 412273 - RNA, 19 nt, Homo sapiens
  misc_RNA (1)...(19): siRNA sense strand
ucacagcccaugcauuugu

SEQ ID NO: 412274 - RNA, 19 nt, Homo sapiens
  misc_RNA (1)...(19): siRNA sense strand
aagaacccguauacauaaa

SEQ ID NO: 412275 - RNA, 19 nt, Homo sapiens
  misc_RNA (1)...(19): siRNA sense strand
agaccaaaccuacgccaaa

SEQ ID NO: 412276 - RNA, 19 nt, Homo sapiens
  misc_RNA (1)...(19): siRNA sense strand
ucugagcuaugauaucaau

SEQ ID NO: 412277 - RNA, 19 nt, Homo sapiens
  misc_RNA (1)...(19): siRNA sense strand
cacagcccaugcauuugua

SEQ ID NO: 412278 - RNA, 19 nt, Homo sapiens
  misc_RNA (1)...(19): siRNA sense strand
ugagcuaugauaucaauug

SEQ ID NO: 412279 - RNA, 19 nt, Homo sapiens
  misc_RNA (1)...(19): siRNA sense strand
cuacaaaccacaaagacau

SEQ ID NO: 412280 - RNA, 19 nt, Homo sapiens
  misc_RNA (1)...(19): siRNA sense strand
uaucaucuguaggcucauu

SEQ ID NO: 412281 - RNA, 19 nt, Homo sapiens
  misc_RNA (1)...(19): siRNA sense strand
aggcuucauucacugauuu

SEQ ID NO: 412282 - RNA, 19 nt, Homo sapiens
  misc_RNA (1)...(19): siRNA sense strand
guagacacacgagcauauu

SEQ ID NO: 412283 - RNA, 19 nt, Homo sapiens
  misc_RNA (1)...(19): siRNA sense strand
gccaucaauuucaucacaa

SEQ ID NO: 412284 - RNA, 19 nt, Homo sapiens
  misc_RNA (1)...(19): siRNA sense strand
uaacuuucuucccacaaca

SEQ ID NO: 412285 - RNA, 19 nt, Homo sapiens
  misc_RNA (1)...(19): siRNA sense strand
acacuccacggaagcaaua

SEQ ID NO: 412286 - RNA, 19 nt, Homo sapiens
  misc_RNA (1)...(19): siRNA sense strand
acaaagacauuggaacacu

SEQ ID NO: 412287 - RNA, 19 nt, Homo sapiens
  misc_RNA (1)...(19): siRNA sense strand
aguaauacccaucauaauc

SEQ ID NO: 412288 - RNA, 19 nt, Homo sapiens
  misc_RNA (1)...(19): siRNA sense strand
ucgaagaacccguauacau

SEQ ID NO: 412289 - RNA, 19 nt, Homo sapiens
  misc_RNA (1)...(19): siRNA sense strand
gaccaaaccuacgccaaaa

SEQ ID NO: 412290 - RNA, 19 nt, Homo sapiens
  misc_RNA (1)...(19): siRNA sense strand
cuaaccaucuucuccuuac

SEQ ID NO: 412291 - RNA, 19 nt, Homo sapiens
  misc_RNA (1)...(19): siRNA sense strand
ggaagcaauaugaaaugau

SEQ ID NO: 412292 - RNA, 19 nt, Homo sapiens
  misc_RNA (1)...(19): siRNA sense strand
ccuaccaggcuucggaaua

SEQ ID NO: 412293 - RNA, 19 nt, Homo sapiens
  misc_RNA (1)...(19): siRNA sense strand
ucggucacccugaaguuua

SEQ ID NO: 412294 - RNA, 19 nt, Homo sapiens
  misc_RNA (1)...(19): siRNA sense strand
cggaggcuuuggcaacuga

SEQ ID NO: 412295 - RNA, 19 nt, Homo sapiens
  misc_RNA (1)...(19): siRNA sense strand
gcucauucauuucucuaac

SEQ ID NO: 412296 - RNA, 19 nt, Homo sapiens
  misc_RNA (1)...(19): siRNA sense strand
gcaguccuacuucuccuau

SEQ ID NO: 412297 - RNA, 19 nt, Homo sapiens
  misc_RNA (1)...(19): siRNA sense strand
cauuggaacacuauaccua

SEQ ID NO: 412298 - RNA, 19 nt, Homo sapiens
  misc_RNA (1)...(19): siRNA sense strand
ccguagaccuaaccaucuu

SEQ ID NO: 412299 - RNA, 19 nt, Homo sapiens
  misc_RNA (1)...(19): siRNA sense strand
aguagaagaacccuccaua

SEQ ID NO: 412300 - RNA, 19 nt, Homo sapiens
  misc_RNA (1)...(19): siRNA sense strand
gaacccguauacauaaaau

SEQ ID NO: 412301 - RNA, 19 nt, Homo sapiens
  misc_RNA (1)...(19): siRNA sense strand
aaacaacauaagcuucuga

SEQ ID NO: 412302 - RNA, 19 nt, Homo sapiens
  misc_RNA (1)...(19): siRNA sense strand
cgaaaaguccuaauaguag

SEQ ID NO: 412303 - RNA, 19 nt, Homo sapiens
  misc_RNA (1)...(19): siRNA sense strand
ucacugauuuccccuauuc

SEQ ID NO: 412304 - RNA, 19 nt, Homo sapiens
  misc_RNA (1)...(19): siRNA sense strand
uuggaacacuauaccuauu

SEQ ID NO: 412305 - RNA, 19 nt, Homo sapiens
  misc_RNA (1)...(19): siRNA sense strand
gaccguugacuauucucua

SEQ ID NO: 412306 - RNA, 19 nt, Homo sapiens
  misc_RNA (1)...(19): siRNA sense strand
ccuaaccaucuucuccuua

SEQ ID NO: 412307 - RNA, 19 nt, Homo sapiens
  misc_RNA (1)...(19): siRNA sense strand
ugccauaacccaauaccaa

SEQ ID NO: 412308 - RNA, 19 nt, Homo sapiens
  misc_RNA (1)...(19): siRNA sense strand
cuaccacacauucgaagaa

SEQ ID NO: 412309 - RNA, 19 nt, Homo sapiens
  misc_RNA (1)...(19): siRNA sense strand
ccuauuauucggcgcauga

SEQ ID NO: 412310 - RNA, 19 nt, Homo sapiens
  misc_RNA (1)...(19): siRNA sense strand
auaggaggcuucauucacu

SEQ ID NO: 412311 - RNA, 19 nt, Homo sapiens
  misc_RNA (1)...(19): siRNA sense strand
uagacacacgagcauauuu

SEQ ID NO: 412312 - RNA, 19 nt, Homo sapiens
  misc_RNA (1)...(19): siRNA sense strand
aggaauagacguagacaca

SEQ ID NO: 412313 - RNA, 19 nt, Homo sapiens
  misc_RNA (1)...(19): siRNA sense strand
ugacuauucucuacaaacc

SEQ ID NO: 412314 - RNA, 19 nt, Homo sapiens
  misc_RNA (1)...(19): siRNA sense strand
uaaacaacauaagcuucug

SEQ ID NO: 412315 - RNA, 19 nt, Homo sapiens
  misc_RNA (1)...(19): siRNA sense strand
cgccgaccguugacuauuc

SEQ ID NO: 412316 - RNA, 19 nt, Homo sapiens
  misc_RNA (1)...(19): siRNA sense strand
uacaguaggaauagacgua

SEQ ID NO: 412317 - RNA, 19 nt, Homo sapiens
  misc_RNA (1)...(19): siRNA sense strand
guugacuauucucuacaaa

SEQ ID NO: 412318 - RNA, 19 nt, Homo sapiens
  misc_RNA (1)...(19): siRNA sense strand
uagaagagcuuaucaccuu

SEQ ID NO: 412319 - RNA, 19 nt, Homo sapiens
  misc_RNA (1)...(19): siRNA sense strand
ggaaauagaaaccgucuga

SEQ ID NO: 412320 - RNA, 19 nt, Homo sapiens
  misc_RNA (1)...(19): siRNA sense strand
gcaauucccggacgucuaa

SEQ ID NO: 412321 - RNA, 19 nt, Homo sapiens
  misc_RNA (1)...(19): siRNA sense strand
gcccaucguccuagaauua

SEQ ID NO: 412322 - RNA, 19 nt, Homo sapiens
  misc_RNA (1)...(19): siRNA sense strand
gagcuuaucaccuuucaug

SEQ ID NO: 412323 - RNA, 19 nt, Homo sapiens
  misc_RNA (1)...(19): siRNA sense strand
gaucacgcccucauaauca

SEQ ID NO: 412324 - RNA, 19 nt, Homo sapiens
  misc_RNA (1)...(19): siRNA sense strand
gaaaccgucugaacuaucc

SEQ ID NO: 412325 - RNA, 19 nt, Homo sapiens
  misc_RNA (1)...(19): siRNA sense strand
cucagacgcucaggaaaua

SEQ ID NO: 412326 - RNA, 19 nt, Homo sapiens
  misc_RNA (1)...(19): siRNA sense strand
gcacaugcagcgcaaguag

SEQ ID NO: 412327 - RNA, 19 nt, Homo sapiens
  misc_RNA (1)...(19): siRNA sense strand
ugaaaucuguggagcaaac

SEQ ID NO: 412328 - RNA, 19 nt, Homo sapiens
  misc_RNA (1)...(19): siRNA sense strand
auagaaaccgucugaacua

SEQ ID NO: 412329 - RNA, 19 nt, Homo sapiens
  misc_RNA (1)...(19): siRNA sense strand
uagaaaccgucugaacuau

SEQ ID NO: 412330 - RNA, 19 nt, Homo sapiens
  misc_RNA (1)...(19): siRNA sense strand
aaucuucaacuccuacaua

SEQ ID NO: 412331 - RNA, 19 nt, Homo sapiens
  misc_RNA (1)...(19): siRNA sense strand
cguugacaaucgaguagua

SEQ ID NO: 412332 - RNA, 19 nt, Homo sapiens
  misc_RNA (1)...(19): siRNA sense strand
cgacuacggcggacuaauc

SEQ ID NO: 412333 - RNA, 19 nt, Homo sapiens
  misc_RNA (1)...(19): siRNA sense strand
gaagagcuuaucaccuuuc

SEQ ID NO: 412334 - RNA, 19 nt, Homo sapiens
  misc_RNA (1)...(19): siRNA sense strand
gaaauagaaaccgucugaa

SEQ ID NO: 412335 - RNA, 19 nt, Homo sapiens
  misc_RNA (1)...(19): siRNA sense strand
gcccguauuuacccuauag

SEQ ID NO: 412336 - RNA, 19 nt, Homo sapiens
  misc_RNA (1)...(19): siRNA sense strand
agaagagcuuaucaccuuu

SEQ ID NO: 412337 - RNA, 19 nt, Homo sapiens
  misc_RNA (1)...(19): siRNA sense strand
uccuaacacucacaacaaa

SEQ ID NO: 412338 - RNA, 19 nt, Homo sapiens
  misc_RNA (1)...(19): siRNA sense strand
ucugaaaucuguggagcaa

SEQ ID NO: 412339 - RNA, 19 nt, Homo sapiens
  misc_RNA (1)...(19): siRNA sense strand
caucucagacgcucaggaa

SEQ ID NO: 412340 - RNA, 19 nt, Homo sapiens
  misc_RNA (1)...(19): siRNA sense strand
cuucaacuccuacauacuu

SEQ ID NO: 412341 - RNA, 19 nt, Homo sapiens
  misc_RNA (1)...(19): siRNA sense strand
ugacguugacaaucgagua

SEQ ID NO: 412342 - RNA, 19 nt, Homo sapiens
  misc_RNA (1)...(19): siRNA sense strand
gacuaaucuucaacuccua

SEQ ID NO: 412343 - RNA, 19 nt, Homo sapiens
  misc_RNA (1)...(19): siRNA sense strand
caucguccuagaauuaauu

SEQ ID NO: 412344 - RNA, 19 nt, Homo sapiens
  misc_RNA (1)...(19): siRNA sense strand
cuaauacuaacaucucaga

SEQ ID NO: 412345 - RNA, 19 nt, Homo sapiens
  misc_RNA (1)...(19): siRNA sense strand
ucucagacgcucaggaaau

SEQ ID NO: 412346 - RNA, 19 nt, Homo sapiens
  misc_RNA (1)...(19): siRNA sense strand
cgucuaaaccaaaccacuu

SEQ ID NO: 412347 - RNA, 19 nt, Homo sapiens
  misc_RNA (1)...(19): siRNA sense strand
uaucauagaagagcuuauc

SEQ ID NO: 412348 - RNA, 19 nt, Homo sapiens
  misc_RNA (1)...(19): siRNA sense strand
gucuaaaccaaaccacuuu

SEQ ID NO: 412349 - RNA, 19 nt, Homo sapiens
  misc_RNA (1)...(19): siRNA sense strand
cuacggcggacuaaucuuc

SEQ ID NO: 412350 - RNA, 19 nt, Homo sapiens
  misc_RNA (1)...(19): siRNA sense strand
aauagaaaccgucugaacu

SEQ ID NO: 412351 - RNA, 19 nt, Homo sapiens
  misc_RNA (1)...(19): siRNA sense strand
ggcccguauuuacccuaua

SEQ ID NO: 412352 - RNA, 19 nt, Homo sapiens
  misc_RNA (1)...(19): siRNA sense strand
ucccggacgucuaaaccaa

SEQ ID NO: 412353 - RNA, 19 nt, Homo sapiens
  misc_RNA (1)...(19): siRNA sense strand
aaauagaaaccgucugaac

SEQ ID NO: 412354 - RNA, 19 nt, Homo sapiens
  misc_RNA (1)...(19): siRNA sense strand
ugaucacgcccucauaauc

SEQ ID NO: 412355 - RNA, 19 nt, Homo sapiens
  misc_RNA (1)...(19): siRNA sense strand
ucaacgaucccucccuuac

SEQ ID NO: 412356 - RNA, 19 nt, Homo sapiens
  misc_RNA (1)...(19): siRNA sense strand
ccuacgcauccuuuacaua

SEQ ID NO: 412357 - RNA, 19 nt, Homo sapiens
  misc_RNA (1)...(19): siRNA sense strand
caccaucgcucuucuacua

SEQ ID NO: 412358 - RNA, 19 nt, Homo sapiens
  misc_RNA (1)...(19): siRNA sense strand
caaacaaucucauaugaag

SEQ ID NO: 412359 - RNA, 19 nt, Homo sapiens
  misc_RNA (1)...(19): siRNA sense strand
gaacuagucucaggcuuca

SEQ ID NO: 412360 - RNA, 19 nt, Homo sapiens
  misc_RNA (1)...(19): siRNA sense strand
acaagaacaccucugauua

SEQ ID NO: 412361 - RNA, 19 nt, Homo sapiens
  misc_RNA (1)...(19): siRNA sense strand
gagcaucaaacucaaacua

SEQ ID NO: 412362 - RNA, 19 nt, Homo sapiens
  misc_RNA (1)...(19): siRNA sense strand
cccaaacaaucucauauga

SEQ ID NO: 412363 - RNA, 19 nt, Homo sapiens
  misc_RNA (1)...(19): siRNA sense strand
acuaauaaguggcuccuuu

SEQ ID NO: 412364 - RNA, 19 nt, Homo sapiens
  misc_RNA (1)...(19): siRNA sense strand
ugauuuaucuccacacuag

SEQ ID NO: 412365 - RNA, 19 nt, Homo sapiens
  misc_RNA (1)...(19): siRNA sense strand
gaacucuacacaacauauu

SEQ ID NO: 412366 - RNA, 19 nt, Homo sapiens
  misc_RNA (1)...(19): siRNA sense strand
cuaauaaguggcuccuuua

SEQ ID NO: 412367 - RNA, 19 nt, Homo sapiens
  misc_RNA (1)...(19): siRNA sense strand
uuuaaccucuccacccuua

SEQ ID NO: 412368 - RNA, 19 nt, Homo sapiens
  misc_RNA (1)...(19): siRNA sense strand
cacccuagcauuacuuaua

SEQ ID NO: 412369 - RNA, 19 nt, Homo sapiens
  misc_RNA (1)...(19): siRNA sense strand
caagaacaccucugauuac

SEQ ID NO: 412370 - RNA, 19 nt, Homo sapiens
  misc_RNA (1)...(19): siRNA sense strand
uaaacacccucaccacuac

SEQ ID NO: 412371 - RNA, 19 nt, Homo sapiens
  misc_RNA (1)...(19): siRNA sense strand
cacaagaacaccucugauu

SEQ ID NO: 412372 - RNA, 19 nt, Homo sapiens
  misc_RNA (1)...(19): siRNA sense strand
caacauauuuugucaccaa

SEQ ID NO: 412373 - RNA, 19 nt, Homo sapiens
  misc_RNA (1)...(19): siRNA sense strand
ccaaacaaucucauaugaa

SEQ ID NO: 412374 - RNA, 19 nt, Homo sapiens
  misc_RNA (1)...(19): siRNA sense strand
gaagucacccuagccauca

SEQ ID NO: 412375 - RNA, 19 nt, Homo sapiens
  misc_RNA (1)...(19): siRNA sense strand
gccgaauacacaaacauua

SEQ ID NO: 412376 - RNA, 19 nt, Homo sapiens
  misc_RNA (1)...(19): siRNA sense strand
uaauaaguggcuccuuuaa

SEQ ID NO: 412377 - RNA, 19 nt, Homo sapiens
  misc_RNA (1)...(19): siRNA sense strand
ccgcuacgaccaacucaua

SEQ ID NO: 412378 - RNA, 19 nt, Homo sapiens
  misc_RNA (1)...(19): siRNA sense strand
ucaugacccuuggccauaa

SEQ ID NO: 412379 - RNA, 19 nt, Homo sapiens
  misc_RNA (1)...(19): siRNA sense strand
cuucauagccgaauacaca

SEQ ID NO: 412380 - RNA, 19 nt, Homo sapiens
  misc_RNA (1)...(19): siRNA sense strand
ucuaggcuauauacaacua

SEQ ID NO: 412381 - RNA, 19 nt, Homo sapiens
  misc_RNA (1)...(19): siRNA sense strand
gauuacuccugccaucaug

SEQ ID NO: 412382 - RNA, 19 nt, Homo sapiens
  misc_RNA (1)...(19): siRNA sense strand
acccuucgcugacgccaua

SEQ ID NO: 412383 - RNA, 19 nt, Homo sapiens
  misc_RNA (1)...(19): siRNA sense strand
uagccuagccguuuacuca

SEQ ID NO: 412384 - RNA, 19 nt, Homo sapiens
  misc_RNA (1)...(19): siRNA sense strand
auaaacacccucaccacua

SEQ ID NO: 412385 - RNA, 19 nt, Homo sapiens
  misc_RNA (1)...(19): siRNA sense strand
gcaguagcccaaacaaucu

SEQ ID NO: 412386 - RNA, 19 nt, Homo sapiens
  misc_RNA (1)...(19): siRNA sense strand
gaucagggugagcaucaaa

SEQ ID NO: 412387 - RNA, 19 nt, Homo sapiens
  misc_RNA (1)...(19): siRNA sense strand
ccgaauacacaaacauuau

SEQ ID NO: 412388 - RNA, 19 nt, Homo sapiens
  misc_RNA (1)...(19): siRNA sense strand
ccauaaaacucuucaccaa

SEQ ID NO: 412389 - RNA, 19 nt, Homo sapiens
  misc_RNA (1)...(19): siRNA sense strand
ccucaccacuacaaucuuc

SEQ ID NO: 412390 - RNA, 19 nt, Homo sapiens
  misc_RNA (1)...(19): siRNA sense strand
gcccaaacaaucucauaug

SEQ ID NO: 412391 - RNA, 19 nt, Homo sapiens
  misc_RNA (1)...(19): siRNA sense strand
caacucauacaccuccuau

SEQ ID NO: 412392 - RNA, 19 nt, Homo sapiens
  misc_RNA (1)...(19): siRNA sense strand
gagcaguagcccaaacaau

SEQ ID NO: 412393 - RNA, 19 nt, Homo sapiens
  misc_RNA (1)...(19): siRNA sense strand
ggccuccuauuuauucuag

SEQ ID NO: 412394 - RNA, 19 nt, Homo sapiens
  misc_RNA (1)...(19): siRNA sense strand
acccuagcauuacuuauau

SEQ ID NO: 412395 - RNA, 19 nt, Homo sapiens
  misc_RNA (1)...(19): siRNA sense strand
ccaucgcucuucuacuaug

SEQ ID NO: 412396 - RNA, 19 nt, Homo sapiens
  misc_RNA (1)...(19): siRNA sense strand
ucccuguucuuaugaauuc

SEQ ID NO: 412397 - RNA, 19 nt, Homo sapiens
  misc_RNA (1)...(19): siRNA sense strand
caucgcucuucuacuauga

SEQ ID NO: 412398 - RNA, 19 nt, Homo sapiens
  misc_RNA (1)...(19): siRNA sense strand
ccugaacucuacacaacau

SEQ ID NO: 412399 - RNA, 19 nt, Homo sapiens
  misc_RNA (1)...(19): siRNA sense strand
auuacaaucuccagcauuc

SEQ ID NO: 412400 - RNA, 19 nt, Homo sapiens
  misc_RNA (1)...(19): siRNA sense strand
cacccuagccaucauucua

SEQ ID NO: 412401 - RNA, 19 nt, Homo sapiens
  misc_RNA (1)...(19): siRNA sense strand
ggaguccgaacuagucuca

SEQ ID NO: 412402 - RNA, 19 nt, Homo sapiens
  misc_RNA (1)...(19): siRNA sense strand
gccuagccguuuacucaau

SEQ ID NO: 412403 - RNA, 19 nt, Homo sapiens
  misc_RNA (1)...(19): siRNA sense strand
auaaguggcuccuuuaacc

SEQ ID NO: 412404 - RNA, 19 nt, Homo sapiens
  misc_RNA (1)...(19): siRNA sense strand
cuauauacaacuacgcaaa

SEQ ID NO: 412405 - RNA, 19 nt, Homo sapiens
  misc_RNA (1)...(19): siRNA sense strand
agccaucauucuacuauca

SEQ ID NO: 412406 - RNA, 19 nt, Homo sapiens
  misc_RNA (1)...(19): siRNA sense strand
cauuguacccauucuaauc

SEQ ID NO: 412407 - RNA, 19 nt, Homo sapiens
  misc_RNA (1)...(19): siRNA sense strand
aagaacaccucugauuacu

SEQ ID NO: 412408 - RNA, 19 nt, Homo sapiens
  misc_RNA (1)...(19): siRNA sense strand
ccauuacaaucuccagcau

SEQ ID NO: 412409 - RNA, 19 nt, Homo sapiens
  misc_RNA (1)...(19): siRNA sense strand
ccuagcauuacuuauauga

SEQ ID NO: 412410 - RNA, 19 nt, Homo sapiens
  misc_RNA (1)...(19): siRNA sense strand
caaccuccuacuccucauu

SEQ ID NO: 412411 - RNA, 19 nt, Homo sapiens
  misc_RNA (1)...(19): siRNA sense strand
uagcccaaacaaucucaua

SEQ ID NO: 412412 - RNA, 19 nt, Homo sapiens
  misc_RNA (1)...(19): siRNA sense strand
caugacccuuggccauaau

SEQ ID NO: 412413 - RNA, 19 nt, Homo sapiens
  misc_RNA (1)...(19): siRNA sense strand
ugaacucuacacaacauau

SEQ ID NO: 412414 - RNA, 19 nt, Homo sapiens
  misc_RNA (1)...(19): siRNA sense strand
ccuagccguuuacucaauc

SEQ ID NO: 412415 - RNA, 19 nt, Homo sapiens
  misc_RNA (1)...(19): siRNA sense strand
accacucacccuagcauua

SEQ ID NO: 412416 - RNA, 19 nt, Homo sapiens
  misc_RNA (1)...(19): siRNA sense strand
ccuaaugcuuaccgaacga

SEQ ID NO: 412417 - RNA, 19 nt, Homo sapiens
  misc_RNA (1)...(19): siRNA sense strand
uaaccucuccacccuuauc

SEQ ID NO: 412418 - RNA, 19 nt, Homo sapiens
  misc_RNA (1)...(19): siRNA sense strand
auaaaacucuucaccaaag

SEQ ID NO: 412419 - RNA, 19 nt, Homo sapiens
  misc_RNA (1)...(19): siRNA sense strand
ccacucacccuagcauuac

SEQ ID NO: 412420 - RNA, 19 nt, Homo sapiens
  misc_RNA (1)...(19): siRNA sense strand
ucaccaagacccuacuucu

SEQ ID NO: 412421 - RNA, 19 nt, Homo sapiens
  misc_RNA (1)...(19): siRNA sense strand
ccuccuacuccucauugua

SEQ ID NO: 412422 - RNA, 19 nt, Homo sapiens
  misc_RNA (1)...(19): siRNA sense strand
gcuauccucuucaacaaua

SEQ ID NO: 412423 - RNA, 19 nt, Homo sapiens
  misc_RNA (1)...(19): siRNA sense strand
gaaacaagcuaacaugacu

SEQ ID NO: 412424 - RNA, 19 nt, Homo sapiens
  misc_RNA (1)...(19): siRNA sense strand
gaaauaaacaugcuagcuu

SEQ ID NO: 412425 - RNA, 19 nt, Homo sapiens
  misc_RNA (1)...(19): siRNA sense strand
gcaagcaaccgcauccaua

SEQ ID NO: 412426 - RNA, 19 nt, Homo sapiens
  misc_RNA (1)...(19): siRNA sense strand
caucuacucuaccaucuuu

SEQ ID NO: 412427 - RNA, 19 nt, Homo sapiens
  misc_RNA (1)...(19): siRNA sense strand
ucuaauagcuauccucuuc

SEQ ID NO: 412428 - RNA, 19 nt, Homo sapiens
  misc_RNA (1)...(19): siRNA sense strand
caaugaaccauaaccaaua

SEQ ID NO: 412429 - RNA, 19 nt, Homo sapiens
  misc_RNA (1)...(19): siRNA sense strand
gaguaggccuagaaauaaa

SEQ ID NO: 412430 - RNA, 19 nt, Homo sapiens
  misc_RNA (1)...(19): siRNA sense strand
ccaauacuaccaaucaaua

SEQ ID NO: 412431 - RNA, 19 nt, Homo sapiens
  misc_RNA (1)...(19): siRNA sense strand
gcgcuaagcucgcacugau

SEQ ID NO: 412432 - RNA, 19 nt, Homo sapiens
  misc_RNA (1)...(19): siRNA sense strand
gcuaagcucgcacugauuu

SEQ ID NO: 412433 - RNA, 19 nt, Homo sapiens
  misc_RNA (1)...(19): siRNA sense strand
uuagcauacuccucaauua

SEQ ID NO: 412434 - RNA, 19 nt, Homo sapiens
  misc_RNA (1)...(19): siRNA sense strand
caucauagcaggcaguuga

SEQ ID NO: 412435 - RNA, 19 nt, Homo sapiens
  misc_RNA (1)...(19): siRNA sense strand
ugaguaggccuagaaauaa

SEQ ID NO: 412436 - RNA, 19 nt, Homo sapiens
  misc_RNA (1)...(19): siRNA sense strand
caagcaaccgcauccauaa

SEQ ID NO: 412437 - RNA, 19 nt, Homo sapiens
  misc_RNA (1)...(19): siRNA sense strand
cugaguaggccuagaaaua

SEQ ID NO: 412438 - RNA, 19 nt, Homo sapiens
  misc_RNA (1)...(19): siRNA sense strand
uaaccaauacuaccaauca

SEQ ID NO: 412439 - RNA, 19 nt, Homo sapiens
  misc_RNA (1)...(19): siRNA sense strand
cuaccuaucuccccuuuua

SEQ ID NO: 412440 - RNA, 19 nt, Homo sapiens
  misc_RNA (1)...(19): siRNA sense strand
ugacuaacacccuuaauuc

SEQ ID NO: 412441 - RNA, 19 nt, Homo sapiens
  misc_RNA (1)...(19): siRNA sense strand
ccuaacauaaccauucuua

SEQ ID NO: 412442 - RNA, 19 nt, Homo sapiens
  misc_RNA (1)...(19): siRNA sense strand
uaauagcuauccucuucaa

SEQ ID NO: 412443 - RNA, 19 nt, Homo sapiens
  misc_RNA (1)...(19): siRNA sense strand
guacaacccuaacauaacc

SEQ ID NO: 412444 - RNA, 19 nt, Homo sapiens
  misc_RNA (1)...(19): siRNA sense strand
uagcuauccucuucaacaa

SEQ ID NO: 412445 - RNA, 19 nt, Homo sapiens
  misc_RNA (1)...(19): siRNA sense strand
caagcuaacaugacuaaca

SEQ ID NO: 412446 - RNA, 19 nt, Homo sapiens
  misc_RNA (1)...(19): siRNA sense strand
gacaaugaaccauaaccaa

SEQ ID NO: 412447 - RNA, 19 nt, Homo sapiens
  misc_RNA (1)...(19): siRNA sense strand
gggccauuaucgaagaauu

SEQ ID NO: 412448 - RNA, 19 nt, Homo sapiens
  misc_RNA (1)...(19): siRNA sense strand
caguugagguggauuaaac

SEQ ID NO: 412449 - RNA, 19 nt, Homo sapiens
  misc_RNA (1)...(19): siRNA sense strand
ccacgcuacuccuaccuau

SEQ ID NO: 412450 - RNA, 19 nt, Homo sapiens
  misc_RNA (1)...(19): siRNA sense strand
uauacucuccggacaauga

SEQ ID NO: 412451 - RNA, 19 nt, Homo sapiens
  misc_RNA (1)...(19): siRNA sense strand
ucaauuacccacauaggau

SEQ ID NO: 412452 - RNA, 19 nt, Homo sapiens
  misc_RNA (1)...(19): siRNA sense strand
ccguacaacccuaacauaa

SEQ ID NO: 412453 - RNA, 19 nt, Homo sapiens
  misc_RNA (1)...(19): siRNA sense strand
ggacaaugaaccauaacca

SEQ ID NO: 412454 - RNA, 19 nt, Homo sapiens
  misc_RNA (1)...(19): siRNA sense strand
gcauccauaauccuucuaa

SEQ ID NO: 412455 - RNA, 19 nt, Homo sapiens
  misc_RNA (1)...(19): siRNA sense strand
cuaacacccuuaauuccau

SEQ ID NO: 412456 - RNA, 19 nt, Homo sapiens
  misc_RNA (1)...(19): siRNA sense strand
cauaauccuucuaauagcu

SEQ ID NO: 412457 - RNA, 19 nt, Homo sapiens
  misc_RNA (1)...(19): siRNA sense strand
uccauaauccuucuaauag

SEQ ID NO: 412458 - RNA, 19 nt, Homo sapiens
  misc_RNA (1)...(19): siRNA sense strand
acaaugaaccauaaccaau

SEQ ID NO: 412459 - RNA, 19 nt, Homo sapiens
  misc_RNA (1)...(19): siRNA sense strand
ccaaucaauacucaucauu

SEQ ID NO: 412460 - RNA, 19 nt, Homo sapiens
  misc_RNA (1)...(19): siRNA sense strand
gaaccauaaccaauacuac

SEQ ID NO: 412461 - RNA, 19 nt, Homo sapiens
  misc_RNA (1)...(19): siRNA sense strand
caauauacucuccggacaa

SEQ ID NO: 412462 - RNA, 19 nt, Homo sapiens
  misc_RNA (1)...(19): siRNA sense strand
uccuuaaccucuacuucua

SEQ ID NO: 412463 - RNA, 19 nt, Homo sapiens
  misc_RNA (1)...(19): siRNA sense strand
gcaggcaguugagguggau

SEQ ID NO: 412464 - RNA, 19 nt, Homo sapiens
  misc_RNA (1)...(19): siRNA sense strand
ucaaucuuauccaucauag

SEQ ID NO: 412465 - RNA, 19 nt, Homo sapiens
  misc_RNA (1)...(19): siRNA sense strand
cauaaccaauacuaccaau

SEQ ID NO: 412466 - RNA, 19 nt, Homo sapiens
  misc_RNA (1)...(19): siRNA sense strand
aauauacucuccggacaau

SEQ ID NO: 412467 - RNA, 19 nt, Homo sapiens
  misc_RNA (1)...(19): siRNA sense strand
aaugacaguuugaacauac

SEQ ID NO: 412468 - RNA, 19 nt, Homo sapiens
  misc_RNA (1)...(19): siRNA sense strand
gcaguugagguggauuaaa

SEQ ID NO: 412469 - RNA, 19 nt, Homo sapiens
  misc_RNA (1)...(19): siRNA sense strand
uccggacaaugaaccauaa

SEQ ID NO: 412470 - RNA, 19 nt, Homo sapiens
  misc_RNA (1)...(19): siRNA sense strand
gcaauaaaacuaggaauag

SEQ ID NO: 412471 - RNA, 19 nt, Homo sapiens
  misc_RNA (1)...(19): siRNA sense strand
ugaaccauaaccaauacua

SEQ ID NO: 412472 - RNA, 19 nt, Homo sapiens
  misc_RNA (1)...(19): siRNA sense strand
gcaaccgcauccauaaucc

SEQ ID NO: 412473 - RNA, 19 nt, Homo sapiens
  misc_RNA (1)...(19): siRNA sense strand
uaucuccccuuuuauacua

SEQ ID NO: 412474 - RNA, 19 nt, Homo sapiens
  misc_RNA (1)...(19): siRNA sense strand
aaugaaccauaaccaauac

SEQ ID NO: 412475 - RNA, 19 nt, Homo sapiens
  misc_RNA (1)...(19): siRNA sense strand
gccaccaucacccuccuua

SEQ ID NO: 412476 - RNA, 19 nt, Homo sapiens
  misc_RNA (1)...(19): siRNA sense strand
ccauaauccuucuaauagc

SEQ ID NO: 412477 - RNA, 19 nt, Homo sapiens
  misc_RNA (1)...(19): siRNA sense strand
aaacaauagccucaucauc

SEQ ID NO: 412478 - RNA, 19 nt, Homo sapiens
  misc_RNA (1)...(19): siRNA sense strand
aaucuuauccaucauagca

SEQ ID NO: 412479 - RNA, 19 nt, Homo sapiens
  misc_RNA (1)...(19): siRNA sense strand
aacaagcuaacaugacuaa

SEQ ID NO: 412480 - RNA, 19 nt, Homo sapiens
  misc_RNA (1)...(19): siRNA sense strand
ccuaacuacuaccgcauuc

SEQ ID NO: 412481 - RNA, 19 nt, Homo sapiens
  misc_RNA (1)...(19): siRNA sense strand
ucacccuccuuaaccucua

SEQ ID NO: 412482 - RNA, 19 nt, Homo sapiens
  misc_RNA (1)...(19): siRNA sense strand
aagcuaacaugacuaacac

SEQ ID NO: 412483 - RNA, 19 nt, Homo sapiens
  misc_RNA (1)...(19): siRNA sense strand
aaacaagcuaacaugacua

SEQ ID NO: 412484 - RNA, 19 nt, Homo sapiens
  misc_RNA (1)...(19): siRNA sense strand
caacccgucaucuacucua

SEQ ID NO: 412485 - RNA, 19 nt, Homo sapiens
  misc_RNA (1)...(19): siRNA sense strand
cuaaucuacuccaccucaa

SEQ ID NO: 412486 - RNA, 19 nt, Homo sapiens
  misc_RNA (1)...(19): siRNA sense strand
uagcauacuccucaauuac

SEQ ID NO: 412487 - RNA, 19 nt, Homo sapiens
  misc_RNA (1)...(19): siRNA sense strand
ccugaaacaagcuaacaug

SEQ ID NO: 412488 - RNA, 19 nt, Homo sapiens
  misc_RNA (1)...(19): siRNA sense strand
caucauccccaccaucaua

SEQ ID NO: 412489 - RNA, 19 nt, Homo sapiens
  misc_RNA (1)...(19): siRNA sense strand
cauccauaauccuucuaau

SEQ ID NO: 412490 - RNA, 19 nt, Homo sapiens
  misc_RNA (1)...(19): siRNA sense strand
uaaacccucguuccacaga

SEQ ID NO: 412491 - RNA, 19 nt, Homo sapiens
  misc_RNA (1)...(19): siRNA sense strand
cugaaacaagcuaacauga

SEQ ID NO: 412492 - RNA, 19 nt, Homo sapiens
  misc_RNA (1)...(19): siRNA sense strand
ccgcauuccuacuacucaa

SEQ ID NO: 412493 - RNA, 19 nt, Homo sapiens
  misc_RNA (1)...(19): siRNA sense strand
acccacauaggaugaauaa

SEQ ID NO: 412494 - RNA, 19 nt, Homo sapiens
  misc_RNA (1)...(19): siRNA sense strand
aaccaauacuaccaaucaa

SEQ ID NO: 412495 - RNA, 19 nt, Homo sapiens
  misc_RNA (1)...(19): siRNA sense strand
uauuccaguucuaaccaaa

SEQ ID NO: 412496 - RNA, 19 nt, Homo sapiens
  misc_RNA (1)...(19): siRNA sense strand
cuuagcauacuccucaauu

SEQ ID NO: 412497 - RNA, 19 nt, Homo sapiens
  misc_RNA (1)...(19): siRNA sense strand
ccaccucaaucacacuacu

SEQ ID NO: 412498 - RNA, 19 nt, Homo sapiens
  misc_RNA (1)...(19): siRNA sense strand
ggccauuaucgaagaauuc

SEQ ID NO: 412499 - RNA, 19 nt, Homo sapiens
  misc_RNA (1)...(19): siRNA sense strand
acacucaucacagcgcuaa

SEQ ID NO: 412500 - RNA, 19 nt, Homo sapiens
  misc_RNA (1)...(19): siRNA sense strand
ugaaacaagcuaacaugac

SEQ ID NO: 412501 - RNA, 19 nt, Homo sapiens
  misc_RNA (1)...(19): siRNA sense strand
aaacccucguuccacagaa

SEQ ID NO: 412502 - RNA, 19 nt, Homo sapiens
  misc_RNA (1)...(19): siRNA sense strand
caacuaaccugccacuaau

SEQ ID NO: 412503 - RNA, 19 nt, Homo sapiens
  misc_RNA (1)...(19): siRNA sense strand
uaugucaucccucuuauua

SEQ ID NO: 412504 - RNA, 19 nt, Homo sapiens
  misc_RNA (1)...(19): siRNA sense strand
ccgcgucccuuucuccaua

SEQ ID NO: 412505 - RNA, 19 nt, Homo sapiens
  misc_RNA (1)...(19): siRNA sense strand
ugucaucccucuuauuaau

SEQ ID NO: 412506 - RNA, 19 nt, Homo sapiens
  misc_RNA (1)...(19): siRNA sense strand
acaacuaaccugccacuaa

SEQ ID NO: 412507 - RNA, 19 nt, Homo sapiens
  misc_RNA (1)...(19): siRNA sense strand
ccuccuagccuuacuacua

SEQ ID NO: 412508 - RNA, 19 nt, Homo sapiens
  misc_RNA (1)...(19): siRNA sense strand
caacacccuccuagccuua

SEQ ID NO: 412509 - RNA, 19 nt, Homo sapiens
  misc_RNA (1)...(19): siRNA sense strand
cuccuagccuuacuacuaa

SEQ ID NO: 412510 - RNA, 19 nt, Homo sapiens
  misc_RNA (1)...(19): siRNA sense strand
caacucaacggcuacauag

SEQ ID NO: 412511 - RNA, 19 nt, Homo sapiens
  misc_RNA (1)...(19): siRNA sense strand
gccuaugagugacuacaaa

SEQ ID NO: 412512 - RNA, 19 nt, Homo sapiens
  misc_RNA (1)...(19): siRNA sense strand
cccuaagucuggccuauga

SEQ ID NO: 412513 - RNA, 19 nt, Homo sapiens
  misc_RNA (1)...(19): siRNA sense strand
agaaauugcccuccuuuua

SEQ ID NO: 412514 - RNA, 19 nt, Homo sapiens
  misc_RNA (1)...(19): siRNA sense strand
ucaucccucuuauuaauca

SEQ ID NO: 412515 - RNA, 19 nt, Homo sapiens
  misc_RNA (1)...(19): siRNA sense strand
cucaacggcuacauagaaa

SEQ ID NO: 412516 - RNA, 19 nt, Homo sapiens
  misc_RNA (1)...(19): siRNA sense strand
acaacucaacggcuacaua

SEQ ID NO: 412517 - RNA, 19 nt, Homo sapiens
  misc_RNA (1)...(19): siRNA sense strand
acucaacggcuacauagaa

SEQ ID NO: 412518 - RNA, 19 nt, Homo sapiens
  misc_RNA (1)...(19): siRNA sense strand
gaaauugcccuccuuuuac

SEQ ID NO: 412519 - RNA, 19 nt, Homo sapiens
  misc_RNA (1)...(19): siRNA sense strand
guuaugucaucccucuuau

SEQ ID NO: 412520 - RNA, 19 nt, Homo sapiens
  misc_RNA (1)...(19): siRNA sense strand
uaguagcuauuaccuucuu

SEQ ID NO: 412521 - RNA, 19 nt, Homo sapiens
  misc_RNA (1)...(19): siRNA sense strand
caugagcccuacaaacaac

SEQ ID NO: 412522 - RNA, 19 nt, Homo sapiens
  misc_RNA (1)...(19): siRNA sense strand
ccaugagcccuacaaacaa

SEQ ID NO: 412523 - RNA, 19 nt, Homo sapiens
  misc_RNA (1)...(19): siRNA sense strand
cuagaaauugcccuccuuu

SEQ ID NO: 412524 - RNA, 19 nt, Homo sapiens
  misc_RNA (1)...(19): siRNA sense strand
ucuagaaauugcccuccuu

SEQ ID NO: 412525 - RNA, 19 nt, Homo sapiens
  misc_RNA (1)...(19): siRNA sense strand
aguuaugucaucccucuua

SEQ ID NO: 412526 - RNA, 19 nt, Homo sapiens
  misc_RNA (1)...(19): siRNA sense strand
accaugagcccuacaaaca

SEQ ID NO: 412527 - RNA, 19 nt, Homo sapiens
  misc_RNA (1)...(19): siRNA sense strand
aauaaucaacacccuccua

SEQ ID NO: 412528 - RNA, 19 nt, Homo sapiens
  misc_RNA (1)...(19): siRNA sense strand
guagcuauuaccuucuuau

SEQ ID NO: 412529 - RNA, 19 nt, Homo sapiens
  misc_RNA (1)...(19): siRNA sense strand
ccuagccuuacuacuaaua

SEQ ID NO: 412530 - RNA, 19 nt, Homo sapiens
  misc_RNA (1)...(19): siRNA sense strand
ccacagaacuaaucauauu

SEQ ID NO: 412531 - RNA, 19 nt, Homo sapiens
  misc_RNA (1)...(19): siRNA sense strand
gcacauacuuccuauucua

SEQ ID NO: 412532 - RNA, 19 nt, Homo sapiens
  misc_RNA (1)...(19): siRNA sense strand
uaaaaucgcucauugcaua

SEQ ID NO: 412533 - RNA, 19 nt, Homo sapiens
  misc_RNA (1)...(19): siRNA sense strand
auacuaaucucccuacaaa

SEQ ID NO: 412534 - RNA, 19 nt, Homo sapiens
  misc_RNA (1)...(19): siRNA sense strand
augacuagcuuacacaaua

SEQ ID NO: 412535 - RNA, 19 nt, Homo sapiens
  misc_RNA (1)...(19): siRNA sense strand
aaauaucacucuccuacuu

SEQ ID NO: 412536 - RNA, 19 nt, Homo sapiens
  misc_RNA (1)...(19): siRNA sense strand
gccaauaacuuaauaugac

SEQ ID NO: 412537 - RNA, 19 nt, Homo sapiens
  misc_RNA (1)...(19): siRNA sense strand
gaacgcaggcacauacuuc

SEQ ID NO: 412538 - RNA, 19 nt, Homo sapiens
  misc_RNA (1)...(19): siRNA sense strand
aaacuaggcggcuauggua

SEQ ID NO: 412539 - RNA, 19 nt, Homo sapiens
  misc_RNA (1)...(19): siRNA sense strand
ucacucacccaccacauua

SEQ ID NO: 412540 - RNA, 19 nt, Homo sapiens
  misc_RNA (1)...(19): siRNA sense strand
uauacucccucuacauauu

SEQ ID NO: 412541 - RNA, 19 nt, Homo sapiens
  misc_RNA (1)...(19): siRNA sense strand
ucaaggacuucaaacucua

SEQ ID NO: 412542 - RNA, 19 nt, Homo sapiens
  misc_RNA (1)...(19): siRNA sense strand
ucaaacuccugagccaaua

SEQ ID NO: 412543 - RNA, 19 nt, Homo sapiens
  misc_RNA (1)...(19): siRNA sense strand
cgacaucauuaccggguuu

SEQ ID NO: 412544 - RNA, 19 nt, Homo sapiens
  misc_RNA (1)...(19): siRNA sense strand
caaacucuacucccacuaa

SEQ ID NO: 412545 - RNA, 19 nt, Homo sapiens
  misc_RNA (1)...(19): siRNA sense strand
aaacuaaucgucccaacaa

SEQ ID NO: 412546 - RNA, 19 nt, Homo sapiens
  misc_RNA (1)...(19): siRNA sense strand
aggcggcuaugguauaaua

SEQ ID NO: 412547 - RNA, 19 nt, Homo sapiens
  misc_RNA (1)...(19): siRNA sense strand
gcaggcacauacuuccuau

SEQ ID NO: 412548 - RNA, 19 nt, Homo sapiens
  misc_RNA (1)...(19): siRNA sense strand
ccaccacauuaacaacaua

SEQ ID NO: 412549 - RNA, 19 nt, Homo sapiens
  misc_RNA (1)...(19): siRNA sense strand
ccuauacucccucuacaua

SEQ ID NO: 412550 - RNA, 19 nt, Homo sapiens
  misc_RNA (1)...(19): siRNA sense strand
agaacucucugugcuagua

SEQ ID NO: 412551 - RNA, 19 nt, Homo sapiens
  misc_RNA (1)...(19): siRNA sense strand
gcgcagucauucucauaau

SEQ ID NO: 412552 - RNA, 19 nt, Homo sapiens
  misc_RNA (1)...(19): siRNA sense strand
uaacagccauucucaucca

SEQ ID NO: 412553 - RNA, 19 nt, Homo sapiens
  misc_RNA (1)...(19): siRNA sense strand
ccaaaucaacaacaaccua

SEQ ID NO: 412554 - RNA, 19 nt, Homo sapiens
  misc_RNA (1)...(19): siRNA sense strand
cuacauauuuaccacaaca

SEQ ID NO: 412555 - RNA, 19 nt, Homo sapiens
  misc_RNA (1)...(19): siRNA sense strand
cuccugagccaauaacuua

SEQ ID NO: 412556 - RNA, 19 nt, Homo sapiens
  misc_RNA (1)...(19): siRNA sense strand
ccacugacaugacuuucca

SEQ ID NO: 412557 - RNA, 19 nt, Homo sapiens
  misc_RNA (1)...(19): siRNA sense strand
caaaucaacaacaaccuau

SEQ ID NO: 412558 - RNA, 19 nt, Homo sapiens
  misc_RNA (1)...(19): siRNA sense strand
uuacaggacucaacauacu

SEQ ID NO: 412559 - RNA, 19 nt, Homo sapiens
  misc_RNA (1)...(19): siRNA sense strand
cuaggcggcuaugguauaa

SEQ ID NO: 412560 - RNA, 19 nt, Homo sapiens
  misc_RNA (1)...(19): siRNA sense strand
ggcaagccaacgccacuua

SEQ ID NO: 412561 - RNA, 19 nt, Homo sapiens
  misc_RNA (1)...(19): siRNA sense strand
gaccuaaaaucgcucauug

SEQ ID NO: 412562 - RNA, 19 nt, Homo sapiens
  misc_RNA (1)...(19): siRNA sense strand
ccacuuaugacucccuaaa

SEQ ID NO: 412563 - RNA, 19 nt, Homo sapiens
  misc_RNA (1)...(19): siRNA sense strand
gagccaauaacuuaauaug

SEQ ID NO: 412564 - RNA, 19 nt, Homo sapiens
  misc_RNA (1)...(19): siRNA sense strand
ucacuaaacauucuacuac

SEQ ID NO: 412565 - RNA, 19 nt, Homo sapiens
  misc_RNA (1)...(19): siRNA sense strand
cuaccucucuauacuaauc

SEQ ID NO: 412566 - RNA, 19 nt, Homo sapiens
  misc_RNA (1)...(19): siRNA sense strand
cgucccaacaauuauauua

SEQ ID NO: 412567 - RNA, 19 nt, Homo sapiens
  misc_RNA (1)...(19): siRNA sense strand
cugagccaauaacuuaaua

SEQ ID NO: 412568 - RNA, 19 nt, Homo sapiens
  misc_RNA (1)...(19): siRNA sense strand
ugacuagcuuacacaauag

SEQ ID NO: 412569 - RNA, 19 nt, Homo sapiens
  misc_RNA (1)...(19): siRNA sense strand
gaacucucugugcuaguaa

SEQ ID NO: 412570 - RNA, 19 nt, Homo sapiens
  misc_RNA (1)...(19): siRNA sense strand
aauaucacucuccuacuua

SEQ ID NO: 412571 - RNA, 19 nt, Homo sapiens
  misc_RNA (1)...(19): siRNA sense strand
uuacggacuccacuuauga

SEQ ID NO: 412572 - RNA, 19 nt, Homo sapiens
  misc_RNA (1)...(19): siRNA sense strand
uuacuauucugccuagcaa

SEQ ID NO: 412573 - RNA, 19 nt, Homo sapiens
  misc_RNA (1)...(19): siRNA sense strand
guaguaacagccauucuca

SEQ ID NO: 412574 - RNA, 19 nt, Homo sapiens
  misc_RNA (1)...(19): siRNA sense strand
cccaagaacuaucaaacuc

SEQ ID NO: 412575 - RNA, 19 nt, Homo sapiens
  misc_RNA (1)...(19): siRNA sense strand
gcucauugcauacucuuca

SEQ ID NO: 412576 - RNA, 19 nt, Homo sapiens
  misc_RNA (1)...(19): siRNA sense strand
caacaacaaccuauuuagc

SEQ ID NO: 412577 - RNA, 19 nt, Homo sapiens
  misc_RNA (1)...(19): siRNA sense strand
aaacucuacucccacuaau

SEQ ID NO: 412578 - RNA, 19 nt, Homo sapiens
  misc_RNA (1)...(19): siRNA sense strand
gcaagccaacgccacuuau

SEQ ID NO: 412579 - RNA, 19 nt, Homo sapiens
  misc_RNA (1)...(19): siRNA sense strand
auaauacgccucacacuca

SEQ ID NO: 412580 - RNA, 19 nt, Homo sapiens
  misc_RNA (1)...(19): siRNA sense strand
acccuaggcucacuaaaca

SEQ ID NO: 412581 - RNA, 19 nt, Homo sapiens
  misc_RNA (1)...(19): siRNA sense strand
gcaucauaauccucucuca

SEQ ID NO: 412582 - RNA, 19 nt, Homo sapiens
  misc_RNA (1)...(19): siRNA sense strand
uaauaugacuagcuuacac

SEQ ID NO: 412583 - RNA, 19 nt, Homo sapiens
  misc_RNA (1)...(19): siRNA sense strand
cuaaacauucuacuacuca

SEQ ID NO: 412584 - RNA, 19 nt, Homo sapiens
  misc_RNA (1)...(19): siRNA sense strand
ccuacaaaucuccuuaauu

SEQ ID NO: 412585 - RNA, 19 nt, Homo sapiens
  misc_RNA (1)...(19): siRNA sense strand
aaucgucccaacaauuaua

SEQ ID NO: 412586 - RNA, 19 nt, Homo sapiens
  misc_RNA (1)...(19): siRNA sense strand
acucacagucgcaucauaa

SEQ ID NO: 412587 - RNA, 19 nt, Homo sapiens
  misc_RNA (1)...(19): siRNA sense strand
caaacuccugagccaauaa

SEQ ID NO: 412588 - RNA, 19 nt, Homo sapiens
  misc_RNA (1)...(19): siRNA sense strand
acuaaucucccuacaaauc

SEQ ID NO: 412589 - RNA, 19 nt, Homo sapiens
  misc_RNA (1)...(19): siRNA sense strand
caacauaaaacccucauuc

SEQ ID NO: 412590 - RNA, 19 nt, Homo sapiens
  misc_RNA (1)...(19): siRNA sense strand
gaggcauaauuauaacaag

SEQ ID NO: 412591 - RNA, 19 nt, Homo sapiens
  misc_RNA (1)...(19): siRNA sense strand
ccuaggcucacuaaacauu

SEQ ID NO: 412592 - RNA, 19 nt, Homo sapiens
  misc_RNA (1)...(19): siRNA sense strand
ccuauucuacacccuagua

SEQ ID NO: 412593 - RNA, 19 nt, Homo sapiens
  misc_RNA (1)...(19): siRNA sense strand
caucauaauccucucucaa

SEQ ID NO: 412594 - RNA, 19 nt, Homo sapiens
  misc_RNA (1)...(19): siRNA sense strand
uaacauucacagccacaga

SEQ ID NO: 412595 - RNA, 19 nt, Homo sapiens
  misc_RNA (1)...(19): siRNA sense strand
cuuacauccucauuacuau

SEQ ID NO: 412596 - RNA, 19 nt, Homo sapiens
  misc_RNA (1)...(19): siRNA sense strand
cucuaccucucuauacuaa

SEQ ID NO: 412597 - RNA, 19 nt, Homo sapiens
  misc_RNA (1)...(19): siRNA sense strand
ucucacugcccaagaacua

SEQ ID NO: 412598 - RNA, 19 nt, Homo sapiens
  misc_RNA (1)...(19): siRNA sense strand
agccacagaacuaaucaua

SEQ ID NO: 412599 - RNA, 19 nt, Homo sapiens
  misc_RNA (1)...(19): siRNA sense strand
cucaaggacuucaaacucu

SEQ ID NO: 412600 - RNA, 19 nt, Homo sapiens
  misc_RNA (1)...(19): siRNA sense strand
uaauacgccucacacucau

SEQ ID NO: 412601 - RNA, 19 nt, Homo sapiens
  misc_RNA (1)...(19): siRNA sense strand
cccuaaagcccaugucgaa

SEQ ID NO: 412602 - RNA, 19 nt, Homo sapiens
  misc_RNA (1)...(19): siRNA sense strand
caacacccuaggcucacua

SEQ ID NO: 412603 - RNA, 19 nt, Homo sapiens
  misc_RNA (1)...(19): siRNA sense strand
acuaaucgucccaacaauu

SEQ ID NO: 412604 - RNA, 19 nt, Homo sapiens
  misc_RNA (1)...(19): siRNA sense strand
auucacagccacagaacua

SEQ ID NO: 412605 - RNA, 19 nt, Homo sapiens
  misc_RNA (1)...(19): siRNA sense strand
gcagucauucucauaaucg

SEQ ID NO: 412606 - RNA, 19 nt, Homo sapiens
  misc_RNA (1)...(19): siRNA sense strand
ucaacaacaaccuauuuag

SEQ ID NO: 412607 - RNA, 19 nt, Homo sapiens
  misc_RNA (1)...(19): siRNA sense strand
acuaggcggcuaugguaua

SEQ ID NO: 412608 - RNA, 19 nt, Homo sapiens
  misc_RNA (1)...(19): siRNA sense strand
ucacccaccacauuaacaa

SEQ ID NO: 412609 - RNA, 19 nt, Homo sapiens
  misc_RNA (1)...(19): siRNA sense strand
cacucacagucgcaucaua

SEQ ID NO: 412610 - RNA, 19 nt, Homo sapiens
  misc_RNA (1)...(19): siRNA sense strand
gcccuauacucccucuaca

SEQ ID NO: 412611 - RNA, 19 nt, Homo sapiens
  misc_RNA (1)...(19): siRNA sense strand
cauaaaacccucauucaca

SEQ ID NO: 412612 - RNA, 19 nt, Homo sapiens
  misc_RNA (1)...(19): siRNA sense strand
uacucccucuacauauuua

SEQ ID NO: 412613 - RNA, 19 nt, Homo sapiens
  misc_RNA (1)...(19): siRNA sense strand
aggcacauacuuccuauuc

SEQ ID NO: 412614 - RNA, 19 nt, Homo sapiens
  misc_RNA (1)...(19): siRNA sense strand
cuaccacugacaugacuuu

SEQ ID NO: 412615 - RNA, 19 nt, Homo sapiens
  misc_RNA (1)...(19): siRNA sense strand
cuacuuacaggacucaaca

SEQ ID NO: 412616 - RNA, 19 nt, Homo sapiens
  misc_RNA (1)...(19): siRNA sense strand
acucuacucccacuaauag

SEQ ID NO: 412617 - RNA, 19 nt, Homo sapiens
  misc_RNA (1)...(19): siRNA sense strand
cggcgcagucauucucaua

SEQ ID NO: 412618 - RNA, 19 nt, Homo sapiens
  misc_RNA (1)...(19): siRNA sense strand
aaacucuaccucucuauac

SEQ ID NO: 412619 - RNA, 19 nt, Homo sapiens
  misc_RNA (1)...(19): siRNA sense strand
gccacagaacuaaucauau

SEQ ID NO: 412620 - RNA, 19 nt, Homo sapiens
  misc_RNA (1)...(19): siRNA sense strand
uuuacggacuccacuuaug

SEQ ID NO: 412621 - RNA, 19 nt, Homo sapiens
  misc_RNA (1)...(19): siRNA sense strand
cacucucacugcccaagaa

SEQ ID NO: 412622 - RNA, 19 nt, Homo sapiens
  misc_RNA (1)...(19): siRNA sense strand
ggcacauacuuccuauucu

SEQ ID NO: 412623 - RNA, 19 nt, Homo sapiens
  misc_RNA (1)...(19): siRNA sense strand
auacucccucuacauauuu

SEQ ID NO: 412624 - RNA, 19 nt, Homo sapiens
  misc_RNA (1)...(19): siRNA sense strand
ggcgcagucauucucauaa

SEQ ID NO: 412625 - RNA, 19 nt, Homo sapiens
  misc_RNA (1)...(19): siRNA sense strand
gcccaagaacuaucaaacu

SEQ ID NO: 412626 - RNA, 19 nt, Homo sapiens
  misc_RNA (1)...(19): siRNA sense strand
ucuuuacggacuccacuua

SEQ ID NO: 412627 - RNA, 19 nt, Homo sapiens
  misc_RNA (1)...(19): siRNA sense strand
ccacccacagccuaauuau

SEQ ID NO: 412628 - RNA, 19 nt, Homo sapiens
  misc_RNA (1)...(19): siRNA sense strand
cgcagucauucucauaauc

SEQ ID NO: 412629 - RNA, 19 nt, Homo sapiens
  misc_RNA (1)...(19): siRNA sense strand
caccacauuaacaacauaa

SEQ ID NO: 412630 - RNA, 19 nt, Homo sapiens
  misc_RNA (1)...(19): siRNA sense strand
cauuauagcuacucucaua

SEQ ID NO: 412631 - RNA, 19 nt, Homo sapiens
  misc_RNA (1)...(19): siRNA sense strand
caacacccacucccucuua

SEQ ID NO: 412632 - RNA, 19 nt, Homo sapiens
  misc_RNA (1)...(19): siRNA sense strand
caucucacuucuaggaaua

SEQ ID NO: 412633 - RNA, 19 nt, Homo sapiens
  misc_RNA (1)...(19): siRNA sense strand
ccucauauccucccuacua

SEQ ID NO: 412634 - RNA, 19 nt, Homo sapiens
  misc_RNA (1)...(19): siRNA sense strand
caacacauauggccuagac

SEQ ID NO: 412635 - RNA, 19 nt, Homo sapiens
  misc_RNA (1)...(19): siRNA sense strand
gcauuuaccaucucacuuc

SEQ ID NO: 412636 - RNA, 19 nt, Homo sapiens
  misc_RNA (1)...(19): siRNA sense strand
ggccuagacuacguacaua

SEQ ID NO: 412637 - RNA, 19 nt, Homo sapiens
  misc_RNA (1)...(19): siRNA sense strand
uaaaccuacuccaaugcua

SEQ ID NO: 412638 - RNA, 19 nt, Homo sapiens
  misc_RNA (1)...(19): siRNA sense strand
uagccaauauugugccuau

SEQ ID NO: 412639 - RNA, 19 nt, Homo sapiens
  misc_RNA (1)...(19): siRNA sense strand
acacauauggccuagacua

SEQ ID NO: 412640 - RNA, 19 nt, Homo sapiens
  misc_RNA (1)...(19): siRNA sense strand
cuacguacauaaccuaaac

SEQ ID NO: 412641 - RNA, 19 nt, Homo sapiens
  misc_RNA (1)...(19): siRNA sense strand
uauugugccuauugccaua

SEQ ID NO: 412642 - RNA, 19 nt, Homo sapiens
  misc_RNA (1)...(19): siRNA sense strand
ccuagaaggaauaauacua

SEQ ID NO: 412643 - RNA, 19 nt, Homo sapiens
  misc_RNA (1)...(19): siRNA sense strand
uaaccuaaaccuacuccaa

SEQ ID NO: 412644 - RNA, 19 nt, Homo sapiens
  misc_RNA (1)...(19): siRNA sense strand
aaaccuacuccaaugcuaa

SEQ ID NO: 412645 - RNA, 19 nt, Homo sapiens
  misc_RNA (1)...(19): siRNA sense strand
ccucuuagccaauauugug

SEQ ID NO: 412646 - RNA, 19 nt, Homo sapiens
  misc_RNA (1)...(19): siRNA sense strand
ccaucucacuucuaggaau

SEQ ID NO: 412647 - RNA, 19 nt, Homo sapiens
  misc_RNA (1)...(19): siRNA sense strand
cauauggccuagacuacgu

SEQ ID NO: 412648 - RNA, 19 nt, Homo sapiens
  misc_RNA (1)...(19): siRNA sense strand
auacuagcauuuaccaucu

SEQ ID NO: 412649 - RNA, 19 nt, Homo sapiens
  misc_RNA (1)...(19): siRNA sense strand
augccuagaaggaauaaua

SEQ ID NO: 412650 - RNA, 19 nt, Homo sapiens
  misc_RNA (1)...(19): siRNA sense strand
agacuacguacauaaccua

SEQ ID NO: 412651 - RNA, 19 nt, Homo sapiens
  misc_RNA (1)...(19): siRNA sense strand
cuacuaugccuagaaggaa

SEQ ID NO: 412652 - RNA, 19 nt, Homo sapiens
  misc_RNA (1)...(19): siRNA sense strand
uaccaucucacuucuagga

SEQ ID NO: 412653 - RNA, 19 nt, Homo sapiens
  misc_RNA (1)...(19): siRNA sense strand
uuuaccaucucacuucuag

SEQ ID NO: 412654 - RNA, 19 nt, Homo sapiens
  misc_RNA (1)...(19): siRNA sense strand
gccuagacuacguacauaa

SEQ ID NO: 412655 - RNA, 19 nt, Homo sapiens
  misc_RNA (1)...(19): siRNA sense strand
uacauaaccuaaaccuacu

SEQ ID NO: 412656 - RNA, 19 nt, Homo sapiens
  misc_RNA (1)...(19): siRNA sense strand
cucauauccucccuacuau

SEQ ID NO: 412657 - RNA, 19 nt, Homo sapiens
  misc_RNA (1)...(19): siRNA sense strand
aaccuaaaccuacuccaau

SEQ ID NO: 412658 - RNA, 19 nt, Homo sapiens
  misc_RNA (1)...(19): siRNA sense strand
ccuacuaugccuagaagga

SEQ ID NO: 412659 - RNA, 19 nt, Homo sapiens
  misc_RNA (1)...(19): siRNA sense strand
gcaaacauaucauacacaa

SEQ ID NO: 412660 - RNA, 19 nt, Homo sapiens
  misc_RNA (1)...(19): siRNA sense strand
gaccuaaccugacuagaaa

SEQ ID NO: 412661 - RNA, 19 nt, Homo sapiens
  misc_RNA (1)...(19): siRNA sense strand
caacaaauagcccuucuaa

SEQ ID NO: 412662 - RNA, 19 nt, Homo sapiens
  misc_RNA (1)...(19): siRNA sense strand
ccacuaauccaaacucuaa

SEQ ID NO: 412663 - RNA, 19 nt, Homo sapiens
  misc_RNA (1)...(19): siRNA sense strand
caggauuucucauuacuaa

SEQ ID NO: 412664 - RNA, 19 nt, Homo sapiens
  misc_RNA (1)...(19): siRNA sense strand
caucgaaaccgcaaacaua

SEQ ID NO: 412665 - RNA, 19 nt, Homo sapiens
  misc_RNA (1)...(19): siRNA sense strand
gcauccaccuuuauuauca

SEQ ID NO: 412666 - RNA, 19 nt, Homo sapiens
  misc_RNA (1)...(19): siRNA sense strand
cuucaaagccauacuauuu

SEQ ID NO: 412667 - RNA, 19 nt, Homo sapiens
  misc_RNA (1)...(19): siRNA sense strand
aggcaaaucagcccaauua

SEQ ID NO: 412668 - RNA, 19 nt, Homo sapiens
  misc_RNA (1)...(19): siRNA sense strand
ugagagggcguaggaauua

SEQ ID NO: 412669 - RNA, 19 nt, Homo sapiens
  misc_RNA (1)...(19): siRNA sense strand
gccuauagcacucgaauaa

SEQ ID NO: 412670 - RNA, 19 nt, Homo sapiens
  misc_RNA (1)...(19): siRNA sense strand
caaaucagcccaauuaggu

SEQ ID NO: 412671 - RNA, 19 nt, Homo sapiens
  misc_RNA (1)...(19): siRNA sense strand
caacacagcagccauucaa

SEQ ID NO: 412672 - RNA, 19 nt, Homo sapiens
  misc_RNA (1)...(19): siRNA sense strand
aauccaaacucuaacacua

SEQ ID NO: 412673 - RNA, 19 nt, Homo sapiens
  misc_RNA (1)...(19): siRNA sense strand
acaaauagcccuucuaaac

SEQ ID NO: 412674 - RNA, 19 nt, Homo sapiens
  misc_RNA (1)...(19): siRNA sense strand
cuagacuacuucuccauaa

SEQ ID NO: 412675 - RNA, 19 nt, Homo sapiens
  misc_RNA (1)...(19): siRNA sense strand
aaacucagacccaaacauu

SEQ ID NO: 412676 - RNA, 19 nt, Homo sapiens
  misc_RNA (1)...(19): siRNA sense strand
uaacagcccuagaccucaa

SEQ ID NO: 412677 - RNA, 19 nt, Homo sapiens
  misc_RNA (1)...(19): siRNA sense strand
gaaaauagcccacuaaucc

SEQ ID NO: 412678 - RNA, 19 nt, Homo sapiens
  misc_RNA (1)...(19): siRNA sense strand
uccacaaccuuaacaauga

SEQ ID NO: 412679 - RNA, 19 nt, Homo sapiens
  misc_RNA (1)...(19): siRNA sense strand
caacccagcucucccuaag

SEQ ID NO: 412680 - RNA, 19 nt, Homo sapiens
  misc_RNA (1)...(19): siRNA sense strand
ccacaaccuuaacaaugaa

SEQ ID NO: 412681 - RNA, 19 nt, Homo sapiens
  misc_RNA (1)...(19): siRNA sense strand
ccuguagcauuguucguua

SEQ ID NO: 412682 - RNA, 19 nt, Homo sapiens
  misc_RNA (1)...(19): siRNA sense strand
ucccuaagcuucaaacuag

SEQ ID NO: 412683 - RNA, 19 nt, Homo sapiens
  misc_RNA (1)...(19): siRNA sense strand
cuacuccacucaagcacua

SEQ ID NO: 412684 - RNA, 19 nt, Homo sapiens
  misc_RNA (1)...(19): siRNA sense strand
caaccucccucaccauugg

SEQ ID NO: 412685 - RNA, 19 nt, Homo sapiens
  misc_RNA (1)...(19): siRNA sense strand
gacuacuucuccauaauau

SEQ ID NO: 412686 - RNA, 19 nt, Homo sapiens
  misc_RNA (1)...(19): siRNA sense strand
agacuacuucuccauaaua

SEQ ID NO: 412687 - RNA, 19 nt, Homo sapiens
  misc_RNA (1)...(19): siRNA sense strand
caacauacucggauucuac

SEQ ID NO: 412688 - RNA, 19 nt, Homo sapiens
  misc_RNA (1)...(19): siRNA sense strand
gccugagcccuaucuauua

SEQ ID NO: 412689 - RNA, 19 nt, Homo sapiens
  misc_RNA (1)...(19): siRNA sense strand
aaccauaccucucacuuca

SEQ ID NO: 412690 - RNA, 19 nt, Homo sapiens
  misc_RNA (1)...(19): siRNA sense strand
agaccuaaccugacuagaa

SEQ ID NO: 412691 - RNA, 19 nt, Homo sapiens
  misc_RNA (1)...(19): siRNA sense strand
aaacuuuacuuccucucuu

SEQ ID NO: 412692 - RNA, 19 nt, Homo sapiens
  misc_RNA (1)...(19): siRNA sense strand
acucagacccaaacauuaa

SEQ ID NO: 412693 - RNA, 19 nt, Homo sapiens
  misc_RNA (1)...(19): siRNA sense strand
cgaaaccgcaaacauauca

SEQ ID NO: 412694 - RNA, 19 nt, Homo sapiens
  misc_RNA (1)...(19): siRNA sense strand
ccaaagaccacaucaucga

SEQ ID NO: 412695 - RNA, 19 nt, Homo sapiens
  misc_RNA (1)...(19): siRNA sense strand
cagcagccauucaagcaau

SEQ ID NO: 412696 - RNA, 19 nt, Homo sapiens
  misc_RNA (1)...(19): siRNA sense strand
auucaucccuguagcauug

SEQ ID NO: 412697 - RNA, 19 nt, Homo sapiens
  misc_RNA (1)...(19): siRNA sense strand
ggauuucucauuacuaaca

SEQ ID NO: 412698 - RNA, 19 nt, Homo sapiens
  misc_RNA (1)...(19): siRNA sense strand
gcaaaucagcccaauuagg

SEQ ID NO: 412699 - RNA, 19 nt, Homo sapiens
  misc_RNA (1)...(19): siRNA sense strand
cuacuucuccauaauauuc

SEQ ID NO: 412700 - RNA, 19 nt, Homo sapiens
  misc_RNA (1)...(19): siRNA sense strand
cauccuaacccuacuccua

SEQ ID NO: 412701 - RNA, 19 nt, Homo sapiens
  misc_RNA (1)...(19): siRNA sense strand
cucaagcacuauaguugua

SEQ ID NO: 412702 - RNA, 19 nt, Homo sapiens
  misc_RNA (1)...(19): siRNA sense strand
cauccucgccuuagcauga

SEQ ID NO: 412703 - RNA, 19 nt, Homo sapiens
  misc_RNA (1)...(19): siRNA sense strand
acccaaacauuaaucaguu

SEQ ID NO: 412704 - RNA, 19 nt, Homo sapiens
  misc_RNA (1)...(19): siRNA sense strand
gcuucaaacuagacuacuu

SEQ ID NO: 412705 - RNA, 19 nt, Homo sapiens
  misc_RNA (1)...(19): siRNA sense strand
uagcauuguucguuacaug

SEQ ID NO: 412706 - RNA, 19 nt, Homo sapiens
  misc_RNA (1)...(19): siRNA sense strand
caaauagcccuucuaaacg

SEQ ID NO: 412707 - RNA, 19 nt, Homo sapiens
  misc_RNA (1)...(19): siRNA sense strand
cauaauauucaucccugua

SEQ ID NO: 412708 - RNA, 19 nt, Homo sapiens
  misc_RNA (1)...(19): siRNA sense strand
gcaggauuucucauuacua

SEQ ID NO: 412709 - RNA, 19 nt, Homo sapiens
  misc_RNA (1)...(19): siRNA sense strand
aaaccgcaaacauaucaua

SEQ ID NO: 412710 - RNA, 19 nt, Homo sapiens
  misc_RNA (1)...(19): siRNA sense strand
caaagaccacaucaucgaa

SEQ ID NO: 412711 - RNA, 19 nt, Homo sapiens
  misc_RNA (1)...(19): siRNA sense strand
aacccugacuucccuaauu

SEQ ID NO: 412712 - RNA, 19 nt, Homo sapiens
  misc_RNA (1)...(19): siRNA sense strand
gagagggcguaggaauuau

SEQ ID NO: 412713 - RNA, 19 nt, Homo sapiens
  misc_RNA (1)...(19): siRNA sense strand
caaccuauuccaacuguuc

SEQ ID NO: 412714 - RNA, 19 nt, Homo sapiens
  misc_RNA (1)...(19): siRNA sense strand
gugccuagaccaagaaguu

SEQ ID NO: 412715 - RNA, 19 nt, Homo sapiens
  misc_RNA (1)...(19): siRNA sense strand
caugagacccacaacaaau

SEQ ID NO: 412716 - RNA, 19 nt, Homo sapiens
  misc_RNA (1)...(19): siRNA sense strand
uaucuaggccuucuuacga

SEQ ID NO: 412717 - RNA, 19 nt, Homo sapiens
  misc_RNA (1)...(19): siRNA sense strand
ccaacauacucggauucua

SEQ ID NO: 412718 - RNA, 19 nt, Homo sapiens
  misc_RNA (1)...(19): siRNA sense strand
aauaggaggacuacucaaa

SEQ ID NO: 412719 - RNA, 19 nt, Homo sapiens
  misc_RNA (1)...(19): siRNA sense strand
gcaggcaaaucagcccaau

SEQ ID NO: 412720 - RNA, 19 nt, Homo sapiens
  misc_RNA (1)...(19): siRNA sense strand
caaccaaccacaccuagca

SEQ ID NO: 412721 - RNA, 19 nt, Homo sapiens
  misc_RNA (1)...(19): siRNA sense strand
ccacucaagcacuauaguu

SEQ ID NO: 412722 - RNA, 19 nt, Homo sapiens
  misc_RNA (1)...(19): siRNA sense strand
gaccaagaaguuauuaucu

SEQ ID NO: 412723 - RNA, 19 nt, Homo sapiens
  misc_RNA (1)...(19): siRNA sense strand
cgccugagcccuaucuauu

SEQ ID NO: 412724 - RNA, 19 nt, Homo sapiens
  misc_RNA (1)...(19): siRNA sense strand
uagacuacuucuccauaau

SEQ ID NO: 412725 - RNA, 19 nt, Homo sapiens
  misc_RNA (1)...(19): siRNA sense strand
ggaagccuauucgcaggau

SEQ ID NO: 412726 - RNA, 19 nt, Homo sapiens
  misc_RNA (1)...(19): siRNA sense strand
cuaacaaccuauuccaacu

SEQ ID NO: 412727 - RNA, 19 nt, Homo sapiens
  misc_RNA (1)...(19): siRNA sense strand
ucaugugccuagaccaaga

SEQ ID NO: 412728 - RNA, 19 nt, Homo sapiens
  misc_RNA (1)...(19): siRNA sense strand
ccuuaacaaugaacaagau

SEQ ID NO: 412729 - RNA, 19 nt, Homo sapiens
  misc_RNA (1)...(19): siRNA sense strand
ucaugagacccacaacaaa

SEQ ID NO: 412730 - RNA, 19 nt, Homo sapiens
  misc_RNA (1)...(19): siRNA sense strand
ccgagcagaugccaacaca

SEQ ID NO: 412731 - RNA, 19 nt, Homo sapiens
  misc_RNA (1)...(19): siRNA sense strand
uagcaugauuuauccuaca

SEQ ID NO: 412732 - RNA, 19 nt, Homo sapiens
  misc_RNA (1)...(19): siRNA sense strand
acaaacgccugagcccuau

SEQ ID NO: 412733 - RNA, 19 nt, Homo sapiens
  misc_RNA (1)...(19): siRNA sense strand
uagcauuccugcacaucug

SEQ ID NO: 412734 - RNA, 19 nt, Homo sapiens
  misc_RNA (1)...(19): siRNA sense strand
gauuuauccuacacuccaa

SEQ ID NO: 412735 - RNA, 19 nt, Homo sapiens
  misc_RNA (1)...(19): siRNA sense strand
gcagaaaauagcccacuaa

SEQ ID NO: 412736 - RNA, 19 nt, Homo sapiens
  misc_RNA (1)...(19): siRNA sense strand
cuuccucucuuucuucuuc

SEQ ID NO: 412737 - RNA, 19 nt, Homo sapiens
  misc_RNA (1)...(19): siRNA sense strand
uucgcaggauuucucauua

SEQ ID NO: 412738 - RNA, 19 nt, Homo sapiens
  misc_RNA (1)...(19): siRNA sense strand
aaagaccacaucaucgaaa

SEQ ID NO: 412739 - RNA, 19 nt, Homo sapiens
  misc_RNA (1)...(19): siRNA sense strand
gacccaaacauuaaucagu

SEQ ID NO: 412740 - RNA, 19 nt, Homo sapiens
  misc_RNA (1)...(19): siRNA sense strand
gaagccuauucgcaggauu

SEQ ID NO: 412741 - RNA, 19 nt, Homo sapiens
  misc_RNA (1)...(19): siRNA sense strand
ccauaccucucacuucaac

SEQ ID NO: 412742 - RNA, 19 nt, Homo sapiens
  misc_RNA (1)...(19): siRNA sense strand
caucaaccaaccacaccua

SEQ ID NO: 412743 - RNA, 19 nt, Homo sapiens
  misc_RNA (1)...(19): siRNA sense strand
caacucaugagacccacaa

SEQ ID NO: 412744 - RNA, 19 nt, Homo sapiens
  misc_RNA (1)...(19): siRNA sense strand
ccacccucguuaacccuaa

SEQ ID NO: 412745 - RNA, 19 nt, Homo sapiens
  misc_RNA (1)...(19): siRNA sense strand
uccaaacucuaacacuaug

SEQ ID NO: 412746 - RNA, 19 nt, Homo sapiens
  misc_RNA (1)...(19): siRNA sense strand
gcugagagggcguaggaau

SEQ ID NO: 412747 - RNA, 19 nt, Homo sapiens
  misc_RNA (1)...(19): siRNA sense strand
ccaccuuuauuaucagucu

SEQ ID NO: 412748 - RNA, 19 nt, Homo sapiens
  misc_RNA (1)...(19): siRNA sense strand
aacuuuacuuccucucuuu

SEQ ID NO: 412749 - RNA, 19 nt, Homo sapiens
  misc_RNA (1)...(19): siRNA sense strand
ucgcauccaccuuuauuau

SEQ ID NO: 412750 - RNA, 19 nt, Homo sapiens
  misc_RNA (1)...(19): siRNA sense strand
ccugagcccuaucuauuac

SEQ ID NO: 412751 - RNA, 19 nt, Homo sapiens
  misc_RNA (1)...(19): siRNA sense strand
gagggcguaggaauuauau

SEQ ID NO: 412752 - RNA, 19 nt, Homo sapiens
  misc_RNA (1)...(19): siRNA sense strand
caauauucaugugccuaga

SEQ ID NO: 412753 - RNA, 19 nt, Homo sapiens
  misc_RNA (1)...(19): siRNA sense strand
cauugucgcauccaccuuu

SEQ ID NO: 412754 - RNA, 19 nt, Homo sapiens
  misc_RNA (1)...(19): siRNA sense strand
uacccacgccuucuucaaa

SEQ ID NO: 412755 - RNA, 19 nt, Homo sapiens
  misc_RNA (1)...(19): siRNA sense strand
uucaagcaauccuauacaa

SEQ ID NO: 412756 - RNA, 19 nt, Homo sapiens
  misc_RNA (1)...(19): siRNA sense strand
uaacaaccuauuccaacug

SEQ ID NO: 412757 - RNA, 19 nt, Homo sapiens
  misc_RNA (1)...(19): siRNA sense strand
agagggcguaggaauuaua

SEQ ID NO: 412758 - RNA, 19 nt, Homo sapiens
  misc_RNA (1)...(19): siRNA sense strand
augagacccacaacaaaua

SEQ ID NO: 412759 - RNA, 19 nt, Homo sapiens
  misc_RNA (1)...(19): siRNA sense strand
guaggaagcugaauaauuu

SEQ ID NO: 412760 - RNA, 19 nt, Homo sapiens
  misc_RNA (1)...(19): siRNA sense strand
cuacagcgauggcuauuga

SEQ ID NO: 412761 - RNA, 19 nt, Homo sapiens
  misc_RNA (1)...(19): siRNA sense strand
gaguguggguuuaguaaug

SEQ ID NO: 412762 - RNA, 19 nt, Homo sapiens
  misc_RNA (1)...(19): siRNA sense strand
ggucggguguguuauuauu

SEQ ID NO: 412763 - RNA, 19 nt, Homo sapiens
  misc_RNA (1)...(19): siRNA sense strand
ucuaagccuucuccuauuu

SEQ ID NO: 412764 - RNA, 19 nt, Homo sapiens
  misc_RNA (1)...(19): siRNA sense strand
gagguuauauggguuuaau

SEQ ID NO: 412765 - RNA, 19 nt, Homo sapiens
  misc_RNA (1)...(19): siRNA sense strand
gaaugaugguugucuuugg

SEQ ID NO: 412766 - RNA, 19 nt, Homo sapiens
  misc_RNA (1)...(19): siRNA sense strand
guggucggguguguuauua

SEQ ID NO: 412767 - RNA, 19 nt, Homo sapiens
  misc_RNA (1)...(19): siRNA sense strand
cgauggcuauugaggagua

SEQ ID NO: 412768 - RNA, 19 nt, Homo sapiens
  misc_RNA (1)...(19): siRNA sense strand
gguguggucggguguguua

SEQ ID NO: 412769 - RNA, 19 nt, Homo sapiens
  misc_RNA (1)...(19): siRNA sense strand
ggaaugaugguugucuuug

SEQ ID NO: 412770 - RNA, 19 nt, Homo sapiens
  misc_RNA (1)...(19): siRNA sense strand
uuaugggcguugauuagua

SEQ ID NO: 412771 - RNA, 19 nt, Homo sapiens
  misc_RNA (1)...(19): siRNA sense strand
uguaggaagcugaauaauu

SEQ ID NO: 412772 - RNA, 19 nt, Homo sapiens
  misc_RNA (1)...(19): siRNA sense strand
gggaaugaugguugucuuu

SEQ ID NO: 412773 - RNA, 19 nt, Homo sapiens
  misc_RNA (1)...(19): siRNA sense strand
gauuaugggcguugauuag

SEQ ID NO: 412774 - RNA, 19 nt, Homo sapiens
  misc_RNA (1)...(19): siRNA sense strand
uaagccuucuccuauuuau

SEQ ID NO: 412775 - RNA, 19 nt, Homo sapiens
  misc_RNA (1)...(19): siRNA sense strand
gauguaugcuuuguuucug

SEQ ID NO: 412776 - RNA, 19 nt, Homo sapiens
  misc_RNA (1)...(19): siRNA sense strand
cuucuaagccuucuccuau

SEQ ID NO: 412777 - RNA, 19 nt, Homo sapiens
  misc_RNA (1)...(19): siRNA sense strand
gguuauauggguuuaauag

SEQ ID NO: 412778 - RNA, 19 nt, Homo sapiens
  misc_RNA (1)...(19): siRNA sense strand
gggagguuauauggguuua

SEQ ID NO: 412779 - RNA, 19 nt, Homo sapiens
  misc_RNA (1)...(19): siRNA sense strand
cuaagccuucuccuauuua

SEQ ID NO: 412780 - RNA, 19 nt, Homo sapiens
  misc_RNA (1)...(19): siRNA sense strand
ugaugguugucuuuggaua

SEQ ID NO: 412781 - RNA, 19 nt, Homo sapiens
  misc_RNA (1)...(19): siRNA sense strand
gguguguuauuauucugaa

SEQ ID NO: 412782 - RNA, 19 nt, Homo sapiens
  misc_RNA (1)...(19): siRNA sense strand
guuacugguugaacauugu

SEQ ID NO: 412783 - RNA, 19 nt, Homo sapiens
  misc_RNA (1)...(19): siRNA sense strand
aaugaugguugucuuugga

SEQ ID NO: 412784 - RNA, 19 nt, Homo sapiens
  misc_RNA (1)...(19): siRNA sense strand
gggcguugauuaguaguag

SEQ ID NO: 412785 - RNA, 19 nt, Homo sapiens
  misc_RNA (1)...(19): siRNA sense strand
gaugguugucuuuggauau

SEQ ID NO: 412786 - RNA, 19 nt, Homo sapiens
  misc_RNA (1)...(19): siRNA sense strand
uaugggcguugauuaguag

SEQ ID NO: 412787 - RNA, 19 nt, Homo sapiens
  misc_RNA (1)...(19): siRNA sense strand
ugauuaugggcguugauua

SEQ ID NO: 412788 - RNA, 19 nt, Homo sapiens
  misc_RNA (1)...(19): siRNA sense strand
ucuguugaguguggguuua

SEQ ID NO: 412789 - RNA, 19 nt, Homo sapiens
  misc_RNA (1)...(19): siRNA sense strand
ggguggugguugugguaaa

SEQ ID NO: 412790 - RNA, 19 nt, Homo sapiens
  misc_RNA (1)...(19): siRNA sense strand
augguugucuuuggauaua

SEQ ID NO: 412791 - RNA, 19 nt, Homo sapiens
  misc_RNA (1)...(19): siRNA sense strand
ggagaggggucaggguuga

SEQ ID NO: 412792 - RNA, 19 nt, Homo sapiens
  misc_RNA (1)...(19): siRNA sense strand
gauuggugcugugggugaa

SEQ ID NO: 412793 - RNA, 19 nt, Homo sapiens
  misc_RNA (1)...(19): siRNA sense strand
uaguguaggaagcugaaua

SEQ ID NO: 412794 - RNA, 19 nt, Homo sapiens
  misc_RNA (1)...(19): siRNA sense strand
uguaugcuuuguuucuguu

SEQ ID NO: 412795 - RNA, 19 nt, Homo sapiens
  misc_RNA (1)...(19): siRNA sense strand
aguguaggaagcugaauaa

SEQ ID NO: 412796 - RNA, 19 nt, Homo sapiens
  misc_RNA (1)...(19): siRNA sense strand
guugaguguggguuuagua

SEQ ID NO: 412797 - RNA, 19 nt, Homo sapiens
  misc_RNA (1)...(19): siRNA sense strand
ugcugugggugaaagagua

SEQ ID NO: 412798 - RNA, 19 nt, Homo sapiens
  misc_RNA (1)...(19): siRNA sense strand
ggugguugugguaaacuuu

SEQ ID NO: 412799 - RNA, 19 nt, Homo sapiens
  misc_RNA (1)...(19): siRNA sense strand
guaguuacugguugaacau

SEQ ID NO: 412800 - RNA, 19 nt, Homo sapiens
  misc_RNA (1)...(19): siRNA sense strand
cauuguuuguugguguaua

SEQ ID NO: 412801 - RNA, 19 nt, Homo sapiens
  misc_RNA (1)...(19): siRNA sense strand
ggucagggguugaggucuu

SEQ ID NO: 412802 - RNA, 19 nt, Homo sapiens
  misc_RNA (1)...(19): siRNA sense strand
gcguugauuaguaguaguu

SEQ ID NO: 412803 - RNA, 19 nt, Homo sapiens
  misc_RNA (1)...(19): siRNA sense strand
guaugauuaugggcguuga

SEQ ID NO: 412804 - RNA, 19 nt, Homo sapiens
  misc_RNA (1)...(19): siRNA sense strand
gaacucagauggcgacaug

SEQ ID NO: 412805 - RNA, 19 nt, Homo sapiens
  misc_RNA (1)...(19): siRNA sense strand
ggauuucaccgucgucuuu

SEQ ID NO: 412806 - RNA, 19 nt, Homo sapiens
  misc_RNA (1)...(19): siRNA sense strand
gauccugggugaugucuuc

SEQ ID NO: 412807 - RNA, 19 nt, Homo sapiens
  misc_RNA (1)...(19): siRNA sense strand
agaacuaccuggauaugga

SEQ ID NO: 412808 - RNA, 19 nt, Homo sapiens
  misc_RNA (1)...(19): siRNA sense strand
gacaucgucuucaccauca

SEQ ID NO: 412809 - RNA, 19 nt, Homo sapiens
  misc_RNA (1)...(19): siRNA sense strand
gcauugacucuucuuacua

SEQ ID NO: 412810 - RNA, 19 nt, Homo sapiens
  misc_RNA (1)...(19): siRNA sense strand
cuggagaacuaccuggaua

SEQ ID NO: 412811 - RNA, 19 nt, Homo sapiens
  misc_RNA (1)...(19): siRNA sense strand
gaggguuacuggcagauca

SEQ ID NO: 412812 - RNA, 19 nt, Homo sapiens
  misc_RNA (1)...(19): siRNA sense strand
ccacacccgucuuugacaa

SEQ ID NO: 412813 - RNA, 19 nt, Homo sapiens
  misc_RNA (1)...(19): siRNA sense strand
ggugaucuuugguggcauu

SEQ ID NO: 412814 - RNA, 19 nt, Homo sapiens
  misc_RNA (1)...(19): siRNA sense strand
guauuaugcucccuucgau

SEQ ID NO: 412815 - RNA, 19 nt, Homo sapiens
  misc_RNA (1)...(19): siRNA sense strand
ugaagaagcacaaccucaa

SEQ ID NO: 412816 - RNA, 19 nt, Homo sapiens
  misc_RNA (1)...(19): siRNA sense strand
guggacagcaucaccauga

SEQ ID NO: 412817 - RNA, 19 nt, Homo sapiens
  misc_RNA (1)...(19): siRNA sense strand
ggagaacuaccuggauaug

SEQ ID NO: 412818 - RNA, 19 nt, Homo sapiens
  misc_RNA (1)...(19): siRNA sense strand
ggcauugacucuucuuacu

SEQ ID NO: 412819 - RNA, 19 nt, Homo sapiens
  misc_RNA (1)...(19): siRNA sense strand
ugacaccaaucagaucuuc

SEQ ID NO: 412820 - RNA, 19 nt, Homo sapiens
  misc_RNA (1)...(19): siRNA sense strand
cauugacucuucuuacuac

SEQ ID NO: 412821 - RNA, 19 nt, Homo sapiens
  misc_RNA (1)...(19): siRNA sense strand
aggcaucucugacaccaau

SEQ ID NO: 412822 - RNA, 19 nt, Homo sapiens
  misc_RNA (1)...(19): siRNA sense strand
gaucuuugguggcauugac

SEQ ID NO: 412823 - RNA, 19 nt, Homo sapiens
  misc_RNA (1)...(19): siRNA sense strand
gcagcguggugaucuuugg

SEQ ID NO: 412824 - RNA, 19 nt, Homo sapiens
  misc_RNA (1)...(19): siRNA sense strand
gggccacacccgucuuuga

SEQ ID NO: 412825 - RNA, 19 nt, Homo sapiens
  misc_RNA (1)...(19): siRNA sense strand
gaagaagcacaaccucaac

SEQ ID NO: 412826 - RNA, 19 nt, Homo sapiens
  misc_RNA (1)...(19): siRNA sense strand
gcuccuuccuguauuaugc

SEQ ID NO: 412827 - RNA, 19 nt, Homo sapiens
  misc_RNA (1)...(19): siRNA sense strand
caggaccucuucucugucu

SEQ ID NO: 412828 - RNA, 19 nt, Homo sapiens
  misc_RNA (1)...(19): siRNA sense strand
caacccagccagaaaguac

SEQ ID NO: 412829 - RNA, 19 nt, Homo sapiens
  misc_RNA (1)...(19): siRNA sense strand
cucaggaccucuucucugu

SEQ ID NO: 412830 - RNA, 19 nt, Homo sapiens
  misc_RNA (1)...(19): siRNA sense strand
cuggcuccuuccuguauua

SEQ ID NO: 412831 - RNA, 19 nt, Homo sapiens
  misc_RNA (1)...(19): siRNA sense strand
cugagugcaucauguacaa

SEQ ID NO: 412832 - RNA, 19 nt, Homo sapiens
  misc_RNA (1)...(19): siRNA sense strand
cagcgccgaugacaagagu

SEQ ID NO: 412833 - RNA, 19 nt, Homo sapiens
  misc_RNA (1)...(19): siRNA sense strand
ccucagcgccgaugacaag

SEQ ID NO: 412834 - RNA, 19 nt, Homo sapiens
  misc_RNA (1)...(19): siRNA sense strand
ugaacugggugccuguuac

SEQ ID NO: 412835 - RNA, 19 nt, Homo sapiens
  misc_RNA (1)...(19): siRNA sense strand
ucucugagugcaucaugua

SEQ ID NO: 412836 - RNA, 19 nt, Homo sapiens
  misc_RNA (1)...(19): siRNA sense strand
ucagaaagaaguccuugag

SEQ ID NO: 412837 - RNA, 19 nt, Homo sapiens
  misc_RNA (1)...(19): siRNA sense strand
ugacucuucuuacuacacu

SEQ ID NO: 412838 - RNA, 19 nt, Homo sapiens
  misc_RNA (1)...(19): siRNA sense strand
gcuucaacccugaggauuc

SEQ ID NO: 412839 - RNA, 19 nt, Homo sapiens
  misc_RNA (1)...(19): siRNA sense strand
cuguuaccgucgaggguua

SEQ ID NO: 412840 - RNA, 19 nt, Homo sapiens
  misc_RNA (1)...(19): siRNA sense strand
gagaacuaccuggauaugg

SEQ ID NO: 412841 - RNA, 19 nt, Homo sapiens
  misc_RNA (1)...(19): siRNA sense strand
uggaguacuucggcacuau

SEQ ID NO: 412842 - RNA, 19 nt, Homo sapiens
  misc_RNA (1)...(19): siRNA sense strand
caucggagccagcgagaac

SEQ ID NO: 412843 - RNA, 19 nt, Homo sapiens
  misc_RNA (1)...(19): siRNA sense strand
ggacagcaucaccaugaac

SEQ ID NO: 412844 - RNA, 19 nt, Homo sapiens
  misc_RNA (1)...(19): siRNA sense strand
uggacagcaucaccaugaa

SEQ ID NO: 412845 - RNA, 19 nt, Homo sapiens
  misc_RNA (1)...(19): siRNA sense strand
gcaucucugacaccaauca

SEQ ID NO: 412846 - RNA, 19 nt, Homo sapiens
  misc_RNA (1)...(19): siRNA sense strand
gcugccaggccauuguuga

SEQ ID NO: 412847 - RNA, 19 nt, Homo sapiens
  misc_RNA (1)...(19): siRNA sense strand
cucccacccugguagauga

SEQ ID NO: 412848 - RNA, 19 nt, Homo sapiens
  misc_RNA (1)...(19): siRNA sense strand
ggaccucuucucugucuac

SEQ ID NO: 412849 - RNA, 19 nt, Homo sapiens
  misc_RNA (1)...(19): siRNA sense strand
gaauuucccucuuaacaaa

SEQ ID NO: 412850 - RNA, 19 nt, Homo sapiens
  misc_RNA (1)...(19): siRNA sense strand
gaauggacuuccucaguaa

SEQ ID NO: 412851 - RNA, 19 nt, Homo sapiens
  misc_RNA (1)...(19): siRNA sense strand
uaacagaguuugcuuaugg

SEQ ID NO: 412852 - RNA, 19 nt, Homo sapiens
  misc_RNA (1)...(19): siRNA sense strand
ggacaugucucacgugaag

SEQ ID NO: 412853 - RNA, 19 nt, Homo sapiens
  misc_RNA (1)...(19): siRNA sense strand
gaaggccgcuugcauuaug

SEQ ID NO: 412854 - RNA, 19 nt, Homo sapiens
  misc_RNA (1)...(19): siRNA sense strand
ccugauagcuggacggaua

SEQ ID NO: 412855 - RNA, 19 nt, Homo sapiens
  misc_RNA (1)...(19): siRNA sense strand
guuaauuucugcagacaua

SEQ ID NO: 412856 - RNA, 19 nt, Homo sapiens
  misc_RNA (1)...(19): siRNA sense strand
ugaauggacuuccucagua

SEQ ID NO: 412857 - RNA, 19 nt, Homo sapiens
  misc_RNA (1)...(19): siRNA sense strand
ggacggauauuuguucuuc

SEQ ID NO: 412858 - RNA, 19 nt, Homo sapiens
  misc_RNA (1)...(19): siRNA sense strand
cauauuugcuggagccaua

SEQ ID NO: 412859 - RNA, 19 nt, Homo sapiens
  misc_RNA (1)...(19): siRNA sense strand
gaagaagauuauccugaga

SEQ ID NO: 412860 - RNA, 19 nt, Homo sapiens
  misc_RNA (1)...(19): siRNA sense strand
ggaauuauauuuggaaugc

SEQ ID NO: 412861 - RNA, 19 nt, Homo sapiens
  misc_RNA (1)...(19): siRNA sense strand
ggacaauagugaacaucaa

SEQ ID NO: 412862 - RNA, 19 nt, Homo sapiens
  misc_RNA (1)...(19): siRNA sense strand
caaccgagguacuauagga

SEQ ID NO: 412863 - RNA, 19 nt, Homo sapiens
  misc_RNA (1)...(19): siRNA sense strand
gaaagcuuaugacuuguuc

SEQ ID NO: 412864 - RNA, 19 nt, Homo sapiens
  misc_RNA (1)...(19): siRNA sense strand
gacccaagcuaaccaagga

SEQ ID NO: 412865 - RNA, 19 nt, Homo sapiens
  misc_RNA (1)...(19): siRNA sense strand
gaaacacuguggcguugau

SEQ ID NO: 412866 - RNA, 19 nt, Homo sapiens
  misc_RNA (1)...(19): siRNA sense strand
cgauauagaugcagaagag

SEQ ID NO: 412867 - RNA, 19 nt, Homo sapiens
  misc_RNA (1)...(19): siRNA sense strand
guucuucuauuaacuguug

SEQ ID NO: 412868 - RNA, 19 nt, Homo sapiens
  misc_RNA (1)...(19): siRNA sense strand
gaaguuggagguuaugaga

SEQ ID NO: 412869 - RNA, 19 nt, Homo sapiens
  misc_RNA (1)...(19): siRNA sense strand
agaaagagcuccugauagc

SEQ ID NO: 412870 - RNA, 19 nt, Homo sapiens
  misc_RNA (1)...(19): siRNA sense strand
ucacguggaugccucaaga

SEQ ID NO: 412871 - RNA, 19 nt, Homo sapiens
  misc_RNA (1)...(19): siRNA sense strand
gugaaggccgcuugcauua

SEQ ID NO: 412872 - RNA, 19 nt, Homo sapiens
  misc_RNA (1)...(19): siRNA sense strand
gaagcaagcgucggagaaa

SEQ ID NO: 412873 - RNA, 19 nt, Homo sapiens
  misc_RNA (1)...(19): siRNA sense strand
ccauugaccucuacaccaa

SEQ ID NO: 412874 - RNA, 19 nt, Homo sapiens
  misc_RNA (1)...(19): siRNA sense strand
guaacugucccaagauuau

SEQ ID NO: 412875 - RNA, 19 nt, Homo sapiens
  misc_RNA (1)...(19): siRNA sense strand
gcagaagggacccaagcua

SEQ ID NO: 412876 - RNA, 19 nt, Homo sapiens
  misc_RNA (1)...(19): siRNA sense strand
ggaagaaacagaugauggu

SEQ ID NO: 412877 - RNA, 19 nt, Homo sapiens
  misc_RNA (1)...(19): siRNA sense strand
gggcgaugcugaagaccaa

SEQ ID NO: 412878 - RNA, 19 nt, Homo sapiens
  misc_RNA (1)...(19): siRNA sense strand
cagaagggacccaagcuaa

SEQ ID NO: 412879 - RNA, 19 nt, Homo sapiens
  misc_RNA (1)...(19): siRNA sense strand
ugaugaccaugccggaaua

SEQ ID NO: 412880 - RNA, 19 nt, Homo sapiens
  misc_RNA (1)...(19): siRNA sense strand
gcgaaucgauauagaugca

SEQ ID NO: 412881 - RNA, 19 nt, Homo sapiens
  misc_RNA (1)...(19): siRNA sense strand
gagcgaaucgauauagaug

SEQ ID NO: 412882 - RNA, 19 nt, Homo sapiens
  misc_RNA (1)...(19): siRNA sense strand
guacacagauaugguagca

SEQ ID NO: 412883 - RNA, 19 nt, Homo sapiens
  misc_RNA (1)...(19): siRNA sense strand
uaugguagcauguguggua

SEQ ID NO: 412884 - RNA, 19 nt, Homo sapiens
  misc_RNA (1)...(19): siRNA sense strand
agaagauuauccugagaaa

SEQ ID NO: 412885 - RNA, 19 nt, Homo sapiens
  misc_RNA (1)...(19): siRNA sense strand
gagaaagagcuccugauag

SEQ ID NO: 412886 - RNA, 19 nt, Homo sapiens
  misc_RNA (1)...(19): siRNA sense strand
ggaagcaagcgucggagaa

SEQ ID NO: 412887 - RNA, 19 nt, Homo sapiens
  misc_RNA (1)...(19): siRNA sense strand
gugcacaaaucaggucauu

SEQ ID NO: 412888 - RNA, 19 nt, Homo sapiens
  misc_RNA (1)...(19): siRNA sense strand
ggaggacaauagugaacau

SEQ ID NO: 412889 - RNA, 19 nt, Homo sapiens
  misc_RNA (1)...(19): siRNA sense strand
ggccaggaauuauauuugg

SEQ ID NO: 412890 - RNA, 19 nt, Homo sapiens
  misc_RNA (1)...(19): siRNA sense strand
ccgaaaugcugcugacauc

SEQ ID NO: 412891 - RNA, 19 nt, Homo sapiens
  misc_RNA (1)...(19): siRNA sense strand
guacaaguuucucaaaaug

SEQ ID NO: 412892 - RNA, 19 nt, Homo sapiens
  misc_RNA (1)...(19): siRNA sense strand
ugaagcugcugcccauguu

SEQ ID NO: 412893 - RNA, 19 nt, Homo sapiens
  misc_RNA (1)...(19): siRNA sense strand
guaauguugcugauucuug

SEQ ID NO: 412894 - RNA, 19 nt, Homo sapiens
  misc_RNA (1)...(19): siRNA sense strand
ucaagaaagcuuaugacuu

SEQ ID NO: 412895 - RNA, 19 nt, Homo sapiens
  misc_RNA (1)...(19): siRNA sense strand
cagaggagcgaaucgauau

SEQ ID NO: 412896 - RNA, 19 nt, Homo sapiens
  misc_RNA (1)...(19): siRNA sense strand
gaccaaccgagguacuaua

SEQ ID NO: 412897 - RNA, 19 nt, Homo sapiens
  misc_RNA (1)...(19): siRNA sense strand
agaguuugcuuauggaaca

SEQ ID NO: 412898 - RNA, 19 nt, Homo sapiens
  misc_RNA (1)...(19): siRNA sense strand
ggggacaacuugacaauca

SEQ ID NO: 412899 - RNA, 19 nt, Homo sapiens
  misc_RNA (1)...(19): siRNA sense strand
guaaaagagucaaugaaca

SEQ ID NO: 412900 - RNA, 19 nt, Homo sapiens
  misc_RNA (1)...(19): siRNA sense strand
gaaaugcugcugacaucuc

SEQ ID NO: 412901 - RNA, 19 nt, Homo sapiens
  misc_RNA (1)...(19): siRNA sense strand
acggauauuuguucuucua

SEQ ID NO: 412902 - RNA, 19 nt, Homo sapiens
  misc_RNA (1)...(19): siRNA sense strand
ccugagaaaucacguggau

SEQ ID NO: 412903 - RNA, 19 nt, Homo sapiens
  misc_RNA (1)...(19): siRNA sense strand
ggagugcacuaucuguacu

SEQ ID NO: 412904 - RNA, 19 nt, Homo sapiens
  misc_RNA (1)...(19): siRNA sense strand
ugauaacagaguuugcuua

SEQ ID NO: 412905 - RNA, 19 nt, Homo sapiens
  misc_RNA (1)...(19): siRNA sense strand
ggaucuuugucccuaucua

SEQ ID NO: 412906 - RNA, 19 nt, Homo sapiens
  misc_RNA (1)...(19): siRNA sense strand
gggcuuggccucggugauu

SEQ ID NO: 412907 - RNA, 19 nt, Homo sapiens
  misc_RNA (1)...(19): siRNA sense strand
ccucggugauuuacacaga

SEQ ID NO: 412908 - RNA, 19 nt, Homo sapiens
  misc_RNA (1)...(19): siRNA sense strand
ucucagucauugucaucua

SEQ ID NO: 412909 - RNA, 19 nt, Homo sapiens
  misc_RNA (1)...(19): siRNA sense strand
ccauuacacagaaucaauu

SEQ ID NO: 412910 - RNA, 19 nt, Homo sapiens
  misc_RNA (1)...(19): siRNA sense strand
ccaguaacaucggcagcaa

SEQ ID NO: 412911 - RNA, 19 nt, Homo sapiens
  misc_RNA (1)...(19): siRNA sense strand
agaugaugguguugaagaa

SEQ ID NO: 412912 - RNA, 19 nt, Homo sapiens
  misc_RNA (1)...(19): siRNA sense strand
uauagaugcagaagagaaa

SEQ ID NO: 412913 - RNA, 19 nt, Homo sapiens
  misc_RNA (1)...(19): siRNA sense strand
acagaggagcgaaucgaua

SEQ ID NO: 412914 - RNA, 19 nt, Homo sapiens
  misc_RNA (1)...(19): siRNA sense strand
gccggaauaucucaagaag

SEQ ID NO: 412915 - RNA, 19 nt, Homo sapiens
  misc_RNA (1)...(19): siRNA sense strand
ggacuuccucaguaauguu

SEQ ID NO: 412916 - RNA, 19 nt, Homo sapiens
  misc_RNA (1)...(19): siRNA sense strand
gccaggaauuauauuugga

SEQ ID NO: 412917 - RNA, 19 nt, Homo sapiens
  misc_RNA (1)...(19): siRNA sense strand
cagucauugucaucuauuu

SEQ ID NO: 412918 - RNA, 19 nt, Homo sapiens
  misc_RNA (1)...(19): siRNA sense strand
ggagcgaaucgauauagau

SEQ ID NO: 412919 - RNA, 19 nt, Homo sapiens
  misc_RNA (1)...(19): siRNA sense strand
gguacaaguuucucaaaau

SEQ ID NO: 412920 - RNA, 19 nt, Homo sapiens
  misc_RNA (1)...(19): siRNA sense strand
gcacccucuucaccauuga

SEQ ID NO: 412921 - RNA, 19 nt, Homo sapiens
  misc_RNA (1)...(19): siRNA sense strand
ugugguaccuucugaaugc

SEQ ID NO: 412922 - RNA, 19 nt, Homo sapiens
  misc_RNA (1)...(19): siRNA sense strand
ggcuaugacugcuguuuac

SEQ ID NO: 412923 - RNA, 19 nt, Homo sapiens
  misc_RNA (1)...(19): siRNA sense strand
guggaugccucaagaaagc

SEQ ID NO: 412924 - RNA, 19 nt, Homo sapiens
  misc_RNA (1)...(19): siRNA sense strand
cagaugaugguguugaaga

SEQ ID NO: 412925 - RNA, 19 nt, Homo sapiens
  misc_RNA (1)...(19): siRNA sense strand
uaacuguugugagcauugu

SEQ ID NO: 412926 - RNA, 19 nt, Homo sapiens
  misc_RNA (1)...(19): siRNA sense strand
aaaugcugcugacaucuca

SEQ ID NO: 412927 - RNA, 19 nt, Homo sapiens
  misc_RNA (1)...(19): siRNA sense strand
caugugugguaccuucuga

SEQ ID NO: 412928 - RNA, 19 nt, Homo sapiens
  misc_RNA (1)...(19): siRNA sense strand
cagauaugguagcaugugu

SEQ ID NO: 412929 - RNA, 19 nt, Homo sapiens
  misc_RNA (1)...(19): siRNA sense strand
cgugaaggccgcuugcauu

SEQ ID NO: 412930 - RNA, 19 nt, Homo sapiens
  misc_RNA (1)...(19): siRNA sense strand
ccauuacagcuuuguggua

SEQ ID NO: 412931 - RNA, 19 nt, Homo sapiens
  misc_RNA (1)...(19): siRNA sense strand
ggacuccuuccauaucuuc

SEQ ID NO: 412932 - RNA, 19 nt, Homo sapiens
  misc_RNA (1)...(19): siRNA sense strand
gcggacuccuuccauaucu

SEQ ID NO: 412933 - RNA, 19 nt, Homo sapiens
  misc_RNA (1)...(19): siRNA sense strand
gggcggacuccuuccauau

SEQ ID NO: 412934 - RNA, 19 nt, Homo sapiens
  misc_RNA (1)...(19): siRNA sense strand
caaaacccauuccugaugu

SEQ ID NO: 412935 - RNA, 19 nt, Homo sapiens
  misc_RNA (1)...(19): siRNA sense strand
uaugugugcuuaccugaag

SEQ ID NO: 412936 - RNA, 19 nt, Homo sapiens
  misc_RNA (1)...(19): siRNA sense strand
ccaggaauuauauuuggaa

SEQ ID NO: 412937 - RNA, 19 nt, Homo sapiens
  misc_RNA (1)...(19): siRNA sense strand
gaggagcgaaucgauauag

SEQ ID NO: 412938 - RNA, 19 nt, Homo sapiens
  misc_RNA (1)...(19): siRNA sense strand
aauugcagcugucuuugug

SEQ ID NO: 412939 - RNA, 19 nt, Homo sapiens
  misc_RNA (1)...(19): siRNA sense strand
ucccugaccuccaucuuca

SEQ ID NO: 412940 - RNA, 19 nt, Homo sapiens
  misc_RNA (1)...(19): siRNA sense strand
augcuggccucucucauga

SEQ ID NO: 412941 - RNA, 19 nt, Homo sapiens
  misc_RNA (1)...(19): siRNA sense strand
uggcugugguggucuuuau

SEQ ID NO: 412942 - RNA, 19 nt, Homo sapiens
  misc_RNA (1)...(19): siRNA sense strand
gaagauuauccugagaaau

SEQ ID NO: 412943 - RNA, 19 nt, Homo sapiens
  misc_RNA (1)...(19): siRNA sense strand
ggcuuggccucggugauuu

SEQ ID NO: 412944 - RNA, 19 nt, Homo sapiens
  misc_RNA (1)...(19): siRNA sense strand
guacagaggagcgaaucga

SEQ ID NO: 412945 - RNA, 19 nt, Homo sapiens
  misc_RNA (1)...(19): siRNA sense strand
ggucuaaugguuggacuug

SEQ ID NO: 412946 - RNA, 19 nt, Homo sapiens
  misc_RNA (1)...(19): siRNA sense strand
gugcuugccaucuucugua

SEQ ID NO: 412947 - RNA, 19 nt, Homo sapiens
  misc_RNA (1)...(19): siRNA sense strand
cugcgaggccugaugcuuu

SEQ ID NO: 412948 - RNA, 19 nt, Homo sapiens
  misc_RNA (1)...(19): siRNA sense strand
cugauuggcucuuuuauuc

SEQ ID NO: 412949 - RNA, 19 nt, Homo sapiens
  misc_RNA (1)...(19): siRNA sense strand
gauaccaccucuccaaaua

SEQ ID NO: 412950 - RNA, 19 nt, Homo sapiens
  misc_RNA (1)...(19): siRNA sense strand
ccacucagcuuucaucauc

SEQ ID NO: 412951 - RNA, 19 nt, Homo sapiens
  misc_RNA (1)...(19): siRNA sense strand
gaagauaccaccucuccaa

SEQ ID NO: 412952 - RNA, 19 nt, Homo sapiens
  misc_RNA (1)...(19): siRNA sense strand
gaaaggccauguggaggaa

SEQ ID NO: 412953 - RNA, 19 nt, Homo sapiens
  misc_RNA (1)...(19): siRNA sense strand
cagccuaccuccagagcua

SEQ ID NO: 412954 - RNA, 19 nt, Homo sapiens
  misc_RNA (1)...(19): siRNA sense strand
ggacgaacacucccagauc

SEQ ID NO: 412955 - RNA, 19 nt, Homo sapiens
  misc_RNA (1)...(19): siRNA sense strand
ccacuggccucccugauac

SEQ ID NO: 412956 - RNA, 19 nt, Homo sapiens
  misc_RNA (1)...(19): siRNA sense strand
gacgaacacucccagaucu

SEQ ID NO: 412957 - RNA, 19 nt, Homo sapiens
  misc_RNA (1)...(19): siRNA sense strand
ccauagaccacucagcuuu

SEQ ID NO: 412958 - RNA, 19 nt, Homo sapiens
  misc_RNA (1)...(19): siRNA sense strand
gccagcaacuuggaaauca

SEQ ID NO: 412959 - RNA, 19 nt, Homo sapiens
  misc_RNA (1)...(19): siRNA sense strand
caucaucggaacagaaauu

SEQ ID NO: 412960 - RNA, 19 nt, Homo sapiens
  misc_RNA (1)...(19): siRNA sense strand
ggagccacaugucauuugg

SEQ ID NO: 412961 - RNA, 19 nt, Homo sapiens
  misc_RNA (1)...(19): siRNA sense strand
cagaaaccagcaccaacua

SEQ ID NO: 412962 - RNA, 19 nt, Homo sapiens
  misc_RNA (1)...(19): siRNA sense strand
agacgccacuccaacuuuc

SEQ ID NO: 412963 - RNA, 19 nt, Homo sapiens
  misc_RNA (1)...(19): siRNA sense strand
ccaggaagguggccaacac

SEQ ID NO: 412964 - RNA, 19 nt, Homo sapiens
  misc_RNA (1)...(19): siRNA sense strand
gggcugaacaaccacaugu

SEQ ID NO: 412965 - RNA, 19 nt, Homo sapiens
  misc_RNA (1)...(19): siRNA sense strand
gaaucaucaucggaacaga

SEQ ID NO: 412966 - RNA, 19 nt, Homo sapiens
  misc_RNA (1)...(19): siRNA sense strand
gggagccacaugucauuug

SEQ ID NO: 412967 - RNA, 19 nt, Homo sapiens
  misc_RNA (1)...(19): siRNA sense strand
ccagaaaccagcaccaacu

SEQ ID NO: 412968 - RNA, 19 nt, Homo sapiens
  misc_RNA (1)...(19): siRNA sense strand
cagacgccacuccaacuuu

SEQ ID NO: 412969 - RNA, 19 nt, Homo sapiens
  misc_RNA (1)...(19): siRNA sense strand
ccacuccaacuuucuguag

SEQ ID NO: 412970 - RNA, 19 nt, Homo sapiens
  misc_RNA (1)...(19): siRNA sense strand
uccacuggccucccugaua

SEQ ID NO: 412971 - RNA, 19 nt, Homo sapiens
  misc_RNA (1)...(19): siRNA sense strand
gacgcaggaggcagaauga

SEQ ID NO: 412972 - RNA, 19 nt, Homo sapiens
  misc_RNA (1)...(19): siRNA sense strand
ccgccacccuuucccacuu

SEQ ID NO: 412973 - RNA, 19 nt, Homo sapiens
  misc_RNA (1)...(19): siRNA sense strand
ggaaucaucaucggaacag

SEQ ID NO: 412974 - RNA, 19 nt, Homo sapiens
  misc_RNA (1)...(19): siRNA sense strand
ccagacgccacuccaacuu

SEQ ID NO: 412975 - RNA, 19 nt, Homo sapiens
  misc_RNA (1)...(19): siRNA sense strand
gggcugcaaccccucauua

SEQ ID NO: 412976 - RNA, 19 nt, Homo sapiens
  misc_RNA (1)...(19): siRNA sense strand
ggugaaccaagccaugaug

SEQ ID NO: 412977 - RNA, 19 nt, Homo sapiens
  misc_RNA (1)...(19): siRNA sense strand
ccaccucuccaaauaccaa

SEQ ID NO: 412978 - RNA, 19 nt, Homo sapiens
  misc_RNA (1)...(19): siRNA sense strand
gcuuucaucauccuacuuc

SEQ ID NO: 412979 - RNA, 19 nt, Homo sapiens
  misc_RNA (1)...(19): siRNA sense strand
cgaacacucccagaucuuc

SEQ ID NO: 412980 - RNA, 19 nt, Homo sapiens
  misc_RNA (1)...(19): siRNA sense strand
gugaaccaagccaugauga

SEQ ID NO: 412981 - RNA, 19 nt, Homo sapiens
  misc_RNA (1)...(19): siRNA sense strand
caggugaaccaagccauga

SEQ ID NO: 412982 - RNA, 19 nt, Homo sapiens
  misc_RNA (1)...(19): siRNA sense strand
aaucaucaucggaacagaa

SEQ ID NO: 412983 - RNA, 19 nt, Homo sapiens
  misc_RNA (1)...(19): siRNA sense strand
auagaccacucagcuuuca

SEQ ID NO: 412984 - RNA, 19 nt, Homo sapiens
  misc_RNA (1)...(19): siRNA sense strand
cauagaccacucagcuuuc

SEQ ID NO: 412985 - RNA, 19 nt, Homo sapiens
  misc_RNA (1)...(19): siRNA sense strand
gaccaaagccugaguuuaa

SEQ ID NO: 412986 - RNA, 19 nt, Homo sapiens
  misc_RNA (1)...(19): siRNA sense strand
auacagagaugauauggua

SEQ ID NO: 412987 - RNA, 19 nt, Homo sapiens
  misc_RNA (1)...(19): siRNA sense strand
gaagcggacuccuagaaga

SEQ ID NO: 412988 - RNA, 19 nt, Homo sapiens
  misc_RNA (1)...(19): siRNA sense strand
caucccagcuggagauuaa

SEQ ID NO: 412989 - RNA, 19 nt, Homo sapiens
  misc_RNA (1)...(19): siRNA sense strand
gagaggaaagcgagaauuu

SEQ ID NO: 412990 - RNA, 19 nt, Homo sapiens
  misc_RNA (1)...(19): siRNA sense strand
gcgagaauuugaaagauau

SEQ ID NO: 412991 - RNA, 19 nt, Homo sapiens
  misc_RNA (1)...(19): siRNA sense strand
gaggaaagcgagaauuuga

SEQ ID NO: 412992 - RNA, 19 nt, Homo sapiens
  misc_RNA (1)...(19): siRNA sense strand
ggaaagcgagaauuugaaa

SEQ ID NO: 412993 - RNA, 19 nt, Homo sapiens
  misc_RNA (1)...(19): siRNA sense strand
gcugagaaguuuccagaug

SEQ ID NO: 412994 - RNA, 19 nt, Homo sapiens
  misc_RNA (1)...(19): siRNA sense strand
ugaaagauauggugggaau

SEQ ID NO: 412995 - RNA, 19 nt, Homo sapiens
  misc_RNA (1)...(19): siRNA sense strand
gagcagaaguggugaugca

SEQ ID NO: 412996 - RNA, 19 nt, Homo sapiens
  misc_RNA (1)...(19): siRNA sense strand
cagaugacccggaagauuu

SEQ ID NO: 412997 - RNA, 19 nt, Homo sapiens
  misc_RNA (1)...(19): siRNA sense strand
gaacagaccagaccaaagc

SEQ ID NO: 412998 - RNA, 19 nt, Homo sapiens
  misc_RNA (1)...(19): siRNA sense strand
ccaaagccguggugauuca

SEQ ID NO: 412999 - RNA, 19 nt, Homo sapiens
  misc_RNA (1)...(19): siRNA sense strand
gagaugauaugguaaaaga

SEQ ID NO: 413000 - RNA, 19 nt, Homo sapiens
  misc_RNA (1)...(19): siRNA sense strand
gggaauaccgacccuauga

SEQ ID NO: 413001 - RNA, 19 nt, Homo sapiens
  misc_RNA (1)...(19): siRNA sense strand
cagcaaggauggaaugaca

SEQ ID NO: 413002 - RNA, 19 nt, Homo sapiens
  misc_RNA (1)...(19): siRNA sense strand
gaggacgauucccauguuu

SEQ ID NO: 413003 - RNA, 19 nt, Homo sapiens
  misc_RNA (1)...(19): siRNA sense strand
gaagaagaaacccaaguuc

SEQ ID NO: 413004 - RNA, 19 nt, Homo sapiens
  misc_RNA (1)...(19): siRNA sense strand
caagagaugacuuuagaug

SEQ ID NO: 413005 - RNA, 19 nt, Homo sapiens
  misc_RNA (1)...(19): siRNA sense strand
cagaaguggugaugcaaga

SEQ ID NO: 413006 - RNA, 19 nt, Homo sapiens
  misc_RNA (1)...(19): siRNA sense strand
gaauaccgacccuaugaga

SEQ ID NO: 413007 - RNA, 19 nt, Homo sapiens
  misc_RNA (1)...(19): siRNA sense strand
gaagaaacccaaguucaag

SEQ ID NO: 413008 - RNA, 19 nt, Homo sapiens
  misc_RNA (1)...(19): siRNA sense strand
ugaggacgauucccauguu

SEQ ID NO: 413009 - RNA, 19 nt, Homo sapiens
  misc_RNA (1)...(19): siRNA sense strand
gagcugagcggagauccua

SEQ ID NO: 413010 - RNA, 19 nt, Homo sapiens
  misc_RNA (1)...(19): siRNA sense strand
guaaagauaccagugaugu

SEQ ID NO: 413011 - RNA, 19 nt, Homo sapiens
  misc_RNA (1)...(19): siRNA sense strand
cugagaaguuuccagauga

SEQ ID NO: 413012 - RNA, 19 nt, Homo sapiens
  misc_RNA (1)...(19): siRNA sense strand
ugagaaguuuccagaugaa

SEQ ID NO: 413013 - RNA, 19 nt, Homo sapiens
  misc_RNA (1)...(19): siRNA sense strand
ggagggagucgcagaagga

SEQ ID NO: 413014 - RNA, 19 nt, Homo sapiens
  misc_RNA (1)...(19): siRNA sense strand
gaaaccagaauccacuguu

SEQ ID NO: 413015 - RNA, 19 nt, Homo sapiens
  misc_RNA (1)...(19): siRNA sense strand
uucaagagaugacuuuaga

SEQ ID NO: 413016 - RNA, 19 nt, Homo sapiens
  misc_RNA (1)...(19): siRNA sense strand
cagccaaaguuccugaguu

SEQ ID NO: 413017 - RNA, 19 nt, Homo sapiens
  misc_RNA (1)...(19): siRNA sense strand
gacuuuagaugaguggaaa

SEQ ID NO: 413018 - RNA, 19 nt, Homo sapiens
  misc_RNA (1)...(19): siRNA sense strand
agaagaaacccaaguucaa

SEQ ID NO: 413019 - RNA, 19 nt, Homo sapiens
  misc_RNA (1)...(19): siRNA sense strand
aaaccagaauccacuguuc

SEQ ID NO: 413020 - RNA, 19 nt, Homo sapiens
  misc_RNA (1)...(19): siRNA sense strand
gagaugacuuuagaugagu

SEQ ID NO: 413021 - RNA, 19 nt, Homo sapiens
  misc_RNA (1)...(19): siRNA sense strand
agagaugacuuuagaugag

SEQ ID NO: 413022 - RNA, 19 nt, Homo sapiens
  misc_RNA (1)...(19): siRNA sense strand
gaaguggugaugcaagaug

SEQ ID NO: 413023 - RNA, 19 nt, Homo sapiens
  misc_RNA (1)...(19): siRNA sense strand
gaucgagacagaccguuga

SEQ ID NO: 413024 - RNA, 19 nt, Homo sapiens
  misc_RNA (1)...(19): siRNA sense strand
ggagggcagagaacaacua

SEQ ID NO: 413025 - RNA, 19 nt, Homo sapiens
  misc_RNA (1)...(19): siRNA sense strand
agcgagaauuugaaagaua

SEQ ID NO: 413026 - RNA, 19 nt, Homo sapiens
  misc_RNA (1)...(19): siRNA sense strand
aaagcgagaauuugaaaga

SEQ ID NO: 413027 - RNA, 19 nt, Homo sapiens
  misc_RNA (1)...(19): siRNA sense strand
gaaacccgccaaugacauc

SEQ ID NO: 413028 - RNA, 19 nt, Homo sapiens
  misc_RNA (1)...(19): siRNA sense strand
agccaaaguuccugaguug

SEQ ID NO: 413029 - RNA, 19 nt, Homo sapiens
  misc_RNA (1)...(19): siRNA sense strand
aaagauauggugggaauga

SEQ ID NO: 413030 - RNA, 19 nt, Homo sapiens
  misc_RNA (1)...(19): siRNA sense strand
gagcagcaaggauggaaug

SEQ ID NO: 413031 - RNA, 19 nt, Homo sapiens
  misc_RNA (1)...(19): siRNA sense strand
cagaagcggacuccuagaa

SEQ ID NO: 413032 - RNA, 19 nt, Homo sapiens
  misc_RNA (1)...(19): siRNA sense strand
gguaaaagaugacuaugag

SEQ ID NO: 413033 - RNA, 19 nt, Homo sapiens
  misc_RNA (1)...(19): siRNA sense strand
gaagacaacauggguggau

SEQ ID NO: 413034 - RNA, 19 nt, Homo sapiens
  misc_RNA (1)...(19): siRNA sense strand
aaacccaaguucaagagau

SEQ ID NO: 413035 - RNA, 19 nt, Homo sapiens
  misc_RNA (1)...(19): siRNA sense strand
ccagaugacccggaagauu

SEQ ID NO: 413036 - RNA, 19 nt, Homo sapiens
  misc_RNA (1)...(19): siRNA sense strand
ggagauccuacagggaaua

SEQ ID NO: 413037 - RNA, 19 nt, Homo sapiens
  misc_RNA (1)...(19): siRNA sense strand
ggccagaagcggacuccua

SEQ ID NO: 413038 - RNA, 19 nt, Homo sapiens
  misc_RNA (1)...(19): siRNA sense strand
agaagaagaaacccaaguu

SEQ ID NO: 413039 - RNA, 19 nt, Homo sapiens
  misc_RNA (1)...(19): siRNA sense strand
gaaacccaaguucaagaga

SEQ ID NO: 413040 - RNA, 19 nt, Homo sapiens
  misc_RNA (1)...(19): siRNA sense strand
caacuaucccagagcagaa

SEQ ID NO: 413041 - RNA, 19 nt, Homo sapiens
  misc_RNA (1)...(19): siRNA sense strand
acagagaugauaugguaaa

SEQ ID NO: 413042 - RNA, 19 nt, Homo sapiens
  misc_RNA (1)...(19): siRNA sense strand
ugaguuggagguagaagaa

SEQ ID NO: 413043 - RNA, 19 nt, Homo sapiens
  misc_RNA (1)...(19): siRNA sense strand
uagguuugaucgagacaga

SEQ ID NO: 413044 - RNA, 19 nt, Homo sapiens
  misc_RNA (1)...(19): siRNA sense strand
uaacauccggaaaccagaa

SEQ ID NO: 413045 - RNA, 19 nt, Homo sapiens
  misc_RNA (1)...(19): siRNA sense strand
gauauggugggaaugacaa

SEQ ID NO: 413046 - RNA, 19 nt, Homo sapiens
  misc_RNA (1)...(19): siRNA sense strand
caaaauagcagucagaacu

SEQ ID NO: 413047 - RNA, 19 nt, Homo sapiens
  misc_RNA (1)...(19): siRNA sense strand
aagaagaaacccaaguuca

SEQ ID NO: 413048 - RNA, 19 nt, Homo sapiens
  misc_RNA (1)...(19): siRNA sense strand
gggcagagaacaacuaucc

SEQ ID NO: 413049 - RNA, 19 nt, Homo sapiens
  misc_RNA (1)...(19): siRNA sense strand
ggaaacccgccaaugacau

SEQ ID NO: 413050 - RNA, 19 nt, Homo sapiens
  misc_RNA (1)...(19): siRNA sense strand
agaccaaagccugaguuua

SEQ ID NO: 413051 - RNA, 19 nt, Homo sapiens
  misc_RNA (1)...(19): siRNA sense strand
caagaacagaccagaccaa

SEQ ID NO: 413052 - RNA, 19 nt, Homo sapiens
  misc_RNA (1)...(19): siRNA sense strand
ggagguagaagaagaaacc

SEQ ID NO: 413053 - RNA, 19 nt, Homo sapiens
  misc_RNA (1)...(19): siRNA sense strand
gagggcagagaacaacuau

SEQ ID NO: 413054 - RNA, 19 nt, Homo sapiens
  misc_RNA (1)...(19): siRNA sense strand
ggaaaccagaauccacugu

SEQ ID NO: 413055 - RNA, 19 nt, Homo sapiens
  misc_RNA (1)...(19): siRNA sense strand
aagagaugacuuuagauga

SEQ ID NO: 413056 - RNA, 19 nt, Homo sapiens
  misc_RNA (1)...(19): siRNA sense strand
gaaagcgagaauuugaaag

SEQ ID NO: 413057 - RNA, 19 nt, Homo sapiens
  misc_RNA (1)...(19): siRNA sense strand
ucacaucccagcuggagau

SEQ ID NO: 413058 - RNA, 19 nt, Homo sapiens
  misc_RNA (1)...(19): siRNA sense strand
ggguggauguggaguucga

SEQ ID NO: 413059 - RNA, 19 nt, Homo sapiens
  misc_RNA (1)...(19): siRNA sense strand
aacccaaguucaagagaug

SEQ ID NO: 413060 - RNA, 19 nt, Homo sapiens
  misc_RNA (1)...(19): siRNA sense strand
uaaagauaccagugaugug

SEQ ID NO: 413061 - RNA, 19 nt, Homo sapiens
  misc_RNA (1)...(19): siRNA sense strand
ccgcgaugcaggagaguuu

SEQ ID NO: 413062 - RNA, 19 nt, Homo sapiens
  misc_RNA (1)...(19): siRNA sense strand
cagagaggcaggcagacuu

SEQ ID NO: 413063 - RNA, 19 nt, Homo sapiens
  misc_RNA (1)...(19): siRNA sense strand
aagcgagaauuugaaagau

SEQ ID NO: 413064 - RNA, 19 nt, Homo sapiens
  misc_RNA (1)...(19): siRNA sense strand
guucaagagaugacuuuag

SEQ ID NO: 413065 - RNA, 19 nt, Homo sapiens
  misc_RNA (1)...(19): siRNA sense strand
gaugauaugguaaaagaug

SEQ ID NO: 413066 - RNA, 19 nt, Homo sapiens
  misc_RNA (1)...(19): siRNA sense strand
uccggaaacccgccaauga

SEQ ID NO: 413067 - RNA, 19 nt, Homo sapiens
  misc_RNA (1)...(19): siRNA sense strand
ggaauaccgacccuaugag

SEQ ID NO: 413068 - RNA, 19 nt, Homo sapiens
  misc_RNA (1)...(19): siRNA sense strand
cagaccaaagccugaguuu

SEQ ID NO: 413069 - RNA, 19 nt, Homo sapiens
  misc_RNA (1)...(19): siRNA sense strand
aagaaacccaaguucaaga

SEQ ID NO: 413070 - RNA, 19 nt, Homo sapiens
  misc_RNA (1)...(19): siRNA sense strand
gaggcaggcagacuucaca

SEQ ID NO: 413071 - RNA, 19 nt, Homo sapiens
  misc_RNA (1)...(19): siRNA sense strand
ccagagaggaaagcgagaa

SEQ ID NO: 413072 - RNA, 19 nt, Homo sapiens
  misc_RNA (1)...(19): siRNA sense strand
uuccaaagccguggugauu

SEQ ID NO: 413073 - RNA, 19 nt, Homo sapiens
  misc_RNA (1)...(19): siRNA sense strand
caaagccugaguuuaacau

SEQ ID NO: 413074 - RNA, 19 nt, Homo sapiens
  misc_RNA (1)...(19): siRNA sense strand
aagaacagaccagaccaaa

SEQ ID NO: 413075 - RNA, 19 nt, Homo sapiens
  misc_RNA (1)...(19): siRNA sense strand
agaggaaagcgagaauuug

SEQ ID NO: 413076 - RNA, 19 nt, Homo sapiens
  misc_RNA (1)...(19): siRNA sense strand
gaaagauauggugggaaug

SEQ ID NO: 413077 - RNA, 19 nt, Homo sapiens
  misc_RNA (1)...(19): siRNA sense strand
ggaucaggagggcagagaa

SEQ ID NO: 413078 - RNA, 19 nt, Homo sapiens
  misc_RNA (1)...(19): siRNA sense strand
ggacgauucccauguuuuc

SEQ ID NO: 413079 - RNA, 19 nt, Homo sapiens
  misc_RNA (1)...(19): siRNA sense strand
aauccacuguuccuuccaa

SEQ ID NO: 413080 - RNA, 19 nt, Homo sapiens
  misc_RNA (1)...(19): siRNA sense strand
gaaagagcugagcggagau

SEQ ID NO: 413081 - RNA, 19 nt, Homo sapiens
  misc_RNA (1)...(19): siRNA sense strand
aguuggagguagaagaaga

SEQ ID NO: 413082 - RNA, 19 nt, Homo sapiens
  misc_RNA (1)...(19): siRNA sense strand
caaagcaggugacauagau

SEQ ID NO: 413083 - RNA, 19 nt, Homo sapiens
  misc_RNA (1)...(19): siRNA sense strand
gcuaugcccucauggaguu

SEQ ID NO: 413084 - RNA, 19 nt, Homo sapiens
  misc_RNA (1)...(19): siRNA sense strand
gcgcaacccugcacugaag

SEQ ID NO: 413085 - RNA, 19 nt, Homo sapiens
  misc_RNA (1)...(19): siRNA sense strand
ugaacaagauucccauucu

SEQ ID NO: 413086 - RNA, 19 nt, Homo sapiens
  misc_RNA (1)...(19): siRNA sense strand
ggucagagaagcagaagga

SEQ ID NO: 413087 - RNA, 19 nt, Homo sapiens
  misc_RNA (1)...(19): siRNA sense strand
gaaugacagcgagcaguuu

SEQ ID NO: 413088 - RNA, 19 nt, Homo sapiens
  misc_RNA (1)...(19): siRNA sense strand
gaggaugccagcaaguuug

SEQ ID NO: 413089 - RNA, 19 nt, Homo sapiens
  misc_RNA (1)...(19): siRNA sense strand
gcacggcuauggcuuugac

SEQ ID NO: 413090 - RNA, 19 nt, Homo sapiens
  misc_RNA (1)...(19): siRNA sense strand
gaccaaggcagucaaagca

SEQ ID NO: 413091 - RNA, 19 nt, Homo sapiens
  misc_RNA (1)...(19): siRNA sense strand
ucacaucucuaaugaacac

SEQ ID NO: 413092 - RNA, 19 nt, Homo sapiens
  misc_RNA (1)...(19): siRNA sense strand
ugacauagaugccaaaacu

SEQ ID NO: 413093 - RNA, 19 nt, Homo sapiens
  misc_RNA (1)...(19): siRNA sense strand
gaaucuggcgugcguggaa

SEQ ID NO: 413094 - RNA, 19 nt, Homo sapiens
  misc_RNA (1)...(19): siRNA sense strand
gggcacggcuauggcuuug

SEQ ID NO: 413095 - RNA, 19 nt, Homo sapiens
  misc_RNA (1)...(19): siRNA sense strand
ucagugaggauuuccagaa

SEQ ID NO: 413096 - RNA, 19 nt, Homo sapiens
  misc_RNA (1)...(19): siRNA sense strand
uggcugcccugaccauguu

SEQ ID NO: 413097 - RNA, 19 nt, Homo sapiens
  misc_RNA (1)...(19): siRNA sense strand
gcuucuggcugcuaaugug

SEQ ID NO: 413098 - RNA, 19 nt, Homo sapiens
  misc_RNA (1)...(19): siRNA sense strand
gggcaaggcgagcaucaug

SEQ ID NO: 413099 - RNA, 19 nt, Homo sapiens
  misc_RNA (1)...(19): siRNA sense strand
ucaaagcaggugacauaga

SEQ ID NO: 413100 - RNA, 19 nt, Homo sapiens
  misc_RNA (1)...(19): siRNA sense strand
ucgcuucugugcaaguauu

SEQ ID NO: 413101 - RNA, 19 nt, Homo sapiens
  misc_RNA (1)...(19): siRNA sense strand
ugaggaugccagcaaguuu

SEQ ID NO: 413102 - RNA, 19 nt, Homo sapiens
  misc_RNA (1)...(19): siRNA sense strand
gcacgcauccugggaagca

SEQ ID NO: 413103 - RNA, 19 nt, Homo sapiens
  misc_RNA (1)...(19): siRNA sense strand
cccaaguccugaacaagau

SEQ ID NO: 413104 - RNA, 19 nt, Homo sapiens
  misc_RNA (1)...(19): siRNA sense strand
uagcaccucuccagcucuu

SEQ ID NO: 413105 - RNA, 19 nt, Homo sapiens
  misc_RNA (1)...(19): siRNA sense strand
ccaccugaccguugaagau

SEQ ID NO: 413106 - RNA, 19 nt, Homo sapiens
  misc_RNA (1)...(19): siRNA sense strand
gccgcuccaugauugauga

SEQ ID NO: 413107 - RNA, 19 nt, Homo sapiens
  misc_RNA (1)...(19): siRNA sense strand
uuaaggagccacagaaggu

SEQ ID NO: 413108 - RNA, 19 nt, Homo sapiens
  misc_RNA (1)...(19): siRNA sense strand
gcaccucuccagcucuuca

SEQ ID NO: 413109 - RNA, 19 nt, Homo sapiens
  misc_RNA (1)...(19): siRNA sense strand
caccgugucugcccuaugc

SEQ ID NO: 413110 - RNA, 19 nt, Homo sapiens
  misc_RNA (1)...(19): siRNA sense strand
ccucgcuucugugcaagua

SEQ ID NO: 413111 - RNA, 19 nt, Homo sapiens
  misc_RNA (1)...(19): siRNA sense strand
agaaugacagcgagcaguu

SEQ ID NO: 413112 - RNA, 19 nt, Homo sapiens
  misc_RNA (1)...(19): siRNA sense strand
gaccugcugccacaucuuc

SEQ ID NO: 413113 - RNA, 19 nt, Homo sapiens
  misc_RNA (1)...(19): siRNA sense strand
cgaggaggccaaugaccuu

SEQ ID NO: 413114 - RNA, 19 nt, Homo sapiens
  misc_RNA (1)...(19): siRNA sense strand
uccgugaggccaagaauga

SEQ ID NO: 413115 - RNA, 19 nt, Homo sapiens
  misc_RNA (1)...(19): siRNA sense strand
gaggaggccaaugaccuuu

SEQ ID NO: 413116 - RNA, 19 nt, Homo sapiens
  misc_RNA (1)...(19): siRNA sense strand
cagcgcaacccugcacuga

SEQ ID NO: 413117 - RNA, 19 nt, Homo sapiens
  misc_RNA (1)...(19): siRNA sense strand
ugcuucacaucucuaauga

SEQ ID NO: 413118 - RNA, 19 nt, Homo sapiens
  misc_RNA (1)...(19): siRNA sense strand
gcaucauggccucggauug

SEQ ID NO: 413119 - RNA, 19 nt, Homo sapiens
  misc_RNA (1)...(19): siRNA sense strand
ggaggccaaugaccuuucc

SEQ ID NO: 413120 - RNA, 19 nt, Homo sapiens
  misc_RNA (1)...(19): siRNA sense strand
gcugccauccucuuccuau

SEQ ID NO: 413121 - RNA, 19 nt, Homo sapiens
  misc_RNA (1)...(19): siRNA sense strand
gaagugaacuggauacuga

SEQ ID NO: 413122 - RNA, 19 nt, Homo sapiens
  misc_RNA (1)...(19): siRNA sense strand
gaaagaaccucacagaugu

SEQ ID NO: 413123 - RNA, 19 nt, Homo sapiens
  misc_RNA (1)...(19): siRNA sense strand
gaaggugguugaaucuuua

SEQ ID NO: 413124 - RNA, 19 nt, Homo sapiens
  misc_RNA (1)...(19): siRNA sense strand
guacacaaaugucaaagua

SEQ ID NO: 413125 - RNA, 19 nt, Homo sapiens
  misc_RNA (1)...(19): siRNA sense strand
gaucgcacauguuuauuua

SEQ ID NO: 413126 - RNA, 19 nt, Homo sapiens
  misc_RNA (1)...(19): siRNA sense strand
gaaaucauguggagaagaa

SEQ ID NO: 413127 - RNA, 19 nt, Homo sapiens
  misc_RNA (1)...(19): siRNA sense strand
uaucuaagcuuccacauuu

SEQ ID NO: 413128 - RNA, 19 nt, Homo sapiens
  misc_RNA (1)...(19): siRNA sense strand
gcaggagacuuuaaagaaa

SEQ ID NO: 413129 - RNA, 19 nt, Homo sapiens
  misc_RNA (1)...(19): siRNA sense strand
gcugaaaugucuccuuaua

SEQ ID NO: 413130 - RNA, 19 nt, Homo sapiens
  misc_RNA (1)...(19): siRNA sense strand
gaacugagcaacacaaaug

SEQ ID NO: 413131 - RNA, 19 nt, Homo sapiens
  misc_RNA (1)...(19): siRNA sense strand
gaaaggguguccaacaguu

SEQ ID NO: 413132 - RNA, 19 nt, Homo sapiens
  misc_RNA (1)...(19): siRNA sense strand
gaguagagaucacaaaugu

SEQ ID NO: 413133 - RNA, 19 nt, Homo sapiens
  misc_RNA (1)...(19): siRNA sense strand
caacacaaaugaagugguu

SEQ ID NO: 413134 - RNA, 19 nt, Homo sapiens
  misc_RNA (1)...(19): siRNA sense strand
aagaugagaugaaggaaua

SEQ ID NO: 413135 - RNA, 19 nt, Homo sapiens
  misc_RNA (1)...(19): siRNA sense strand
gaacacuggccucauauuu

SEQ ID NO: 413136 - RNA, 19 nt, Homo sapiens
  misc_RNA (1)...(19): siRNA sense strand
ggagaaagaccaaguguau

SEQ ID NO: 413137 - RNA, 19 nt, Homo sapiens
  misc_RNA (1)...(19): siRNA sense strand
uggaagagaugauucuaua

SEQ ID NO: 413138 - RNA, 19 nt, Homo sapiens
  misc_RNA (1)...(19): siRNA sense strand
ugaaaugucuccuuauaug

SEQ ID NO: 413139 - RNA, 19 nt, Homo sapiens
  misc_RNA (1)...(19): siRNA sense strand
gcaagcacaugaccucuga

SEQ ID NO: 413140 - RNA, 19 nt, Homo sapiens
  misc_RNA (1)...(19): siRNA sense strand
gaggaaauguacaaaguga

SEQ ID NO: 413141 - RNA, 19 nt, Homo sapiens
  misc_RNA (1)...(19): siRNA sense strand
caaguuaauugucagauga

SEQ ID NO: 413142 - RNA, 19 nt, Homo sapiens
  misc_RNA (1)...(19): siRNA sense strand
ggaaggagaucugguuuca

SEQ ID NO: 413143 - RNA, 19 nt, Homo sapiens
  misc_RNA (1)...(19): siRNA sense strand
ucagugaccuucuacguaa

SEQ ID NO: 413144 - RNA, 19 nt, Homo sapiens
  misc_RNA (1)...(19): siRNA sense strand
gcacagaaacugcaagaau

SEQ ID NO: 413145 - RNA, 19 nt, Homo sapiens
  misc_RNA (1)...(19): siRNA sense strand
gcaagcacauggugauaau

SEQ ID NO: 413146 - RNA, 19 nt, Homo sapiens
  misc_RNA (1)...(19): siRNA sense strand
cacagaaacugcaagaauu

SEQ ID NO: 413147 - RNA, 19 nt, Homo sapiens
  misc_RNA (1)...(19): siRNA sense strand
acacaacucuuggaaauga

SEQ ID NO: 413148 - RNA, 19 nt, Homo sapiens
  misc_RNA (1)...(19): siRNA sense strand
ugacaaagcugacauucca

SEQ ID NO: 413149 - RNA, 19 nt, Homo sapiens
  misc_RNA (1)...(19): siRNA sense strand
ggaaauacuugacaaagcu

SEQ ID NO: 413150 - RNA, 19 nt, Homo sapiens
  misc_RNA (1)...(19): siRNA sense strand
aaggagaucugguuucaaa

SEQ ID NO: 413151 - RNA, 19 nt, Homo sapiens
  misc_RNA (1)...(19): siRNA sense strand
ggaaauguacaaagugaaa

SEQ ID NO: 413152 - RNA, 19 nt, Homo sapiens
  misc_RNA (1)...(19): siRNA sense strand
gcacauggugauaaugaua

SEQ ID NO: 413153 - RNA, 19 nt, Homo sapiens
  misc_RNA (1)...(19): siRNA sense strand
gggcaacacuggagagaau

SEQ ID NO: 413154 - RNA, 19 nt, Homo sapiens
  misc_RNA (1)...(19): siRNA sense strand
ugagugcuuuguuucauua

SEQ ID NO: 413155 - RNA, 19 nt, Homo sapiens
  misc_RNA (1)...(19): siRNA sense strand
ugaaggugguugaaucuuu

SEQ ID NO: 413156 - RNA, 19 nt, Homo sapiens
  misc_RNA (1)...(19): siRNA sense strand
acacacaacucuuggaaau

SEQ ID NO: 413157 - RNA, 19 nt, Homo sapiens
  misc_RNA (1)...(19): siRNA sense strand
ccaauggacugguaucugu

SEQ ID NO: 413158 - RNA, 19 nt, Homo sapiens
  misc_RNA (1)...(19): siRNA sense strand
ggagauacauaaguuggaa

SEQ ID NO: 413159 - RNA, 19 nt, Homo sapiens
  misc_RNA (1)...(19): siRNA sense strand
gauuacaaaugcagacuug

SEQ ID NO: 413160 - RNA, 19 nt, Homo sapiens
  misc_RNA (1)...(19): siRNA sense strand
uagcagaucuuccacaauc

SEQ ID NO: 413161 - RNA, 19 nt, Homo sapiens
  misc_RNA (1)...(19): siRNA sense strand
cuaaggaaaugagugauaa

SEQ ID NO: 413162 - RNA, 19 nt, Homo sapiens
  misc_RNA (1)...(19): siRNA sense strand
ucaagaaccucuacuaagg

SEQ ID NO: 413163 - RNA, 19 nt, Homo sapiens
  misc_RNA (1)...(19): siRNA sense strand
gaacuucccugacccucau

SEQ ID NO: 413164 - RNA, 19 nt, Homo sapiens
  misc_RNA (1)...(19): siRNA sense strand
gguaugcuauguugacuau

SEQ ID NO: 413165 - RNA, 19 nt, Homo sapiens
  misc_RNA (1)...(19): siRNA sense strand
ggacauaacaguuccucuu

SEQ ID NO: 413166 - RNA, 19 nt, Homo sapiens
  misc_RNA (1)...(19): siRNA sense strand
uguaugagcuggauuaugg

SEQ ID NO: 413167 - RNA, 19 nt, Homo sapiens
  misc_RNA (1)...(19): siRNA sense strand
ggcaggagauacauaaguu

SEQ ID NO: 413168 - RNA, 19 nt, Homo sapiens
  misc_RNA (1)...(19): siRNA sense strand
guagagaucacaaauguuc

SEQ ID NO: 413169 - RNA, 19 nt, Homo sapiens
  misc_RNA (1)...(19): siRNA sense strand
gacuguagcauuaagguua

SEQ ID NO: 413170 - RNA, 19 nt, Homo sapiens
  misc_RNA (1)...(19): siRNA sense strand
cagaccugcuggugaaaua

SEQ ID NO: 413171 - RNA, 19 nt, Homo sapiens
  misc_RNA (1)...(19): siRNA sense strand
gcagguagaagaaagcauu

SEQ ID NO: 413172 - RNA, 19 nt, Homo sapiens
  misc_RNA (1)...(19): siRNA sense strand
gauagagacuaguagaucu

SEQ ID NO: 413173 - RNA, 19 nt, Homo sapiens
  misc_RNA (1)...(19): siRNA sense strand
gagcuguucugcagucuca

SEQ ID NO: 413174 - RNA, 19 nt, Homo sapiens
  misc_RNA (1)...(19): siRNA sense strand
agaaagaaccucacagaug

SEQ ID NO: 413175 - RNA, 19 nt, Homo sapiens
  misc_RNA (1)...(19): siRNA sense strand
ccagagggaucgcacaugu

SEQ ID NO: 413176 - RNA, 19 nt, Homo sapiens
  misc_RNA (1)...(19): siRNA sense strand
gaucuuugcaguggaaaua

SEQ ID NO: 413177 - RNA, 19 nt, Homo sapiens
  misc_RNA (1)...(19): siRNA sense strand
auaaagguaugcuauguug

SEQ ID NO: 413178 - RNA, 19 nt, Homo sapiens
  misc_RNA (1)...(19): siRNA sense strand
caaaugaagugguuaucag

SEQ ID NO: 413179 - RNA, 19 nt, Homo sapiens
  misc_RNA (1)...(19): siRNA sense strand
cauaacaguuccucuuuua

SEQ ID NO: 413180 - RNA, 19 nt, Homo sapiens
  misc_RNA (1)...(19): siRNA sense strand
gccauggccugcacagaaa

SEQ ID NO: 413181 - RNA, 19 nt, Homo sapiens
  misc_RNA (1)...(19): siRNA sense strand
uaagauagaggacuacuuc

SEQ ID NO: 413182 - RNA, 19 nt, Homo sapiens
  misc_RNA (1)...(19): siRNA sense strand
gguugaaucuuuaacuugu

SEQ ID NO: 413183 - RNA, 19 nt, Homo sapiens
  misc_RNA (1)...(19): siRNA sense strand
uaaacaagcauaacaaugg

SEQ ID NO: 413184 - RNA, 19 nt, Homo sapiens
  misc_RNA (1)...(19): siRNA sense strand
aaacaaacaccaccguuga

SEQ ID NO: 413185 - RNA, 19 nt, Homo sapiens
  misc_RNA (1)...(19): siRNA sense strand
guuaagagauucuguuuug

SEQ ID NO: 413186 - RNA, 19 nt, Homo sapiens
  misc_RNA (1)...(19): siRNA sense strand
ggagaucugguuucaaaga

SEQ ID NO: 413187 - RNA, 19 nt, Homo sapiens
  misc_RNA (1)...(19): siRNA sense strand
ggcaggagacuuuaaagaa

SEQ ID NO: 413188 - RNA, 19 nt, Homo sapiens
  misc_RNA (1)...(19): siRNA sense strand
auaccuggauucaugauuu

SEQ ID NO: 413189 - RNA, 19 nt, Homo sapiens
  misc_RNA (1)...(19): siRNA sense strand
cgaauuagucaacauaaga

SEQ ID NO: 413190 - RNA, 19 nt, Homo sapiens
  misc_RNA (1)...(19): siRNA sense strand
gacauaacaguuccucuuu

SEQ ID NO: 413191 - RNA, 19 nt, Homo sapiens
  misc_RNA (1)...(19): siRNA sense strand
caaaggaaacucuguugga

SEQ ID NO: 413192 - RNA, 19 nt, Homo sapiens
  misc_RNA (1)...(19): siRNA sense strand
gccauuaagugcuguuuag

SEQ ID NO: 413193 - RNA, 19 nt, Homo sapiens
  misc_RNA (1)...(19): siRNA sense strand
guaagggucugaacaagcu

SEQ ID NO: 413194 - RNA, 19 nt, Homo sapiens
  misc_RNA (1)...(19): siRNA sense strand
guucugcagucucauaaga

SEQ ID NO: 413195 - RNA, 19 nt, Homo sapiens
  misc_RNA (1)...(19): siRNA sense strand
ucaagccuccugccucuua

SEQ ID NO: 413196 - RNA, 19 nt, Homo sapiens
  misc_RNA (1)...(19): siRNA sense strand
gaaccucuacuaaggaaau

SEQ ID NO: 413197 - RNA, 19 nt, Homo sapiens
  misc_RNA (1)...(19): siRNA sense strand
caaagacauuccagugcaa

SEQ ID NO: 413198 - RNA, 19 nt, Homo sapiens
  misc_RNA (1)...(19): siRNA sense strand
caaaggaguucuaaaagga

SEQ ID NO: 413199 - RNA, 19 nt, Homo sapiens
  misc_RNA (1)...(19): siRNA sense strand
ggaucgcacauguuuauuu

SEQ ID NO: 413200 - RNA, 19 nt, Homo sapiens
  misc_RNA (1)...(19): siRNA sense strand
ugucagagcucagggaaau

SEQ ID NO: 413201 - RNA, 19 nt, Homo sapiens
  misc_RNA (1)...(19): siRNA sense strand
ugaacuggauacugagaaa

SEQ ID NO: 413202 - RNA, 19 nt, Homo sapiens
  misc_RNA (1)...(19): siRNA sense strand
uuugaacacuggccucaua

SEQ ID NO: 413203 - RNA, 19 nt, Homo sapiens
  misc_RNA (1)...(19): siRNA sense strand
cuggagagauuaccugcua

SEQ ID NO: 413204 - RNA, 19 nt, Homo sapiens
  misc_RNA (1)...(19): siRNA sense strand
ggacugguaucuguguaug

SEQ ID NO: 413205 - RNA, 19 nt, Homo sapiens
  misc_RNA (1)...(19): siRNA sense strand
cuagaagccuaucugagaa

SEQ ID NO: 413206 - RNA, 19 nt, Homo sapiens
  misc_RNA (1)...(19): siRNA sense strand
gcagugcugugguuaagag

SEQ ID NO: 413207 - RNA, 19 nt, Homo sapiens
  misc_RNA (1)...(19): siRNA sense strand
caagcucagugaccuucua

SEQ ID NO: 413208 - RNA, 19 nt, Homo sapiens
  misc_RNA (1)...(19): siRNA sense strand
augcugaaaugucuccuua

SEQ ID NO: 413209 - RNA, 19 nt, Homo sapiens
  misc_RNA (1)...(19): siRNA sense strand
gugcugugguuaagagauu

SEQ ID NO: 413210 - RNA, 19 nt, Homo sapiens
  misc_RNA (1)...(19): siRNA sense strand
cagcauagacuacauuucu

SEQ ID NO: 413211 - RNA, 19 nt, Homo sapiens
  misc_RNA (1)...(19): siRNA sense strand
gcauuaagguuacaaaagu

SEQ ID NO: 413212 - RNA, 19 nt, Homo sapiens
  misc_RNA (1)...(19): siRNA sense strand
gggcacaggucaucucaac

SEQ ID NO: 413213 - RNA, 19 nt, Homo sapiens
  misc_RNA (1)...(19): siRNA sense strand
cgaggaggacgccugguua

SEQ ID NO: 413214 - RNA, 19 nt, Homo sapiens
  misc_RNA (1)...(19): siRNA sense strand
gaagaugagaugaaggaau

SEQ ID NO: 413215 - RNA, 19 nt, Homo sapiens
  misc_RNA (1)...(19): siRNA sense strand
gauuccaacugaagcauca

SEQ ID NO: 413216 - RNA, 19 nt, Homo sapiens
  misc_RNA (1)...(19): siRNA sense strand
gcaacacuggagagaauuu

SEQ ID NO: 413217 - RNA, 19 nt, Homo sapiens
  misc_RNA (1)...(19): siRNA sense strand
ggaaaaugguuacgaguag

SEQ ID NO: 413218 - RNA, 19 nt, Homo sapiens
  misc_RNA (1)...(19): siRNA sense strand
acacaaaugucaaaguaac

SEQ ID NO: 413219 - RNA, 19 nt, Homo sapiens
  misc_RNA (1)...(19): siRNA sense strand
gcuugaaggcuauauguga

SEQ ID NO: 413220 - RNA, 19 nt, Homo sapiens
  misc_RNA (1)...(19): siRNA sense strand
cgaugacccugaucuagug

SEQ ID NO: 413221 - RNA, 19 nt, Homo sapiens
  misc_RNA (1)...(19): siRNA sense strand
gaggaagccuugacuauca

SEQ ID NO: 413222 - RNA, 19 nt, Homo sapiens
  misc_RNA (1)...(19): siRNA sense strand
gauuguggaugcuagguuu

SEQ ID NO: 413223 - RNA, 19 nt, Homo sapiens
  misc_RNA (1)...(19): siRNA sense strand
acacagauaucgccaagga

SEQ ID NO: 413224 - RNA, 19 nt, Homo sapiens
  misc_RNA (1)...(19): siRNA sense strand
gaaauuacagauucaagug

SEQ ID NO: 413225 - RNA, 19 nt, Homo sapiens
  misc_RNA (1)...(19): siRNA sense strand
cuacucagguuguugauca

SEQ ID NO: 413226 - RNA, 19 nt, Homo sapiens
  misc_RNA (1)...(19): siRNA sense strand
gcaauugccuccagcucau

SEQ ID NO: 413227 - RNA, 19 nt, Homo sapiens
  misc_RNA (1)...(19): siRNA sense strand
ugacaugaguguagaccuu

SEQ ID NO: 413228 - RNA, 19 nt, Homo sapiens
  misc_RNA (1)...(19): siRNA sense strand
guggugacguaaugaaauu

SEQ ID NO: 413229 - RNA, 19 nt, Homo sapiens
  misc_RNA (1)...(19): siRNA sense strand
cugaaugggugaaaggaaa

SEQ ID NO: 413230 - RNA, 19 nt, Homo sapiens
  misc_RNA (1)...(19): siRNA sense strand
gcuccaugcuggcugaaga

SEQ ID NO: 413231 - RNA, 19 nt, Homo sapiens
  misc_RNA (1)...(19): siRNA sense strand
ggaggaagccuugacuauc

SEQ ID NO: 413232 - RNA, 19 nt, Homo sapiens
  misc_RNA (1)...(19): siRNA sense strand
cgcccuggcugauuacaaa

SEQ ID NO: 413233 - RNA, 19 nt, Homo sapiens
  misc_RNA (1)...(19): siRNA sense strand
ucagguuguugaucauuau

SEQ ID NO: 413234 - RNA, 19 nt, Homo sapiens
  misc_RNA (1)...(19): siRNA sense strand
gagaggcagagaagaaaug

SEQ ID NO: 413235 - RNA, 19 nt, Homo sapiens
  misc_RNA (1)...(19): siRNA sense strand
cucagguuguugaucauua

SEQ ID NO: 413236 - RNA, 19 nt, Homo sapiens
  misc_RNA (1)...(19): siRNA sense strand
ggcugaagaugcaaucaag

SEQ ID NO: 413237 - RNA, 19 nt, Homo sapiens
  misc_RNA (1)...(19): siRNA sense strand
ccuggcugauuacaaauug

SEQ ID NO: 413238 - RNA, 19 nt, Homo sapiens
  misc_RNA (1)...(19): siRNA sense strand
uggcugugguuccgcaauu

SEQ ID NO: 413239 - RNA, 19 nt, Homo sapiens
  misc_RNA (1)...(19): siRNA sense strand
gacaugaguguagaccuuu

SEQ ID NO: 413240 - RNA, 19 nt, Homo sapiens
  misc_RNA (1)...(19): siRNA sense strand
ggagaggcagagaagaaau

SEQ ID NO: 413241 - RNA, 19 nt, Homo sapiens
  misc_RNA (1)...(19): siRNA sense strand
aaggagaggcagagaagaa

SEQ ID NO: 413242 - RNA, 19 nt, Homo sapiens
  misc_RNA (1)...(19): siRNA sense strand
caugcuggcugaagaugca

SEQ ID NO: 413243 - RNA, 19 nt, Homo sapiens
  misc_RNA (1)...(19): siRNA sense strand
uccagcauguggugacgua

SEQ ID NO: 413244 - RNA, 19 nt, Homo sapiens
  misc_RNA (1)...(19): siRNA sense strand
gggaagauuguggaugcua

SEQ ID NO: 413245 - RNA, 19 nt, Homo sapiens
  misc_RNA (1)...(19): siRNA sense strand
uggaggaagccuugacuau

SEQ ID NO: 413246 - RNA, 19 nt, Homo sapiens
  misc_RNA (1)...(19): siRNA sense strand
gaugaaaaggggaagauug

SEQ ID NO: 413247 - RNA, 19 nt, Homo sapiens
  misc_RNA (1)...(19): siRNA sense strand
ccagcucauuagccacuga

SEQ ID NO: 413248 - RNA, 19 nt, Homo sapiens
  misc_RNA (1)...(19): siRNA sense strand
ccaagagcauccuaaacga

SEQ ID NO: 413249 - RNA, 19 nt, Homo sapiens
  misc_RNA (1)...(19): siRNA sense strand
ccaaggaaagauugaauga

SEQ ID NO: 413250 - RNA, 19 nt, Homo sapiens
  misc_RNA (1)...(19): siRNA sense strand
gcaugaacccuggaccuuu

SEQ ID NO: 413251 - RNA, 19 nt, Homo sapiens
  misc_RNA (1)...(19): siRNA sense strand
ccuggaagcuuggcugaga

SEQ ID NO: 413252 - RNA, 19 nt, Homo sapiens
  misc_RNA (1)...(19): siRNA sense strand
ggagccacaucgcaacuac

SEQ ID NO: 413253 - RNA, 19 nt, Homo sapiens
  misc_RNA (1)...(19): siRNA sense strand
ucuacaaucccguggagua

SEQ ID NO: 413254 - RNA, 19 nt, Homo sapiens
  misc_RNA (1)...(19): siRNA sense strand
caugaacccuggaccuuuu

SEQ ID NO: 413255 - RNA, 19 nt, Homo sapiens
  misc_RNA (1)...(19): siRNA sense strand
ugccacugcuguugaaaug

SEQ ID NO: 413256 - RNA, 19 nt, Homo sapiens
  misc_RNA (1)...(19): siRNA sense strand
gaacagcuucuugggaucu

SEQ ID NO: 413257 - RNA, 19 nt, Homo sapiens
  misc_RNA (1)...(19): siRNA sense strand
aaucuaugcccucugcuuu

SEQ ID NO: 413258 - RNA, 19 nt, Homo sapiens
  misc_RNA (1)...(19): siRNA sense strand
ggaggcaguggccaaggaa

SEQ ID NO: 413259 - RNA, 19 nt, Homo sapiens
  misc_RNA (1)...(19): siRNA sense strand
ggagugcccacagucagaa

SEQ ID NO: 413260 - RNA, 19 nt, Homo sapiens
  misc_RNA (1)...(19): siRNA sense strand
gccaaggaaagauugaaug

SEQ ID NO: 413261 - RNA, 19 nt, Homo sapiens
  misc_RNA (1)...(19): siRNA sense strand
guggacagccugaggucuu

SEQ ID NO: 413262 - RNA, 19 nt, Homo sapiens
  misc_RNA (1)...(19): siRNA sense strand
gaggucuucuuccaucacu

SEQ ID NO: 413263 - RNA, 19 nt, Homo sapiens
  misc_RNA (1)...(19): siRNA sense strand
cuacaaucccguggaguau

SEQ ID NO: 413264 - RNA, 19 nt, Homo sapiens
  misc_RNA (1)...(19): siRNA sense strand
ggucuucuuccaucacugu

SEQ ID NO: 413265 - RNA, 19 nt, Homo sapiens
  misc_RNA (1)...(19): siRNA sense strand
ggacugguugggcauugug

SEQ ID NO: 413266 - RNA, 19 nt, Homo sapiens
  misc_RNA (1)...(19): siRNA sense strand
guacucuuccugggcauga

SEQ ID NO: 413267 - RNA, 19 nt, Homo sapiens
  misc_RNA (1)...(19): siRNA sense strand
ggccaaggaaagauugaau

SEQ ID NO: 413268 - RNA, 19 nt, Homo sapiens
  misc_RNA (1)...(19): siRNA sense strand
ggcaguggccaaggaaaga

SEQ ID NO: 413269 - RNA, 19 nt, Homo sapiens
  misc_RNA (1)...(19): siRNA sense strand
acaaucccguggaguaugc

SEQ ID NO: 413270 - RNA, 19 nt, Homo sapiens
  misc_RNA (1)...(19): siRNA sense strand
caaucuaugcccucugcuu

SEQ ID NO: 413271 - RNA, 19 nt, Homo sapiens
  misc_RNA (1)...(19): siRNA sense strand
ggaguggaaugaauuaauu

SEQ ID NO: 413272 - RNA, 19 nt, Homo sapiens
  misc_RNA (1)...(19): siRNA sense strand
ggaaugaucauguacauau

SEQ ID NO: 413273 - RNA, 19 nt, Homo sapiens
  misc_RNA (1)...(19): siRNA sense strand
gagaagaacuauggaucua

SEQ ID NO: 413274 - RNA, 19 nt, Homo sapiens
  misc_RNA (1)...(19): siRNA sense strand
ucacagagcugcacacagu

SEQ ID NO: 413275 - RNA, 19 nt, Homo sapiens
  misc_RNA (1)...(19): siRNA sense strand
caacacuucuggaucuuaa

SEQ ID NO: 413276 - RNA, 19 nt, Homo sapiens
  misc_RNA (1)...(19): siRNA sense strand
gauauuugccugaagauaa

SEQ ID NO: 413277 - RNA, 19 nt, Homo sapiens
  misc_RNA (1)...(19): siRNA sense strand
gaagaacuauggaucuaca

SEQ ID NO: 413278 - RNA, 19 nt, Homo sapiens
  misc_RNA (1)...(19): siRNA sense strand
uaacaacacuucuggaucu

SEQ ID NO: 413279 - RNA, 19 nt, Homo sapiens
  misc_RNA (1)...(19): siRNA sense strand
aaucagagguuugguagua

SEQ ID NO: 413280 - RNA, 19 nt, Homo sapiens
  misc_RNA (1)...(19): siRNA sense strand
gaauucaagucauccaaga

SEQ ID NO: 413281 - RNA, 19 nt, Homo sapiens
  misc_RNA (1)...(19): siRNA sense strand
gaaggagaaguaauuguuu

SEQ ID NO: 413282 - RNA, 19 nt, Homo sapiens
  misc_RNA (1)...(19): siRNA sense strand
caagaggcaauaccaauaa

SEQ ID NO: 413283 - RNA, 19 nt, Homo sapiens
  misc_RNA (1)...(19): siRNA sense strand
uaacaccaguuucuucaga

SEQ ID NO: 413284 - RNA, 19 nt, Homo sapiens
  misc_RNA (1)...(19): siRNA sense strand
aaauagaggcuucguguuu

SEQ ID NO: 413285 - RNA, 19 nt, Homo sapiens
  misc_RNA (1)...(19): siRNA sense strand
caagaguaaucaagucaga

SEQ ID NO: 413286 - RNA, 19 nt, Homo sapiens
  misc_RNA (1)...(19): siRNA sense strand
ccaagaggauggaaugauc

SEQ ID NO: 413287 - RNA, 19 nt, Homo sapiens
  misc_RNA (1)...(19): siRNA sense strand
ggaggcagguaucgagaug

SEQ ID NO: 413288 - RNA, 19 nt, Homo sapiens
  misc_RNA (1)...(19): siRNA sense strand
gcagucauuugcuuuaaag

SEQ ID NO: 413289 - RNA, 19 nt, Homo sapiens
  misc_RNA (1)...(19): siRNA sense strand
gcaauaccaauaaguucua

SEQ ID NO: 413290 - RNA, 19 nt, Homo sapiens
  misc_RNA (1)...(19): siRNA sense strand
ucaagaggcaauaccaaua

SEQ ID NO: 413291 - RNA, 19 nt, Homo sapiens
  misc_RNA (1)...(19): siRNA sense strand
guaucgagaugcuagaaug

SEQ ID NO: 413292 - RNA, 19 nt, Homo sapiens
  misc_RNA (1)...(19): siRNA sense strand
gccugaagauaaaguauug

SEQ ID NO: 413293 - RNA, 19 nt, Homo sapiens
  misc_RNA (1)...(19): siRNA sense strand
ucaggaagcugugcugugu

SEQ ID NO: 413294 - RNA, 19 nt, Homo sapiens
  misc_RNA (1)...(19): siRNA sense strand
gccuauaacuacugguaaa

SEQ ID NO: 413295 - RNA, 19 nt, Homo sapiens
  misc_RNA (1)...(19): siRNA sense strand
gaggauuuaccacugauaa

SEQ ID NO: 413296 - RNA, 19 nt, Homo sapiens
  misc_RNA (1)...(19): siRNA sense strand
gaaauagaggcuucguguu

SEQ ID NO: 413297 - RNA, 19 nt, Homo sapiens
  misc_RNA (1)...(19): siRNA sense strand
ugaaggagaaguaauuguu

SEQ ID NO: 413298 - RNA, 19 nt, Homo sapiens
  misc_RNA (1)...(19): siRNA sense strand
cgaugaaggagaaguaauu

SEQ ID NO: 413299 - RNA, 19 nt, Homo sapiens
  misc_RNA (1)...(19): siRNA sense strand
gaacuauggaucuacaaca

SEQ ID NO: 413300 - RNA, 19 nt, Homo sapiens
  misc_RNA (1)...(19): siRNA sense strand
gaauuccuccaucaucaaa

SEQ ID NO: 413301 - RNA, 19 nt, Homo sapiens
  misc_RNA (1)...(19): siRNA sense strand
ccaauaaguucuacaugcu

SEQ ID NO: 413302 - RNA, 19 nt, Homo sapiens
  misc_RNA (1)...(19): siRNA sense strand
gaggcaauaccaauaaguu

SEQ ID NO: 413303 - RNA, 19 nt, Homo sapiens
  misc_RNA (1)...(19): siRNA sense strand
caacauggagacuggaaga

SEQ ID NO: 413304 - RNA, 19 nt, Homo sapiens
  misc_RNA (1)...(19): siRNA sense strand
aagaauugauugccaagga

SEQ ID NO: 413305 - RNA, 19 nt, Homo sapiens
  misc_RNA (1)...(19): siRNA sense strand
gagaugcuagaaugaauga

SEQ ID NO: 413306 - RNA, 19 nt, Homo sapiens
  misc_RNA (1)...(19): siRNA sense strand
gagcugcacacaguaauga

SEQ ID NO: 413307 - RNA, 19 nt, Homo sapiens
  misc_RNA (1)...(19): siRNA sense strand
caagucagaggauuauaug

SEQ ID NO: 413308 - RNA, 19 nt, Homo sapiens
  misc_RNA (1)...(19): siRNA sense strand
ccaaaacacuuacuucaca

SEQ ID NO: 413309 - RNA, 19 nt, Homo sapiens
  misc_RNA (1)...(19): siRNA sense strand
gaggauggaaugaucaugu

SEQ ID NO: 413310 - RNA, 19 nt, Homo sapiens
  misc_RNA (1)...(19): siRNA sense strand
cuacaagaguaaucaaguc

SEQ ID NO: 413311 - RNA, 19 nt, Homo sapiens
  misc_RNA (1)...(19): siRNA sense strand
aauagaggcuucguguuug

SEQ ID NO: 413312 - RNA, 19 nt, Homo sapiens
  misc_RNA (1)...(19): siRNA sense strand
agaauugauugccaaggaa

SEQ ID NO: 413313 - RNA, 19 nt, Homo sapiens
  misc_RNA (1)...(19): siRNA sense strand
aaucauccauauaccgaaa

SEQ ID NO: 413314 - RNA, 19 nt, Homo sapiens
  misc_RNA (1)...(19): siRNA sense strand
ggagccagccuauaacuac

SEQ ID NO: 413315 - RNA, 19 nt, Homo sapiens
  misc_RNA (1)...(19): siRNA sense strand
aggauggaaugaucaugua

SEQ ID NO: 413316 - RNA, 19 nt, Homo sapiens
  misc_RNA (1)...(19): siRNA sense strand
cagaggauuauaugacuuu

SEQ ID NO: 413317 - RNA, 19 nt, Homo sapiens
  misc_RNA (1)...(19): siRNA sense strand
uggaggguauggauauuug

SEQ ID NO: 413318 - RNA, 19 nt, Homo sapiens
  misc_RNA (1)...(19): siRNA sense strand
ggaauuccuccaucaucaa

SEQ ID NO: 413319 - RNA, 19 nt, Homo sapiens
  misc_RNA (1)...(19): siRNA sense strand
guuaaucagagguuuggua

SEQ ID NO: 413320 - RNA, 19 nt, Homo sapiens
  misc_RNA (1)...(19): siRNA sense strand
gugcaacugucggaaauag

SEQ ID NO: 413321 - RNA, 19 nt, Homo sapiens
  misc_RNA (1)...(19): siRNA sense strand
ucaagucagaggauuauau

SEQ ID NO: 413322 - RNA, 19 nt, Homo sapiens
  misc_RNA (1)...(19): siRNA sense strand
ggauauuugccugaagaua

SEQ ID NO: 413323 - RNA, 19 nt, Homo sapiens
  misc_RNA (1)...(19): siRNA sense strand
guauggauauuugccugaa

SEQ ID NO: 413324 - RNA, 19 nt, Homo sapiens
  misc_RNA (1)...(19): siRNA sense strand
gaugaaggagaaguaauug

SEQ ID NO: 413325 - RNA, 19 nt, Homo sapiens
  misc_RNA (1)...(19): siRNA sense strand
ggccagccuucgagagcua

SEQ ID NO: 413326 - RNA, 19 nt, Homo sapiens
  misc_RNA (1)...(19): siRNA sense strand
aaagaaauguuagccaacu

SEQ ID NO: 413327 - RNA, 19 nt, Homo sapiens
  misc_RNA (1)...(19): siRNA sense strand
uauaacuacugguaaagca

SEQ ID NO: 413328 - RNA, 19 nt, Homo sapiens
  misc_RNA (1)...(19): siRNA sense strand
gaagcugugcugugugugu

SEQ ID NO: 413329 - RNA, 19 nt, Homo sapiens
  misc_RNA (1)...(19): siRNA sense strand
ugccagcgaugaaggagaa

SEQ ID NO: 413330 - RNA, 19 nt, Homo sapiens
  misc_RNA (1)...(19): siRNA sense strand
cuuggugucuggguauaua

SEQ ID NO: 413331 - RNA, 19 nt, Homo sapiens
  misc_RNA (1)...(19): siRNA sense strand
gggaguggaaugaauuaau

SEQ ID NO: 413332 - RNA, 19 nt, Homo sapiens
  misc_RNA (1)...(19): siRNA sense strand
gcaacugucggaaauagag

SEQ ID NO: 413333 - RNA, 19 nt, Homo sapiens
  misc_RNA (1)...(19): siRNA sense strand
ggaggauuuaccacugaua

SEQ ID NO: 413334 - RNA, 19 nt, Homo sapiens
  misc_RNA (1)...(19): siRNA sense strand
gaugcuagaaugaaugauc

SEQ ID NO: 413335 - RNA, 19 nt, Homo sapiens
  misc_RNA (1)...(19): siRNA sense strand
ugcacacaguaaugaaaua

SEQ ID NO: 413336 - RNA, 19 nt, Homo sapiens
  misc_RNA (1)...(19): siRNA sense strand
ggaggacaccauucaagag

SEQ ID NO: 413337 - RNA, 19 nt, Homo sapiens
  misc_RNA (1)...(19): siRNA sense strand
ucagaggauuauaugacuu

SEQ ID NO: 413338 - RNA, 19 nt, Homo sapiens
  misc_RNA (1)...(19): siRNA sense strand
cagcgaugaaggagaagua

SEQ ID NO: 413339 - RNA, 19 nt, Homo sapiens
  misc_RNA (1)...(19): siRNA sense strand
gcccaugccugugcaacug

SEQ ID NO: 413340 - RNA, 19 nt, Homo sapiens
  misc_RNA (1)...(19): siRNA sense strand
cagccuauaacuacuggua

SEQ ID NO: 413341 - RNA, 19 nt, Homo sapiens
  misc_RNA (1)...(19): siRNA sense strand
aagcugugcugugugugua

SEQ ID NO: 413342 - RNA, 19 nt, Homo sapiens
  misc_RNA (1)...(19): siRNA sense strand
ucugcgggcugacgacuug

SEQ ID NO: 413343 - RNA, 19 nt, Homo sapiens
  misc_RNA (1)...(19): siRNA sense strand
ucgagaugcuagaaugaau

SEQ ID NO: 413344 - RNA, 19 nt, Homo sapiens
  misc_RNA (1)...(19): siRNA sense strand
gaauugauugccaaggaau

SEQ ID NO: 413345 - RNA, 19 nt, Homo sapiens
  misc_RNA (1)...(19): siRNA sense strand
gcuacaagaguaaucaagu

SEQ ID NO: 413346 - RNA, 19 nt, Homo sapiens
  misc_RNA (1)...(19): siRNA sense strand
gauguuccuccuucuaugu

SEQ ID NO: 413347 - RNA, 19 nt, Homo sapiens
  misc_RNA (1)...(19): siRNA sense strand
caagaggauggaaugauca

SEQ ID NO: 413348 - RNA, 19 nt, Homo sapiens
  misc_RNA (1)...(19): siRNA sense strand
caaccaaaaucucuuguac

SEQ ID NO: 413349 - RNA, 19 nt, Homo sapiens
  misc_RNA (1)...(19): siRNA sense strand
caugggaguggaaugaauu

SEQ ID NO: 413350 - RNA, 19 nt, Homo sapiens
  misc_RNA (1)...(19): siRNA sense strand
gaucuuggcacucacuaac

SEQ ID NO: 413351 - RNA, 19 nt, Homo sapiens
  misc_RNA (1)...(19): siRNA sense strand
gcacacaguaaugaaauac

SEQ ID NO: 413352 - RNA, 19 nt, Homo sapiens
  misc_RNA (1)...(19): siRNA sense strand
gugauguuccuccuucuau

SEQ ID NO: 413353 - RNA, 19 nt, Homo sapiens
  misc_RNA (1)...(19): siRNA sense strand
gcugcacacaguaaugaaa

SEQ ID NO: 413354 - RNA, 19 nt, Homo sapiens
  misc_RNA (1)...(19): siRNA sense strand
acagagcugcacacaguaa

SEQ ID NO: 413355 - RNA, 19 nt, Homo sapiens
  misc_RNA (1)...(19): siRNA sense strand
ggugauguuccuccuucua

SEQ ID NO: 413356 - RNA, 19 nt, Homo sapiens
  misc_RNA (1)...(19): siRNA sense strand
aggaagcugugcugugugu

SEQ ID NO: 413357 - RNA, 19 nt, Homo sapiens
  misc_RNA (1)...(19): siRNA sense strand
gauggaaugaucauguaca

SEQ ID NO: 413358 - RNA, 19 nt, Homo sapiens
  misc_RNA (1)...(19): siRNA sense strand
gagguuugguaguaacaac

SEQ ID NO: 413359 - RNA, 19 nt, Homo sapiens
  misc_RNA (1)...(19): siRNA sense strand
acugauaaacagccacuaa

SEQ ID NO: 413360 - RNA, 19 nt, Homo sapiens
  misc_RNA (1)...(19): siRNA sense strand
ugauguuccuccuucuaug

SEQ ID NO: 413361 - RNA, 19 nt, Homo sapiens
  misc_RNA (1)...(19): siRNA sense strand
gagccagccuauaacuacu

SEQ ID NO: 413362 - RNA, 19 nt, Homo sapiens
  misc_RNA (1)...(19): siRNA sense strand
uuacagugggaaagaauug

SEQ ID NO: 413363 - RNA, 19 nt, Homo sapiens
  misc_RNA (1)...(19): siRNA sense strand
gguaguaacaacacuucug

SEQ ID NO: 413364 - RNA, 19 nt, Homo sapiens
  misc_RNA (1)...(19): siRNA sense strand
uuaucugccuagagaagaa

SEQ ID NO: 413365 - RNA, 19 nt, Homo sapiens
  misc_RNA (1)...(19): siRNA sense strand
caacuugcuuguccaucac

SEQ ID NO: 413366 - RNA, 19 nt, Homo sapiens
  misc_RNA (1)...(19): siRNA sense strand
ugauaaacagccacuaagu

SEQ ID NO: 413367 - RNA, 19 nt, Homo sapiens
  misc_RNA (1)...(19): siRNA sense strand
ucacuaacaccaguuucuu

SEQ ID NO: 413368 - RNA, 19 nt, Homo sapiens
  misc_RNA (1)...(19): siRNA sense strand
gcacucacuaacaccaguu

SEQ ID NO: 413369 - RNA, 19 nt, Homo sapiens
  misc_RNA (1)...(19): siRNA sense strand
acaugggaguggaaugaau

SEQ ID NO: 413370 - RNA, 19 nt, Homo sapiens
  misc_RNA (1)...(19): siRNA sense strand
auacaugggaguggaauga

SEQ ID NO: 413371 - RNA, 19 nt, Homo sapiens
  misc_RNA (1)...(19): siRNA sense strand
gaacugugguccaugguaa

SEQ ID NO: 413372 - RNA, 19 nt, Homo sapiens
  misc_RNA (1)...(19): siRNA sense strand
gugcuugucuccaaucuua

SEQ ID NO: 413373 - RNA, 19 nt, Homo sapiens
  misc_RNA (1)...(19): siRNA sense strand
ggagacaacucgagagaug

SEQ ID NO: 413374 - RNA, 19 nt, Homo sapiens
  misc_RNA (1)...(19): siRNA sense strand
ugacaagggugaggaguua

SEQ ID NO: 413375 - RNA, 19 nt, Homo sapiens
  misc_RNA (1)...(19): siRNA sense strand
guuaggaccuggaaaugua

SEQ ID NO: 413376 - RNA, 19 nt, Homo sapiens
  misc_RNA (1)...(19): siRNA sense strand
gaagagggcauucuaggau

SEQ ID NO: 413377 - RNA, 19 nt, Homo sapiens
  misc_RNA (1)...(19): siRNA sense strand
uaggugacauccuuucuuu

SEQ ID NO: 413378 - RNA, 19 nt, Homo sapiens
  misc_RNA (1)...(19): siRNA sense strand
aauaugagccgaggaaaua

SEQ ID NO: 413379 - RNA, 19 nt, Homo sapiens
  misc_RNA (1)...(19): siRNA sense strand
ccaacaauaggacgaaaua

SEQ ID NO: 413380 - RNA, 19 nt, Homo sapiens
  misc_RNA (1)...(19): siRNA sense strand
ugagaucuaugguacaguu

SEQ ID NO: 413381 - RNA, 19 nt, Homo sapiens
  misc_RNA (1)...(19): siRNA sense strand
gaagaguuauucucaagcu

SEQ ID NO: 413382 - RNA, 19 nt, Homo sapiens
  misc_RNA (1)...(19): siRNA sense strand
uuccuggucucuuuaguua

SEQ ID NO: 413383 - RNA, 19 nt, Homo sapiens
  misc_RNA (1)...(19): siRNA sense strand
ggaguuaggaccuggaaau

SEQ ID NO: 413384 - RNA, 19 nt, Homo sapiens
  misc_RNA (1)...(19): siRNA sense strand
gagccgaggaaauagcuua

SEQ ID NO: 413385 - RNA, 19 nt, Homo sapiens
  misc_RNA (1)...(19): siRNA sense strand
gaaauguacagaaagaagu

SEQ ID NO: 413386 - RNA, 19 nt, Homo sapiens
  misc_RNA (1)...(19): siRNA sense strand
gaauaugagccgaggaaau

SEQ ID NO: 413387 - RNA, 19 nt, Homo sapiens
  misc_RNA (1)...(19): siRNA sense strand
gcgaguauguugaccuauc

SEQ ID NO: 413388 - RNA, 19 nt, Homo sapiens
  misc_RNA (1)...(19): siRNA sense strand
gaaaugaagaguuauucuc

SEQ ID NO: 413389 - RNA, 19 nt, Homo sapiens
  misc_RNA (1)...(19): siRNA sense strand
ggaagagggcauucuagga

SEQ ID NO: 413390 - RNA, 19 nt, Homo sapiens
  misc_RNA (1)...(19): siRNA sense strand
gcacauugccaguaucgau

SEQ ID NO: 413391 - RNA, 19 nt, Homo sapiens
  misc_RNA (1)...(19): siRNA sense strand
gggaagacuuauuguugug

SEQ ID NO: 413392 - RNA, 19 nt, Homo sapiens
  misc_RNA (1)...(19): siRNA sense strand
ggaaauguacagaaagaag

SEQ ID NO: 413393 - RNA, 19 nt, Homo sapiens
  misc_RNA (1)...(19): siRNA sense strand
caacaacuguggucuugcu

SEQ ID NO: 413394 - RNA, 19 nt, Homo sapiens
  misc_RNA (1)...(19): siRNA sense strand
gcagagaauccaaguacug

SEQ ID NO: 413395 - RNA, 19 nt, Homo sapiens
  misc_RNA (1)...(19): siRNA sense strand
ggugacauccuuucuuugu

SEQ ID NO: 413396 - RNA, 19 nt, Homo sapiens
  misc_RNA (1)...(19): siRNA sense strand
caauauauacgucuuggau

SEQ ID NO: 413397 - RNA, 19 nt, Homo sapiens
  misc_RNA (1)...(19): siRNA sense strand
gucaacaacuguggucuug

SEQ ID NO: 413398 - RNA, 19 nt, Homo sapiens
  misc_RNA (1)...(19): siRNA sense strand
ucagcuuccuggucucuuu

SEQ ID NO: 413399 - RNA, 19 nt, Homo sapiens
  misc_RNA (1)...(19): siRNA sense strand
ccuggucucuuuaguuaug

SEQ ID NO: 413400 - RNA, 19 nt, Homo sapiens
  misc_RNA (1)...(19): siRNA sense strand
ggaacugugguccauggua

SEQ ID NO: 413401 - RNA, 19 nt, Homo sapiens
  misc_RNA (1)...(19): siRNA sense strand
agagggcauucuaggauuu

SEQ ID NO: 413402 - RNA, 19 nt, Homo sapiens
  misc_RNA (1)...(19): siRNA sense strand
ggacuuugugauuccauaa

SEQ ID NO: 413403 - RNA, 19 nt, Homo sapiens
  misc_RNA (1)...(19): siRNA sense strand
gggaauaugagccgaggaa

SEQ ID NO: 413404 - RNA, 19 nt, Homo sapiens
  misc_RNA (1)...(19): siRNA sense strand
cuggaaauguacagaaaga

SEQ ID NO: 413405 - RNA, 19 nt, Homo sapiens
  misc_RNA (1)...(19): siRNA sense strand
gcucagcacauugccagua

SEQ ID NO: 413406 - RNA, 19 nt, Homo sapiens
  misc_RNA (1)...(19): siRNA sense strand
ugggaagacuuauuguugu

SEQ ID NO: 413407 - RNA, 19 nt, Homo sapiens
  misc_RNA (1)...(19): siRNA sense strand
auauauacgucuuggauag

SEQ ID NO: 413408 - RNA, 19 nt, Homo sapiens
  misc_RNA (1)...(19): siRNA sense strand
gcugguggaugcccuccuu

SEQ ID NO: 413409 - RNA, 19 nt, Homo sapiens
  misc_RNA (1)...(19): siRNA sense strand
gagaugaucgcucguucug

SEQ ID NO: 413410 - RNA, 19 nt, Homo sapiens
  misc_RNA (1)...(19): siRNA sense strand
caucacacaucccuuccau

SEQ ID NO: 413411 - RNA, 19 nt, Homo sapiens
  misc_RNA (1)...(19): siRNA sense strand
gaucuaugguacaguucau

SEQ ID NO: 413412 - RNA, 19 nt, Homo sapiens
  misc_RNA (1)...(19): siRNA sense strand
uauguugaccuaucccuuu

SEQ ID NO: 413413 - RNA, 19 nt, Homo sapiens
  misc_RNA (1)...(19): siRNA sense strand
uaccaugaaugaaaugaag

SEQ ID NO: 413414 - RNA, 19 nt, Homo sapiens
  misc_RNA (1)...(19): siRNA sense strand
aagagggcauucuaggauu

SEQ ID NO: 413415 - RNA, 19 nt, Homo sapiens
  misc_RNA (1)...(19): siRNA sense strand
uggccuaccucgucaauac

SEQ ID NO: 413416 - RNA, 19 nt, Homo sapiens
  misc_RNA (1)...(19): siRNA sense strand
ggaagacuuauuguuguga

SEQ ID NO: 413417 - RNA, 19 nt, Homo sapiens
  misc_RNA (1)...(19): siRNA sense strand
ggguuucuaccaugaauga

SEQ ID NO: 413418 - RNA, 19 nt, Homo sapiens
  misc_RNA (1)...(19): siRNA sense strand
ugugguccaugguaaaguu

SEQ ID NO: 413419 - RNA, 19 nt, Homo sapiens
  misc_RNA (1)...(19): siRNA sense strand
guaacucacuggccuaccu

SEQ ID NO: 413420 - RNA, 19 nt, Homo sapiens
  misc_RNA (1)...(19): siRNA sense strand
gccucuuccuccaacaaua

SEQ ID NO: 413421 - RNA, 19 nt, Homo sapiens
  misc_RNA (1)...(19): siRNA sense strand
acaguucauuggcagagaa

SEQ ID NO: 413422 - RNA, 19 nt, Homo sapiens
  misc_RNA (1)...(19): siRNA sense strand
guugugaccugaaaauguu

SEQ ID NO: 413423 - RNA, 19 nt, Homo sapiens
  misc_RNA (1)...(19): siRNA sense strand
acagaaagaagucucaucu

SEQ ID NO: 413424 - RNA, 19 nt, Homo sapiens
  misc_RNA (1)...(19): siRNA sense strand
ggaauaugagccgaggaaa

SEQ ID NO: 413425 - RNA, 19 nt, Homo sapiens
  misc_RNA (1)...(19): siRNA sense strand
gcucauguacgugaaagug

SEQ ID NO: 413426 - RNA, 19 nt, Homo sapiens
  misc_RNA (1)...(19): siRNA sense strand
gaccuggaaauguacagaa

SEQ ID NO: 413427 - RNA, 19 nt, Homo sapiens
  misc_RNA (1)...(19): siRNA sense strand
cagcuuccuggucucuuua

SEQ ID NO: 413428 - RNA, 19 nt, Homo sapiens
  misc_RNA (1)...(19): siRNA sense strand
ucuuauggcugucaacaac

SEQ ID NO: 413429 - RNA, 19 nt, Homo sapiens
  misc_RNA (1)...(19): siRNA sense strand
uugcgaguauguugaccua

SEQ ID NO: 413430 - RNA, 19 nt, Homo sapiens
  misc_RNA (1)...(19): siRNA sense strand
gugacauccuuucuuugug

SEQ ID NO: 413431 - RNA, 19 nt, Homo sapiens
  misc_RNA (1)...(19): siRNA sense strand
caacaauaggacgaaauau

SEQ ID NO: 413432 - RNA, 19 nt, Homo sapiens
  misc_RNA (1)...(19): siRNA sense strand
cugcuacccucaucacaca

SEQ ID NO: 413433 - RNA, 19 nt, Homo sapiens
  misc_RNA (1)...(19): siRNA sense strand
gagacaacucgagagauga

SEQ ID NO: 413434 - RNA, 19 nt, Homo sapiens
  misc_RNA (1)...(19): siRNA sense strand
ugucccagccgcucaugua

SEQ ID NO: 413435 - RNA, 19 nt, Homo sapiens
  misc_RNA (1)...(19): siRNA sense strand
gaguuaggaccuggaaaug

SEQ ID NO: 413436 - RNA, 19 nt, Homo sapiens
  misc_RNA (1)...(19): siRNA sense strand
uugggaagacuuauuguug

SEQ ID NO: 413437 - RNA, 19 nt, Homo sapiens
  misc_RNA (1)...(19): siRNA sense strand
guugaccuaucccuuugug

SEQ ID NO: 413438 - RNA, 19 nt, Homo sapiens
  misc_RNA (1)...(19): siRNA sense strand
caugugaucacucugagau

SEQ ID NO: 413439 - RNA, 19 nt, Homo sapiens
  misc_RNA (1)...(19): siRNA sense strand
uuauuguugugaccugaaa

SEQ ID NO: 413440 - RNA, 19 nt, Homo sapiens
  misc_RNA (1)...(19): siRNA sense strand
ccaaucuuauggcugucaa

SEQ ID NO: 413441 - RNA, 19 nt, Homo sapiens
  misc_RNA (1)...(19): siRNA sense strand
gaccuaucccuuugugcuu

SEQ ID NO: 413442 - RNA, 19 nt, Homo sapiens
  misc_RNA (1)...(19): siRNA sense strand
ggugggauaugagccucuu

SEQ ID NO: 413443 - RNA, 19 nt, Homo sapiens
  misc_RNA (1)...(19): siRNA sense strand
gugauuccauaauaaccau

SEQ ID NO: 413444 - RNA, 19 nt, Homo sapiens
  misc_RNA (1)...(19): siRNA sense strand
cagagaauccaaguacugu

SEQ ID NO: 413445 - RNA, 19 nt, Homo sapiens
  misc_RNA (1)...(19): siRNA sense strand
ccuucuaggugacauccuu

SEQ ID NO: 413446 - RNA, 19 nt, Homo sapiens
  misc_RNA (1)...(19): siRNA sense strand
ccuuugugcuugucuccaa

SEQ ID NO: 413447 - RNA, 19 nt, Homo sapiens
  misc_RNA (1)...(19): siRNA sense strand
gugacaagggugaggaguu

SEQ ID NO: 413448 - RNA, 19 nt, Homo sapiens
  misc_RNA (1)...(19): siRNA sense strand
gcaagugugucagcuuccu

SEQ ID NO: 413449 - RNA, 19 nt, Homo sapiens
  misc_RNA (1)...(19): siRNA sense strand
augaagaguuauucucaag

SEQ ID NO: 413450 - RNA, 19 nt, Homo sapiens
  misc_RNA (1)...(19): siRNA sense strand
gaggaguuaggaccuggaa

SEQ ID NO: 413451 - RNA, 19 nt, Homo sapiens
  misc_RNA (1)...(19): siRNA sense strand
cucagcacauugccaguau

SEQ ID NO: 413452 - RNA, 19 nt, Homo sapiens
  misc_RNA (1)...(19): siRNA sense strand
gagccucuuccuccaacaa

SEQ ID NO: 413453 - RNA, 19 nt, Homo sapiens
  misc_RNA (1)...(19): siRNA sense strand
uggcagagaauccaaguac

SEQ ID NO: 413454 - RNA, 19 nt, Homo sapiens
  misc_RNA (1)...(19): siRNA sense strand
accuggaaauguacagaaa

SEQ ID NO: 413455 - RNA, 19 nt, Homo sapiens
  misc_RNA (1)...(19): siRNA sense strand
gaaaggaucuuguucauau

SEQ ID NO: 413456 - RNA, 19 nt, Homo sapiens
  misc_RNA (1)...(19): siRNA sense strand
ggaaggaaauacuagaaga

SEQ ID NO: 413457 - RNA, 19 nt, Homo sapiens
  misc_RNA (1)...(19): siRNA sense strand
ggaagcuccucucagguua

SEQ ID NO: 413458 - RNA, 19 nt, Homo sapiens
  misc_RNA (1)...(19): siRNA sense strand
acacggaccuugaggaauu

SEQ ID NO: 413459 - RNA, 19 nt, Homo sapiens
  misc_RNA (1)...(19): siRNA sense strand
ggccagggcuucagcagaa

SEQ ID NO: 413460 - RNA, 19 nt, Homo sapiens
  misc_RNA (1)...(19): siRNA sense strand
gaaggaaauacuagaagaa

SEQ ID NO: 413461 - RNA, 19 nt, Homo sapiens
  misc_RNA (1)...(19): siRNA sense strand
ucucgucacuccuuucuuu

SEQ ID NO: 413462 - RNA, 19 nt, Homo sapiens
  misc_RNA (1)...(19): siRNA sense strand
ugagauaccugcaguuugc

SEQ ID NO: 413463 - RNA, 19 nt, Homo sapiens
  misc_RNA (1)...(19): siRNA sense strand
caaccugggauucaaauga

SEQ ID NO: 413464 - RNA, 19 nt, Homo sapiens
  misc_RNA (1)...(19): siRNA sense strand
caacacggaccuugaggaa

SEQ ID NO: 413465 - RNA, 19 nt, Homo sapiens
  misc_RNA (1)...(19): siRNA sense strand
ggaccaacacgaagugaga

SEQ ID NO: 413466 - RNA, 19 nt, Homo sapiens
  misc_RNA (1)...(19): siRNA sense strand
ccgcagaggugcugugcaa

SEQ ID NO: 413467 - RNA, 19 nt, Homo sapiens
  misc_RNA (1)...(19): siRNA sense strand
caggacaacuacaccuuug

SEQ ID NO: 413468 - RNA, 19 nt, Homo sapiens
  misc_RNA (1)...(19): siRNA sense strand
gcaccuggaccaacacgaa

SEQ ID NO: 413469 - RNA, 19 nt, Homo sapiens
  misc_RNA (1)...(19): siRNA sense strand
gaggaaggaaauacuagaa

SEQ ID NO: 413470 - RNA, 19 nt, Homo sapiens
  misc_RNA (1)...(19): siRNA sense strand
acaggcagauccacauaga

SEQ ID NO: 413471 - RNA, 19 nt, Homo sapiens
  misc_RNA (1)...(19): siRNA sense strand
ugaacaaccugcugaugag

SEQ ID NO: 413472 - RNA, 19 nt, Homo sapiens
  misc_RNA (1)...(19): siRNA sense strand
gaacucgugagccggauug

SEQ ID NO: 413473 - RNA, 19 nt, Homo sapiens
  misc_RNA (1)...(19): siRNA sense strand
ggaggaaggaaauacuaga

SEQ ID NO: 413474 - RNA, 19 nt, Homo sapiens
  misc_RNA (1)...(19): siRNA sense strand
cccaaucacuacaagaaau

SEQ ID NO: 413475 - RNA, 19 nt, Homo sapiens
  misc_RNA (1)...(19): siRNA sense strand
ccaagagggucagcaccuu

SEQ ID NO: 413476 - RNA, 19 nt, Homo sapiens
  misc_RNA (1)...(19): siRNA sense strand
gcagaggugcugugcaaca

SEQ ID NO: 413477 - RNA, 19 nt, Homo sapiens
  misc_RNA (1)...(19): siRNA sense strand
ccaaccgugugcugcguaa

SEQ ID NO: 413478 - RNA, 19 nt, Homo sapiens
  misc_RNA (1)...(19): siRNA sense strand
gcaccuuccaggaguuuga

SEQ ID NO: 413479 - RNA, 19 nt, Homo sapiens
  misc_RNA (1)...(19): siRNA sense strand
gagauggaggaaggaaaua

SEQ ID NO: 413480 - RNA, 19 nt, Homo sapiens
  misc_RNA (1)...(19): siRNA sense strand
ccucccggcucgacaaguu

SEQ ID NO: 413481 - RNA, 19 nt, Homo sapiens
  misc_RNA (1)...(19): siRNA sense strand
gcagauccacauagacauc

SEQ ID NO: 413482 - RNA, 19 nt, Homo sapiens
  misc_RNA (1)...(19): siRNA sense strand
cacggaccuugaggaauua

SEQ ID NO: 413483 - RNA, 19 nt, Homo sapiens
  misc_RNA (1)...(19): siRNA sense strand
uauaaaugaucucgucacu

SEQ ID NO: 413484 - RNA, 19 nt, Homo sapiens
  misc_RNA (1)...(19): siRNA sense strand
gagccggauugaugagcaa

SEQ ID NO: 413485 - RNA, 19 nt, Homo sapiens
  misc_RNA (1)...(19): siRNA sense strand
auagacaucccucgcauga

SEQ ID NO: 413486 - RNA, 19 nt, Homo sapiens
  misc_RNA (1)...(19): siRNA sense strand
ucaggacaacuacaccuuu

SEQ ID NO: 413487 - RNA, 19 nt, Homo sapiens
  misc_RNA (1)...(19): siRNA sense strand
gaacuccgagguggucaug

SEQ ID NO: 413488 - RNA, 19 nt, Homo sapiens
  misc_RNA (1)...(19): siRNA sense strand
ccaaucacuacaagaaaug

SEQ ID NO: 413489 - RNA, 19 nt, Homo sapiens
  misc_RNA (1)...(19): siRNA sense strand
ggccuaccgccucaaguuu

SEQ ID NO: 413490 - RNA, 19 nt, Homo sapiens
  misc_RNA (1)...(19): siRNA sense strand
ggacggcuuuucucauuuc

SEQ ID NO: 413491 - RNA, 19 nt, Homo sapiens
  misc_RNA (1)...(19): siRNA sense strand
gaggaauuacggagguuga

SEQ ID NO: 413492 - RNA, 19 nt, Homo sapiens
  misc_RNA (1)...(19): siRNA sense strand
aaaggaucuuguucauaug

SEQ ID NO: 413493 - RNA, 19 nt, Homo sapiens
  misc_RNA (1)...(19): siRNA sense strand
acuguuacauggcacuuug

SEQ ID NO: 413494 - RNA, 19 nt, Homo sapiens
  misc_RNA (1)...(19): siRNA sense strand
ugagauggaggaaggaaau

SEQ ID NO: 413495 - RNA, 19 nt, Homo sapiens
  misc_RNA (1)...(19): siRNA sense strand
uuucucauuuccacuugua

SEQ ID NO: 413496 - RNA, 19 nt, Homo sapiens
  misc_RNA (1)...(19): siRNA sense strand
uugcauuuauugagcacua

SEQ ID NO: 413497 - RNA, 19 nt, Homo sapiens
  misc_RNA (1)...(19): siRNA sense strand
uggaagcuccucucagguu

SEQ ID NO: 413498 - RNA, 19 nt, Homo sapiens
  misc_RNA (1)...(19): siRNA sense strand
gaugaacaaccugcugaug

SEQ ID NO: 413499 - RNA, 19 nt, Homo sapiens
  misc_RNA (1)...(19): siRNA sense strand
cgucacuccuuucuuugug

SEQ ID NO: 413500 - RNA, 19 nt, Homo sapiens
  misc_RNA (1)...(19): siRNA sense strand
cagcauccagcacguguau

SEQ ID NO: 413501 - RNA, 19 nt, Homo sapiens
  misc_RNA (1)...(19): siRNA sense strand
ggacaccuaccagucugaa

SEQ ID NO: 413502 - RNA, 19 nt, Homo sapiens
  misc_RNA (1)...(19): siRNA sense strand
ggacacauacaggcagauc

SEQ ID NO: 413503 - RNA, 19 nt, Homo sapiens
  misc_RNA (1)...(19): siRNA sense strand
cagaggugcugugcaacau

SEQ ID NO: 413504 - RNA, 19 nt, Homo sapiens
  misc_RNA (1)...(19): siRNA sense strand
gcauccagcacguguaugg

SEQ ID NO: 413505 - RNA, 19 nt, Homo sapiens
  misc_RNA (1)...(19): siRNA sense strand
gcauuuauugagcacuauu

SEQ ID NO: 413506 - RNA, 19 nt, Homo sapiens
  misc_RNA (1)...(19): siRNA sense strand
uccaggaguuugagagcaa

SEQ ID NO: 413507 - RNA, 19 nt, Homo sapiens
  misc_RNA (1)...(19): siRNA sense strand
augaacaaccugcugauga

SEQ ID NO: 413508 - RNA, 19 nt, Homo sapiens
  misc_RNA (1)...(19): siRNA sense strand
uggauggcauucaggacaa

SEQ ID NO: 413509 - RNA, 19 nt, Homo sapiens
  misc_RNA (1)...(19): siRNA sense strand
uuauugagcacuauuacga

SEQ ID NO: 413510 - RNA, 19 nt, Homo sapiens
  misc_RNA (1)...(19): siRNA sense strand
guccuguccugcagaaagu

SEQ ID NO: 413511 - RNA, 19 nt, Homo sapiens
  misc_RNA (1)...(19): siRNA sense strand
ugagcacuauuacgauucu

SEQ ID NO: 413512 - RNA, 19 nt, Homo sapiens
  misc_RNA (1)...(19): siRNA sense strand
auugagcacuauuacgauu

SEQ ID NO: 413513 - RNA, 19 nt, Homo sapiens
  misc_RNA (1)...(19): siRNA sense strand
gagcacuauuacgauucua

SEQ ID NO: 413514 - RNA, 19 nt, Homo sapiens
  misc_RNA (1)...(19): siRNA sense strand
auacaggcagauccacaua

SEQ ID NO: 413515 - RNA, 19 nt, Homo sapiens
  misc_RNA (1)...(19): siRNA sense strand
gaaguucaccaggacacau

SEQ ID NO: 413516 - RNA, 19 nt, Homo sapiens
  misc_RNA (1)...(19): siRNA sense strand
ggaagcgcagcaacagcaa

SEQ ID NO: 413517 - RNA, 19 nt, Homo sapiens
  misc_RNA (1)...(19): siRNA sense strand
gcagcauccagcacgugua

SEQ ID NO: 413518 - RNA, 19 nt, Homo sapiens
  misc_RNA (1)...(19): siRNA sense strand
gugagauaccugcaguuug

SEQ ID NO: 413519 - RNA, 19 nt, Homo sapiens
  misc_RNA (1)...(19): siRNA sense strand
acuccgagguggucaugga

SEQ ID NO: 413520 - RNA, 19 nt, Homo sapiens
  misc_RNA (1)...(19): siRNA sense strand
uuuguggucuucauuugug

SEQ ID NO: 413521 - RNA, 19 nt, Homo sapiens
  misc_RNA (1)...(19): siRNA sense strand
ucuuuguggucuucauuug

SEQ ID NO: 413522 - RNA, 19 nt, Homo sapiens
  misc_RNA (1)...(19): siRNA sense strand
guucaggguauaaaugauc

SEQ ID NO: 413523 - RNA, 19 nt, Homo sapiens
  misc_RNA (1)...(19): siRNA sense strand
ccggacggcuuuucucauu

SEQ ID NO: 413524 - RNA, 19 nt, Homo sapiens
  misc_RNA (1)...(19): siRNA sense strand
gccuuccgcuggaugaaca

SEQ ID NO: 413525 - RNA, 19 nt, Homo sapiens
  misc_RNA (1)...(19): siRNA sense strand
gaucucgucacuccuuucu

SEQ ID NO: 413526 - RNA, 19 nt, Homo sapiens
  misc_RNA (1)...(19): siRNA sense strand
cagaacagcugcuacauca

SEQ ID NO: 413527 - RNA, 19 nt, Homo sapiens
  misc_RNA (1)...(19): siRNA sense strand
acaaggagaucuucugcaa

SEQ ID NO: 413528 - RNA, 19 nt, Homo sapiens
  misc_RNA (1)...(19): siRNA sense strand
cggaacagcugcagguuau

SEQ ID NO: 413529 - RNA, 19 nt, Homo sapiens
  misc_RNA (1)...(19): siRNA sense strand
gaacagcugcuacaucaag

SEQ ID NO: 413530 - RNA, 19 nt, Homo sapiens
  misc_RNA (1)...(19): siRNA sense strand
caggagcucuggacaagga

SEQ ID NO: 413531 - RNA, 19 nt, Homo sapiens
  misc_RNA (1)...(19): siRNA sense strand
gauaucugcucaaggucaa

SEQ ID NO: 413532 - RNA, 19 nt, Homo sapiens
  misc_RNA (1)...(19): siRNA sense strand
gcugcuacaucaagaacaa

SEQ ID NO: 413533 - RNA, 19 nt, Homo sapiens
  misc_RNA (1)...(19): siRNA sense strand
ccucaaagccgauauggau

SEQ ID NO: 413534 - RNA, 19 nt, Homo sapiens
  misc_RNA (1)...(19): siRNA sense strand
gcggaacagcugcagguua

SEQ ID NO: 413535 - RNA, 19 nt, Homo sapiens
  misc_RNA (1)...(19): siRNA sense strand
ggaccgauaucugcucaag

SEQ ID NO: 413536 - RNA, 19 nt, Homo sapiens
  misc_RNA (1)...(19): siRNA sense strand
ggucaggccuccccaugua

SEQ ID NO: 413537 - RNA, 19 nt, Homo sapiens
  misc_RNA (1)...(19): siRNA sense strand
ccacuacgacaccaugauu

SEQ ID NO: 413538 - RNA, 19 nt, Homo sapiens
  misc_RNA (1)...(19): siRNA sense strand
ggcaggagcucuggacaag

SEQ ID NO: 413539 - RNA, 19 nt, Homo sapiens
  misc_RNA (1)...(19): siRNA sense strand
ucgagauccuggaccgaua

SEQ ID NO: 413540 - RNA, 19 nt, Homo sapiens
  misc_RNA (1)...(19): siRNA sense strand
ucugcaagauggacuacuu

SEQ ID NO: 413541 - RNA, 19 nt, Homo sapiens
  misc_RNA (1)...(19): siRNA sense strand
cugcacggcuacauugaga

SEQ ID NO: 413542 - RNA, 19 nt, Homo sapiens
  misc_RNA (1)...(19): siRNA sense strand
gaacagcugcagguuaugc

SEQ ID NO: 413543 - RNA, 19 nt, Homo sapiens
  misc_RNA (1)...(19): siRNA sense strand
ggacuacuucagccgauuc

SEQ ID NO: 413544 - RNA, 19 nt, Homo sapiens
  misc_RNA (1)...(19): siRNA sense strand
gcacggcuacauugagagu

SEQ ID NO: 413545 - RNA, 19 nt, Homo sapiens
  misc_RNA (1)...(19): siRNA sense strand
ugcagaagcuggcggacau

SEQ ID NO: 413546 - RNA, 19 nt, Homo sapiens
  misc_RNA (1)...(19): siRNA sense strand
cuacauugagagucaggua

SEQ ID NO: 413547 - RNA, 19 nt, Homo sapiens
  misc_RNA (1)...(19): siRNA sense strand
accgauaucugcucaaggu

SEQ ID NO: 413548 - RNA, 19 nt, Homo sapiens
  misc_RNA (1)...(19): siRNA sense strand
ccucggaacaggacaguca

SEQ ID NO: 413549 - RNA, 19 nt, Homo sapiens
  misc_RNA (1)...(19): siRNA sense strand
gauccuggaccgauaucug

SEQ ID NO: 413550 - RNA, 19 nt, Homo sapiens
  misc_RNA (1)...(19): siRNA sense strand
gaccacccgcugucuugaa

SEQ ID NO: 413551 - RNA, 19 nt, Homo sapiens
  misc_RNA (1)...(19): siRNA sense strand
ccuaccaccuggccugcuu

SEQ ID NO: 413552 - RNA, 19 nt, Homo sapiens
  misc_RNA (1)...(19): siRNA sense strand
auccaggugugguuucaaa

SEQ ID NO: 413553 - RNA, 19 nt, Homo sapiens
  misc_RNA (1)...(19): siRNA sense strand
cgagauccuggaccgauau

SEQ ID NO: 413554 - RNA, 19 nt, Homo sapiens
  misc_RNA (1)...(19): siRNA sense strand
gcaccaagcucccuaagca

SEQ ID NO: 413555 - RNA, 19 nt, Homo sapiens
  misc_RNA (1)...(19): siRNA sense strand
gcaaauaccggaccuucua

SEQ ID NO: 413556 - RNA, 19 nt, Homo sapiens
  misc_RNA (1)...(19): siRNA sense strand
gagaaagguaugacucuua

SEQ ID NO: 413557 - RNA, 19 nt, Homo sapiens
  misc_RNA (1)...(19): siRNA sense strand
gaaaggauccaguuugugu

SEQ ID NO: 413558 - RNA, 19 nt, Homo sapiens
  misc_RNA (1)...(19): siRNA sense strand
gcaaagaggauccagagaa

SEQ ID NO: 413559 - RNA, 19 nt, Homo sapiens
  misc_RNA (1)...(19): siRNA sense strand
gcaguauucucaacaacaa

SEQ ID NO: 413560 - RNA, 19 nt, Homo sapiens
  misc_RNA (1)...(19): siRNA sense strand
caaagaggauccagagaag

SEQ ID NO: 413561 - RNA, 19 nt, Homo sapiens
  misc_RNA (1)...(19): siRNA sense strand
gcaauggcaugaagcagau

SEQ ID NO: 413562 - RNA, 19 nt, Homo sapiens
  misc_RNA (1)...(19): siRNA sense strand
ccaagaagaagaagagaaa

SEQ ID NO: 413563 - RNA, 19 nt, Homo sapiens
  misc_RNA (1)...(19): siRNA sense strand
acaacaagcucaucagcaa

SEQ ID NO: 413564 - RNA, 19 nt, Homo sapiens
  misc_RNA (1)...(19): siRNA sense strand
caacagcgacucagacaau

SEQ ID NO: 413565 - RNA, 19 nt, Homo sapiens
  misc_RNA (1)...(19): siRNA sense strand
gcaagaagagucaggacaa

SEQ ID NO: 413566 - RNA, 19 nt, Homo sapiens
  misc_RNA (1)...(19): siRNA sense strand
agaaagguaugacucuuau

SEQ ID NO: 413567 - RNA, 19 nt, Homo sapiens
  misc_RNA (1)...(19): siRNA sense strand
ggagaaagguaugacucuu

SEQ ID NO: 413568 - RNA, 19 nt, Homo sapiens
  misc_RNA (1)...(19): siRNA sense strand
gaaccaagaagaagaagag

SEQ ID NO: 413569 - RNA, 19 nt, Homo sapiens
  misc_RNA (1)...(19): siRNA sense strand
caagaaguccucccucaug

SEQ ID NO: 413570 - RNA, 19 nt, Homo sapiens
  misc_RNA (1)...(19): siRNA sense strand
gcaccgaggcuguggagaa

SEQ ID NO: 413571 - RNA, 19 nt, Homo sapiens
  misc_RNA (1)...(19): siRNA sense strand
ccacuuugcagucgacaua

SEQ ID NO: 413572 - RNA, 19 nt, Homo sapiens
  misc_RNA (1)...(19): siRNA sense strand
uagauauggugccgcauuu

SEQ ID NO: 413573 - RNA, 19 nt, Homo sapiens
  misc_RNA (1)...(19): siRNA sense strand
gaucugacccaggaaauug

SEQ ID NO: 413574 - RNA, 19 nt, Homo sapiens
  misc_RNA (1)...(19): siRNA sense strand
agauggaaauggccuauga

SEQ ID NO: 413575 - RNA, 19 nt, Homo sapiens
  misc_RNA (1)...(19): siRNA sense strand
gaaauugccauggagcauu

SEQ ID NO: 413576 - RNA, 19 nt, Homo sapiens
  misc_RNA (1)...(19): siRNA sense strand
gguaugguauggccacuuc

SEQ ID NO: 413577 - RNA, 19 nt, Homo sapiens
  misc_RNA (1)...(19): siRNA sense strand
uguguucucugugcaaaua

SEQ ID NO: 413578 - RNA, 19 nt, Homo sapiens
  misc_RNA (1)...(19): siRNA sense strand
aaagguaugacucuuauga

SEQ ID NO: 413579 - RNA, 19 nt, Homo sapiens
  misc_RNA (1)...(19): siRNA sense strand
ugaagaccauggaucacaa

SEQ ID NO: 413580 - RNA, 19 nt, Homo sapiens
  misc_RNA (1)...(19): siRNA sense strand
gauuauggauauggaacuu

SEQ ID NO: 413581 - RNA, 19 nt, Homo sapiens
  misc_RNA (1)...(19): siRNA sense strand
ucacuaacaagaccaagaa

SEQ ID NO: 413582 - RNA, 19 nt, Homo sapiens
  misc_RNA (1)...(19): siRNA sense strand
gcucagcccaccugugauu

SEQ ID NO: 413583 - RNA, 19 nt, Homo sapiens
  misc_RNA (1)...(19): siRNA sense strand
ugacacaaaugcaaacacu

SEQ ID NO: 413584 - RNA, 19 nt, Homo sapiens
  misc_RNA (1)...(19): siRNA sense strand
gaauuaaccagcgcuuaga

SEQ ID NO: 413585 - RNA, 19 nt, Homo sapiens
  misc_RNA (1)...(19): siRNA sense strand
ggauccaguuuguguguuc

SEQ ID NO: 413586 - RNA, 19 nt, Homo sapiens
  misc_RNA (1)...(19): siRNA sense strand
ugagugagcgcgaccugua

SEQ ID NO: 413587 - RNA, 19 nt, Homo sapiens
  misc_RNA (1)...(19): siRNA sense strand
gagagaagaaggcaaagag

SEQ ID NO: 413588 - RNA, 19 nt, Homo sapiens
  misc_RNA (1)...(19): siRNA sense strand
caccugugauuauggauau

SEQ ID NO: 413589 - RNA, 19 nt, Homo sapiens
  misc_RNA (1)...(19): siRNA sense strand
gggaaaugccuagcucuga

SEQ ID NO: 413590 - RNA, 19 nt, Homo sapiens
  misc_RNA (1)...(19): siRNA sense strand
gagaggaugaggagggaaa

SEQ ID NO: 413591 - RNA, 19 nt, Homo sapiens
  misc_RNA (1)...(19): siRNA sense strand
gccuagcucugacacaaau

SEQ ID NO: 413592 - RNA, 19 nt, Homo sapiens
  misc_RNA (1)...(19): siRNA sense strand
agaagcaucugaagaccau

SEQ ID NO: 413593 - RNA, 19 nt, Homo sapiens
  misc_RNA (1)...(19): siRNA sense strand
agacagaggagcuccgaaa

SEQ ID NO: 413594 - RNA, 19 nt, Homo sapiens
  misc_RNA (1)...(19): siRNA sense strand
ccagccaucuugacagcaa

SEQ ID NO: 413595 - RNA, 19 nt, Homo sapiens
  misc_RNA (1)...(19): siRNA sense strand
caagaagagucaggacaag

SEQ ID NO: 413596 - RNA, 19 nt, Homo sapiens
  misc_RNA (1)...(19): siRNA sense strand
gaucugaaaccacuuugca

SEQ ID NO: 413597 - RNA, 19 nt, Homo sapiens
  misc_RNA (1)...(19): siRNA sense strand
ccgcuuugguuucggguuu

SEQ ID NO: 413598 - RNA, 19 nt, Homo sapiens
  misc_RNA (1)...(19): siRNA sense strand
gcucugacacaaaugcaaa

SEQ ID NO: 413599 - RNA, 19 nt, Homo sapiens
  misc_RNA (1)...(19): siRNA sense strand
aggaguacgucacuaacaa

SEQ ID NO: 413600 - RNA, 19 nt, Homo sapiens
  misc_RNA (1)...(19): siRNA sense strand
guacggcucagguggagaa

SEQ ID NO: 413601 - RNA, 19 nt, Homo sapiens
  misc_RNA (1)...(19): siRNA sense strand
ggaacucugggacaaauag

SEQ ID NO: 413602 - RNA, 19 nt, Homo sapiens
  misc_RNA (1)...(19): siRNA sense strand
ccacaaggaacacuuuaag

SEQ ID NO: 413603 - RNA, 19 nt, Homo sapiens
  misc_RNA (1)...(19): siRNA sense strand
ggagagaagaaggcaaaga

SEQ ID NO: 413604 - RNA, 19 nt, Homo sapiens
  misc_RNA (1)...(19): siRNA sense strand
gaaccgcaggcucaugaug

SEQ ID NO: 413605 - RNA, 19 nt, Homo sapiens
  misc_RNA (1)...(19): siRNA sense strand
uaagcagacggcugacuuu

SEQ ID NO: 413606 - RNA, 19 nt, Homo sapiens
  misc_RNA (1)...(19): siRNA sense strand
acagcaaguuccacaagga

SEQ ID NO: 413607 - RNA, 19 nt, Homo sapiens
  misc_RNA (1)...(19): siRNA sense strand
acacaaaugcaaacacuag

SEQ ID NO: 413608 - RNA, 19 nt, Homo sapiens
  misc_RNA (1)...(19): siRNA sense strand
gaaaagaggaugggagaga

SEQ ID NO: 413609 - RNA, 19 nt, Homo sapiens
  misc_RNA (1)...(19): siRNA sense strand
gaaaugccuagcucugaca

SEQ ID NO: 413610 - RNA, 19 nt, Homo sapiens
  misc_RNA (1)...(19): siRNA sense strand
aaccagcgcuuagauaugg

SEQ ID NO: 413611 - RNA, 19 nt, Homo sapiens
  misc_RNA (1)...(19): siRNA sense strand
caaauaccggaccuucuau

SEQ ID NO: 413612 - RNA, 19 nt, Homo sapiens
  misc_RNA (1)...(19): siRNA sense strand
ggaucugacccaggaaauu

SEQ ID NO: 413613 - RNA, 19 nt, Homo sapiens
  misc_RNA (1)...(19): siRNA sense strand
ccaccugugauuauggaua

SEQ ID NO: 413614 - RNA, 19 nt, Homo sapiens
  misc_RNA (1)...(19): siRNA sense strand
gcccaccugugauuaugga

SEQ ID NO: 413615 - RNA, 19 nt, Homo sapiens
  misc_RNA (1)...(19): siRNA sense strand
gaacucugggacaaauaga

SEQ ID NO: 413616 - RNA, 19 nt, Homo sapiens
  misc_RNA (1)...(19): siRNA sense strand
ggacaaauagaggcuacga

SEQ ID NO: 413617 - RNA, 19 nt, Homo sapiens
  misc_RNA (1)...(19): siRNA sense strand
gcucagguggagaaaggua

SEQ ID NO: 413618 - RNA, 19 nt, Homo sapiens
  misc_RNA (1)...(19): siRNA sense strand
ggagacagacaugaugcaa

SEQ ID NO: 413619 - RNA, 19 nt, Homo sapiens
  misc_RNA (1)...(19): siRNA sense strand
uaacaagaccaagaagaca

SEQ ID NO: 413620 - RNA, 19 nt, Homo sapiens
  misc_RNA (1)...(19): siRNA sense strand
gacaacagcgacucagaca

SEQ ID NO: 413621 - RNA, 19 nt, Homo sapiens
  misc_RNA (1)...(19): siRNA sense strand
cagaauuaaccagcgcuua

SEQ ID NO: 413622 - RNA, 19 nt, Homo sapiens
  misc_RNA (1)...(19): siRNA sense strand
ggaaaggauccaguuugug

SEQ ID NO: 413623 - RNA, 19 nt, Homo sapiens
  misc_RNA (1)...(19): siRNA sense strand
gcacggacugcucggacaa

SEQ ID NO: 413624 - RNA, 19 nt, Homo sapiens
  misc_RNA (1)...(19): siRNA sense strand
gcuugacccugagauggaa

SEQ ID NO: 413625 - RNA, 19 nt, Homo sapiens
  misc_RNA (1)...(19): siRNA sense strand
uaaccagcgcuuagauaug

SEQ ID NO: 413626 - RNA, 19 nt, Homo sapiens
  misc_RNA (1)...(19): siRNA sense strand
uuaaccagcgcuuagauau

SEQ ID NO: 413627 - RNA, 19 nt, Homo sapiens
  misc_RNA (1)...(19): siRNA sense strand
cuacgagggcuauggcuau

SEQ ID NO: 413628 - RNA, 19 nt, Homo sapiens
  misc_RNA (1)...(19): siRNA sense strand
cccaggaaauugccaugga

SEQ ID NO: 413629 - RNA, 19 nt, Homo sapiens
  misc_RNA (1)...(19): siRNA sense strand
cagucgacauacucggaua

SEQ ID NO: 413630 - RNA, 19 nt, Homo sapiens
  misc_RNA (1)...(19): siRNA sense strand
cagcccaccugugauuaug

SEQ ID NO: 413631 - RNA, 19 nt, Homo sapiens
  misc_RNA (1)...(19): siRNA sense strand
gauauggugccgcauuugg

SEQ ID NO: 413632 - RNA, 19 nt, Homo sapiens
  misc_RNA (1)...(19): siRNA sense strand
agaauuaaccagcgcuuag

SEQ ID NO: 413633 - RNA, 19 nt, Homo sapiens
  misc_RNA (1)...(19): siRNA sense strand
gaguacgucacuaacaaga

SEQ ID NO: 413634 - RNA, 19 nt, Homo sapiens
  misc_RNA (1)...(19): siRNA sense strand
caguuuguguguucucugu

SEQ ID NO: 413635 - RNA, 19 nt, Homo sapiens
  misc_RNA (1)...(19): siRNA sense strand
cggcucagguggagaaagg

SEQ ID NO: 413636 - RNA, 19 nt, Homo sapiens
  misc_RNA (1)...(19): siRNA sense strand
gagcuacacaggcuuuguc

SEQ ID NO: 413637 - RNA, 19 nt, Homo sapiens
  misc_RNA (1)...(19): siRNA sense strand
cggaaccgcaggcucauga

SEQ ID NO: 413638 - RNA, 19 nt, Homo sapiens
  misc_RNA (1)...(19): siRNA sense strand
ggaaauugccauggagcau

SEQ ID NO: 413639 - RNA, 19 nt, Homo sapiens
  misc_RNA (1)...(19): siRNA sense strand
cugacuuucugcaggagua

SEQ ID NO: 413640 - RNA, 19 nt, Homo sapiens
  misc_RNA (1)...(19): siRNA sense strand
gaaagguaugacucuuaug

SEQ ID NO: 413641 - RNA, 19 nt, Homo sapiens
  misc_RNA (1)...(19): siRNA sense strand
agaagaaggcaaagaggau

SEQ ID NO: 413642 - RNA, 19 nt, Homo sapiens
  misc_RNA (1)...(19): siRNA sense strand
ggauauggaacuuggaacu

SEQ ID NO: 413643 - RNA, 19 nt, Homo sapiens
  misc_RNA (1)...(19): siRNA sense strand
gacacaaaugcaaacacua

SEQ ID NO: 413644 - RNA, 19 nt, Homo sapiens
  misc_RNA (1)...(19): siRNA sense strand
uccagcaaaucuacagaga

SEQ ID NO: 413645 - RNA, 19 nt, Homo sapiens
  misc_RNA (1)...(19): siRNA sense strand
cuaagcagacggcugacuu

SEQ ID NO: 413646 - RNA, 19 nt, Homo sapiens
  misc_RNA (1)...(19): siRNA sense strand
gggcuauggcuauggcuau

SEQ ID NO: 413647 - RNA, 19 nt, Homo sapiens
  misc_RNA (1)...(19): siRNA sense strand
gagaccgcaugguggaaag

SEQ ID NO: 413648 - RNA, 19 nt, Homo sapiens
  misc_RNA (1)...(19): siRNA sense strand
gcauuuggagacagacaug

SEQ ID NO: 413649 - RNA, 19 nt, Homo sapiens
  misc_RNA (1)...(19): siRNA sense strand
uuagauauggugccgcauu

SEQ ID NO: 413650 - RNA, 19 nt, Homo sapiens
  misc_RNA (1)...(19): siRNA sense strand
gguggaggcagcccauugu

SEQ ID NO: 413651 - RNA, 19 nt, Homo sapiens
  misc_RNA (1)...(19): siRNA sense strand
ggaguacgucacuaacaag

SEQ ID NO: 413652 - RNA, 19 nt, Homo sapiens
  misc_RNA (1)...(19): siRNA sense strand
caccgaggcuguggagaag

SEQ ID NO: 413653 - RNA, 19 nt, Homo sapiens
  misc_RNA (1)...(19): siRNA sense strand
ugggagagaagaaggcaaa

SEQ ID NO: 413654 - RNA, 19 nt, Homo sapiens
  misc_RNA (1)...(19): siRNA sense strand
gaagaggauuugacaguua

SEQ ID NO: 413655 - RNA, 19 nt, Homo sapiens
  misc_RNA (1)...(19): siRNA sense strand
ggaagaagaaggugaguua

SEQ ID NO: 413656 - RNA, 19 nt, Homo sapiens
  misc_RNA (1)...(19): siRNA sense strand
ggaagaggaugaagaggaa

SEQ ID NO: 413657 - RNA, 19 nt, Homo sapiens
  misc_RNA (1)...(19): siRNA sense strand
caagguguaugcgauauua

SEQ ID NO: 413658 - RNA, 19 nt, Homo sapiens
  misc_RNA (1)...(19): siRNA sense strand
ggaaugaaggcuuguauga

SEQ ID NO: 413659 - RNA, 19 nt, Homo sapiens
  misc_RNA (1)...(19): siRNA sense strand
ggaagaauuugaggaagaa

SEQ ID NO: 413660 - RNA, 19 nt, Homo sapiens
  misc_RNA (1)...(19): siRNA sense strand
gaaagugacucugaugaca

SEQ ID NO: 413661 - RNA, 19 nt, Homo sapiens
  misc_RNA (1)...(19): siRNA sense strand
ggaggagccugaagaacuu

SEQ ID NO: 413662 - RNA, 19 nt, Homo sapiens
  misc_RNA (1)...(19): siRNA sense strand
ggaagaggauuugacaguu

SEQ ID NO: 413663 - RNA, 19 nt, Homo sapiens
  misc_RNA (1)...(19): siRNA sense strand
ggaagaagaguuugaggaa

SEQ ID NO: 413664 - RNA, 19 nt, Homo sapiens
  misc_RNA (1)...(19): siRNA sense strand
ggaagaagaagaagaggaa

SEQ ID NO: 413665 - RNA, 19 nt, Homo sapiens
  misc_RNA (1)...(19): siRNA sense strand
ggaagaggaggaagacuuu

SEQ ID NO: 413666 - RNA, 19 nt, Homo sapiens
  misc_RNA (1)...(19): siRNA sense strand
ggccgaagcucuccaggaa

SEQ ID NO: 413667 - RNA, 19 nt, Homo sapiens
  misc_RNA (1)...(19): siRNA sense strand
ggaggaagacuuugaggaa

SEQ ID NO: 413668 - RNA, 19 nt, Homo sapiens
  misc_RNA (1)...(19): siRNA sense strand
aagaagagauggagacaga

SEQ ID NO: 413669 - RNA, 19 nt, Homo sapiens
  misc_RNA (1)...(19): siRNA sense strand
gucaguagcaagaauauua

SEQ ID NO: 413670 - RNA, 19 nt, Homo sapiens
  misc_RNA (1)...(19): siRNA sense strand
caacagcagugaugaagag

SEQ ID NO: 413671 - RNA, 19 nt, Homo sapiens
  misc_RNA (1)...(19): siRNA sense strand
agagacaccugcagaagaa

SEQ ID NO: 413672 - RNA, 19 nt, Homo sapiens
  misc_RNA (1)...(19): siRNA sense strand
ggagaguguuucugguuug

SEQ ID NO: 413673 - RNA, 19 nt, Homo sapiens
  misc_RNA (1)...(19): siRNA sense strand
aagaagaguuugaggaaga

SEQ ID NO: 413674 - RNA, 19 nt, Homo sapiens
  misc_RNA (1)...(19): siRNA sense strand
gcccucagcuccaacaguu

SEQ ID NO: 413675 - RNA, 19 nt, Homo sapiens
  misc_RNA (1)...(19): siRNA sense strand
gaaggaggagccugaagaa

SEQ ID NO: 413676 - RNA, 19 nt, Homo sapiens
  misc_RNA (1)...(19): siRNA sense strand
ggaagaagaggaggaagaa

SEQ ID NO: 413677 - RNA, 19 nt, Homo sapiens
  misc_RNA (1)...(19): siRNA sense strand
cccaggagcuuguugaaga

SEQ ID NO: 413678 - RNA, 19 nt, Homo sapiens
  misc_RNA (1)...(19): siRNA sense strand
ggaggaagaagaacuggaa

SEQ ID NO: 413679 - RNA, 19 nt, Homo sapiens
  misc_RNA (1)...(19): siRNA sense strand
gaagagauggagacagaga

SEQ ID NO: 413680 - RNA, 19 nt, Homo sapiens
  misc_RNA (1)...(19): siRNA sense strand
gaccagccuuuguccacua

SEQ ID NO: 413681 - RNA, 19 nt, Homo sapiens
  misc_RNA (1)...(19): siRNA sense strand
gcacgucucaguuccauca

SEQ ID NO: 413682 - RNA, 19 nt, Homo sapiens
  misc_RNA (1)...(19): siRNA sense strand
aggcuuguaugaccuauuu

SEQ ID NO: 413683 - RNA, 19 nt, Homo sapiens
  misc_RNA (1)...(19): siRNA sense strand
uggaagaccuggaguuugg

SEQ ID NO: 413684 - RNA, 19 nt, Homo sapiens
  misc_RNA (1)...(19): siRNA sense strand
gaggauuugacaguuauua

SEQ ID NO: 413685 - RNA, 19 nt, Homo sapiens
  misc_RNA (1)...(19): siRNA sense strand
ccaggagcuuguugaagaa

SEQ ID NO: 413686 - RNA, 19 nt, Homo sapiens
  misc_RNA (1)...(19): siRNA sense strand
ugaguuagaggaagaagaa

SEQ ID NO: 413687 - RNA, 19 nt, Homo sapiens
  misc_RNA (1)...(19): siRNA sense strand
guaaugcacgucucaguuc

SEQ ID NO: 413688 - RNA, 19 nt, Homo sapiens
  misc_RNA (1)...(19): siRNA sense strand
gaccaagguguaugcgaua

SEQ ID NO: 413689 - RNA, 19 nt, Homo sapiens
  misc_RNA (1)...(19): siRNA sense strand
gaaggaaugaaggcuugua

SEQ ID NO: 413690 - RNA, 19 nt, Homo sapiens
  misc_RNA (1)...(19): siRNA sense strand
cgaaggaggagccugaaga

SEQ ID NO: 413691 - RNA, 19 nt, Homo sapiens
  misc_RNA (1)...(19): siRNA sense strand
gcgagaagauagccuugag

SEQ ID NO: 413692 - RNA, 19 nt, Homo sapiens
  misc_RNA (1)...(19): siRNA sense strand
uggagaguguuucugguuu

SEQ ID NO: 413693 - RNA, 19 nt, Homo sapiens
  misc_RNA (1)...(19): siRNA sense strand
gguggaagaccuggaguuu

SEQ ID NO: 413694 - RNA, 19 nt, Homo sapiens
  misc_RNA (1)...(19): siRNA sense strand
agaagaaggugaguuagag

SEQ ID NO: 413695 - RNA, 19 nt, Homo sapiens
  misc_RNA (1)...(19): siRNA sense strand
aggaagaauuugaggaaga

SEQ ID NO: 413696 - RNA, 19 nt, Homo sapiens
  misc_RNA (1)...(19): siRNA sense strand
gagcauucagcagguguua

SEQ ID NO: 413697 - RNA, 19 nt, Homo sapiens
  misc_RNA (1)...(19): siRNA sense strand
ggaagaaggggaagaagaa

SEQ ID NO: 413698 - RNA, 19 nt, Homo sapiens
  misc_RNA (1)...(19): siRNA sense strand
ccagcugccugcacuguuc

SEQ ID NO: 413699 - RNA, 19 nt, Homo sapiens
  misc_RNA (1)...(19): siRNA sense strand
gcagucagcauuggaagga

SEQ ID NO: 413700 - RNA, 19 nt, Homo sapiens
  misc_RNA (1)...(19): siRNA sense strand
ugaggaagaauuugaggaa

SEQ ID NO: 413701 - RNA, 19 nt, Homo sapiens
  misc_RNA (1)...(19): siRNA sense strand
aagaggauuugacaguuau

SEQ ID NO: 413702 - RNA, 19 nt, Homo sapiens
  misc_RNA (1)...(19): siRNA sense strand
acaaggaggaggcaucuga

SEQ ID NO: 413703 - RNA, 19 nt, Homo sapiens
  misc_RNA (1)...(19): siRNA sense strand
gagcaucgguagagauucc

SEQ ID NO: 413704 - RNA, 19 nt, Homo sapiens
  misc_RNA (1)...(19): siRNA sense strand
cagccuuuguccacuauga

SEQ ID NO: 413705 - RNA, 19 nt, Homo sapiens
  misc_RNA (1)...(19): siRNA sense strand
ggaagaagaacuggaagag

SEQ ID NO: 413706 - RNA, 19 nt, Homo sapiens
  misc_RNA (1)...(19): siRNA sense strand
gaagaggaauauuuugaag

SEQ ID NO: 413707 - RNA, 19 nt, Homo sapiens
  misc_RNA (1)...(19): siRNA sense strand
ggaagaggaagaggaugaa

SEQ ID NO: 413708 - RNA, 19 nt, Homo sapiens
  misc_RNA (1)...(19): siRNA sense strand
ggaagacuuugaggaagag

SEQ ID NO: 413709 - RNA, 19 nt, Homo sapiens
  misc_RNA (1)...(19): siRNA sense strand
aggaagacuuugaggaaga

SEQ ID NO: 413710 - RNA, 19 nt, Homo sapiens
  misc_RNA (1)...(19): siRNA sense strand
ggaagaggagccugaggau

SEQ ID NO: 413711 - RNA, 19 nt, Homo sapiens
  misc_RNA (1)...(19): siRNA sense strand
gagaucuccuuggaaagug

SEQ ID NO: 413712 - RNA, 19 nt, Homo sapiens
  misc_RNA (1)...(19): siRNA sense strand
cagagacaccugcagaaga

SEQ ID NO: 413713 - RNA, 19 nt, Homo sapiens
  misc_RNA (1)...(19): siRNA sense strand
guuagaggaagaagaagaa

SEQ ID NO: 413714 - RNA, 19 nt, Homo sapiens
  misc_RNA (1)...(19): siRNA sense strand
aagaagaggaggaagaaga

SEQ ID NO: 413715 - RNA, 19 nt, Homo sapiens
  misc_RNA (1)...(19): siRNA sense strand
gcauucagcagguguuaca

SEQ ID NO: 413716 - RNA, 19 nt, Homo sapiens
  misc_RNA (1)...(19): siRNA sense strand
ggaugaagaggaauauuuu

SEQ ID NO: 413717 - RNA, 19 nt, Homo sapiens
  misc_RNA (1)...(19): siRNA sense strand
guagcaagaauauuagcuu

SEQ ID NO: 413718 - RNA, 19 nt, Homo sapiens
  misc_RNA (1)...(19): siRNA sense strand
aggaugaagaggaauauuu

SEQ ID NO: 413719 - RNA, 19 nt, Homo sapiens
  misc_RNA (1)...(19): siRNA sense strand
cagcagcacugugugucuu

SEQ ID NO: 413720 - RNA, 19 nt, Homo sapiens
  misc_RNA (1)...(19): siRNA sense strand
ggaggaggaagaagaacug

SEQ ID NO: 413721 - RNA, 19 nt, Homo sapiens
  misc_RNA (1)...(19): siRNA sense strand
aagaagaagaggaggauga

SEQ ID NO: 413722 - RNA, 19 nt, Homo sapiens
  misc_RNA (1)...(19): siRNA sense strand
ggaggaggaagaggaagaa

SEQ ID NO: 413723 - RNA, 19 nt, Homo sapiens
  misc_RNA (1)...(19): siRNA sense strand
caccacagccaaccaccua

SEQ ID NO: 413724 - RNA, 19 nt, Homo sapiens
  misc_RNA (1)...(19): siRNA sense strand
ccagaaccuuucagcucuu

SEQ ID NO: 413725 - RNA, 19 nt, Homo sapiens
  misc_RNA (1)...(19): siRNA sense strand
agaguuugaggaagaauuu

SEQ ID NO: 413726 - RNA, 19 nt, Homo sapiens
  misc_RNA (1)...(19): siRNA sense strand
agaagaguuugaggaagaa

SEQ ID NO: 413727 - RNA, 19 nt, Homo sapiens
  misc_RNA (1)...(19): siRNA sense strand
agaagaagaagaggaagaa

SEQ ID NO: 413728 - RNA, 19 nt, Homo sapiens
  misc_RNA (1)...(19): siRNA sense strand
ggaaagugacucugaugac

SEQ ID NO: 413729 - RNA, 19 nt, Homo sapiens
  misc_RNA (1)...(19): siRNA sense strand
cagcgucaguagcaagaau

SEQ ID NO: 413730 - RNA, 19 nt, Homo sapiens
  misc_RNA (1)...(19): siRNA sense strand
agaggaggaagaagaguuu

SEQ ID NO: 413731 - RNA, 19 nt, Homo sapiens
  misc_RNA (1)...(19): siRNA sense strand
gagcugugggugcagguuu

SEQ ID NO: 413732 - RNA, 19 nt, Homo sapiens
  misc_RNA (1)...(19): siRNA sense strand
gaagaagaaggugaguuag

SEQ ID NO: 413733 - RNA, 19 nt, Homo sapiens
  misc_RNA (1)...(19): siRNA sense strand
ccgaagcucuccaggaaaa

SEQ ID NO: 413734 - RNA, 19 nt, Homo sapiens
  misc_RNA (1)...(19): siRNA sense strand
ggagcuuguugaagaagag

SEQ ID NO: 413735 - RNA, 19 nt, Homo sapiens
  misc_RNA (1)...(19): siRNA sense strand
gggcucaugugccuauugc

SEQ ID NO: 413736 - RNA, 19 nt, Homo sapiens
  misc_RNA (1)...(19): siRNA sense strand
ugaggaggaggaagaagaa

SEQ ID NO: 413737 - RNA, 19 nt, Homo sapiens
  misc_RNA (1)...(19): siRNA sense strand
aagaagaaggugaguuaga

SEQ ID NO: 413738 - RNA, 19 nt, Homo sapiens
  misc_RNA (1)...(19): siRNA sense strand
ggaauauuuugaagaggaa

SEQ ID NO: 413739 - RNA, 19 nt, Homo sapiens
  misc_RNA (1)...(19): siRNA sense strand
aagaagaagaggaagaaga

SEQ ID NO: 413740 - RNA, 19 nt, Homo sapiens
  misc_RNA (1)...(19): siRNA sense strand
gugggccucucaucaagga

SEQ ID NO: 413741 - RNA, 19 nt, Homo sapiens
  misc_RNA (1)...(19): siRNA sense strand
gaccugcugucugcacuca

SEQ ID NO: 413742 - RNA, 19 nt, Homo sapiens
  misc_RNA (1)...(19): siRNA sense strand
ggcuugugguucucucaaa

SEQ ID NO: 413743 - RNA, 19 nt, Homo sapiens
  misc_RNA (1)...(19): siRNA sense strand
aaggugaguuagaggaaga

SEQ ID NO: 413744 - RNA, 19 nt, Homo sapiens
  misc_RNA (1)...(19): siRNA sense strand
agaauuugaggaagaagaa

SEQ ID NO: 413745 - RNA, 19 nt, Homo sapiens
  misc_RNA (1)...(19): siRNA sense strand
agaagaagaggaagaagag

SEQ ID NO: 413746 - RNA, 19 nt, Homo sapiens
  misc_RNA (1)...(19): siRNA sense strand
cagaaccuuucagcucuug

SEQ ID NO: 413747 - RNA, 19 nt, Homo sapiens
  misc_RNA (1)...(19): siRNA sense strand
aagaggaugaagaggaaua

SEQ ID NO: 413748 - RNA, 19 nt, Homo sapiens
  misc_RNA (1)...(19): siRNA sense strand
gaagaggaggaagacuuug

SEQ ID NO: 413749 - RNA, 19 nt, Homo sapiens
  misc_RNA (1)...(19): siRNA sense strand
agaagaggaagaagaggaa

SEQ ID NO: 413750 - RNA, 19 nt, Homo sapiens
  misc_RNA (1)...(19): siRNA sense strand
gaaugaaggcuuguaugac

SEQ ID NO: 413751 - RNA, 19 nt, Homo sapiens
  misc_RNA (1)...(19): siRNA sense strand
uggccgacuucaucgauug

SEQ ID NO: 413752 - RNA, 19 nt, Homo sapiens
  misc_RNA (1)...(19): siRNA sense strand
gaaggcuuguaugaccuau

SEQ ID NO: 413753 - RNA, 19 nt, Homo sapiens
  misc_RNA (1)...(19): siRNA sense strand
ggaugaggaggaggaagaa

SEQ ID NO: 413754 - RNA, 19 nt, Homo sapiens
  misc_RNA (1)...(19): siRNA sense strand
gaauggaccuguuauacug

SEQ ID NO: 413755 - RNA, 19 nt, Homo sapiens
  misc_RNA (1)...(19): siRNA sense strand
ucagguagacuuacacuuu

SEQ ID NO: 413756 - RNA, 19 nt, Homo sapiens
  misc_RNA (1)...(19): siRNA sense strand
gcacuuaccaauaguauac

SEQ ID NO: 413757 - RNA, 19 nt, Homo sapiens
  misc_RNA (1)...(19): siRNA sense strand
uaucagaauggaccuguua

SEQ ID NO: 413758 - RNA, 19 nt, Homo sapiens
  misc_RNA (1)...(19): siRNA sense strand
guugugcacuuaccaauag

SEQ ID NO: 413759 - RNA, 19 nt, Homo sapiens
  misc_RNA (1)...(19): siRNA sense strand
cuucguaauucgugccuua

SEQ ID NO: 413760 - RNA, 19 nt, Homo sapiens
  misc_RNA (1)...(19): siRNA sense strand
cagguagacuuacacuuuc

SEQ ID NO: 413761 - RNA, 19 nt, Homo sapiens
  misc_RNA (1)...(19): siRNA sense strand
caccauauauaccauuaca

SEQ ID NO: 413762 - RNA, 19 nt, Homo sapiens
  misc_RNA (1)...(19): siRNA sense strand
guauacaagggaucuauga

SEQ ID NO: 413763 - RNA, 19 nt, Homo sapiens
  misc_RNA (1)...(19): siRNA sense strand
cguaauucgugccuuauca

SEQ ID NO: 413764 - RNA, 19 nt, Homo sapiens
  misc_RNA (1)...(19): siRNA sense strand
ucagaauggaccuguuaua

SEQ ID NO: 413765 - RNA, 19 nt, Homo sapiens
  misc_RNA (1)...(19): siRNA sense strand
uagaugagauguccuucca

SEQ ID NO: 413766 - RNA, 19 nt, Homo sapiens
  misc_RNA (1)...(19): siRNA sense strand
gcccuugcuugcuuuccua

SEQ ID NO: 413767 - RNA, 19 nt, Homo sapiens
  misc_RNA (1)...(19): siRNA sense strand
ccuauucacuccuguucug

SEQ ID NO: 413768 - RNA, 19 nt, Homo sapiens
  misc_RNA (1)...(19): siRNA sense strand
uggcaguucaccauauaua

SEQ ID NO: 413769 - RNA, 19 nt, Homo sapiens
  misc_RNA (1)...(19): siRNA sense strand
caucgcccuugcuugcuuu

SEQ ID NO: 413770 - RNA, 19 nt, Homo sapiens
  misc_RNA (1)...(19): siRNA sense strand
cagaauggaccuguuauac

SEQ ID NO: 413771 - RNA, 19 nt, Homo sapiens
  misc_RNA (1)...(19): siRNA sense strand
ccacucacuucguaauucg

SEQ ID NO: 413772 - RNA, 19 nt, Homo sapiens
  misc_RNA (1)...(19): siRNA sense strand
ccaagucucuccccacuag

SEQ ID NO: 413773 - RNA, 19 nt, Homo sapiens
  misc_RNA (1)...(19): siRNA sense strand
cuugcuugcuuuccuauuc

SEQ ID NO: 413774 - RNA, 19 nt, Homo sapiens
  misc_RNA (1)...(19): siRNA sense strand
uguaucuguugugcacuua

SEQ ID NO: 413775 - RNA, 19 nt, Homo sapiens
  misc_RNA (1)...(19): siRNA sense strand
caucucucagguagacuua

SEQ ID NO: 413776 - RNA, 19 nt, Homo sapiens
  misc_RNA (1)...(19): siRNA sense strand
ucucucagguagacuuaca

SEQ ID NO: 413777 - RNA, 19 nt, Homo sapiens
  misc_RNA (1)...(19): siRNA sense strand
gcaccaccuuuucuuggaa

SEQ ID NO: 413778 - RNA, 19 nt, Homo sapiens
  misc_RNA (1)...(19): siRNA sense strand
ucaucgcccuugcuugcuu

SEQ ID NO: 413779 - RNA, 19 nt, Homo sapiens
  misc_RNA (1)...(19): siRNA sense strand
cccacucacuucguaauuc

SEQ ID NO: 413780 - RNA, 19 nt, Homo sapiens
  misc_RNA (1)...(19): siRNA sense strand
agaauggaccuguuauacu

SEQ ID NO: 413781 - RNA, 19 nt, Homo sapiens
  misc_RNA (1)...(19): siRNA sense strand
gcccagcacaucagucauc

SEQ ID NO: 413782 - RNA, 19 nt, Homo sapiens
  misc_RNA (1)...(19): siRNA sense strand
ggaggguccuguacaaucu

SEQ ID NO: 413783 - RNA, 19 nt, Homo sapiens
  misc_RNA (1)...(19): siRNA sense strand
ccgagauggagcccaauua

SEQ ID NO: 413784 - RNA, 19 nt, Homo sapiens
  misc_RNA (1)...(19): siRNA sense strand
ccuggaggguccuguacaa

SEQ ID NO: 413785 - RNA, 19 nt, Homo sapiens
  misc_RNA (1)...(19): siRNA sense strand
ccuguacaaucucaucaug

SEQ ID NO: 413786 - RNA, 19 nt, Homo sapiens
  misc_RNA (1)...(19): siRNA sense strand
cgagauggagcccaauuag

SEQ ID NO: 413787 - RNA, 19 nt, Homo sapiens
  misc_RNA (1)...(19): siRNA sense strand
ggagugagcuguucaugga

SEQ ID NO: 413788 - RNA, 19 nt, Homo sapiens
  misc_RNA (1)...(19): siRNA sense strand
gaccugaacuuccgcauug

SEQ ID NO: 413789 - RNA, 19 nt, Homo sapiens
  misc_RNA (1)...(19): siRNA sense strand
gcuaugaccugcacuuugu

SEQ ID NO: 413790 - RNA, 19 nt, Homo sapiens
  misc_RNA (1)...(19): siRNA sense strand
ggacagaccguauccuaug

SEQ ID NO: 413791 - RNA, 19 nt, Homo sapiens
  misc_RNA (1)...(19): siRNA sense strand
gcaaggacuauguggcuua

SEQ ID NO: 413792 - RNA, 19 nt, Homo sapiens
  misc_RNA (1)...(19): siRNA sense strand
gcucccaccuucaaguuug

SEQ ID NO: 413793 - RNA, 19 nt, Homo sapiens
  misc_RNA (1)...(19): siRNA sense strand
gggacuggaucggcuuaua

SEQ ID NO: 413794 - RNA, 19 nt, Homo sapiens
  misc_RNA (1)...(19): siRNA sense strand
caagggccauggagacuuc

SEQ ID NO: 413795 - RNA, 19 nt, Homo sapiens
  misc_RNA (1)...(19): siRNA sense strand
aagaacaccuggcccauuc

SEQ ID NO: 413796 - RNA, 19 nt, Homo sapiens
  misc_RNA (1)...(19): siRNA sense strand
gaagauguggaugggaaua

SEQ ID NO: 413797 - RNA, 19 nt, Homo sapiens
  misc_RNA (1)...(19): siRNA sense strand
ccacuugccugcgcauaug

SEQ ID NO: 413798 - RNA, 19 nt, Homo sapiens
  misc_RNA (1)...(19): siRNA sense strand
gcucagagggagaggauga

SEQ ID NO: 413799 - RNA, 19 nt, Homo sapiens
  misc_RNA (1)...(19): siRNA sense strand
cgauaccagugccaagaaa

SEQ ID NO: 413800 - RNA, 19 nt, Homo sapiens
  misc_RNA (1)...(19): siRNA sense strand
ggcuggagguggcagauga

SEQ ID NO: 413801 - RNA, 19 nt, Homo sapiens
  misc_RNA (1)...(19): siRNA sense strand
cagcucagccuaccuggaa

SEQ ID NO: 413802 - RNA, 19 nt, Homo sapiens
  misc_RNA (1)...(19): siRNA sense strand
ugaacuccaugcucaacaa

SEQ ID NO: 413803 - RNA, 19 nt, Homo sapiens
  misc_RNA (1)...(19): siRNA sense strand
gaaggaccagcucaacaug

SEQ ID NO: 413804 - RNA, 19 nt, Homo sapiens
  misc_RNA (1)...(19): siRNA sense strand
ucacugaacccuuccagau

SEQ ID NO: 413805 - RNA, 19 nt, Homo sapiens
  misc_RNA (1)...(19): siRNA sense strand
caaggacuauguggcuuau

SEQ ID NO: 413806 - RNA, 19 nt, Homo sapiens
  misc_RNA (1)...(19): siRNA sense strand
gcuuauaccggguggguuu

SEQ ID NO: 413807 - RNA, 19 nt, Homo sapiens
  misc_RNA (1)...(19): siRNA sense strand
gagaaggaccagcucaaca

SEQ ID NO: 413808 - RNA, 19 nt, Homo sapiens
  misc_RNA (1)...(19): siRNA sense strand
ugauguggguaccaacaaa

SEQ ID NO: 413809 - RNA, 19 nt, Homo sapiens
  misc_RNA (1)...(19): siRNA sense strand
gcuagggcccuucaacuuc

SEQ ID NO: 413810 - RNA, 19 nt, Homo sapiens
  misc_RNA (1)...(19): siRNA sense strand
caagaacaccuggcccauu

SEQ ID NO: 413811 - RNA, 19 nt, Homo sapiens
  misc_RNA (1)...(19): siRNA sense strand
ggaccugaacuuccgcauu

SEQ ID NO: 413812 - RNA, 19 nt, Homo sapiens
  misc_RNA (1)...(19): siRNA sense strand
gagcuaugaccugcacuuu

SEQ ID NO: 413813 - RNA, 19 nt, Homo sapiens
  misc_RNA (1)...(19): siRNA sense strand
ggacuggaucggcuuauac

SEQ ID NO: 413814 - RNA, 19 nt, Homo sapiens
  misc_RNA (1)...(19): siRNA sense strand
gacagaccguauccuaugg

SEQ ID NO: 413815 - RNA, 19 nt, Homo sapiens
  misc_RNA (1)...(19): siRNA sense strand
ccauaggguugcaggaagu

SEQ ID NO: 413816 - RNA, 19 nt, Homo sapiens
  misc_RNA (1)...(19): siRNA sense strand
gucaccaccuccucuucua

SEQ ID NO: 413817 - RNA, 19 nt, Homo sapiens
  misc_RNA (1)...(19): siRNA sense strand
gguaccaacaaauacgaua

SEQ ID NO: 413818 - RNA, 19 nt, Homo sapiens
  misc_RNA (1)...(19): siRNA sense strand
ucaacaagcgacucaagga

SEQ ID NO: 413819 - RNA, 19 nt, Homo sapiens
  misc_RNA (1)...(19): siRNA sense strand
cgacggcgcagacaugauc

SEQ ID NO: 413820 - RNA, 19 nt, Homo sapiens
  misc_RNA (1)...(19): siRNA sense strand
aggacuauguggcuuaugu

SEQ ID NO: 413821 - RNA, 19 nt, Homo sapiens
  misc_RNA (1)...(19): siRNA sense strand
gaacaccuggcccauucug

SEQ ID NO: 413822 - RNA, 19 nt, Homo sapiens
  misc_RNA (1)...(19): siRNA sense strand
ggugagguaccgcauggaa

SEQ ID NO: 413823 - RNA, 19 nt, Homo sapiens
  misc_RNA (1)...(19): siRNA sense strand
ccaguggagugagcuguuc

SEQ ID NO: 413824 - RNA, 19 nt, Homo sapiens
  misc_RNA (1)...(19): siRNA sense strand
cacauggaauacacaguca

SEQ ID NO: 413825 - RNA, 19 nt, Homo sapiens
  misc_RNA (1)...(19): siRNA sense strand
gaucaugaccucguguucu

SEQ ID NO: 413826 - RNA, 19 nt, Homo sapiens
  misc_RNA (1)...(19): siRNA sense strand
cagaccguauccuauggaa

SEQ ID NO: 413827 - RNA, 19 nt, Homo sapiens
  misc_RNA (1)...(19): siRNA sense strand
gguaacauucagugaggaa

SEQ ID NO: 413828 - RNA, 19 nt, Homo sapiens
  misc_RNA (1)...(19): siRNA sense strand
gcagccacauggaauacac

SEQ ID NO: 413829 - RNA, 19 nt, Homo sapiens
  misc_RNA (1)...(19): siRNA sense strand
gggcuacuauagucacaac

SEQ ID NO: 413830 - RNA, 19 nt, Homo sapiens
  misc_RNA (1)...(19): siRNA sense strand
agcaggcgguggugaggua

SEQ ID NO: 413831 - RNA, 19 nt, Homo sapiens
  misc_RNA (1)...(19): siRNA sense strand
caaguuugccaucgacagu

SEQ ID NO: 413832 - RNA, 19 nt, Homo sapiens
  misc_RNA (1)...(19): siRNA sense strand
acaccuggcccauucugaa

SEQ ID NO: 413833 - RNA, 19 nt, Homo sapiens
  misc_RNA (1)...(19): siRNA sense strand
agaaggaccagcucaacau

SEQ ID NO: 413834 - RNA, 19 nt, Homo sapiens
  misc_RNA (1)...(19): siRNA sense strand
gggagaaggaccagcucaa

SEQ ID NO: 413835 - RNA, 19 nt, Homo sapiens
  misc_RNA (1)...(19): siRNA sense strand
uccaucagcucugggagaa

SEQ ID NO: 413836 - RNA, 19 nt, Homo sapiens
  misc_RNA (1)...(19): siRNA sense strand
acagugaccagcuccauca

SEQ ID NO: 413837 - RNA, 19 nt, Homo sapiens
  misc_RNA (1)...(19): siRNA sense strand
acugaacccuuccagaucu

SEQ ID NO: 413838 - RNA, 19 nt, Homo sapiens
  misc_RNA (1)...(19): siRNA sense strand
gauguggguaccaacaaau

SEQ ID NO: 413839 - RNA, 19 nt, Homo sapiens
  misc_RNA (1)...(19): siRNA sense strand
cuacauccacccugucauc

SEQ ID NO: 413840 - RNA, 19 nt, Homo sapiens
  misc_RNA (1)...(19): siRNA sense strand
ggagaaggaccagcucaac

SEQ ID NO: 413841 - RNA, 19 nt, Homo sapiens
  misc_RNA (1)...(19): siRNA sense strand
gcagacaugaucgccauag

SEQ ID NO: 413842 - RNA, 19 nt, Homo sapiens
  misc_RNA (1)...(19): siRNA sense strand
ccucgaagccugggccuau

SEQ ID NO: 413843 - RNA, 19 nt, Homo sapiens
  misc_RNA (1)...(19): siRNA sense strand
gaacuccaugcucaacaag

SEQ ID NO: 413844 - RNA, 19 nt, Homo sapiens
  misc_RNA (1)...(19): siRNA sense strand
gcagcgcaaagacaacuuc

SEQ ID NO: 413845 - RNA, 19 nt, Homo sapiens
  misc_RNA (1)...(19): siRNA sense strand
ugucugggccaaacaugaa

SEQ ID NO: 413846 - RNA, 19 nt, Homo sapiens
  misc_RNA (1)...(19): siRNA sense strand
aggcuuggcacccagagua

SEQ ID NO: 413847 - RNA, 19 nt, Homo sapiens
  misc_RNA (1)...(19): siRNA sense strand
gcucaacaagcgacucaag

SEQ ID NO: 413848 - RNA, 19 nt, Homo sapiens
  misc_RNA (1)...(19): siRNA sense strand
cggguggguuuccgccauu

SEQ ID NO: 413849 - RNA, 19 nt, Homo sapiens
  misc_RNA (1)...(19): siRNA sense strand
cccaguuccuccugcaguu

SEQ ID NO: 413850 - RNA, 19 nt, Homo sapiens
  misc_RNA (1)...(19): siRNA sense strand
cagcuuggacagaccguau

SEQ ID NO: 413851 - RNA, 19 nt, Homo sapiens
  misc_RNA (1)...(19): siRNA sense strand
gcucaggcaccagcucaga

SEQ ID NO: 413852 - RNA, 19 nt, Homo sapiens
  misc_RNA (1)...(19): siRNA sense strand
gcuuaugucugggccaaac

SEQ ID NO: 413853 - RNA, 19 nt, Homo sapiens
  misc_RNA (1)...(19): siRNA sense strand
gguaccgcauggaaacagu

SEQ ID NO: 413854 - RNA, 19 nt, Homo sapiens
  misc_RNA (1)...(19): siRNA sense strand
gugagguaccgcauggaaa

SEQ ID NO: 413855 - RNA, 19 nt, Homo sapiens
  misc_RNA (1)...(19): siRNA sense strand
ccacacaaguuuacaguuu

SEQ ID NO: 413856 - RNA, 19 nt, Homo sapiens
  misc_RNA (1)...(19): siRNA sense strand
uauuggcuauguaggauua

SEQ ID NO: 413857 - RNA, 19 nt, Homo sapiens
  misc_RNA (1)...(19): siRNA sense strand
ccaagugggugcacguguu

SEQ ID NO: 413858 - RNA, 19 nt, Homo sapiens
  misc_RNA (1)...(19): siRNA sense strand
gacaguggaugugcaauuc

SEQ ID NO: 413859 - RNA, 19 nt, Homo sapiens
  misc_RNA (1)...(19): siRNA sense strand
gcacuacgacuuggacuug

SEQ ID NO: 413860 - RNA, 19 nt, Homo sapiens
  misc_RNA (1)...(19): siRNA sense strand
caagugggugcacguguua

SEQ ID NO: 413861 - RNA, 19 nt, Homo sapiens
  misc_RNA (1)...(19): siRNA sense strand
cagauugcauucacaggaa

SEQ ID NO: 413862 - RNA, 19 nt, Homo sapiens
  misc_RNA (1)...(19): siRNA sense strand
ccagagcccacacaaguuu

SEQ ID NO: 413863 - RNA, 19 nt, Homo sapiens
  misc_RNA (1)...(19): siRNA sense strand
ugaacgagacccugaguga

SEQ ID NO: 413864 - RNA, 19 nt, Homo sapiens
  misc_RNA (1)...(19): siRNA sense strand
ggccagagcccacacaagu

SEQ ID NO: 413865 - RNA, 19 nt, Homo sapiens
  misc_RNA (1)...(19): siRNA sense strand
ccaguauuguggcucaaga

SEQ ID NO: 413866 - RNA, 19 nt, Homo sapiens
  misc_RNA (1)...(19): siRNA sense strand
ggucggaauuuggauuauc

SEQ ID NO: 413867 - RNA, 19 nt, Homo sapiens
  misc_RNA (1)...(19): siRNA sense strand
cacacaaguuuacaguuuc

SEQ ID NO: 413868 - RNA, 19 nt, Homo sapiens
  misc_RNA (1)...(19): siRNA sense strand
ugacaguggaugugcaauu

SEQ ID NO: 413869 - RNA, 19 nt, Homo sapiens
  misc_RNA (1)...(19): siRNA sense strand
uacaguuucuggugaugaa

SEQ ID NO: 413870 - RNA, 19 nt, Homo sapiens
  misc_RNA (1)...(19): siRNA sense strand
caguggaugugcaauucuu

SEQ ID NO: 413871 - RNA, 19 nt, Homo sapiens
  misc_RNA (1)...(19): siRNA sense strand
uuaaagaaugggcagauug

SEQ ID NO: 413872 - RNA, 19 nt, Homo sapiens
  misc_RNA (1)...(19): siRNA sense strand
cuuaaagaaugggcagauu

SEQ ID NO: 413873 - RNA, 19 nt, Homo sapiens
  misc_RNA (1)...(19): siRNA sense strand
cuacgaguccuccguguuc

SEQ ID NO: 413874 - RNA, 19 nt, Homo sapiens
  misc_RNA (1)...(19): siRNA sense strand
cacaggaacuacuuuuauu

SEQ ID NO: 413875 - RNA, 19 nt, Homo sapiens
  misc_RNA (1)...(19): siRNA sense strand
gcauucacaggaacuacuu

SEQ ID NO: 413876 - RNA, 19 nt, Homo sapiens
  misc_RNA (1)...(19): siRNA sense strand
acacaaguuuacaguuucu

SEQ ID NO: 413877 - RNA, 19 nt, Homo sapiens
  misc_RNA (1)...(19): siRNA sense strand
ggaugugcaauucuuaaag

SEQ ID NO: 413878 - RNA, 19 nt, Homo sapiens
  misc_RNA (1)...(19): siRNA sense strand
guggaugugcaauucuuaa

SEQ ID NO: 413879 - RNA, 19 nt, Homo sapiens
  misc_RNA (1)...(19): siRNA sense strand
uaaagaaugggcagauugc

SEQ ID NO: 413880 - RNA, 19 nt, Homo sapiens
  misc_RNA (1)...(19): siRNA sense strand
ggacugccuucuggucaac

SEQ ID NO: 413881 - RNA, 19 nt, Homo sapiens
  misc_RNA (1)...(19): siRNA sense strand
gccagagcccacacaaguu

SEQ ID NO: 413882 - RNA, 19 nt, Homo sapiens
  misc_RNA (1)...(19): siRNA sense strand
cagagcccacacaaguuua

SEQ ID NO: 413883 - RNA, 19 nt, Homo sapiens
  misc_RNA (1)...(19): siRNA sense strand
gcaagcugacaguggaugu

SEQ ID NO: 413884 - RNA, 19 nt, Homo sapiens
  misc_RNA (1)...(19): siRNA sense strand
ccagaggccacauuuacca

SEQ ID NO: 413885 - RNA, 19 nt, Homo sapiens
  misc_RNA (1)...(19): siRNA sense strand
guuuacaguuucuggugau

SEQ ID NO: 413886 - RNA, 19 nt, Homo sapiens
  misc_RNA (1)...(19): siRNA sense strand
cauuuaccauggucggaau

SEQ ID NO: 413887 - RNA, 19 nt, Homo sapiens
  misc_RNA (1)...(19): siRNA sense strand
uccguguucugcaccagua

SEQ ID NO: 413888 - RNA, 19 nt, Homo sapiens
  misc_RNA (1)...(19): siRNA sense strand
gaugaacgagacccugagu

SEQ ID NO: 413889 - RNA, 19 nt, Homo sapiens
  misc_RNA (1)...(19): siRNA sense strand
cggacugccuucuggucaa

SEQ ID NO: 413890 - RNA, 19 nt, Homo sapiens
  misc_RNA (1)...(19): siRNA sense strand
uuaccauggucggaauuug

SEQ ID NO: 413891 - RNA, 19 nt, Homo sapiens
  misc_RNA (1)...(19): siRNA sense strand
ggaaauggcucaucucugu

SEQ ID NO: 413892 - RNA, 19 nt, Homo sapiens
  misc_RNA (1)...(19): siRNA sense strand
ccucagaacuugaccauga

SEQ ID NO: 413893 - RNA, 19 nt, Homo sapiens
  misc_RNA (1)...(19): siRNA sense strand
caaguaaacugcugacgau

SEQ ID NO: 413894 - RNA, 19 nt, Homo sapiens
  misc_RNA (1)...(19): siRNA sense strand
gggagauacuucuuucgua

SEQ ID NO: 413895 - RNA, 19 nt, Homo sapiens
  misc_RNA (1)...(19): siRNA sense strand
gaccaugacugucuuccaa

SEQ ID NO: 413896 - RNA, 19 nt, Homo sapiens
  misc_RNA (1)...(19): siRNA sense strand
gcaccagccucaccuguca

SEQ ID NO: 413897 - RNA, 19 nt, Homo sapiens
  misc_RNA (1)...(19): siRNA sense strand
ccaaggagacggcacagua

SEQ ID NO: 413898 - RNA, 19 nt, Homo sapiens
  misc_RNA (1)...(19): siRNA sense strand
gaacaagaccguccaucuc

SEQ ID NO: 413899 - RNA, 19 nt, Homo sapiens
  misc_RNA (1)...(19): siRNA sense strand
guaaacugcugacgaugca

SEQ ID NO: 413900 - RNA, 19 nt, Homo sapiens
  misc_RNA (1)...(19): siRNA sense strand
gcggaaggacagacaagua

SEQ ID NO: 413901 - RNA, 19 nt, Homo sapiens
  misc_RNA (1)...(19): siRNA sense strand
ggaaggacagacaaguaaa

SEQ ID NO: 413902 - RNA, 19 nt, Homo sapiens
  misc_RNA (1)...(19): siRNA sense strand
cggaaggacagacaaguaa

SEQ ID NO: 413903 - RNA, 19 nt, Homo sapiens
  misc_RNA (1)...(19): siRNA sense strand
caaggagacggcacaguau

SEQ ID NO: 413904 - RNA, 19 nt, Homo sapiens
  misc_RNA (1)...(19): siRNA sense strand
gcagagcaaagccacauca

SEQ ID NO: 413905 - RNA, 19 nt, Homo sapiens
  misc_RNA (1)...(19): siRNA sense strand
gacugaaccuugggcagaa

SEQ ID NO: 413906 - RNA, 19 nt, Homo sapiens
  misc_RNA (1)...(19): siRNA sense strand
gaaggacagacaaguaaac

SEQ ID NO: 413907 - RNA, 19 nt, Homo sapiens
  misc_RNA (1)...(19): siRNA sense strand
ggacaggaggccacugaca

SEQ ID NO: 413908 - RNA, 19 nt, Homo sapiens
  misc_RNA (1)...(19): siRNA sense strand
cacaguauccacagucuug

SEQ ID NO: 413909 - RNA, 19 nt, Homo sapiens
  misc_RNA (1)...(19): siRNA sense strand
uauccacagucuugggaaa

SEQ ID NO: 413910 - RNA, 19 nt, Homo sapiens
  misc_RNA (1)...(19): siRNA sense strand
ccacagcccuggucuuccu

SEQ ID NO: 413911 - RNA, 19 nt, Homo sapiens
  misc_RNA (1)...(19): siRNA sense strand
gaagugaugcggggagaua

SEQ ID NO: 413912 - RNA, 19 nt, Homo sapiens
  misc_RNA (1)...(19): siRNA sense strand
cgaacaagaccguccaucu

SEQ ID NO: 413913 - RNA, 19 nt, Homo sapiens
  misc_RNA (1)...(19): siRNA sense strand
ggaccgauuccaccuccuu

SEQ ID NO: 413914 - RNA, 19 nt, Homo sapiens
  misc_RNA (1)...(19): siRNA sense strand
cgugggagauacgggcaua

SEQ ID NO: 413915 - RNA, 19 nt, Homo sapiens
  misc_RNA (1)...(19): siRNA sense strand
acaagaccguccaucucaa

SEQ ID NO: 413916 - RNA, 19 nt, Homo sapiens
  misc_RNA (1)...(19): siRNA sense strand
caccggcucucugugaaug

SEQ ID NO: 413917 - RNA, 19 nt, Homo sapiens
  misc_RNA (1)...(19): siRNA sense strand
ccacugacaccgaguacuc

SEQ ID NO: 413918 - RNA, 19 nt, Homo sapiens
  misc_RNA (1)...(19): siRNA sense strand
aaagccacaucaggaguga

SEQ ID NO: 413919 - RNA, 19 nt, Homo sapiens
  misc_RNA (1)...(19): siRNA sense strand
agagaugccagaagaagug

SEQ ID NO: 413920 - RNA, 19 nt, Homo sapiens
  misc_RNA (1)...(19): siRNA sense strand
gcacaguauccacagucuu

SEQ ID NO: 413921 - RNA, 19 nt, Homo sapiens
  misc_RNA (1)...(19): siRNA sense strand
gaugccagaagaagugaug

SEQ ID NO: 413922 - RNA, 19 nt, Homo sapiens
  misc_RNA (1)...(19): siRNA sense strand
caugugcccugcuccuucu

SEQ ID NO: 413923 - RNA, 19 nt, Homo sapiens
  misc_RNA (1)...(19): siRNA sense strand
ugaugcaguugacagcaau

SEQ ID NO: 413924 - RNA, 19 nt, Homo sapiens
  misc_RNA (1)...(19): siRNA sense strand
aacaagaccguccaucuca

SEQ ID NO: 413925 - RNA, 19 nt, Homo sapiens
  misc_RNA (1)...(19): siRNA sense strand
ucgcauggcuggauuuacc

SEQ ID NO: 413926 - RNA, 19 nt, Homo sapiens
  misc_RNA (1)...(19): siRNA sense strand
cgccuggucugugcaguug

SEQ ID NO: 413927 - RNA, 19 nt, Homo sapiens
  misc_RNA (1)...(19): siRNA sense strand
ccacagucuugggaaaugg

SEQ ID NO: 413928 - RNA, 19 nt, Homo sapiens
  misc_RNA (1)...(19): siRNA sense strand
cuacccgccucagaacuug

SEQ ID NO: 413929 - RNA, 19 nt, Homo sapiens
  misc_RNA (1)...(19): siRNA sense strand
ggaaauggcucaucucuuu

SEQ ID NO: 413930 - RNA, 19 nt, Homo sapiens
  misc_RNA (1)...(19): siRNA sense strand
gaaauggaguuacaaauca

SEQ ID NO: 413931 - RNA, 19 nt, Homo sapiens
  misc_RNA (1)...(19): siRNA sense strand
gaccaugacugucuuccaa

SEQ ID NO: 413932 - RNA, 19 nt, Homo sapiens
  misc_RNA (1)...(19): siRNA sense strand
ggagggagacagacaauau

SEQ ID NO: 413933 - RNA, 19 nt, Homo sapiens
  misc_RNA (1)...(19): siRNA sense strand
gcaccagccucaccuguca

SEQ ID NO: 413934 - RNA, 19 nt, Homo sapiens
  misc_RNA (1)...(19): siRNA sense strand
ugacagcccugacccauag

SEQ ID NO: 413935 - RNA, 19 nt, Homo sapiens
  misc_RNA (1)...(19): siRNA sense strand
cuaagcagcugucuguguu

SEQ ID NO: 413936 - RNA, 19 nt, Homo sapiens
  misc_RNA (1)...(19): siRNA sense strand
aaacuaagcagcugucugu

SEQ ID NO: 413937 - RNA, 19 nt, Homo sapiens
  misc_RNA (1)...(19): siRNA sense strand
cccaugaucuccuggauug

SEQ ID NO: 413938 - RNA, 19 nt, Homo sapiens
  misc_RNA (1)...(19): siRNA sense strand
ccuuggaacuugaccauga

SEQ ID NO: 413939 - RNA, 19 nt, Homo sapiens
  misc_RNA (1)...(19): siRNA sense strand
ccacagcccugggaaaugg

SEQ ID NO: 413940 - RNA, 19 nt, Homo sapiens
  misc_RNA (1)...(19): siRNA sense strand
caaacaacccagacagaga

SEQ ID NO: 413941 - RNA, 19 nt, Homo sapiens
  misc_RNA (1)...(19): siRNA sense strand
ugaaauggaguuacaaauc

SEQ ID NO: 413942 - RNA, 19 nt, Homo sapiens
  misc_RNA (1)...(19): siRNA sense strand
aaacaacccagacagagaa

SEQ ID NO: 413943 - RNA, 19 nt, Homo sapiens
  misc_RNA (1)...(19): siRNA sense strand
cuagagagaggaagcauga

SEQ ID NO: 413944 - RNA, 19 nt, Homo sapiens
  misc_RNA (1)...(19): siRNA sense strand
ggugugaccacgaccagua

SEQ ID NO: 413945 - RNA, 19 nt, Homo sapiens
  misc_RNA (1)...(19): siRNA sense strand
cucaagaccuguaucacaa

SEQ ID NO: 413946 - RNA, 19 nt, Homo sapiens
  misc_RNA (1)...(19): siRNA sense strand
caggauggcuggacugacu

SEQ ID NO: 413947 - RNA, 19 nt, Homo sapiens
  misc_RNA (1)...(19): siRNA sense strand
ggaguuacaaaucacaguu

SEQ ID NO: 413948 - RNA, 19 nt, Homo sapiens
  misc_RNA (1)...(19): siRNA sense strand
gagagaggaagcaugaaau

SEQ ID NO: 413949 - RNA, 19 nt, Homo sapiens
  misc_RNA (1)...(19): siRNA sense strand
gauaaggggucauauuucu

SEQ ID NO: 413950 - RNA, 19 nt, Homo sapiens
  misc_RNA (1)...(19): siRNA sense strand
gcagcugucuguguuugug

SEQ ID NO: 413951 - RNA, 19 nt, Homo sapiens
  misc_RNA (1)...(19): siRNA sense strand
gggauaaggggucauauuu

SEQ ID NO: 413952 - RNA, 19 nt, Homo sapiens
  misc_RNA (1)...(19): siRNA sense strand
caagaccuguaucacaagu

SEQ ID NO: 413953 - RNA, 19 nt, Homo sapiens
  misc_RNA (1)...(19): siRNA sense strand
ggaagcaugaaauggaguu

SEQ ID NO: 413954 - RNA, 19 nt, Homo sapiens
  misc_RNA (1)...(19): siRNA sense strand
ggaacuugaccaugacugu

SEQ ID NO: 413955 - RNA, 19 nt, Homo sapiens
  misc_RNA (1)...(19): siRNA sense strand
gaagcaugaaauggaguua

SEQ ID NO: 413956 - RNA, 19 nt, Homo sapiens
  misc_RNA (1)...(19): siRNA sense strand
caugaaauggaguuacaaa

SEQ ID NO: 413957 - RNA, 19 nt, Homo sapiens
  misc_RNA (1)...(19): siRNA sense strand
ugcaucaucuucaucauag

SEQ ID NO: 413958 - RNA, 19 nt, Homo sapiens
  misc_RNA (1)...(19): siRNA sense strand
gagggagacagacaauaug

SEQ ID NO: 413959 - RNA, 19 nt, Homo sapiens
  misc_RNA (1)...(19): siRNA sense strand
gagacagaccauaccaaga

SEQ ID NO: 413960 - RNA, 19 nt, Homo sapiens
  misc_RNA (1)...(19): siRNA sense strand
gccucucccugcagaauga

SEQ ID NO: 413961 - RNA, 19 nt, Homo sapiens
  misc_RNA (1)...(19): siRNA sense strand
agaggaagcaugaaaugga

SEQ ID NO: 413962 - RNA, 19 nt, Homo sapiens
  misc_RNA (1)...(19): siRNA sense strand
agagagaggaagcaugaaa

SEQ ID NO: 413963 - RNA, 19 nt, Homo sapiens
  misc_RNA (1)...(19): siRNA sense strand
gacaauauggggaugguua

SEQ ID NO: 413964 - RNA, 19 nt, Homo sapiens
  misc_RNA (1)...(19): siRNA sense strand
gggcacaggcaccucaaga

SEQ ID NO: 413965 - RNA, 19 nt, Homo sapiens
  misc_RNA (1)...(19): siRNA sense strand
gauguguccuacccuccuu

SEQ ID NO: 413966 - RNA, 19 nt, Homo sapiens
  misc_RNA (1)...(19): siRNA sense strand
caacccagacagagaagug

SEQ ID NO: 413967 - RNA, 19 nt, Homo sapiens
  misc_RNA (1)...(19): siRNA sense strand
gagugcacgugagggauga

SEQ ID NO: 413968 - RNA, 19 nt, Homo sapiens
  misc_RNA (1)...(19): siRNA sense strand
ccucagugcucacccuuac

SEQ ID NO: 413969 - RNA, 19 nt, Homo sapiens
  misc_RNA (1)...(19): siRNA sense strand
ccucaagaccuguaucaca

SEQ ID NO: 413970 - RNA, 19 nt, Homo sapiens
  misc_RNA (1)...(19): siRNA sense strand
cugcaucaucuucaucaua

SEQ ID NO: 413971 - RNA, 19 nt, Homo sapiens
  misc_RNA (1)...(19): siRNA sense strand
gugacagcccugacccaua

SEQ ID NO: 413972 - RNA, 19 nt, Homo sapiens
  misc_RNA (1)...(19): siRNA sense strand
gauacaggcauggaagaug

SEQ ID NO: 413973 - RNA, 19 nt, Homo sapiens
  misc_RNA (1)...(19): siRNA sense strand
gaguuacaaaucacaguug

SEQ ID NO: 413974 - RNA, 19 nt, Homo sapiens
  misc_RNA (1)...(19): siRNA sense strand
gggccuguguguccaugug

SEQ ID NO: 413975 - RNA, 19 nt, Homo sapiens
  misc_RNA (1)...(19): siRNA sense strand
agacagaccauaccaagac

SEQ ID NO: 413976 - RNA, 19 nt, Homo sapiens
  misc_RNA (1)...(19): siRNA sense strand
aagcagcugucuguguuug

SEQ ID NO: 413977 - RNA, 19 nt, Homo sapiens
  misc_RNA (1)...(19): siRNA sense strand
cacaaacaacccagacaga

SEQ ID NO: 413978 - RNA, 19 nt, Homo sapiens
  misc_RNA (1)...(19): siRNA sense strand
agagaggaagcaugaaaug

SEQ ID NO: 413979 - RNA, 19 nt, Homo sapiens
  misc_RNA (1)...(19): siRNA sense strand
gggaaauggcucaucucuu

SEQ ID NO: 413980 - RNA, 19 nt, Homo sapiens
  misc_RNA (1)...(19): siRNA sense strand
ccugggaaauggcucaucu

SEQ ID NO: 413981 - RNA, 19 nt, Homo sapiens
  misc_RNA (1)...(19): siRNA sense strand
gauggagggagacagacaa

SEQ ID NO: 413982 - RNA, 19 nt, Homo sapiens
  misc_RNA (1)...(19): siRNA sense strand
aguuacaaaucacaguuga

SEQ ID NO: 413983 - RNA, 19 nt, Homo sapiens
  misc_RNA (1)...(19): siRNA sense strand
gagaggaagcaugaaaugg

SEQ ID NO: 413984 - RNA, 19 nt, Homo sapiens
  misc_RNA (1)...(19): siRNA sense strand
uaaggggucauauuucuuu

SEQ ID NO: 413985 - RNA, 19 nt, Homo sapiens
  misc_RNA (1)...(19): siRNA sense strand
gggauacaggcauggaaga

SEQ ID NO: 413986 - RNA, 19 nt, Homo sapiens
  misc_RNA (1)...(19): siRNA sense strand
gggcaggagacagaccaua

SEQ ID NO: 413987 - RNA, 19 nt, Homo sapiens
  misc_RNA (1)...(19): siRNA sense strand
caugugcccugcuccuucu

SEQ ID NO: 413988 - RNA, 19 nt, Homo sapiens
  misc_RNA (1)...(19): siRNA sense strand
ggauacaggcauggaagau

SEQ ID NO: 413989 - RNA, 19 nt, Homo sapiens
  misc_RNA (1)...(19): siRNA sense strand
agcaugaaauggaguuaca

SEQ ID NO: 413990 - RNA, 19 nt, Homo sapiens
  misc_RNA (1)...(19): siRNA sense strand
caucaucuucaucauagug

SEQ ID NO: 413991 - RNA, 19 nt, Homo sapiens
  misc_RNA (1)...(19): siRNA sense strand
caaaucacaguugaauuac

SEQ ID NO: 413992 - RNA, 19 nt, Homo sapiens
  misc_RNA (1)...(19): siRNA sense strand
ggauggagggagacagaca

SEQ ID NO: 413993 - RNA, 19 nt, Homo sapiens
  misc_RNA (1)...(19): siRNA sense strand
uguccuacccuccuuggaa

SEQ ID NO: 413994 - RNA, 19 nt, Homo sapiens
  misc_RNA (1)...(19): siRNA sense strand
aaauggcucaucucuuuca

SEQ ID NO: 413995 - RNA, 19 nt, Homo sapiens
  misc_RNA (1)...(19): siRNA sense strand
caaagaagauuacacaguu

SEQ ID NO: 413996 - RNA, 19 nt, Homo sapiens
  misc_RNA (1)...(19): siRNA sense strand
ugacagaucuccagcuauu

SEQ ID NO: 413997 - RNA, 19 nt, Homo sapiens
  misc_RNA (1)...(19): siRNA sense strand
gaauauauaugucccagau

SEQ ID NO: 413998 - RNA, 19 nt, Homo sapiens
  misc_RNA (1)...(19): siRNA sense strand
gauaauagagccaaugaaa

SEQ ID NO: 413999 - RNA, 19 nt, Homo sapiens
  misc_RNA (1)...(19): siRNA sense strand
gaucacaucucuuccaaca

SEQ ID NO: 414000 - RNA, 19 nt, Homo sapiens
  misc_RNA (1)...(19): siRNA sense strand
caaacuaccggaauauaua

SEQ ID NO: 414001 - RNA, 19 nt, Homo sapiens
  misc_RNA (1)...(19): siRNA sense strand
gaaucaggcuuuauugaag

SEQ ID NO: 414002 - RNA, 19 nt, Homo sapiens
  misc_RNA (1)...(19): siRNA sense strand
gcaggauucuuugcaaauu

SEQ ID NO: 414003 - RNA, 19 nt, Homo sapiens
  misc_RNA (1)...(19): siRNA sense strand
caacacaucuuugcaggau

SEQ ID NO: 414004 - RNA, 19 nt, Homo sapiens
  misc_RNA (1)...(19): siRNA sense strand
ucacaucucuuccaacagu

SEQ ID NO: 414005 - RNA, 19 nt, Homo sapiens
  misc_RNA (1)...(19): siRNA sense strand
gacaguaacucaggaacaa

SEQ ID NO: 414006 - RNA, 19 nt, Homo sapiens
  misc_RNA (1)...(19): siRNA sense strand
gaaggaauacuacaacaca

SEQ ID NO: 414007 - RNA, 19 nt, Homo sapiens
  misc_RNA (1)...(19): siRNA sense strand
ugacagaugauuccaguuu

SEQ ID NO: 414008 - RNA, 19 nt, Homo sapiens
  misc_RNA (1)...(19): siRNA sense strand
gcaacagauuuagcaauga

SEQ ID NO: 414009 - RNA, 19 nt, Homo sapiens
  misc_RNA (1)...(19): siRNA sense strand
gcaaagaagauuacacagu

SEQ ID NO: 414010 - RNA, 19 nt, Homo sapiens
  misc_RNA (1)...(19): siRNA sense strand
auacagaucucgaggaagu

SEQ ID NO: 414011 - RNA, 19 nt, Homo sapiens
  misc_RNA (1)...(19): siRNA sense strand
uuacacaguugaagaggaa

SEQ ID NO: 414012 - RNA, 19 nt, Homo sapiens
  misc_RNA (1)...(19): siRNA sense strand
gcaguuaccuugcaaucac

SEQ ID NO: 414013 - RNA, 19 nt, Homo sapiens
  misc_RNA (1)...(19): siRNA sense strand
uugaagaagugacagauga

SEQ ID NO: 414014 - RNA, 19 nt, Homo sapiens
  misc_RNA (1)...(19): siRNA sense strand
ugauauggguuuagagugu

SEQ ID NO: 414015 - RNA, 19 nt, Homo sapiens
  misc_RNA (1)...(19): siRNA sense strand
ccacuggaccaagauaaua

SEQ ID NO: 414016 - RNA, 19 nt, Homo sapiens
  misc_RNA (1)...(19): siRNA sense strand
gaagaagugacagaugauu

SEQ ID NO: 414017 - RNA, 19 nt, Homo sapiens
  misc_RNA (1)...(19): siRNA sense strand
gcaagcaacagauuuagca

SEQ ID NO: 414018 - RNA, 19 nt, Homo sapiens
  misc_RNA (1)...(19): siRNA sense strand
ccaaacuaccggaauauau

SEQ ID NO: 414019 - RNA, 19 nt, Homo sapiens
  misc_RNA (1)...(19): siRNA sense strand
gauagacaauaccacaaca

SEQ ID NO: 414020 - RNA, 19 nt, Homo sapiens
  misc_RNA (1)...(19): siRNA sense strand
ugaaucaggcuuuauugaa

SEQ ID NO: 414021 - RNA, 19 nt, Homo sapiens
  misc_RNA (1)...(19): siRNA sense strand
aaagaagauuacacaguug

SEQ ID NO: 414022 - RNA, 19 nt, Homo sapiens
  misc_RNA (1)...(19): siRNA sense strand
ccugacagaucuccagcua

SEQ ID NO: 414023 - RNA, 19 nt, Homo sapiens
  misc_RNA (1)...(19): siRNA sense strand
gcagucggauagacaauac

SEQ ID NO: 414024 - RNA, 19 nt, Homo sapiens
  misc_RNA (1)...(19): siRNA sense strand
acacaucuuugcaggauuc

SEQ ID NO: 414025 - RNA, 19 nt, Homo sapiens
  misc_RNA (1)...(19): siRNA sense strand
caacagauuuagcaaugac

SEQ ID NO: 414026 - RNA, 19 nt, Homo sapiens
  misc_RNA (1)...(19): siRNA sense strand
caucuuugcaggauucuuu

SEQ ID NO: 414027 - RNA, 19 nt, Homo sapiens
  misc_RNA (1)...(19): siRNA sense strand
uaauagagccaaugaaagg

SEQ ID NO: 414028 - RNA, 19 nt, Homo sapiens
  misc_RNA (1)...(19): siRNA sense strand
guaggaagagcuuaaaugg

SEQ ID NO: 414029 - RNA, 19 nt, Homo sapiens
  misc_RNA (1)...(19): siRNA sense strand
aaucaggcuuuauugaaga

SEQ ID NO: 414030 - RNA, 19 nt, Homo sapiens
  misc_RNA (1)...(19): siRNA sense strand
acaaguugauauggguuua

SEQ ID NO: 414031 - RNA, 19 nt, Homo sapiens
  misc_RNA (1)...(19): siRNA sense strand
caacagugacaguaacuca

SEQ ID NO: 414032 - RNA, 19 nt, Homo sapiens
  misc_RNA (1)...(19): siRNA sense strand
gguuuagaguguccaguau

SEQ ID NO: 414033 - RNA, 19 nt, Homo sapiens
  misc_RNA (1)...(19): siRNA sense strand
gacagggcuugaugccauu

SEQ ID NO: 414034 - RNA, 19 nt, Homo sapiens
  misc_RNA (1)...(19): siRNA sense strand
uuucacagcaguuguauug

SEQ ID NO: 414035 - RNA, 19 nt, Homo sapiens
  misc_RNA (1)...(19): siRNA sense strand
auauauaugucccagaugu

SEQ ID NO: 414036 - RNA, 19 nt, Homo sapiens
  misc_RNA (1)...(19): siRNA sense strand
cuacaugaccgauggacuu

SEQ ID NO: 414037 - RNA, 19 nt, Homo sapiens
  misc_RNA (1)...(19): siRNA sense strand
agcaacagauuuagcaaug

SEQ ID NO: 414038 - RNA, 19 nt, Homo sapiens
  misc_RNA (1)...(19): siRNA sense strand
ugcaaucacuucuuucaca

SEQ ID NO: 414039 - RNA, 19 nt, Homo sapiens
  misc_RNA (1)...(19): siRNA sense strand
ggguuuagaguguccagua

SEQ ID NO: 414040 - RNA, 19 nt, Homo sapiens
  misc_RNA (1)...(19): siRNA sense strand
ggucagacagggcuugaug

SEQ ID NO: 414041 - RNA, 19 nt, Homo sapiens
  misc_RNA (1)...(19): siRNA sense strand
gcgggaugcugcacuccaa

SEQ ID NO: 414042 - RNA, 19 nt, Homo sapiens
  misc_RNA (1)...(19): siRNA sense strand
caggauucuuugcaaauuc

SEQ ID NO: 414043 - RNA, 19 nt, Homo sapiens
  misc_RNA (1)...(19): siRNA sense strand
ggaauacuacaacacaucu

SEQ ID NO: 414044 - RNA, 19 nt, Homo sapiens
  misc_RNA (1)...(19): siRNA sense strand
gugaaucaggcuuuauuga

SEQ ID NO: 414045 - RNA, 19 nt, Homo sapiens
  misc_RNA (1)...(19): siRNA sense strand
guauguaggaagagcuuaa

SEQ ID NO: 414046 - RNA, 19 nt, Homo sapiens
  misc_RNA (1)...(19): siRNA sense strand
acagaucuccagcuauuga

SEQ ID NO: 414047 - RNA, 19 nt, Homo sapiens
  misc_RNA (1)...(19): siRNA sense strand
agaugugaaucaggcuuua

SEQ ID NO: 414048 - RNA, 19 nt, Homo sapiens
  misc_RNA (1)...(19): siRNA sense strand
agaggaaguccggcaguua

SEQ ID NO: 414049 - RNA, 19 nt, Homo sapiens
  misc_RNA (1)...(19): siRNA sense strand
gaagauuacacaguugaag

SEQ ID NO: 414050 - RNA, 19 nt, Homo sapiens
  misc_RNA (1)...(19): siRNA sense strand
caugaccgauggacuuucu

SEQ ID NO: 414051 - RNA, 19 nt, Homo sapiens
  misc_RNA (1)...(19): siRNA sense strand
gacaauaccacaacaacac

SEQ ID NO: 414052 - RNA, 19 nt, Homo sapiens
  misc_RNA (1)...(19): siRNA sense strand
gaaguccggcaguuaccuu

SEQ ID NO: 414053 - RNA, 19 nt, Homo sapiens
  misc_RNA (1)...(19): siRNA sense strand
caguaugcaaagaagauua

SEQ ID NO: 414054 - RNA, 19 nt, Homo sapiens
  misc_RNA (1)...(19): siRNA sense strand
gggcuugaugccauuguaa

SEQ ID NO: 414055 - RNA, 19 nt, Homo sapiens
  misc_RNA (1)...(19): siRNA sense strand
ccaagauaauagagccaau

SEQ ID NO: 414056 - RNA, 19 nt, Homo sapiens
  misc_RNA (1)...(19): siRNA sense strand
gacagaugauuccaguuuu

SEQ ID NO: 414057 - RNA, 19 nt, Homo sapiens
  misc_RNA (1)...(19): siRNA sense strand
gaggaaguccggcaguuac

SEQ ID NO: 414058 - RNA, 19 nt, Homo sapiens
  misc_RNA (1)...(19): siRNA sense strand
caagauaauagagccaaug

SEQ ID NO: 414059 - RNA, 19 nt, Homo sapiens
  misc_RNA (1)...(19): siRNA sense strand
ggauagacaauaccacaac

SEQ ID NO: 414060 - RNA, 19 nt, Homo sapiens
  misc_RNA (1)...(19): siRNA sense strand
aagauaauagagccaauga

SEQ ID NO: 414061 - RNA, 19 nt, Homo sapiens
  misc_RNA (1)...(19): siRNA sense strand
gccccaaacuaccggaaua

SEQ ID NO: 414062 - RNA, 19 nt, Homo sapiens
  misc_RNA (1)...(19): siRNA sense strand
ucaggaacaaguugauaug

SEQ ID NO: 414063 - RNA, 19 nt, Homo sapiens
  misc_RNA (1)...(19): siRNA sense strand
ggcagucggauagacaaua

SEQ ID NO: 414064 - RNA, 19 nt, Homo sapiens
  misc_RNA (1)...(19): siRNA sense strand
aagaggaaguccggcaguu

SEQ ID NO: 414065 - RNA, 19 nt, Homo sapiens
  misc_RNA (1)...(19): siRNA sense strand
cagaugugaaucaggcuuu

SEQ ID NO: 414066 - RNA, 19 nt, Homo sapiens
  misc_RNA (1)...(19): siRNA sense strand
uguaggaagagcuuaaaug

SEQ ID NO: 414067 - RNA, 19 nt, Homo sapiens
  misc_RNA (1)...(19): siRNA sense strand
aagaagauuacacaguuga

SEQ ID NO: 414068 - RNA, 19 nt, Homo sapiens
  misc_RNA (1)...(19): siRNA sense strand
aagauuacacaguugaaga

SEQ ID NO: 414069 - RNA, 19 nt, Homo sapiens
  misc_RNA (1)...(19): siRNA sense strand
ggacucuacucggcaaagc

SEQ ID NO: 414070 - RNA, 19 nt, Homo sapiens
  misc_RNA (1)...(19): siRNA sense strand
gccauugggucggagauac

SEQ ID NO: 414071 - RNA, 19 nt, Homo sapiens
  misc_RNA (1)...(19): siRNA sense strand
ggcaaagccagagcacuga

SEQ ID NO: 414072 - RNA, 19 nt, Homo sapiens
  misc_RNA (1)...(19): siRNA sense strand
uaaauggugaggacucuac

SEQ ID NO: 414073 - RNA, 19 nt, Homo sapiens
  misc_RNA (1)...(19): siRNA sense strand
gccauuguaacccagcuuu

SEQ ID NO: 414074 - RNA, 19 nt, Homo sapiens
  misc_RNA (1)...(19): siRNA sense strand
cccaaacuaccggaauaua

SEQ ID NO: 414075 - RNA, 19 nt, Homo sapiens
  misc_RNA (1)...(19): siRNA sense strand
gaauacuacaacacaucuu

SEQ ID NO: 414076 - RNA, 19 nt, Homo sapiens
  misc_RNA (1)...(19): siRNA sense strand
guugauauggguuuagagu

SEQ ID NO: 414077 - RNA, 19 nt, Homo sapiens
  misc_RNA (1)...(19): siRNA sense strand
ugacaguaacucaggaaca

SEQ ID NO: 414078 - RNA, 19 nt, Homo sapiens
  misc_RNA (1)...(19): siRNA sense strand
ggaaguucucguccugaca

SEQ ID NO: 414079 - RNA, 19 nt, Homo sapiens
  misc_RNA (1)...(19): siRNA sense strand
ugaccgauggacuuucuga

SEQ ID NO: 414080 - RNA, 19 nt, Homo sapiens
  misc_RNA (1)...(19): siRNA sense strand
aaguugauauggguuuaga

SEQ ID NO: 414081 - RNA, 19 nt, Homo sapiens
  misc_RNA (1)...(19): siRNA sense strand
gaggacaucuucguacaug

SEQ ID NO: 414082 - RNA, 19 nt, Homo sapiens
  misc_RNA (1)...(19): siRNA sense strand
ccgaggacaucuucguaca

SEQ ID NO: 414083 - RNA, 19 nt, Homo sapiens
  misc_RNA (1)...(19): siRNA sense strand
ccuacaagaugugcccuau

SEQ ID NO: 414084 - RNA, 19 nt, Homo sapiens
  misc_RNA (1)...(19): siRNA sense strand
uacaagaugugcccuaucc

SEQ ID NO: 414085 - RNA, 19 nt, Homo sapiens
  misc_RNA (1)...(19): siRNA sense strand
ucaagggcgucuguaagca

SEQ ID NO: 414086 - RNA, 19 nt, Homo sapiens
  misc_RNA (1)...(19): siRNA sense strand
gcccuaucccucccaagaa

SEQ ID NO: 414087 - RNA, 19 nt, Homo sapiens
  misc_RNA (1)...(19): siRNA sense strand
gggcgucuguaagcaguuc

SEQ ID NO: 414088 - RNA, 19 nt, Homo sapiens
  misc_RNA (1)...(19): siRNA sense strand
acagggccauggcuucauc

SEQ ID NO: 414089 - RNA, 19 nt, Homo sapiens
  misc_RNA (1)...(19): siRNA sense strand
aagcggaccaggaccuauu

SEQ ID NO: 414090 - RNA, 19 nt, Homo sapiens
  misc_RNA (1)...(19): siRNA sense strand
uggagguggugcucacuca

SEQ ID NO: 414091 - RNA, 19 nt, Homo sapiens
  misc_RNA (1)...(19): siRNA sense strand
ucacagggccauggcuuca

SEQ ID NO: 414092 - RNA, 19 nt, Homo sapiens
  misc_RNA (1)...(19): siRNA sense strand
guucaagggcgucuguaag

SEQ ID NO: 414093 - RNA, 19 nt, Homo sapiens
  misc_RNA (1)...(19): siRNA sense strand
ggaaugggauggucuagua

SEQ ID NO: 414094 - RNA, 19 nt, Homo sapiens
  misc_RNA (1)...(19): siRNA sense strand
gauuugccauucuuugaua

SEQ ID NO: 414095 - RNA, 19 nt, Homo sapiens
  misc_RNA (1)...(19): siRNA sense strand
gacacucucugcugcauuu

SEQ ID NO: 414096 - RNA, 19 nt, Homo sapiens
  misc_RNA (1)...(19): siRNA sense strand
ugcagacucucaauuaaua

SEQ ID NO: 414097 - RNA, 19 nt, Homo sapiens
  misc_RNA (1)...(19): siRNA sense strand
aaacagauuugccauucuu

SEQ ID NO: 414098 - RNA, 19 nt, Homo sapiens
  misc_RNA (1)...(19): siRNA sense strand
auacuuguguggcaaauuu

SEQ ID NO: 414099 - RNA, 19 nt, Homo sapiens
  misc_RNA (1)...(19): siRNA sense strand
gaaaacagauuugccauuc

SEQ ID NO: 414100 - RNA, 19 nt, Homo sapiens
  misc_RNA (1)...(19): siRNA sense strand
cagcauagcagauaaaaua

SEQ ID NO: 414101 - RNA, 19 nt, Homo sapiens
  misc_RNA (1)...(19): siRNA sense strand
gggaaagaauaacuucaga

SEQ ID NO: 414102 - RNA, 19 nt, Homo sapiens
  misc_RNA (1)...(19): siRNA sense strand
ucagauugcuacauggauu

SEQ ID NO: 414103 - RNA, 19 nt, Homo sapiens
  misc_RNA (1)...(19): siRNA sense strand
caaauuugccuuaucagau

SEQ ID NO: 414104 - RNA, 19 nt, Homo sapiens
  misc_RNA (1)...(19): siRNA sense strand
gcaacaugacuguaaaguu

SEQ ID NO: 414105 - RNA, 19 nt, Homo sapiens
  misc_RNA (1)...(19): siRNA sense strand
accagaagauuucagcaua

SEQ ID NO: 414106 - RNA, 19 nt, Homo sapiens
  misc_RNA (1)...(19): siRNA sense strand
ggaauccaguguuguaagg

SEQ ID NO: 414107 - RNA, 19 nt, Homo sapiens
  misc_RNA (1)...(19): siRNA sense strand
uaaugaaagugggaaagaa

SEQ ID NO: 414108 - RNA, 19 nt, Homo sapiens
  misc_RNA (1)...(19): siRNA sense strand
gaacuggcaacaugacugu

SEQ ID NO: 414109 - RNA, 19 nt, Homo sapiens
  misc_RNA (1)...(19): siRNA sense strand
gugcuauacuuauguuuca

SEQ ID NO: 414110 - RNA, 19 nt, Homo sapiens
  misc_RNA (1)...(19): siRNA sense strand
ccagaagauuucagcauag

SEQ ID NO: 414111 - RNA, 19 nt, Homo sapiens
  misc_RNA (1)...(19): siRNA sense strand
aaauuugccuuaucagauc

SEQ ID NO: 414112 - RNA, 19 nt, Homo sapiens
  misc_RNA (1)...(19): siRNA sense strand
gauggucuaguaaggauaa

SEQ ID NO: 414113 - RNA, 19 nt, Homo sapiens
  misc_RNA (1)...(19): siRNA sense strand
guaaggauagaaccuaaga

SEQ ID NO: 414114 - RNA, 19 nt, Homo sapiens
  misc_RNA (1)...(19): siRNA sense strand
ugaaagugggaaagaauaa

SEQ ID NO: 414115 - RNA, 19 nt, Homo sapiens
  misc_RNA (1)...(19): siRNA sense strand
gguuguugcuugugaacuu

SEQ ID NO: 414116 - RNA, 19 nt, Homo sapiens
  misc_RNA (1)...(19): siRNA sense strand
caccaccacccaucaauuu

SEQ ID NO: 414117 - RNA, 19 nt, Homo sapiens
  misc_RNA (1)...(19): siRNA sense strand
gcacguguggaccaucuaa

SEQ ID NO: 414118 - RNA, 19 nt, Homo sapiens
  misc_RNA (1)...(19): siRNA sense strand
gggauggucuaguaaggau

SEQ ID NO: 414119 - RNA, 19 nt, Homo sapiens
  misc_RNA (1)...(19): siRNA sense strand
gauuucagcauagcagaua

SEQ ID NO: 414120 - RNA, 19 nt, Homo sapiens
  misc_RNA (1)...(19): siRNA sense strand
gggauugggcagcacauuu

SEQ ID NO: 414121 - RNA, 19 nt, Homo sapiens
  misc_RNA (1)...(19): siRNA sense strand
gauagaaccuaagaaucca

SEQ ID NO: 414122 - RNA, 19 nt, Homo sapiens
  misc_RNA (1)...(19): siRNA sense strand
gaaugggauggucuaguaa

SEQ ID NO: 414123 - RNA, 19 nt, Homo sapiens
  misc_RNA (1)...(19): siRNA sense strand
ggugugcuauacuuauguu

SEQ ID NO: 414124 - RNA, 19 nt, Homo sapiens
  misc_RNA (1)...(19): siRNA sense strand
cagauuugccauucuuuga

SEQ ID NO: 414125 - RNA, 19 nt, Homo sapiens
  misc_RNA (1)...(19): siRNA sense strand
caggugugcuauacuuaug

SEQ ID NO: 414126 - RNA, 19 nt, Homo sapiens
  misc_RNA (1)...(19): siRNA sense strand
uacugcagacucucaauua

SEQ ID NO: 414127 - RNA, 19 nt, Homo sapiens
  misc_RNA (1)...(19): siRNA sense strand
aagaccaacugauguagug

SEQ ID NO: 414128 - RNA, 19 nt, Homo sapiens
  misc_RNA (1)...(19): siRNA sense strand
acugcagacucucaauuaa

SEQ ID NO: 414129 - RNA, 19 nt, Homo sapiens
  misc_RNA (1)...(19): siRNA sense strand
uguggaccaucuaaugaaa

SEQ ID NO: 414130 - RNA, 19 nt, Homo sapiens
  misc_RNA (1)...(19): siRNA sense strand
acucucugcugcauuuaaa

SEQ ID NO: 414131 - RNA, 19 nt, Homo sapiens
  misc_RNA (1)...(19): siRNA sense strand
acgcagaagguauucauuu

SEQ ID NO: 414132 - RNA, 19 nt, Homo sapiens
  misc_RNA (1)...(19): siRNA sense strand
gugcaacaacucuuggaaa

SEQ ID NO: 414133 - RNA, 19 nt, Homo sapiens
  misc_RNA (1)...(19): siRNA sense strand
cuuaagaccaacugaugua

SEQ ID NO: 414134 - RNA, 19 nt, Homo sapiens
  misc_RNA (1)...(19): siRNA sense strand
ggauucaacgcagaaggua

SEQ ID NO: 414135 - RNA, 19 nt, Homo sapiens
  misc_RNA (1)...(19): siRNA sense strand
ccauggacauagaugacuu

SEQ ID NO: 414136 - RNA, 19 nt, Homo sapiens
  misc_RNA (1)...(19): siRNA sense strand
uuucaggugugcuauacuu

SEQ ID NO: 414137 - RNA, 19 nt, Homo sapiens
  misc_RNA (1)...(19): siRNA sense strand
gcagauaaaauacagcaaa

SEQ ID NO: 414138 - RNA, 19 nt, Homo sapiens
  misc_RNA (1)...(19): siRNA sense strand
ggugggugaugugcugaaa

SEQ ID NO: 414139 - RNA, 19 nt, Homo sapiens
  misc_RNA (1)...(19): siRNA sense strand
aaagguuguugcuugugaa

SEQ ID NO: 414140 - RNA, 19 nt, Homo sapiens
  misc_RNA (1)...(19): siRNA sense strand
cuggaggacucauguucaa

SEQ ID NO: 414141 - RNA, 19 nt, Homo sapiens
  misc_RNA (1)...(19): siRNA sense strand
gccauucuuugauacuugu

SEQ ID NO: 414142 - RNA, 19 nt, Homo sapiens
  misc_RNA (1)...(19): siRNA sense strand
caacgcagaagguauucau

SEQ ID NO: 414143 - RNA, 19 nt, Homo sapiens
  misc_RNA (1)...(19): siRNA sense strand
ccaccaccacccaucaauu

SEQ ID NO: 414144 - RNA, 19 nt, Homo sapiens
  misc_RNA (1)...(19): siRNA sense strand
caauuaauacacagcuguu

SEQ ID NO: 414145 - RNA, 19 nt, Homo sapiens
  misc_RNA (1)...(19): siRNA sense strand
aaggauagaaccuaagaau

SEQ ID NO: 414146 - RNA, 19 nt, Homo sapiens
  misc_RNA (1)...(19): siRNA sense strand
gauguagugcuggaaguug

SEQ ID NO: 414147 - RNA, 19 nt, Homo sapiens
  misc_RNA (1)...(19): siRNA sense strand
ggauugggcagcacauuuu

SEQ ID NO: 414148 - RNA, 19 nt, Homo sapiens
  misc_RNA (1)...(19): siRNA sense strand
cuaaugaaagugggaaaga

SEQ ID NO: 414149 - RNA, 19 nt, Homo sapiens
  misc_RNA (1)...(19): siRNA sense strand
cguguggaccaucuaauga

SEQ ID NO: 414150 - RNA, 19 nt, Homo sapiens
  misc_RNA (1)...(19): siRNA sense strand
uuguaaggauagaaccuaa

SEQ ID NO: 414151 - RNA, 19 nt, Homo sapiens
  misc_RNA (1)...(19): siRNA sense strand
ucagaucucuucgccuuuu

SEQ ID NO: 414152 - RNA, 19 nt, Homo sapiens
  misc_RNA (1)...(19): siRNA sense strand
cgcagaagguauucauuuu

SEQ ID NO: 414153 - RNA, 19 nt, Homo sapiens
  misc_RNA (1)...(19): siRNA sense strand
caucagauugcuacaugga

SEQ ID NO: 414154 - RNA, 19 nt, Homo sapiens
  misc_RNA (1)...(19): siRNA sense strand
uucaucagauugcuacaug

SEQ ID NO: 414155 - RNA, 19 nt, Homo sapiens
  misc_RNA (1)...(19): siRNA sense strand
gccuuaagaccaacugaug

SEQ ID NO: 414156 - RNA, 19 nt, Homo sapiens
  misc_RNA (1)...(19): siRNA sense strand
gugaugugcugaaaacaga

SEQ ID NO: 414157 - RNA, 19 nt, Homo sapiens
  misc_RNA (1)...(19): siRNA sense strand
gcuggaggacucauguuca

SEQ ID NO: 414158 - RNA, 19 nt, Homo sapiens
  misc_RNA (1)...(19): siRNA sense strand
gaaagugggaaagaauaac

SEQ ID NO: 414159 - RNA, 19 nt, Homo sapiens
  misc_RNA (1)...(19): siRNA sense strand
uggaccaucuaaugaaagu

SEQ ID NO: 414160 - RNA, 19 nt, Homo sapiens
  misc_RNA (1)...(19): siRNA sense strand
gacucucaauuaauacaca

SEQ ID NO: 414161 - RNA, 19 nt, Homo sapiens
  misc_RNA (1)...(19): siRNA sense strand
ucaggugugcuauacuuau

SEQ ID NO: 414162 - RNA, 19 nt, Homo sapiens
  misc_RNA (1)...(19): siRNA sense strand
aaaagguuguugcuuguga

SEQ ID NO: 414163 - RNA, 19 nt, Homo sapiens
  misc_RNA (1)...(19): siRNA sense strand
gcacagguuuuagugacaa

SEQ ID NO: 414164 - RNA, 19 nt, Homo sapiens
  misc_RNA (1)...(19): siRNA sense strand
ugcaacaacucuuggaaaa

SEQ ID NO: 414165 - RNA, 19 nt, Homo sapiens
  misc_RNA (1)...(19): siRNA sense strand
acaugacuguaaaguuguu

SEQ ID NO: 414166 - RNA, 19 nt, Homo sapiens
  misc_RNA (1)...(19): siRNA sense strand
cuggcaacaugacuguaaa

SEQ ID NO: 414167 - RNA, 19 nt, Homo sapiens
  misc_RNA (1)...(19): siRNA sense strand
ugccauucuuugauacuug

SEQ ID NO: 414168 - RNA, 19 nt, Homo sapiens
  misc_RNA (1)...(19): siRNA sense strand
ugacuucaucagauugcua

SEQ ID NO: 414169 - RNA, 19 nt, Homo sapiens
  misc_RNA (1)...(19): siRNA sense strand
ucaggaaugggauggucua

SEQ ID NO: 414170 - RNA, 19 nt, Homo sapiens
  misc_RNA (1)...(19): siRNA sense strand
guuguaaggauagaaccua

SEQ ID NO: 414171 - RNA, 19 nt, Homo sapiens
  misc_RNA (1)...(19): siRNA sense strand
augaaagugggaaagaaua

SEQ ID NO: 414172 - RNA, 19 nt, Homo sapiens
  misc_RNA (1)...(19): siRNA sense strand
aaugaaagugggaaagaau

SEQ ID NO: 414173 - RNA, 19 nt, Homo sapiens
  misc_RNA (1)...(19): siRNA sense strand
ucuucaagcuguugcuaca

SEQ ID NO: 414174 - RNA, 19 nt, Homo sapiens
  misc_RNA (1)...(19): siRNA sense strand
guuguugcuugugaacuug

SEQ ID NO: 414175 - RNA, 19 nt, Homo sapiens
  misc_RNA (1)...(19): siRNA sense strand
guguggaccaucuaaugaa

SEQ ID NO: 414176 - RNA, 19 nt, Homo sapiens
  misc_RNA (1)...(19): siRNA sense strand
cagaagauuucagcauagc

SEQ ID NO: 414177 - RNA, 19 nt, Homo sapiens
  misc_RNA (1)...(19): siRNA sense strand
gcacguaccacaccaauga

SEQ ID NO: 414178 - RNA, 19 nt, Homo sapiens
  misc_RNA (1)...(19): siRNA sense strand
ggugauagcagcagaaagg

SEQ ID NO: 414179 - RNA, 19 nt, Homo sapiens
  misc_RNA (1)...(19): siRNA sense strand
ccaagaugcuggugauagc

SEQ ID NO: 414180 - RNA, 19 nt, Homo sapiens
  misc_RNA (1)...(19): siRNA sense strand
cgucauugcaggugugauu

SEQ ID NO: 414181 - RNA, 19 nt, Homo sapiens
  misc_RNA (1)...(19): siRNA sense strand
ccuccaagaugcuggugau

SEQ ID NO: 414182 - RNA, 19 nt, Homo sapiens
  misc_RNA (1)...(19): siRNA sense strand
ccuagucucccuccucuuc

SEQ ID NO: 414183 - RNA, 19 nt, Homo sapiens
  misc_RNA (1)...(19): siRNA sense strand
gcagcagaaaggaguacuu

SEQ ID NO: 414184 - RNA, 19 nt, Homo sapiens
  misc_RNA (1)...(19): siRNA sense strand
gacccugcccuccaagaug

SEQ ID NO: 414185 - RNA, 19 nt, Homo sapiens
  misc_RNA (1)...(19): siRNA sense strand
ggccaagggcacggaguuu

SEQ ID NO: 414186 - RNA, 19 nt, Homo sapiens
  misc_RNA (1)...(19): siRNA sense strand
gccaagggcacggaguuug

SEQ ID NO: 414187 - RNA, 19 nt, Homo sapiens
  misc_RNA (1)...(19): siRNA sense strand
gcacguaccacaccaauga

SEQ ID NO: 414188 - RNA, 19 nt, Homo sapiens
  misc_RNA (1)...(19): siRNA sense strand
ggugauagcagcagaaagg

SEQ ID NO: 414189 - RNA, 19 nt, Homo sapiens
  misc_RNA (1)...(19): siRNA sense strand
ccaagaugcuggugauagc

SEQ ID NO: 414190 - RNA, 19 nt, Homo sapiens
  misc_RNA (1)...(19): siRNA sense strand
cgucauugcaggugugauu

SEQ ID NO: 414191 - RNA, 19 nt, Homo sapiens
  misc_RNA (1)...(19): siRNA sense strand
ccuccaagaugcuggugau

SEQ ID NO: 414192 - RNA, 19 nt, Homo sapiens
  misc_RNA (1)...(19): siRNA sense strand
ccuagucucccuccucuuc

SEQ ID NO: 414193 - RNA, 19 nt, Homo sapiens
  misc_RNA (1)...(19): siRNA sense strand
gcagcagaaaggaguacuu

SEQ ID NO: 414194 - RNA, 19 nt, Homo sapiens
  misc_RNA (1)...(19): siRNA sense strand
gacccugcccuccaagaug

SEQ ID NO: 414195 - RNA, 19 nt, Homo sapiens
  misc_RNA (1)...(19): siRNA sense strand
ggccaagggcacggaguuu

SEQ ID NO: 414196 - RNA, 19 nt, Homo sapiens
  misc_RNA (1)...(19): siRNA sense strand
gccaagggcacggaguuug

SEQ ID NO: 414197 - RNA, 19 nt, Homo sapiens
  misc_RNA (1)...(19): siRNA sense strand
gaaaggugcuuccgaggua

SEQ ID NO: 414198 - RNA, 19 nt, Homo sapiens
  misc_RNA (1)...(19): siRNA sense strand
ccaaaucucuggacaaguu

SEQ ID NO: 414199 - RNA, 19 nt, Homo sapiens
  misc_RNA (1)...(19): siRNA sense strand
gcaccgaccugcagaaaga

SEQ ID NO: 414200 - RNA, 19 nt, Homo sapiens
  misc_RNA (1)...(19): siRNA sense strand
ggaggcagcuggcacaaga

SEQ ID NO: 414201 - RNA, 19 nt, Homo sapiens
  misc_RNA (1)...(19): siRNA sense strand
ucacagaacuacagagaga

SEQ ID NO: 414202 - RNA, 19 nt, Homo sapiens
  misc_RNA (1)...(19): siRNA sense strand
gcugaggccuggcugaauu

SEQ ID NO: 414203 - RNA, 19 nt, Homo sapiens
  misc_RNA (1)...(19): siRNA sense strand
gcuggaagccugucaaaga

SEQ ID NO: 414204 - RNA, 19 nt, Homo sapiens
  misc_RNA (1)...(19): siRNA sense strand
gaaggcagcucacgaaacc

SEQ ID NO: 414205 - RNA, 19 nt, Homo sapiens
  misc_RNA (1)...(19): siRNA sense strand
gcagaaagagggcgaguuc

SEQ ID NO: 414206 - RNA, 19 nt, Homo sapiens
  misc_RNA (1)...(19): siRNA sense strand
ggucuuggaauuagucaua

SEQ ID NO: 414207 - RNA, 19 nt, Homo sapiens
  misc_RNA (1)...(19): siRNA sense strand
ucaguccucucaccacuuu

SEQ ID NO: 414208 - RNA, 19 nt, Homo sapiens
  misc_RNA (1)...(19): siRNA sense strand
gucaagcacugguaccaaa

SEQ ID NO: 414209 - RNA, 19 nt, Homo sapiens
  misc_RNA (1)...(19): siRNA sense strand
gagaguucauccaggaaau

SEQ ID NO: 414210 - RNA, 19 nt, Homo sapiens
  misc_RNA (1)...(19): siRNA sense strand
gaguucauccaggaaauua

SEQ ID NO: 414211 - RNA, 19 nt, Homo sapiens
  misc_RNA (1)...(19): siRNA sense strand
ggaagcugccaccucagua

SEQ ID NO: 414212 - RNA, 19 nt, Homo sapiens
  misc_RNA (1)...(19): siRNA sense strand
gacuaucucuugccagaca

SEQ ID NO: 414213 - RNA, 19 nt, Homo sapiens
  misc_RNA (1)...(19): siRNA sense strand
gaagcugccaccucaguau

SEQ ID NO: 414214 - RNA, 19 nt, Homo sapiens
  misc_RNA (1)...(19): siRNA sense strand
ggagaguucauccaggaaa

SEQ ID NO: 414215 - RNA, 19 nt, Homo sapiens
  misc_RNA (1)...(19): siRNA sense strand
gagaaggcagcucacgaaa

SEQ ID NO: 414216 - RNA, 19 nt, Homo sapiens
  misc_RNA (1)...(19): siRNA sense strand
ggacggucuuggaauuagu

SEQ ID NO: 414217 - RNA, 19 nt, Homo sapiens
  misc_RNA (1)...(19): siRNA sense strand
cagcaacucugcaucuacu

SEQ ID NO: 414218 - RNA, 19 nt, Homo sapiens
  misc_RNA (1)...(19): siRNA sense strand
gcuccuacccugugugugu

SEQ ID NO: 414219 - RNA, 19 nt, Homo sapiens
  misc_RNA (1)...(19): siRNA sense strand
ggagcgagggagcaugaaa

SEQ ID NO: 414220 - RNA, 19 nt, Homo sapiens
  misc_RNA (1)...(19): siRNA sense strand
cggcggacccuacaggaaa

SEQ ID NO: 414221 - RNA, 19 nt, Homo sapiens
  misc_RNA (1)...(19): siRNA sense strand
gaaauaccccagccaaauc

SEQ ID NO: 414222 - RNA, 19 nt, Homo sapiens
  misc_RNA (1)...(19): siRNA sense strand
acgcugaccugguugucuu

SEQ ID NO: 414223 - RNA, 19 nt, Homo sapiens
  misc_RNA (1)...(19): siRNA sense strand
guaccaaaauuguaagaag

SEQ ID NO: 414224 - RNA, 19 nt, Homo sapiens
  misc_RNA (1)...(19): siRNA sense strand
ggacccuacaggaaacuug

SEQ ID NO: 414225 - RNA, 19 nt, Homo sapiens
  misc_RNA (1)...(19): siRNA sense strand
cuggaagccugucaaagag

SEQ ID NO: 414226 - RNA, 19 nt, Homo sapiens
  misc_RNA (1)...(19): siRNA sense strand
agucauaaacuaccagcaa

SEQ ID NO: 414227 - RNA, 19 nt, Homo sapiens
  misc_RNA (1)...(19): siRNA sense strand
cagcuggaagccugucaaa

SEQ ID NO: 414228 - RNA, 19 nt, Homo sapiens
  misc_RNA (1)...(19): siRNA sense strand
gucuuggaauuagucauaa

SEQ ID NO: 414229 - RNA, 19 nt, Homo sapiens
  misc_RNA (1)...(19): siRNA sense strand
gggaagcugccaccucagu

SEQ ID NO: 414230 - RNA, 19 nt, Homo sapiens
  misc_RNA (1)...(19): siRNA sense strand
gcacugguaccaaaauugu

SEQ ID NO: 414231 - RNA, 19 nt, Homo sapiens
  misc_RNA (1)...(19): siRNA sense strand
cuucacagaacuacagaga

SEQ ID NO: 414232 - RNA, 19 nt, Homo sapiens
  misc_RNA (1)...(19): siRNA sense strand
agccaaaucucuggacaag

SEQ ID NO: 414233 - RNA, 19 nt, Homo sapiens
  misc_RNA (1)...(19): siRNA sense strand
gaaaggugcuuccgaggua

SEQ ID NO: 414234 - RNA, 19 nt, Homo sapiens
  misc_RNA (1)...(19): siRNA sense strand
ccaaaucucuggacaaguu

SEQ ID NO: 414235 - RNA, 19 nt, Homo sapiens
  misc_RNA (1)...(19): siRNA sense strand
gcaccgaccugcagaaaga

SEQ ID NO: 414236 - RNA, 19 nt, Homo sapiens
  misc_RNA (1)...(19): siRNA sense strand
ggaggcagcuggcacaaga

SEQ ID NO: 414237 - RNA, 19 nt, Homo sapiens
  misc_RNA (1)...(19): siRNA sense strand
ucacagaacuacagagaga

SEQ ID NO: 414238 - RNA, 19 nt, Homo sapiens
  misc_RNA (1)...(19): siRNA sense strand
gcugaggccuggcugaauu

SEQ ID NO: 414239 - RNA, 19 nt, Homo sapiens
  misc_RNA (1)...(19): siRNA sense strand
gcuggaagccugucaaaga

SEQ ID NO: 414240 - RNA, 19 nt, Homo sapiens
  misc_RNA (1)...(19): siRNA sense strand
gaaggcagcucacgaaacc

SEQ ID NO: 414241 - RNA, 19 nt, Homo sapiens
  misc_RNA (1)...(19): siRNA sense strand
gcagaaagagggcgaguuc

SEQ ID NO: 414242 - RNA, 19 nt, Homo sapiens
  misc_RNA (1)...(19): siRNA sense strand
ggucuuggaauuagucaua

SEQ ID NO: 414243 - RNA, 19 nt, Homo sapiens
  misc_RNA (1)...(19): siRNA sense strand
ucaguccucucaccacuuu

SEQ ID NO: 414244 - RNA, 19 nt, Homo sapiens
  misc_RNA (1)...(19): siRNA sense strand
gucaagcacugguaccaaa

SEQ ID NO: 414245 - RNA, 19 nt, Homo sapiens
  misc_RNA (1)...(19): siRNA sense strand
gagaguucauccaggaaau

SEQ ID NO: 414246 - RNA, 19 nt, Homo sapiens
  misc_RNA (1)...(19): siRNA sense strand
gaguucauccaggaaauua

SEQ ID NO: 414247 - RNA, 19 nt, Homo sapiens
  misc_RNA (1)...(19): siRNA sense strand
ggaagcugccaccucagua

SEQ ID NO: 414248 - RNA, 19 nt, Homo sapiens
  misc_RNA (1)...(19): siRNA sense strand
gacuaucucuugccagaca

SEQ ID NO: 414249 - RNA, 19 nt, Homo sapiens
  misc_RNA (1)...(19): siRNA sense strand
gaagcugccaccucaguau

SEQ ID NO: 414250 - RNA, 19 nt, Homo sapiens
  misc_RNA (1)...(19): siRNA sense strand
ggagaguucauccaggaaa

SEQ ID NO: 414251 - RNA, 19 nt, Homo sapiens
  misc_RNA (1)...(19): siRNA sense strand
gagaaggcagcucacgaaa

SEQ ID NO: 414252 - RNA, 19 nt, Homo sapiens
  misc_RNA (1)...(19): siRNA sense strand
ggacggucuuggaauuagu

SEQ ID NO: 414253 - RNA, 19 nt, Homo sapiens
  misc_RNA (1)...(19): siRNA sense strand
cagcaacucugcaucuacu

SEQ ID NO: 414254 - RNA, 19 nt, Homo sapiens
  misc_RNA (1)...(19): siRNA sense strand
gcuccuacccugugugugu

SEQ ID NO: 414255 - RNA, 19 nt, Homo sapiens
  misc_RNA (1)...(19): siRNA sense strand
ggagcgagggagcaugaaa

SEQ ID NO: 414256 - RNA, 19 nt, Homo sapiens
  misc_RNA (1)...(19): siRNA sense strand
cggcggacccuacaggaaa

SEQ ID NO: 414257 - RNA, 19 nt, Homo sapiens
  misc_RNA (1)...(19): siRNA sense strand
gaaauaccccagccaaauc

SEQ ID NO: 414258 - RNA, 19 nt, Homo sapiens
  misc_RNA (1)...(19): siRNA sense strand
acgcugaccugguugucuu

SEQ ID NO: 414259 - RNA, 19 nt, Homo sapiens
  misc_RNA (1)...(19): siRNA sense strand
guaccaaaauuguaagaag

SEQ ID NO: 414260 - RNA, 19 nt, Homo sapiens
  misc_RNA (1)...(19): siRNA sense strand
ggacccuacaggaaacuug

SEQ ID NO: 414261 - RNA, 19 nt, Homo sapiens
  misc_RNA (1)...(19): siRNA sense strand
cuggaagccugucaaagag

SEQ ID NO: 414262 - RNA, 19 nt, Homo sapiens
  misc_RNA (1)...(19): siRNA sense strand
agucauaaacuaccagcaa

SEQ ID NO: 414263 - RNA, 19 nt, Homo sapiens
  misc_RNA (1)...(19): siRNA sense strand
cagcuggaagccugucaaa

SEQ ID NO: 414264 - RNA, 19 nt, Homo sapiens
  misc_RNA (1)...(19): siRNA sense strand
gucuuggaauuagucauaa

SEQ ID NO: 414265 - RNA, 19 nt, Homo sapiens
  misc_RNA (1)...(19): siRNA sense strand
gggaagcugccaccucagu

SEQ ID NO: 414266 - RNA, 19 nt, Homo sapiens
  misc_RNA (1)...(19): siRNA sense strand
gcacugguaccaaaauugu

SEQ ID NO: 414267 - RNA, 19 nt, Homo sapiens
  misc_RNA (1)...(19): siRNA sense strand
cuucacagaacuacagaga

SEQ ID NO: 414268 - RNA, 19 nt, Homo sapiens
  misc_RNA (1)...(19): siRNA sense strand
agccaaaucucuggacaag

SEQ ID NO: 414269 - RNA, 19 nt, Homo sapiens
  misc_RNA (1)...(19): siRNA sense strand
gaaccaggccgaucacuuc

SEQ ID NO: 414270 - RNA, 19 nt, Homo sapiens
  misc_RNA (1)...(19): siRNA sense strand
ccaggccgaucacuucuug

SEQ ID NO: 414271 - RNA, 19 nt, Homo sapiens
  misc_RNA (1)...(19): siRNA sense strand
cagcgaagcccagauaaga

SEQ ID NO: 414272 - RNA, 19 nt, Homo sapiens
  misc_RNA (1)...(19): siRNA sense strand
caugugaguuucaacaagu

SEQ ID NO: 414273 - RNA, 19 nt, Homo sapiens
  misc_RNA (1)...(19): siRNA sense strand
cuucagugcuuccuacaga

SEQ ID NO: 414274 - RNA, 19 nt, Homo sapiens
  misc_RNA (1)...(19): siRNA sense strand
ugggaucaguuucauguga

SEQ ID NO: 414275 - RNA, 19 nt, Homo sapiens
  misc_RNA (1)...(19): siRNA sense strand
gcccagcgaagcccagaua

SEQ ID NO: 414276 - RNA, 19 nt, Homo sapiens
  misc_RNA (1)...(19): siRNA sense strand
ggaaccaggccgaucacuu

SEQ ID NO: 414277 - RNA, 19 nt, Homo sapiens
  misc_RNA (1)...(19): siRNA sense strand
ccgguuaccugcucuacug

SEQ ID NO: 414278 - RNA, 19 nt, Homo sapiens
  misc_RNA (1)...(19): siRNA sense strand
gcggguggcauacugcuuu

SEQ ID NO: 414279 - RNA, 19 nt, Homo sapiens
  misc_RNA (1)...(19): siRNA sense strand
gucaucagcuuggaggauu

SEQ ID NO: 414280 - RNA, 19 nt, Homo sapiens
  misc_RNA (1)...(19): siRNA sense strand
uggaggauuucauggagaa

SEQ ID NO: 414281 - RNA, 19 nt, Homo sapiens
  misc_RNA (1)...(19): siRNA sense strand
cugagaagcggguggcaua

SEQ ID NO: 414282 - RNA, 19 nt, Homo sapiens
  misc_RNA (1)...(19): siRNA sense strand
ggcauuuccuucagugcuu

SEQ ID NO: 414283 - RNA, 19 nt, Homo sapiens
  misc_RNA (1)...(19): siRNA sense strand
ggauugaguaccagcauca

SEQ ID NO: 414284 - RNA, 19 nt, Homo sapiens
  misc_RNA (1)...(19): siRNA sense strand
caucacaagccuccuuuca

SEQ ID NO: 414285 - RNA, 19 nt, Homo sapiens
  misc_RNA (1)...(19): siRNA sense strand
gcgaagcccagauaagaag

SEQ ID NO: 414286 - RNA, 19 nt, Homo sapiens
  misc_RNA (1)...(19): siRNA sense strand
ggcugucccuccuuggauu

SEQ ID NO: 414287 - RNA, 19 nt, Homo sapiens
  misc_RNA (1)...(19): siRNA sense strand
agaagcggguggcauacug

SEQ ID NO: 414288 - RNA, 19 nt, Homo sapiens
  misc_RNA (1)...(19): siRNA sense strand
ucaucagcuuggaggauuu

SEQ ID NO: 414289 - RNA, 19 nt, Homo sapiens
  misc_RNA (1)...(19): siRNA sense strand
cagcuuggaggauuucaug

SEQ ID NO: 414290 - RNA, 19 nt, Homo sapiens
  misc_RNA (1)...(19): siRNA sense strand
ggaucaguuucaugugagu

SEQ ID NO: 414291 - RNA, 19 nt, Homo sapiens
  misc_RNA (1)...(19): siRNA sense strand
ucaugugaguuucaacaag

SEQ ID NO: 414292 - RNA, 19 nt, Homo sapiens
  misc_RNA (1)...(19): siRNA sense strand
gcauuugcaaagcugcuaa

SEQ ID NO: 414293 - RNA, 19 nt, Homo sapiens
  misc_RNA (1)...(19): siRNA sense strand
aagaagacgugccccauga

SEQ ID NO: 414294 - RNA, 19 nt, Homo sapiens
  misc_RNA (1)...(19): siRNA sense strand
cuugggcucucuggcauuu

SEQ ID NO: 414295 - RNA, 19 nt, Homo sapiens
  misc_RNA (1)...(19): siRNA sense strand
uuacaggcauuuccuucag

SEQ ID NO: 414296 - RNA, 19 nt, Homo sapiens
  misc_RNA (1)...(19): siRNA sense strand
gcuuggaggauuucaugga

SEQ ID NO: 414297 - RNA, 19 nt, Homo sapiens
  misc_RNA (1)...(19): siRNA sense strand
gaaccaggccgaucacuuc

SEQ ID NO: 414298 - RNA, 19 nt, Homo sapiens
  misc_RNA (1)...(19): siRNA sense strand
ccaggccgaucacuucuug

SEQ ID NO: 414299 - RNA, 19 nt, Homo sapiens
  misc_RNA (1)...(19): siRNA sense strand
cagcgaagcccagauaaga

SEQ ID NO: 414300 - RNA, 19 nt, Homo sapiens
  misc_RNA (1)...(19): siRNA sense strand
caugugaguuucaacaagu

SEQ ID NO: 414301 - RNA, 19 nt, Homo sapiens
  misc_RNA (1)...(19): siRNA sense strand
cuucagugcuuccuacaga

SEQ ID NO: 414302 - RNA, 19 nt, Homo sapiens
  misc_RNA (1)...(19): siRNA sense strand
ugggaucaguuucauguga

SEQ ID NO: 414303 - RNA, 19 nt, Homo sapiens
  misc_RNA (1)...(19): siRNA sense strand
gcccagcgaagcccagaua

SEQ ID NO: 414304 - RNA, 19 nt, Homo sapiens
  misc_RNA (1)...(19): siRNA sense strand
ggaaccaggccgaucacuu

SEQ ID NO: 414305 - RNA, 19 nt, Homo sapiens
  misc_RNA (1)...(19): siRNA sense strand
ccgguuaccugcucuacug

SEQ ID NO: 414306 - RNA, 19 nt, Homo sapiens
  misc_RNA (1)...(19): siRNA sense strand
gcggguggcauacugcuuu

SEQ ID NO: 414307 - RNA, 19 nt, Homo sapiens
  misc_RNA (1)...(19): siRNA sense strand
gucaucagcuuggaggauu

SEQ ID NO: 414308 - RNA, 19 nt, Homo sapiens
  misc_RNA (1)...(19): siRNA sense strand
uggaggauuucauggagaa

SEQ ID NO: 414309 - RNA, 19 nt, Homo sapiens
  misc_RNA (1)...(19): siRNA sense strand
cugagaagcggguggcaua

SEQ ID NO: 414310 - RNA, 19 nt, Homo sapiens
  misc_RNA (1)...(19): siRNA sense strand
ggcauuuccuucagugcuu

SEQ ID NO: 414311 - RNA, 19 nt, Homo sapiens
  misc_RNA (1)...(19): siRNA sense strand
ggauugaguaccagcauca

SEQ ID NO: 414312 - RNA, 19 nt, Homo sapiens
  misc_RNA (1)...(19): siRNA sense strand
caucacaagccuccuuuca

SEQ ID NO: 414313 - RNA, 19 nt, Homo sapiens
  misc_RNA (1)...(19): siRNA sense strand
gcgaagcccagauaagaag

SEQ ID NO: 414314 - RNA, 19 nt, Homo sapiens
  misc_RNA (1)...(19): siRNA sense strand
ggcugucccuccuuggauu

SEQ ID NO: 414315 - RNA, 19 nt, Homo sapiens
  misc_RNA (1)...(19): siRNA sense strand
agaagcggguggcauacug

SEQ ID NO: 414316 - RNA, 19 nt, Homo sapiens
  misc_RNA (1)...(19): siRNA sense strand
ucaucagcuuggaggauuu

SEQ ID NO: 414317 - RNA, 19 nt, Homo sapiens
  misc_RNA (1)...(19): siRNA sense strand
cagcuuggaggauuucaug

SEQ ID NO: 414318 - RNA, 19 nt, Homo sapiens
  misc_RNA (1)...(19): siRNA sense strand
ggaucaguuucaugugagu

SEQ ID NO: 414319 - RNA, 19 nt, Homo sapiens
  misc_RNA (1)...(19): siRNA sense strand
ucaugugaguuucaacaag

SEQ ID NO: 414320 - RNA, 19 nt, Homo sapiens
  misc_RNA (1)...(19): siRNA sense strand
gcauuugcaaagcugcuaa

SEQ ID NO: 414321 - RNA, 19 nt, Homo sapiens
  misc_RNA (1)...(19): siRNA sense strand
aagaagacgugccccauga

SEQ ID NO: 414322 - RNA, 19 nt, Homo sapiens
  misc_RNA (1)...(19): siRNA sense strand
cuugggcucucuggcauuu

SEQ ID NO: 414323 - RNA, 19 nt, Homo sapiens
  misc_RNA (1)...(19): siRNA sense strand
uuacaggcauuuccuucag

SEQ ID NO: 414324 - RNA, 19 nt, Homo sapiens
  misc_RNA (1)...(19): siRNA sense strand
gcuuggaggauuucaugga

SEQ ID NO: 414325 - RNA, 19 nt, Homo sapiens
  misc_RNA (1)...(19): siRNA sense strand
gauguaaguuguccaauaa

SEQ ID NO: 414326 - RNA, 19 nt, Homo sapiens
  misc_RNA (1)...(19): siRNA sense strand
gaagagaguuuaauggaau

SEQ ID NO: 414327 - RNA, 19 nt, Homo sapiens
  misc_RNA (1)...(19): siRNA sense strand
gcacagaacucuuacuuac

SEQ ID NO: 414328 - RNA, 19 nt, Homo sapiens
  misc_RNA (1)...(19): siRNA sense strand
gaacaccuaucacacauau

SEQ ID NO: 414329 - RNA, 19 nt, Homo sapiens
  misc_RNA (1)...(19): siRNA sense strand
gcaacaaacugaagcaaga

SEQ ID NO: 414330 - RNA, 19 nt, Homo sapiens
  misc_RNA (1)...(19): siRNA sense strand
ggauguaaguuguccaaua

SEQ ID NO: 414331 - RNA, 19 nt, Homo sapiens
  misc_RNA (1)...(19): siRNA sense strand
gaacagcaaagaacauaua

SEQ ID NO: 414332 - RNA, 19 nt, Homo sapiens
  misc_RNA (1)...(19): siRNA sense strand
ggaaguagauagugaagau

SEQ ID NO: 414333 - RNA, 19 nt, Homo sapiens
  misc_RNA (1)...(19): siRNA sense strand
gaauuuaugucgaaacuuc

SEQ ID NO: 414334 - RNA, 19 nt, Homo sapiens
  misc_RNA (1)...(19): siRNA sense strand
ggaaacagauagugucuca

SEQ ID NO: 414335 - RNA, 19 nt, Homo sapiens
  misc_RNA (1)...(19): siRNA sense strand
gaacaaacaucaaaaggaa

SEQ ID NO: 414336 - RNA, 19 nt, Homo sapiens
  misc_RNA (1)...(19): siRNA sense strand
aaacaagccugguucaguu

SEQ ID NO: 414337 - RNA, 19 nt, Homo sapiens
  misc_RNA (1)...(19): siRNA sense strand
caaagaacauauaguagug

SEQ ID NO: 414338 - RNA, 19 nt, Homo sapiens
  misc_RNA (1)...(19): siRNA sense strand
cagcaaagaacauauagua

SEQ ID NO: 414339 - RNA, 19 nt, Homo sapiens
  misc_RNA (1)...(19): siRNA sense strand
caucgaaacuccagaacaa

SEQ ID NO: 414340 - RNA, 19 nt, Homo sapiens
  misc_RNA (1)...(19): siRNA sense strand
ucucauagcaccaauauuu

SEQ ID NO: 414341 - RNA, 19 nt, Homo sapiens
  misc_RNA (1)...(19): siRNA sense strand
gaaaggagagcaagaaucu

SEQ ID NO: 414342 - RNA, 19 nt, Homo sapiens
  misc_RNA (1)...(19): siRNA sense strand
gccauauggugaagucuua

SEQ ID NO: 414343 - RNA, 19 nt, Homo sapiens
  misc_RNA (1)...(19): siRNA sense strand
ggaagaauguccaauaagc

SEQ ID NO: 414344 - RNA, 19 nt, Homo sapiens
  misc_RNA (1)...(19): siRNA sense strand
ggaagaagagaguuuaaug

SEQ ID NO: 414345 - RNA, 19 nt, Homo sapiens
  misc_RNA (1)...(19): siRNA sense strand
gcaaagaacauauaguagu

SEQ ID NO: 414346 - RNA, 19 nt, Homo sapiens
  misc_RNA (1)...(19): siRNA sense strand
caggagagaccaaugauaa

SEQ ID NO: 414347 - RNA, 19 nt, Homo sapiens
  misc_RNA (1)...(19): siRNA sense strand
agagaaagcuuuggaaaca

SEQ ID NO: 414348 - RNA, 19 nt, Homo sapiens
  misc_RNA (1)...(19): siRNA sense strand
ggacaggagagaccaauga

SEQ ID NO: 414349 - RNA, 19 nt, Homo sapiens
  misc_RNA (1)...(19): siRNA sense strand
ggaccuacguugcaguuca

SEQ ID NO: 414350 - RNA, 19 nt, Homo sapiens
  misc_RNA (1)...(19): siRNA sense strand
cuacagaucuacaaacaag

SEQ ID NO: 414351 - RNA, 19 nt, Homo sapiens
  misc_RNA (1)...(19): siRNA sense strand
cagcuuacguuuacugguu

SEQ ID NO: 414352 - RNA, 19 nt, Homo sapiens
  misc_RNA (1)...(19): siRNA sense strand
gcaagcaugucugaauuuc

SEQ ID NO: 414353 - RNA, 19 nt, Homo sapiens
  misc_RNA (1)...(19): siRNA sense strand
ccaaaccucuugccacuag

SEQ ID NO: 414354 - RNA, 19 nt, Homo sapiens
  misc_RNA (1)...(19): siRNA sense strand
gauaagccaucaccaaacu

SEQ ID NO: 414355 - RNA, 19 nt, Homo sapiens
  misc_RNA (1)...(19): siRNA sense strand
aaagaaaggauguaaguug

SEQ ID NO: 414356 - RNA, 19 nt, Homo sapiens
  misc_RNA (1)...(19): siRNA sense strand
ggaaguagaacagcaaaga

SEQ ID NO: 414357 - RNA, 19 nt, Homo sapiens
  misc_RNA (1)...(19): siRNA sense strand
caacggaccaguuaagaga

SEQ ID NO: 414358 - RNA, 19 nt, Homo sapiens
  misc_RNA (1)...(19): siRNA sense strand
agaaagaagugaugaaacu

SEQ ID NO: 414359 - RNA, 19 nt, Homo sapiens
  misc_RNA (1)...(19): siRNA sense strand
gagaacaccuaucacacau

SEQ ID NO: 414360 - RNA, 19 nt, Homo sapiens
  misc_RNA (1)...(19): siRNA sense strand
gaaccuaguaacagccaua

SEQ ID NO: 414361 - RNA, 19 nt, Homo sapiens
  misc_RNA (1)...(19): siRNA sense strand
cagcaugcaugacuuuaau

SEQ ID NO: 414362 - RNA, 19 nt, Homo sapiens
  misc_RNA (1)...(19): siRNA sense strand
gaaguagaacagcaaagaa

SEQ ID NO: 414363 - RNA, 19 nt, Homo sapiens
  misc_RNA (1)...(19): siRNA sense strand
gaacugccgcaaacuuuau

SEQ ID NO: 414364 - RNA, 19 nt, Homo sapiens
  misc_RNA (1)...(19): siRNA sense strand
gaaguagccaugcaggaaa

SEQ ID NO: 414365 - RNA, 19 nt, Homo sapiens
  misc_RNA (1)...(19): siRNA sense strand
gaagaagagaguuuaaugg

SEQ ID NO: 414366 - RNA, 19 nt, Homo sapiens
  misc_RNA (1)...(19): siRNA sense strand
cacaagaaauggaaguaga

SEQ ID NO: 414367 - RNA, 19 nt, Homo sapiens
  misc_RNA (1)...(19): siRNA sense strand
ccauagugauaccugcuua

SEQ ID NO: 414368 - RNA, 19 nt, Homo sapiens
  misc_RNA (1)...(19): siRNA sense strand
caucuuaaacucugccaua

SEQ ID NO: 414369 - RNA, 19 nt, Homo sapiens
  misc_RNA (1)...(19): siRNA sense strand
gacuacagaucuacaaaca

SEQ ID NO: 414370 - RNA, 19 nt, Homo sapiens
  misc_RNA (1)...(19): siRNA sense strand
gagcaagaaucucauagcu

SEQ ID NO: 414371 - RNA, 19 nt, Homo sapiens
  misc_RNA (1)...(19): siRNA sense strand
aagcaugucugaauuucuu

SEQ ID NO: 414372 - RNA, 19 nt, Homo sapiens
  misc_RNA (1)...(19): siRNA sense strand
aagcaagcaugucugaauu

SEQ ID NO: 414373 - RNA, 19 nt, Homo sapiens
  misc_RNA (1)...(19): siRNA sense strand
caagagaugaccugcauug

SEQ ID NO: 414374 - RNA, 19 nt, Homo sapiens
  misc_RNA (1)...(19): siRNA sense strand
agaagagaguuuaauggaa

SEQ ID NO: 414375 - RNA, 19 nt, Homo sapiens
  misc_RNA (1)...(19): siRNA sense strand
acagaacucuuacuuacau

SEQ ID NO: 414376 - RNA, 19 nt, Homo sapiens
  misc_RNA (1)...(19): siRNA sense strand
guuaagagaacaccuauca

SEQ ID NO: 414377 - RNA, 19 nt, Homo sapiens
  misc_RNA (1)...(19): siRNA sense strand
aaaggauacuccaaaugaa

SEQ ID NO: 414378 - RNA, 19 nt, Homo sapiens
  misc_RNA (1)...(19): siRNA sense strand
gucaauagauaaagcuguu

SEQ ID NO: 414379 - RNA, 19 nt, Homo sapiens
  misc_RNA (1)...(19): siRNA sense strand
gaaacuucaugcuucaucu

SEQ ID NO: 414380 - RNA, 19 nt, Homo sapiens
  misc_RNA (1)...(19): siRNA sense strand
cugaauuucuugaaucuga

SEQ ID NO: 414381 - RNA, 19 nt, Homo sapiens
  misc_RNA (1)...(19): siRNA sense strand
aacaggcgcuuacagcuuu

SEQ ID NO: 414382 - RNA, 19 nt, Homo sapiens
  misc_RNA (1)...(19): siRNA sense strand
aaauggaaguagauaguga

SEQ ID NO: 414383 - RNA, 19 nt, Homo sapiens
  misc_RNA (1)...(19): siRNA sense strand
aagaaaggauguaaguugu

SEQ ID NO: 414384 - RNA, 19 nt, Homo sapiens
  misc_RNA (1)...(19): siRNA sense strand
agaaagcuuuggaaacaga

SEQ ID NO: 414385 - RNA, 19 nt, Homo sapiens
  misc_RNA (1)...(19): siRNA sense strand
caagaaauggaaguagaua

SEQ ID NO: 414386 - RNA, 19 nt, Homo sapiens
  misc_RNA (1)...(19): siRNA sense strand
gccacaaucgucuguauuu

SEQ ID NO: 414387 - RNA, 19 nt, Homo sapiens
  misc_RNA (1)...(19): siRNA sense strand
gaauuugaaccuaguaaca

SEQ ID NO: 414388 - RNA, 19 nt, Homo sapiens
  misc_RNA (1)...(19): siRNA sense strand
ggagagaccaaugauaaau

SEQ ID NO: 414389 - RNA, 19 nt, Homo sapiens
  misc_RNA (1)...(19): siRNA sense strand
uaagagaacaccuaucaca

SEQ ID NO: 414390 - RNA, 19 nt, Homo sapiens
  misc_RNA (1)...(19): siRNA sense strand
caaccuggauuugcuuuua

SEQ ID NO: 414391 - RNA, 19 nt, Homo sapiens
  misc_RNA (1)...(19): siRNA sense strand
ucaguuaaaccuacucaaa

SEQ ID NO: 414392 - RNA, 19 nt, Homo sapiens
  misc_RNA (1)...(19): siRNA sense strand
gaagaguuuucugauguua

SEQ ID NO: 414393 - RNA, 19 nt, Homo sapiens
  misc_RNA (1)...(19): siRNA sense strand
uuacaugucucaucgaaac

SEQ ID NO: 414394 - RNA, 19 nt, Homo sapiens
  misc_RNA (1)...(19): siRNA sense strand
gaagaauguccaauaagca

SEQ ID NO: 414395 - RNA, 19 nt, Homo sapiens
  misc_RNA (1)...(19): siRNA sense strand
aaacaaaacccggaaauuu

SEQ ID NO: 414396 - RNA, 19 nt, Homo sapiens
  misc_RNA (1)...(19): siRNA sense strand
ccaggaagaagagaguuua

SEQ ID NO: 414397 - RNA, 19 nt, Homo sapiens
  misc_RNA (1)...(19): siRNA sense strand
gaaauggaaguagauagug

SEQ ID NO: 414398 - RNA, 19 nt, Homo sapiens
  misc_RNA (1)...(19): siRNA sense strand
gcaggaaauggaagaaugu

SEQ ID NO: 414399 - RNA, 19 nt, Homo sapiens
  misc_RNA (1)...(19): siRNA sense strand
acgaagaaauaacugaaga

SEQ ID NO: 414400 - RNA, 19 nt, Homo sapiens
  misc_RNA (1)...(19): siRNA sense strand
caaacgaagaaauaacuga

SEQ ID NO: 414401 - RNA, 19 nt, Homo sapiens
  misc_RNA (1)...(19): siRNA sense strand
uuaccaagcuccgugaaau

SEQ ID NO: 414402 - RNA, 19 nt, Homo sapiens
  misc_RNA (1)...(19): siRNA sense strand
aaucgucuguauuuccaua

SEQ ID NO: 414403 - RNA, 19 nt, Homo sapiens
  misc_RNA (1)...(19): siRNA sense strand
ugaacugccgcaaacuuua

SEQ ID NO: 414404 - RNA, 19 nt, Homo sapiens
  misc_RNA (1)...(19): siRNA sense strand
caacaugggagacuauucu

SEQ ID NO: 414405 - RNA, 19 nt, Homo sapiens
  misc_RNA (1)...(19): siRNA sense strand
ggaaguccugcuugugaaa

SEQ ID NO: 414406 - RNA, 19 nt, Homo sapiens
  misc_RNA (1)...(19): siRNA sense strand
aagaaucauugacuacaga

SEQ ID NO: 414407 - RNA, 19 nt, Homo sapiens
  misc_RNA (1)...(19): siRNA sense strand
caagccugguucaguuaaa

SEQ ID NO: 414408 - RNA, 19 nt, Homo sapiens
  misc_RNA (1)...(19): siRNA sense strand
caugggagacuauucuuga

SEQ ID NO: 414409 - RNA, 19 nt, Homo sapiens
  misc_RNA (1)...(19): siRNA sense strand
ggagaaaccaaugaaaaua

SEQ ID NO: 414410 - RNA, 19 nt, Homo sapiens
  misc_RNA (1)...(19): siRNA sense strand
gcaaguucccacagguaaa

SEQ ID NO: 414411 - RNA, 19 nt, Homo sapiens
  misc_RNA (1)...(19): siRNA sense strand
ggagagaaagaagugauga

SEQ ID NO: 414412 - RNA, 19 nt, Homo sapiens
  misc_RNA (1)...(19): siRNA sense strand
gauccugaauggcuaagag

SEQ ID NO: 414413 - RNA, 19 nt, Homo sapiens
  misc_RNA (1)...(19): siRNA sense strand
uagaacagcaaagaacaua

SEQ ID NO: 414414 - RNA, 19 nt, Homo sapiens
  misc_RNA (1)...(19): siRNA sense strand
cuuaaacucugccauagca

SEQ ID NO: 414415 - RNA, 19 nt, Homo sapiens
  misc_RNA (1)...(19): siRNA sense strand
cucaaacuauugcuguuaa

SEQ ID NO: 414416 - RNA, 19 nt, Homo sapiens
  misc_RNA (1)...(19): siRNA sense strand
gaauguccaauaagcaaga

SEQ ID NO: 414417 - RNA, 19 nt, Homo sapiens
  misc_RNA (1)...(19): siRNA sense strand
ccacaaucgucuguauuuc

SEQ ID NO: 414418 - RNA, 19 nt, Homo sapiens
  misc_RNA (1)...(19): siRNA sense strand
caacuauguuuaucaucca

SEQ ID NO: 414419 - RNA, 19 nt, Homo sapiens
  misc_RNA (1)...(19): siRNA sense strand
gaagaaauaacugaagaac

SEQ ID NO: 414420 - RNA, 19 nt, Homo sapiens
  misc_RNA (1)...(19): siRNA sense strand
gagagaaagaagugaugaa

SEQ ID NO: 414421 - RNA, 19 nt, Homo sapiens
  misc_RNA (1)...(19): siRNA sense strand
gagagaccaaugauaaauc

SEQ ID NO: 414422 - RNA, 19 nt, Homo sapiens
  misc_RNA (1)...(19): siRNA sense strand
ugaugaaacucuggaaucu

SEQ ID NO: 414423 - RNA, 19 nt, Homo sapiens
  misc_RNA (1)...(19): siRNA sense strand
acaccuaucacacauauuc

SEQ ID NO: 414424 - RNA, 19 nt, Homo sapiens
  misc_RNA (1)...(19): siRNA sense strand
gaaucucauagcaccaaua

SEQ ID NO: 414425 - RNA, 19 nt, Homo sapiens
  misc_RNA (1)...(19): siRNA sense strand
gaagauguccgacuuauuc

SEQ ID NO: 414426 - RNA, 19 nt, Homo sapiens
  misc_RNA (1)...(19): siRNA sense strand
gaagauggauuccuguaca

SEQ ID NO: 414427 - RNA, 19 nt, Homo sapiens
  misc_RNA (1)...(19): siRNA sense strand
gcuuacagcucaaugcuaa

SEQ ID NO: 414428 - RNA, 19 nt, Homo sapiens
  misc_RNA (1)...(19): siRNA sense strand
gagcucaucaagauaauua

SEQ ID NO: 414429 - RNA, 19 nt, Homo sapiens
  misc_RNA (1)...(19): siRNA sense strand
gaacaaagaguagaagaug

SEQ ID NO: 414430 - RNA, 19 nt, Homo sapiens
  misc_RNA (1)...(19): siRNA sense strand
ugagaaagaugaagaugga

SEQ ID NO: 414431 - RNA, 19 nt, Homo sapiens
  misc_RNA (1)...(19): siRNA sense strand
ggaugaaauugucagugua

SEQ ID NO: 414432 - RNA, 19 nt, Homo sapiens
  misc_RNA (1)...(19): siRNA sense strand
gggaugaaauugucagugu

SEQ ID NO: 414433 - RNA, 19 nt, Homo sapiens
  misc_RNA (1)...(19): siRNA sense strand
gauaauagaacgauacaag

SEQ ID NO: 414434 - RNA, 19 nt, Homo sapiens
  misc_RNA (1)...(19): siRNA sense strand
gaugaaauugucaguguaa

SEQ ID NO: 414435 - RNA, 19 nt, Homo sapiens
  misc_RNA (1)...(19): siRNA sense strand
gaaagaugaagauggauuc

SEQ ID NO: 414436 - RNA, 19 nt, Homo sapiens
  misc_RNA (1)...(19): siRNA sense strand
guagaagauguccgacuua

SEQ ID NO: 414437 - RNA, 19 nt, Homo sapiens
  misc_RNA (1)...(19): siRNA sense strand
uagaagauguccgacuuau

SEQ ID NO: 414438 - RNA, 19 nt, Homo sapiens
  misc_RNA (1)...(19): siRNA sense strand
gagagcagcauccaaccaa

SEQ ID NO: 414439 - RNA, 19 nt, Homo sapiens
  misc_RNA (1)...(19): siRNA sense strand
caggagacguucgggauga

SEQ ID NO: 414440 - RNA, 19 nt, Homo sapiens
  misc_RNA (1)...(19): siRNA sense strand
caaaaucccggugauaaua

SEQ ID NO: 414441 - RNA, 19 nt, Homo sapiens
  misc_RNA (1)...(19): siRNA sense strand
aguagaagauguccgacuu

SEQ ID NO: 414442 - RNA, 19 nt, Homo sapiens
  misc_RNA (1)...(19): siRNA sense strand
gcagcuuccuguucuggau

SEQ ID NO: 414443 - RNA, 19 nt, Homo sapiens
  misc_RNA (1)...(19): siRNA sense strand
uguaugagagugagaaaga

SEQ ID NO: 414444 - RNA, 19 nt, Homo sapiens
  misc_RNA (1)...(19): siRNA sense strand
gauacaagggugagaagca

SEQ ID NO: 414445 - RNA, 19 nt, Homo sapiens
  misc_RNA (1)...(19): siRNA sense strand
gcucaucaagauaauuaga

SEQ ID NO: 414446 - RNA, 19 nt, Homo sapiens
  misc_RNA (1)...(19): siRNA sense strand
agaaagaugaagauggauu

SEQ ID NO: 414447 - RNA, 19 nt, Homo sapiens
  misc_RNA (1)...(19): siRNA sense strand
caccuucgaacaaagagua

SEQ ID NO: 414448 - RNA, 19 nt, Homo sapiens
  misc_RNA (1)...(19): siRNA sense strand
cgaacaaagaguagaagau

SEQ ID NO: 414449 - RNA, 19 nt, Homo sapiens
  misc_RNA (1)...(19): siRNA sense strand
guaugagagugagaaagau

SEQ ID NO: 414450 - RNA, 19 nt, Homo sapiens
  misc_RNA (1)...(19): siRNA sense strand
gauaauuagaaggcgcuua

SEQ ID NO: 414451 - RNA, 19 nt, Homo sapiens
  misc_RNA (1)...(19): siRNA sense strand
aaaucccggugauaauaga

SEQ ID NO: 414452 - RNA, 19 nt, Homo sapiens
  misc_RNA (1)...(19): siRNA sense strand
agugagcucaucaagauaa

SEQ ID NO: 414453 - RNA, 19 nt, Homo sapiens
  misc_RNA (1)...(19): siRNA sense strand
gaacgauacaagggugaga

SEQ ID NO: 414454 - RNA, 19 nt, Homo sapiens
  misc_RNA (1)...(19): siRNA sense strand
aacaaagaguagaagaugu

SEQ ID NO: 414455 - RNA, 19 nt, Homo sapiens
  misc_RNA (1)...(19): siRNA sense strand
agagcagcauccaaccaaa

SEQ ID NO: 414456 - RNA, 19 nt, Homo sapiens
  misc_RNA (1)...(19): siRNA sense strand
gaaggcgcuuacagcucaa

SEQ ID NO: 414457 - RNA, 19 nt, Homo sapiens
  misc_RNA (1)...(19): siRNA sense strand
cgccgcaccuucgaacaaa

SEQ ID NO: 414458 - RNA, 19 nt, Homo sapiens
  misc_RNA (1)...(19): siRNA sense strand
gagugagcucaucaagaua

SEQ ID NO: 414459 - RNA, 19 nt, Homo sapiens
  misc_RNA (1)...(19): siRNA sense strand
caaucucagagguguauga

SEQ ID NO: 414460 - RNA, 19 nt, Homo sapiens
  misc_RNA (1)...(19): siRNA sense strand
acaaagaguagaagauguc

SEQ ID NO: 414461 - RNA, 19 nt, Homo sapiens
  misc_RNA (1)...(19): siRNA sense strand
ccuuguaccugaccauguc

SEQ ID NO: 414462 - RNA, 19 nt, Homo sapiens
  misc_RNA (1)...(19): siRNA sense strand
agaagauguccgacuuauu

SEQ ID NO: 414463 - RNA, 19 nt, Homo sapiens
  misc_RNA (1)...(19): siRNA sense strand
ggagacguucgggaugaaa

SEQ ID NO: 414464 - RNA, 19 nt, Homo sapiens
  misc_RNA (1)...(19): siRNA sense strand
agagugagaaagaugaaga

SEQ ID NO: 414465 - RNA, 19 nt, Homo sapiens
  misc_RNA (1)...(19): siRNA sense strand
ggugauaauagaacgauac

SEQ ID NO: 414466 - RNA, 19 nt, Homo sapiens
  misc_RNA (1)...(19): siRNA sense strand
cagcuuccuguucuggaua

SEQ ID NO: 414467 - RNA, 19 nt, Homo sapiens
  misc_RNA (1)...(19): siRNA sense strand
gucagcgucuccacaccaa

SEQ ID NO: 414468 - RNA, 19 nt, Homo sapiens
  misc_RNA (1)...(19): siRNA sense strand
gugagcucaucaagauaau

SEQ ID NO: 414469 - RNA, 19 nt, Homo sapiens
  misc_RNA (1)...(19): siRNA sense strand
gaaagucgccucaaagaua

SEQ ID NO: 414470 - RNA, 19 nt, Homo sapiens
  misc_RNA (1)...(19): siRNA sense strand
gaaagaaagucgccucaaa

SEQ ID NO: 414471 - RNA, 19 nt, Homo sapiens
  misc_RNA (1)...(19): siRNA sense strand
ggacagagccugagaaguu

SEQ ID NO: 414472 - RNA, 19 nt, Homo sapiens
  misc_RNA (1)...(19): siRNA sense strand
gaaugaaacgcucagauua

SEQ ID NO: 414473 - RNA, 19 nt, Homo sapiens
  misc_RNA (1)...(19): siRNA sense strand
gaaacaaagucccauaaag

SEQ ID NO: 414474 - RNA, 19 nt, Homo sapiens
  misc_RNA (1)...(19): siRNA sense strand
gaacuuggauucucucaac

SEQ ID NO: 414475 - RNA, 19 nt, Homo sapiens
  misc_RNA (1)...(19): siRNA sense strand
caaaagauguuacccauuu

SEQ ID NO: 414476 - RNA, 19 nt, Homo sapiens
  misc_RNA (1)...(19): siRNA sense strand
ggagauauguuggugagaa

SEQ ID NO: 414477 - RNA, 19 nt, Homo sapiens
  misc_RNA (1)...(19): siRNA sense strand
guagauuucuuucaacaga

SEQ ID NO: 414478 - RNA, 19 nt, Homo sapiens
  misc_RNA (1)...(19): siRNA sense strand
gaugaagaauggaagagaa

SEQ ID NO: 414479 - RNA, 19 nt, Homo sapiens
  misc_RNA (1)...(19): siRNA sense strand
gacagagaauguaaugaaa

SEQ ID NO: 414480 - RNA, 19 nt, Homo sapiens
  misc_RNA (1)...(19): siRNA sense strand
gaagagaauacgaacauug

SEQ ID NO: 414481 - RNA, 19 nt, Homo sapiens
  misc_RNA (1)...(19): siRNA sense strand
aaagucgccucaaagauaa

SEQ ID NO: 414482 - RNA, 19 nt, Homo sapiens
  misc_RNA (1)...(19): siRNA sense strand
ugaaaucaauggaguguuc

SEQ ID NO: 414483 - RNA, 19 nt, Homo sapiens
  misc_RNA (1)...(19): siRNA sense strand
ucacaaaccagaugccuuu

SEQ ID NO: 414484 - RNA, 19 nt, Homo sapiens
  misc_RNA (1)...(19): siRNA sense strand
guacuccucuauauuuaug

SEQ ID NO: 414485 - RNA, 19 nt, Homo sapiens
  misc_RNA (1)...(19): siRNA sense strand
ggaagagaauacgaacauu

SEQ ID NO: 414486 - RNA, 19 nt, Homo sapiens
  misc_RNA (1)...(19): siRNA sense strand
ugacagagaauguaaugaa

SEQ ID NO: 414487 - RNA, 19 nt, Homo sapiens
  misc_RNA (1)...(19): siRNA sense strand
gcacuuaagagaugggauu

SEQ ID NO: 414488 - RNA, 19 nt, Homo sapiens
  misc_RNA (1)...(19): siRNA sense strand
ggaucucauuccaaacuuu

SEQ ID NO: 414489 - RNA, 19 nt, Homo sapiens
  misc_RNA (1)...(19): siRNA sense strand
ucuaugcucuucaccauga

SEQ ID NO: 414490 - RNA, 19 nt, Homo sapiens
  misc_RNA (1)...(19): siRNA sense strand
gaguagauuucuuucaaca

SEQ ID NO: 414491 - RNA, 19 nt, Homo sapiens
  misc_RNA (1)...(19): siRNA sense strand
ucgaguagauuucuuucaa

SEQ ID NO: 414492 - RNA, 19 nt, Homo sapiens
  misc_RNA (1)...(19): siRNA sense strand
ugaaugaaacgcucagauu

SEQ ID NO: 414493 - RNA, 19 nt, Homo sapiens
  misc_RNA (1)...(19): siRNA sense strand
gagaauacgaacauugcua

SEQ ID NO: 414494 - RNA, 19 nt, Homo sapiens
  misc_RNA (1)...(19): siRNA sense strand
ccacugaaauuagacaauc

SEQ ID NO: 414495 - RNA, 19 nt, Homo sapiens
  misc_RNA (1)...(19): siRNA sense strand
ggaggagauugacgcaguu

SEQ ID NO: 414496 - RNA, 19 nt, Homo sapiens
  misc_RNA (1)...(19): siRNA sense strand
gaauggaagagaauacgaa

SEQ ID NO: 414497 - RNA, 19 nt, Homo sapiens
  misc_RNA (1)...(19): siRNA sense strand
caccuacgaugcccuggua

SEQ ID NO: 414498 - RNA, 19 nt, Homo sapiens
  misc_RNA (1)...(19): siRNA sense strand
gagaacagcaaguccauca

SEQ ID NO: 414499 - RNA, 19 nt, Homo sapiens
  misc_RNA (1)...(19): siRNA sense strand
gaagaugaagaauggaaga

SEQ ID NO: 414500 - RNA, 19 nt, Homo sapiens
  misc_RNA (1)...(19): siRNA sense strand
cuaaauaucgguuuguuuc

SEQ ID NO: 414501 - RNA, 19 nt, Homo sapiens
  misc_RNA (1)...(19): siRNA sense strand
ggagugaacuuggauucuc

SEQ ID NO: 414502 - RNA, 19 nt, Homo sapiens
  misc_RNA (1)...(19): siRNA sense strand
ccauaaagcucugucugau

SEQ ID NO: 414503 - RNA, 19 nt, Homo sapiens
  misc_RNA (1)...(19): siRNA sense strand
gaugaucgacucccagaau

SEQ ID NO: 414504 - RNA, 19 nt, Homo sapiens
  misc_RNA (1)...(19): siRNA sense strand
caaaccagaugccuuuagg

SEQ ID NO: 414505 - RNA, 19 nt, Homo sapiens
  misc_RNA (1)...(19): siRNA sense strand
gacaaucuaccaauucuuc

SEQ ID NO: 414506 - RNA, 19 nt, Homo sapiens
  misc_RNA (1)...(19): siRNA sense strand
guuacucugucuucacaaa

SEQ ID NO: 414507 - RNA, 19 nt, Homo sapiens
  misc_RNA (1)...(19): siRNA sense strand
gacagagccugagaaguuc

SEQ ID NO: 414508 - RNA, 19 nt, Homo sapiens
  misc_RNA (1)...(19): siRNA sense strand
ggagauugacgcaguuuua

SEQ ID NO: 414509 - RNA, 19 nt, Homo sapiens
  misc_RNA (1)...(19): siRNA sense strand
auaaagcucugucugaucu

SEQ ID NO: 414510 - RNA, 19 nt, Homo sapiens
  misc_RNA (1)...(19): siRNA sense strand
ggaaacauggguucuugug

SEQ ID NO: 414511 - RNA, 19 nt, Homo sapiens
  misc_RNA (1)...(19): siRNA sense strand
gaauguuacucugucuuca

SEQ ID NO: 414512 - RNA, 19 nt, Homo sapiens
  misc_RNA (1)...(19): siRNA sense strand
ccagucaauuaucaucauu

SEQ ID NO: 414513 - RNA, 19 nt, Homo sapiens
  misc_RNA (1)...(19): siRNA sense strand
gcaucgaguagauuucuuu

SEQ ID NO: 414514 - RNA, 19 nt, Homo sapiens
  misc_RNA (1)...(19): siRNA sense strand
ccacaagaucccuuucuga

SEQ ID NO: 414515 - RNA, 19 nt, Homo sapiens
  misc_RNA (1)...(19): siRNA sense strand
gcacauuauuuggagugaa

SEQ ID NO: 414516 - RNA, 19 nt, Homo sapiens
  misc_RNA (1)...(19): siRNA sense strand
gaacagcaaguccaucaac

SEQ ID NO: 414517 - RNA, 19 nt, Homo sapiens
  misc_RNA (1)...(19): siRNA sense strand
aaagaaacaaagucccaua

SEQ ID NO: 414518 - RNA, 19 nt, Homo sapiens
  misc_RNA (1)...(19): siRNA sense strand
ucccagaauuccaaagaaa

SEQ ID NO: 414519 - RNA, 19 nt, Homo sapiens
  misc_RNA (1)...(19): siRNA sense strand
cacaagaucccuuucugaa

SEQ ID NO: 414520 - RNA, 19 nt, Homo sapiens
  misc_RNA (1)...(19): siRNA sense strand
gagauauguuggugagaag

SEQ ID NO: 414521 - RNA, 19 nt, Homo sapiens
  misc_RNA (1)...(19): siRNA sense strand
augaaacgcucagauuauu

SEQ ID NO: 414522 - RNA, 19 nt, Homo sapiens
  misc_RNA (1)...(19): siRNA sense strand
ugucugaucuggagcuugu

SEQ ID NO: 414523 - RNA, 19 nt, Homo sapiens
  misc_RNA (1)...(19): siRNA sense strand
ugguacuccucuauauuua

SEQ ID NO: 414524 - RNA, 19 nt, Homo sapiens
  misc_RNA (1)...(19): siRNA sense strand
ucucaacaauccacaagau

SEQ ID NO: 414525 - RNA, 19 nt, Homo sapiens
  misc_RNA (1)...(19): siRNA sense strand
guucauucccaaaggguua

SEQ ID NO: 414526 - RNA, 19 nt, Homo sapiens
  misc_RNA (1)...(19): siRNA sense strand
ccaguuguuaguagaguua

SEQ ID NO: 414527 - RNA, 19 nt, Homo sapiens
  misc_RNA (1)...(19): siRNA sense strand
gaagaauggaagagaauac

SEQ ID NO: 414528 - RNA, 19 nt, Homo sapiens
  misc_RNA (1)...(19): siRNA sense strand
gcagugaugguuccaaucu

SEQ ID NO: 414529 - RNA, 19 nt, Homo sapiens
  misc_RNA (1)...(19): siRNA sense strand
agaaacaaagucccauaaa

SEQ ID NO: 414530 - RNA, 19 nt, Homo sapiens
  misc_RNA (1)...(19): siRNA sense strand
aaacaaagucccauaaagc

SEQ ID NO: 414531 - RNA, 19 nt, Homo sapiens
  misc_RNA (1)...(19): siRNA sense strand
ugaaagaauguuacucugu

SEQ ID NO: 414532 - RNA, 19 nt, Homo sapiens
  misc_RNA (1)...(19): siRNA sense strand
cuuaagagaugggauuaca

SEQ ID NO: 414533 - RNA, 19 nt, Homo sapiens
  misc_RNA (1)...(19): siRNA sense strand
uagcagugaugguuccaau

SEQ ID NO: 414534 - RNA, 19 nt, Homo sapiens
  misc_RNA (1)...(19): siRNA sense strand
ccaaaggguuagcagugau

SEQ ID NO: 414535 - RNA, 19 nt, Homo sapiens
  misc_RNA (1)...(19): siRNA sense strand
gcucagauuauucccaguu

SEQ ID NO: 414536 - RNA, 19 nt, Homo sapiens
  misc_RNA (1)...(19): siRNA sense strand
caccauggauguaaucacu

SEQ ID NO: 414537 - RNA, 19 nt, Homo sapiens
  misc_RNA (1)...(19): siRNA sense strand
cugguacuccucuauauuu

SEQ ID NO: 414538 - RNA, 19 nt, Homo sapiens
  misc_RNA (1)...(19): siRNA sense strand
uaagagaugggauuacaag

SEQ ID NO: 414539 - RNA, 19 nt, Homo sapiens
  misc_RNA (1)...(19): siRNA sense strand
cccaaaggguuagcaguga

SEQ ID NO: 414540 - RNA, 19 nt, Homo sapiens
  misc_RNA (1)...(19): siRNA sense strand
aagaaacaaagucccauaa

SEQ ID NO: 414541 - RNA, 19 nt, Homo sapiens
  misc_RNA (1)...(19): siRNA sense strand
gaaaggaugaaagaaaguc

SEQ ID NO: 414542 - RNA, 19 nt, Homo sapiens
  misc_RNA (1)...(19): siRNA sense strand
uugaaaggaugaaagaaag

SEQ ID NO: 414543 - RNA, 19 nt, Homo sapiens
  misc_RNA (1)...(19): siRNA sense strand
ccaauguggagauauguug

SEQ ID NO: 414544 - RNA, 19 nt, Homo sapiens
  misc_RNA (1)...(19): siRNA sense strand
aaugaaacgcucagauuau

SEQ ID NO: 414545 - RNA, 19 nt, Homo sapiens
  misc_RNA (1)...(19): siRNA sense strand
uggaguaccuugacauggu

SEQ ID NO: 414546 - RNA, 19 nt, Homo sapiens
  misc_RNA (1)...(19): siRNA sense strand
aagaaagucgccucaaaga

SEQ ID NO: 414547 - RNA, 19 nt, Homo sapiens
  misc_RNA (1)...(19): siRNA sense strand
aaagaaagucgccucaaag

SEQ ID NO: 414548 - RNA, 19 nt, Homo sapiens
  misc_RNA (1)...(19): siRNA sense strand
gagugaacuuggauucucu

SEQ ID NO: 414549 - RNA, 19 nt, Homo sapiens
  misc_RNA (1)...(19): siRNA sense strand
gguccaaugggauuucuga

SEQ ID NO: 414550 - RNA, 19 nt, Homo sapiens
  misc_RNA (1)...(19): siRNA sense strand
agugaugguuccaaucuau

SEQ ID NO: 414551 - RNA, 19 nt, Homo sapiens
  misc_RNA (1)...(19): siRNA sense strand
uuacgagagucugcaagaa

SEQ ID NO: 414552 - RNA, 19 nt, Homo sapiens
  misc_RNA (1)...(19): siRNA sense strand
gacaugguggugaaugaaa

SEQ ID NO: 414553 - RNA, 19 nt, Homo sapiens
  misc_RNA (1)...(19): siRNA sense strand
gauggaguaccuugacaug

SEQ ID NO: 414554 - RNA, 19 nt, Homo sapiens
  misc_RNA (1)...(19): siRNA sense strand
gaaacugcaggaggagauu

SEQ ID NO: 414555 - RNA, 19 nt, Homo sapiens
  misc_RNA (1)...(19): siRNA sense strand
ccauugaaaggaugaaaga

SEQ ID NO: 414556 - RNA, 19 nt, Homo sapiens
  misc_RNA (1)...(19): siRNA sense strand
ugaagaauggaagagaaua

SEQ ID NO: 414557 - RNA, 19 nt, Homo sapiens
  misc_RNA (1)...(19): siRNA sense strand
gccugguacuccucuauau

SEQ ID NO: 414558 - RNA, 19 nt, Homo sapiens
  misc_RNA (1)...(19): siRNA sense strand
cagauuauucccaguuguu

SEQ ID NO: 414559 - RNA, 19 nt, Homo sapiens
  misc_RNA (1)...(19): siRNA sense strand
ucacucuuuccauuucuua

SEQ ID NO: 414560 - RNA, 19 nt, Homo sapiens
  misc_RNA (1)...(19): siRNA sense strand
guuccaaucuaugcucuuc

SEQ ID NO: 414561 - RNA, 19 nt, Homo sapiens
  misc_RNA (1)...(19): siRNA sense strand
uuaagaagcugggaauucc

SEQ ID NO: 414562 - RNA, 19 nt, Homo sapiens
  misc_RNA (1)...(19): siRNA sense strand
cagugaugguuccaaucua

SEQ ID NO: 414563 - RNA, 19 nt, Homo sapiens
  misc_RNA (1)...(19): siRNA sense strand
cuuguggcccagucaauua

SEQ ID NO: 414564 - RNA, 19 nt, Homo sapiens
  misc_RNA (1)...(19): siRNA sense strand
agaauacgaacauugcuau

SEQ ID NO: 414565 - RNA, 19 nt, Homo sapiens
  misc_RNA (1)...(19): siRNA sense strand
aaucuaugcucuucaccau

SEQ ID NO: 414566 - RNA, 19 nt, Homo sapiens
  misc_RNA (1)...(19): siRNA sense strand
uacgagagucugcaagaaa

SEQ ID NO: 414567 - RNA, 19 nt, Homo sapiens
  misc_RNA (1)...(19): siRNA sense strand
ccagaauuccaaagaaaca

SEQ ID NO: 414568 - RNA, 19 nt, Homo sapiens
  misc_RNA (1)...(19): siRNA sense strand
ccucaaagauaaacaaaag

SEQ ID NO: 414569 - RNA, 19 nt, Homo sapiens
  misc_RNA (1)...(19): siRNA sense strand
gaaagucgccucaaagaua

SEQ ID NO: 414570 - RNA, 19 nt, Homo sapiens
  misc_RNA (1)...(19): siRNA sense strand
gaaagaaagucgccucaaa

SEQ ID NO: 414571 - RNA, 19 nt, Homo sapiens
  misc_RNA (1)...(19): siRNA sense strand
ggacagagccugagaaguu

SEQ ID NO: 414572 - RNA, 19 nt, Homo sapiens
  misc_RNA (1)...(19): siRNA sense strand
gaaugaaacgcucagauua

SEQ ID NO: 414573 - RNA, 19 nt, Homo sapiens
  misc_RNA (1)...(19): siRNA sense strand
gaaacaaagucccauaaag

SEQ ID NO: 414574 - RNA, 19 nt, Homo sapiens
  misc_RNA (1)...(19): siRNA sense strand
gaacuuggauucucucaac

SEQ ID NO: 414575 - RNA, 19 nt, Homo sapiens
  misc_RNA (1)...(19): siRNA sense strand
caaaagauguuacccauuu

SEQ ID NO: 414576 - RNA, 19 nt, Homo sapiens
  misc_RNA (1)...(19): siRNA sense strand
ggagauauguuggugagaa

SEQ ID NO: 414577 - RNA, 19 nt, Homo sapiens
  misc_RNA (1)...(19): siRNA sense strand
guagauuucuuucaacaga

SEQ ID NO: 414578 - RNA, 19 nt, Homo sapiens
  misc_RNA (1)...(19): siRNA sense strand
gaugaagaauggaagagaa

SEQ ID NO: 414579 - RNA, 19 nt, Homo sapiens
  misc_RNA (1)...(19): siRNA sense strand
gacagagaauguaaugaaa

SEQ ID NO: 414580 - RNA, 19 nt, Homo sapiens
  misc_RNA (1)...(19): siRNA sense strand
gaagagaauacgaacauug

SEQ ID NO: 414581 - RNA, 19 nt, Homo sapiens
  misc_RNA (1)...(19): siRNA sense strand
aaagucgccucaaagauaa

SEQ ID NO: 414582 - RNA, 19 nt, Homo sapiens
  misc_RNA (1)...(19): siRNA sense strand
ugaaaucaauggaguguuc

SEQ ID NO: 414583 - RNA, 19 nt, Homo sapiens
  misc_RNA (1)...(19): siRNA sense strand
ucacaaaccagaugccuuu

SEQ ID NO: 414584 - RNA, 19 nt, Homo sapiens
  misc_RNA (1)...(19): siRNA sense strand
guacuccucuauauuuaug

SEQ ID NO: 414585 - RNA, 19 nt, Homo sapiens
  misc_RNA (1)...(19): siRNA sense strand
ggaagagaauacgaacauu

SEQ ID NO: 414586 - RNA, 19 nt, Homo sapiens
  misc_RNA (1)...(19): siRNA sense strand
ugacagagaauguaaugaa

SEQ ID NO: 414587 - RNA, 19 nt, Homo sapiens
  misc_RNA (1)...(19): siRNA sense strand
gcacuuaagagaugggauu

SEQ ID NO: 414588 - RNA, 19 nt, Homo sapiens
  misc_RNA (1)...(19): siRNA sense strand
ggaucucauuccaaacuuu

SEQ ID NO: 414589 - RNA, 19 nt, Homo sapiens
  misc_RNA (1)...(19): siRNA sense strand
ucuaugcucuucaccauga

SEQ ID NO: 414590 - RNA, 19 nt, Homo sapiens
  misc_RNA (1)...(19): siRNA sense strand
gaguagauuucuuucaaca

SEQ ID NO: 414591 - RNA, 19 nt, Homo sapiens
  misc_RNA (1)...(19): siRNA sense strand
ucgaguagauuucuuucaa

SEQ ID NO: 414592 - RNA, 19 nt, Homo sapiens
  misc_RNA (1)...(19): siRNA sense strand
ugaaugaaacgcucagauu

SEQ ID NO: 414593 - RNA, 19 nt, Homo sapiens
  misc_RNA (1)...(19): siRNA sense strand
gagaauacgaacauugcua

SEQ ID NO: 414594 - RNA, 19 nt, Homo sapiens
  misc_RNA (1)...(19): siRNA sense strand
ccacugaaauuagacaauc

SEQ ID NO: 414595 - RNA, 19 nt, Homo sapiens
  misc_RNA (1)...(19): siRNA sense strand
ggaggagauugacgcaguu

SEQ ID NO: 414596 - RNA, 19 nt, Homo sapiens
  misc_RNA (1)...(19): siRNA sense strand
gaauggaagagaauacgaa

SEQ ID NO: 414597 - RNA, 19 nt, Homo sapiens
  misc_RNA (1)...(19): siRNA sense strand
caccuacgaugcccuggua

SEQ ID NO: 414598 - RNA, 19 nt, Homo sapiens
  misc_RNA (1)...(19): siRNA sense strand
gagaacagcaaguccauca

SEQ ID NO: 414599 - RNA, 19 nt, Homo sapiens
  misc_RNA (1)...(19): siRNA sense strand
gaagaugaagaauggaaga

SEQ ID NO: 414600 - RNA, 19 nt, Homo sapiens
  misc_RNA (1)...(19): siRNA sense strand
cuaaauaucgguuuguuuc

SEQ ID NO: 414601 - RNA, 19 nt, Homo sapiens
  misc_RNA (1)...(19): siRNA sense strand
ggagugaacuuggauucuc

SEQ ID NO: 414602 - RNA, 19 nt, Homo sapiens
  misc_RNA (1)...(19): siRNA sense strand
ccauaaagcucugucugau

SEQ ID NO: 414603 - RNA, 19 nt, Homo sapiens
  misc_RNA (1)...(19): siRNA sense strand
gaugaucgacucccagaau

SEQ ID NO: 414604 - RNA, 19 nt, Homo sapiens
  misc_RNA (1)...(19): siRNA sense strand
caaaccagaugccuuuagg

SEQ ID NO: 414605 - RNA, 19 nt, Homo sapiens
  misc_RNA (1)...(19): siRNA sense strand
gacaaucuaccaauucuuc

SEQ ID NO: 414606 - RNA, 19 nt, Homo sapiens
  misc_RNA (1)...(19): siRNA sense strand
guuacucugucuucacaaa

SEQ ID NO: 414607 - RNA, 19 nt, Homo sapiens
  misc_RNA (1)...(19): siRNA sense strand
gacagagccugagaaguuc

SEQ ID NO: 414608 - RNA, 19 nt, Homo sapiens
  misc_RNA (1)...(19): siRNA sense strand
ggagauugacgcaguuuua

SEQ ID NO: 414609 - RNA, 19 nt, Homo sapiens
  misc_RNA (1)...(19): siRNA sense strand
auaaagcucugucugaucu

SEQ ID NO: 414610 - RNA, 19 nt, Homo sapiens
  misc_RNA (1)...(19): siRNA sense strand
ggaaacauggguucuugug

SEQ ID NO: 414611 - RNA, 19 nt, Homo sapiens
  misc_RNA (1)...(19): siRNA sense strand
gaauguuacucugucuuca

SEQ ID NO: 414612 - RNA, 19 nt, Homo sapiens
  misc_RNA (1)...(19): siRNA sense strand
ccagucaauuaucaucauu

SEQ ID NO: 414613 - RNA, 19 nt, Homo sapiens
  misc_RNA (1)...(19): siRNA sense strand
gcaucgaguagauuucuuu

SEQ ID NO: 414614 - RNA, 19 nt, Homo sapiens
  misc_RNA (1)...(19): siRNA sense strand
ccacaagaucccuuucuga

SEQ ID NO: 414615 - RNA, 19 nt, Homo sapiens
  misc_RNA (1)...(19): siRNA sense strand
gcacauuauuuggagugaa

SEQ ID NO: 414616 - RNA, 19 nt, Homo sapiens
  misc_RNA (1)...(19): siRNA sense strand
gaacagcaaguccaucaac

SEQ ID NO: 414617 - RNA, 19 nt, Homo sapiens
  misc_RNA (1)...(19): siRNA sense strand
aaagaaacaaagucccaua

SEQ ID NO: 414618 - RNA, 19 nt, Homo sapiens
  misc_RNA (1)...(19): siRNA sense strand
ucccagaauuccaaagaaa

SEQ ID NO: 414619 - RNA, 19 nt, Homo sapiens
  misc_RNA (1)...(19): siRNA sense strand
cacaagaucccuuucugaa

SEQ ID NO: 414620 - RNA, 19 nt, Homo sapiens
  misc_RNA (1)...(19): siRNA sense strand
gagauauguuggugagaag

SEQ ID NO: 414621 - RNA, 19 nt, Homo sapiens
  misc_RNA (1)...(19): siRNA sense strand
augaaacgcucagauuauu

SEQ ID NO: 414622 - RNA, 19 nt, Homo sapiens
  misc_RNA (1)...(19): siRNA sense strand
ugucugaucuggagcuugu

SEQ ID NO: 414623 - RNA, 19 nt, Homo sapiens
  misc_RNA (1)...(19): siRNA sense strand
ugguacuccucuauauuua

SEQ ID NO: 414624 - RNA, 19 nt, Homo sapiens
  misc_RNA (1)...(19): siRNA sense strand
ucucaacaauccacaagau

SEQ ID NO: 414625 - RNA, 19 nt, Homo sapiens
  misc_RNA (1)...(19): siRNA sense strand
guucauucccaaaggguua

SEQ ID NO: 414626 - RNA, 19 nt, Homo sapiens
  misc_RNA (1)...(19): siRNA sense strand
ccaguuguuaguagaguua

SEQ ID NO: 414627 - RNA, 19 nt, Homo sapiens
  misc_RNA (1)...(19): siRNA sense strand
gaagaauggaagagaauac

SEQ ID NO: 414628 - RNA, 19 nt, Homo sapiens
  misc_RNA (1)...(19): siRNA sense strand
gcagugaugguuccaaucu

SEQ ID NO: 414629 - RNA, 19 nt, Homo sapiens
  misc_RNA (1)...(19): siRNA sense strand
agaaacaaagucccauaaa

SEQ ID NO: 414630 - RNA, 19 nt, Homo sapiens
  misc_RNA (1)...(19): siRNA sense strand
aaacaaagucccauaaagc

SEQ ID NO: 414631 - RNA, 19 nt, Homo sapiens
  misc_RNA (1)...(19): siRNA sense strand
ugaaagaauguuacucugu

SEQ ID NO: 414632 - RNA, 19 nt, Homo sapiens
  misc_RNA (1)...(19): siRNA sense strand
cuuaagagaugggauuaca

SEQ ID NO: 414633 - RNA, 19 nt, Homo sapiens
  misc_RNA (1)...(19): siRNA sense strand
uagcagugaugguuccaau

SEQ ID NO: 414634 - RNA, 19 nt, Homo sapiens
  misc_RNA (1)...(19): siRNA sense strand
ccaaaggguuagcagugau

SEQ ID NO: 414635 - RNA, 19 nt, Homo sapiens
  misc_RNA (1)...(19): siRNA sense strand
gcucagauuauucccaguu

SEQ ID NO: 414636 - RNA, 19 nt, Homo sapiens
  misc_RNA (1)...(19): siRNA sense strand
caccauggauguaaucacu

SEQ ID NO: 414637 - RNA, 19 nt, Homo sapiens
  misc_RNA (1)...(19): siRNA sense strand
cugguacuccucuauauuu

SEQ ID NO: 414638 - RNA, 19 nt, Homo sapiens
  misc_RNA (1)...(19): siRNA sense strand
uaagagaugggauuacaag

SEQ ID NO: 414639 - RNA, 19 nt, Homo sapiens
  misc_RNA (1)...(19): siRNA sense strand
cccaaaggguuagcaguga

SEQ ID NO: 414640 - RNA, 19 nt, Homo sapiens
  misc_RNA (1)...(19): siRNA sense strand
aagaaacaaagucccauaa

SEQ ID NO: 414641 - RNA, 19 nt, Homo sapiens
  misc_RNA (1)...(19): siRNA sense strand
gaaaggaugaaagaaaguc

SEQ ID NO: 414642 - RNA, 19 nt, Homo sapiens
  misc_RNA (1)...(19): siRNA sense strand
uugaaaggaugaaagaaag

SEQ ID NO: 414643 - RNA, 19 nt, Homo sapiens
  misc_RNA (1)...(19): siRNA sense strand
ccaauguggagauauguug

SEQ ID NO: 414644 - RNA, 19 nt, Homo sapiens
  misc_RNA (1)...(19): siRNA sense strand
aaugaaacgcucagauuau

SEQ ID NO: 414645 - RNA, 19 nt, Homo sapiens
  misc_RNA (1)...(19): siRNA sense strand
uggaguaccuugacauggu

SEQ ID NO: 414646 - RNA, 19 nt, Homo sapiens
  misc_RNA (1)...(19): siRNA sense strand
aagaaagucgccucaaaga

SEQ ID NO: 414647 - RNA, 19 nt, Homo sapiens
  misc_RNA (1)...(19): siRNA sense strand
aaagaaagucgccucaaag

SEQ ID NO: 414648 - RNA, 19 nt, Homo sapiens
  misc_RNA (1)...(19): siRNA sense strand
gagugaacuuggauucucu

SEQ ID NO: 414649 - RNA, 19 nt, Homo sapiens
  misc_RNA (1)...(19): siRNA sense strand
gguccaaugggauuucuga

SEQ ID NO: 414650 - RNA, 19 nt, Homo sapiens
  misc_RNA (1)...(19): siRNA sense strand
agugaugguuccaaucuau

SEQ ID NO: 414651 - RNA, 19 nt, Homo sapiens
  misc_RNA (1)...(19): siRNA sense strand
uuacgagagucugcaagaa

SEQ ID NO: 414652 - RNA, 19 nt, Homo sapiens
  misc_RNA (1)...(19): siRNA sense strand
gacaugguggugaaugaaa

SEQ ID NO: 414653 - RNA, 19 nt, Homo sapiens
  misc_RNA (1)...(19): siRNA sense strand
gauggaguaccuugacaug

SEQ ID NO: 414654 - RNA, 19 nt, Homo sapiens
  misc_RNA (1)...(19): siRNA sense strand
gaaacugcaggaggagauu

SEQ ID NO: 414655 - RNA, 19 nt, Homo sapiens
  misc_RNA (1)...(19): siRNA sense strand
ccauugaaaggaugaaaga

SEQ ID NO: 414656 - RNA, 19 nt, Homo sapiens
  misc_RNA (1)...(19): siRNA sense strand
ugaagaauggaagagaaua

SEQ ID NO: 414657 - RNA, 19 nt, Homo sapiens
  misc_RNA (1)...(19): siRNA sense strand
gccugguacuccucuauau

SEQ ID NO: 414658 - RNA, 19 nt, Homo sapiens
  misc_RNA (1)...(19): siRNA sense strand
cagauuauucccaguuguu

SEQ ID NO: 414659 - RNA, 19 nt, Homo sapiens
  misc_RNA (1)...(19): siRNA sense strand
ucacucuuuccauuucuua

SEQ ID NO: 414660 - RNA, 19 nt, Homo sapiens
  misc_RNA (1)...(19): siRNA sense strand
guuccaaucuaugcucuuc

SEQ ID NO: 414661 - RNA, 19 nt, Homo sapiens
  misc_RNA (1)...(19): siRNA sense strand
uuaagaagcugggaauucc

SEQ ID NO: 414662 - RNA, 19 nt, Homo sapiens
  misc_RNA (1)...(19): siRNA sense strand
cagugaugguuccaaucua

SEQ ID NO: 414663 - RNA, 19 nt, Homo sapiens
  misc_RNA (1)...(19): siRNA sense strand
cuuguggcccagucaauua

SEQ ID NO: 414664 - RNA, 19 nt, Homo sapiens
  misc_RNA (1)...(19): siRNA sense strand
agaauacgaacauugcuau

SEQ ID NO: 414665 - RNA, 19 nt, Homo sapiens
  misc_RNA (1)...(19): siRNA sense strand
aaucuaugcucuucaccau

SEQ ID NO: 414666 - RNA, 19 nt, Homo sapiens
  misc_RNA (1)...(19): siRNA sense strand
uacgagagucugcaagaaa

SEQ ID NO: 414667 - RNA, 19 nt, Homo sapiens
  misc_RNA (1)...(19): siRNA sense strand
ccagaauuccaaagaaaca

SEQ ID NO: 414668 - RNA, 19 nt, Homo sapiens
  misc_RNA (1)...(19): siRNA sense strand
ccucaaagauaaacaaaag

SEQ ID NO: 414669 - RNA, 19 nt, Homo sapiens
  misc_RNA (1)...(19): siRNA sense strand
gaaagucgccucaaagaua

SEQ ID NO: 414670 - RNA, 19 nt, Homo sapiens
  misc_RNA (1)...(19): siRNA sense strand
gaaagaaagucgccucaaa

SEQ ID NO: 414671 - RNA, 19 nt, Homo sapiens
  misc_RNA (1)...(19): siRNA sense strand
ggacagagccugagaaguu

SEQ ID NO: 414672 - RNA, 19 nt, Homo sapiens
  misc_RNA (1)...(19): siRNA sense strand
gaaugaaacgcucagauua

SEQ ID NO: 414673 - RNA, 19 nt, Homo sapiens
  misc_RNA (1)...(19): siRNA sense strand
gaaacaaagucccauaaag

SEQ ID NO: 414674 - RNA, 19 nt, Homo sapiens
  misc_RNA (1)...(19): siRNA sense strand
gaacuuggauucucucaac

SEQ ID NO: 414675 - RNA, 19 nt, Homo sapiens
  misc_RNA (1)...(19): siRNA sense strand
caaaagauguuacccauuu

SEQ ID NO: 414676 - RNA, 19 nt, Homo sapiens
  misc_RNA (1)...(19): siRNA sense strand
ggagauauguuggugagaa

SEQ ID NO: 414677 - RNA, 19 nt, Homo sapiens
  misc_RNA (1)...(19): siRNA sense strand
guagauuucuuucaacaga

SEQ ID NO: 414678 - RNA, 19 nt, Homo sapiens
  misc_RNA (1)...(19): siRNA sense strand
gaugaagaauggaagagaa

SEQ ID NO: 414679 - RNA, 19 nt, Homo sapiens
  misc_RNA (1)...(19): siRNA sense strand
gacagagaauguaaugaaa

SEQ ID NO: 414680 - RNA, 19 nt, Homo sapiens
  misc_RNA (1)...(19): siRNA sense strand
gaagagaauacgaacauug

SEQ ID NO: 414681 - RNA, 19 nt, Homo sapiens
  misc_RNA (1)...(19): siRNA sense strand
aaagucgccucaaagauaa

SEQ ID NO: 414682 - RNA, 19 nt, Homo sapiens
  misc_RNA (1)...(19): siRNA sense strand
ugaaaucaauggaguguuc

SEQ ID NO: 414683 - RNA, 19 nt, Homo sapiens
  misc_RNA (1)...(19): siRNA sense strand
ucacaaaccagaugccuuu

SEQ ID NO: 414684 - RNA, 19 nt, Homo sapiens
  misc_RNA (1)...(19): siRNA sense strand
guacuccucuauauuuaug

SEQ ID NO: 414685 - RNA, 19 nt, Homo sapiens
  misc_RNA (1)...(19): siRNA sense strand
ggaagagaauacgaacauu

SEQ ID NO: 414686 - RNA, 19 nt, Homo sapiens
  misc_RNA (1)...(19): siRNA sense strand
ugacagagaauguaaugaa

SEQ ID NO: 414687 - RNA, 19 nt, Homo sapiens
  misc_RNA (1)...(19): siRNA sense strand
ggaucucauuccaaacuuu

SEQ ID NO: 414688 - RNA, 19 nt, Homo sapiens
  misc_RNA (1)...(19): siRNA sense strand
ucuaugcucuucaccauga

SEQ ID NO: 414689 - RNA, 19 nt, Homo sapiens
  misc_RNA (1)...(19): siRNA sense strand
gaguagauuucuuucaaca

SEQ ID NO: 414690 - RNA, 19 nt, Homo sapiens
  misc_RNA (1)...(19): siRNA sense strand
ucgaguagauuucuuucaa

SEQ ID NO: 414691 - RNA, 19 nt, Homo sapiens
  misc_RNA (1)...(19): siRNA sense strand
ugaaugaaacgcucagauu

SEQ ID NO: 414692 - RNA, 19 nt, Homo sapiens
  misc_RNA (1)...(19): siRNA sense strand
gagaauacgaacauugcua

SEQ ID NO: 414693 - RNA, 19 nt, Homo sapiens
  misc_RNA (1)...(19): siRNA sense strand
ggaggagauugacgcaguu

SEQ ID NO: 414694 - RNA, 19 nt, Homo sapiens
  misc_RNA (1)...(19): siRNA sense strand
gaauggaagagaauacgaa

SEQ ID NO: 414695 - RNA, 19 nt, Homo sapiens
  misc_RNA (1)...(19): siRNA sense strand
caccuacgaugcccuggua

SEQ ID NO: 414696 - RNA, 19 nt, Homo sapiens
  misc_RNA (1)...(19): siRNA sense strand
gagaacagcaaguccauca

SEQ ID NO: 414697 - RNA, 19 nt, Homo sapiens
  misc_RNA (1)...(19): siRNA sense strand
gaagaugaagaauggaaga

SEQ ID NO: 414698 - RNA, 19 nt, Homo sapiens
  misc_RNA (1)...(19): siRNA sense strand
cuaaauaucgguuuguuuc

SEQ ID NO: 414699 - RNA, 19 nt, Homo sapiens
  misc_RNA (1)...(19): siRNA sense strand
ggagugaacuuggauucuc

SEQ ID NO: 414700 - RNA, 19 nt, Homo sapiens
  misc_RNA (1)...(19): siRNA sense strand
ccauaaagcucugucugau

SEQ ID NO: 414701 - RNA, 19 nt, Homo sapiens
  misc_RNA (1)...(19): siRNA sense strand
gaugaucgacucccagaau

SEQ ID NO: 414702 - RNA, 19 nt, Homo sapiens
  misc_RNA (1)...(19): siRNA sense strand
caaaccagaugccuuuagg

SEQ ID NO: 414703 - RNA, 19 nt, Homo sapiens
  misc_RNA (1)...(19): siRNA sense strand
guuacucugucuucacaaa

SEQ ID NO: 414704 - RNA, 19 nt, Homo sapiens
  misc_RNA (1)...(19): siRNA sense strand
gacagagccugagaaguuc

SEQ ID NO: 414705 - RNA, 19 nt, Homo sapiens
  misc_RNA (1)...(19): siRNA sense strand
ggagauugacgcaguuuua

SEQ ID NO: 414706 - RNA, 19 nt, Homo sapiens
  misc_RNA (1)...(19): siRNA sense strand
auaaagcucugucugaucu

SEQ ID NO: 414707 - RNA, 19 nt, Homo sapiens
  misc_RNA (1)...(19): siRNA sense strand
ggaaacauggguucuugug

SEQ ID NO: 414708 - RNA, 19 nt, Homo sapiens
  misc_RNA (1)...(19): siRNA sense strand
gaauguuacucugucuuca

SEQ ID NO: 414709 - RNA, 19 nt, Homo sapiens
  misc_RNA (1)...(19): siRNA sense strand
ccagucaauuaucaucauu

SEQ ID NO: 414710 - RNA, 19 nt, Homo sapiens
  misc_RNA (1)...(19): siRNA sense strand
gcaucgaguagauuucuuu

SEQ ID NO: 414711 - RNA, 19 nt, Homo sapiens
  misc_RNA (1)...(19): siRNA sense strand
ccacaagaucccuuucuga

SEQ ID NO: 414712 - RNA, 19 nt, Homo sapiens
  misc_RNA (1)...(19): siRNA sense strand
gcacauuauuuggagugaa

SEQ ID NO: 414713 - RNA, 19 nt, Homo sapiens
  misc_RNA (1)...(19): siRNA sense strand
gaacagcaaguccaucaac

SEQ ID NO: 414714 - RNA, 19 nt, Homo sapiens
  misc_RNA (1)...(19): siRNA sense strand
aaagaaacaaagucccaua

SEQ ID NO: 414715 - RNA, 19 nt, Homo sapiens
  misc_RNA (1)...(19): siRNA sense strand
ucccagaauuccaaagaaa

SEQ ID NO: 414716 - RNA, 19 nt, Homo sapiens
  misc_RNA (1)...(19): siRNA sense strand
cacaagaucccuuucugaa

SEQ ID NO: 414717 - RNA, 19 nt, Homo sapiens
  misc_RNA (1)...(19): siRNA sense strand
gagauauguuggugagaag

SEQ ID NO: 414718 - RNA, 19 nt, Homo sapiens
  misc_RNA (1)...(19): siRNA sense strand
augaaacgcucagauuauu

SEQ ID NO: 414719 - RNA, 19 nt, Homo sapiens
  misc_RNA (1)...(19): siRNA sense strand
ugucugaucuggagcuugu

SEQ ID NO: 414720 - RNA, 19 nt, Homo sapiens
  misc_RNA (1)...(19): siRNA sense strand
ugguacuccucuauauuua

SEQ ID NO: 414721 - RNA, 19 nt, Homo sapiens
  misc_RNA (1)...(19): siRNA sense strand
ucucaacaauccacaagau

SEQ ID NO: 414722 - RNA, 19 nt, Homo sapiens
  misc_RNA (1)...(19): siRNA sense strand
guucauucccaaaggguua

SEQ ID NO: 414723 - RNA, 19 nt, Homo sapiens
  misc_RNA (1)...(19): siRNA sense strand
ccaguuguuaguagaguua

SEQ ID NO: 414724 - RNA, 19 nt, Homo sapiens
  misc_RNA (1)...(19): siRNA sense strand
gaagaauggaagagaauac

SEQ ID NO: 414725 - RNA, 19 nt, Homo sapiens
  misc_RNA (1)...(19): siRNA sense strand
gcagugaugguuccaaucu

SEQ ID NO: 414726 - RNA, 19 nt, Homo sapiens
  misc_RNA (1)...(19): siRNA sense strand
agaaacaaagucccauaaa

SEQ ID NO: 414727 - RNA, 19 nt, Homo sapiens
  misc_RNA (1)...(19): siRNA sense strand
aaacaaagucccauaaagc

SEQ ID NO: 414728 - RNA, 19 nt, Homo sapiens
  misc_RNA (1)...(19): siRNA sense strand
ugaaagaauguuacucugu

SEQ ID NO: 414729 - RNA, 19 nt, Homo sapiens
  misc_RNA (1)...(19): siRNA sense strand
uagcagugaugguuccaau

SEQ ID NO: 414730 - RNA, 19 nt, Homo sapiens
  misc_RNA (1)...(19): siRNA sense strand
ccaaaggguuagcagugau

SEQ ID NO: 414731 - RNA, 19 nt, Homo sapiens
  misc_RNA (1)...(19): siRNA sense strand
gcucagauuauucccaguu

SEQ ID NO: 414732 - RNA, 19 nt, Homo sapiens
  misc_RNA (1)...(19): siRNA sense strand
caccauggauguaaucacu

SEQ ID NO: 414733 - RNA, 19 nt, Homo sapiens
  misc_RNA (1)...(19): siRNA sense strand
cugguacuccucuauauuu

SEQ ID NO: 414734 - RNA, 19 nt, Homo sapiens
  misc_RNA (1)...(19): siRNA sense strand
cccaaaggguuagcaguga

SEQ ID NO: 414735 - RNA, 19 nt, Homo sapiens
  misc_RNA (1)...(19): siRNA sense strand
aagaaacaaagucccauaa

SEQ ID NO: 414736 - RNA, 19 nt, Homo sapiens
  misc_RNA (1)...(19): siRNA sense strand
gaaaggaugaaagaaaguc

SEQ ID NO: 414737 - RNA, 19 nt, Homo sapiens
  misc_RNA (1)...(19): siRNA sense strand
uugaaaggaugaaagaaag

SEQ ID NO: 414738 - RNA, 19 nt, Homo sapiens
  misc_RNA (1)...(19): siRNA sense strand
ccaauguggagauauguug

SEQ ID NO: 414739 - RNA, 19 nt, Homo sapiens
  misc_RNA (1)...(19): siRNA sense strand
aaugaaacgcucagauuau

SEQ ID NO: 414740 - RNA, 19 nt, Homo sapiens
  misc_RNA (1)...(19): siRNA sense strand
uggaguaccuugacauggu

SEQ ID NO: 414741 - RNA, 19 nt, Homo sapiens
  misc_RNA (1)...(19): siRNA sense strand
aagaaagucgccucaaaga

SEQ ID NO: 414742 - RNA, 19 nt, Homo sapiens
  misc_RNA (1)...(19): siRNA sense strand
aaagaaagucgccucaaag

SEQ ID NO: 414743 - RNA, 19 nt, Homo sapiens
  misc_RNA (1)...(19): siRNA sense strand
gagugaacuuggauucucu

SEQ ID NO: 414744 - RNA, 19 nt, Homo sapiens
  misc_RNA (1)...(19): siRNA sense strand
gguccaaugggauuucuga

SEQ ID NO: 414745 - RNA, 19 nt, Homo sapiens
  misc_RNA (1)...(19): siRNA sense strand
agugaugguuccaaucuau

SEQ ID NO: 414746 - RNA, 19 nt, Homo sapiens
  misc_RNA (1)...(19): siRNA sense strand
uuacgagagucugcaagaa

SEQ ID NO: 414747 - RNA, 19 nt, Homo sapiens
  misc_RNA (1)...(19): siRNA sense strand
gacaugguggugaaugaaa

SEQ ID NO: 414748 - RNA, 19 nt, Homo sapiens
  misc_RNA (1)...(19): siRNA sense strand
gauggaguaccuugacaug

SEQ ID NO: 414749 - RNA, 19 nt, Homo sapiens
  misc_RNA (1)...(19): siRNA sense strand
gaaacugcaggaggagauu

SEQ ID NO: 414750 - RNA, 19 nt, Homo sapiens
  misc_RNA (1)...(19): siRNA sense strand
ccauugaaaggaugaaaga

SEQ ID NO: 414751 - RNA, 19 nt, Homo sapiens
  misc_RNA (1)...(19): siRNA sense strand
ugaagaauggaagagaaua

SEQ ID NO: 414752 - RNA, 19 nt, Homo sapiens
  misc_RNA (1)...(19): siRNA sense strand
gccugguacuccucuauau

SEQ ID NO: 414753 - RNA, 19 nt, Homo sapiens
  misc_RNA (1)...(19): siRNA sense strand
cagauuauucccaguuguu

SEQ ID NO: 414754 - RNA, 19 nt, Homo sapiens
  misc_RNA (1)...(19): siRNA sense strand
ucacucuuuccauuucuua

SEQ ID NO: 414755 - RNA, 19 nt, Homo sapiens
  misc_RNA (1)...(19): siRNA sense strand
guuccaaucuaugcucuuc

SEQ ID NO: 414756 - RNA, 19 nt, Homo sapiens
  misc_RNA (1)...(19): siRNA sense strand
cuuguggcccagucaauua

SEQ ID NO: 414757 - RNA, 19 nt, Homo sapiens
  misc_RNA (1)...(19): siRNA sense strand
cagugaugguuccaaucua

SEQ ID NO: 414758 - RNA, 19 nt, Homo sapiens
  misc_RNA (1)...(19): siRNA sense strand
uuaagaagcugggaauucc

SEQ ID NO: 414759 - RNA, 19 nt, Homo sapiens
  misc_RNA (1)...(19): siRNA sense strand
ugaaaagugccuuaaguuu

SEQ ID NO: 414760 - RNA, 19 nt, Homo sapiens
  misc_RNA (1)...(19): siRNA sense strand
aaucuaugcucuucaccau

SEQ ID NO: 414761 - RNA, 19 nt, Homo sapiens
  misc_RNA (1)...(19): siRNA sense strand
uacgagagucugcaagaaa

SEQ ID NO: 414762 - RNA, 19 nt, Homo sapiens
  misc_RNA (1)...(19): siRNA sense strand
ccagaauuccaaagaaaca

SEQ ID NO: 414763 - RNA, 19 nt, Homo sapiens
  misc_RNA (1)...(19): siRNA sense strand
ccucaaagauaaacaaaag

SEQ ID NO: 414764 - RNA, 19 nt, Homo sapiens
  misc_RNA (1)...(19): siRNA sense strand
agaauacgaacauugcuau

SEQ ID NO: 414765 - RNA, 19 nt, Homo sapiens
  misc_RNA (1)...(19): siRNA sense strand
gaaacgcucagauuauucc

SEQ ID NO: 414766 - RNA, 19 nt, Homo sapiens
  misc_RNA (1)...(19): siRNA sense strand
cgaguagauuucuuucaac

SEQ ID NO: 414767 - RNA, 19 nt, Homo sapiens
  misc_RNA (1)...(19): siRNA sense strand
cagauggaguaccuugaca

SEQ ID NO: 414768 - RNA, 19 nt, Homo sapiens
  misc_RNA (1)...(19): siRNA sense strand
auaaggcaccugucaccua

SEQ ID NO: 414769 - RNA, 19 nt, Homo sapiens
  misc_RNA (1)...(19): siRNA sense strand
ggaagaagcuuaugaauug

SEQ ID NO: 414770 - RNA, 19 nt, Homo sapiens
  misc_RNA (1)...(19): siRNA sense strand
gaaaugugcucaaaguuua

SEQ ID NO: 414771 - RNA, 19 nt, Homo sapiens
  misc_RNA (1)...(19): siRNA sense strand
uaaagaagcugaagaaaug

SEQ ID NO: 414772 - RNA, 19 nt, Homo sapiens
  misc_RNA (1)...(19): siRNA sense strand
gaacuacucuuauaucaga

SEQ ID NO: 414773 - RNA, 19 nt, Homo sapiens
  misc_RNA (1)...(19): siRNA sense strand
ggagaaaccuuggcuauga

SEQ ID NO: 414774 - RNA, 19 nt, Homo sapiens
  misc_RNA (1)...(19): siRNA sense strand
gaaaguacaccuacauuaa

SEQ ID NO: 414775 - RNA, 19 nt, Homo sapiens
  misc_RNA (1)...(19): siRNA sense strand
gaagaaaugugcucaaagu

SEQ ID NO: 414776 - RNA, 19 nt, Homo sapiens
  misc_RNA (1)...(19): siRNA sense strand
caagaaggcugccguuaaa

SEQ ID NO: 414777 - RNA, 19 nt, Homo sapiens
  misc_RNA (1)...(19): siRNA sense strand
gaacuucuguugcaacuau

SEQ ID NO: 414778 - RNA, 19 nt, Homo sapiens
  misc_RNA (1)...(19): siRNA sense strand
caagccagcuaauauguua

SEQ ID NO: 414779 - RNA, 19 nt, Homo sapiens
  misc_RNA (1)...(19): siRNA sense strand
ggacacagcagacagauuu

SEQ ID NO: 414780 - RNA, 19 nt, Homo sapiens
  misc_RNA (1)...(19): siRNA sense strand
caagguggauuaugaauau

SEQ ID NO: 414781 - RNA, 19 nt, Homo sapiens
  misc_RNA (1)...(19): siRNA sense strand
ggaagcaggucucuauaga

SEQ ID NO: 414782 - RNA, 19 nt, Homo sapiens
  misc_RNA (1)...(19): siRNA sense strand
ggaagaugcugcagauguu

SEQ ID NO: 414783 - RNA, 19 nt, Homo sapiens
  misc_RNA (1)...(19): siRNA sense strand
gaacaucuuuguaccuaug

SEQ ID NO: 414784 - RNA, 19 nt, Homo sapiens
  misc_RNA (1)...(19): siRNA sense strand
gcaacuaugucguuuggaa

SEQ ID NO: 414785 - RNA, 19 nt, Homo sapiens
  misc_RNA (1)...(19): siRNA sense strand
caucagcgguagagaauuu

SEQ ID NO: 414786 - RNA, 19 nt, Homo sapiens
  misc_RNA (1)...(19): siRNA sense strand
gaaguaugaugaagccauu

SEQ ID NO: 414787 - RNA, 19 nt, Homo sapiens
  misc_RNA (1)...(19): siRNA sense strand
gaggaagccuggacuaaau

SEQ ID NO: 414788 - RNA, 19 nt, Homo sapiens
  misc_RNA (1)...(19): siRNA sense strand
gcagagagcaucauggauu

SEQ ID NO: 414789 - RNA, 19 nt, Homo sapiens
  misc_RNA (1)...(19): siRNA sense strand
gugaagcacuuaagaaaug

SEQ ID NO: 414790 - RNA, 19 nt, Homo sapiens
  misc_RNA (1)...(19): siRNA sense strand
uaaacuugcuguagaagaa

SEQ ID NO: 414791 - RNA, 19 nt, Homo sapiens
  misc_RNA (1)...(19): siRNA sense strand
gaauaaauuuggugaagca

SEQ ID NO: 414792 - RNA, 19 nt, Homo sapiens
  misc_RNA (1)...(19): siRNA sense strand
ggaaacgagguaucaguua

SEQ ID NO: 414793 - RNA, 19 nt, Homo sapiens
  misc_RNA (1)...(19): siRNA sense strand
gaacaucagcgguagagaa

SEQ ID NO: 414794 - RNA, 19 nt, Homo sapiens
  misc_RNA (1)...(19): siRNA sense strand
ggugagaaguuuaaagaau

SEQ ID NO: 414795 - RNA, 19 nt, Homo sapiens
  misc_RNA (1)...(19): siRNA sense strand
gcagauuugugauaaacuu

SEQ ID NO: 414796 - RNA, 19 nt, Homo sapiens
  misc_RNA (1)...(19): siRNA sense strand
gcagacagauuuaucaacu

SEQ ID NO: 414797 - RNA, 19 nt, Homo sapiens
  misc_RNA (1)...(19): siRNA sense strand
gaaauggauugaaauucug

SEQ ID NO: 414798 - RNA, 19 nt, Homo sapiens
  misc_RNA (1)...(19): siRNA sense strand
aaacugggccuauuacaaa

SEQ ID NO: 414799 - RNA, 19 nt, Homo sapiens
  misc_RNA (1)...(19): siRNA sense strand
gaaacgagguaucaguuac

SEQ ID NO: 414800 - RNA, 19 nt, Homo sapiens
  misc_RNA (1)...(19): siRNA sense strand
cauagaagaguuaguagua

SEQ ID NO: 414801 - RNA, 19 nt, Homo sapiens
  misc_RNA (1)...(19): siRNA sense strand
gugauaaacuugcuguaga

SEQ ID NO: 414802 - RNA, 19 nt, Homo sapiens
  misc_RNA (1)...(19): siRNA sense strand
gagaaaccuuggcuaugaa

SEQ ID NO: 414803 - RNA, 19 nt, Homo sapiens
  misc_RNA (1)...(19): siRNA sense strand
ugaaauggcagcaaagauu

SEQ ID NO: 414804 - RNA, 19 nt, Homo sapiens
  misc_RNA (1)...(19): siRNA sense strand
ggauugaaauucuguaaac

SEQ ID NO: 414805 - RNA, 19 nt, Homo sapiens
  misc_RNA (1)...(19): siRNA sense strand
uaagcaugcuggaaauauu

SEQ ID NO: 414806 - RNA, 19 nt, Homo sapiens
  misc_RNA (1)...(19): siRNA sense strand
ugaaaguacaccuacauua

SEQ ID NO: 414807 - RNA, 19 nt, Homo sapiens
  misc_RNA (1)...(19): siRNA sense strand
gugagaaguuuaaagaaug

SEQ ID NO: 414808 - RNA, 19 nt, Homo sapiens
  misc_RNA (1)...(19): siRNA sense strand
gcacucaagccagcuaaua

SEQ ID NO: 414809 - RNA, 19 nt, Homo sapiens
  misc_RNA (1)...(19): siRNA sense strand
ggucagacaagaaguauga

SEQ ID NO: 414810 - RNA, 19 nt, Homo sapiens
  misc_RNA (1)...(19): siRNA sense strand
ccaagaaggcugccguuaa

SEQ ID NO: 414811 - RNA, 19 nt, Homo sapiens
  misc_RNA (1)...(19): siRNA sense strand
ugcgagaucuugaggguua

SEQ ID NO: 414812 - RNA, 19 nt, Homo sapiens
  misc_RNA (1)...(19): siRNA sense strand
gccauuaaguguuacagaa

SEQ ID NO: 414813 - RNA, 19 nt, Homo sapiens
  misc_RNA (1)...(19): siRNA sense strand
ccaccagucuucaauacuu

SEQ ID NO: 414814 - RNA, 19 nt, Homo sapiens
  misc_RNA (1)...(19): siRNA sense strand
caagagagaaauccugaaa

SEQ ID NO: 414815 - RNA, 19 nt, Homo sapiens
  misc_RNA (1)...(19): siRNA sense strand
gauuaaagaagcugaagaa

SEQ ID NO: 414816 - RNA, 19 nt, Homo sapiens
  misc_RNA (1)...(19): siRNA sense strand
ggaaccaccaaccacauua

SEQ ID NO: 414817 - RNA, 19 nt, Homo sapiens
  misc_RNA (1)...(19): siRNA sense strand
guagagguuugagaaauga

SEQ ID NO: 414818 - RNA, 19 nt, Homo sapiens
  misc_RNA (1)...(19): siRNA sense strand
aagccaaccugauuaaaga

SEQ ID NO: 414819 - RNA, 19 nt, Homo sapiens
  misc_RNA (1)...(19): siRNA sense strand
gcuuuggaguacauaaaua

SEQ ID NO: 414820 - RNA, 19 nt, Homo sapiens
  misc_RNA (1)...(19): siRNA sense strand
ugauaaacuugcuguagaa

SEQ ID NO: 414821 - RNA, 19 nt, Homo sapiens
  misc_RNA (1)...(19): siRNA sense strand
uaaauuuggugaagcacuu

SEQ ID NO: 414822 - RNA, 19 nt, Homo sapiens
  misc_RNA (1)...(19): siRNA sense strand
ggcacaacauuaugacaaa

SEQ ID NO: 414823 - RNA, 19 nt, Homo sapiens
  misc_RNA (1)...(19): siRNA sense strand
augaagccauuaaguguua

SEQ ID NO: 414824 - RNA, 19 nt, Homo sapiens
  misc_RNA (1)...(19): siRNA sense strand
cuuaagaaaugucaugaga

SEQ ID NO: 414825 - RNA, 19 nt, Homo sapiens
  misc_RNA (1)...(19): siRNA sense strand
ccaccaaccacauuacuuu

SEQ ID NO: 414826 - RNA, 19 nt, Homo sapiens
  misc_RNA (1)...(19): siRNA sense strand
uauagaggauugcaagaga

SEQ ID NO: 414827 - RNA, 19 nt, Homo sapiens
  misc_RNA (1)...(19): siRNA sense strand
gaaaagcagauuugugaua

SEQ ID NO: 414828 - RNA, 19 nt, Homo sapiens
  misc_RNA (1)...(19): siRNA sense strand
gaccuuuccuuacuacaga

SEQ ID NO: 414829 - RNA, 19 nt, Homo sapiens
  misc_RNA (1)...(19): siRNA sense strand
gcaugugguuccaaacaga

SEQ ID NO: 414830 - RNA, 19 nt, Homo sapiens
  misc_RNA (1)...(19): siRNA sense strand
agaaaugugcucaaaguuu

SEQ ID NO: 414831 - RNA, 19 nt, Homo sapiens
  misc_RNA (1)...(19): siRNA sense strand
ggucagccaucuauugcuu

SEQ ID NO: 414832 - RNA, 19 nt, Homo sapiens
  misc_RNA (1)...(19): siRNA sense strand
gagcaucauggauugguua

SEQ ID NO: 414833 - RNA, 19 nt, Homo sapiens
  misc_RNA (1)...(19): siRNA sense strand
cagagagcaucauggauug

SEQ ID NO: 414834 - RNA, 19 nt, Homo sapiens
  misc_RNA (1)...(19): siRNA sense strand
gugaacuacucuuauauca

SEQ ID NO: 414835 - RNA, 19 nt, Homo sapiens
  misc_RNA (1)...(19): siRNA sense strand
cugacaagguggauuauga

SEQ ID NO: 414836 - RNA, 19 nt, Homo sapiens
  misc_RNA (1)...(19): siRNA sense strand
cagcaaagauuuuagaaga

SEQ ID NO: 414837 - RNA, 19 nt, Homo sapiens
  misc_RNA (1)...(19): siRNA sense strand
gcacguuuauggccuucuu

SEQ ID NO: 414838 - RNA, 19 nt, Homo sapiens
  misc_RNA (1)...(19): siRNA sense strand
gagaagcuuuggaacaucu

SEQ ID NO: 414839 - RNA, 19 nt, Homo sapiens
  misc_RNA (1)...(19): siRNA sense strand
ugcuauugcuuaccauuua

SEQ ID NO: 414840 - RNA, 19 nt, Homo sapiens
  misc_RNA (1)...(19): siRNA sense strand
uagagaagcuuuggaacau

SEQ ID NO: 414841 - RNA, 19 nt, Homo sapiens
  misc_RNA (1)...(19): siRNA sense strand
agaaaugucaugagauuga

SEQ ID NO: 414842 - RNA, 19 nt, Homo sapiens
  misc_RNA (1)...(19): siRNA sense strand
cagaaugugcccaggcuua

SEQ ID NO: 414843 - RNA, 19 nt, Homo sapiens
  misc_RNA (1)...(19): siRNA sense strand
gaaggcugccguuaaacuu

SEQ ID NO: 414844 - RNA, 19 nt, Homo sapiens
  misc_RNA (1)...(19): siRNA sense strand
gcacuuaagaaaugucaug

SEQ ID NO: 414845 - RNA, 19 nt, Homo sapiens
  misc_RNA (1)...(19): siRNA sense strand
gcagauguuuauagaggau

SEQ ID NO: 414846 - RNA, 19 nt, Homo sapiens
  misc_RNA (1)...(19): siRNA sense strand
gguagagaauuugaaugaa

SEQ ID NO: 414847 - RNA, 19 nt, Homo sapiens
  misc_RNA (1)...(19): siRNA sense strand
cguagagguuugagaaaug

SEQ ID NO: 414848 - RNA, 19 nt, Homo sapiens
  misc_RNA (1)...(19): siRNA sense strand
aagcggaucuugagguguu

SEQ ID NO: 414849 - RNA, 19 nt, Homo sapiens
  misc_RNA (1)...(19): siRNA sense strand
uggaacaucuuuguaccua

SEQ ID NO: 414850 - RNA, 19 nt, Homo sapiens
  misc_RNA (1)...(19): siRNA sense strand
gcuuaugaauugguucgua

SEQ ID NO: 414851 - RNA, 19 nt, Homo sapiens
  misc_RNA (1)...(19): siRNA sense strand
gcuauugcuuaccauuuau

SEQ ID NO: 414852 - RNA, 19 nt, Homo sapiens
  misc_RNA (1)...(19): siRNA sense strand
gaaugugcccaggcuuaua

SEQ ID NO: 414853 - RNA, 19 nt, Homo sapiens
  misc_RNA (1)...(19): siRNA sense strand
cuacuuggcacaacauuau

SEQ ID NO: 414854 - RNA, 19 nt, Homo sapiens
  misc_RNA (1)...(19): siRNA sense strand
gaagaugcugcagauguuu

SEQ ID NO: 414855 - RNA, 19 nt, Homo sapiens
  misc_RNA (1)...(19): siRNA sense strand
ggcaaucauagaagaguua

SEQ ID NO: 414856 - RNA, 19 nt, Homo sapiens
  misc_RNA (1)...(19): siRNA sense strand
cugaagaaaugugcucaaa

SEQ ID NO: 414857 - RNA, 19 nt, Homo sapiens
  misc_RNA (1)...(19): siRNA sense strand
caaaauacaugcuaaaagc

SEQ ID NO: 414858 - RNA, 19 nt, Homo sapiens
  misc_RNA (1)...(19): siRNA sense strand
aagcaugcuggaaauauua

SEQ ID NO: 414859 - RNA, 19 nt, Homo sapiens
  misc_RNA (1)...(19): siRNA sense strand
gaugaagccauuaaguguu

SEQ ID NO: 414860 - RNA, 19 nt, Homo sapiens
  misc_RNA (1)...(19): siRNA sense strand
aaaggaagaagcuuaugaa

SEQ ID NO: 414861 - RNA, 19 nt, Homo sapiens
  misc_RNA (1)...(19): siRNA sense strand
ggaacaucuuuguaccuau

SEQ ID NO: 414862 - RNA, 19 nt, Homo sapiens
  misc_RNA (1)...(19): siRNA sense strand
gggaaacgagguaucaguu

SEQ ID NO: 414863 - RNA, 19 nt, Homo sapiens
  misc_RNA (1)...(19): siRNA sense strand
caucauggauugguuaugc

SEQ ID NO: 414864 - RNA, 19 nt, Homo sapiens
  misc_RNA (1)...(19): siRNA sense strand
gaaaugucaugagauugag

SEQ ID NO: 414865 - RNA, 19 nt, Homo sapiens
  misc_RNA (1)...(19): siRNA sense strand
gaagaagcuuaugaauugg

SEQ ID NO: 414866 - RNA, 19 nt, Homo sapiens
  misc_RNA (1)...(19): siRNA sense strand
guuaugaaaccucucuaaa

SEQ ID NO: 414867 - RNA, 19 nt, Homo sapiens
  misc_RNA (1)...(19): siRNA sense strand
caccagucuucaauacuuu

SEQ ID NO: 414868 - RNA, 19 nt, Homo sapiens
  misc_RNA (1)...(19): siRNA sense strand
ugaagagucauguguguug

SEQ ID NO: 414869 - RNA, 19 nt, Homo sapiens
  misc_RNA (1)...(19): siRNA sense strand
ggaagaagcuuaugaauug

SEQ ID NO: 414870 - RNA, 19 nt, Homo sapiens
  misc_RNA (1)...(19): siRNA sense strand
gaaaugugcucaaaguuua

SEQ ID NO: 414871 - RNA, 19 nt, Homo sapiens
  misc_RNA (1)...(19): siRNA sense strand
uaaagaagcugcugaaauu

SEQ ID NO: 414872 - RNA, 19 nt, Homo sapiens
  misc_RNA (1)...(19): siRNA sense strand
uaaagaagcugaagaaaug

SEQ ID NO: 414873 - RNA, 19 nt, Homo sapiens
  misc_RNA (1)...(19): siRNA sense strand
gaacuacucuuauaucaga

SEQ ID NO: 414874 - RNA, 19 nt, Homo sapiens
  misc_RNA (1)...(19): siRNA sense strand
gaucauauguggacuuauu

SEQ ID NO: 414875 - RNA, 19 nt, Homo sapiens
  misc_RNA (1)...(19): siRNA sense strand
ggagaaaccuuggcuauga

SEQ ID NO: 414876 - RNA, 19 nt, Homo sapiens
  misc_RNA (1)...(19): siRNA sense strand
gaaaguacaccuacauuaa

SEQ ID NO: 414877 - RNA, 19 nt, Homo sapiens
  misc_RNA (1)...(19): siRNA sense strand
gaagaaaugugcucaaagu

SEQ ID NO: 414878 - RNA, 19 nt, Homo sapiens
  misc_RNA (1)...(19): siRNA sense strand
caagaaggcugccguuaaa

SEQ ID NO: 414879 - RNA, 19 nt, Homo sapiens
  misc_RNA (1)...(19): siRNA sense strand
gaacuucuguugcaacuau

SEQ ID NO: 414880 - RNA, 19 nt, Homo sapiens
  misc_RNA (1)...(19): siRNA sense strand
gaagcgagcuauagaguug

SEQ ID NO: 414881 - RNA, 19 nt, Homo sapiens
  misc_RNA (1)...(19): siRNA sense strand
caagccagcuaauauguua

SEQ ID NO: 414882 - RNA, 19 nt, Homo sapiens
  misc_RNA (1)...(19): siRNA sense strand
ggacacagcagacagauuu

SEQ ID NO: 414883 - RNA, 19 nt, Homo sapiens
  misc_RNA (1)...(19): siRNA sense strand
caacgaauccaaagaauuu

SEQ ID NO: 414884 - RNA, 19 nt, Homo sapiens
  misc_RNA (1)...(19): siRNA sense strand
caagguggauuaugaauau

SEQ ID NO: 414885 - RNA, 19 nt, Homo sapiens
  misc_RNA (1)...(19): siRNA sense strand
gaagaaggaugaugaugau

SEQ ID NO: 414886 - RNA, 19 nt, Homo sapiens
  misc_RNA (1)...(19): siRNA sense strand
caacaacacuugaugaauc

SEQ ID NO: 414887 - RNA, 19 nt, Homo sapiens
  misc_RNA (1)...(19): siRNA sense strand
ggaagcaggucucuauaga

SEQ ID NO: 414888 - RNA, 19 nt, Homo sapiens
  misc_RNA (1)...(19): siRNA sense strand
ggaagaugcugcagauguu

SEQ ID NO: 414889 - RNA, 19 nt, Homo sapiens
  misc_RNA (1)...(19): siRNA sense strand
gaacaucuuuguaccuaug

SEQ ID NO: 414890 - RNA, 19 nt, Homo sapiens
  misc_RNA (1)...(19): siRNA sense strand
cuaaagaagcuacguaaua

SEQ ID NO: 414891 - RNA, 19 nt, Homo sapiens
  misc_RNA (1)...(19): siRNA sense strand
gauaugaagaucacaguua

SEQ ID NO: 414892 - RNA, 19 nt, Homo sapiens
  misc_RNA (1)...(19): siRNA sense strand
gcaacuaugucguuuggaa

SEQ ID NO: 414893 - RNA, 19 nt, Homo sapiens
  misc_RNA (1)...(19): siRNA sense strand
caucagcgguagagaauuu

SEQ ID NO: 414894 - RNA, 19 nt, Homo sapiens
  misc_RNA (1)...(19): siRNA sense strand
gaaguaugaugaagccauu

SEQ ID NO: 414895 - RNA, 19 nt, Homo sapiens
  misc_RNA (1)...(19): siRNA sense strand
gaggaagccuggacuaaau

SEQ ID NO: 414896 - RNA, 19 nt, Homo sapiens
  misc_RNA (1)...(19): siRNA sense strand
gcagagagcaucauggauu

SEQ ID NO: 414897 - RNA, 19 nt, Homo sapiens
  misc_RNA (1)...(19): siRNA sense strand
gugaagcacuuaagaaaug

SEQ ID NO: 414898 - RNA, 19 nt, Homo sapiens
  misc_RNA (1)...(19): siRNA sense strand
uaaacuugcuguagaagaa

SEQ ID NO: 414899 - RNA, 19 nt, Homo sapiens
  misc_RNA (1)...(19): siRNA sense strand
gaauaaauuuggugaagca

SEQ ID NO: 414900 - RNA, 19 nt, Homo sapiens
  misc_RNA (1)...(19): siRNA sense strand
gaagcuacguaauaaacaa

SEQ ID NO: 414901 - RNA, 19 nt, Homo sapiens
  misc_RNA (1)...(19): siRNA sense strand
cugaagaacuggccaauga

SEQ ID NO: 414902 - RNA, 19 nt, Homo sapiens
  misc_RNA (1)...(19): siRNA sense strand
ggaaacgagguaucaguua

SEQ ID NO: 414903 - RNA, 19 nt, Homo sapiens
  misc_RNA (1)...(19): siRNA sense strand
gaacaucagcgguagagaa

SEQ ID NO: 414904 - RNA, 19 nt, Homo sapiens
  misc_RNA (1)...(19): siRNA sense strand
ggugagaaguuuaaagaau

SEQ ID NO: 414905 - RNA, 19 nt, Homo sapiens
  misc_RNA (1)...(19): siRNA sense strand
gcagauuugugauaaacuu

SEQ ID NO: 414906 - RNA, 19 nt, Homo sapiens
  misc_RNA (1)...(19): siRNA sense strand
guaaagagggcauuugcua

SEQ ID NO: 414907 - RNA, 19 nt, Homo sapiens
  misc_RNA (1)...(19): siRNA sense strand
gcagacagauuuaucaacu

SEQ ID NO: 414908 - RNA, 19 nt, Homo sapiens
  misc_RNA (1)...(19): siRNA sense strand
aaacugggccuauuacaaa

SEQ ID NO: 414909 - RNA, 19 nt, Homo sapiens
  misc_RNA (1)...(19): siRNA sense strand
gaaauggauugaaauucug

SEQ ID NO: 414910 - RNA, 19 nt, Homo sapiens
  misc_RNA (1)...(19): siRNA sense strand
gaaacgagguaucaguuac

SEQ ID NO: 414911 - RNA, 19 nt, Homo sapiens
  misc_RNA (1)...(19): siRNA sense strand
acagaaaccuccagacaug

SEQ ID NO: 414912 - RNA, 19 nt, Homo sapiens
  misc_RNA (1)...(19): siRNA sense strand
gaagauuacccuuagauca

SEQ ID NO: 414913 - RNA, 19 nt, Homo sapiens
  misc_RNA (1)...(19): siRNA sense strand
cauagaagaguuaguagua

SEQ ID NO: 414914 - RNA, 19 nt, Homo sapiens
  misc_RNA (1)...(19): siRNA sense strand
gugauaaacuugcuguaga

SEQ ID NO: 414915 - RNA, 19 nt, Homo sapiens
  misc_RNA (1)...(19): siRNA sense strand
gaacuggccaaugaaauuu

SEQ ID NO: 414916 - RNA, 19 nt, Homo sapiens
  misc_RNA (1)...(19): siRNA sense strand
ugaagaacuuggugaagaa

SEQ ID NO: 414917 - RNA, 19 nt, Homo sapiens
  misc_RNA (1)...(19): siRNA sense strand
gagaaaccuuggcuaugaa

SEQ ID NO: 414918 - RNA, 19 nt, Homo sapiens
  misc_RNA (1)...(19): siRNA sense strand
gaagaucacaguuaaugga

SEQ ID NO: 414919 - RNA, 19 nt, Homo sapiens
  misc_RNA (1)...(19): siRNA sense strand
gaagaacuggccaaugaaa

SEQ ID NO: 414920 - RNA, 19 nt, Homo sapiens
  misc_RNA (1)...(19): siRNA sense strand
ugaaauggcagcaaagauu

SEQ ID NO: 414921 - RNA, 19 nt, Homo sapiens
  misc_RNA (1)...(19): siRNA sense strand
guaaagaagcugcugaaau

SEQ ID NO: 414922 - RNA, 19 nt, Homo sapiens
  misc_RNA (1)...(19): siRNA sense strand
ggauugaaauucuguaaac

SEQ ID NO: 414923 - RNA, 19 nt, Homo sapiens
  misc_RNA (1)...(19): siRNA sense strand
aaagaaagcccagauagaa

SEQ ID NO: 414924 - RNA, 19 nt, Homo sapiens
  misc_RNA (1)...(19): siRNA sense strand
uaagcaugcuggaaauauu

SEQ ID NO: 414925 - RNA, 19 nt, Homo sapiens
  misc_RNA (1)...(19): siRNA sense strand
ugaaaguacaccuacauua

SEQ ID NO: 414926 - RNA, 19 nt, Homo sapiens
  misc_RNA (1)...(19): siRNA sense strand
gugagaaguuuaaagaaug

SEQ ID NO: 414927 - RNA, 19 nt, Homo sapiens
  misc_RNA (1)...(19): siRNA sense strand
gcacucaagccagcuaaua

SEQ ID NO: 414928 - RNA, 19 nt, Homo sapiens
  misc_RNA (1)...(19): siRNA sense strand
ggucagacaagaaguauga

SEQ ID NO: 414929 - RNA, 19 nt, Homo sapiens
  misc_RNA (1)...(19): siRNA sense strand
gagcaacgaauccaaagaa

SEQ ID NO: 414930 - RNA, 19 nt, Homo sapiens
  misc_RNA (1)...(19): siRNA sense strand
uaacaccguugaagaacuu

SEQ ID NO: 414931 - RNA, 19 nt, Homo sapiens
  misc_RNA (1)...(19): siRNA sense strand
gauaggagguccaaaagaa

SEQ ID NO: 414932 - RNA, 19 nt, Homo sapiens
  misc_RNA (1)...(19): siRNA sense strand
ccagauagaagaagagaaa

SEQ ID NO: 414933 - RNA, 19 nt, Homo sapiens
  misc_RNA (1)...(19): siRNA sense strand
ccaagaaggcugccguuaa

SEQ ID NO: 414934 - RNA, 19 nt, Homo sapiens
  misc_RNA (1)...(19): siRNA sense strand
ugcgagaucuugaggguua

SEQ ID NO: 414935 - RNA, 19 nt, Homo sapiens
  misc_RNA (1)...(19): siRNA sense strand
gccauuaaguguuacagaa

SEQ ID NO: 414936 - RNA, 19 nt, Homo sapiens
  misc_RNA (1)...(19): siRNA sense strand
ccaccagucuucaauacuu

SEQ ID NO: 414937 - RNA, 19 nt, Homo sapiens
  misc_RNA (1)...(19): siRNA sense strand
caagagagaaauccugaaa

SEQ ID NO: 414938 - RNA, 19 nt, Homo sapiens
  misc_RNA (1)...(19): siRNA sense strand
uagaucauauguggacuua

SEQ ID NO: 414939 - RNA, 19 nt, Homo sapiens
  misc_RNA (1)...(19): siRNA sense strand
gauuaaagaagcugaagaa

SEQ ID NO: 414940 - RNA, 19 nt, Homo sapiens
  misc_RNA (1)...(19): siRNA sense strand
ggaaccaccaaccacauua

SEQ ID NO: 414941 - RNA, 19 nt, Homo sapiens
  misc_RNA (1)...(19): siRNA sense strand
guagagguuugagaaauga

SEQ ID NO: 414942 - RNA, 19 nt, Homo sapiens
  misc_RNA (1)...(19): siRNA sense strand
aagaagagcucaaaagaaa

SEQ ID NO: 414943 - RNA, 19 nt, Homo sapiens
  misc_RNA (1)...(19): siRNA sense strand
aagccaaccugauuaaaga

SEQ ID NO: 414944 - RNA, 19 nt, Homo sapiens
  misc_RNA (1)...(19): siRNA sense strand
gcuuuggaguacauaaaua

SEQ ID NO: 414945 - RNA, 19 nt, Homo sapiens
  misc_RNA (1)...(19): siRNA sense strand
ugauaaacuugcuguagaa

SEQ ID NO: 414946 - RNA, 19 nt, Homo sapiens
  misc_RNA (1)...(19): siRNA sense strand
agacauguauggagguauu

SEQ ID NO: 414947 - RNA, 19 nt, Homo sapiens
  misc_RNA (1)...(19): siRNA sense strand
uaaauuuggugaagcacuu

SEQ ID NO: 414948 - RNA, 19 nt, Homo sapiens
  misc_RNA (1)...(19): siRNA sense strand
ggcacaacauuaugacaaa

SEQ ID NO: 414949 - RNA, 19 nt, Homo sapiens
  misc_RNA (1)...(19): siRNA sense strand
augaagccauuaaguguua

SEQ ID NO: 414950 - RNA, 19 nt, Homo sapiens
  misc_RNA (1)...(19): siRNA sense strand
gaucacaguuaauggagau

SEQ ID NO: 414951 - RNA, 19 nt, Homo sapiens
  misc_RNA (1)...(19): siRNA sense strand
gcaacgaauccaaagaauu

SEQ ID NO: 414952 - RNA, 19 nt, Homo sapiens
  misc_RNA (1)...(19): siRNA sense strand
cuuaagaaaugucaugaga

SEQ ID NO: 414953 - RNA, 19 nt, Homo sapiens
  misc_RNA (1)...(19): siRNA sense strand
ccaccaaccacauuacuuu

SEQ ID NO: 414954 - RNA, 19 nt, Homo sapiens
  misc_RNA (1)...(19): siRNA sense strand
uauagaggauugcaagaga

SEQ ID NO: 414955 - RNA, 19 nt, Homo sapiens
  misc_RNA (1)...(19): siRNA sense strand
gaaaagcagauuugugaua

SEQ ID NO: 414956 - RNA, 19 nt, Homo sapiens
  misc_RNA (1)...(19): siRNA sense strand
gaccuuuccuuacuacaga

SEQ ID NO: 414957 - RNA, 19 nt, Homo sapiens
  misc_RNA (1)...(19): siRNA sense strand
gcaaauugucauaagcuuu

SEQ ID NO: 414958 - RNA, 19 nt, Homo sapiens
  misc_RNA (1)...(19): siRNA sense strand
aagaagcugcugaaauuua

SEQ ID NO: 414959 - RNA, 19 nt, Homo sapiens
  misc_RNA (1)...(19): siRNA sense strand
cagagaaacuggccaaggu

SEQ ID NO: 414960 - RNA, 19 nt, Homo sapiens
  misc_RNA (1)...(19): siRNA sense strand
gaaggaugaugaugaugag

SEQ ID NO: 414961 - RNA, 19 nt, Homo sapiens
  misc_RNA (1)...(19): siRNA sense strand
gcaugugguuccaaacaga

SEQ ID NO: 414962 - RNA, 19 nt, Homo sapiens
  misc_RNA (1)...(19): siRNA sense strand
agaaaugugcucaaaguuu

SEQ ID NO: 414963 - RNA, 19 nt, Homo sapiens
  misc_RNA (1)...(19): siRNA sense strand
ggucagccaucuauugcuu

SEQ ID NO: 414964 - RNA, 19 nt, Homo sapiens
  misc_RNA (1)...(19): siRNA sense strand
gagcaucauggauugguua

SEQ ID NO: 414965 - RNA, 19 nt, Homo sapiens
  misc_RNA (1)...(19): siRNA sense strand
cagcaaagauuuuagaaga

SEQ ID NO: 414966 - RNA, 19 nt, Homo sapiens
  misc_RNA (1)...(19): siRNA sense strand
ugaggaagauuacccuuag

SEQ ID NO: 414967 - RNA, 19 nt, Homo sapiens
  misc_RNA (1)...(19): siRNA sense strand
gugaacuacucuuauauca

SEQ ID NO: 414968 - RNA, 19 nt, Homo sapiens
  misc_RNA (1)...(19): siRNA sense strand
cugacaagguggauuauga

SEQ ID NO: 414969 - RNA, 19 nt, Homo sapiens
  misc_RNA (1)...(19): siRNA sense strand
ggacaaagguggaggagaa

SEQ ID NO: 414970 - RNA, 19 nt, Homo sapiens
  misc_RNA (1)...(19): siRNA sense strand
gaaagacgccuaacucaga

SEQ ID NO: 414971 - RNA, 19 nt, Homo sapiens
  misc_RNA (1)...(19): siRNA sense strand
ggaggaaccugagaaggaa

SEQ ID NO: 414972 - RNA, 19 nt, Homo sapiens
  misc_RNA (1)...(19): siRNA sense strand
gaaauagcccugcccaaca

SEQ ID NO: 414973 - RNA, 19 nt, Homo sapiens
  misc_RNA (1)...(19): siRNA sense strand
ccaagacuuugcccugauu

SEQ ID NO: 414974 - RNA, 19 nt, Homo sapiens
  misc_RNA (1)...(19): siRNA sense strand
aaauagcccugcccaacaa

SEQ ID NO: 414975 - RNA, 19 nt, Homo sapiens
  misc_RNA (1)...(19): siRNA sense strand
aggaagaccuguacuaugg

SEQ ID NO: 414976 - RNA, 19 nt, Homo sapiens
  misc_RNA (1)...(19): siRNA sense strand
gggaggaaccugagaagga

SEQ ID NO: 414977 - RNA, 19 nt, Homo sapiens
  misc_RNA (1)...(19): siRNA sense strand
gggaggaagccgccuauga

SEQ ID NO: 414978 - RNA, 19 nt, Homo sapiens
  misc_RNA (1)...(19): siRNA sense strand
ggcaucaucuggagcaugu

SEQ ID NO: 414979 - RNA, 19 nt, Homo sapiens
  misc_RNA (1)...(19): siRNA sense strand
aagaugaccuggacaugga

SEQ ID NO: 414980 - RNA, 19 nt, Homo sapiens
  misc_RNA (1)...(19): siRNA sense strand
gaggaagaccuguacuaug

SEQ ID NO: 414981 - RNA, 19 nt, Homo sapiens
  misc_RNA (1)...(19): siRNA sense strand
gggcagcagugggaaauag

SEQ ID NO: 414982 - RNA, 19 nt, Homo sapiens
  misc_RNA (1)...(19): siRNA sense strand
ggaccgcuuccaagacuuu

SEQ ID NO: 414983 - RNA, 19 nt, Homo sapiens
  misc_RNA (1)...(19): siRNA sense strand
gaccagagccugccugacu

SEQ ID NO: 414984 - RNA, 19 nt, Homo sapiens
  misc_RNA (1)...(19): siRNA sense strand
ccaugggccugcuggagaa

SEQ ID NO: 414985 - RNA, 19 nt, Homo sapiens
  misc_RNA (1)...(19): siRNA sense strand
gggaaagacgccuaacuca

SEQ ID NO: 414986 - RNA, 19 nt, Homo sapiens
  misc_RNA (1)...(19): siRNA sense strand
ggaggaagccgccuaugac

SEQ ID NO: 414987 - RNA, 19 nt, Homo sapiens
  misc_RNA (1)...(19): siRNA sense strand
ggaagaggaagaccuguac

SEQ ID NO: 414988 - RNA, 19 nt, Homo sapiens
  misc_RNA (1)...(19): siRNA sense strand
ccaaugcaucuccacauga

SEQ ID NO: 414989 - RNA, 19 nt, Homo sapiens
  misc_RNA (1)...(19): siRNA sense strand
acaaggagcuggguuuuga

SEQ ID NO: 414990 - RNA, 19 nt, Homo sapiens
  misc_RNA (1)...(19): siRNA sense strand
ggacacagguggggaggaa

SEQ ID NO: 414991 - RNA, 19 nt, Homo sapiens
  misc_RNA (1)...(19): siRNA sense strand
ggucuacggcaccuucuau

SEQ ID NO: 414992 - RNA, 19 nt, Homo sapiens
  misc_RNA (1)...(19): siRNA sense strand
caaugcaucuccacaugac

SEQ ID NO: 414993 - RNA, 19 nt, Homo sapiens
  misc_RNA (1)...(19): siRNA sense strand
cccaaugcaucuccacaug

SEQ ID NO: 414994 - RNA, 19 nt, Homo sapiens
  misc_RNA (1)...(19): siRNA sense strand
caaagguggaggagaagga

SEQ ID NO: 414995 - RNA, 19 nt, Homo sapiens
  misc_RNA (1)...(19): siRNA sense strand
uggcuuccuuccaagauga

SEQ ID NO: 414996 - RNA, 19 nt, Homo sapiens
  misc_RNA (1)...(19): siRNA sense strand
uggcagcgguacccaagga

SEQ ID NO: 414997 - RNA, 19 nt, Homo sapiens
  misc_RNA (1)...(19): siRNA sense strand
aaccagugauggaggagaa

SEQ ID NO: 414998 - RNA, 19 nt, Homo sapiens
  misc_RNA (1)...(19): siRNA sense strand
aagaggaagaccuguacua

SEQ ID NO: 414999 - RNA, 19 nt, Homo sapiens
  misc_RNA (1)...(19): siRNA sense strand
agaggaagaccuguacuau

SEQ ID NO: 415000 - RNA, 19 nt, Homo sapiens
  misc_RNA (1)...(19): siRNA sense strand
gaaagucaugagcuacagu

SEQ ID NO: 415001 - RNA, 19 nt, Homo sapiens
  misc_RNA (1)...(19): siRNA sense strand
ugacagggaggaagcuugu

SEQ ID NO: 415002 - RNA, 19 nt, Homo sapiens
  misc_RNA (1)...(19): siRNA sense strand
gacuuugcccugauugaug

SEQ ID NO: 415003 - RNA, 19 nt, Homo sapiens
  misc_RNA (1)...(19): siRNA sense strand
cucgguacguuccucauga

SEQ ID NO: 415004 - RNA, 19 nt, Homo sapiens
  misc_RNA (1)...(19): siRNA sense strand
gaaggcagcagccccaaug

SEQ ID NO: 415005 - RNA, 19 nt, Homo sapiens
  misc_RNA (1)...(19): siRNA sense strand
caagggcucagacgagagu

SEQ ID NO: 415006 - RNA, 19 nt, Homo sapiens
  misc_RNA (1)...(19): siRNA sense strand
cuucgucccugcugacucu

SEQ ID NO: 415007 - RNA, 19 nt, Homo sapiens
  misc_RNA (1)...(19): siRNA sense strand
ggacaaggagcuggguuuu

SEQ ID NO: 415008 - RNA, 19 nt, Homo sapiens
  misc_RNA (1)...(19): siRNA sense strand
cggacaaggagcuggguuu

SEQ ID NO: 415009 - RNA, 19 nt, Homo sapiens
  misc_RNA (1)...(19): siRNA sense strand
gaaagugccuugacaauug

SEQ ID NO: 415010 - RNA, 19 nt, Homo sapiens
  misc_RNA (1)...(19): siRNA sense strand
ggaaagaauuggcaugaag

SEQ ID NO: 415011 - RNA, 19 nt, Homo sapiens
  misc_RNA (1)...(19): siRNA sense strand
caacaaaugagacaagaaa

SEQ ID NO: 415012 - RNA, 19 nt, Homo sapiens
  misc_RNA (1)...(19): siRNA sense strand
cgacugauuucuuggcuuu

SEQ ID NO: 415013 - RNA, 19 nt, Homo sapiens
  misc_RNA (1)...(19): siRNA sense strand
gaguaugucucucuucaug

SEQ ID NO: 415014 - RNA, 19 nt, Homo sapiens
  misc_RNA (1)...(19): siRNA sense strand
ggaaagugccuugacaauu

SEQ ID NO: 415015 - RNA, 19 nt, Homo sapiens
  misc_RNA (1)...(19): siRNA sense strand
ccaaguggauauuauggaa

SEQ ID NO: 415016 - RNA, 19 nt, Homo sapiens
  misc_RNA (1)...(19): siRNA sense strand
gaaauaauacagcauccuu

SEQ ID NO: 415017 - RNA, 19 nt, Homo sapiens
  misc_RNA (1)...(19): siRNA sense strand
ggaaggcgccagcgaagaa

SEQ ID NO: 415018 - RNA, 19 nt, Homo sapiens
  misc_RNA (1)...(19): siRNA sense strand
gaagcagauuggaguaugu

SEQ ID NO: 415019 - RNA, 19 nt, Homo sapiens
  misc_RNA (1)...(19): siRNA sense strand
gaaacacggguccgagaaa

SEQ ID NO: 415020 - RNA, 19 nt, Homo sapiens
  misc_RNA (1)...(19): siRNA sense strand
gaauuggcaugaagcagau

SEQ ID NO: 415021 - RNA, 19 nt, Homo sapiens
  misc_RNA (1)...(19): siRNA sense strand
gaauacaucggcagccaaa

SEQ ID NO: 415022 - RNA, 19 nt, Homo sapiens
  misc_RNA (1)...(19): siRNA sense strand
gauauuauggaacucgaua

SEQ ID NO: 415023 - RNA, 19 nt, Homo sapiens
  misc_RNA (1)...(19): siRNA sense strand
acaaacagcagcagaagaa

SEQ ID NO: 415024 - RNA, 19 nt, Homo sapiens
  misc_RNA (1)...(19): siRNA sense strand
gcaacaugcucagauuaca

SEQ ID NO: 415025 - RNA, 19 nt, Homo sapiens
  misc_RNA (1)...(19): siRNA sense strand
caaggaggcugugcaacau

SEQ ID NO: 415026 - RNA, 19 nt, Homo sapiens
  misc_RNA (1)...(19): siRNA sense strand
agcaauaccugacagcaaa

SEQ ID NO: 415027 - RNA, 19 nt, Homo sapiens
  misc_RNA (1)...(19): siRNA sense strand
aagaaugcauccuaacguu

SEQ ID NO: 415028 - RNA, 19 nt, Homo sapiens
  misc_RNA (1)...(19): siRNA sense strand
gaagccaacaaccauacua

SEQ ID NO: 415029 - RNA, 19 nt, Homo sapiens
  misc_RNA (1)...(19): siRNA sense strand
caaaugagacaagaaagug

SEQ ID NO: 415030 - RNA, 19 nt, Homo sapiens
  misc_RNA (1)...(19): siRNA sense strand
gaagaaugcauccuaacgu

SEQ ID NO: 415031 - RNA, 19 nt, Homo sapiens
  misc_RNA (1)...(19): siRNA sense strand
caauggauguuugucaugu

SEQ ID NO: 415032 - RNA, 19 nt, Homo sapiens
  misc_RNA (1)...(19): siRNA sense strand
gaaaguguacagugcaaag

SEQ ID NO: 415033 - RNA, 19 nt, Homo sapiens
  misc_RNA (1)...(19): siRNA sense strand
caaagaaaucccagagcaa

SEQ ID NO: 415034 - RNA, 19 nt, Homo sapiens
  misc_RNA (1)...(19): siRNA sense strand
gaaaguaaagaagcaauac

SEQ ID NO: 415035 - RNA, 19 nt, Homo sapiens
  misc_RNA (1)...(19): siRNA sense strand
gaagggagaggaaaagaaa

SEQ ID NO: 415036 - RNA, 19 nt, Homo sapiens
  misc_RNA (1)...(19): siRNA sense strand
guaugucucucuucauguc

SEQ ID NO: 415037 - RNA, 19 nt, Homo sapiens
  misc_RNA (1)...(19): siRNA sense strand
ccaaggaggcugugcaaca

SEQ ID NO: 415038 - RNA, 19 nt, Homo sapiens
  misc_RNA (1)...(19): siRNA sense strand
gugcaacaugcucagauua

SEQ ID NO: 415039 - RNA, 19 nt, Homo sapiens
  misc_RNA (1)...(19): siRNA sense strand
agucagcacuguacacuag

SEQ ID NO: 415040 - RNA, 19 nt, Homo sapiens
  misc_RNA (1)...(19): siRNA sense strand
ccuaauaaaggagaaagua

SEQ ID NO: 415041 - RNA, 19 nt, Homo sapiens
  misc_RNA (1)...(19): siRNA sense strand
cagcgaagaaugcauccua

SEQ ID NO: 415042 - RNA, 19 nt, Homo sapiens
  misc_RNA (1)...(19): siRNA sense strand
acacggguccgagaaauaa

SEQ ID NO: 415043 - RNA, 19 nt, Homo sapiens
  misc_RNA (1)...(19): siRNA sense strand
ugaagcagauuggaguaug

SEQ ID NO: 415044 - RNA, 19 nt, Homo sapiens
  misc_RNA (1)...(19): siRNA sense strand
aguccaagauaaacagaaa

SEQ ID NO: 415045 - RNA, 19 nt, Homo sapiens
  misc_RNA (1)...(19): siRNA sense strand
caaaggaagaagugucaga

SEQ ID NO: 415046 - RNA, 19 nt, Homo sapiens
  misc_RNA (1)...(19): siRNA sense strand
aaacacggguccgagaaau

SEQ ID NO: 415047 - RNA, 19 nt, Homo sapiens
  misc_RNA (1)...(19): siRNA sense strand
caacaugcucagauuacaa

SEQ ID NO: 415048 - RNA, 19 nt, Homo sapiens
  misc_RNA (1)...(19): siRNA sense strand
gaagggagaacgaggaaaa

SEQ ID NO: 415049 - RNA, 19 nt, Homo sapiens
  misc_RNA (1)...(19): siRNA sense strand
agaaugcauccuaacguua

SEQ ID NO: 415050 - RNA, 19 nt, Homo sapiens
  misc_RNA (1)...(19): siRNA sense strand
augcaaagcugacugugau

SEQ ID NO: 415051 - RNA, 19 nt, Homo sapiens
  misc_RNA (1)...(19): siRNA sense strand
cauguaagcccagacuauu

SEQ ID NO: 415052 - RNA, 19 nt, Homo sapiens
  misc_RNA (1)...(19): siRNA sense strand
aaacagaaaucgguaucag

SEQ ID NO: 415053 - RNA, 19 nt, Homo sapiens
  misc_RNA (1)...(19): siRNA sense strand
gauaaacagaaaucgguau

SEQ ID NO: 415054 - RNA, 19 nt, Homo sapiens
  misc_RNA (1)...(19): siRNA sense strand
cagauuacaauggauguuu

SEQ ID NO: 415055 - RNA, 19 nt, Homo sapiens
  misc_RNA (1)...(19): siRNA sense strand
uauggagugugucaguauu

SEQ ID NO: 415056 - RNA, 19 nt, Homo sapiens
  misc_RNA (1)...(19): siRNA sense strand
uggaguaugucucucuuca

SEQ ID NO: 415057 - RNA, 19 nt, Homo sapiens
  misc_RNA (1)...(19): siRNA sense strand
agauuacaauggauguuug

SEQ ID NO: 415058 - RNA, 19 nt, Homo sapiens
  misc_RNA (1)...(19): siRNA sense strand
gcgaaaaguccaagauaaa

SEQ ID NO: 415059 - RNA, 19 nt, Homo sapiens
  misc_RNA (1)...(19): siRNA sense strand
ggaauccagcaaagaaauc

SEQ ID NO: 415060 - RNA, 19 nt, Homo sapiens
  misc_RNA (1)...(19): siRNA sense strand
guacagugcaaaggaagaa

SEQ ID NO: 415061 - RNA, 19 nt, Homo sapiens
  misc_RNA (1)...(19): siRNA sense strand
ugaggucagugaauggaau

SEQ ID NO: 415062 - RNA, 19 nt, Homo sapiens
  misc_RNA (1)...(19): siRNA sense strand
gaacuuuauggaauacauc

SEQ ID NO: 415063 - RNA, 19 nt, Homo sapiens
  misc_RNA (1)...(19): siRNA sense strand
ugacugugauaccuguuuc

SEQ ID NO: 415064 - RNA, 19 nt, Homo sapiens
  misc_RNA (1)...(19): siRNA sense strand
ugugcaacaugcucagauu

SEQ ID NO: 415065 - RNA, 19 nt, Homo sapiens
  misc_RNA (1)...(19): siRNA sense strand
aauggauguuugucaugua

SEQ ID NO: 415066 - RNA, 19 nt, Homo sapiens
  misc_RNA (1)...(19): siRNA sense strand
uggaaagaauuggcaugaa

SEQ ID NO: 415067 - RNA, 19 nt, Homo sapiens
  misc_RNA (1)...(19): siRNA sense strand
aagaaaguguacagugcaa

SEQ ID NO: 415068 - RNA, 19 nt, Homo sapiens
  misc_RNA (1)...(19): siRNA sense strand
gagaaaguaaagaagcaau

SEQ ID NO: 415069 - RNA, 19 nt, Homo sapiens
  misc_RNA (1)...(19): siRNA sense strand
ggagaaaguaaagaagcaa

SEQ ID NO: 415070 - RNA, 19 nt, Homo sapiens
  misc_RNA (1)...(19): siRNA sense strand
ucauguaagcccagacuau

SEQ ID NO: 415071 - RNA, 19 nt, Homo sapiens
  misc_RNA (1)...(19): siRNA sense strand
auggauguuugucauguaa

SEQ ID NO: 415072 - RNA, 19 nt, Homo sapiens
  misc_RNA (1)...(19): siRNA sense strand
aaugagacaagaaagugua

SEQ ID NO: 415073 - RNA, 19 nt, Homo sapiens
  misc_RNA (1)...(19): siRNA sense strand
acaaaugagacaagaaagu

SEQ ID NO: 415074 - RNA, 19 nt, Homo sapiens
  misc_RNA (1)...(19): siRNA sense strand
ugaaacacggguccgagaa

SEQ ID NO: 415075 - RNA, 19 nt, Homo sapiens
  misc_RNA (1)...(19): siRNA sense strand
gucagugaauggaauccuu

SEQ ID NO: 415076 - RNA, 19 nt, Homo sapiens
  misc_RNA (1)...(19): siRNA sense strand
gcaaagcugacugugauac

SEQ ID NO: 415077 - RNA, 19 nt, Homo sapiens
  misc_RNA (1)...(19): siRNA sense strand
aaaggaagaagugucagaa

SEQ ID NO: 415078 - RNA, 19 nt, Homo sapiens
  misc_RNA (1)...(19): siRNA sense strand
ggauguuugucauguaagc

SEQ ID NO: 415079 - RNA, 19 nt, Homo sapiens
  misc_RNA (1)...(19): siRNA sense strand
agcgaagaaugcauccuaa

SEQ ID NO: 415080 - RNA, 19 nt, Homo sapiens
  misc_RNA (1)...(19): siRNA sense strand
cccaacaaaugagacaaga

SEQ ID NO: 415081 - RNA, 19 nt, Homo sapiens
  misc_RNA (1)...(19): siRNA sense strand
uuacuuacaccuuggaaag

SEQ ID NO: 415082 - RNA, 19 nt, Homo sapiens
  misc_RNA (1)...(19): siRNA sense strand
gaaaaguccaagauaaaca

SEQ ID NO: 415083 - RNA, 19 nt, Homo sapiens
  misc_RNA (1)...(19): siRNA sense strand
uacagcauccuucagcaaa

SEQ ID NO: 415084 - RNA, 19 nt, Homo sapiens
  misc_RNA (1)...(19): siRNA sense strand
aauaauacagcauccuuca

SEQ ID NO: 415085 - RNA, 19 nt, Homo sapiens
  misc_RNA (1)...(19): siRNA sense strand
caaaagagggacugaaaca

SEQ ID NO: 415086 - RNA, 19 nt, Homo sapiens
  misc_RNA (1)...(19): siRNA sense strand
acuauggagugugucagua

SEQ ID NO: 415087 - RNA, 19 nt, Homo sapiens
  misc_RNA (1)...(19): siRNA sense strand
cagaagggagaacgaggaa

SEQ ID NO: 415088 - RNA, 19 nt, Homo sapiens
  misc_RNA (1)...(19): siRNA sense strand
caugaagcagauuggagua

SEQ ID NO: 415089 - RNA, 19 nt, Homo sapiens
  misc_RNA (1)...(19): siRNA sense strand
aggagaaaguaaagaagca

SEQ ID NO: 415090 - RNA, 19 nt, Homo sapiens
  misc_RNA (1)...(19): siRNA sense strand
augcucagauuacaaugga

SEQ ID NO: 415091 - RNA, 19 nt, Homo sapiens
  misc_RNA (1)...(19): siRNA sense strand
ccaacaaaugagacaagaa

SEQ ID NO: 415092 - RNA, 19 nt, Homo sapiens
  misc_RNA (1)...(19): siRNA sense strand
cuuggaaagugccuugaca

SEQ ID NO: 415093 - RNA, 19 nt, Homo sapiens
  misc_RNA (1)...(19): siRNA sense strand
aaacaaacagcagcagaag

SEQ ID NO: 415094 - RNA, 19 nt, Homo sapiens
  misc_RNA (1)...(19): siRNA sense strand
aaagaagcaauaccugaca

SEQ ID NO: 415095 - RNA, 19 nt, Homo sapiens
  misc_RNA (1)...(19): siRNA sense strand
aguguacagugcaaaggaa

SEQ ID NO: 415096 - RNA, 19 nt, Homo sapiens
  misc_RNA (1)...(19): siRNA sense strand
ggaguccaugcacgaagaa

SEQ ID NO: 415097 - RNA, 19 nt, Homo sapiens
  misc_RNA (1)...(19): siRNA sense strand
ccuugacaauugcccagaa

SEQ ID NO: 415098 - RNA, 19 nt, Homo sapiens
  misc_RNA (1)...(19): siRNA sense strand
aaagugccuugacaauugc

SEQ ID NO: 415099 - RNA, 19 nt, Homo sapiens
  misc_RNA (1)...(19): siRNA sense strand
ggaagggagaggaaaagaa

SEQ ID NO: 415100 - RNA, 19 nt, Homo sapiens
  misc_RNA (1)...(19): siRNA sense strand
gaaggcgccagcgaagaau

SEQ ID NO: 415101 - RNA, 19 nt, Homo sapiens
  misc_RNA (1)...(19): siRNA sense strand
caaacuauguugaugguua

SEQ ID NO: 415102 - RNA, 19 nt, Homo sapiens
  misc_RNA (1)...(19): siRNA sense strand
gaagauuucuggaggauga

SEQ ID NO: 415103 - RNA, 19 nt, Homo sapiens
  misc_RNA (1)...(19): siRNA sense strand
gaaaggaacagauuacauu

SEQ ID NO: 415104 - RNA, 19 nt, Homo sapiens
  misc_RNA (1)...(19): siRNA sense strand
gaaagaguguaacaaagaa

SEQ ID NO: 415105 - RNA, 19 nt, Homo sapiens
  misc_RNA (1)...(19): siRNA sense strand
aaacaccucuggaaugaua

SEQ ID NO: 415106 - RNA, 19 nt, Homo sapiens
  misc_RNA (1)...(19): siRNA sense strand
gaagacagcagauuuauca

SEQ ID NO: 415107 - RNA, 19 nt, Homo sapiens
  misc_RNA (1)...(19): siRNA sense strand
gaacaucacugcagagcau

SEQ ID NO: 415108 - RNA, 19 nt, Homo sapiens
  misc_RNA (1)...(19): siRNA sense strand
gcagauuuaucacuguuaa

SEQ ID NO: 415109 - RNA, 19 nt, Homo sapiens
  misc_RNA (1)...(19): siRNA sense strand
cgacaugacagacuucuua

SEQ ID NO: 415110 - RNA, 19 nt, Homo sapiens
  misc_RNA (1)...(19): siRNA sense strand
caaugagucuucuaacaaa

SEQ ID NO: 415111 - RNA, 19 nt, Homo sapiens
  misc_RNA (1)...(19): siRNA sense strand
acagaagccucuaaaguuu

SEQ ID NO: 415112 - RNA, 19 nt, Homo sapiens
  misc_RNA (1)...(19): siRNA sense strand
gagaagacguuuacaaagg

SEQ ID NO: 415113 - RNA, 19 nt, Homo sapiens
  misc_RNA (1)...(19): siRNA sense strand
gacagaagccucuaaaguu

SEQ ID NO: 415114 - RNA, 19 nt, Homo sapiens
  misc_RNA (1)...(19): siRNA sense strand
ggaaagacacgacuggaaa

SEQ ID NO: 415115 - RNA, 19 nt, Homo sapiens
  misc_RNA (1)...(19): siRNA sense strand
ucggugagcucuauucuaa

SEQ ID NO: 415116 - RNA, 19 nt, Homo sapiens
  misc_RNA (1)...(19): siRNA sense strand
aaagauuucuggcgaauga

SEQ ID NO: 415117 - RNA, 19 nt, Homo sapiens
  misc_RNA (1)...(19): siRNA sense strand
gaaccguguugguggauuu

SEQ ID NO: 415118 - RNA, 19 nt, Homo sapiens
  misc_RNA (1)...(19): siRNA sense strand
gcuaauaccacucgaauau

SEQ ID NO: 415119 - RNA, 19 nt, Homo sapiens
  misc_RNA (1)...(19): siRNA sense strand
ccaguuccgugcuccauua

SEQ ID NO: 415120 - RNA, 19 nt, Homo sapiens
  misc_RNA (1)...(19): siRNA sense strand
ggacaauucugcacuggau

SEQ ID NO: 415121 - RNA, 19 nt, Homo sapiens
  misc_RNA (1)...(19): siRNA sense strand
gaaaggagacugaaguauc

SEQ ID NO: 415122 - RNA, 19 nt, Homo sapiens
  misc_RNA (1)...(19): siRNA sense strand
uggaguaucugagaaauaa

SEQ ID NO: 415123 - RNA, 19 nt, Homo sapiens
  misc_RNA (1)...(19): siRNA sense strand
gaaugaaaggaacagauua

SEQ ID NO: 415124 - RNA, 19 nt, Homo sapiens
  misc_RNA (1)...(19): siRNA sense strand
gaacaggcaccuauauugu

SEQ ID NO: 415125 - RNA, 19 nt, Homo sapiens
  misc_RNA (1)...(19): siRNA sense strand
gcacagcgacuacauuaau

SEQ ID NO: 415126 - RNA, 19 nt, Homo sapiens
  misc_RNA (1)...(19): siRNA sense strand
ggacagaagccucuaaagu

SEQ ID NO: 415127 - RNA, 19 nt, Homo sapiens
  misc_RNA (1)...(19): siRNA sense strand
ggaauguuaugugcccuua

SEQ ID NO: 415128 - RNA, 19 nt, Homo sapiens
  misc_RNA (1)...(19): siRNA sense strand
ggaugacuaugucuuagaa

SEQ ID NO: 415129 - RNA, 19 nt, Homo sapiens
  misc_RNA (1)...(19): siRNA sense strand
ggaaugaaaggaacagauu

SEQ ID NO: 415130 - RNA, 19 nt, Homo sapiens
  misc_RNA (1)...(19): siRNA sense strand
ugaggaauauggaaacauu

SEQ ID NO: 415131 - RNA, 19 nt, Homo sapiens
  misc_RNA (1)...(19): siRNA sense strand
aguaguaccuuugaacuua

SEQ ID NO: 415132 - RNA, 19 nt, Homo sapiens
  misc_RNA (1)...(19): siRNA sense strand
gacaaugagucuucuaaca

SEQ ID NO: 415133 - RNA, 19 nt, Homo sapiens
  misc_RNA (1)...(19): siRNA sense strand
caauaccaguucaucuaua

SEQ ID NO: 415134 - RNA, 19 nt, Homo sapiens
  misc_RNA (1)...(19): siRNA sense strand
ggacagcgacaaagacuug

SEQ ID NO: 415135 - RNA, 19 nt, Homo sapiens
  misc_RNA (1)...(19): siRNA sense strand
gcgacuacauuaaugcaaa

SEQ ID NO: 415136 - RNA, 19 nt, Homo sapiens
  misc_RNA (1)...(19): siRNA sense strand
ugaacuacaugaucuccua

SEQ ID NO: 415137 - RNA, 19 nt, Homo sapiens
  misc_RNA (1)...(19): siRNA sense strand
gacugugccucucuaauga

SEQ ID NO: 415138 - RNA, 19 nt, Homo sapiens
  misc_RNA (1)...(19): siRNA sense strand
caagggaccagaauaguga

SEQ ID NO: 415139 - RNA, 19 nt, Homo sapiens
  misc_RNA (1)...(19): siRNA sense strand
ucagaaagaguguaacaaa

SEQ ID NO: 415140 - RNA, 19 nt, Homo sapiens
  misc_RNA (1)...(19): siRNA sense strand
ucagacugcucauuucuau

SEQ ID NO: 415141 - RNA, 19 nt, Homo sapiens
  misc_RNA (1)...(19): siRNA sense strand
uaugaggccuggaguauuc

SEQ ID NO: 415142 - RNA, 19 nt, Homo sapiens
  misc_RNA (1)...(19): siRNA sense strand
acaggcaccuauauuguaa

SEQ ID NO: 415143 - RNA, 19 nt, Homo sapiens
  misc_RNA (1)...(19): siRNA sense strand
gcagagcauuccaaucauc

SEQ ID NO: 415144 - RNA, 19 nt, Homo sapiens
  misc_RNA (1)...(19): siRNA sense strand
aaauggugcuguucuuauu

SEQ ID NO: 415145 - RNA, 19 nt, Homo sapiens
  misc_RNA (1)...(19): siRNA sense strand
caaauggccuaacccagau

SEQ ID NO: 415146 - RNA, 19 nt, Homo sapiens
  misc_RNA (1)...(19): siRNA sense strand
aagaauccaugaacuguga

SEQ ID NO: 415147 - RNA, 19 nt, Homo sapiens
  misc_RNA (1)...(19): siRNA sense strand
caaaggacagcgacaaaga

SEQ ID NO: 415148 - RNA, 19 nt, Homo sapiens
  misc_RNA (1)...(19): siRNA sense strand
aaaggagacugaaguaucu

SEQ ID NO: 415149 - RNA, 19 nt, Homo sapiens
  misc_RNA (1)...(19): siRNA sense strand
gaacagugaggaauaugga

SEQ ID NO: 415150 - RNA, 19 nt, Homo sapiens
  misc_RNA (1)...(19): siRNA sense strand
ggcccgaaaugccaucuaa

SEQ ID NO: 415151 - RNA, 19 nt, Homo sapiens
  misc_RNA (1)...(19): siRNA sense strand
gcagaacaggcaccuauau

SEQ ID NO: 415152 - RNA, 19 nt, Homo sapiens
  misc_RNA (1)...(19): siRNA sense strand
gaacuuaucaacgucauca

SEQ ID NO: 415153 - RNA, 19 nt, Homo sapiens
  misc_RNA (1)...(19): siRNA sense strand
gagguuuccuguugagaug

SEQ ID NO: 415154 - RNA, 19 nt, Homo sapiens
  misc_RNA (1)...(19): siRNA sense strand
ucaagucgguggaguaucu

SEQ ID NO: 415155 - RNA, 19 nt, Homo sapiens
  misc_RNA (1)...(19): siRNA sense strand
gagaaggagaagacguuua

SEQ ID NO: 415156 - RNA, 19 nt, Homo sapiens
  misc_RNA (1)...(19): siRNA sense strand
gagugggucuugcaccauu

SEQ ID NO: 415157 - RNA, 19 nt, Homo sapiens
  misc_RNA (1)...(19): siRNA sense strand
uauguuaacagcauccuua

SEQ ID NO: 415158 - RNA, 19 nt, Homo sapiens
  misc_RNA (1)...(19): siRNA sense strand
ccaagggucgucagaauga

SEQ ID NO: 415159 - RNA, 19 nt, Homo sapiens
  misc_RNA (1)...(19): siRNA sense strand
gaaaaugugaucaguauug

SEQ ID NO: 415160 - RNA, 19 nt, Homo sapiens
  misc_RNA (1)...(19): siRNA sense strand
aagcacagcgacuacauua

SEQ ID NO: 415161 - RNA, 19 nt, Homo sapiens
  misc_RNA (1)...(19): siRNA sense strand
ucauugcugugcucguuua

SEQ ID NO: 415162 - RNA, 19 nt, Homo sapiens
  misc_RNA (1)...(19): siRNA sense strand
agaagacguuuacaaagga

SEQ ID NO: 415163 - RNA, 19 nt, Homo sapiens
  misc_RNA (1)...(19): siRNA sense strand
agaaagaguguaacaaaga

SEQ ID NO: 415164 - RNA, 19 nt, Homo sapiens
  misc_RNA (1)...(19): siRNA sense strand
cagaaagaguguaacaaag

SEQ ID NO: 415165 - RNA, 19 nt, Homo sapiens
  misc_RNA (1)...(19): siRNA sense strand
gagaggguguaacaaaaua

SEQ ID NO: 415166 - RNA, 19 nt, Homo sapiens
  misc_RNA (1)...(19): siRNA sense strand
acacaucggugagcucuau

SEQ ID NO: 415167 - RNA, 19 nt, Homo sapiens
  misc_RNA (1)...(19): siRNA sense strand
ccacauacuacgaaagauu

SEQ ID NO: 415168 - RNA, 19 nt, Homo sapiens
  misc_RNA (1)...(19): siRNA sense strand
cagagaacagugaggaaua

SEQ ID NO: 415169 - RNA, 19 nt, Homo sapiens
  misc_RNA (1)...(19): siRNA sense strand
ugaagggugucguacauca

SEQ ID NO: 415170 - RNA, 19 nt, Homo sapiens
  misc_RNA (1)...(19): siRNA sense strand
guaguaccuuugaacuuau

SEQ ID NO: 415171 - RNA, 19 nt, Homo sapiens
  misc_RNA (1)...(19): siRNA sense strand
gcgcuguacugcugauaug

SEQ ID NO: 415172 - RNA, 19 nt, Homo sapiens
  misc_RNA (1)...(19): siRNA sense strand
ggagaagacguuuacaaag

SEQ ID NO: 415173 - RNA, 19 nt, Homo sapiens
  misc_RNA (1)...(19): siRNA sense strand
ggagccagccggagacuau

SEQ ID NO: 415174 - RNA, 19 nt, Homo sapiens
  misc_RNA (1)...(19): siRNA sense strand
cugagaagguggaauuuca

SEQ ID NO: 415175 - RNA, 19 nt, Homo sapiens
  misc_RNA (1)...(19): siRNA sense strand
gagaagaauccaugaacug

SEQ ID NO: 415176 - RNA, 19 nt, Homo sapiens
  misc_RNA (1)...(19): siRNA sense strand
acaaaacacuggaaucauu

SEQ ID NO: 415177 - RNA, 19 nt, Homo sapiens
  misc_RNA (1)...(19): siRNA sense strand
gaacaaaacacuggaauca

SEQ ID NO: 415178 - RNA, 19 nt, Homo sapiens
  misc_RNA (1)...(19): siRNA sense strand
gcauuccaaucauccagaa

SEQ ID NO: 415179 - RNA, 19 nt, Homo sapiens
  misc_RNA (1)...(19): siRNA sense strand
cgaguggucccuaaugaaa

SEQ ID NO: 415180 - RNA, 19 nt, Homo sapiens
  misc_RNA (1)...(19): siRNA sense strand
gccagacgaugcuguuuca

SEQ ID NO: 415181 - RNA, 19 nt, Homo sapiens
  misc_RNA (1)...(19): siRNA sense strand
cgaaauaguggaguggaua

SEQ ID NO: 415182 - RNA, 19 nt, Homo sapiens
  misc_RNA (1)...(19): siRNA sense strand
gggagggcaucagacuaua

SEQ ID NO: 415183 - RNA, 19 nt, Homo sapiens
  misc_RNA (1)...(19): siRNA sense strand
cagaagaugaguuugugua

SEQ ID NO: 415184 - RNA, 19 nt, Homo sapiens
  misc_RNA (1)...(19): siRNA sense strand
gaggaauauggaaacauua

SEQ ID NO: 415185 - RNA, 19 nt, Homo sapiens
  misc_RNA (1)...(19): siRNA sense strand
cgucaccagucuccuauug

SEQ ID NO: 415186 - RNA, 19 nt, Homo sapiens
  misc_RNA (1)...(19): siRNA sense strand
ggccuacucuggugccuau

SEQ ID NO: 415187 - RNA, 19 nt, Homo sapiens
  misc_RNA (1)...(19): siRNA sense strand
gagcauggagucccuagug

SEQ ID NO: 415188 - RNA, 19 nt, Homo sapiens
  misc_RNA (1)...(19): siRNA sense strand
gaagaugaguuuguguacu

SEQ ID NO: 415189 - RNA, 19 nt, Homo sapiens
  misc_RNA (1)...(19): siRNA sense strand
gggcagaacaggcaccuau

SEQ ID NO: 415190 - RNA, 19 nt, Homo sapiens
  misc_RNA (1)...(19): siRNA sense strand
cgaguaugcccuuccagua

SEQ ID NO: 415191 - RNA, 19 nt, Homo sapiens
  misc_RNA (1)...(19): siRNA sense strand
aaaggguagugauccagua

SEQ ID NO: 415192 - RNA, 19 nt, Homo sapiens
  misc_RNA (1)...(19): siRNA sense strand
gugguggcaucuccucuuu

SEQ ID NO: 415193 - RNA, 19 nt, Homo sapiens
  misc_RNA (1)...(19): siRNA sense strand
gacuaugucuuagaaguuc

SEQ ID NO: 415194 - RNA, 19 nt, Homo sapiens
  misc_RNA (1)...(19): siRNA sense strand
guuaacagcauccuuauac

SEQ ID NO: 415195 - RNA, 19 nt, Homo sapiens
  misc_RNA (1)...(19): siRNA sense strand
agagaacagugaggaauau

SEQ ID NO: 415196 - RNA, 19 nt, Homo sapiens
  misc_RNA (1)...(19): siRNA sense strand
gaaguuaagaccuuuacca

SEQ ID NO: 415197 - RNA, 19 nt, Homo sapiens
  misc_RNA (1)...(19): siRNA sense strand
cagcagauuuaucacuguu

SEQ ID NO: 415198 - RNA, 19 nt, Homo sapiens
  misc_RNA (1)...(19): siRNA sense strand
guuccgugcuccauuaugu

SEQ ID NO: 415199 - RNA, 19 nt, Homo sapiens
  misc_RNA (1)...(19): siRNA sense strand
acaggaugacuaugucuua

SEQ ID NO: 415200 - RNA, 19 nt, Homo sapiens
  misc_RNA (1)...(19): siRNA sense strand
gugccucucuaaugaagaa

SEQ ID NO: 415201 - RNA, 19 nt, Homo sapiens
  misc_RNA (1)...(19): siRNA sense strand
ccucacagcuuguaaagug

SEQ ID NO: 415202 - RNA, 19 nt, Homo sapiens
  misc_RNA (1)...(19): siRNA sense strand
caucauugcuggccugguu

SEQ ID NO: 415203 - RNA, 19 nt, Homo sapiens
  misc_RNA (1)...(19): siRNA sense strand
gagauacaccugccaugug

SEQ ID NO: 415204 - RNA, 19 nt, Homo sapiens
  misc_RNA (1)...(19): siRNA sense strand
gaacccuccuccugcuacu

SEQ ID NO: 415205 - RNA, 19 nt, Homo sapiens
  misc_RNA (1)...(19): siRNA sense strand
ggaaaggacugcccucaua

SEQ ID NO: 415206 - RNA, 19 nt, Homo sapiens
  misc_RNA (1)...(19): siRNA sense strand
gaagggaccugcuuuagga

SEQ ID NO: 415207 - RNA, 19 nt, Homo sapiens
  misc_RNA (1)...(19): siRNA sense strand
ggacugcccucauaugaaa

SEQ ID NO: 415208 - RNA, 19 nt, Homo sapiens
  misc_RNA (1)...(19): siRNA sense strand
ggaugaaccaggaagauuu

SEQ ID NO: 415209 - RNA, 19 nt, Homo sapiens
  misc_RNA (1)...(19): siRNA sense strand
gaacuaaaggagaagauuc

SEQ ID NO: 415210 - RNA, 19 nt, Homo sapiens
  misc_RNA (1)...(19): siRNA sense strand
ugagagcacuuacaaccaa

SEQ ID NO: 415211 - RNA, 19 nt, Homo sapiens
  misc_RNA (1)...(19): siRNA sense strand
ccaaggagcccagcaacua

SEQ ID NO: 415212 - RNA, 19 nt, Homo sapiens
  misc_RNA (1)...(19): siRNA sense strand
gaaaggacugcccucauau

SEQ ID NO: 415213 - RNA, 19 nt, Homo sapiens
  misc_RNA (1)...(19): siRNA sense strand
ucuuagagcugaucaaaca

SEQ ID NO: 415214 - RNA, 19 nt, Homo sapiens
  misc_RNA (1)...(19): siRNA sense strand
gacucaaacugccaacuga

SEQ ID NO: 415215 - RNA, 19 nt, Homo sapiens
  misc_RNA (1)...(19): siRNA sense strand
gagaagauucagccagaaa

SEQ ID NO: 415216 - RNA, 19 nt, Homo sapiens
  misc_RNA (1)...(19): siRNA sense strand
caacuaugacuucgucuau

SEQ ID NO: 415217 - RNA, 19 nt, Homo sapiens
  misc_RNA (1)...(19): siRNA sense strand
ggagaagauucagccagaa

SEQ ID NO: 415218 - RNA, 19 nt, Homo sapiens
  misc_RNA (1)...(19): siRNA sense strand
uaaugcagguggugaagga

SEQ ID NO: 415219 - RNA, 19 nt, Homo sapiens
  misc_RNA (1)...(19): siRNA sense strand
gaacucgcuuucuccaucu

SEQ ID NO: 415220 - RNA, 19 nt, Homo sapiens
  misc_RNA (1)...(19): siRNA sense strand
gcccucauaugaaagagaa

SEQ ID NO: 415221 - RNA, 19 nt, Homo sapiens
  misc_RNA (1)...(19): siRNA sense strand
acuaugacuucgucuauga

SEQ ID NO: 415222 - RNA, 19 nt, Homo sapiens
  misc_RNA (1)...(19): siRNA sense strand
gaaggagcagguuaugaga

SEQ ID NO: 415223 - RNA, 19 nt, Homo sapiens
  misc_RNA (1)...(19): siRNA sense strand
aaccugagcuacacugaga

SEQ ID NO: 415224 - RNA, 19 nt, Homo sapiens
  misc_RNA (1)...(19): siRNA sense strand
gcauuacggagacuuagaa

SEQ ID NO: 415225 - RNA, 19 nt, Homo sapiens
  misc_RNA (1)...(19): siRNA sense strand
ugacaagcaugaguacugu

SEQ ID NO: 415226 - RNA, 19 nt, Homo sapiens
  misc_RNA (1)...(19): siRNA sense strand
gcaacuaugacuucgucua

SEQ ID NO: 415227 - RNA, 19 nt, Homo sapiens
  misc_RNA (1)...(19): siRNA sense strand
ggaacuaaaggagaagauu

SEQ ID NO: 415228 - RNA, 19 nt, Homo sapiens
  misc_RNA (1)...(19): siRNA sense strand
cuucaucgcuccugacaag

SEQ ID NO: 415229 - RNA, 19 nt, Homo sapiens
  misc_RNA (1)...(19): siRNA sense strand
caagacaaguuuugguauu

SEQ ID NO: 415230 - RNA, 19 nt, Homo sapiens
  misc_RNA (1)...(19): siRNA sense strand
acacugagauccugaaaau

SEQ ID NO: 415231 - RNA, 19 nt, Homo sapiens
  misc_RNA (1)...(19): siRNA sense strand
ggaagggaccugcuuuagg

SEQ ID NO: 415232 - RNA, 19 nt, Homo sapiens
  misc_RNA (1)...(19): siRNA sense strand
guuaugagagcacuuacaa

SEQ ID NO: 415233 - RNA, 19 nt, Homo sapiens
  misc_RNA (1)...(19): siRNA sense strand
caaggagcccagcaacuau

SEQ ID NO: 415234 - RNA, 19 nt, Homo sapiens
  misc_RNA (1)...(19): siRNA sense strand
guggaagggaccugcuuua

SEQ ID NO: 415235 - RNA, 19 nt, Homo sapiens
  misc_RNA (1)...(19): siRNA sense strand
ugacgcaccuccgccgauu

SEQ ID NO: 415236 - RNA, 19 nt, Homo sapiens
  misc_RNA (1)...(19): siRNA sense strand
gaugaaccaggaagauuuc

SEQ ID NO: 415237 - RNA, 19 nt, Homo sapiens
  misc_RNA (1)...(19): siRNA sense strand
gcggaggcaagacaaguuu

SEQ ID NO: 415238 - RNA, 19 nt, Homo sapiens
  misc_RNA (1)...(19): siRNA sense strand
caucuuguaugacucaaac

SEQ ID NO: 415239 - RNA, 19 nt, Homo sapiens
  misc_RNA (1)...(19): siRNA sense strand
aucacaaaguccugcauua

SEQ ID NO: 415240 - RNA, 19 nt, Homo sapiens
  misc_RNA (1)...(19): siRNA sense strand
ugaaggagcagguuaugag

SEQ ID NO: 415241 - RNA, 19 nt, Homo sapiens
  misc_RNA (1)...(19): siRNA sense strand
cagguuaugagagcacuua

SEQ ID NO: 415242 - RNA, 19 nt, Homo sapiens
  misc_RNA (1)...(19): siRNA sense strand
uuacggagacuuagaagag

SEQ ID NO: 415243 - RNA, 19 nt, Homo sapiens
  misc_RNA (1)...(19): siRNA sense strand
aagcaugaguacuguaucu

SEQ ID NO: 415244 - RNA, 19 nt, Homo sapiens
  misc_RNA (1)...(19): siRNA sense strand
gccgguggcagauaucaaa

SEQ ID NO: 415245 - RNA, 19 nt, Homo sapiens
  misc_RNA (1)...(19): siRNA sense strand
ugacuucgucuaugacugu

SEQ ID NO: 415246 - RNA, 19 nt, Homo sapiens
  misc_RNA (1)...(19): siRNA sense strand
caaacugccaacugaacuu

SEQ ID NO: 415247 - RNA, 19 nt, Homo sapiens
  misc_RNA (1)...(19): siRNA sense strand
gcccagcaacuaugacuuc

SEQ ID NO: 415248 - RNA, 19 nt, Homo sapiens
  misc_RNA (1)...(19): siRNA sense strand
ggacggauggacugaaugc

SEQ ID NO: 415249 - RNA, 19 nt, Homo sapiens
  misc_RNA (1)...(19): siRNA sense strand
aaucuuagagcugaucaaa

SEQ ID NO: 415250 - RNA, 19 nt, Homo sapiens
  misc_RNA (1)...(19): siRNA sense strand
cgucuaugacuguaacuga

SEQ ID NO: 415251 - RNA, 19 nt, Homo sapiens
  misc_RNA (1)...(19): siRNA sense strand
ucacaaaguccugcauuac

SEQ ID NO: 415252 - RNA, 19 nt, Homo sapiens
  misc_RNA (1)...(19): siRNA sense strand
aaggacugcccucauauga

SEQ ID NO: 415253 - RNA, 19 nt, Homo sapiens
  misc_RNA (1)...(19): siRNA sense strand
agagaguccucagggagaa

SEQ ID NO: 415254 - RNA, 19 nt, Homo sapiens
  misc_RNA (1)...(19): siRNA sense strand
gaaaucuuagagcugauca

SEQ ID NO: 415255 - RNA, 19 nt, Homo sapiens
  misc_RNA (1)...(19): siRNA sense strand
ggaccugcuuuaggaaacu

SEQ ID NO: 415256 - RNA, 19 nt, Homo sapiens
  misc_RNA (1)...(19): siRNA sense strand
gaggaugaaccaggaagau

SEQ ID NO: 415257 - RNA, 19 nt, Homo sapiens
  misc_RNA (1)...(19): siRNA sense strand
acaagcaugaguacuguau

SEQ ID NO: 415258 - RNA, 19 nt, Homo sapiens
  misc_RNA (1)...(19): siRNA sense strand
aaaggacugcccucauaug

SEQ ID NO: 415259 - RNA, 19 nt, Homo sapiens
  misc_RNA (1)...(19): siRNA sense strand
ugacucaaacugccaacug

SEQ ID NO: 415260 - RNA, 19 nt, Homo sapiens
  misc_RNA (1)...(19): siRNA sense strand
guggugaaggagcagguua

SEQ ID NO: 415261 - RNA, 19 nt, Homo sapiens
  misc_RNA (1)...(19): siRNA sense strand
gagaagugccccacgauuc

SEQ ID NO: 415262 - RNA, 19 nt, Homo sapiens
  misc_RNA (1)...(19): siRNA sense strand
uacggagacuuagaagaga

SEQ ID NO: 415263 - RNA, 19 nt, Homo sapiens
  misc_RNA (1)...(19): siRNA sense strand
gggaccugcuuuaggaaac

SEQ ID NO: 415264 - RNA, 19 nt, Homo sapiens
  misc_RNA (1)...(19): siRNA sense strand
gugaaggagcagguuauga

SEQ ID NO: 415265 - RNA, 19 nt, Homo sapiens
  misc_RNA (1)...(19): siRNA sense strand
gggaaaggacugcccucau

SEQ ID NO: 415266 - RNA, 19 nt, Homo sapiens
  misc_RNA (1)...(19): siRNA sense strand
agagcaaacugcagaaccu

SEQ ID NO: 415267 - RNA, 19 nt, Homo sapiens
  misc_RNA (1)...(19): siRNA sense strand
gacaagcaugaguacugua

SEQ ID NO: 415268 - RNA, 19 nt, Homo sapiens
  misc_RNA (1)...(19): siRNA sense strand
aaucacaaaguccugcauu

SEQ ID NO: 415269 - RNA, 19 nt, Homo sapiens
  misc_RNA (1)...(19): siRNA sense strand
ggaaaggacugcccucaua

SEQ ID NO: 415270 - RNA, 19 nt, Homo sapiens
  misc_RNA (1)...(19): siRNA sense strand
gaagggaccugcuuuagga

SEQ ID NO: 415271 - RNA, 19 nt, Homo sapiens
  misc_RNA (1)...(19): siRNA sense strand
ggacugcccucauaugaaa

SEQ ID NO: 415272 - RNA, 19 nt, Homo sapiens
  misc_RNA (1)...(19): siRNA sense strand
ggaugaaccaggaagauuu

SEQ ID NO: 415273 - RNA, 19 nt, Homo sapiens
  misc_RNA (1)...(19): siRNA sense strand
gaacuaaaggagaagauuc

SEQ ID NO: 415274 - RNA, 19 nt, Homo sapiens
  misc_RNA (1)...(19): siRNA sense strand
ugagagcacuuacaaccaa

SEQ ID NO: 415275 - RNA, 19 nt, Homo sapiens
  misc_RNA (1)...(19): siRNA sense strand
ccaaggagcccagcaacua

SEQ ID NO: 415276 - RNA, 19 nt, Homo sapiens
  misc_RNA (1)...(19): siRNA sense strand
gaaaggacugcccucauau

SEQ ID NO: 415277 - RNA, 19 nt, Homo sapiens
  misc_RNA (1)...(19): siRNA sense strand
ucuuagagcugaucaaaca

SEQ ID NO: 415278 - RNA, 19 nt, Homo sapiens
  misc_RNA (1)...(19): siRNA sense strand
gacucaaacugccaacuga

SEQ ID NO: 415279 - RNA, 19 nt, Homo sapiens
  misc_RNA (1)...(19): siRNA sense strand
gagaagauucagccagaaa

SEQ ID NO: 415280 - RNA, 19 nt, Homo sapiens
  misc_RNA (1)...(19): siRNA sense strand
caacuaugacuucgucuau

SEQ ID NO: 415281 - RNA, 19 nt, Homo sapiens
  misc_RNA (1)...(19): siRNA sense strand
ggagaagauucagccagaa

SEQ ID NO: 415282 - RNA, 19 nt, Homo sapiens
  misc_RNA (1)...(19): siRNA sense strand
gaacucgcuuucuccaucu

SEQ ID NO: 415283 - RNA, 19 nt, Homo sapiens
  misc_RNA (1)...(19): siRNA sense strand
gcccucauaugaaagagaa

SEQ ID NO: 415284 - RNA, 19 nt, Homo sapiens
  misc_RNA (1)...(19): siRNA sense strand
acuaugacuucgucuauga

SEQ ID NO: 415285 - RNA, 19 nt, Homo sapiens
  misc_RNA (1)...(19): siRNA sense strand
gaaggagcagguuaugaga

SEQ ID NO: 415286 - RNA, 19 nt, Homo sapiens
  misc_RNA (1)...(19): siRNA sense strand
aaccugagcuacacugaga

SEQ ID NO: 415287 - RNA, 19 nt, Homo sapiens
  misc_RNA (1)...(19): siRNA sense strand
gcauuacggagacuuagaa

SEQ ID NO: 415288 - RNA, 19 nt, Homo sapiens
  misc_RNA (1)...(19): siRNA sense strand
ugacaagcaugaguacugu

SEQ ID NO: 415289 - RNA, 19 nt, Homo sapiens
  misc_RNA (1)...(19): siRNA sense strand
gcaacuaugacuucgucua

SEQ ID NO: 415290 - RNA, 19 nt, Homo sapiens
  misc_RNA (1)...(19): siRNA sense strand
ggaacuaaaggagaagauu

SEQ ID NO: 415291 - RNA, 19 nt, Homo sapiens
  misc_RNA (1)...(19): siRNA sense strand
cuucaucgcuccugacaag

SEQ ID NO: 415292 - RNA, 19 nt, Homo sapiens
  misc_RNA (1)...(19): siRNA sense strand
caagacaaguuuugguauu

SEQ ID NO: 415293 - RNA, 19 nt, Homo sapiens
  misc_RNA (1)...(19): siRNA sense strand
acacugagauccugaaaau

SEQ ID NO: 415294 - RNA, 19 nt, Homo sapiens
  misc_RNA (1)...(19): siRNA sense strand
ggaagggaccugcuuuagg

SEQ ID NO: 415295 - RNA, 19 nt, Homo sapiens
  misc_RNA (1)...(19): siRNA sense strand
guuaugagagcacuuacaa

SEQ ID NO: 415296 - RNA, 19 nt, Homo sapiens
  misc_RNA (1)...(19): siRNA sense strand
caaggagcccagcaacuau

SEQ ID NO: 415297 - RNA, 19 nt, Homo sapiens
  misc_RNA (1)...(19): siRNA sense strand
guggaagggaccugcuuua

SEQ ID NO: 415298 - RNA, 19 nt, Homo sapiens
  misc_RNA (1)...(19): siRNA sense strand
ugacgcaccuccgccgauu

SEQ ID NO: 415299 - RNA, 19 nt, Homo sapiens
  misc_RNA (1)...(19): siRNA sense strand
gaugaaccaggaagauuuc

SEQ ID NO: 415300 - RNA, 19 nt, Homo sapiens
  misc_RNA (1)...(19): siRNA sense strand
gcggaggcaagacaaguuu

SEQ ID NO: 415301 - RNA, 19 nt, Homo sapiens
  misc_RNA (1)...(19): siRNA sense strand
caucuuguaugacucaaac

SEQ ID NO: 415302 - RNA, 19 nt, Homo sapiens
  misc_RNA (1)...(19): siRNA sense strand
aucacaaaguccugcauua

SEQ ID NO: 415303 - RNA, 19 nt, Homo sapiens
  misc_RNA (1)...(19): siRNA sense strand
ugaaggagcagguuaugag

SEQ ID NO: 415304 - RNA, 19 nt, Homo sapiens
  misc_RNA (1)...(19): siRNA sense strand
cagguuaugagagcacuua

SEQ ID NO: 415305 - RNA, 19 nt, Homo sapiens
  misc_RNA (1)...(19): siRNA sense strand
uuacggagacuuagaagag

SEQ ID NO: 415306 - RNA, 19 nt, Homo sapiens
  misc_RNA (1)...(19): siRNA sense strand
aagcaugaguacuguaucu

SEQ ID NO: 415307 - RNA, 19 nt, Homo sapiens
  misc_RNA (1)...(19): siRNA sense strand
gccgguggcagauaucaaa

SEQ ID NO: 415308 - RNA, 19 nt, Homo sapiens
  misc_RNA (1)...(19): siRNA sense strand
ugacuucgucuaugacugu

SEQ ID NO: 415309 - RNA, 19 nt, Homo sapiens
  misc_RNA (1)...(19): siRNA sense strand
caaacugccaacugaacuu

SEQ ID NO: 415310 - RNA, 19 nt, Homo sapiens
  misc_RNA (1)...(19): siRNA sense strand
gcccagcaacuaugacuuc

SEQ ID NO: 415311 - RNA, 19 nt, Homo sapiens
  misc_RNA (1)...(19): siRNA sense strand
ggacggauggacugaaugc

SEQ ID NO: 415312 - RNA, 19 nt, Homo sapiens
  misc_RNA (1)...(19): siRNA sense strand
aaucuuagagcugaucaaa

SEQ ID NO: 415313 - RNA, 19 nt, Homo sapiens
  misc_RNA (1)...(19): siRNA sense strand
cgucuaugacuguaacuga

SEQ ID NO: 415314 - RNA, 19 nt, Homo sapiens
  misc_RNA (1)...(19): siRNA sense strand
ucacaaaguccugcauuac

SEQ ID NO: 415315 - RNA, 19 nt, Homo sapiens
  misc_RNA (1)...(19): siRNA sense strand
aaggacugcccucauauga

SEQ ID NO: 415316 - RNA, 19 nt, Homo sapiens
  misc_RNA (1)...(19): siRNA sense strand
agagaguccucagggagaa

SEQ ID NO: 415317 - RNA, 19 nt, Homo sapiens
  misc_RNA (1)...(19): siRNA sense strand
gaaaucuuagagcugauca

SEQ ID NO: 415318 - RNA, 19 nt, Homo sapiens
  misc_RNA (1)...(19): siRNA sense strand
ggaccugcuuuaggaaacu

SEQ ID NO: 415319 - RNA, 19 nt, Homo sapiens
  misc_RNA (1)...(19): siRNA sense strand
gaggaugaaccaggaagau

SEQ ID NO: 415320 - RNA, 19 nt, Homo sapiens
  misc_RNA (1)...(19): siRNA sense strand
acaagcaugaguacuguau

SEQ ID NO: 415321 - RNA, 19 nt, Homo sapiens
  misc_RNA (1)...(19): siRNA sense strand
aaaggacugcccucauaug

SEQ ID NO: 415322 - RNA, 19 nt, Homo sapiens
  misc_RNA (1)...(19): siRNA sense strand
ugacucaaacugccaacug

SEQ ID NO: 415323 - RNA, 19 nt, Homo sapiens
  misc_RNA (1)...(19): siRNA sense strand
guggugaaggagcagguua

SEQ ID NO: 415324 - RNA, 19 nt, Homo sapiens
  misc_RNA (1)...(19): siRNA sense strand
gagaagugccccacgauuc

SEQ ID NO: 415325 - RNA, 19 nt, Homo sapiens
  misc_RNA (1)...(19): siRNA sense strand
uacggagacuuagaagaga

SEQ ID NO: 415326 - RNA, 19 nt, Homo sapiens
  misc_RNA (1)...(19): siRNA sense strand
gugaaggagcagguuauga

SEQ ID NO: 415327 - RNA, 19 nt, Homo sapiens
  misc_RNA (1)...(19): siRNA sense strand
gggaaaggacugcccucau

SEQ ID NO: 415328 - RNA, 19 nt, Homo sapiens
  misc_RNA (1)...(19): siRNA sense strand
gggaccugcuuuaggaaac

SEQ ID NO: 415329 - RNA, 19 nt, Homo sapiens
  misc_RNA (1)...(19): siRNA sense strand
aaucacaaaguccugcauu

SEQ ID NO: 415330 - RNA, 19 nt, Homo sapiens
  misc_RNA (1)...(19): siRNA sense strand
gacaagcaugaguacugua

SEQ ID NO: 415331 - RNA, 19 nt, Homo sapiens
  misc_RNA (1)...(19): siRNA sense strand
agagcaaacugcagaaccu

SEQ ID NO: 415332 - RNA, 19 nt, Homo sapiens
  misc_RNA (1)...(19): siRNA sense strand
ugaagacgcugcugcugua

SEQ ID NO: 415333 - RNA, 19 nt, Homo sapiens
  misc_RNA (1)...(19): siRNA sense strand
gagaaacacccacgagaaa

SEQ ID NO: 415334 - RNA, 19 nt, Homo sapiens
  misc_RNA (1)...(19): siRNA sense strand
gcaggagccucgcuucauc

SEQ ID NO: 415335 - RNA, 19 nt, Homo sapiens
  misc_RNA (1)...(19): siRNA sense strand
gccagccgcucaacaacua

SEQ ID NO: 415336 - RNA, 19 nt, Homo sapiens
  misc_RNA (1)...(19): siRNA sense strand
uuuaccagcucaauaagua

SEQ ID NO: 415337 - RNA, 19 nt, Homo sapiens
  misc_RNA (1)...(19): siRNA sense strand
ccgcugcccucacuacuuu

SEQ ID NO: 415338 - RNA, 19 nt, Homo sapiens
  misc_RNA (1)...(19): siRNA sense strand
aagcagagcucggcagaga

SEQ ID NO: 415339 - RNA, 19 nt, Homo sapiens
  misc_RNA (1)...(19): siRNA sense strand
ccagggaaauucucaccaa

SEQ ID NO: 415340 - RNA, 19 nt, Homo sapiens
  misc_RNA (1)...(19): siRNA sense strand
gaggucaaguugcgcauca

SEQ ID NO: 415341 - RNA, 19 nt, Homo sapiens
  misc_RNA (1)...(19): siRNA sense strand
ucaauaaguacuacacuga

SEQ ID NO: 415342 - RNA, 19 nt, Homo sapiens
  misc_RNA (1)...(19): siRNA sense strand
ucaacuugcucucgaagga

SEQ ID NO: 415343 - RNA, 19 nt, Homo sapiens
  misc_RNA (1)...(19): siRNA sense strand
caacaacuaccacaugaag

SEQ ID NO: 415344 - RNA, 19 nt, Homo sapiens
  misc_RNA (1)...(19): siRNA sense strand
cgagaaacacccacgagaa

SEQ ID NO: 415345 - RNA, 19 nt, Homo sapiens
  misc_RNA (1)...(19): siRNA sense strand
gaaacaagugccucucagu

SEQ ID NO: 415346 - RNA, 19 nt, Homo sapiens
  misc_RNA (1)...(19): siRNA sense strand
gcucaacaacuaccacaug

SEQ ID NO: 415347 - RNA, 19 nt, Homo sapiens
  misc_RNA (1)...(19): siRNA sense strand
gggaaauucucaccaaucc

SEQ ID NO: 415348 - RNA, 19 nt, Homo sapiens
  misc_RNA (1)...(19): siRNA sense strand
gggauguggucaagaugau

SEQ ID NO: 415349 - RNA, 19 nt, Homo sapiens
  misc_RNA (1)...(19): siRNA sense strand
gagguuggccagggaaauu

SEQ ID NO: 415350 - RNA, 19 nt, Homo sapiens
  misc_RNA (1)...(19): siRNA sense strand
cucaacaacuaccacauga

SEQ ID NO: 415351 - RNA, 19 nt, Homo sapiens
  misc_RNA (1)...(19): siRNA sense strand
ucucggacgugcucaagga

SEQ ID NO: 415352 - RNA, 19 nt, Homo sapiens
  misc_RNA (1)...(19): siRNA sense strand
ggccgaaggguucaacuug

SEQ ID NO: 415353 - RNA, 19 nt, Homo sapiens
  misc_RNA (1)...(19): siRNA sense strand
guaagauccgcucgcguuu

SEQ ID NO: 415354 - RNA, 19 nt, Homo sapiens
  misc_RNA (1)...(19): siRNA sense strand
gcucaggccaagcugguuu

SEQ ID NO: 415355 - RNA, 19 nt, Homo sapiens
  misc_RNA (1)...(19): siRNA sense strand
aauuugagguggugcucua

SEQ ID NO: 415356 - RNA, 19 nt, Homo sapiens
  misc_RNA (1)...(19): siRNA sense strand
cagggaaauucucaccaau

SEQ ID NO: 415357 - RNA, 19 nt, Homo sapiens
  misc_RNA (1)...(19): siRNA sense strand
ccaaaagccuggacaaacu

SEQ ID NO: 415358 - RNA, 19 nt, Homo sapiens
  misc_RNA (1)...(19): siRNA sense strand
gaugggcgucuucaacuuc

SEQ ID NO: 415359 - RNA, 19 nt, Homo sapiens
  misc_RNA (1)...(19): siRNA sense strand
gcuguacgagugcgagaaa

SEQ ID NO: 415360 - RNA, 19 nt, Homo sapiens
  misc_RNA (1)...(19): siRNA sense strand
gaaacacccacgagaaacg

SEQ ID NO: 415361 - RNA, 19 nt, Homo sapiens
  misc_RNA (1)...(19): siRNA sense strand
gcccaaccucgaccucuuu

SEQ ID NO: 415362 - RNA, 19 nt, Homo sapiens
  misc_RNA (1)...(19): siRNA sense strand
ggagaaccgccugcugaug

SEQ ID NO: 415363 - RNA, 19 nt, Homo sapiens
  misc_RNA (1)...(19): siRNA sense strand
agacgcugcugcuguacga

SEQ ID NO: 415364 - RNA, 19 nt, Homo sapiens
  misc_RNA (1)...(19): siRNA sense strand
uaaaccagaugggcgucuu

SEQ ID NO: 415365 - RNA, 19 nt, Homo sapiens
  misc_RNA (1)...(19): siRNA sense strand
caccagcgaggucaaguug

SEQ ID NO: 415366 - RNA, 19 nt, Homo sapiens
  misc_RNA (1)...(19): siRNA sense strand
gguucaacuugcucucgaa

SEQ ID NO: 415367 - RNA, 19 nt, Homo sapiens
  misc_RNA (1)...(19): siRNA sense strand
ggagcgcuauguggugcaa

SEQ ID NO: 415368 - RNA, 19 nt, Homo sapiens
  misc_RNA (1)...(19): siRNA sense strand
ggaagcggagcaugucucu

SEQ ID NO: 415369 - RNA, 19 nt, Homo sapiens
  misc_RNA (1)...(19): siRNA sense strand
guggacaagugcagcuauc

SEQ ID NO: 415370 - RNA, 19 nt, Homo sapiens
  misc_RNA (1)...(19): siRNA sense strand
agaugggcgucuucaacuu

SEQ ID NO: 415371 - RNA, 19 nt, Homo sapiens
  misc_RNA (1)...(19): siRNA sense strand
ccagaugggcgucuucaac

SEQ ID NO: 415372 - RNA, 19 nt, Homo sapiens
  misc_RNA (1)...(19): siRNA sense strand
caucagggagcgcuaugug

SEQ ID NO: 415373 - RNA, 19 nt, Homo sapiens
  misc_RNA (1)...(19): siRNA sense strand
gugcagcuaucgggaugug

SEQ ID NO: 415374 - RNA, 19 nt, Homo sapiens
  misc_RNA (1)...(19): siRNA sense strand
aagcggagcaugucucucu

SEQ ID NO: 415375 - RNA, 19 nt, Homo sapiens
  misc_RNA (1)...(19): siRNA sense strand
cggacgugcucaaggaagu

SEQ ID NO: 415376 - RNA, 19 nt, Homo sapiens
  misc_RNA (1)...(19): siRNA sense strand
ggaauuguaccauggaaga

SEQ ID NO: 415377 - RNA, 19 nt, Homo sapiens
  misc_RNA (1)...(19): siRNA sense strand
gggcaagccugcucuagag

SEQ ID NO: 415378 - RNA, 19 nt, Homo sapiens
  misc_RNA (1)...(19): siRNA sense strand
acacggugcugcugcguaa

SEQ ID NO: 415379 - RNA, 19 nt, Homo sapiens
  misc_RNA (1)...(19): siRNA sense strand
gcagcaagauccggucugu

SEQ ID NO: 415380 - RNA, 19 nt, Homo sapiens
  misc_RNA (1)...(19): siRNA sense strand
gcucagacgugcagcuucu

SEQ ID NO: 415381 - RNA, 19 nt, Homo sapiens
  misc_RNA (1)...(19): siRNA sense strand
gagggaaucaccaccuauu

SEQ ID NO: 415382 - RNA, 19 nt, Homo sapiens
  misc_RNA (1)...(19): siRNA sense strand
ggaaucaccaccuauuucu

SEQ ID NO: 415383 - RNA, 19 nt, Homo sapiens
  misc_RNA (1)...(19): siRNA sense strand
acgugcagcuucuggaaua

SEQ ID NO: 415384 - RNA, 19 nt, Homo sapiens
  misc_RNA (1)...(19): siRNA sense strand
caacaugggcaacuacaag

SEQ ID NO: 415385 - RNA, 19 nt, Homo sapiens
  misc_RNA (1)...(19): siRNA sense strand
gggaaucaccaccuauuuc

SEQ ID NO: 415386 - RNA, 19 nt, Homo sapiens
  misc_RNA (1)...(19): siRNA sense strand
gacccgaguuggaggagau

SEQ ID NO: 415387 - RNA, 19 nt, Homo sapiens
  misc_RNA (1)...(19): siRNA sense strand
caacaugcccuggcugaag

SEQ ID NO: 415388 - RNA, 19 nt, Homo sapiens
  misc_RNA (1)...(19): siRNA sense strand
gcaacuacaaguccuuugg

SEQ ID NO: 415389 - RNA, 19 nt, Homo sapiens
  misc_RNA (1)...(19): siRNA sense strand
gaccagcugcgccaacaug

SEQ ID NO: 415390 - RNA, 19 nt, Homo sapiens
  misc_RNA (1)...(19): siRNA sense strand
cucggaagcucauuguuca

SEQ ID NO: 415391 - RNA, 19 nt, Homo sapiens
  misc_RNA (1)...(19): siRNA sense strand
ggagggaaucaccaccuau

SEQ ID NO: 415392 - RNA, 19 nt, Homo sapiens
  misc_RNA (1)...(19): siRNA sense strand
gaaucucggaagcucauug

SEQ ID NO: 415393 - RNA, 19 nt, Homo sapiens
  misc_RNA (1)...(19): siRNA sense strand
aguacauccugcccaauga

SEQ ID NO: 415394 - RNA, 19 nt, Homo sapiens
  misc_RNA (1)...(19): siRNA sense strand
ccacagccgaugcccgauu

SEQ ID NO: 415395 - RNA, 19 nt, Homo sapiens
  misc_RNA (1)...(19): siRNA sense strand
aggagggaaucaccaccua

SEQ ID NO: 415396 - RNA, 19 nt, Homo sapiens
  misc_RNA (1)...(19): siRNA sense strand
cacagccgaugcccgauuc

SEQ ID NO: 415397 - RNA, 19 nt, Homo sapiens
  misc_RNA (1)...(19): siRNA sense strand
cuauuucucugggaauugu

SEQ ID NO: 415398 - RNA, 19 nt, Homo sapiens
  misc_RNA (1)...(19): siRNA sense strand
gggcaacuacaaguccuuu

SEQ ID NO: 415399 - RNA, 19 nt, Homo sapiens
  misc_RNA (1)...(19): siRNA sense strand
caguacauccugcccaaug

SEQ ID NO: 415400 - RNA, 19 nt, Homo sapiens
  misc_RNA (1)...(19): siRNA sense strand
uuaccgaggaggaguauca

SEQ ID NO: 415401 - RNA, 19 nt, Homo sapiens
  misc_RNA (1)...(19): siRNA sense strand
caacuacaaguccuuuggu

SEQ ID NO: 415402 - RNA, 19 nt, Homo sapiens
  misc_RNA (1)...(19): siRNA sense strand
gcagcacccagaagaaguc

SEQ ID NO: 415403 - RNA, 19 nt, Homo sapiens
  misc_RNA (1)...(19): siRNA sense strand
ucucggaagcucauuguuc

SEQ ID NO: 415404 - RNA, 19 nt, Homo sapiens
  misc_RNA (1)...(19): siRNA sense strand
acuccaacaugggcaacua

SEQ ID NO: 415405 - RNA, 19 nt, Homo sapiens
  misc_RNA (1)...(19): siRNA sense strand
ggaauuguaccauggaaga

SEQ ID NO: 415406 - RNA, 19 nt, Homo sapiens
  misc_RNA (1)...(19): siRNA sense strand
gggcaagccugcucuagag

SEQ ID NO: 415407 - RNA, 19 nt, Homo sapiens
  misc_RNA (1)...(19): siRNA sense strand
acacggugcugcugcguaa

SEQ ID NO: 415408 - RNA, 19 nt, Homo sapiens
  misc_RNA (1)...(19): siRNA sense strand
gcagcaagauccggucugu

SEQ ID NO: 415409 - RNA, 19 nt, Homo sapiens
  misc_RNA (1)...(19): siRNA sense strand
gcucagacgugcagcuucu

SEQ ID NO: 415410 - RNA, 19 nt, Homo sapiens
  misc_RNA (1)...(19): siRNA sense strand
gagggaaucaccaccuauu

SEQ ID NO: 415411 - RNA, 19 nt, Homo sapiens
  misc_RNA (1)...(19): siRNA sense strand
ggaaucaccaccuauuucu

SEQ ID NO: 415412 - RNA, 19 nt, Homo sapiens
  misc_RNA (1)...(19): siRNA sense strand
acgugcagcuucuggaaua

SEQ ID NO: 415413 - RNA, 19 nt, Homo sapiens
  misc_RNA (1)...(19): siRNA sense strand
caacaugggcaacuacaag

SEQ ID NO: 415414 - RNA, 19 nt, Homo sapiens
  misc_RNA (1)...(19): siRNA sense strand
gggaaucaccaccuauuuc

SEQ ID NO: 415415 - RNA, 19 nt, Homo sapiens
  misc_RNA (1)...(19): siRNA sense strand
gacccgaguuggaggagau

SEQ ID NO: 415416 - RNA, 19 nt, Homo sapiens
  misc_RNA (1)...(19): siRNA sense strand
caacaugcccuggcugaag

SEQ ID NO: 415417 - RNA, 19 nt, Homo sapiens
  misc_RNA (1)...(19): siRNA sense strand
gcaacuacaaguccuuugg

SEQ ID NO: 415418 - RNA, 19 nt, Homo sapiens
  misc_RNA (1)...(19): siRNA sense strand
gaccagcugcgccaacaug

SEQ ID NO: 415419 - RNA, 19 nt, Homo sapiens
  misc_RNA (1)...(19): siRNA sense strand
cucggaagcucauuguuca

SEQ ID NO: 415420 - RNA, 19 nt, Homo sapiens
  misc_RNA (1)...(19): siRNA sense strand
ggagggaaucaccaccuau

SEQ ID NO: 415421 - RNA, 19 nt, Homo sapiens
  misc_RNA (1)...(19): siRNA sense strand
gaaucucggaagcucauug

SEQ ID NO: 415422 - RNA, 19 nt, Homo sapiens
  misc_RNA (1)...(19): siRNA sense strand
aguacauccugcccaauga

SEQ ID NO: 415423 - RNA, 19 nt, Homo sapiens
  misc_RNA (1)...(19): siRNA sense strand
ccacagccgaugcccgauu

SEQ ID NO: 415424 - RNA, 19 nt, Homo sapiens
  misc_RNA (1)...(19): siRNA sense strand
aggagggaaucaccaccua

SEQ ID NO: 415425 - RNA, 19 nt, Homo sapiens
  misc_RNA (1)...(19): siRNA sense strand
cacagccgaugcccgauuc

SEQ ID NO: 415426 - RNA, 19 nt, Homo sapiens
  misc_RNA (1)...(19): siRNA sense strand
cuauuucucugggaauugu

SEQ ID NO: 415427 - RNA, 19 nt, Homo sapiens
  misc_RNA (1)...(19): siRNA sense strand
gggcaacuacaaguccuuu

SEQ ID NO: 415428 - RNA, 19 nt, Homo sapiens
  misc_RNA (1)...(19): siRNA sense strand
caguacauccugcccaaug

SEQ ID NO: 415429 - RNA, 19 nt, Homo sapiens
  misc_RNA (1)...(19): siRNA sense strand
uuaccgaggaggaguauca

SEQ ID NO: 415430 - RNA, 19 nt, Homo sapiens
  misc_RNA (1)...(19): siRNA sense strand
caacuacaaguccuuuggu

SEQ ID NO: 415431 - RNA, 19 nt, Homo sapiens
  misc_RNA (1)...(19): siRNA sense strand
gcagcacccagaagaaguc

SEQ ID NO: 415432 - RNA, 19 nt, Homo sapiens
  misc_RNA (1)...(19): siRNA sense strand
ucucggaagcucauuguuc

SEQ ID NO: 415433 - RNA, 19 nt, Homo sapiens
  misc_RNA (1)...(19): siRNA sense strand
acuccaacaugggcaacua

SEQ ID NO: 415434 - RNA, 19 nt, Homo sapiens
  misc_RNA (1)...(19): siRNA sense strand
gaaaggauguugagaaaug

SEQ ID NO: 415435 - RNA, 19 nt, Homo sapiens
  misc_RNA (1)...(19): siRNA sense strand
caauaaagcuuguggcaaa

SEQ ID NO: 415436 - RNA, 19 nt, Homo sapiens
  misc_RNA (1)...(19): siRNA sense strand
gaacaggccuccaaaauuu

SEQ ID NO: 415437 - RNA, 19 nt, Homo sapiens
  misc_RNA (1)...(19): siRNA sense strand
gagcaaagguggaacagaa

SEQ ID NO: 415438 - RNA, 19 nt, Homo sapiens
  misc_RNA (1)...(19): siRNA sense strand
gaacugcccucaucaacuu

SEQ ID NO: 415439 - RNA, 19 nt, Homo sapiens
  misc_RNA (1)...(19): siRNA sense strand
ccacaaaguuggacacaaa

SEQ ID NO: 415440 - RNA, 19 nt, Homo sapiens
  misc_RNA (1)...(19): siRNA sense strand
aaacagugcuugccaauga

SEQ ID NO: 415441 - RNA, 19 nt, Homo sapiens
  misc_RNA (1)...(19): siRNA sense strand
ggaaauaacuacguguuug

SEQ ID NO: 415442 - RNA, 19 nt, Homo sapiens
  misc_RNA (1)...(19): siRNA sense strand
ggaggucccugucguuauu

SEQ ID NO: 415443 - RNA, 19 nt, Homo sapiens
  misc_RNA (1)...(19): siRNA sense strand
gcacagcucucugaaggaa

SEQ ID NO: 415444 - RNA, 19 nt, Homo sapiens
  misc_RNA (1)...(19): siRNA sense strand
acacagcaguggccgauua

SEQ ID NO: 415445 - RNA, 19 nt, Homo sapiens
  misc_RNA (1)...(19): siRNA sense strand
aagaaaggauguugagaaa

SEQ ID NO: 415446 - RNA, 19 nt, Homo sapiens
  misc_RNA (1)...(19): siRNA sense strand
gacaguaucuacagagaga

SEQ ID NO: 415447 - RNA, 19 nt, Homo sapiens
  misc_RNA (1)...(19): siRNA sense strand
gaaucuacauccacaaagu

SEQ ID NO: 415448 - RNA, 19 nt, Homo sapiens
  misc_RNA (1)...(19): siRNA sense strand
ggacgaagcaucaagaagu

SEQ ID NO: 415449 - RNA, 19 nt, Homo sapiens
  misc_RNA (1)...(19): siRNA sense strand
ggaaggcucucuggauuca

SEQ ID NO: 415450 - RNA, 19 nt, Homo sapiens
  misc_RNA (1)...(19): siRNA sense strand
caccuggacuucacauuaa

SEQ ID NO: 415451 - RNA, 19 nt, Homo sapiens
  misc_RNA (1)...(19): siRNA sense strand
ccaaugagcagguggauga

SEQ ID NO: 415452 - RNA, 19 nt, Homo sapiens
  misc_RNA (1)...(19): siRNA sense strand
cuacguguuugccagauua

SEQ ID NO: 415453 - RNA, 19 nt, Homo sapiens
  misc_RNA (1)...(19): siRNA sense strand
caagaaaggauguugagaa

SEQ ID NO: 415454 - RNA, 19 nt, Homo sapiens
  misc_RNA (1)...(19): siRNA sense strand
acagaggacuucucacuga

SEQ ID NO: 415455 - RNA, 19 nt, Homo sapiens
  misc_RNA (1)...(19): siRNA sense strand
caacgacuguggaccuuga

SEQ ID NO: 415456 - RNA, 19 nt, Homo sapiens
  misc_RNA (1)...(19): siRNA sense strand
gaagaugaguaaguccaaa

SEQ ID NO: 415457 - RNA, 19 nt, Homo sapiens
  misc_RNA (1)...(19): siRNA sense strand
cugaaagacuggcugauuu

SEQ ID NO: 415458 - RNA, 19 nt, Homo sapiens
  misc_RNA (1)...(19): siRNA sense strand
gacaagugauaaacugaaa

SEQ ID NO: 415459 - RNA, 19 nt, Homo sapiens
  misc_RNA (1)...(19): siRNA sense strand
gaguauacauugcagacaa

SEQ ID NO: 415460 - RNA, 19 nt, Homo sapiens
  misc_RNA (1)...(19): siRNA sense strand
ccaccuggacuucacauua

SEQ ID NO: 415461 - RNA, 19 nt, Homo sapiens
  misc_RNA (1)...(19): siRNA sense strand
ggccuacucugaagucauu

SEQ ID NO: 415462 - RNA, 19 nt, Homo sapiens
  misc_RNA (1)...(19): siRNA sense strand
ggacuucacauuaaagguu

SEQ ID NO: 415463 - RNA, 19 nt, Homo sapiens
  misc_RNA (1)...(19): siRNA sense strand
gacaaccgcuuaugcaaag

SEQ ID NO: 415464 - RNA, 19 nt, Homo sapiens
  misc_RNA (1)...(19): siRNA sense strand
gaggacuucucacugaauu

SEQ ID NO: 415465 - RNA, 19 nt, Homo sapiens
  misc_RNA (1)...(19): siRNA sense strand
gagaguaauucccggaugu

SEQ ID NO: 415466 - RNA, 19 nt, Homo sapiens
  misc_RNA (1)...(19): siRNA sense strand
gcaguucugaucaacaaua

SEQ ID NO: 415467 - RNA, 19 nt, Homo sapiens
  misc_RNA (1)...(19): siRNA sense strand
uggcagaccuuccagaaug

SEQ ID NO: 415468 - RNA, 19 nt, Homo sapiens
  misc_RNA (1)...(19): siRNA sense strand
guggagacgugacaaguga

SEQ ID NO: 415469 - RNA, 19 nt, Homo sapiens
  misc_RNA (1)...(19): siRNA sense strand
caaaguuggacacaaagua

SEQ ID NO: 415470 - RNA, 19 nt, Homo sapiens
  misc_RNA (1)...(19): siRNA sense strand
ccacgaauuuguucuucaa

SEQ ID NO: 415471 - RNA, 19 nt, Homo sapiens
  misc_RNA (1)...(19): siRNA sense strand
cucagacaaugguuuauua

SEQ ID NO: 415472 - RNA, 19 nt, Homo sapiens
  misc_RNA (1)...(19): siRNA sense strand
ccagaaugguauggaauaa

SEQ ID NO: 415473 - RNA, 19 nt, Homo sapiens
  misc_RNA (1)...(19): siRNA sense strand
cagcugggauagggaaaua

SEQ ID NO: 415474 - RNA, 19 nt, Homo sapiens
  misc_RNA (1)...(19): siRNA sense strand
ugacaacucgguuuauuga

SEQ ID NO: 415475 - RNA, 19 nt, Homo sapiens
  misc_RNA (1)...(19): siRNA sense strand
agaaguaccucagacaaug

SEQ ID NO: 415476 - RNA, 19 nt, Homo sapiens
  misc_RNA (1)...(19): siRNA sense strand
ggaugccuguggauuugua

SEQ ID NO: 415477 - RNA, 19 nt, Homo sapiens
  misc_RNA (1)...(19): siRNA sense strand
caagggagcagccaagaga

SEQ ID NO: 415478 - RNA, 19 nt, Homo sapiens
  misc_RNA (1)...(19): siRNA sense strand
ggacucaguaucucuuuau

SEQ ID NO: 415479 - RNA, 19 nt, Homo sapiens
  misc_RNA (1)...(19): siRNA sense strand
gggagaagaugaguaaguc

SEQ ID NO: 415480 - RNA, 19 nt, Homo sapiens
  misc_RNA (1)...(19): siRNA sense strand
gacaaugguuuauuaagac

SEQ ID NO: 415481 - RNA, 19 nt, Homo sapiens
  misc_RNA (1)...(19): siRNA sense strand
ggagacgugacaagugaua

SEQ ID NO: 415482 - RNA, 19 nt, Homo sapiens
  misc_RNA (1)...(19): siRNA sense strand
gagaaaugguggcaucaac

SEQ ID NO: 415483 - RNA, 19 nt, Homo sapiens
  misc_RNA (1)...(19): siRNA sense strand
gggaaauaacuacguguuu

SEQ ID NO: 415484 - RNA, 19 nt, Homo sapiens
  misc_RNA (1)...(19): siRNA sense strand
uguaauggcugugaacaug

SEQ ID NO: 415485 - RNA, 19 nt, Homo sapiens
  misc_RNA (1)...(19): siRNA sense strand
ggaaagaacaugccgucau

SEQ ID NO: 415486 - RNA, 19 nt, Homo sapiens
  misc_RNA (1)...(19): siRNA sense strand
gaaaugguggcaucaacga

SEQ ID NO: 415487 - RNA, 19 nt, Homo sapiens
  misc_RNA (1)...(19): siRNA sense strand
caacaucgcgucuuucacu

SEQ ID NO: 415488 - RNA, 19 nt, Homo sapiens
  misc_RNA (1)...(19): siRNA sense strand
gaaaguggacaaaagagua

SEQ ID NO: 415489 - RNA, 19 nt, Homo sapiens
  misc_RNA (1)...(19): siRNA sense strand
aaaguuggacacaaaguaa

SEQ ID NO: 415490 - RNA, 19 nt, Homo sapiens
  misc_RNA (1)...(19): siRNA sense strand
ggacaaaagaguauacauu

SEQ ID NO: 415491 - RNA, 19 nt, Homo sapiens
  misc_RNA (1)...(19): siRNA sense strand
gcacgguuccagaagauga

SEQ ID NO: 415492 - RNA, 19 nt, Homo sapiens
  misc_RNA (1)...(19): siRNA sense strand
gagacagacacgauggaua

SEQ ID NO: 415493 - RNA, 19 nt, Homo sapiens
  misc_RNA (1)...(19): siRNA sense strand
gaagcucugugcccacuac

SEQ ID NO: 415494 - RNA, 19 nt, Homo sapiens
  misc_RNA (1)...(19): siRNA sense strand
caagugauaaacugaaaga

SEQ ID NO: 415495 - RNA, 19 nt, Homo sapiens
  misc_RNA (1)...(19): siRNA sense strand
gacgaagcaucaagaaguc

SEQ ID NO: 415496 - RNA, 19 nt, Homo sapiens
  misc_RNA (1)...(19): siRNA sense strand
caguucugaucaacaauaa

SEQ ID NO: 415497 - RNA, 19 nt, Homo sapiens
  misc_RNA (1)...(19): siRNA sense strand
caagaacuccgucaucucu

SEQ ID NO: 415498 - RNA, 19 nt, Homo sapiens
  misc_RNA (1)...(19): siRNA sense strand
gaggugacgugggagaaga

SEQ ID NO: 415499 - RNA, 19 nt, Homo sapiens
  misc_RNA (1)...(19): siRNA sense strand
caaagguggaacagaagua

SEQ ID NO: 415500 - RNA, 19 nt, Homo sapiens
  misc_RNA (1)...(19): siRNA sense strand
gaaguggaucucacagguu

SEQ ID NO: 415501 - RNA, 19 nt, Homo sapiens
  misc_RNA (1)...(19): siRNA sense strand
ccuaccaucuggacaguau

SEQ ID NO: 415502 - RNA, 19 nt, Homo sapiens
  misc_RNA (1)...(19): siRNA sense strand
guacaagaacuccgucauc

SEQ ID NO: 415503 - RNA, 19 nt, Homo sapiens
  misc_RNA (1)...(19): siRNA sense strand
aaacgaaagagaaguuaga

SEQ ID NO: 415504 - RNA, 19 nt, Homo sapiens
  misc_RNA (1)...(19): siRNA sense strand
gaaauaacuacguguuugc

SEQ ID NO: 415505 - RNA, 19 nt, Homo sapiens
  misc_RNA (1)...(19): siRNA sense strand
uggcaguucugaucaacaa

SEQ ID NO: 415506 - RNA, 19 nt, Homo sapiens
  misc_RNA (1)...(19): siRNA sense strand
cagaggacuucucacugaa

SEQ ID NO: 415507 - RNA, 19 nt, Homo sapiens
  misc_RNA (1)...(19): siRNA sense strand
gugcugagauggcaacaac

SEQ ID NO: 415508 - RNA, 19 nt, Homo sapiens
  misc_RNA (1)...(19): siRNA sense strand
gcucagaggacaccaucuu

SEQ ID NO: 415509 - RNA, 19 nt, Homo sapiens
  misc_RNA (1)...(19): siRNA sense strand
uuggaaggcucucuggauu

SEQ ID NO: 415510 - RNA, 19 nt, Homo sapiens
  misc_RNA (1)...(19): siRNA sense strand
gauacacugacccucauaa

SEQ ID NO: 415511 - RNA, 19 nt, Homo sapiens
  misc_RNA (1)...(19): siRNA sense strand
cuggaggacuugccuguga

SEQ ID NO: 415512 - RNA, 19 nt, Homo sapiens
  misc_RNA (1)...(19): siRNA sense strand
uuaaacacaugaggaaaca

SEQ ID NO: 415513 - RNA, 19 nt, Homo sapiens
  misc_RNA (1)...(19): siRNA sense strand
ucaacuuccuggugcaaga

SEQ ID NO: 415514 - RNA, 19 nt, Homo sapiens
  misc_RNA (1)...(19): siRNA sense strand
gucaugcacuuguucuaug

SEQ ID NO: 415515 - RNA, 19 nt, Homo sapiens
  misc_RNA (1)...(19): siRNA sense strand
gacaccaucuuagcccaaa

SEQ ID NO: 415516 - RNA, 19 nt, Homo sapiens
  misc_RNA (1)...(19): siRNA sense strand
cagacacgauggauaccuu

SEQ ID NO: 415517 - RNA, 19 nt, Homo sapiens
  misc_RNA (1)...(19): siRNA sense strand
caaggacgaagcaucaaga

SEQ ID NO: 415518 - RNA, 19 nt, Homo sapiens
  misc_RNA (1)...(19): siRNA sense strand
gacaaaagaguauacauug

SEQ ID NO: 415519 - RNA, 19 nt, Homo sapiens
  misc_RNA (1)...(19): siRNA sense strand
cacgauggauaccuuuguu

SEQ ID NO: 415520 - RNA, 19 nt, Homo sapiens
  misc_RNA (1)...(19): siRNA sense strand
aaauaggaauucccaguac

SEQ ID NO: 415521 - RNA, 19 nt, Homo sapiens
  misc_RNA (1)...(19): siRNA sense strand
gacucaguaucucuuuauu

SEQ ID NO: 415522 - RNA, 19 nt, Homo sapiens
  misc_RNA (1)...(19): siRNA sense strand
agacaaccgcuuaugcaaa

SEQ ID NO: 415523 - RNA, 19 nt, Homo sapiens
  misc_RNA (1)...(19): siRNA sense strand
cauguaaccucagagaucu

SEQ ID NO: 415524 - RNA, 19 nt, Homo sapiens
  misc_RNA (1)...(19): siRNA sense strand
gauaucuugugggauguga

SEQ ID NO: 415525 - RNA, 19 nt, Homo sapiens
  misc_RNA (1)...(19): siRNA sense strand
auacauugcagacaagaaa

SEQ ID NO: 415526 - RNA, 19 nt, Homo sapiens
  misc_RNA (1)...(19): siRNA sense strand
auggauaccuuuguugauu

SEQ ID NO: 415527 - RNA, 19 nt, Homo sapiens
  misc_RNA (1)...(19): siRNA sense strand
aaggcucucuggauucaaa

SEQ ID NO: 415528 - RNA, 19 nt, Homo sapiens
  misc_RNA (1)...(19): siRNA sense strand
caugcaagcccacuggauu

SEQ ID NO: 415529 - RNA, 19 nt, Homo sapiens
  misc_RNA (1)...(19): siRNA sense strand
ggauaccuuuguugauucu

SEQ ID NO: 415530 - RNA, 19 nt, Homo sapiens
  misc_RNA (1)...(19): siRNA sense strand
gagcugggugucaggcuuu

SEQ ID NO: 415531 - RNA, 19 nt, Homo sapiens
  misc_RNA (1)...(19): siRNA sense strand
uacaagaacuccgucaucu

SEQ ID NO: 415532 - RNA, 19 nt, Homo sapiens
  misc_RNA (1)...(19): siRNA sense strand
cuugacaacucgguuuauu

SEQ ID NO: 415533 - RNA, 19 nt, Homo sapiens
  misc_RNA (1)...(19): siRNA sense strand
cgugggagaagaugaguaa

SEQ ID NO: 415534 - RNA, 19 nt, Homo sapiens
  misc_RNA (1)...(19): siRNA sense strand
gaacauuacuccaccugua

SEQ ID NO: 415535 - RNA, 19 nt, Homo sapiens
  misc_RNA (1)...(19): siRNA sense strand
gauuagacaucacaacaua

SEQ ID NO: 415536 - RNA, 19 nt, Homo sapiens
  misc_RNA (1)...(19): siRNA sense strand
gaaauugacuuugaagaug

SEQ ID NO: 415537 - RNA, 19 nt, Homo sapiens
  misc_RNA (1)...(19): siRNA sense strand
gaagacagcagccucauuu

SEQ ID NO: 415538 - RNA, 19 nt, Homo sapiens
  misc_RNA (1)...(19): siRNA sense strand
ggaaggcgccucucaauau

SEQ ID NO: 415539 - RNA, 19 nt, Homo sapiens
  misc_RNA (1)...(19): siRNA sense strand
uaugaaaccuggagaauau

SEQ ID NO: 415540 - RNA, 19 nt, Homo sapiens
  misc_RNA (1)...(19): siRNA sense strand
gaaggcgccucucaauauu

SEQ ID NO: 415541 - RNA, 19 nt, Homo sapiens
  misc_RNA (1)...(19): siRNA sense strand
uaagaagaaugaccaggua

SEQ ID NO: 415542 - RNA, 19 nt, Homo sapiens
  misc_RNA (1)...(19): siRNA sense strand
ugacucaccucgcuuauug

SEQ ID NO: 415543 - RNA, 19 nt, Homo sapiens
  misc_RNA (1)...(19): siRNA sense strand
gaaauucacuaugccaaga

SEQ ID NO: 415544 - RNA, 19 nt, Homo sapiens
  misc_RNA (1)...(19): siRNA sense strand
gaacauaaacaaccucaau

SEQ ID NO: 415545 - RNA, 19 nt, Homo sapiens
  misc_RNA (1)...(19): siRNA sense strand
ugacagcgcucuccggaaa

SEQ ID NO: 415546 - RNA, 19 nt, Homo sapiens
  misc_RNA (1)...(19): siRNA sense strand
guagacaaguuuaagaaga

SEQ ID NO: 415547 - RNA, 19 nt, Homo sapiens
  misc_RNA (1)...(19): siRNA sense strand
ugacaucaaugcugaaguu

SEQ ID NO: 415548 - RNA, 19 nt, Homo sapiens
  misc_RNA (1)...(19): siRNA sense strand
gaagaaugaccagguauuu

SEQ ID NO: 415549 - RNA, 19 nt, Homo sapiens
  misc_RNA (1)...(19): siRNA sense strand
aaacaaaggcugcuacuau

SEQ ID NO: 415550 - RNA, 19 nt, Homo sapiens
  misc_RNA (1)...(19): siRNA sense strand
agaguuagguuguguagaa

SEQ ID NO: 415551 - RNA, 19 nt, Homo sapiens
  misc_RNA (1)...(19): siRNA sense strand
ggguagagacugagcauua

SEQ ID NO: 415552 - RNA, 19 nt, Homo sapiens
  misc_RNA (1)...(19): siRNA sense strand
gaagugaacugcuguuucc

SEQ ID NO: 415553 - RNA, 19 nt, Homo sapiens
  misc_RNA (1)...(19): siRNA sense strand
gcaggaguauugacauuuc

SEQ ID NO: 415554 - RNA, 19 nt, Homo sapiens
  misc_RNA (1)...(19): siRNA sense strand
uaacgacaccuccaacuuu

SEQ ID NO: 415555 - RNA, 19 nt, Homo sapiens
  misc_RNA (1)...(19): siRNA sense strand
ugagauugaucccauguuu

SEQ ID NO: 415556 - RNA, 19 nt, Homo sapiens
  misc_RNA (1)...(19): siRNA sense strand
ugucagagauucuuaaaca

SEQ ID NO: 415557 - RNA, 19 nt, Homo sapiens
  misc_RNA (1)...(19): siRNA sense strand
guaucaaacuguccacuga

SEQ ID NO: 415558 - RNA, 19 nt, Homo sapiens
  misc_RNA (1)...(19): siRNA sense strand
ggaccucucugauguucuu

SEQ ID NO: 415559 - RNA, 19 nt, Homo sapiens
  misc_RNA (1)...(19): siRNA sense strand
acucugaccucucaccuua

SEQ ID NO: 415560 - RNA, 19 nt, Homo sapiens
  misc_RNA (1)...(19): siRNA sense strand
gaucggaagugugagauug

SEQ ID NO: 415561 - RNA, 19 nt, Homo sapiens
  misc_RNA (1)...(19): siRNA sense strand
gaagaagcacuuacacaga

SEQ ID NO: 415562 - RNA, 19 nt, Homo sapiens
  misc_RNA (1)...(19): siRNA sense strand
cuacagauuucaacuacaa

SEQ ID NO: 415563 - RNA, 19 nt, Homo sapiens
  misc_RNA (1)...(19): siRNA sense strand
ccggaucacuggcgcuuua

SEQ ID NO: 415564 - RNA, 19 nt, Homo sapiens
  misc_RNA (1)...(19): siRNA sense strand
aagaagcacuuacacagaa

SEQ ID NO: 415565 - RNA, 19 nt, Homo sapiens
  misc_RNA (1)...(19): siRNA sense strand
gguuugcacuugauugauu

SEQ ID NO: 415566 - RNA, 19 nt, Homo sapiens
  misc_RNA (1)...(19): siRNA sense strand
gcacuuacacagaacuauu

SEQ ID NO: 415567 - RNA, 19 nt, Homo sapiens
  misc_RNA (1)...(19): siRNA sense strand
aacaaaggcugcuacuauu

SEQ ID NO: 415568 - RNA, 19 nt, Homo sapiens
  misc_RNA (1)...(19): siRNA sense strand
uccagaagcccaaggauua

SEQ ID NO: 415569 - RNA, 19 nt, Homo sapiens
  misc_RNA (1)...(19): siRNA sense strand
ugacagugaugaugaagau

SEQ ID NO: 415570 - RNA, 19 nt, Homo sapiens
  misc_RNA (1)...(19): siRNA sense strand
gaucccauguuucagaaga

SEQ ID NO: 415571 - RNA, 19 nt, Homo sapiens
  misc_RNA (1)...(19): siRNA sense strand
gguagagacugagcauuau

SEQ ID NO: 415572 - RNA, 19 nt, Homo sapiens
  misc_RNA (1)...(19): siRNA sense strand
gaaccaaccaacuuuaaag

SEQ ID NO: 415573 - RNA, 19 nt, Homo sapiens
  misc_RNA (1)...(19): siRNA sense strand
cagcaggaguauugacauu

SEQ ID NO: 415574 - RNA, 19 nt, Homo sapiens
  misc_RNA (1)...(19): siRNA sense strand
caaagaagaagcacuuaca

SEQ ID NO: 415575 - RNA, 19 nt, Homo sapiens
  misc_RNA (1)...(19): siRNA sense strand
agacugagcauuaugaaga

SEQ ID NO: 415576 - RNA, 19 nt, Homo sapiens
  misc_RNA (1)...(19): siRNA sense strand
ccaggcaccagguuacuua

SEQ ID NO: 415577 - RNA, 19 nt, Homo sapiens
  misc_RNA (1)...(19): siRNA sense strand
gcacugccagccacaauga

SEQ ID NO: 415578 - RNA, 19 nt, Homo sapiens
  misc_RNA (1)...(19): siRNA sense strand
gaaguagaaggccauguug

SEQ ID NO: 415579 - RNA, 19 nt, Homo sapiens
  misc_RNA (1)...(19): siRNA sense strand
uaagacagcacaacagaau

SEQ ID NO: 415580 - RNA, 19 nt, Homo sapiens
  misc_RNA (1)...(19): siRNA sense strand
acagaacuauugagcagaa

SEQ ID NO: 415581 - RNA, 19 nt, Homo sapiens
  misc_RNA (1)...(19): siRNA sense strand
gcucagaaccucuccauac

SEQ ID NO: 415582 - RNA, 19 nt, Homo sapiens
  misc_RNA (1)...(19): siRNA sense strand
agaaguggcugacgagaag

SEQ ID NO: 415583 - RNA, 19 nt, Homo sapiens
  misc_RNA (1)...(19): siRNA sense strand
gcaccagguuacuuaagau

SEQ ID NO: 415584 - RNA, 19 nt, Homo sapiens
  misc_RNA (1)...(19): siRNA sense strand
agaaugaccagguauuuga

SEQ ID NO: 415585 - RNA, 19 nt, Homo sapiens
  misc_RNA (1)...(19): siRNA sense strand
ggcaccagguuacuuaaga

SEQ ID NO: 415586 - RNA, 19 nt, Homo sapiens
  misc_RNA (1)...(19): siRNA sense strand
caagaaugcuuuugguuug

SEQ ID NO: 415587 - RNA, 19 nt, Homo sapiens
  misc_RNA (1)...(19): siRNA sense strand
gcucgagggucuuugaucu

SEQ ID NO: 415588 - RNA, 19 nt, Homo sapiens
  misc_RNA (1)...(19): siRNA sense strand
gccauaggguagagacuga

SEQ ID NO: 415589 - RNA, 19 nt, Homo sapiens
  misc_RNA (1)...(19): siRNA sense strand
gaccagguauuugacauca

SEQ ID NO: 415590 - RNA, 19 nt, Homo sapiens
  misc_RNA (1)...(19): siRNA sense strand
gauggaagugcuacugaaa

SEQ ID NO: 415591 - RNA, 19 nt, Homo sapiens
  misc_RNA (1)...(19): siRNA sense strand
gacugagcauuaugaagaa

SEQ ID NO: 415592 - RNA, 19 nt, Homo sapiens
  misc_RNA (1)...(19): siRNA sense strand
cgaagacuuuccucagaau

SEQ ID NO: 415593 - RNA, 19 nt, Homo sapiens
  misc_RNA (1)...(19): siRNA sense strand
gcagcagugugcagaagau

SEQ ID NO: 415594 - RNA, 19 nt, Homo sapiens
  misc_RNA (1)...(19): siRNA sense strand
uggaagugcuacugaaaug

SEQ ID NO: 415595 - RNA, 19 nt, Homo sapiens
  misc_RNA (1)...(19): siRNA sense strand
cgaagcagaucggaagugu

SEQ ID NO: 415596 - RNA, 19 nt, Homo sapiens
  misc_RNA (1)...(19): siRNA sense strand
cagggaagcuggaaaagaa

SEQ ID NO: 415597 - RNA, 19 nt, Homo sapiens
  misc_RNA (1)...(19): siRNA sense strand
gcccaaggauuagacauca

SEQ ID NO: 415598 - RNA, 19 nt, Homo sapiens
  misc_RNA (1)...(19): siRNA sense strand
acacgcagauuacggaaca

SEQ ID NO: 415599 - RNA, 19 nt, Homo sapiens
  misc_RNA (1)...(19): siRNA sense strand
cuaccacccuuccuacaga

SEQ ID NO: 415600 - RNA, 19 nt, Homo sapiens
  misc_RNA (1)...(19): siRNA sense strand
ucgaagacuuuccucagaa

SEQ ID NO: 415601 - RNA, 19 nt, Homo sapiens
  misc_RNA (1)...(19): siRNA sense strand
ugaaacacauaaugagucu

SEQ ID NO: 415602 - RNA, 19 nt, Homo sapiens
  misc_RNA (1)...(19): siRNA sense strand
cuauugagcagaacauaaa

SEQ ID NO: 415603 - RNA, 19 nt, Homo sapiens
  misc_RNA (1)...(19): siRNA sense strand
gaaaugggaacaaccaaaa

SEQ ID NO: 415604 - RNA, 19 nt, Homo sapiens
  misc_RNA (1)...(19): siRNA sense strand
aagcagaucggaaguguga

SEQ ID NO: 415605 - RNA, 19 nt, Homo sapiens
  misc_RNA (1)...(19): siRNA sense strand
gaguuagguuguguagaaa

SEQ ID NO: 415606 - RNA, 19 nt, Homo sapiens
  misc_RNA (1)...(19): siRNA sense strand
guuagguuguguagaaaug

SEQ ID NO: 415607 - RNA, 19 nt, Homo sapiens
  misc_RNA (1)...(19): siRNA sense strand
ucagagauucuuaaacaga

SEQ ID NO: 415608 - RNA, 19 nt, Homo sapiens
  misc_RNA (1)...(19): siRNA sense strand
ugaagacuaugauuacaac

SEQ ID NO: 415609 - RNA, 19 nt, Homo sapiens
  misc_RNA (1)...(19): siRNA sense strand
gacagcagccucauuugau

SEQ ID NO: 415610 - RNA, 19 nt, Homo sapiens
  misc_RNA (1)...(19): siRNA sense strand
gcacuugauugauuuuaug

SEQ ID NO: 415611 - RNA, 19 nt, Homo sapiens
  misc_RNA (1)...(19): siRNA sense strand
cuacuauucugaccaaguc

SEQ ID NO: 415612 - RNA, 19 nt, Homo sapiens
  misc_RNA (1)...(19): siRNA sense strand
gagugacuguggagacuuc

SEQ ID NO: 415613 - RNA, 19 nt, Homo sapiens
  misc_RNA (1)...(19): siRNA sense strand
gcagaucggaagugugaga

SEQ ID NO: 415614 - RNA, 19 nt, Homo sapiens
  misc_RNA (1)...(19): siRNA sense strand
gcuguaaagccaaagaaga

SEQ ID NO: 415615 - RNA, 19 nt, Homo sapiens
  misc_RNA (1)...(19): siRNA sense strand
cgaaccaaccaacuuuaaa

SEQ ID NO: 415616 - RNA, 19 nt, Homo sapiens
  misc_RNA (1)...(19): siRNA sense strand
agacagcagccucauuuga

SEQ ID NO: 415617 - RNA, 19 nt, Homo sapiens
  misc_RNA (1)...(19): siRNA sense strand
acagugaugaugaagauuu

SEQ ID NO: 415618 - RNA, 19 nt, Homo sapiens
  misc_RNA (1)...(19): siRNA sense strand
aaccagaauuggagagcua

SEQ ID NO: 415619 - RNA, 19 nt, Homo sapiens
  misc_RNA (1)...(19): siRNA sense strand
ccacaaugaauaacucuuc

SEQ ID NO: 415620 - RNA, 19 nt, Homo sapiens
  misc_RNA (1)...(19): siRNA sense strand
acagugaaacacauaauga

SEQ ID NO: 415621 - RNA, 19 nt, Homo sapiens
  misc_RNA (1)...(19): siRNA sense strand
ggacagugaaacacauaau

SEQ ID NO: 415622 - RNA, 19 nt, Homo sapiens
  misc_RNA (1)...(19): siRNA sense strand
ccaugccgauguauacaga

SEQ ID NO: 415623 - RNA, 19 nt, Homo sapiens
  misc_RNA (1)...(19): siRNA sense strand
ugggaacucugaccucuca

SEQ ID NO: 415624 - RNA, 19 nt, Homo sapiens
  misc_RNA (1)...(19): siRNA sense strand
gguccagcuucaccucaaa

SEQ ID NO: 415625 - RNA, 19 nt, Homo sapiens
  misc_RNA (1)...(19): siRNA sense strand
cuaugaaaccuggagaaua

SEQ ID NO: 415626 - RNA, 19 nt, Homo sapiens
  misc_RNA (1)...(19): siRNA sense strand
ugauggaagugcuacugaa

SEQ ID NO: 415627 - RNA, 19 nt, Homo sapiens
  misc_RNA (1)...(19): siRNA sense strand
guuugcacuugauugauuu

SEQ ID NO: 415628 - RNA, 19 nt, Homo sapiens
  misc_RNA (1)...(19): siRNA sense strand
uugccugucuccuacauuu

SEQ ID NO: 415629 - RNA, 19 nt, Homo sapiens
  misc_RNA (1)...(19): siRNA sense strand
cagugaugaugaagauuug

SEQ ID NO: 415630 - RNA, 19 nt, Homo sapiens
  misc_RNA (1)...(19): siRNA sense strand
gaagaugauauugacuuug

SEQ ID NO: 415631 - RNA, 19 nt, Homo sapiens
  misc_RNA (1)...(19): siRNA sense strand
gagcugccaggaagaaaug

SEQ ID NO: 415632 - RNA, 19 nt, Homo sapiens
  misc_RNA (1)...(19): siRNA sense strand
caaugaauaacucuucuuc

SEQ ID NO: 415633 - RNA, 19 nt, Homo sapiens
  misc_RNA (1)...(19): siRNA sense strand
aaacacauaaugagucugu

SEQ ID NO: 415634 - RNA, 19 nt, Homo sapiens
  misc_RNA (1)...(19): siRNA sense strand
gaagguaaauacaagguua

SEQ ID NO: 415635 - RNA, 19 nt, Homo sapiens
  misc_RNA (1)...(19): siRNA sense strand
gcucuuguguccauuauua

SEQ ID NO: 415636 - RNA, 19 nt, Homo sapiens
  misc_RNA (1)...(19): siRNA sense strand
cagcaaagcuccuauacuu

SEQ ID NO: 415637 - RNA, 19 nt, Homo sapiens
  misc_RNA (1)...(19): siRNA sense strand
gagaacaacucacccaaug

SEQ ID NO: 415638 - RNA, 19 nt, Homo sapiens
  misc_RNA (1)...(19): siRNA sense strand
cgagauagaugguguuguu

SEQ ID NO: 415639 - RNA, 19 nt, Homo sapiens
  misc_RNA (1)...(19): siRNA sense strand
gaaagaaccacaaaucuca

SEQ ID NO: 415640 - RNA, 19 nt, Homo sapiens
  misc_RNA (1)...(19): siRNA sense strand
ccacaaaucucaauagaac

SEQ ID NO: 415641 - RNA, 19 nt, Homo sapiens
  misc_RNA (1)...(19): siRNA sense strand
ugaaugcugucauagcuua

SEQ ID NO: 415642 - RNA, 19 nt, Homo sapiens
  misc_RNA (1)...(19): siRNA sense strand
caacaaggacuucagcuuu

SEQ ID NO: 415643 - RNA, 19 nt, Homo sapiens
  misc_RNA (1)...(19): siRNA sense strand
gaaaagaaccagagauuaa

SEQ ID NO: 415644 - RNA, 19 nt, Homo sapiens
  misc_RNA (1)...(19): siRNA sense strand
gauagaugguguuguuuau

SEQ ID NO: 415645 - RNA, 19 nt, Homo sapiens
  misc_RNA (1)...(19): siRNA sense strand
gaggccaaguuucauauuu

SEQ ID NO: 415646 - RNA, 19 nt, Homo sapiens
  misc_RNA (1)...(19): siRNA sense strand
ucacagggaugggcauaua

SEQ ID NO: 415647 - RNA, 19 nt, Homo sapiens
  misc_RNA (1)...(19): siRNA sense strand
ggacccagauguuggcauu

SEQ ID NO: 415648 - RNA, 19 nt, Homo sapiens
  misc_RNA (1)...(19): siRNA sense strand
gaagggccguuuagguuau

SEQ ID NO: 415649 - RNA, 19 nt, Homo sapiens
  misc_RNA (1)...(19): siRNA sense strand
ccacaagcaucuaaggauu

SEQ ID NO: 415650 - RNA, 19 nt, Homo sapiens
  misc_RNA (1)...(19): siRNA sense strand
cauaagagauccagaaggu

SEQ ID NO: 415651 - RNA, 19 nt, Homo sapiens
  misc_RNA (1)...(19): siRNA sense strand
gagagaaagccaauggaua

SEQ ID NO: 415652 - RNA, 19 nt, Homo sapiens
  misc_RNA (1)...(19): siRNA sense strand
ggagagaggccaaguuuca

SEQ ID NO: 415653 - RNA, 19 nt, Homo sapiens
  misc_RNA (1)...(19): siRNA sense strand
gaaauugucccucguuaca

SEQ ID NO: 415654 - RNA, 19 nt, Homo sapiens
  misc_RNA (1)...(19): siRNA sense strand
gggcauauacaucuguuua

SEQ ID NO: 415655 - RNA, 19 nt, Homo sapiens
  misc_RNA (1)...(19): siRNA sense strand
gaaagugagugaucauggu

SEQ ID NO: 415656 - RNA, 19 nt, Homo sapiens
  misc_RNA (1)...(19): siRNA sense strand
uuacauagcaaacgagaua

SEQ ID NO: 415657 - RNA, 19 nt, Homo sapiens
  misc_RNA (1)...(19): siRNA sense strand
ggagaaagaaccacaaauc

SEQ ID NO: 415658 - RNA, 19 nt, Homo sapiens
  misc_RNA (1)...(19): siRNA sense strand
ugacaacaguccucgguuu

SEQ ID NO: 415659 - RNA, 19 nt, Homo sapiens
  misc_RNA (1)...(19): siRNA sense strand
uaagagauccagaagguaa

SEQ ID NO: 415660 - RNA, 19 nt, Homo sapiens
  misc_RNA (1)...(19): siRNA sense strand
gaaccugccgcaucuguuu

SEQ ID NO: 415661 - RNA, 19 nt, Homo sapiens
  misc_RNA (1)...(19): siRNA sense strand
gaggagagaggccaaguuu

SEQ ID NO: 415662 - RNA, 19 nt, Homo sapiens
  misc_RNA (1)...(19): siRNA sense strand
ccaaugcucaaauuacuua

SEQ ID NO: 415663 - RNA, 19 nt, Homo sapiens
  misc_RNA (1)...(19): siRNA sense strand
gaacuaaccaucgaagaga

SEQ ID NO: 415664 - RNA, 19 nt, Homo sapiens
  misc_RNA (1)...(19): siRNA sense strand
acaagcaucuaaggauuua

SEQ ID NO: 415665 - RNA, 19 nt, Homo sapiens
  misc_RNA (1)...(19): siRNA sense strand
acaauucuccuucuagaua

SEQ ID NO: 415666 - RNA, 19 nt, Homo sapiens
  misc_RNA (1)...(19): siRNA sense strand
ucagagacaucaaugacaa

SEQ ID NO: 415667 - RNA, 19 nt, Homo sapiens
  misc_RNA (1)...(19): siRNA sense strand
uagaaucugugucuuguau

SEQ ID NO: 415668 - RNA, 19 nt, Homo sapiens
  misc_RNA (1)...(19): siRNA sense strand
gagcuucuguacagccuaa

SEQ ID NO: 415669 - RNA, 19 nt, Homo sapiens
  misc_RNA (1)...(19): siRNA sense strand
gacaacaguccucgguuua

SEQ ID NO: 415670 - RNA, 19 nt, Homo sapiens
  misc_RNA (1)...(19): siRNA sense strand
guaauaagcuuggguucca

SEQ ID NO: 415671 - RNA, 19 nt, Homo sapiens
  misc_RNA (1)...(19): siRNA sense strand
ucacaauucuccuucuaga

SEQ ID NO: 415672 - RNA, 19 nt, Homo sapiens
  misc_RNA (1)...(19): siRNA sense strand
caauagaaccgacucauag

SEQ ID NO: 415673 - RNA, 19 nt, Homo sapiens
  misc_RNA (1)...(19): siRNA sense strand
aauacaagguuaacugcua

SEQ ID NO: 415674 - RNA, 19 nt, Homo sapiens
  misc_RNA (1)...(19): siRNA sense strand
gcauauacaucuguuuaag

SEQ ID NO: 415675 - RNA, 19 nt, Homo sapiens
  misc_RNA (1)...(19): siRNA sense strand
ugagggauuucaugucaaa

SEQ ID NO: 415676 - RNA, 19 nt, Homo sapiens
  misc_RNA (1)...(19): siRNA sense strand
ucagugacauuaaugacaa

SEQ ID NO: 415677 - RNA, 19 nt, Homo sapiens
  misc_RNA (1)...(19): siRNA sense strand
gaaguacagauuccacuga

SEQ ID NO: 415678 - RNA, 19 nt, Homo sapiens
  misc_RNA (1)...(19): siRNA sense strand
guagcucugucuguaauaa

SEQ ID NO: 415679 - RNA, 19 nt, Homo sapiens
  misc_RNA (1)...(19): siRNA sense strand
uaauagaacuaaccaucga

SEQ ID NO: 415680 - RNA, 19 nt, Homo sapiens
  misc_RNA (1)...(19): siRNA sense strand
ucagaaaguuccacaagca

SEQ ID NO: 415681 - RNA, 19 nt, Homo sapiens
  misc_RNA (1)...(19): siRNA sense strand
gaccaaugcucaaauuacu

SEQ ID NO: 415682 - RNA, 19 nt, Homo sapiens
  misc_RNA (1)...(19): siRNA sense strand
agagaaagccaauggauau

SEQ ID NO: 415683 - RNA, 19 nt, Homo sapiens
  misc_RNA (1)...(19): siRNA sense strand
gguagaaucugugucuugu

SEQ ID NO: 415684 - RNA, 19 nt, Homo sapiens
  misc_RNA (1)...(19): siRNA sense strand
gaagguagaaucugugucu

SEQ ID NO: 415685 - RNA, 19 nt, Homo sapiens
  misc_RNA (1)...(19): siRNA sense strand
ucaauagaaccgacucaua

SEQ ID NO: 415686 - RNA, 19 nt, Homo sapiens
  misc_RNA (1)...(19): siRNA sense strand
gaaccagagauuaauauag

SEQ ID NO: 415687 - RNA, 19 nt, Homo sapiens
  misc_RNA (1)...(19): siRNA sense strand
caacauuacuuuggaagag

SEQ ID NO: 415688 - RNA, 19 nt, Homo sapiens
  misc_RNA (1)...(19): siRNA sense strand
ccaccgagcuucuguacag

SEQ ID NO: 415689 - RNA, 19 nt, Homo sapiens
  misc_RNA (1)...(19): siRNA sense strand
caacucacccaaugccuuu

SEQ ID NO: 415690 - RNA, 19 nt, Homo sapiens
  misc_RNA (1)...(19): siRNA sense strand
guaaauacaagguuaacug

SEQ ID NO: 415691 - RNA, 19 nt, Homo sapiens
  misc_RNA (1)...(19): siRNA sense strand
guaauuaguguaacagaug

SEQ ID NO: 415692 - RNA, 19 nt, Homo sapiens
  misc_RNA (1)...(19): siRNA sense strand
caaaaccuauggacuauga

SEQ ID NO: 415693 - RNA, 19 nt, Homo sapiens
  misc_RNA (1)...(19): siRNA sense strand
ugaagggccguuuagguua

SEQ ID NO: 415694 - RNA, 19 nt, Homo sapiens
  misc_RNA (1)...(19): siRNA sense strand
ggauuuauuucaccuggau

SEQ ID NO: 415695 - RNA, 19 nt, Homo sapiens
  misc_RNA (1)...(19): siRNA sense strand
cuuaguagcucugucugua

SEQ ID NO: 415696 - RNA, 19 nt, Homo sapiens
  misc_RNA (1)...(19): siRNA sense strand
gaaccacaaaucucaauag

SEQ ID NO: 415697 - RNA, 19 nt, Homo sapiens
  misc_RNA (1)...(19): siRNA sense strand
gagaaagaaccacaaaucu

SEQ ID NO: 415698 - RNA, 19 nt, Homo sapiens
  misc_RNA (1)...(19): siRNA sense strand
ucacaggaauucugacagu

SEQ ID NO: 415699 - RNA, 19 nt, Homo sapiens
  misc_RNA (1)...(19): siRNA sense strand
ugaaaacacuggagucauu

SEQ ID NO: 415700 - RNA, 19 nt, Homo sapiens
  misc_RNA (1)...(19): siRNA sense strand
gggaaacccaggaccagua

SEQ ID NO: 415701 - RNA, 19 nt, Homo sapiens
  misc_RNA (1)...(19): siRNA sense strand
gagauuggaguaauuagug

SEQ ID NO: 415702 - RNA, 19 nt, Homo sapiens
  misc_RNA (1)...(19): siRNA sense strand
ggugagauuggaguaauua

SEQ ID NO: 415703 - RNA, 19 nt, Homo sapiens
  misc_RNA (1)...(19): siRNA sense strand
caacaguccucgguuuauc

SEQ ID NO: 415704 - RNA, 19 nt, Homo sapiens
  misc_RNA (1)...(19): siRNA sense strand
caaugauaaugcuccaauu

SEQ ID NO: 415705 - RNA, 19 nt, Homo sapiens
  misc_RNA (1)...(19): siRNA sense strand
aauugucccucguuacaua

SEQ ID NO: 415706 - RNA, 19 nt, Homo sapiens
  misc_RNA (1)...(19): siRNA sense strand
caauugcccucucuucaca

SEQ ID NO: 415707 - RNA, 19 nt, Homo sapiens
  misc_RNA (1)...(19): siRNA sense strand
caggaauacuucagguuug

SEQ ID NO: 415708 - RNA, 19 nt, Homo sapiens
  misc_RNA (1)...(19): siRNA sense strand
gccaauggauauuucuaau

SEQ ID NO: 415709 - RNA, 19 nt, Homo sapiens
  misc_RNA (1)...(19): siRNA sense strand
gcugagggcuaaagucucu

SEQ ID NO: 415710 - RNA, 19 nt, Homo sapiens
  misc_RNA (1)...(19): siRNA sense strand
acuaugagcuacagcaguu

SEQ ID NO: 415711 - RNA, 19 nt, Homo sapiens
  misc_RNA (1)...(19): siRNA sense strand
gugaagggccguuuagguu

SEQ ID NO: 415712 - RNA, 19 nt, Homo sapiens
  misc_RNA (1)...(19): siRNA sense strand
gcaguucuaugaaguagcu

SEQ ID NO: 415713 - RNA, 19 nt, Homo sapiens
  misc_RNA (1)...(19): siRNA sense strand
caauucuccuucuagauau

SEQ ID NO: 415714 - RNA, 19 nt, Homo sapiens
  misc_RNA (1)...(19): siRNA sense strand
aaaucaaugucacugugua

SEQ ID NO: 415715 - RNA, 19 nt, Homo sapiens
  misc_RNA (1)...(19): siRNA sense strand
caaagacacaggcaugaau

SEQ ID NO: 415716 - RNA, 19 nt, Homo sapiens
  misc_RNA (1)...(19): siRNA sense strand
gagaagagaaagaaaagua

SEQ ID NO: 415717 - RNA, 19 nt, Homo sapiens
  misc_RNA (1)...(19): siRNA sense strand
cuacagcaguucuaugaag

SEQ ID NO: 415718 - RNA, 19 nt, Homo sapiens
  misc_RNA (1)...(19): siRNA sense strand
ucagcugccucgggaguua

SEQ ID NO: 415719 - RNA, 19 nt, Homo sapiens
  misc_RNA (1)...(19): siRNA sense strand
uguaaucacugcucuugug

SEQ ID NO: 415720 - RNA, 19 nt, Homo sapiens
  misc_RNA (1)...(19): siRNA sense strand
ggaccgagaagagaaagaa

SEQ ID NO: 415721 - RNA, 19 nt, Homo sapiens
  misc_RNA (1)...(19): siRNA sense strand
aaacuggcaacauuacuuu

SEQ ID NO: 415722 - RNA, 19 nt, Homo sapiens
  misc_RNA (1)...(19): siRNA sense strand
ucaggaauacuucagguuu

SEQ ID NO: 415723 - RNA, 19 nt, Homo sapiens
  misc_RNA (1)...(19): siRNA sense strand
gaagccacccagagaauca

SEQ ID NO: 415724 - RNA, 19 nt, Homo sapiens
  misc_RNA (1)...(19): siRNA sense strand
guucagaccuaucgcuuac

SEQ ID NO: 415725 - RNA, 19 nt, Homo sapiens
  misc_RNA (1)...(19): siRNA sense strand
gaaucugugucuuguaugc

SEQ ID NO: 415726 - RNA, 19 nt, Homo sapiens
  misc_RNA (1)...(19): siRNA sense strand
gaggagaaagaaccacaaa

SEQ ID NO: 415727 - RNA, 19 nt, Homo sapiens
  misc_RNA (1)...(19): siRNA sense strand
aaucacaauucuccuucua

SEQ ID NO: 415728 - RNA, 19 nt, Homo sapiens
  misc_RNA (1)...(19): siRNA sense strand
ugucauagauacaggaaag

SEQ ID NO: 415729 - RNA, 19 nt, Homo sapiens
  misc_RNA (1)...(19): siRNA sense strand
gaauacuucagguuuguga

SEQ ID NO: 415730 - RNA, 19 nt, Homo sapiens
  misc_RNA (1)...(19): siRNA sense strand
guuaucaccuuacaaacca

SEQ ID NO: 415731 - RNA, 19 nt, Homo sapiens
  misc_RNA (1)...(19): siRNA sense strand
gaacuggaacccguuaaca

SEQ ID NO: 415732 - RNA, 19 nt, Homo sapiens
  misc_RNA (1)...(19): siRNA sense strand
cugaaauugucccucguua

SEQ ID NO: 415733 - RNA, 19 nt, Homo sapiens
  misc_RNA (1)...(19): siRNA sense strand
ggaccaaugcucaaauuac

SEQ ID NO: 415734 - RNA, 19 nt, Homo sapiens
  misc_RNA (1)...(19): siRNA sense strand
ccaaagagcugucagaaau

SEQ ID NO: 415735 - RNA, 19 nt, Homo sapiens
  misc_RNA (1)...(19): siRNA sense strand
ggagauugcugacaaacug

SEQ ID NO: 415736 - RNA, 19 nt, Homo sapiens
  misc_RNA (1)...(19): siRNA sense strand
ucaaugggcagaagaagua

SEQ ID NO: 415737 - RNA, 19 nt, Homo sapiens
  misc_RNA (1)...(19): siRNA sense strand
cagaagaaguaccagauuc

SEQ ID NO: 415738 - RNA, 19 nt, Homo sapiens
  misc_RNA (1)...(19): siRNA sense strand
gcagaagaaguaccagauu

SEQ ID NO: 415739 - RNA, 19 nt, Homo sapiens
  misc_RNA (1)...(19): siRNA sense strand
gaagguaucgggcuaaucg

SEQ ID NO: 415740 - RNA, 19 nt, Homo sapiens
  misc_RNA (1)...(19): siRNA sense strand
gccaccaccugaagauuug

SEQ ID NO: 415741 - RNA, 19 nt, Homo sapiens
  misc_RNA (1)...(19): siRNA sense strand
gugcagaaguccagggaau

SEQ ID NO: 415742 - RNA, 19 nt, Homo sapiens
  misc_RNA (1)...(19): siRNA sense strand
ucacagaggacgugcagaa

SEQ ID NO: 415743 - RNA, 19 nt, Homo sapiens
  misc_RNA (1)...(19): siRNA sense strand
ggacaguggugagcucagu

SEQ ID NO: 415744 - RNA, 19 nt, Homo sapiens
  misc_RNA (1)...(19): siRNA sense strand
gagcccaucugcuguuucu

SEQ ID NO: 415745 - RNA, 19 nt, Homo sapiens
  misc_RNA (1)...(19): siRNA sense strand
caggaagccucacguccaa

SEQ ID NO: 415746 - RNA, 19 nt, Homo sapiens
  misc_RNA (1)...(19): siRNA sense strand
ucugugaccucuuugaugu

SEQ ID NO: 415747 - RNA, 19 nt, Homo sapiens
  misc_RNA (1)...(19): siRNA sense strand
guaucgggcuaaucgagaa

SEQ ID NO: 415748 - RNA, 19 nt, Homo sapiens
  misc_RNA (1)...(19): siRNA sense strand
gaguugauguccucagaag

SEQ ID NO: 415749 - RNA, 19 nt, Homo sapiens
  misc_RNA (1)...(19): siRNA sense strand
gaagccucacguccaaaua

SEQ ID NO: 415750 - RNA, 19 nt, Homo sapiens
  misc_RNA (1)...(19): siRNA sense strand
gauguccucagaaguguuu

SEQ ID NO: 415751 - RNA, 19 nt, Homo sapiens
  misc_RNA (1)...(19): siRNA sense strand
gagugugaguggucccauu

SEQ ID NO: 415752 - RNA, 19 nt, Homo sapiens
  misc_RNA (1)...(19): siRNA sense strand
cgggagaccacgauuauau

SEQ ID NO: 415753 - RNA, 19 nt, Homo sapiens
  misc_RNA (1)...(19): siRNA sense strand
caacccuucuaccuccuuu

SEQ ID NO: 415754 - RNA, 19 nt, Homo sapiens
  misc_RNA (1)...(19): siRNA sense strand
gcagcgggagcaagaacua

SEQ ID NO: 415755 - RNA, 19 nt, Homo sapiens
  misc_RNA (1)...(19): siRNA sense strand
cggcggauuuacgacauua

SEQ ID NO: 415756 - RNA, 19 nt, Homo sapiens
  misc_RNA (1)...(19): siRNA sense strand
ggacugcucaccaccaagu

SEQ ID NO: 415757 - RNA, 19 nt, Homo sapiens
  misc_RNA (1)...(19): siRNA sense strand
agaccacgauuauaucuac

SEQ ID NO: 415758 - RNA, 19 nt, Homo sapiens
  misc_RNA (1)...(19): siRNA sense strand
ggaagccucacguccaaau

SEQ ID NO: 415759 - RNA, 19 nt, Homo sapiens
  misc_RNA (1)...(19): siRNA sense strand
aaagagcugucagaaaucu

SEQ ID NO: 415760 - RNA, 19 nt, Homo sapiens
  misc_RNA (1)...(19): siRNA sense strand
uggccuacgucacucauga

SEQ ID NO: 415761 - RNA, 19 nt, Homo sapiens
  misc_RNA (1)...(19): siRNA sense strand
ggauuuacgacauuaccaa

SEQ ID NO: 415762 - RNA, 19 nt, Homo sapiens
  misc_RNA (1)...(19): siRNA sense strand
guugauguccucagaagug

SEQ ID NO: 415763 - RNA, 19 nt, Homo sapiens
  misc_RNA (1)...(19): siRNA sense strand
cagaggacgugcagaacag

SEQ ID NO: 415764 - RNA, 19 nt, Homo sapiens
  misc_RNA (1)...(19): siRNA sense strand
ggagaccacgauuauaucu

SEQ ID NO: 415765 - RNA, 19 nt, Homo sapiens
  misc_RNA (1)...(19): siRNA sense strand
gagaccacgauuauaucua

SEQ ID NO: 415766 - RNA, 19 nt, Homo sapiens
  misc_RNA (1)...(19): siRNA sense strand
gcagaaguccagggaaugg

SEQ ID NO: 415767 - RNA, 19 nt, Homo sapiens
  misc_RNA (1)...(19): siRNA sense strand
caaagagcugucagaaauc

SEQ ID NO: 415768 - RNA, 19 nt, Homo sapiens
  misc_RNA (1)...(19): siRNA sense strand
agaagaaguaccagauuca

SEQ ID NO: 415769 - RNA, 19 nt, Homo sapiens
  misc_RNA (1)...(19): siRNA sense strand
ggaguugauguccucagaa

SEQ ID NO: 415770 - RNA, 19 nt, Homo sapiens
  misc_RNA (1)...(19): siRNA sense strand
cccgggagauugcugacaa

SEQ ID NO: 415771 - RNA, 19 nt, Homo sapiens
  misc_RNA (1)...(19): siRNA sense strand
cggagcugcuggaggaguu

SEQ ID NO: 415772 - RNA, 19 nt, Homo sapiens
  misc_RNA (1)...(19): siRNA sense strand
agagcugucagaaaucuuu

SEQ ID NO: 415773 - RNA, 19 nt, Homo sapiens
  misc_RNA (1)...(19): siRNA sense strand
cagaugcuuugcuggagau

SEQ ID NO: 415774 - RNA, 19 nt, Homo sapiens
  misc_RNA (1)...(19): siRNA sense strand
gagauugcugacaaacuga

SEQ ID NO: 415775 - RNA, 19 nt, Homo sapiens
  misc_RNA (1)...(19): siRNA sense strand
agagugaaggugucuguga

SEQ ID NO: 415776 - RNA, 19 nt, Homo sapiens
  misc_RNA (1)...(19): siRNA sense strand
gggagaccacgauuauauc

SEQ ID NO: 415777 - RNA, 19 nt, Homo sapiens
  misc_RNA (1)...(19): siRNA sense strand
ccgggagauugcugacaaa

SEQ ID NO: 415778 - RNA, 19 nt, Homo sapiens
  misc_RNA (1)...(19): siRNA sense strand
ugaugugccuguucucaac

SEQ ID NO: 415779 - RNA, 19 nt, Homo sapiens
  misc_RNA (1)...(19): siRNA sense strand
ggcagaagaaguaccagau

SEQ ID NO: 415780 - RNA, 19 nt, Homo sapiens
  misc_RNA (1)...(19): siRNA sense strand
cccaaagagcugucagaaa

SEQ ID NO: 415781 - RNA, 19 nt, Homo sapiens
  misc_RNA (1)...(19): siRNA sense strand
ugccaccaccugaagauuu

SEQ ID NO: 415782 - RNA, 19 nt, Homo sapiens
  misc_RNA (1)...(19): siRNA sense strand
ccacgauuauaucuacaac

SEQ ID NO: 415783 - RNA, 19 nt, Homo sapiens
  misc_RNA (1)...(19): siRNA sense strand
ccaaguucgugucccuucu

SEQ ID NO: 415784 - RNA, 19 nt, Homo sapiens
  misc_RNA (1)...(19): siRNA sense strand
gauuuacgacauuaccaau

SEQ ID NO: 415785 - RNA, 19 nt, Homo sapiens
  misc_RNA (1)...(19): siRNA sense strand
gcccugggacugauagcaa

SEQ ID NO: 415786 - RNA, 19 nt, Homo sapiens
  misc_RNA (1)...(19): siRNA sense strand
caaccuggacgagagugaa

SEQ ID NO: 415787 - RNA, 19 nt, Homo sapiens
  misc_RNA (1)...(19): siRNA sense strand
gaccacgauuauaucuaca

SEQ ID NO: 415788 - RNA, 19 nt, Homo sapiens
  misc_RNA (1)...(19): siRNA sense strand
acuccaagccggcacgaaa

SEQ ID NO: 415789 - RNA, 19 nt, Homo sapiens
  misc_RNA (1)...(19): siRNA sense strand
ggacccaacccuucuaccu

SEQ ID NO: 415790 - RNA, 19 nt, Homo sapiens
  misc_RNA (1)...(19): siRNA sense strand
uaacacagcugcucagaaa

SEQ ID NO: 415791 - RNA, 19 nt, Homo sapiens
  misc_RNA (1)...(19): siRNA sense strand
ggacagagcugaggcagaa

SEQ ID NO: 415792 - RNA, 19 nt, Homo sapiens
  misc_RNA (1)...(19): siRNA sense strand
ccaagaaggucauucagua

SEQ ID NO: 415793 - RNA, 19 nt, Homo sapiens
  misc_RNA (1)...(19): siRNA sense strand
gcaacgagcuggccacaga

SEQ ID NO: 415794 - RNA, 19 nt, Homo sapiens
  misc_RNA (1)...(19): siRNA sense strand
ucaagaaacuggaggauga

SEQ ID NO: 415795 - RNA, 19 nt, Homo sapiens
  misc_RNA (1)...(19): siRNA sense strand
gagcagcuauccauauuga

SEQ ID NO: 415796 - RNA, 19 nt, Homo sapiens
  misc_RNA (1)...(19): siRNA sense strand
ggagaggauuagugacuua

SEQ ID NO: 415797 - RNA, 19 nt, Homo sapiens
  misc_RNA (1)...(19): siRNA sense strand
ggauauagcuggauuugag

SEQ ID NO: 415798 - RNA, 19 nt, Homo sapiens
  misc_RNA (1)...(19): siRNA sense strand
ggacguagaguuauugaaa

SEQ ID NO: 415799 - RNA, 19 nt, Homo sapiens
  misc_RNA (1)...(19): siRNA sense strand
gaggaaauuugaucaguug

SEQ ID NO: 415800 - RNA, 19 nt, Homo sapiens
  misc_RNA (1)...(19): siRNA sense strand
acaagaagcugaaggaaau

SEQ ID NO: 415801 - RNA, 19 nt, Homo sapiens
  misc_RNA (1)...(19): siRNA sense strand
aaacaucucuuccaaauac

SEQ ID NO: 415802 - RNA, 19 nt, Homo sapiens
  misc_RNA (1)...(19): siRNA sense strand
gaugagaaguuccucuuug

SEQ ID NO: 415803 - RNA, 19 nt, Homo sapiens
  misc_RNA (1)...(19): siRNA sense strand
ccaagucgcugaagcagaa

SEQ ID NO: 415804 - RNA, 19 nt, Homo sapiens
  misc_RNA (1)...(19): siRNA sense strand
agagacagcuucacgagua

SEQ ID NO: 415805 - RNA, 19 nt, Homo sapiens
  misc_RNA (1)...(19): siRNA sense strand
caacgaagccuccgugcua

SEQ ID NO: 415806 - RNA, 19 nt, Homo sapiens
  misc_RNA (1)...(19): siRNA sense strand
gcucaaagccgaaauggaa

SEQ ID NO: 415807 - RNA, 19 nt, Homo sapiens
  misc_RNA (1)...(19): siRNA sense strand
uuaaggagcuggaacagaa

SEQ ID NO: 415808 - RNA, 19 nt, Homo sapiens
  misc_RNA (1)...(19): siRNA sense strand
gaaccaaggccagugaaua

SEQ ID NO: 415809 - RNA, 19 nt, Homo sapiens
  misc_RNA (1)...(19): siRNA sense strand
gaacaaagcccuggacaag

SEQ ID NO: 415810 - RNA, 19 nt, Homo sapiens
  misc_RNA (1)...(19): siRNA sense strand
gggcggagcucaaugacaa

SEQ ID NO: 415811 - RNA, 19 nt, Homo sapiens
  misc_RNA (1)...(19): siRNA sense strand
gaagaacaaugcccugaag

SEQ ID NO: 415812 - RNA, 19 nt, Homo sapiens
  misc_RNA (1)...(19): siRNA sense strand
ccaaagagaaugagaagaa

SEQ ID NO: 415813 - RNA, 19 nt, Homo sapiens
  misc_RNA (1)...(19): siRNA sense strand
ccaagcagcucaaggacaa

SEQ ID NO: 415814 - RNA, 19 nt, Homo sapiens
  misc_RNA (1)...(19): siRNA sense strand
ccauuaagcuggccaagga

SEQ ID NO: 415815 - RNA, 19 nt, Homo sapiens
  misc_RNA (1)...(19): siRNA sense strand
ugagagggcucgcaaacaa

SEQ ID NO: 415816 - RNA, 19 nt, Homo sapiens
  misc_RNA (1)...(19): siRNA sense strand
caaagagaaugagaagaaa

SEQ ID NO: 415817 - RNA, 19 nt, Homo sapiens
  misc_RNA (1)...(19): siRNA sense strand
agaagaagcugcaggacuu

SEQ ID NO: 415818 - RNA, 19 nt, Homo sapiens
  misc_RNA (1)...(19): siRNA sense strand
gagccaacauugagaccua

SEQ ID NO: 415819 - RNA, 19 nt, Homo sapiens
  misc_RNA (1)...(19): siRNA sense strand
gaucaaagcccuggaacuu

SEQ ID NO: 415820 - RNA, 19 nt, Homo sapiens
  misc_RNA (1)...(19): siRNA sense strand
cagaggagcuggccaguag

SEQ ID NO: 415821 - RNA, 19 nt, Homo sapiens
  misc_RNA (1)...(19): siRNA sense strand
gaagaaggcccuggaugaa

SEQ ID NO: 415822 - RNA, 19 nt, Homo sapiens
  misc_RNA (1)...(19): siRNA sense strand
cagagcagcuugagcaguu

SEQ ID NO: 415823 - RNA, 19 nt, Homo sapiens
  misc_RNA (1)...(19): siRNA sense strand
gcaagaaagacacaaguau

SEQ ID NO: 415824 - RNA, 19 nt, Homo sapiens
  misc_RNA (1)...(19): siRNA sense strand
gcacggcccagaagaauga

SEQ ID NO: 415825 - RNA, 19 nt, Homo sapiens
  misc_RNA (1)...(19): siRNA sense strand
aaacaagcaugaaucuaug

SEQ ID NO: 415826 - RNA, 19 nt, Homo sapiens
  misc_RNA (1)...(19): siRNA sense strand
ggaauuaaugugacagauu

SEQ ID NO: 415827 - RNA, 19 nt, Homo sapiens
  misc_RNA (1)...(19): siRNA sense strand
ggaggcaacugcagagaca

SEQ ID NO: 415828 - RNA, 19 nt, Homo sapiens
  misc_RNA (1)...(19): siRNA sense strand
ucacagggaugcuuaacga

SEQ ID NO: 415829 - RNA, 19 nt, Homo sapiens
  misc_RNA (1)...(19): siRNA sense strand
gaagauggcccagcagaug

SEQ ID NO: 415830 - RNA, 19 nt, Homo sapiens
  misc_RNA (1)...(19): siRNA sense strand
gagaggacauuccacaucu

SEQ ID NO: 415831 - RNA, 19 nt, Homo sapiens
  misc_RNA (1)...(19): siRNA sense strand
gaugaaaucgcucagaaga

SEQ ID NO: 415832 - RNA, 19 nt, Homo sapiens
  misc_RNA (1)...(19): siRNA sense strand
cugggaagguggacuauaa

SEQ ID NO: 415833 - RNA, 19 nt, Homo sapiens
  misc_RNA (1)...(19): siRNA sense strand
auaaacaccugcccaucua

SEQ ID NO: 415834 - RNA, 19 nt, Homo sapiens
  misc_RNA (1)...(19): siRNA sense strand
gaacuggaagugcggcuaa

SEQ ID NO: 415835 - RNA, 19 nt, Homo sapiens
  misc_RNA (1)...(19): siRNA sense strand
guacuucucagggcuaaua

SEQ ID NO: 415836 - RNA, 19 nt, Homo sapiens
  misc_RNA (1)...(19): siRNA sense strand
gcaggaggccagagagaaa

SEQ ID NO: 415837 - RNA, 19 nt, Homo sapiens
  misc_RNA (1)...(19): siRNA sense strand
uccacaagcugcagaauga

SEQ ID NO: 415838 - RNA, 19 nt, Homo sapiens
  misc_RNA (1)...(19): siRNA sense strand
ugacagauuucaccagauc

SEQ ID NO: 415839 - RNA, 19 nt, Homo sapiens
  misc_RNA (1)...(19): siRNA sense strand
gcaagauggccgagcagua

SEQ ID NO: 415840 - RNA, 19 nt, Homo sapiens
  misc_RNA (1)...(19): siRNA sense strand
gacaagaagcugaaggaaa

SEQ ID NO: 415841 - RNA, 19 nt, Homo sapiens
  misc_RNA (1)...(19): siRNA sense strand
ugaagaaggcccuggauga

SEQ ID NO: 415842 - RNA, 19 nt, Homo sapiens
  misc_RNA (1)...(19): siRNA sense strand
gagcgagauuugaagauca

SEQ ID NO: 415843 - RNA, 19 nt, Homo sapiens
  misc_RNA (1)...(19): siRNA sense strand
cgacaacuccucacgauuc

SEQ ID NO: 415844 - RNA, 19 nt, Homo sapiens
  misc_RNA (1)...(19): siRNA sense strand
gaaggucacgguugggaaa

SEQ ID NO: 415845 - RNA, 19 nt, Homo sapiens
  misc_RNA (1)...(19): siRNA sense strand
acaaugcccugaagaagau

SEQ ID NO: 415846 - RNA, 19 nt, Homo sapiens
  misc_RNA (1)...(19): siRNA sense strand
uggaugaucagaacaauaa

SEQ ID NO: 415847 - RNA, 19 nt, Homo sapiens
  misc_RNA (1)...(19): siRNA sense strand
gaggagauacugcaugaga

SEQ ID NO: 415848 - RNA, 19 nt, Homo sapiens
  misc_RNA (1)...(19): siRNA sense strand
gugccuggcugaccaagaa

SEQ ID NO: 415849 - RNA, 19 nt, Homo sapiens
  misc_RNA (1)...(19): siRNA sense strand
gaacaaugcccugaagaag

SEQ ID NO: 415850 - RNA, 19 nt, Homo sapiens
  misc_RNA (1)...(19): siRNA sense strand
cgaccugguuguugauuug

SEQ ID NO: 415851 - RNA, 19 nt, Homo sapiens
  misc_RNA (1)...(19): siRNA sense strand
agaaggcccuggaugaaga

SEQ ID NO: 415852 - RNA, 19 nt, Homo sapiens
  misc_RNA (1)...(19): siRNA sense strand
ucucagggcuaauauauac

SEQ ID NO: 415853 - RNA, 19 nt, Homo sapiens
  misc_RNA (1)...(19): siRNA sense strand
ucgcagagcucaagaugca

SEQ ID NO: 415854 - RNA, 19 nt, Homo sapiens
  misc_RNA (1)...(19): siRNA sense strand
ccaaggagcggcagcagaa

SEQ ID NO: 415855 - RNA, 19 nt, Homo sapiens
  misc_RNA (1)...(19): siRNA sense strand
ggagcgagauuugaagauc

SEQ ID NO: 415856 - RNA, 19 nt, Homo sapiens
  misc_RNA (1)...(19): siRNA sense strand
ggcgagaugugguacagaa

SEQ ID NO: 415857 - RNA, 19 nt, Homo sapiens
  misc_RNA (1)...(19): siRNA sense strand
gcaagaagaggcacgagau

SEQ ID NO: 415858 - RNA, 19 nt, Homo sapiens
  misc_RNA (1)...(19): siRNA sense strand
gcaaauucauccgcaucaa

SEQ ID NO: 415859 - RNA, 19 nt, Homo sapiens
  misc_RNA (1)...(19): siRNA sense strand
aagcggaccucgagaagga

SEQ ID NO: 415860 - RNA, 19 nt, Homo sapiens
  misc_RNA (1)...(19): siRNA sense strand
ugaaaucgcucagaagaac

SEQ ID NO: 415861 - RNA, 19 nt, Homo sapiens
  misc_RNA (1)...(19): siRNA sense strand
agaugcagcuggccaagaa

SEQ ID NO: 415862 - RNA, 19 nt, Homo sapiens
  misc_RNA (1)...(19): siRNA sense strand
ggacauuccacaucuuuua

SEQ ID NO: 415863 - RNA, 19 nt, Homo sapiens
  misc_RNA (1)...(19): siRNA sense strand
gaggacauuccacaucuuu

SEQ ID NO: 415864 - RNA, 19 nt, Homo sapiens
  misc_RNA (1)...(19): siRNA sense strand
gaaaguuugccaccucaug

SEQ ID NO: 415865 - RNA, 19 nt, Homo sapiens
  misc_RNA (1)...(19): siRNA sense strand
agcaggagguggaacauaa

SEQ ID NO: 415866 - RNA, 19 nt, Homo sapiens
  misc_RNA (1)...(19): siRNA sense strand
uggaggagauacugcauga

SEQ ID NO: 415867 - RNA, 19 nt, Homo sapiens
  misc_RNA (1)...(19): siRNA sense strand
guacagaaagcucagacaa

SEQ ID NO: 415868 - RNA, 19 nt, Homo sapiens
  misc_RNA (1)...(19): siRNA sense strand
gagcagcugugcaucaacu

SEQ ID NO: 415869 - RNA, 19 nt, Homo sapiens
  misc_RNA (1)...(19): siRNA sense strand
ggaaauuugaucaguuguu

SEQ ID NO: 415870 - RNA, 19 nt, Homo sapiens
  misc_RNA (1)...(19): siRNA sense strand
gaccagauggccaagauga

SEQ ID NO: 415871 - RNA, 19 nt, Homo sapiens
  misc_RNA (1)...(19): siRNA sense strand
ugacuucccugcucaaugc

SEQ ID NO: 415872 - RNA, 19 nt, Homo sapiens
  misc_RNA (1)...(19): siRNA sense strand
caagaaagacacaaguauc

SEQ ID NO: 415873 - RNA, 19 nt, Homo sapiens
  misc_RNA (1)...(19): siRNA sense strand
ggagcucaaugacaaaguc

SEQ ID NO: 415874 - RNA, 19 nt, Homo sapiens
  misc_RNA (1)...(19): siRNA sense strand
gaggagcagcuauccauau

SEQ ID NO: 415875 - RNA, 19 nt, Homo sapiens
  misc_RNA (1)...(19): siRNA sense strand
aaccaaggccagugaauaa

SEQ ID NO: 415876 - RNA, 19 nt, Homo sapiens
  misc_RNA (1)...(19): siRNA sense strand
gacgcagacuucaauggaa

SEQ ID NO: 415877 - RNA, 19 nt, Homo sapiens
  misc_RNA (1)...(19): siRNA sense strand
gaggugaacgcacucaaga

SEQ ID NO: 415878 - RNA, 19 nt, Homo sapiens
  misc_RNA (1)...(19): siRNA sense strand
gagacagcuucacgaguau

SEQ ID NO: 415879 - RNA, 19 nt, Homo sapiens
  misc_RNA (1)...(19): siRNA sense strand
gcagaagggccaacucagu

SEQ ID NO: 415880 - RNA, 19 nt, Homo sapiens
  misc_RNA (1)...(19): siRNA sense strand
agaggaaauuugaucaguu

SEQ ID NO: 415881 - RNA, 19 nt, Homo sapiens
  misc_RNA (1)...(19): siRNA sense strand
ggagauacugcaugagaug

SEQ ID NO: 415882 - RNA, 19 nt, Homo sapiens
  misc_RNA (1)...(19): siRNA sense strand
gaugugucguggcuacuug

SEQ ID NO: 415883 - RNA, 19 nt, Homo sapiens
  misc_RNA (1)...(19): siRNA sense strand
gcgagggcaucgaguggaa

SEQ ID NO: 415884 - RNA, 19 nt, Homo sapiens
  misc_RNA (1)...(19): siRNA sense strand
gaaacuggaggaugagauc

SEQ ID NO: 415885 - RNA, 19 nt, Homo sapiens
  misc_RNA (1)...(19): siRNA sense strand
ugaacgcacucaagagcaa

SEQ ID NO: 415886 - RNA, 19 nt, Homo sapiens
  misc_RNA (1)...(19): siRNA sense strand
gaagcugaaggaaaucuug

SEQ ID NO: 415887 - RNA, 19 nt, Homo sapiens
  misc_RNA (1)...(19): siRNA sense strand
ggaagacgagcgaaagcaa

SEQ ID NO: 415888 - RNA, 19 nt, Homo sapiens
  misc_RNA (1)...(19): siRNA sense strand
agaagagguuccagaagga

SEQ ID NO: 415889 - RNA, 19 nt, Homo sapiens
  misc_RNA (1)...(19): siRNA sense strand
gcuaauauauacguacucu

SEQ ID NO: 415890 - RNA, 19 nt, Homo sapiens
  misc_RNA (1)...(19): siRNA sense strand
uaacacagcugcucagaaa

SEQ ID NO: 415891 - RNA, 19 nt, Homo sapiens
  misc_RNA (1)...(19): siRNA sense strand
ggacagagcugaggcagaa

SEQ ID NO: 415892 - RNA, 19 nt, Homo sapiens
  misc_RNA (1)...(19): siRNA sense strand
ccaagaaggucauucagua

SEQ ID NO: 415893 - RNA, 19 nt, Homo sapiens
  misc_RNA (1)...(19): siRNA sense strand
gcaacgagcuggccacaga

SEQ ID NO: 415894 - RNA, 19 nt, Homo sapiens
  misc_RNA (1)...(19): siRNA sense strand
ucaagaaacuggaggauga

SEQ ID NO: 415895 - RNA, 19 nt, Homo sapiens
  misc_RNA (1)...(19): siRNA sense strand
gagcagcuauccauauuga

SEQ ID NO: 415896 - RNA, 19 nt, Homo sapiens
  misc_RNA (1)...(19): siRNA sense strand
ggagaggauuagugacuua

SEQ ID NO: 415897 - RNA, 19 nt, Homo sapiens
  misc_RNA (1)...(19): siRNA sense strand
ggauauagcuggauuugag

SEQ ID NO: 415898 - RNA, 19 nt, Homo sapiens
  misc_RNA (1)...(19): siRNA sense strand
gaggaaauuugaucaguug

SEQ ID NO: 415899 - RNA, 19 nt, Homo sapiens
  misc_RNA (1)...(19): siRNA sense strand
acaagaagcugaaggaaau

SEQ ID NO: 415900 - RNA, 19 nt, Homo sapiens
  misc_RNA (1)...(19): siRNA sense strand
aaacaucucuuccaaauac

SEQ ID NO: 415901 - RNA, 19 nt, Homo sapiens
  misc_RNA (1)...(19): siRNA sense strand
gaugagaaguuccucuuug

SEQ ID NO: 415902 - RNA, 19 nt, Homo sapiens
  misc_RNA (1)...(19): siRNA sense strand
ccaagucgcugaagcagaa

SEQ ID NO: 415903 - RNA, 19 nt, Homo sapiens
  misc_RNA (1)...(19): siRNA sense strand
agagacagcuucacgagua

SEQ ID NO: 415904 - RNA, 19 nt, Homo sapiens
  misc_RNA (1)...(19): siRNA sense strand
caacgaagccuccgugcua

SEQ ID NO: 415905 - RNA, 19 nt, Homo sapiens
  misc_RNA (1)...(19): siRNA sense strand
gcucaaagccgaaauggaa

SEQ ID NO: 415906 - RNA, 19 nt, Homo sapiens
  misc_RNA (1)...(19): siRNA sense strand
uuaaggagcuggaacagaa

SEQ ID NO: 415907 - RNA, 19 nt, Homo sapiens
  misc_RNA (1)...(19): siRNA sense strand
gaacaaagcccuggacaag

SEQ ID NO: 415908 - RNA, 19 nt, Homo sapiens
  misc_RNA (1)...(19): siRNA sense strand
gggcggagcucaaugacaa

SEQ ID NO: 415909 - RNA, 19 nt, Homo sapiens
  misc_RNA (1)...(19): siRNA sense strand
gaagaacaaugcccugaag

SEQ ID NO: 415910 - RNA, 19 nt, Homo sapiens
  misc_RNA (1)...(19): siRNA sense strand
ccaaagagaaugagaagaa

SEQ ID NO: 415911 - RNA, 19 nt, Homo sapiens
  misc_RNA (1)...(19): siRNA sense strand
ccaagcagcucaaggacaa

SEQ ID NO: 415912 - RNA, 19 nt, Homo sapiens
  misc_RNA (1)...(19): siRNA sense strand
ccauuaagcuggccaagga

SEQ ID NO: 415913 - RNA, 19 nt, Homo sapiens
  misc_RNA (1)...(19): siRNA sense strand
ugagagggcucgcaaacaa

SEQ ID NO: 415914 - RNA, 19 nt, Homo sapiens
  misc_RNA (1)...(19): siRNA sense strand
caaagagaaugagaagaaa

SEQ ID NO: 415915 - RNA, 19 nt, Homo sapiens
  misc_RNA (1)...(19): siRNA sense strand
agaagaagcugcaggacuu

SEQ ID NO: 415916 - RNA, 19 nt, Homo sapiens
  misc_RNA (1)...(19): siRNA sense strand
gagccaacauugagaccua

SEQ ID NO: 415917 - RNA, 19 nt, Homo sapiens
  misc_RNA (1)...(19): siRNA sense strand
gaucaaagcccuggaacuu

SEQ ID NO: 415918 - RNA, 19 nt, Homo sapiens
  misc_RNA (1)...(19): siRNA sense strand
cagaggagcuggccaguag

SEQ ID NO: 415919 - RNA, 19 nt, Homo sapiens
  misc_RNA (1)...(19): siRNA sense strand
gaagaaggcccuggaugaa

SEQ ID NO: 415920 - RNA, 19 nt, Homo sapiens
  misc_RNA (1)...(19): siRNA sense strand
cagagcagcuugagcaguu

SEQ ID NO: 415921 - RNA, 19 nt, Homo sapiens
  misc_RNA (1)...(19): siRNA sense strand
gcaagaaagacacaaguau

SEQ ID NO: 415922 - RNA, 19 nt, Homo sapiens
  misc_RNA (1)...(19): siRNA sense strand
gcacggcccagaagaauga

SEQ ID NO: 415923 - RNA, 19 nt, Homo sapiens
  misc_RNA (1)...(19): siRNA sense strand
aaacaagcaugaaucuaug

SEQ ID NO: 415924 - RNA, 19 nt, Homo sapiens
  misc_RNA (1)...(19): siRNA sense strand
ggaauuaaugugacagauu

SEQ ID NO: 415925 - RNA, 19 nt, Homo sapiens
  misc_RNA (1)...(19): siRNA sense strand
ggaggcaacugcagagaca

SEQ ID NO: 415926 - RNA, 19 nt, Homo sapiens
  misc_RNA (1)...(19): siRNA sense strand
ucacagggaugcuuaacga

SEQ ID NO: 415927 - RNA, 19 nt, Homo sapiens
  misc_RNA (1)...(19): siRNA sense strand
gaagauggcccagcagaug

SEQ ID NO: 415928 - RNA, 19 nt, Homo sapiens
  misc_RNA (1)...(19): siRNA sense strand
gagaggacauuccacaucu

SEQ ID NO: 415929 - RNA, 19 nt, Homo sapiens
  misc_RNA (1)...(19): siRNA sense strand
gaugaaaucgcucagaaga

SEQ ID NO: 415930 - RNA, 19 nt, Homo sapiens
  misc_RNA (1)...(19): siRNA sense strand
cugggaagguggacuauaa

SEQ ID NO: 415931 - RNA, 19 nt, Homo sapiens
  misc_RNA (1)...(19): siRNA sense strand
auaaacaccugcccaucua

SEQ ID NO: 415932 - RNA, 19 nt, Homo sapiens
  misc_RNA (1)...(19): siRNA sense strand
gaacuggaagugcggcuaa

SEQ ID NO: 415933 - RNA, 19 nt, Homo sapiens
  misc_RNA (1)...(19): siRNA sense strand
guacuucucagggcuaaua

SEQ ID NO: 415934 - RNA, 19 nt, Homo sapiens
  misc_RNA (1)...(19): siRNA sense strand
gcaggaggccagagagaaa

SEQ ID NO: 415935 - RNA, 19 nt, Homo sapiens
  misc_RNA (1)...(19): siRNA sense strand
uccacaagcugcagaauga

SEQ ID NO: 415936 - RNA, 19 nt, Homo sapiens
  misc_RNA (1)...(19): siRNA sense strand
ugacagauuucaccagauc

SEQ ID NO: 415937 - RNA, 19 nt, Homo sapiens
  misc_RNA (1)...(19): siRNA sense strand
gcaagauggccgagcagua

SEQ ID NO: 415938 - RNA, 19 nt, Homo sapiens
  misc_RNA (1)...(19): siRNA sense strand
gacaagaagcugaaggaaa

SEQ ID NO: 415939 - RNA, 19 nt, Homo sapiens
  misc_RNA (1)...(19): siRNA sense strand
ugaagaaggcccuggauga

SEQ ID NO: 415940 - RNA, 19 nt, Homo sapiens
  misc_RNA (1)...(19): siRNA sense strand
gagcgagauuugaagauca

SEQ ID NO: 415941 - RNA, 19 nt, Homo sapiens
  misc_RNA (1)...(19): siRNA sense strand
cgacaacuccucacgauuc

SEQ ID NO: 415942 - RNA, 19 nt, Homo sapiens
  misc_RNA (1)...(19): siRNA sense strand
gaaggucacgguugggaaa

SEQ ID NO: 415943 - RNA, 19 nt, Homo sapiens
  misc_RNA (1)...(19): siRNA sense strand
acaaugcccugaagaagau

SEQ ID NO: 415944 - RNA, 19 nt, Homo sapiens
  misc_RNA (1)...(19): siRNA sense strand
uggaugaucagaacaauaa

SEQ ID NO: 415945 - RNA, 19 nt, Homo sapiens
  misc_RNA (1)...(19): siRNA sense strand
gaggagauacugcaugaga

SEQ ID NO: 415946 - RNA, 19 nt, Homo sapiens
  misc_RNA (1)...(19): siRNA sense strand
gugccuggcugaccaagaa

SEQ ID NO: 415947 - RNA, 19 nt, Homo sapiens
  misc_RNA (1)...(19): siRNA sense strand
gaacaaugcccugaagaag

SEQ ID NO: 415948 - RNA, 19 nt, Homo sapiens
  misc_RNA (1)...(19): siRNA sense strand
cgaccugguuguugauuug

SEQ ID NO: 415949 - RNA, 19 nt, Homo sapiens
  misc_RNA (1)...(19): siRNA sense strand
agaaggcccuggaugaaga

SEQ ID NO: 415950 - RNA, 19 nt, Homo sapiens
  misc_RNA (1)...(19): siRNA sense strand
ucucagggcuaauauauac

SEQ ID NO: 415951 - RNA, 19 nt, Homo sapiens
  misc_RNA (1)...(19): siRNA sense strand
ucgcagagcucaagaugca

SEQ ID NO: 415952 - RNA, 19 nt, Homo sapiens
  misc_RNA (1)...(19): siRNA sense strand
ccaaggagcggcagcagaa

SEQ ID NO: 415953 - RNA, 19 nt, Homo sapiens
  misc_RNA (1)...(19): siRNA sense strand
ggagcgagauuugaagauc

SEQ ID NO: 415954 - RNA, 19 nt, Homo sapiens
  misc_RNA (1)...(19): siRNA sense strand
ggcgagaugugguacagaa

SEQ ID NO: 415955 - RNA, 19 nt, Homo sapiens
  misc_RNA (1)...(19): siRNA sense strand
gcaagaagaggcacgagau

SEQ ID NO: 415956 - RNA, 19 nt, Homo sapiens
  misc_RNA (1)...(19): siRNA sense strand
gcaaauucauccgcaucaa

SEQ ID NO: 415957 - RNA, 19 nt, Homo sapiens
  misc_RNA (1)...(19): siRNA sense strand
aagcggaccucgagaagga

SEQ ID NO: 415958 - RNA, 19 nt, Homo sapiens
  misc_RNA (1)...(19): siRNA sense strand
ugaaaucgcucagaagaac

SEQ ID NO: 415959 - RNA, 19 nt, Homo sapiens
  misc_RNA (1)...(19): siRNA sense strand
agaugcagcuggccaagaa

SEQ ID NO: 415960 - RNA, 19 nt, Homo sapiens
  misc_RNA (1)...(19): siRNA sense strand
ggacauuccacaucuuuua

SEQ ID NO: 415961 - RNA, 19 nt, Homo sapiens
  misc_RNA (1)...(19): siRNA sense strand
gaggacauuccacaucuuu

SEQ ID NO: 415962 - RNA, 19 nt, Homo sapiens
  misc_RNA (1)...(19): siRNA sense strand
gaaaguuugccaccucaug

SEQ ID NO: 415963 - RNA, 19 nt, Homo sapiens
  misc_RNA (1)...(19): siRNA sense strand
agcaggagguggaacauaa

SEQ ID NO: 415964 - RNA, 19 nt, Homo sapiens
  misc_RNA (1)...(19): siRNA sense strand
uggaggagauacugcauga

SEQ ID NO: 415965 - RNA, 19 nt, Homo sapiens
  misc_RNA (1)...(19): siRNA sense strand
guacagaaagcucagacaa

SEQ ID NO: 415966 - RNA, 19 nt, Homo sapiens
  misc_RNA (1)...(19): siRNA sense strand
gagcagcugugcaucaacu

SEQ ID NO: 415967 - RNA, 19 nt, Homo sapiens
  misc_RNA (1)...(19): siRNA sense strand
ggaaauuugaucaguuguu

SEQ ID NO: 415968 - RNA, 19 nt, Homo sapiens
  misc_RNA (1)...(19): siRNA sense strand
gaccagauggccaagauga

SEQ ID NO: 415969 - RNA, 19 nt, Homo sapiens
  misc_RNA (1)...(19): siRNA sense strand
ugacuucccugcucaaugc

SEQ ID NO: 415970 - RNA, 19 nt, Homo sapiens
  misc_RNA (1)...(19): siRNA sense strand
caagaaagacacaaguauc

SEQ ID NO: 415971 - RNA, 19 nt, Homo sapiens
  misc_RNA (1)...(19): siRNA sense strand
ggagcucaaugacaaaguc

SEQ ID NO: 415972 - RNA, 19 nt, Homo sapiens
  misc_RNA (1)...(19): siRNA sense strand
gaggagcagcuauccauau

SEQ ID NO: 415973 - RNA, 19 nt, Homo sapiens
  misc_RNA (1)...(19): siRNA sense strand
gaggugaacgcacucaaga

SEQ ID NO: 415974 - RNA, 19 nt, Homo sapiens
  misc_RNA (1)...(19): siRNA sense strand
gagacagcuucacgaguau

SEQ ID NO: 415975 - RNA, 19 nt, Homo sapiens
  misc_RNA (1)...(19): siRNA sense strand
gcagaagggccaacucagu

SEQ ID NO: 415976 - RNA, 19 nt, Homo sapiens
  misc_RNA (1)...(19): siRNA sense strand
agaggaaauuugaucaguu

SEQ ID NO: 415977 - RNA, 19 nt, Homo sapiens
  misc_RNA (1)...(19): siRNA sense strand
ggagauacugcaugagaug

SEQ ID NO: 415978 - RNA, 19 nt, Homo sapiens
  misc_RNA (1)...(19): siRNA sense strand
gaugugucguggcuacuug

SEQ ID NO: 415979 - RNA, 19 nt, Homo sapiens
  misc_RNA (1)...(19): siRNA sense strand
gcgagggcaucgaguggaa

SEQ ID NO: 415980 - RNA, 19 nt, Homo sapiens
  misc_RNA (1)...(19): siRNA sense strand
ggcaagaaagacacaagua

SEQ ID NO: 415981 - RNA, 19 nt, Homo sapiens
  misc_RNA (1)...(19): siRNA sense strand
ugaacgcacucaagagcaa

SEQ ID NO: 415982 - RNA, 19 nt, Homo sapiens
  misc_RNA (1)...(19): siRNA sense strand
gaagcugaaggaaaucuug

SEQ ID NO: 415983 - RNA, 19 nt, Homo sapiens
  misc_RNA (1)...(19): siRNA sense strand
ggaagacgagcgaaagcaa

SEQ ID NO: 415984 - RNA, 19 nt, Homo sapiens
  misc_RNA (1)...(19): siRNA sense strand
agaagagguuccagaagga

SEQ ID NO: 415985 - RNA, 19 nt, Homo sapiens
  misc_RNA (1)...(19): siRNA sense strand
gaaacuggaggaugagauc

SEQ ID NO: 415986 - RNA, 19 nt, Homo sapiens
  misc_RNA (1)...(19): siRNA sense strand
gcuaauauauacguacucu

SEQ ID NO: 415987 - RNA, 19 nt, Homo sapiens
  misc_RNA (1)...(19): siRNA sense strand
ggaggagcagcuauccaua

SEQ ID NO: 415988 - RNA, 19 nt, Homo sapiens
  misc_RNA (1)...(19): siRNA sense strand
aggcgaaccuagacaagaa

SEQ ID NO: 415989 - RNA, 19 nt, Homo sapiens
  misc_RNA (1)...(19): siRNA sense strand
acaaggagcaggcagagaa

SEQ ID NO: 415990 - RNA, 19 nt, Homo sapiens
  misc_RNA (1)...(19): siRNA sense strand
gagaguaugucgacuuaga

SEQ ID NO: 415991 - RNA, 19 nt, Homo sapiens
  misc_RNA (1)...(19): siRNA sense strand
gaacagcgacaaacaccua

SEQ ID NO: 415992 - RNA, 19 nt, Homo sapiens
  misc_RNA (1)...(19): siRNA sense strand
gagaaggacacgcgaauuu

SEQ ID NO: 415993 - RNA, 19 nt, Homo sapiens
  misc_RNA (1)...(19): siRNA sense strand
ccgagaguaugucgacuua

SEQ ID NO: 415994 - RNA, 19 nt, Homo sapiens
  misc_RNA (1)...(19): siRNA sense strand
gaaggacacgcgaauuuga

SEQ ID NO: 415995 - RNA, 19 nt, Homo sapiens
  misc_RNA (1)...(19): siRNA sense strand
gcaggaggaugcauuagca

SEQ ID NO: 415996 - RNA, 19 nt, Homo sapiens
  misc_RNA (1)...(19): siRNA sense strand
ggauugaucuccaaagacu

SEQ ID NO: 415997 - RNA, 19 nt, Homo sapiens
  misc_RNA (1)...(19): siRNA sense strand
gagaagcaggcaagguaua

SEQ ID NO: 415998 - RNA, 19 nt, Homo sapiens
  misc_RNA (1)...(19): siRNA sense strand
uggaaaggcuggauugauc

SEQ ID NO: 415999 - RNA, 19 nt, Homo sapiens
  misc_RNA (1)...(19): siRNA sense strand
uuugaaggcucccaugauu

SEQ ID NO: 416000 - RNA, 19 nt, Homo sapiens
  misc_RNA (1)...(19): siRNA sense strand
gaauggagucuguguuauc

SEQ ID NO: 416001 - RNA, 19 nt, Homo sapiens
  misc_RNA (1)...(19): siRNA sense strand
aagagaagcaggcaaggua

SEQ ID NO: 416002 - RNA, 19 nt, Homo sapiens
  misc_RNA (1)...(19): siRNA sense strand
gaagaggcucggagaagga

SEQ ID NO: 416003 - RNA, 19 nt, Homo sapiens
  misc_RNA (1)...(19): siRNA sense strand
gcaggcaagguauauuuga

SEQ ID NO: 416004 - RNA, 19 nt, Homo sapiens
  misc_RNA (1)...(19): siRNA sense strand
gcgagugugagauuaagua

SEQ ID NO: 416005 - RNA, 19 nt, Homo sapiens
  misc_RNA (1)...(19): siRNA sense strand
guaugucgacuuagaaaga

SEQ ID NO: 416006 - RNA, 19 nt, Homo sapiens
  misc_RNA (1)...(19): siRNA sense strand
cugaauggagucuguguua

SEQ ID NO: 416007 - RNA, 19 nt, Homo sapiens
  misc_RNA (1)...(19): siRNA sense strand
caggcaagguauauuugaa

SEQ ID NO: 416008 - RNA, 19 nt, Homo sapiens
  misc_RNA (1)...(19): siRNA sense strand
acacgcgaauuugaagaua

SEQ ID NO: 416009 - RNA, 19 nt, Homo sapiens
  misc_RNA (1)...(19): siRNA sense strand
ccagcaggaggaugcauua

SEQ ID NO: 416010 - RNA, 19 nt, Homo sapiens
  misc_RNA (1)...(19): siRNA sense strand
ggagaaggacacgcgaauu

SEQ ID NO: 416011 - RNA, 19 nt, Homo sapiens
  misc_RNA (1)...(19): siRNA sense strand
gcacaacaggccuuugaag

SEQ ID NO: 416012 - RNA, 19 nt, Homo sapiens
  misc_RNA (1)...(19): siRNA sense strand
gaguaugucgacuuagaaa

SEQ ID NO: 416013 - RNA, 19 nt, Homo sapiens
  misc_RNA (1)...(19): siRNA sense strand
aagcaggcaagguauauuu

SEQ ID NO: 416014 - RNA, 19 nt, Homo sapiens
  misc_RNA (1)...(19): siRNA sense strand
gaagcaggcaagguauauu

SEQ ID NO: 416015 - RNA, 19 nt, Homo sapiens
  misc_RNA (1)...(19): siRNA sense strand
uagcacaacaggccuuuga

SEQ ID NO: 416016 - RNA, 19 nt, Homo sapiens
  misc_RNA (1)...(19): siRNA sense strand
ggaggaugcauuagcacaa

SEQ ID NO: 416017 - RNA, 19 nt, Homo sapiens
  misc_RNA (1)...(19): siRNA sense strand
gagucuguguuaucuggaa

SEQ ID NO: 416018 - RNA, 19 nt, Homo sapiens
  misc_RNA (1)...(19): siRNA sense strand
ugaauggagucuguguuau

SEQ ID NO: 416019 - RNA, 19 nt, Homo sapiens
  misc_RNA (1)...(19): siRNA sense strand
cacaacaggccuuugaaga

SEQ ID NO: 416020 - RNA, 19 nt, Homo sapiens
  misc_RNA (1)...(19): siRNA sense strand
gagccgcgagugugagauu

SEQ ID NO: 416021 - RNA, 19 nt, Homo sapiens
  misc_RNA (1)...(19): siRNA sense strand
cgacuuagaaagagaagca

SEQ ID NO: 416022 - RNA, 19 nt, Homo sapiens
  misc_RNA (1)...(19): siRNA sense strand
acgcgaauuugaagauaga

SEQ ID NO: 416023 - RNA, 19 nt, Homo sapiens
  misc_RNA (1)...(19): siRNA sense strand
ggacacgcgaauuugaaga

SEQ ID NO: 416024 - RNA, 19 nt, Homo sapiens
  misc_RNA (1)...(19): siRNA sense strand
gggagaacagcgacaaaca

SEQ ID NO: 416025 - RNA, 19 nt, Homo sapiens
  misc_RNA (1)...(19): siRNA sense strand
ccaaagacuggaugguaug

SEQ ID NO: 416026 - RNA, 19 nt, Homo sapiens
  misc_RNA (1)...(19): siRNA sense strand
ggaaaggcuggauugaucu

SEQ ID NO: 416027 - RNA, 19 nt, Homo sapiens
  misc_RNA (1)...(19): siRNA sense strand
gaagcugagccgcgagugu

SEQ ID NO: 416028 - RNA, 19 nt, Homo sapiens
  misc_RNA (1)...(19): siRNA sense strand
ggucucaucgggaggaaau

SEQ ID NO: 416029 - RNA, 19 nt, Homo sapiens
  misc_RNA (1)...(19): siRNA sense strand
gaggaugcauuagcacaac

SEQ ID NO: 416030 - RNA, 19 nt, Homo sapiens
  misc_RNA (1)...(19): siRNA sense strand
uaugggcugucuggaguuu

SEQ ID NO: 416031 - RNA, 19 nt, Homo sapiens
  misc_RNA (1)...(19): siRNA sense strand
gcucggaaaucgcuuuugu

SEQ ID NO: 416032 - RNA, 19 nt, Homo sapiens
  misc_RNA (1)...(19): siRNA sense strand
ugaaggcucccaugauucu

SEQ ID NO: 416033 - RNA, 19 nt, Homo sapiens
  misc_RNA (1)...(19): siRNA sense strand
gcagggagaacagcgacaa

SEQ ID NO: 416034 - RNA, 19 nt, Homo sapiens
  misc_RNA (1)...(19): siRNA sense strand
ugggcugucuggaguuuga

SEQ ID NO: 416035 - RNA, 19 nt, Homo sapiens
  misc_RNA (1)...(19): siRNA sense strand
agaaggacacgcgaauuug

SEQ ID NO: 416036 - RNA, 19 nt, Homo sapiens
  misc_RNA (1)...(19): siRNA sense strand
ggagaacagcgacaaacac

SEQ ID NO: 416037 - RNA, 19 nt, Homo sapiens
  misc_RNA (1)...(19): siRNA sense strand
gaauuugaagauagagaca

SEQ ID NO: 416038 - RNA, 19 nt, Homo sapiens
  misc_RNA (1)...(19): siRNA sense strand
acaacaggccuuugaagag

SEQ ID NO: 416039 - RNA, 19 nt, Homo sapiens
  misc_RNA (1)...(19): siRNA sense strand
aauggagucuguguuaucu

SEQ ID NO: 416040 - RNA, 19 nt, Homo sapiens
  misc_RNA (1)...(19): siRNA sense strand
agaagcaggcaagguauau

SEQ ID NO: 416041 - RNA, 19 nt, Homo sapiens
  misc_RNA (1)...(19): siRNA sense strand
gacacgcgaauuugaagau

SEQ ID NO: 416042 - RNA, 19 nt, Homo sapiens
  misc_RNA (1)...(19): siRNA sense strand
gaaaggcuggauugaucuc

SEQ ID NO: 416043 - RNA, 19 nt, Homo sapiens
  misc_RNA (1)...(19): siRNA sense strand
acaccuagccgagaguaug

SEQ ID NO: 416044 - RNA, 19 nt, Homo sapiens
  misc_RNA (1)...(19): siRNA sense strand
gagaguaugucgacuuaga

SEQ ID NO: 416045 - RNA, 19 nt, Homo sapiens
  misc_RNA (1)...(19): siRNA sense strand
gaacagcgacaaacaccua

SEQ ID NO: 416046 - RNA, 19 nt, Homo sapiens
  misc_RNA (1)...(19): siRNA sense strand
gagaaggacacgcgaauuu

SEQ ID NO: 416047 - RNA, 19 nt, Homo sapiens
  misc_RNA (1)...(19): siRNA sense strand
ccgagaguaugucgacuua

SEQ ID NO: 416048 - RNA, 19 nt, Homo sapiens
  misc_RNA (1)...(19): siRNA sense strand
gaaggacacgcgaauuuga

SEQ ID NO: 416049 - RNA, 19 nt, Homo sapiens
  misc_RNA (1)...(19): siRNA sense strand
gcaggaggaugcauuagca

SEQ ID NO: 416050 - RNA, 19 nt, Homo sapiens
  misc_RNA (1)...(19): siRNA sense strand
ggauugaucuccaaagacu

SEQ ID NO: 416051 - RNA, 19 nt, Homo sapiens
  misc_RNA (1)...(19): siRNA sense strand
gagaagcaggcaagguaua

SEQ ID NO: 416052 - RNA, 19 nt, Homo sapiens
  misc_RNA (1)...(19): siRNA sense strand
uggaaaggcuggauugauc

SEQ ID NO: 416053 - RNA, 19 nt, Homo sapiens
  misc_RNA (1)...(19): siRNA sense strand
caauuuaggugguggugau

SEQ ID NO: 416054 - RNA, 19 nt, Homo sapiens
  misc_RNA (1)...(19): siRNA sense strand
uuugaaggcucccaugauu

SEQ ID NO: 416055 - RNA, 19 nt, Homo sapiens
  misc_RNA (1)...(19): siRNA sense strand
gaauggagucuguguuauc

SEQ ID NO: 416056 - RNA, 19 nt, Homo sapiens
  misc_RNA (1)...(19): siRNA sense strand
aagagaagcaggcaaggua

SEQ ID NO: 416057 - RNA, 19 nt, Homo sapiens
  misc_RNA (1)...(19): siRNA sense strand
gaagaggcucggagaagga

SEQ ID NO: 416058 - RNA, 19 nt, Homo sapiens
  misc_RNA (1)...(19): siRNA sense strand
gcaggcaagguauauuuga

SEQ ID NO: 416059 - RNA, 19 nt, Homo sapiens
  misc_RNA (1)...(19): siRNA sense strand
gcgagugugagauuaagua

SEQ ID NO: 416060 - RNA, 19 nt, Homo sapiens
  misc_RNA (1)...(19): siRNA sense strand
ggugaugaccucaaacuuc

SEQ ID NO: 416061 - RNA, 19 nt, Homo sapiens
  misc_RNA (1)...(19): siRNA sense strand
guaugucgacuuagaaaga

SEQ ID NO: 416062 - RNA, 19 nt, Homo sapiens
  misc_RNA (1)...(19): siRNA sense strand
cugaauggagucuguguua

SEQ ID NO: 416063 - RNA, 19 nt, Homo sapiens
  misc_RNA (1)...(19): siRNA sense strand
caggcaagguauauuugaa

SEQ ID NO: 416064 - RNA, 19 nt, Homo sapiens
  misc_RNA (1)...(19): siRNA sense strand
acacgcgaauuugaagaua

SEQ ID NO: 416065 - RNA, 19 nt, Homo sapiens
  misc_RNA (1)...(19): siRNA sense strand
ccagcaggaggaugcauua

SEQ ID NO: 416066 - RNA, 19 nt, Homo sapiens
  misc_RNA (1)...(19): siRNA sense strand
ggagaaggacacgcgaauu

SEQ ID NO: 416067 - RNA, 19 nt, Homo sapiens
  misc_RNA (1)...(19): siRNA sense strand
gcacaacaggccuuugaag

SEQ ID NO: 416068 - RNA, 19 nt, Homo sapiens
  misc_RNA (1)...(19): siRNA sense strand
gaguaugucgacuuagaaa

SEQ ID NO: 416069 - RNA, 19 nt, Homo sapiens
  misc_RNA (1)...(19): siRNA sense strand
aagcaggcaagguauauuu

SEQ ID NO: 416070 - RNA, 19 nt, Homo sapiens
  misc_RNA (1)...(19): siRNA sense strand
gaagcaggcaagguauauu

SEQ ID NO: 416071 - RNA, 19 nt, Homo sapiens
  misc_RNA (1)...(19): siRNA sense strand
uagcacaacaggccuuuga

SEQ ID NO: 416072 - RNA, 19 nt, Homo sapiens
  misc_RNA (1)...(19): siRNA sense strand
ggaggaugcauuagcacaa

SEQ ID NO: 416073 - RNA, 19 nt, Homo sapiens
  misc_RNA (1)...(19): siRNA sense strand
gagucuguguuaucuggaa

SEQ ID NO: 416074 - RNA, 19 nt, Homo sapiens
  misc_RNA (1)...(19): siRNA sense strand
ugaauggagucuguguuau

SEQ ID NO: 416075 - RNA, 19 nt, Homo sapiens
  misc_RNA (1)...(19): siRNA sense strand
cacaacaggccuuugaaga

SEQ ID NO: 416076 - RNA, 19 nt, Homo sapiens
  misc_RNA (1)...(19): siRNA sense strand
gagccgcgagugugagauu

SEQ ID NO: 416077 - RNA, 19 nt, Homo sapiens
  misc_RNA (1)...(19): siRNA sense strand
cgacuuagaaagagaagca

SEQ ID NO: 416078 - RNA, 19 nt, Homo sapiens
  misc_RNA (1)...(19): siRNA sense strand
acgcgaauuugaagauaga

SEQ ID NO: 416079 - RNA, 19 nt, Homo sapiens
  misc_RNA (1)...(19): siRNA sense strand
ggacacgcgaauuugaaga

SEQ ID NO: 416080 - RNA, 19 nt, Homo sapiens
  misc_RNA (1)...(19): siRNA sense strand
gggagaacagcgacaaaca

SEQ ID NO: 416081 - RNA, 19 nt, Homo sapiens
  misc_RNA (1)...(19): siRNA sense strand
ccaaagacuggaugguaug

SEQ ID NO: 416082 - RNA, 19 nt, Homo sapiens
  misc_RNA (1)...(19): siRNA sense strand
ggaaaggcuggauugaucu

SEQ ID NO: 416083 - RNA, 19 nt, Homo sapiens
  misc_RNA (1)...(19): siRNA sense strand
uaugggcugucuggaguuu

SEQ ID NO: 416084 - RNA, 19 nt, Homo sapiens
  misc_RNA (1)...(19): siRNA sense strand
gaagcugagccgcgagugu

SEQ ID NO: 416085 - RNA, 19 nt, Homo sapiens
  misc_RNA (1)...(19): siRNA sense strand
ggucucaucgggaggaaau

SEQ ID NO: 416086 - RNA, 19 nt, Homo sapiens
  misc_RNA (1)...(19): siRNA sense strand
gaggaugcauuagcacaac

SEQ ID NO: 416087 - RNA, 19 nt, Homo sapiens
  misc_RNA (1)...(19): siRNA sense strand
gcucggaaaucgcuuuugu

SEQ ID NO: 416088 - RNA, 19 nt, Homo sapiens
  misc_RNA (1)...(19): siRNA sense strand
ugaaggcucccaugauucu

SEQ ID NO: 416089 - RNA, 19 nt, Homo sapiens
  misc_RNA (1)...(19): siRNA sense strand
ugggcugucuggaguuuga

SEQ ID NO: 416090 - RNA, 19 nt, Homo sapiens
  misc_RNA (1)...(19): siRNA sense strand
gcagggagaacagcgacaa

SEQ ID NO: 416091 - RNA, 19 nt, Homo sapiens
  misc_RNA (1)...(19): siRNA sense strand
uaguccugguuccaauuua

SEQ ID NO: 416092 - RNA, 19 nt, Homo sapiens
  misc_RNA (1)...(19): siRNA sense strand
gaugaccucaaacuucguu

SEQ ID NO: 416093 - RNA, 19 nt, Homo sapiens
  misc_RNA (1)...(19): siRNA sense strand
agaaggacacgcgaauuug

SEQ ID NO: 416094 - RNA, 19 nt, Homo sapiens
  misc_RNA (1)...(19): siRNA sense strand
ggagaacagcgacaaacac

SEQ ID NO: 416095 - RNA, 19 nt, Homo sapiens
  misc_RNA (1)...(19): siRNA sense strand
gaauuugaagauagagaca

SEQ ID NO: 416096 - RNA, 19 nt, Homo sapiens
  misc_RNA (1)...(19): siRNA sense strand
acaacaggccuuugaagag

SEQ ID NO: 416097 - RNA, 19 nt, Homo sapiens
  misc_RNA (1)...(19): siRNA sense strand
ugaccucaaacuucguuaa

SEQ ID NO: 416098 - RNA, 19 nt, Homo sapiens
  misc_RNA (1)...(19): siRNA sense strand
aauggagucuguguuaucu

SEQ ID NO: 416099 - RNA, 19 nt, Homo sapiens
  misc_RNA (1)...(19): siRNA sense strand
cuaguccugguuccaauuu

SEQ ID NO: 416100 - RNA, 19 nt, Homo sapiens
  misc_RNA (1)...(19): siRNA sense strand
agaagcaggcaagguauau

SEQ ID NO: 416101 - RNA, 19 nt, Homo sapiens
  misc_RNA (1)...(19): siRNA sense strand
gacacgcgaauuugaagau

SEQ ID NO: 416102 - RNA, 19 nt, Homo sapiens
  misc_RNA (1)...(19): siRNA sense strand
gaaaggcuggauugaucuc

SEQ ID NO: 416103 - RNA, 19 nt, Homo sapiens
  misc_RNA (1)...(19): siRNA sense strand
acaccuagccgagaguaug

SEQ ID NO: 416104 - RNA, 19 nt, Homo sapiens
  misc_RNA (1)...(19): siRNA sense strand
ggucugcgauccugaaugg

SEQ ID NO: 416105 - RNA, 19 nt, Homo sapiens
  misc_RNA (1)...(19): siRNA sense strand
uaauauuggugcccugaug

SEQ ID NO: 416106 - RNA, 19 nt, Homo sapiens
  misc_RNA (1)...(19): siRNA sense strand
gcagcgucgucauagguaa

SEQ ID NO: 416107 - RNA, 19 nt, Homo sapiens
  misc_RNA (1)...(19): siRNA sense strand
cgucauagguaauauuggu

SEQ ID NO: 416108 - RNA, 19 nt, Homo sapiens
  misc_RNA (1)...(19): siRNA sense strand
gugaggaggaugaggagua

SEQ ID NO: 416109 - RNA, 19 nt, Homo sapiens
  misc_RNA (1)...(19): siRNA sense strand
gcuacgccacccacaagua

SEQ ID NO: 416110 - RNA, 19 nt, Homo sapiens
  misc_RNA (1)...(19): siRNA sense strand
guggcugccucgcugauga

SEQ ID NO: 416111 - RNA, 19 nt, Homo sapiens
  misc_RNA (1)...(19): siRNA sense strand
cagaaggcgguaucgcuuu

SEQ ID NO: 416112 - RNA, 19 nt, Homo sapiens
  misc_RNA (1)...(19): siRNA sense strand
uggcagcagcgucgucaua

SEQ ID NO: 416113 - RNA, 19 nt, Homo sapiens
  misc_RNA (1)...(19): siRNA sense strand
ugaggaggaugaggaguag

SEQ ID NO: 416114 - RNA, 19 nt, Homo sapiens
  misc_RNA (1)...(19): siRNA sense strand
gcagcagcgucgucauagg

SEQ ID NO: 416115 - RNA, 19 nt, Homo sapiens
  misc_RNA (1)...(19): siRNA sense strand
cuacgccacccacaaguau

SEQ ID NO: 416116 - RNA, 19 nt, Homo sapiens
  misc_RNA (1)...(19): siRNA sense strand
cugcugcucuucacuugca

SEQ ID NO: 416117 - RNA, 19 nt, Homo sapiens
  misc_RNA (1)...(19): siRNA sense strand
ggucugcgauccugaaugg

SEQ ID NO: 416118 - RNA, 19 nt, Homo sapiens
  misc_RNA (1)...(19): siRNA sense strand
uaauauuggugcccugaug

SEQ ID NO: 416119 - RNA, 19 nt, Homo sapiens
  misc_RNA (1)...(19): siRNA sense strand
gcagcgucgucauagguaa

SEQ ID NO: 416120 - RNA, 19 nt, Homo sapiens
  misc_RNA (1)...(19): siRNA sense strand
cgucauagguaauauuggu

SEQ ID NO: 416121 - RNA, 19 nt, Homo sapiens
  misc_RNA (1)...(19): siRNA sense strand
gugaggaggaugaggagua

SEQ ID NO: 416122 - RNA, 19 nt, Homo sapiens
  misc_RNA (1)...(19): siRNA sense strand
gcuacgccacccacaagua

SEQ ID NO: 416123 - RNA, 19 nt, Homo sapiens
  misc_RNA (1)...(19): siRNA sense strand
guggcugccucgcugauga

SEQ ID NO: 416124 - RNA, 19 nt, Homo sapiens
  misc_RNA (1)...(19): siRNA sense strand
cagaaggcgguaucgcuuu

SEQ ID NO: 416125 - RNA, 19 nt, Homo sapiens
  misc_RNA (1)...(19): siRNA sense strand
uggcagcagcgucgucaua

SEQ ID NO: 416126 - RNA, 19 nt, Homo sapiens
  misc_RNA (1)...(19): siRNA sense strand
ugaggaggaugaggaguag

SEQ ID NO: 416127 - RNA, 19 nt, Homo sapiens
  misc_RNA (1)...(19): siRNA sense strand
gcagcagcgucgucauagg

SEQ ID NO: 416128 - RNA, 19 nt, Homo sapiens
  misc_RNA (1)...(19): siRNA sense strand
cuacgccacccacaaguau

SEQ ID NO: 416129 - RNA, 19 nt, Homo sapiens
  misc_RNA (1)...(19): siRNA sense strand
cugcugcucuucacuugca

SEQ ID NO: 416130 - RNA, 19 nt, Homo sapiens
  misc_RNA (1)...(19): siRNA sense strand
ggucugcgauccugaaugg

SEQ ID NO: 416131 - RNA, 19 nt, Homo sapiens
  misc_RNA (1)...(19): siRNA sense strand
uaauauuggugcccugaug

SEQ ID NO: 416132 - RNA, 19 nt, Homo sapiens
  misc_RNA (1)...(19): siRNA sense strand
gcagcgucgucauagguaa

SEQ ID NO: 416133 - RNA, 19 nt, Homo sapiens
  misc_RNA (1)...(19): siRNA sense strand
cgucauagguaauauuggu

SEQ ID NO: 416134 - RNA, 19 nt, Homo sapiens
  misc_RNA (1)...(19): siRNA sense strand
gugaggaggaugaggagua

SEQ ID NO: 416135 - RNA, 19 nt, Homo sapiens
  misc_RNA (1)...(19): siRNA sense strand
gcuacgccacccacaagua

SEQ ID NO: 416136 - RNA, 19 nt, Homo sapiens
  misc_RNA (1)...(19): siRNA sense strand
guggcugccucgcugauga

SEQ ID NO: 416137 - RNA, 19 nt, Homo sapiens
  misc_RNA (1)...(19): siRNA sense strand
cagaaggcgguaucgcuuu

SEQ ID NO: 416138 - RNA, 19 nt, Homo sapiens
  misc_RNA (1)...(19): siRNA sense strand
uggcagcagcgucgucaua

SEQ ID NO: 416139 - RNA, 19 nt, Homo sapiens
  misc_RNA (1)...(19): siRNA sense strand
ugaggaggaugaggaguag

SEQ ID NO: 416140 - RNA, 19 nt, Homo sapiens
  misc_RNA (1)...(19): siRNA sense strand
gcagcagcgucgucauagg

SEQ ID NO: 416141 - RNA, 19 nt, Homo sapiens
  misc_RNA (1)...(19): siRNA sense strand
cuacgccacccacaaguau

SEQ ID NO: 416142 - RNA, 19 nt, Homo sapiens
  misc_RNA (1)...(19): siRNA sense strand
cugcugcucuucacuugca

SEQ ID NO: 416143 - RNA, 19 nt, Homo sapiens
  misc_RNA (1)...(19): siRNA sense strand
ggucugcgauccugaaugg

SEQ ID NO: 416144 - RNA, 19 nt, Homo sapiens
  misc_RNA (1)...(19): siRNA sense strand
uaauauuggugcccugaug

SEQ ID NO: 416145 - RNA, 19 nt, Homo sapiens
  misc_RNA (1)...(19): siRNA sense strand
gcagcgucgucauagguaa

SEQ ID NO: 416146 - RNA, 19 nt, Homo sapiens
  misc_RNA (1)...(19): siRNA sense strand
cgucauagguaauauuggu

SEQ ID NO: 416147 - RNA, 19 nt, Homo sapiens
  misc_RNA (1)...(19): siRNA sense strand
gugaggaggaugaggagua

SEQ ID NO: 416148 - RNA, 19 nt, Homo sapiens
  misc_RNA (1)...(19): siRNA sense strand
gcuacgccacccacaagua

SEQ ID NO: 416149 - RNA, 19 nt, Homo sapiens
  misc_RNA (1)...(19): siRNA sense strand
guggcugccucgcugauga

SEQ ID NO: 416150 - RNA, 19 nt, Homo sapiens
  misc_RNA (1)...(19): siRNA sense strand
cagaaggcgguaucgcuuu

SEQ ID NO: 416151 - RNA, 19 nt, Homo sapiens
  misc_RNA (1)...(19): siRNA sense strand
uggcagcagcgucgucaua

SEQ ID NO: 416152 - RNA, 19 nt, Homo sapiens
  misc_RNA (1)...(19): siRNA sense strand
ugaggaggaugaggaguag

SEQ ID NO: 416153 - RNA, 19 nt, Homo sapiens
  misc_RNA (1)...(19): siRNA sense strand
gcagcagcgucgucauagg

SEQ ID NO: 416154 - RNA, 19 nt, Homo sapiens
  misc_RNA (1)...(19): siRNA sense strand
cuacgccacccacaaguau

SEQ ID NO: 416155 - RNA, 19 nt, Homo sapiens
  misc_RNA (1)...(19): siRNA sense strand
cugcugcucuucacuugca

SEQ ID NO: 416156 - RNA, 19 nt, Homo sapiens
  misc_RNA (1)...(19): siRNA sense strand
ggucugcgauccugaaugg

SEQ ID NO: 416157 - RNA, 19 nt, Homo sapiens
  misc_RNA (1)...(19): siRNA sense strand
uaauauuggugcccugaug

SEQ ID NO: 416158 - RNA, 19 nt, Homo sapiens
  misc_RNA (1)...(19): siRNA sense strand
gcagcgucgucauagguaa

SEQ ID NO: 416159 - RNA, 19 nt, Homo sapiens
  misc_RNA (1)...(19): siRNA sense strand
cgucauagguaauauuggu

SEQ ID NO: 416160 - RNA, 19 nt, Homo sapiens
  misc_RNA (1)...(19): siRNA sense strand
gugaggaggaugaggagua

SEQ ID NO: 416161 - RNA, 19 nt, Homo sapiens
  misc_RNA (1)...(19): siRNA sense strand
gcuacgccacccacaagua

SEQ ID NO: 416162 - RNA, 19 nt, Homo sapiens
  misc_RNA (1)...(19): siRNA sense strand
guggcugccucgcugauga

SEQ ID NO: 416163 - RNA, 19 nt, Homo sapiens
  misc_RNA (1)...(19): siRNA sense strand
cagaaggcgguaucgcuuu

SEQ ID NO: 416164 - RNA, 19 nt, Homo sapiens
  misc_RNA (1)...(19): siRNA sense strand
uggcagcagcgucgucaua

SEQ ID NO: 416165 - RNA, 19 nt, Homo sapiens
  misc_RNA (1)...(19): siRNA sense strand
ugaggaggaugaggaguag

SEQ ID NO: 416166 - RNA, 19 nt, Homo sapiens
  misc_RNA (1)...(19): siRNA sense strand
gcagcagcgucgucauagg

SEQ ID NO: 416167 - RNA, 19 nt, Homo sapiens
  misc_RNA (1)...(19): siRNA sense strand
cuacgccacccacaaguau

SEQ ID NO: 416168 - RNA, 19 nt, Homo sapiens
  misc_RNA (1)...(19): siRNA sense strand
cugcugcucuucacuugca

SEQ ID NO: 416169 - RNA, 19 nt, Homo sapiens
  misc_RNA (1)...(19): siRNA sense strand
ggucugcgauccugaaugg

SEQ ID NO: 416170 - RNA, 19 nt, Homo sapiens
  misc_RNA (1)...(19): siRNA sense strand
uaauauuggugcccugaug

SEQ ID NO: 416171 - RNA, 19 nt, Homo sapiens
  misc_RNA (1)...(19): siRNA sense strand
gcagcgucgucauagguaa

SEQ ID NO: 416172 - RNA, 19 nt, Homo sapiens
  misc_RNA (1)...(19): siRNA sense strand
cgucauagguaauauuggu

SEQ ID NO: 416173 - RNA, 19 nt, Homo sapiens
  misc_RNA (1)...(19): siRNA sense strand
gugaggaggaugaggagua

SEQ ID NO: 416174 - RNA, 19 nt, Homo sapiens
  misc_RNA (1)...(19): siRNA sense strand
gcuacgccacccacaagua

SEQ ID NO: 416175 - RNA, 19 nt, Homo sapiens
  misc_RNA (1)...(19): siRNA sense strand
guggcugccucgcugauga

SEQ ID NO: 416176 - RNA, 19 nt, Homo sapiens
  misc_RNA (1)...(19): siRNA sense strand
cagaaggcgguaucgcuuu

SEQ ID NO: 416177 - RNA, 19 nt, Homo sapiens
  misc_RNA (1)...(19): siRNA sense strand
uggcagcagcgucgucaua

SEQ ID NO: 416178 - RNA, 19 nt, Homo sapiens
  misc_RNA (1)...(19): siRNA sense strand
ugaggaggaugaggaguag

SEQ ID NO: 416179 - RNA, 19 nt, Homo sapiens
  misc_RNA (1)...(19): siRNA sense strand
gcagcagcgucgucauagg

SEQ ID NO: 416180 - RNA, 19 nt, Homo sapiens
  misc_RNA (1)...(19): siRNA sense strand
cuacgccacccacaaguau

SEQ ID NO: 416181 - RNA, 19 nt, Homo sapiens
  misc_RNA (1)...(19): siRNA sense strand
cugcugcucuucacuugca

SEQ ID NO: 416182 - RNA, 19 nt, Homo sapiens
  misc_RNA (1)...(19): siRNA sense strand
ggucugcgauccugaaugg

SEQ ID NO: 416183 - RNA, 19 nt, Homo sapiens
  misc_RNA (1)...(19): siRNA sense strand
uaauauuggugcccugaug

SEQ ID NO: 416184 - RNA, 19 nt, Homo sapiens
  misc_RNA (1)...(19): siRNA sense strand
gcagcgucgucauagguaa

SEQ ID NO: 416185 - RNA, 19 nt, Homo sapiens
  misc_RNA (1)...(19): siRNA sense strand
cgucauagguaauauuggu

SEQ ID NO: 416186 - RNA, 19 nt, Homo sapiens
  misc_RNA (1)...(19): siRNA sense strand
gugaggaggaugaggagua

SEQ ID NO: 416187 - RNA, 19 nt, Homo sapiens
  misc_RNA (1)...(19): siRNA sense strand
gcuacgccacccacaagua

SEQ ID NO: 416188 - RNA, 19 nt, Homo sapiens
  misc_RNA (1)...(19): siRNA sense strand
guggcugccucgcugauga

SEQ ID NO: 416189 - RNA, 19 nt, Homo sapiens
  misc_RNA (1)...(19): siRNA sense strand
cagaaggcgguaucgcuuu

SEQ ID NO: 416190 - RNA, 19 nt, Homo sapiens
  misc_RNA (1)...(19): siRNA sense strand
uggcagcagcgucgucaua

SEQ ID NO: 416191 - RNA, 19 nt, Homo sapiens
  misc_RNA (1)...(19): siRNA sense strand
ugaggaggaugaggaguag

SEQ ID NO: 416192 - RNA, 19 nt, Homo sapiens
  misc_RNA (1)...(19): siRNA sense strand
gcagcagcgucgucauagg

SEQ ID NO: 416193 - RNA, 19 nt, Homo sapiens
  misc_RNA (1)...(19): siRNA sense strand
cuacgccacccacaaguau

SEQ ID NO: 416194 - RNA, 19 nt, Homo sapiens
  misc_RNA (1)...(19): siRNA sense strand
cugcugcucuucacuugca

SEQ ID NO: 416195 - RNA, 19 nt, Homo sapiens
  misc_RNA (1)...(19): siRNA sense strand
ggucugcgauccugaaugg

SEQ ID NO: 416196 - RNA, 19 nt, Homo sapiens
  misc_RNA (1)...(19): siRNA sense strand
uaauauuggugcccugaug

SEQ ID NO: 416197 - RNA, 19 nt, Homo sapiens
  misc_RNA (1)...(19): siRNA sense strand
gcagcgucgucauagguaa

SEQ ID NO: 416198 - RNA, 19 nt, Homo sapiens
  misc_RNA (1)...(19): siRNA sense strand
cgucauagguaauauuggu

SEQ ID NO: 416199 - RNA, 19 nt, Homo sapiens
  misc_RNA (1)...(19): siRNA sense strand
gugaggaggaugaggagua

SEQ ID NO: 416200 - RNA, 19 nt, Homo sapiens
  misc_RNA (1)...(19): siRNA sense strand
gcuacgccacccacaagua

SEQ ID NO: 416201 - RNA, 19 nt, Homo sapiens
  misc_RNA (1)...(19): siRNA sense strand
guggcugccucgcugauga

SEQ ID NO: 416202 - RNA, 19 nt, Homo sapiens
  misc_RNA (1)...(19): siRNA sense strand
cagaaggcgguaucgcuuu

SEQ ID NO: 416203 - RNA, 19 nt, Homo sapiens
  misc_RNA (1)...(19): siRNA sense strand
uggcagcagcgucgucaua

SEQ ID NO: 416204 - RNA, 19 nt, Homo sapiens
  misc_RNA (1)...(19): siRNA sense strand
ugaggaggaugaggaguag

SEQ ID NO: 416205 - RNA, 19 nt, Homo sapiens
  misc_RNA (1)...(19): siRNA sense strand
gcagcagcgucgucauagg

SEQ ID NO: 416206 - RNA, 19 nt, Homo sapiens
  misc_RNA (1)...(19): siRNA sense strand
cuacgccacccacaaguau

SEQ ID NO: 416207 - RNA, 19 nt, Homo sapiens
  misc_RNA (1)...(19): siRNA sense strand
cugcugcucuucacuugca

SEQ ID NO: 416208 - RNA, 19 nt, Homo sapiens
  misc_RNA (1)...(19): siRNA sense strand
ggucugcgauccugaaugg

SEQ ID NO: 416209 - RNA, 19 nt, Homo sapiens
  misc_RNA (1)...(19): siRNA sense strand
uaauauuggugcccugaug

SEQ ID NO: 416210 - RNA, 19 nt, Homo sapiens
  misc_RNA (1)...(19): siRNA sense strand
gcagcgucgucauagguaa

SEQ ID NO: 416211 - RNA, 19 nt, Homo sapiens
  misc_RNA (1)...(19): siRNA sense strand
cgucauagguaauauuggu

SEQ ID NO: 416212 - RNA, 19 nt, Homo sapiens
  misc_RNA (1)...(19): siRNA sense strand
gugaggaggaugaggagua

SEQ ID NO: 416213 - RNA, 19 nt, Homo sapiens
  misc_RNA (1)...(19): siRNA sense strand
gcuacgccacccacaagua

SEQ ID NO: 416214 - RNA, 19 nt, Homo sapiens
  misc_RNA (1)...(19): siRNA sense strand
guggcugccucgcugauga

SEQ ID NO: 416215 - RNA, 19 nt, Homo sapiens
  misc_RNA (1)...(19): siRNA sense strand
cagaaggcgguaucgcuuu

SEQ ID NO: 416216 - RNA, 19 nt, Homo sapiens
  misc_RNA (1)...(19): siRNA sense strand
uggcagcagcgucgucaua

SEQ ID NO: 416217 - RNA, 19 nt, Homo sapiens
  misc_RNA (1)...(19): siRNA sense strand
ugaggaggaugaggaguag

SEQ ID NO: 416218 - RNA, 19 nt, Homo sapiens
  misc_RNA (1)...(19): siRNA sense strand
gcagcagcgucgucauagg

SEQ ID NO: 416219 - RNA, 19 nt, Homo sapiens
  misc_RNA (1)...(19): siRNA sense strand
cuacgccacccacaaguau

SEQ ID NO: 416220 - RNA, 19 nt, Homo sapiens
  misc_RNA (1)...(19): siRNA sense strand
cugcugcucuucacuugca

SEQ ID NO: 416221 - RNA, 19 nt, Homo sapiens
  misc_RNA (1)...(19): siRNA sense strand
gaaggaaggugcucacauu

SEQ ID NO: 416222 - RNA, 19 nt, Homo sapiens
  misc_RNA (1)...(19): siRNA sense strand
gcucacauuccuuaaauua

SEQ ID NO: 416223 - RNA, 19 nt, Homo sapiens
  misc_RNA (1)...(19): siRNA sense strand
gagcgaugauucugacauu

SEQ ID NO: 416224 - RNA, 19 nt, Homo sapiens
  misc_RNA (1)...(19): siRNA sense strand
gaugauacagcacugauaa

SEQ ID NO: 416225 - RNA, 19 nt, Homo sapiens
  misc_RNA (1)...(19): siRNA sense strand
gaauacugcagcuuccuua

SEQ ID NO: 416226 - RNA, 19 nt, Homo sapiens
  misc_RNA (1)...(19): siRNA sense strand
gagagaaaccuguguugug

SEQ ID NO: 416227 - RNA, 19 nt, Homo sapiens
  misc_RNA (1)...(19): siRNA sense strand
gcuaucauacuggcuauua

SEQ ID NO: 416228 - RNA, 19 nt, Homo sapiens
  misc_RNA (1)...(19): siRNA sense strand
uaagcaugcucuaaagaau

SEQ ID NO: 416229 - RNA, 19 nt, Homo sapiens
  misc_RNA (1)...(19): siRNA sense strand
ucugugaaguagcuaauaa

SEQ ID NO: 416230 - RNA, 19 nt, Homo sapiens
  misc_RNA (1)...(19): siRNA sense strand
ggaaauagagaggagcaaa

SEQ ID NO: 416231 - RNA, 19 nt, Homo sapiens
  misc_RNA (1)...(19): siRNA sense strand
gaaaaugaaagccaaguuu

SEQ ID NO: 416232 - RNA, 19 nt, Homo sapiens
  misc_RNA (1)...(19): siRNA sense strand
gugcucacauuccuuaaau

SEQ ID NO: 416233 - RNA, 19 nt, Homo sapiens
  misc_RNA (1)...(19): siRNA sense strand
ucagaagacgguugcauuu

SEQ ID NO: 416234 - RNA, 19 nt, Homo sapiens
  misc_RNA (1)...(19): siRNA sense strand
cagaagacgguugcauuua

SEQ ID NO: 416235 - RNA, 19 nt, Homo sapiens
  misc_RNA (1)...(19): siRNA sense strand
gcacaggccagagcgauga

SEQ ID NO: 416236 - RNA, 19 nt, Homo sapiens
  misc_RNA (1)...(19): siRNA sense strand
gcugaugcuuugggaagua

SEQ ID NO: 416237 - RNA, 19 nt, Homo sapiens
  misc_RNA (1)...(19): siRNA sense strand
ccaaaucugcuccauggaa

SEQ ID NO: 416238 - RNA, 19 nt, Homo sapiens
  misc_RNA (1)...(19): siRNA sense strand
ggaugauacagcacugaua

SEQ ID NO: 416239 - RNA, 19 nt, Homo sapiens
  misc_RNA (1)...(19): siRNA sense strand
gauaacaucaagcccaaau

SEQ ID NO: 416240 - RNA, 19 nt, Homo sapiens
  misc_RNA (1)...(19): siRNA sense strand
agaagacgguugcauuuac

SEQ ID NO: 416241 - RNA, 19 nt, Homo sapiens
  misc_RNA (1)...(19): siRNA sense strand
gcgaugauucugacauuug

SEQ ID NO: 416242 - RNA, 19 nt, Homo sapiens
  misc_RNA (1)...(19): siRNA sense strand
gguuuacacuggauaugga

SEQ ID NO: 416243 - RNA, 19 nt, Homo sapiens
  misc_RNA (1)...(19): siRNA sense strand
gcagcuuccuuacaacagu

SEQ ID NO: 416244 - RNA, 19 nt, Homo sapiens
  misc_RNA (1)...(19): siRNA sense strand
ugaugaugcugaugcuuug

SEQ ID NO: 416245 - RNA, 19 nt, Homo sapiens
  misc_RNA (1)...(19): siRNA sense strand
gaaaaccugcuaagaagaa

SEQ ID NO: 416246 - RNA, 19 nt, Homo sapiens
  misc_RNA (1)...(19): siRNA sense strand
aaacuucggguaaaccaaa

SEQ ID NO: 416247 - RNA, 19 nt, Homo sapiens
  misc_RNA (1)...(19): siRNA sense strand
aaagccaaguuucaacaga

SEQ ID NO: 416248 - RNA, 19 nt, Homo sapiens
  misc_RNA (1)...(19): siRNA sense strand
aaagaaaaccugcuaagaa

SEQ ID NO: 416249 - RNA, 19 nt, Homo sapiens
  misc_RNA (1)...(19): siRNA sense strand
ugggaaguauguuaauuuc

SEQ ID NO: 416250 - RNA, 19 nt, Homo sapiens
  misc_RNA (1)...(19): siRNA sense strand
uaacaucaagcccaaaucu

SEQ ID NO: 416251 - RNA, 19 nt, Homo sapiens
  misc_RNA (1)...(19): siRNA sense strand
uaagagagaaaccuguguu

SEQ ID NO: 416252 - RNA, 19 nt, Homo sapiens
  misc_RNA (1)...(19): siRNA sense strand
caacagaugaaagugagaa

SEQ ID NO: 416253 - RNA, 19 nt, Homo sapiens
  misc_RNA (1)...(19): siRNA sense strand
gaagacgguugcauuuacc

SEQ ID NO: 416254 - RNA, 19 nt, Homo sapiens
  misc_RNA (1)...(19): siRNA sense strand
uacacuggauauggaaaua

SEQ ID NO: 416255 - RNA, 19 nt, Homo sapiens
  misc_RNA (1)...(19): siRNA sense strand
uuaagcaugcucuaaagaa

SEQ ID NO: 416256 - RNA, 19 nt, Homo sapiens
  misc_RNA (1)...(19): siRNA sense strand
ggugacauuugugaaacuu

SEQ ID NO: 416257 - RNA, 19 nt, Homo sapiens
  misc_RNA (1)...(19): siRNA sense strand
uacugcagcuuccuuacaa

SEQ ID NO: 416258 - RNA, 19 nt, Homo sapiens
  misc_RNA (1)...(19): siRNA sense strand
ccucccauauguccagauu

SEQ ID NO: 416259 - RNA, 19 nt, Homo sapiens
  misc_RNA (1)...(19): siRNA sense strand
gaaauagagaggagcaaaa

SEQ ID NO: 416260 - RNA, 19 nt, Homo sapiens
  misc_RNA (1)...(19): siRNA sense strand
cacuggauauggaaauaga

SEQ ID NO: 416261 - RNA, 19 nt, Homo sapiens
  misc_RNA (1)...(19): siRNA sense strand
guccagauucucuugauga

SEQ ID NO: 416262 - RNA, 19 nt, Homo sapiens
  misc_RNA (1)...(19): siRNA sense strand
gucagaagacgguugcauu

SEQ ID NO: 416263 - RNA, 19 nt, Homo sapiens
  misc_RNA (1)...(19): siRNA sense strand
ucugacauuugggaugaua

SEQ ID NO: 416264 - RNA, 19 nt, Homo sapiens
  misc_RNA (1)...(19): siRNA sense strand
cgaugauucugacauuugg

SEQ ID NO: 416265 - RNA, 19 nt, Homo sapiens
  misc_RNA (1)...(19): siRNA sense strand
gaauaaaagccaaaagaag

SEQ ID NO: 416266 - RNA, 19 nt, Homo sapiens
  misc_RNA (1)...(19): siRNA sense strand
gcuuugggaaguauguuaa

SEQ ID NO: 416267 - RNA, 19 nt, Homo sapiens
  misc_RNA (1)...(19): siRNA sense strand
ucccauauguccagauucu

SEQ ID NO: 416268 - RNA, 19 nt, Homo sapiens
  misc_RNA (1)...(19): siRNA sense strand
aagccaaguuucaacagau

SEQ ID NO: 416269 - RNA, 19 nt, Homo sapiens
  misc_RNA (1)...(19): siRNA sense strand
aagaaaaccugcuaagaag

SEQ ID NO: 416270 - RNA, 19 nt, Homo sapiens
  misc_RNA (1)...(19): siRNA sense strand
gcauuuacccagcuaccau

SEQ ID NO: 416271 - RNA, 19 nt, Homo sapiens
  misc_RNA (1)...(19): siRNA sense strand
gaaacuucggguaaaccaa

SEQ ID NO: 416272 - RNA, 19 nt, Homo sapiens
  misc_RNA (1)...(19): siRNA sense strand
ggugcucacauuccuuaaa

SEQ ID NO: 416273 - RNA, 19 nt, Homo sapiens
  misc_RNA (1)...(19): siRNA sense strand
cuaucauacuggcuauuau

SEQ ID NO: 416274 - RNA, 19 nt, Homo sapiens
  misc_RNA (1)...(19): siRNA sense strand
cccaccaccucccauaugu

SEQ ID NO: 416275 - RNA, 19 nt, Homo sapiens
  misc_RNA (1)...(19): siRNA sense strand
gaaaguuggggacaaaugu

SEQ ID NO: 416276 - RNA, 19 nt, Homo sapiens
  misc_RNA (1)...(19): siRNA sense strand
aaccugcuaagaagaauaa

SEQ ID NO: 416277 - RNA, 19 nt, Homo sapiens
  misc_RNA (1)...(19): siRNA sense strand
auucugacauuugggauga

SEQ ID NO: 416278 - RNA, 19 nt, Homo sapiens
  misc_RNA (1)...(19): siRNA sense strand
uugaugaugcugaugcuuu

SEQ ID NO: 416279 - RNA, 19 nt, Homo sapiens
  misc_RNA (1)...(19): siRNA sense strand
ggaggauuccgugcuguuc

SEQ ID NO: 416280 - RNA, 19 nt, Homo sapiens
  misc_RNA (1)...(19): siRNA sense strand
caaaaucuguccgaucuac

SEQ ID NO: 416281 - RNA, 19 nt, Homo sapiens
  misc_RNA (1)...(19): siRNA sense strand
ucauuuaagcaugcucuaa

SEQ ID NO: 416282 - RNA, 19 nt, Homo sapiens
  misc_RNA (1)...(19): siRNA sense strand
aaaccugcuaagaagaaua

SEQ ID NO: 416283 - RNA, 19 nt, Homo sapiens
  misc_RNA (1)...(19): siRNA sense strand
gggaaguauguuaauuuca

SEQ ID NO: 416284 - RNA, 19 nt, Homo sapiens
  misc_RNA (1)...(19): siRNA sense strand
aaaucuguccgaucuacuu

SEQ ID NO: 416285 - RNA, 19 nt, Homo sapiens
  misc_RNA (1)...(19): siRNA sense strand
gguugcauuuacccagcua

SEQ ID NO: 416286 - RNA, 19 nt, Homo sapiens
  misc_RNA (1)...(19): siRNA sense strand
gaaggaaggugcucacauu

SEQ ID NO: 416287 - RNA, 19 nt, Homo sapiens
  misc_RNA (1)...(19): siRNA sense strand
gcucacauuccuuaaauua

SEQ ID NO: 416288 - RNA, 19 nt, Homo sapiens
  misc_RNA (1)...(19): siRNA sense strand
gagcgaugauucugacauu

SEQ ID NO: 416289 - RNA, 19 nt, Homo sapiens
  misc_RNA (1)...(19): siRNA sense strand
gaugauacagcacugauaa

SEQ ID NO: 416290 - RNA, 19 nt, Homo sapiens
  misc_RNA (1)...(19): siRNA sense strand
gaauacugcagcuuccuua

SEQ ID NO: 416291 - RNA, 19 nt, Homo sapiens
  misc_RNA (1)...(19): siRNA sense strand
gagagaaaccuguguugug

SEQ ID NO: 416292 - RNA, 19 nt, Homo sapiens
  misc_RNA (1)...(19): siRNA sense strand
gcuaucauacuggcuauua

SEQ ID NO: 416293 - RNA, 19 nt, Homo sapiens
  misc_RNA (1)...(19): siRNA sense strand
uaagcaugcucuaaagaau

SEQ ID NO: 416294 - RNA, 19 nt, Homo sapiens
  misc_RNA (1)...(19): siRNA sense strand
ucugugaaguagcuaauaa

SEQ ID NO: 416295 - RNA, 19 nt, Homo sapiens
  misc_RNA (1)...(19): siRNA sense strand
ggaaauagagaggagcaaa

SEQ ID NO: 416296 - RNA, 19 nt, Homo sapiens
  misc_RNA (1)...(19): siRNA sense strand
gaaaaugaaagccaaguuu

SEQ ID NO: 416297 - RNA, 19 nt, Homo sapiens
  misc_RNA (1)...(19): siRNA sense strand
gugcucacauuccuuaaau

SEQ ID NO: 416298 - RNA, 19 nt, Homo sapiens
  misc_RNA (1)...(19): siRNA sense strand
ucagaagacgguugcauuu

SEQ ID NO: 416299 - RNA, 19 nt, Homo sapiens
  misc_RNA (1)...(19): siRNA sense strand
cagaagacgguugcauuua

SEQ ID NO: 416300 - RNA, 19 nt, Homo sapiens
  misc_RNA (1)...(19): siRNA sense strand
gcacaggccagagcgauga

SEQ ID NO: 416301 - RNA, 19 nt, Homo sapiens
  misc_RNA (1)...(19): siRNA sense strand
gcugaugcuuugggaagua

SEQ ID NO: 416302 - RNA, 19 nt, Homo sapiens
  misc_RNA (1)...(19): siRNA sense strand
ccaaaucugcuccauggaa

SEQ ID NO: 416303 - RNA, 19 nt, Homo sapiens
  misc_RNA (1)...(19): siRNA sense strand
ggaugauacagcacugaua

SEQ ID NO: 416304 - RNA, 19 nt, Homo sapiens
  misc_RNA (1)...(19): siRNA sense strand
gauaacaucaagcccaaau

SEQ ID NO: 416305 - RNA, 19 nt, Homo sapiens
  misc_RNA (1)...(19): siRNA sense strand
agaagacgguugcauuuac

SEQ ID NO: 416306 - RNA, 19 nt, Homo sapiens
  misc_RNA (1)...(19): siRNA sense strand
gcgaugauucugacauuug

SEQ ID NO: 416307 - RNA, 19 nt, Homo sapiens
  misc_RNA (1)...(19): siRNA sense strand
gguuuacacuggauaugga

SEQ ID NO: 416308 - RNA, 19 nt, Homo sapiens
  misc_RNA (1)...(19): siRNA sense strand
gcagcuuccuuacaacagu

SEQ ID NO: 416309 - RNA, 19 nt, Homo sapiens
  misc_RNA (1)...(19): siRNA sense strand
ugaugaugcugaugcuuug

SEQ ID NO: 416310 - RNA, 19 nt, Homo sapiens
  misc_RNA (1)...(19): siRNA sense strand
gaaaaccugcuaagaagaa

SEQ ID NO: 416311 - RNA, 19 nt, Homo sapiens
  misc_RNA (1)...(19): siRNA sense strand
aaacuucggguaaaccaaa

SEQ ID NO: 416312 - RNA, 19 nt, Homo sapiens
  misc_RNA (1)...(19): siRNA sense strand
aaagccaaguuucaacaga

SEQ ID NO: 416313 - RNA, 19 nt, Homo sapiens
  misc_RNA (1)...(19): siRNA sense strand
aaagaaaaccugcuaagaa

SEQ ID NO: 416314 - RNA, 19 nt, Homo sapiens
  misc_RNA (1)...(19): siRNA sense strand
ugggaaguauguuaauuuc

SEQ ID NO: 416315 - RNA, 19 nt, Homo sapiens
  misc_RNA (1)...(19): siRNA sense strand
uaacaucaagcccaaaucu

SEQ ID NO: 416316 - RNA, 19 nt, Homo sapiens
  misc_RNA (1)...(19): siRNA sense strand
uaagagagaaaccuguguu

SEQ ID NO: 416317 - RNA, 19 nt, Homo sapiens
  misc_RNA (1)...(19): siRNA sense strand
caacagaugaaagugagaa

SEQ ID NO: 416318 - RNA, 19 nt, Homo sapiens
  misc_RNA (1)...(19): siRNA sense strand
gaagacgguugcauuuacc

SEQ ID NO: 416319 - RNA, 19 nt, Homo sapiens
  misc_RNA (1)...(19): siRNA sense strand
uacacuggauauggaaaua

SEQ ID NO: 416320 - RNA, 19 nt, Homo sapiens
  misc_RNA (1)...(19): siRNA sense strand
uuaagcaugcucuaaagaa

SEQ ID NO: 416321 - RNA, 19 nt, Homo sapiens
  misc_RNA (1)...(19): siRNA sense strand
ggugacauuugugaaacuu

SEQ ID NO: 416322 - RNA, 19 nt, Homo sapiens
  misc_RNA (1)...(19): siRNA sense strand
uacugcagcuuccuuacaa

SEQ ID NO: 416323 - RNA, 19 nt, Homo sapiens
  misc_RNA (1)...(19): siRNA sense strand
ccucccauauguccagauu

SEQ ID NO: 416324 - RNA, 19 nt, Homo sapiens
  misc_RNA (1)...(19): siRNA sense strand
gaaauagagaggagcaaaa

SEQ ID NO: 416325 - RNA, 19 nt, Homo sapiens
  misc_RNA (1)...(19): siRNA sense strand
cacuggauauggaaauaga

SEQ ID NO: 416326 - RNA, 19 nt, Homo sapiens
  misc_RNA (1)...(19): siRNA sense strand
guccagauucucuugauga

SEQ ID NO: 416327 - RNA, 19 nt, Homo sapiens
  misc_RNA (1)...(19): siRNA sense strand
gucagaagacgguugcauu

SEQ ID NO: 416328 - RNA, 19 nt, Homo sapiens
  misc_RNA (1)...(19): siRNA sense strand
ucugacauuugggaugaua

SEQ ID NO: 416329 - RNA, 19 nt, Homo sapiens
  misc_RNA (1)...(19): siRNA sense strand
cgaugauucugacauuugg

SEQ ID NO: 416330 - RNA, 19 nt, Homo sapiens
  misc_RNA (1)...(19): siRNA sense strand
gaauaaaagccaaaagaag

SEQ ID NO: 416331 - RNA, 19 nt, Homo sapiens
  misc_RNA (1)...(19): siRNA sense strand
gcuuugggaaguauguuaa

SEQ ID NO: 416332 - RNA, 19 nt, Homo sapiens
  misc_RNA (1)...(19): siRNA sense strand
ucccauauguccagauucu

SEQ ID NO: 416333 - RNA, 19 nt, Homo sapiens
  misc_RNA (1)...(19): siRNA sense strand
aagccaaguuucaacagau

SEQ ID NO: 416334 - RNA, 19 nt, Homo sapiens
  misc_RNA (1)...(19): siRNA sense strand
aagaaaaccugcuaagaag

SEQ ID NO: 416335 - RNA, 19 nt, Homo sapiens
  misc_RNA (1)...(19): siRNA sense strand
gcauuuacccagcuaccau

SEQ ID NO: 416336 - RNA, 19 nt, Homo sapiens
  misc_RNA (1)...(19): siRNA sense strand
gaaacuucggguaaaccaa

SEQ ID NO: 416337 - RNA, 19 nt, Homo sapiens
  misc_RNA (1)...(19): siRNA sense strand
ggugcucacauuccuuaaa

SEQ ID NO: 416338 - RNA, 19 nt, Homo sapiens
  misc_RNA (1)...(19): siRNA sense strand
cuaucauacuggcuauuau

SEQ ID NO: 416339 - RNA, 19 nt, Homo sapiens
  misc_RNA (1)...(19): siRNA sense strand
cccaccaccucccauaugu

SEQ ID NO: 416340 - RNA, 19 nt, Homo sapiens
  misc_RNA (1)...(19): siRNA sense strand
gaaaguuggggacaaaugu

SEQ ID NO: 416341 - RNA, 19 nt, Homo sapiens
  misc_RNA (1)...(19): siRNA sense strand
aaccugcuaagaagaauaa

SEQ ID NO: 416342 - RNA, 19 nt, Homo sapiens
  misc_RNA (1)...(19): siRNA sense strand
auucugacauuugggauga

SEQ ID NO: 416343 - RNA, 19 nt, Homo sapiens
  misc_RNA (1)...(19): siRNA sense strand
uugaugaugcugaugcuuu

SEQ ID NO: 416344 - RNA, 19 nt, Homo sapiens
  misc_RNA (1)...(19): siRNA sense strand
ggaggauuccgugcuguuc

SEQ ID NO: 416345 - RNA, 19 nt, Homo sapiens
  misc_RNA (1)...(19): siRNA sense strand
caaaaucuguccgaucuac

SEQ ID NO: 416346 - RNA, 19 nt, Homo sapiens
  misc_RNA (1)...(19): siRNA sense strand
ucauuuaagcaugcucuaa

SEQ ID NO: 416347 - RNA, 19 nt, Homo sapiens
  misc_RNA (1)...(19): siRNA sense strand
aaaccugcuaagaagaaua

SEQ ID NO: 416348 - RNA, 19 nt, Homo sapiens
  misc_RNA (1)...(19): siRNA sense strand
gggaaguauguuaauuuca

SEQ ID NO: 416349 - RNA, 19 nt, Homo sapiens
  misc_RNA (1)...(19): siRNA sense strand
aaaucuguccgaucuacuu

SEQ ID NO: 416350 - RNA, 19 nt, Homo sapiens
  misc_RNA (1)...(19): siRNA sense strand
gguugcauuuacccagcua

SEQ ID NO: 416351 - RNA, 19 nt, Homo sapiens
  misc_RNA (1)...(19): siRNA sense strand
gagcgaugauucugacauu

SEQ ID NO: 416352 - RNA, 19 nt, Homo sapiens
  misc_RNA (1)...(19): siRNA sense strand
gaugauacagcacugauaa

SEQ ID NO: 416353 - RNA, 19 nt, Homo sapiens
  misc_RNA (1)...(19): siRNA sense strand
gaauacugcagcuuccuua

SEQ ID NO: 416354 - RNA, 19 nt, Homo sapiens
  misc_RNA (1)...(19): siRNA sense strand
gagagaaaccuguguugug

SEQ ID NO: 416355 - RNA, 19 nt, Homo sapiens
  misc_RNA (1)...(19): siRNA sense strand
gcuaucauacuggcuauua

SEQ ID NO: 416356 - RNA, 19 nt, Homo sapiens
  misc_RNA (1)...(19): siRNA sense strand
uaagcaugcucuaaagaau

SEQ ID NO: 416357 - RNA, 19 nt, Homo sapiens
  misc_RNA (1)...(19): siRNA sense strand
ucugugaaguagcuaauaa

SEQ ID NO: 416358 - RNA, 19 nt, Homo sapiens
  misc_RNA (1)...(19): siRNA sense strand
ggaaauagagaggagcaaa

SEQ ID NO: 416359 - RNA, 19 nt, Homo sapiens
  misc_RNA (1)...(19): siRNA sense strand
gaaaaugaaagccaaguuu

SEQ ID NO: 416360 - RNA, 19 nt, Homo sapiens
  misc_RNA (1)...(19): siRNA sense strand
ucagaagacgguugcauuu

SEQ ID NO: 416361 - RNA, 19 nt, Homo sapiens
  misc_RNA (1)...(19): siRNA sense strand
cagaagacgguugcauuua

SEQ ID NO: 416362 - RNA, 19 nt, Homo sapiens
  misc_RNA (1)...(19): siRNA sense strand
gcacaggccagagcgauga

SEQ ID NO: 416363 - RNA, 19 nt, Homo sapiens
  misc_RNA (1)...(19): siRNA sense strand
gcugaugcuuugggaagua

SEQ ID NO: 416364 - RNA, 19 nt, Homo sapiens
  misc_RNA (1)...(19): siRNA sense strand
ccaaaucugcuccauggaa

SEQ ID NO: 416365 - RNA, 19 nt, Homo sapiens
  misc_RNA (1)...(19): siRNA sense strand
ggaugauacagcacugaua

SEQ ID NO: 416366 - RNA, 19 nt, Homo sapiens
  misc_RNA (1)...(19): siRNA sense strand
gauaacaucaagcccaaau

SEQ ID NO: 416367 - RNA, 19 nt, Homo sapiens
  misc_RNA (1)...(19): siRNA sense strand
gcgaugauucugacauuug

SEQ ID NO: 416368 - RNA, 19 nt, Homo sapiens
  misc_RNA (1)...(19): siRNA sense strand
agaagacgguugcauuuac

SEQ ID NO: 416369 - RNA, 19 nt, Homo sapiens
  misc_RNA (1)...(19): siRNA sense strand
gguuuacacuggauaugga

SEQ ID NO: 416370 - RNA, 19 nt, Homo sapiens
  misc_RNA (1)...(19): siRNA sense strand
gcagcuuccuuacaacagu

SEQ ID NO: 416371 - RNA, 19 nt, Homo sapiens
  misc_RNA (1)...(19): siRNA sense strand
ugaugaugcugaugcuuug

SEQ ID NO: 416372 - RNA, 19 nt, Homo sapiens
  misc_RNA (1)...(19): siRNA sense strand
gaaaaccugcuaagaagaa

SEQ ID NO: 416373 - RNA, 19 nt, Homo sapiens
  misc_RNA (1)...(19): siRNA sense strand
aaacuucggguaaaccaaa

SEQ ID NO: 416374 - RNA, 19 nt, Homo sapiens
  misc_RNA (1)...(19): siRNA sense strand
aaagccaaguuucaacaga

SEQ ID NO: 416375 - RNA, 19 nt, Homo sapiens
  misc_RNA (1)...(19): siRNA sense strand
aaagaaaaccugcuaagaa

SEQ ID NO: 416376 - RNA, 19 nt, Homo sapiens
  misc_RNA (1)...(19): siRNA sense strand
ugggaaguauguuaauuuc

SEQ ID NO: 416377 - RNA, 19 nt, Homo sapiens
  misc_RNA (1)...(19): siRNA sense strand
uaacaucaagcccaaaucu

SEQ ID NO: 416378 - RNA, 19 nt, Homo sapiens
  misc_RNA (1)...(19): siRNA sense strand
uaagagagaaaccuguguu

SEQ ID NO: 416379 - RNA, 19 nt, Homo sapiens
  misc_RNA (1)...(19): siRNA sense strand
caacagaugaaagugagaa

SEQ ID NO: 416380 - RNA, 19 nt, Homo sapiens
  misc_RNA (1)...(19): siRNA sense strand
gaagacgguugcauuuacc

SEQ ID NO: 416381 - RNA, 19 nt, Homo sapiens
  misc_RNA (1)...(19): siRNA sense strand
uacacuggauauggaaaua

SEQ ID NO: 416382 - RNA, 19 nt, Homo sapiens
  misc_RNA (1)...(19): siRNA sense strand
uuaagcaugcucuaaagaa

SEQ ID NO: 416383 - RNA, 19 nt, Homo sapiens
  misc_RNA (1)...(19): siRNA sense strand
ggugacauuugugaaacuu

SEQ ID NO: 416384 - RNA, 19 nt, Homo sapiens
  misc_RNA (1)...(19): siRNA sense strand
uacugcagcuuccuuacaa

SEQ ID NO: 416385 - RNA, 19 nt, Homo sapiens
  misc_RNA (1)...(19): siRNA sense strand
ccucccauauguccagauu

SEQ ID NO: 416386 - RNA, 19 nt, Homo sapiens
  misc_RNA (1)...(19): siRNA sense strand
gaaauagagaggagcaaaa

SEQ ID NO: 416387 - RNA, 19 nt, Homo sapiens
  misc_RNA (1)...(19): siRNA sense strand
cacuggauauggaaauaga

SEQ ID NO: 416388 - RNA, 19 nt, Homo sapiens
  misc_RNA (1)...(19): siRNA sense strand
guccagauucucuugauga

SEQ ID NO: 416389 - RNA, 19 nt, Homo sapiens
  misc_RNA (1)...(19): siRNA sense strand
gucagaagacgguugcauu

SEQ ID NO: 416390 - RNA, 19 nt, Homo sapiens
  misc_RNA (1)...(19): siRNA sense strand
ucugacauuugggaugaua

SEQ ID NO: 416391 - RNA, 19 nt, Homo sapiens
  misc_RNA (1)...(19): siRNA sense strand
cgaugauucugacauuugg

SEQ ID NO: 416392 - RNA, 19 nt, Homo sapiens
  misc_RNA (1)...(19): siRNA sense strand
gaauaaaagccaaaagaag

SEQ ID NO: 416393 - RNA, 19 nt, Homo sapiens
  misc_RNA (1)...(19): siRNA sense strand
gcuuugggaaguauguuaa

SEQ ID NO: 416394 - RNA, 19 nt, Homo sapiens
  misc_RNA (1)...(19): siRNA sense strand
ucccauauguccagauucu

SEQ ID NO: 416395 - RNA, 19 nt, Homo sapiens
  misc_RNA (1)...(19): siRNA sense strand
aagccaaguuucaacagau

SEQ ID NO: 416396 - RNA, 19 nt, Homo sapiens
  misc_RNA (1)...(19): siRNA sense strand
aagaaaaccugcuaagaag

SEQ ID NO: 416397 - RNA, 19 nt, Homo sapiens
  misc_RNA (1)...(19): siRNA sense strand
gcauuuacccagcuaccau

SEQ ID NO: 416398 - RNA, 19 nt, Homo sapiens
  misc_RNA (1)...(19): siRNA sense strand
gaaacuucggguaaaccaa

SEQ ID NO: 416399 - RNA, 19 nt, Homo sapiens
  misc_RNA (1)...(19): siRNA sense strand
cuaucauacuggcuauuau

SEQ ID NO: 416400 - RNA, 19 nt, Homo sapiens
  misc_RNA (1)...(19): siRNA sense strand
cccaccaccucccauaugu

SEQ ID NO: 416401 - RNA, 19 nt, Homo sapiens
  misc_RNA (1)...(19): siRNA sense strand
gaaaguuggggacaaaugu

SEQ ID NO: 416402 - RNA, 19 nt, Homo sapiens
  misc_RNA (1)...(19): siRNA sense strand
aaccugcuaagaagaauaa

SEQ ID NO: 416403 - RNA, 19 nt, Homo sapiens
  misc_RNA (1)...(19): siRNA sense strand
uugaugaugcugaugcuuu

SEQ ID NO: 416404 - RNA, 19 nt, Homo sapiens
  misc_RNA (1)...(19): siRNA sense strand
auucugacauuugggauga

SEQ ID NO: 416405 - RNA, 19 nt, Homo sapiens
  misc_RNA (1)...(19): siRNA sense strand
ggaggauuccgugcuguuc

SEQ ID NO: 416406 - RNA, 19 nt, Homo sapiens
  misc_RNA (1)...(19): siRNA sense strand
ucauuuaagcaugcucuaa

SEQ ID NO: 416407 - RNA, 19 nt, Homo sapiens
  misc_RNA (1)...(19): siRNA sense strand
caaaaucuguccgaucuac

SEQ ID NO: 416408 - RNA, 19 nt, Homo sapiens
  misc_RNA (1)...(19): siRNA sense strand
aaaccugcuaagaagaaua

SEQ ID NO: 416409 - RNA, 19 nt, Homo sapiens
  misc_RNA (1)...(19): siRNA sense strand
gggaaguauguuaauuuca

SEQ ID NO: 416410 - RNA, 19 nt, Homo sapiens
  misc_RNA (1)...(19): siRNA sense strand
aaaucuguccgaucuacuu

SEQ ID NO: 416411 - RNA, 19 nt, Homo sapiens
  misc_RNA (1)...(19): siRNA sense strand
gguugcauuuacccagcua

SEQ ID NO: 416412 - RNA, 19 nt, Homo sapiens
  misc_RNA (1)...(19): siRNA sense strand
gagcgaugauucugacauu

SEQ ID NO: 416413 - RNA, 19 nt, Homo sapiens
  misc_RNA (1)...(19): siRNA sense strand
gaugauacagcacugauaa

SEQ ID NO: 416414 - RNA, 19 nt, Homo sapiens
  misc_RNA (1)...(19): siRNA sense strand
gaauacugcagcuuccuua

SEQ ID NO: 416415 - RNA, 19 nt, Homo sapiens
  misc_RNA (1)...(19): siRNA sense strand
gagagaaaccuguguugug

SEQ ID NO: 416416 - RNA, 19 nt, Homo sapiens
  misc_RNA (1)...(19): siRNA sense strand
gcuaucauacuggcuauua

SEQ ID NO: 416417 - RNA, 19 nt, Homo sapiens
  misc_RNA (1)...(19): siRNA sense strand
uaagcaugcucuaaagaau

SEQ ID NO: 416418 - RNA, 19 nt, Homo sapiens
  misc_RNA (1)...(19): siRNA sense strand
ucugugaaguagcuaauaa

SEQ ID NO: 416419 - RNA, 19 nt, Homo sapiens
  misc_RNA (1)...(19): siRNA sense strand
ggaaauagagaggagcaaa

SEQ ID NO: 416420 - RNA, 19 nt, Homo sapiens
  misc_RNA (1)...(19): siRNA sense strand
gaaaaugaaagccaaguuu

SEQ ID NO: 416421 - RNA, 19 nt, Homo sapiens
  misc_RNA (1)...(19): siRNA sense strand
ucagaagacgguugcauuu

SEQ ID NO: 416422 - RNA, 19 nt, Homo sapiens
  misc_RNA (1)...(19): siRNA sense strand
cagaagacgguugcauuua

SEQ ID NO: 416423 - RNA, 19 nt, Homo sapiens
  misc_RNA (1)...(19): siRNA sense strand
gcacaggccagagcgauga

SEQ ID NO: 416424 - RNA, 19 nt, Homo sapiens
  misc_RNA (1)...(19): siRNA sense strand
gcugaugcuuugggaagua

SEQ ID NO: 416425 - RNA, 19 nt, Homo sapiens
  misc_RNA (1)...(19): siRNA sense strand
ccaaaucugcuccauggaa

SEQ ID NO: 416426 - RNA, 19 nt, Homo sapiens
  misc_RNA (1)...(19): siRNA sense strand
ggaugauacagcacugaua

SEQ ID NO: 416427 - RNA, 19 nt, Homo sapiens
  misc_RNA (1)...(19): siRNA sense strand
gauaacaucaagcccaaau

SEQ ID NO: 416428 - RNA, 19 nt, Homo sapiens
  misc_RNA (1)...(19): siRNA sense strand
gcgaugauucugacauuug

SEQ ID NO: 416429 - RNA, 19 nt, Homo sapiens
  misc_RNA (1)...(19): siRNA sense strand
agaagacgguugcauuuac

SEQ ID NO: 416430 - RNA, 19 nt, Homo sapiens
  misc_RNA (1)...(19): siRNA sense strand
gguuuacacuggauaugga

SEQ ID NO: 416431 - RNA, 19 nt, Homo sapiens
  misc_RNA (1)...(19): siRNA sense strand
gcagcuuccuuacaacagu

SEQ ID NO: 416432 - RNA, 19 nt, Homo sapiens
  misc_RNA (1)...(19): siRNA sense strand
ugaugaugcugaugcuuug

SEQ ID NO: 416433 - RNA, 19 nt, Homo sapiens
  misc_RNA (1)...(19): siRNA sense strand
gaaaaccugcuaagaagaa

SEQ ID NO: 416434 - RNA, 19 nt, Homo sapiens
  misc_RNA (1)...(19): siRNA sense strand
aaacuucggguaaaccaaa

SEQ ID NO: 416435 - RNA, 19 nt, Homo sapiens
  misc_RNA (1)...(19): siRNA sense strand
aaagccaaguuucaacaga

SEQ ID NO: 416436 - RNA, 19 nt, Homo sapiens
  misc_RNA (1)...(19): siRNA sense strand
aaagaaaaccugcuaagaa

SEQ ID NO: 416437 - RNA, 19 nt, Homo sapiens
  misc_RNA (1)...(19): siRNA sense strand
ugggaaguauguuaauuuc

SEQ ID NO: 416438 - RNA, 19 nt, Homo sapiens
  misc_RNA (1)...(19): siRNA sense strand
uaacaucaagcccaaaucu

SEQ ID NO: 416439 - RNA, 19 nt, Homo sapiens
  misc_RNA (1)...(19): siRNA sense strand
uaagagagaaaccuguguu

SEQ ID NO: 416440 - RNA, 19 nt, Homo sapiens
  misc_RNA (1)...(19): siRNA sense strand
caacagaugaaagugagaa

SEQ ID NO: 416441 - RNA, 19 nt, Homo sapiens
  misc_RNA (1)...(19): siRNA sense strand
gaagacgguugcauuuacc

SEQ ID NO: 416442 - RNA, 19 nt, Homo sapiens
  misc_RNA (1)...(19): siRNA sense strand
uacacuggauauggaaaua

SEQ ID NO: 416443 - RNA, 19 nt, Homo sapiens
  misc_RNA (1)...(19): siRNA sense strand
uuaagcaugcucuaaagaa

SEQ ID NO: 416444 - RNA, 19 nt, Homo sapiens
  misc_RNA (1)...(19): siRNA sense strand
ggugacauuugugaaacuu

SEQ ID NO: 416445 - RNA, 19 nt, Homo sapiens
  misc_RNA (1)...(19): siRNA sense strand
uacugcagcuuccuuacaa

SEQ ID NO: 416446 - RNA, 19 nt, Homo sapiens
  misc_RNA (1)...(19): siRNA sense strand
ccucccauauguccagauu

SEQ ID NO: 416447 - RNA, 19 nt, Homo sapiens
  misc_RNA (1)...(19): siRNA sense strand
gaaauagagaggagcaaaa

SEQ ID NO: 416448 - RNA, 19 nt, Homo sapiens
  misc_RNA (1)...(19): siRNA sense strand
cacuggauauggaaauaga

SEQ ID NO: 416449 - RNA, 19 nt, Homo sapiens
  misc_RNA (1)...(19): siRNA sense strand
guccagauucucuugauga

SEQ ID NO: 416450 - RNA, 19 nt, Homo sapiens
  misc_RNA (1)...(19): siRNA sense strand
gucagaagacgguugcauu

SEQ ID NO: 416451 - RNA, 19 nt, Homo sapiens
  misc_RNA (1)...(19): siRNA sense strand
ucugacauuugggaugaua

SEQ ID NO: 416452 - RNA, 19 nt, Homo sapiens
  misc_RNA (1)...(19): siRNA sense strand
cgaugauucugacauuugg

SEQ ID NO: 416453 - RNA, 19 nt, Homo sapiens
  misc_RNA (1)...(19): siRNA sense strand
gaauaaaagccaaaagaag

SEQ ID NO: 416454 - RNA, 19 nt, Homo sapiens
  misc_RNA (1)...(19): siRNA sense strand
gcuuugggaaguauguuaa

SEQ ID NO: 416455 - RNA, 19 nt, Homo sapiens
  misc_RNA (1)...(19): siRNA sense strand
ucccauauguccagauucu

SEQ ID NO: 416456 - RNA, 19 nt, Homo sapiens
  misc_RNA (1)...(19): siRNA sense strand
aagccaaguuucaacagau

SEQ ID NO: 416457 - RNA, 19 nt, Homo sapiens
  misc_RNA (1)...(19): siRNA sense strand
aagaaaaccugcuaagaag

SEQ ID NO: 416458 - RNA, 19 nt, Homo sapiens
  misc_RNA (1)...(19): siRNA sense strand
gcauuuacccagcuaccau

SEQ ID NO: 416459 - RNA, 19 nt, Homo sapiens
  misc_RNA (1)...(19): siRNA sense strand
gaaacuucggguaaaccaa

SEQ ID NO: 416460 - RNA, 19 nt, Homo sapiens
  misc_RNA (1)...(19): siRNA sense strand
cuaucauacuggcuauuau

SEQ ID NO: 416461 - RNA, 19 nt, Homo sapiens
  misc_RNA (1)...(19): siRNA sense strand
cccaccaccucccauaugu

SEQ ID NO: 416462 - RNA, 19 nt, Homo sapiens
  misc_RNA (1)...(19): siRNA sense strand
gaaaguuggggacaaaugu

SEQ ID NO: 416463 - RNA, 19 nt, Homo sapiens
  misc_RNA (1)...(19): siRNA sense strand
aaccugcuaagaagaauaa

SEQ ID NO: 416464 - RNA, 19 nt, Homo sapiens
  misc_RNA (1)...(19): siRNA sense strand
uugaugaugcugaugcuuu

SEQ ID NO: 416465 - RNA, 19 nt, Homo sapiens
  misc_RNA (1)...(19): siRNA sense strand
auucugacauuugggauga

SEQ ID NO: 416466 - RNA, 19 nt, Homo sapiens
  misc_RNA (1)...(19): siRNA sense strand
ggaggauuccgugcuguuc

SEQ ID NO: 416467 - RNA, 19 nt, Homo sapiens
  misc_RNA (1)...(19): siRNA sense strand
ucauuuaagcaugcucuaa

SEQ ID NO: 416468 - RNA, 19 nt, Homo sapiens
  misc_RNA (1)...(19): siRNA sense strand
caaaaucuguccgaucuac

SEQ ID NO: 416469 - RNA, 19 nt, Homo sapiens
  misc_RNA (1)...(19): siRNA sense strand
aaaccugcuaagaagaaua

SEQ ID NO: 416470 - RNA, 19 nt, Homo sapiens
  misc_RNA (1)...(19): siRNA sense strand
gggaaguauguuaauuuca

SEQ ID NO: 416471 - RNA, 19 nt, Homo sapiens
  misc_RNA (1)...(19): siRNA sense strand
aaaucuguccgaucuacuu

SEQ ID NO: 416472 - RNA, 19 nt, Homo sapiens
  misc_RNA (1)...(19): siRNA sense strand
gguugcauuuacccagcua

SEQ ID NO: 416473 - RNA, 19 nt, Homo sapiens
  misc_RNA (1)...(19): siRNA sense strand
gagcgaugauucugacauu

SEQ ID NO: 416474 - RNA, 19 nt, Homo sapiens
  misc_RNA (1)...(19): siRNA sense strand
gaugauacagcacugauaa

SEQ ID NO: 416475 - RNA, 19 nt, Homo sapiens
  misc_RNA (1)...(19): siRNA sense strand
gaauacugcagcuuccuua

SEQ ID NO: 416476 - RNA, 19 nt, Homo sapiens
  misc_RNA (1)...(19): siRNA sense strand
gagagaaaccuguguugug

SEQ ID NO: 416477 - RNA, 19 nt, Homo sapiens
  misc_RNA (1)...(19): siRNA sense strand
gcuaucauacuggcuauua

SEQ ID NO: 416478 - RNA, 19 nt, Homo sapiens
  misc_RNA (1)...(19): siRNA sense strand
uaagcaugcucuaaagaau

SEQ ID NO: 416479 - RNA, 19 nt, Homo sapiens
  misc_RNA (1)...(19): siRNA sense strand
ucugugaaguagcuaauaa

SEQ ID NO: 416480 - RNA, 19 nt, Homo sapiens
  misc_RNA (1)...(19): siRNA sense strand
ggaaauagagaggagcaaa

SEQ ID NO: 416481 - RNA, 19 nt, Homo sapiens
  misc_RNA (1)...(19): siRNA sense strand
gaaaaugaaagccaaguuu

SEQ ID NO: 416482 - RNA, 19 nt, Homo sapiens
  misc_RNA (1)...(19): siRNA sense strand
ucagaagacgguugcauuu

SEQ ID NO: 416483 - RNA, 19 nt, Homo sapiens
  misc_RNA (1)...(19): siRNA sense strand
cagaagacgguugcauuua

SEQ ID NO: 416484 - RNA, 19 nt, Homo sapiens
  misc_RNA (1)...(19): siRNA sense strand
gcacaggccagagcgauga

SEQ ID NO: 416485 - RNA, 19 nt, Homo sapiens
  misc_RNA (1)...(19): siRNA sense strand
gcugaugcuuugggaagua

SEQ ID NO: 416486 - RNA, 19 nt, Homo sapiens
  misc_RNA (1)...(19): siRNA sense strand
ccaaaucugcuccauggaa

SEQ ID NO: 416487 - RNA, 19 nt, Homo sapiens
  misc_RNA (1)...(19): siRNA sense strand
ggaugauacagcacugaua

SEQ ID NO: 416488 - RNA, 19 nt, Homo sapiens
  misc_RNA (1)...(19): siRNA sense strand
gauaacaucaagcccaaau

SEQ ID NO: 416489 - RNA, 19 nt, Homo sapiens
  misc_RNA (1)...(19): siRNA sense strand
gcgaugauucugacauuug

SEQ ID NO: 416490 - RNA, 19 nt, Homo sapiens
  misc_RNA (1)...(19): siRNA sense strand
agaagacgguugcauuuac

SEQ ID NO: 416491 - RNA, 19 nt, Homo sapiens
  misc_RNA (1)...(19): siRNA sense strand
gguuuacacuggauaugga

SEQ ID NO: 416492 - RNA, 19 nt, Homo sapiens
  misc_RNA (1)...(19): siRNA sense strand
gcagcuuccuuacaacagu

SEQ ID NO: 416493 - RNA, 19 nt, Homo sapiens
  misc_RNA (1)...(19): siRNA sense strand
ugaugaugcugaugcuuug

SEQ ID NO: 416494 - RNA, 19 nt, Homo sapiens
  misc_RNA (1)...(19): siRNA sense strand
gaaaaccugcuaagaagaa

SEQ ID NO: 416495 - RNA, 19 nt, Homo sapiens
  misc_RNA (1)...(19): siRNA sense strand
aaacuucggguaaaccaaa

SEQ ID NO: 416496 - RNA, 19 nt, Homo sapiens
  misc_RNA (1)...(19): siRNA sense strand
aaagccaaguuucaacaga

SEQ ID NO: 416497 - RNA, 19 nt, Homo sapiens
  misc_RNA (1)...(19): siRNA sense strand
aaagaaaaccugcuaagaa

SEQ ID NO: 416498 - RNA, 19 nt, Homo sapiens
  misc_RNA (1)...(19): siRNA sense strand
ugggaaguauguuaauuuc

SEQ ID NO: 416499 - RNA, 19 nt, Homo sapiens
  misc_RNA (1)...(19): siRNA sense strand
uaacaucaagcccaaaucu

SEQ ID NO: 416500 - RNA, 19 nt, Homo sapiens
  misc_RNA (1)...(19): siRNA sense strand
uaagagagaaaccuguguu

SEQ ID NO: 416501 - RNA, 19 nt, Homo sapiens
  misc_RNA (1)...(19): siRNA sense strand
caacagaugaaagugagaa

SEQ ID NO: 416502 - RNA, 19 nt, Homo sapiens
  misc_RNA (1)...(19): siRNA sense strand
gaagacgguugcauuuacc

SEQ ID NO: 416503 - RNA, 19 nt, Homo sapiens
  misc_RNA (1)...(19): siRNA sense strand
uacacuggauauggaaaua

SEQ ID NO: 416504 - RNA, 19 nt, Homo sapiens
  misc_RNA (1)...(19): siRNA sense strand
uuaagcaugcucuaaagaa

SEQ ID NO: 416505 - RNA, 19 nt, Homo sapiens
  misc_RNA (1)...(19): siRNA sense strand
ggugacauuugugaaacuu

SEQ ID NO: 416506 - RNA, 19 nt, Homo sapiens
  misc_RNA (1)...(19): siRNA sense strand
uacugcagcuuccuuacaa

SEQ ID NO: 416507 - RNA, 19 nt, Homo sapiens
  misc_RNA (1)...(19): siRNA sense strand
ccucccauauguccagauu

SEQ ID NO: 416508 - RNA, 19 nt, Homo sapiens
  misc_RNA (1)...(19): siRNA sense strand
gaaauagagaggagcaaaa

SEQ ID NO: 416509 - RNA, 19 nt, Homo sapiens
  misc_RNA (1)...(19): siRNA sense strand
cacuggauauggaaauaga

SEQ ID NO: 416510 - RNA, 19 nt, Homo sapiens
  misc_RNA (1)...(19): siRNA sense strand
guccagauucucuugauga

SEQ ID NO: 416511 - RNA, 19 nt, Homo sapiens
  misc_RNA (1)...(19): siRNA sense strand
gucagaagacgguugcauu

SEQ ID NO: 416512 - RNA, 19 nt, Homo sapiens
  misc_RNA (1)...(19): siRNA sense strand
ucugacauuugggaugaua

SEQ ID NO: 416513 - RNA, 19 nt, Homo sapiens
  misc_RNA (1)...(19): siRNA sense strand
cgaugauucugacauuugg

SEQ ID NO: 416514 - RNA, 19 nt, Homo sapiens
  misc_RNA (1)...(19): siRNA sense strand
gaauaaaagccaaaagaag

SEQ ID NO: 416515 - RNA, 19 nt, Homo sapiens
  misc_RNA (1)...(19): siRNA sense strand
gcuuugggaaguauguuaa

SEQ ID NO: 416516 - RNA, 19 nt, Homo sapiens
  misc_RNA (1)...(19): siRNA sense strand
ucccauauguccagauucu

SEQ ID NO: 416517 - RNA, 19 nt, Homo sapiens
  misc_RNA (1)...(19): siRNA sense strand
aagccaaguuucaacagau

SEQ ID NO: 416518 - RNA, 19 nt, Homo sapiens
  misc_RNA (1)...(19): siRNA sense strand
aagaaaaccugcuaagaag

SEQ ID NO: 416519 - RNA, 19 nt, Homo sapiens
  misc_RNA (1)...(19): siRNA sense strand
gcauuuacccagcuaccau

SEQ ID NO: 416520 - RNA, 19 nt, Homo sapiens
  misc_RNA (1)...(19): siRNA sense strand
gaaacuucggguaaaccaa

SEQ ID NO: 416521 - RNA, 19 nt, Homo sapiens
  misc_RNA (1)...(19): siRNA sense strand
cuaucauacuggcuauuau

SEQ ID NO: 416522 - RNA, 19 nt, Homo sapiens
  misc_RNA (1)...(19): siRNA sense strand
cccaccaccucccauaugu

SEQ ID NO: 416523 - RNA, 19 nt, Homo sapiens
  misc_RNA (1)...(19): siRNA sense strand
gaaaguuggggacaaaugu

SEQ ID NO: 416524 - RNA, 19 nt, Homo sapiens
  misc_RNA (1)...(19): siRNA sense strand
aaccugcuaagaagaauaa

SEQ ID NO: 416525 - RNA, 19 nt, Homo sapiens
  misc_RNA (1)...(19): siRNA sense strand
uugaugaugcugaugcuuu

SEQ ID NO: 416526 - RNA, 19 nt, Homo sapiens
  misc_RNA (1)...(19): siRNA sense strand
auucugacauuugggauga

SEQ ID NO: 416527 - RNA, 19 nt, Homo sapiens
  misc_RNA (1)...(19): siRNA sense strand
ggaggauuccgugcuguuc

SEQ ID NO: 416528 - RNA, 19 nt, Homo sapiens
  misc_RNA (1)...(19): siRNA sense strand
ucauuuaagcaugcucuaa

SEQ ID NO: 416529 - RNA, 19 nt, Homo sapiens
  misc_RNA (1)...(19): siRNA sense strand
caaaaucuguccgaucuac

SEQ ID NO: 416530 - RNA, 19 nt, Homo sapiens
  misc_RNA (1)...(19): siRNA sense strand
aaaccugcuaagaagaaua

SEQ ID NO: 416531 - RNA, 19 nt, Homo sapiens
  misc_RNA (1)...(19): siRNA sense strand
gggaaguauguuaauuuca

SEQ ID NO: 416532 - RNA, 19 nt, Homo sapiens
  misc_RNA (1)...(19): siRNA sense strand
aaaucuguccgaucuacuu

SEQ ID NO: 416533 - RNA, 19 nt, Homo sapiens
  misc_RNA (1)...(19): siRNA sense strand
gguugcauuuacccagcua

SEQ ID NO: 416534 - RNA, 19 nt, Homo sapiens
  misc_RNA (1)...(19): siRNA sense strand
gagcgaugauucugacauu

SEQ ID NO: 416535 - RNA, 19 nt, Homo sapiens
  misc_RNA (1)...(19): siRNA sense strand
gaugauacagcacugauaa

SEQ ID NO: 416536 - RNA, 19 nt, Homo sapiens
  misc_RNA (1)...(19): siRNA sense strand
gaauacugcagcuuccuua

SEQ ID NO: 416537 - RNA, 19 nt, Homo sapiens
  misc_RNA (1)...(19): siRNA sense strand
gagagaaaccuguguugug

SEQ ID NO: 416538 - RNA, 19 nt, Homo sapiens
  misc_RNA (1)...(19): siRNA sense strand
gcuaucauacuggcuauua

SEQ ID NO: 416539 - RNA, 19 nt, Homo sapiens
  misc_RNA (1)...(19): siRNA sense strand
uaagcaugcucuaaagaau

SEQ ID NO: 416540 - RNA, 19 nt, Homo sapiens
  misc_RNA (1)...(19): siRNA sense strand
ucugugaaguagcuaauaa

SEQ ID NO: 416541 - RNA, 19 nt, Homo sapiens
  misc_RNA (1)...(19): siRNA sense strand
ggaaauagagaggagcaaa

SEQ ID NO: 416542 - RNA, 19 nt, Homo sapiens
  misc_RNA (1)...(19): siRNA sense strand
gaaaaugaaagccaaguuu

SEQ ID NO: 416543 - RNA, 19 nt, Homo sapiens
  misc_RNA (1)...(19): siRNA sense strand
ucagaagacgguugcauuu

SEQ ID NO: 416544 - RNA, 19 nt, Homo sapiens
  misc_RNA (1)...(19): siRNA sense strand
cagaagacgguugcauuua

SEQ ID NO: 416545 - RNA, 19 nt, Homo sapiens
  misc_RNA (1)...(19): siRNA sense strand
gcacaggccagagcgauga

SEQ ID NO: 416546 - RNA, 19 nt, Homo sapiens
  misc_RNA (1)...(19): siRNA sense strand
gcugaugcuuugggaagua

SEQ ID NO: 416547 - RNA, 19 nt, Homo sapiens
  misc_RNA (1)...(19): siRNA sense strand
ccaaaucugcuccauggaa

SEQ ID NO: 416548 - RNA, 19 nt, Homo sapiens
  misc_RNA (1)...(19): siRNA sense strand
ggaugauacagcacugaua

SEQ ID NO: 416549 - RNA, 19 nt, Homo sapiens
  misc_RNA (1)...(19): siRNA sense strand
gauaacaucaagcccaaau

SEQ ID NO: 416550 - RNA, 19 nt, Homo sapiens
  misc_RNA (1)...(19): siRNA sense strand
gcgaugauucugacauuug

SEQ ID NO: 416551 - RNA, 19 nt, Homo sapiens
  misc_RNA (1)...(19): siRNA sense strand
agaagacgguugcauuuac

SEQ ID NO: 416552 - RNA, 19 nt, Homo sapiens
  misc_RNA (1)...(19): siRNA sense strand
gguuuacacuggauaugga

SEQ ID NO: 416553 - RNA, 19 nt, Homo sapiens
  misc_RNA (1)...(19): siRNA sense strand
gcagcuuccuuacaacagu

SEQ ID NO: 416554 - RNA, 19 nt, Homo sapiens
  misc_RNA (1)...(19): siRNA sense strand
ugaugaugcugaugcuuug

SEQ ID NO: 416555 - RNA, 19 nt, Homo sapiens
  misc_RNA (1)...(19): siRNA sense strand
gaaaaccugcuaagaagaa

SEQ ID NO: 416556 - RNA, 19 nt, Homo sapiens
  misc_RNA (1)...(19): siRNA sense strand
aaacuucggguaaaccaaa

SEQ ID NO: 416557 - RNA, 19 nt, Homo sapiens
  misc_RNA (1)...(19): siRNA sense strand
aaagccaaguuucaacaga

SEQ ID NO: 416558 - RNA, 19 nt, Homo sapiens
  misc_RNA (1)...(19): siRNA sense strand
aaagaaaaccugcuaagaa

SEQ ID NO: 416559 - RNA, 19 nt, Homo sapiens
  misc_RNA (1)...(19): siRNA sense strand
ugggaaguauguuaauuuc

SEQ ID NO: 416560 - RNA, 19 nt, Homo sapiens
  misc_RNA (1)...(19): siRNA sense strand
uaacaucaagcccaaaucu

SEQ ID NO: 416561 - RNA, 19 nt, Homo sapiens
  misc_RNA (1)...(19): siRNA sense strand
uaagagagaaaccuguguu

SEQ ID NO: 416562 - RNA, 19 nt, Homo sapiens
  misc_RNA (1)...(19): siRNA sense strand
caacagaugaaagugagaa

SEQ ID NO: 416563 - RNA, 19 nt, Homo sapiens
  misc_RNA (1)...(19): siRNA sense strand
gaagacgguugcauuuacc

SEQ ID NO: 416564 - RNA, 19 nt, Homo sapiens
  misc_RNA (1)...(19): siRNA sense strand
uacacuggauauggaaaua

SEQ ID NO: 416565 - RNA, 19 nt, Homo sapiens
  misc_RNA (1)...(19): siRNA sense strand
uuaagcaugcucuaaagaa

SEQ ID NO: 416566 - RNA, 19 nt, Homo sapiens
  misc_RNA (1)...(19): siRNA sense strand
ggugacauuugugaaacuu

SEQ ID NO: 416567 - RNA, 19 nt, Homo sapiens
  misc_RNA (1)...(19): siRNA sense strand
uacugcagcuuccuuacaa

SEQ ID NO: 416568 - RNA, 19 nt, Homo sapiens
  misc_RNA (1)...(19): siRNA sense strand
ccucccauauguccagauu

SEQ ID NO: 416569 - RNA, 19 nt, Homo sapiens
  misc_RNA (1)...(19): siRNA sense strand
gaaauagagaggagcaaaa

SEQ ID NO: 416570 - RNA, 19 nt, Homo sapiens
  misc_RNA (1)...(19): siRNA sense strand
cacuggauauggaaauaga

SEQ ID NO: 416571 - RNA, 19 nt, Homo sapiens
  misc_RNA (1)...(19): siRNA sense strand
guccagauucucuugauga

SEQ ID NO: 416572 - RNA, 19 nt, Homo sapiens
  misc_RNA (1)...(19): siRNA sense strand
gucagaagacgguugcauu

SEQ ID NO: 416573 - RNA, 19 nt, Homo sapiens
  misc_RNA (1)...(19): siRNA sense strand
ucugacauuugggaugaua

SEQ ID NO: 416574 - RNA, 19 nt, Homo sapiens
  misc_RNA (1)...(19): siRNA sense strand
cgaugauucugacauuugg

SEQ ID NO: 416575 - RNA, 19 nt, Homo sapiens
  misc_RNA (1)...(19): siRNA sense strand
gaauaaaagccaaaagaag

SEQ ID NO: 416576 - RNA, 19 nt, Homo sapiens
  misc_RNA (1)...(19): siRNA sense strand
gcuuugggaaguauguuaa

SEQ ID NO: 416577 - RNA, 19 nt, Homo sapiens
  misc_RNA (1)...(19): siRNA sense strand
ucccauauguccagauucu

SEQ ID NO: 416578 - RNA, 19 nt, Homo sapiens
  misc_RNA (1)...(19): siRNA sense strand
aagccaaguuucaacagau

SEQ ID NO: 416579 - RNA, 19 nt, Homo sapiens
  misc_RNA (1)...(19): siRNA sense strand
aagaaaaccugcuaagaag

SEQ ID NO: 416580 - RNA, 19 nt, Homo sapiens
  misc_RNA (1)...(19): siRNA sense strand
gcauuuacccagcuaccau

SEQ ID NO: 416581 - RNA, 19 nt, Homo sapiens
  misc_RNA (1)...(19): siRNA sense strand
gaaacuucggguaaaccaa

SEQ ID NO: 416582 - RNA, 19 nt, Homo sapiens
  misc_RNA (1)...(19): siRNA sense strand
cuaucauacuggcuauuau

SEQ ID NO: 416583 - RNA, 19 nt, Homo sapiens
  misc_RNA (1)...(19): siRNA sense strand
cccaccaccucccauaugu

SEQ ID NO: 416584 - RNA, 19 nt, Homo sapiens
  misc_RNA (1)...(19): siRNA sense strand
gaaaguuggggacaaaugu

SEQ ID NO: 416585 - RNA, 19 nt, Homo sapiens
  misc_RNA (1)...(19): siRNA sense strand
aaccugcuaagaagaauaa

SEQ ID NO: 416586 - RNA, 19 nt, Homo sapiens
  misc_RNA (1)...(19): siRNA sense strand
uugaugaugcugaugcuuu

SEQ ID NO: 416587 - RNA, 19 nt, Homo sapiens
  misc_RNA (1)...(19): siRNA sense strand
auucugacauuugggauga

SEQ ID NO: 416588 - RNA, 19 nt, Homo sapiens
  misc_RNA (1)...(19): siRNA sense strand
ggaggauuccgugcuguuc

SEQ ID NO: 416589 - RNA, 19 nt, Homo sapiens
  misc_RNA (1)...(19): siRNA sense strand
ucauuuaagcaugcucuaa

SEQ ID NO: 416590 - RNA, 19 nt, Homo sapiens
  misc_RNA (1)...(19): siRNA sense strand
caaaaucuguccgaucuac

SEQ ID NO: 416591 - RNA, 19 nt, Homo sapiens
  misc_RNA (1)...(19): siRNA sense strand
aaaccugcuaagaagaaua

SEQ ID NO: 416592 - RNA, 19 nt, Homo sapiens
  misc_RNA (1)...(19): siRNA sense strand
gggaaguauguuaauuuca

SEQ ID NO: 416593 - RNA, 19 nt, Homo sapiens
  misc_RNA (1)...(19): siRNA sense strand
aaaucuguccgaucuacuu

SEQ ID NO: 416594 - RNA, 19 nt, Homo sapiens
  misc_RNA (1)...(19): siRNA sense strand
gguugcauuuacccagcua

SEQ ID NO: 416595 - RNA, 19 nt, Homo sapiens
  misc_RNA (1)...(19): siRNA sense strand
gagcgaugauucugacauu

SEQ ID NO: 416596 - RNA, 19 nt, Homo sapiens
  misc_RNA (1)...(19): siRNA sense strand
gaugauacagcacugauaa

SEQ ID NO: 416597 - RNA, 19 nt, Homo sapiens
  misc_RNA (1)...(19): siRNA sense strand
gaauacugcagcuuccuua

SEQ ID NO: 416598 - RNA, 19 nt, Homo sapiens
  misc_RNA (1)...(19): siRNA sense strand
gagagaaaccuguguugug

SEQ ID NO: 416599 - RNA, 19 nt, Homo sapiens
  misc_RNA (1)...(19): siRNA sense strand
gcuaucauacuggcuauua

SEQ ID NO: 416600 - RNA, 19 nt, Homo sapiens
  misc_RNA (1)...(19): siRNA sense strand
uaagcaugcucuaaagaau

SEQ ID NO: 416601 - RNA, 19 nt, Homo sapiens
  misc_RNA (1)...(19): siRNA sense strand
ucugugaaguagcuaauaa

SEQ ID NO: 416602 - RNA, 19 nt, Homo sapiens
  misc_RNA (1)...(19): siRNA sense strand
ggaaauagagaggagcaaa

SEQ ID NO: 416603 - RNA, 19 nt, Homo sapiens
  misc_RNA (1)...(19): siRNA sense strand
gaaaaugaaagccaaguuu

SEQ ID NO: 416604 - RNA, 19 nt, Homo sapiens
  misc_RNA (1)...(19): siRNA sense strand
ucagaagacgguugcauuu

SEQ ID NO: 416605 - RNA, 19 nt, Homo sapiens
  misc_RNA (1)...(19): siRNA sense strand
cagaagacgguugcauuua

SEQ ID NO: 416606 - RNA, 19 nt, Homo sapiens
  misc_RNA (1)...(19): siRNA sense strand
gcacaggccagagcgauga

SEQ ID NO: 416607 - RNA, 19 nt, Homo sapiens
  misc_RNA (1)...(19): siRNA sense strand
gcugaugcuuugggaagua

SEQ ID NO: 416608 - RNA, 19 nt, Homo sapiens
  misc_RNA (1)...(19): siRNA sense strand
ccaaaucugcuccauggaa

SEQ ID NO: 416609 - RNA, 19 nt, Homo sapiens
  misc_RNA (1)...(19): siRNA sense strand
ggaugauacagcacugaua

SEQ ID NO: 416610 - RNA, 19 nt, Homo sapiens
  misc_RNA (1)...(19): siRNA sense strand
gauaacaucaagcccaaau

SEQ ID NO: 416611 - RNA, 19 nt, Homo sapiens
  misc_RNA (1)...(19): siRNA sense strand
gcgaugauucugacauuug

SEQ ID NO: 416612 - RNA, 19 nt, Homo sapiens
  misc_RNA (1)...(19): siRNA sense strand
agaagacgguugcauuuac

SEQ ID NO: 416613 - RNA, 19 nt, Homo sapiens
  misc_RNA (1)...(19): siRNA sense strand
gguuuacacuggauaugga

SEQ ID NO: 416614 - RNA, 19 nt, Homo sapiens
  misc_RNA (1)...(19): siRNA sense strand
gcagcuuccuuacaacagu

SEQ ID NO: 416615 - RNA, 19 nt, Homo sapiens
  misc_RNA (1)...(19): siRNA sense strand
ugaugaugcugaugcuuug

SEQ ID NO: 416616 - RNA, 19 nt, Homo sapiens
  misc_RNA (1)...(19): siRNA sense strand
gaaaaccugcuaagaagaa

SEQ ID NO: 416617 - RNA, 19 nt, Homo sapiens
  misc_RNA (1)...(19): siRNA sense strand
aaacuucggguaaaccaaa

SEQ ID NO: 416618 - RNA, 19 nt, Homo sapiens
  misc_RNA (1)...(19): siRNA sense strand
aaagccaaguuucaacaga

SEQ ID NO: 416619 - RNA, 19 nt, Homo sapiens
  misc_RNA (1)...(19): siRNA sense strand
aaagaaaaccugcuaagaa

SEQ ID NO: 416620 - RNA, 19 nt, Homo sapiens
  misc_RNA (1)...(19): siRNA sense strand
ugggaaguauguuaauuuc

SEQ ID NO: 416621 - RNA, 19 nt, Homo sapiens
  misc_RNA (1)...(19): siRNA sense strand
uaacaucaagcccaaaucu

SEQ ID NO: 416622 - RNA, 19 nt, Homo sapiens
  misc_RNA (1)...(19): siRNA sense strand
uaagagagaaaccuguguu

SEQ ID NO: 416623 - RNA, 19 nt, Homo sapiens
  misc_RNA (1)...(19): siRNA sense strand
caacagaugaaagugagaa

SEQ ID NO: 416624 - RNA, 19 nt, Homo sapiens
  misc_RNA (1)...(19): siRNA sense strand
gaagacgguugcauuuacc

SEQ ID NO: 416625 - RNA, 19 nt, Homo sapiens
  misc_RNA (1)...(19): siRNA sense strand
uacacuggauauggaaaua

SEQ ID NO: 416626 - RNA, 19 nt, Homo sapiens
  misc_RNA (1)...(19): siRNA sense strand
uuaagcaugcucuaaagaa

SEQ ID NO: 416627 - RNA, 19 nt, Homo sapiens
  misc_RNA (1)...(19): siRNA sense strand
ggugacauuugugaaacuu

SEQ ID NO: 416628 - RNA, 19 nt, Homo sapiens
  misc_RNA (1)...(19): siRNA sense strand
uacugcagcuuccuuacaa

SEQ ID NO: 416629 - RNA, 19 nt, Homo sapiens
  misc_RNA (1)...(19): siRNA sense strand
ccucccauauguccagauu

SEQ ID NO: 416630 - RNA, 19 nt, Homo sapiens
  misc_RNA (1)...(19): siRNA sense strand
gaaauagagaggagcaaaa

SEQ ID NO: 416631 - RNA, 19 nt, Homo sapiens
  misc_RNA (1)...(19): siRNA sense strand
cacuggauauggaaauaga

SEQ ID NO: 416632 - RNA, 19 nt, Homo sapiens
  misc_RNA (1)...(19): siRNA sense strand
guccagauucucuugauga

SEQ ID NO: 416633 - RNA, 19 nt, Homo sapiens
  misc_RNA (1)...(19): siRNA sense strand
gucagaagacgguugcauu

SEQ ID NO: 416634 - RNA, 19 nt, Homo sapiens
  misc_RNA (1)...(19): siRNA sense strand
ucugacauuugggaugaua

SEQ ID NO: 416635 - RNA, 19 nt, Homo sapiens
  misc_RNA (1)...(19): siRNA sense strand
cgaugauucugacauuugg

SEQ ID NO: 416636 - RNA, 19 nt, Homo sapiens
  misc_RNA (1)...(19): siRNA sense strand
gaauaaaagccaaaagaag

SEQ ID NO: 416637 - RNA, 19 nt, Homo sapiens
  misc_RNA (1)...(19): siRNA sense strand
gcuuugggaaguauguuaa

SEQ ID NO: 416638 - RNA, 19 nt, Homo sapiens
  misc_RNA (1)...(19): siRNA sense strand
ucccauauguccagauucu

SEQ ID NO: 416639 - RNA, 19 nt, Homo sapiens
  misc_RNA (1)...(19): siRNA sense strand
aagccaaguuucaacagau

SEQ ID NO: 416640 - RNA, 19 nt, Homo sapiens
  misc_RNA (1)...(19): siRNA sense strand
aagaaaaccugcuaagaag

SEQ ID NO: 416641 - RNA, 19 nt, Homo sapiens
  misc_RNA (1)...(19): siRNA sense strand
gcauuuacccagcuaccau

SEQ ID NO: 416642 - RNA, 19 nt, Homo sapiens
  misc_RNA (1)...(19): siRNA sense strand
gaaacuucggguaaaccaa

SEQ ID NO: 416643 - RNA, 19 nt, Homo sapiens
  misc_RNA (1)...(19): siRNA sense strand
cuaucauacuggcuauuau

SEQ ID NO: 416644 - RNA, 19 nt, Homo sapiens
  misc_RNA (1)...(19): siRNA sense strand
cccaccaccucccauaugu

SEQ ID NO: 416645 - RNA, 19 nt, Homo sapiens
  misc_RNA (1)...(19): siRNA sense strand
gaaaguuggggacaaaugu

SEQ ID NO: 416646 - RNA, 19 nt, Homo sapiens
  misc_RNA (1)...(19): siRNA sense strand
aaccugcuaagaagaauaa

SEQ ID NO: 416647 - RNA, 19 nt, Homo sapiens
  misc_RNA (1)...(19): siRNA sense strand
uugaugaugcugaugcuuu

SEQ ID NO: 416648 - RNA, 19 nt, Homo sapiens
  misc_RNA (1)...(19): siRNA sense strand
auucugacauuugggauga

SEQ ID NO: 416649 - RNA, 19 nt, Homo sapiens
  misc_RNA (1)...(19): siRNA sense strand
ggaggauuccgugcuguuc

SEQ ID NO: 416650 - RNA, 19 nt, Homo sapiens
  misc_RNA (1)...(19): siRNA sense strand
ucauuuaagcaugcucuaa

SEQ ID NO: 416651 - RNA, 19 nt, Homo sapiens
  misc_RNA (1)...(19): siRNA sense strand
caaaaucuguccgaucuac

SEQ ID NO: 416652 - RNA, 19 nt, Homo sapiens
  misc_RNA (1)...(19): siRNA sense strand
aaaccugcuaagaagaaua

SEQ ID NO: 416653 - RNA, 19 nt, Homo sapiens
  misc_RNA (1)...(19): siRNA sense strand
gggaaguauguuaauuuca

SEQ ID NO: 416654 - RNA, 19 nt, Homo sapiens
  misc_RNA (1)...(19): siRNA sense strand
aaaucuguccgaucuacuu

SEQ ID NO: 416655 - RNA, 19 nt, Homo sapiens
  misc_RNA (1)...(19): siRNA sense strand
gguugcauuuacccagcua

SEQ ID NO: 416656 - RNA, 19 nt, Homo sapiens
  misc_RNA (1)...(19): siRNA sense strand
gagcgaugauucugacauu

SEQ ID NO: 416657 - RNA, 19 nt, Homo sapiens
  misc_RNA (1)...(19): siRNA sense strand
gaugauacagcacugauaa

SEQ ID NO: 416658 - RNA, 19 nt, Homo sapiens
  misc_RNA (1)...(19): siRNA sense strand
gaauacugcagcuuccuua

SEQ ID NO: 416659 - RNA, 19 nt, Homo sapiens
  misc_RNA (1)...(19): siRNA sense strand
gagagaaaccuguguugug

SEQ ID NO: 416660 - RNA, 19 nt, Homo sapiens
  misc_RNA (1)...(19): siRNA sense strand
gcuaucauacuggcuauua

SEQ ID NO: 416661 - RNA, 19 nt, Homo sapiens
  misc_RNA (1)...(19): siRNA sense strand
uaagcaugcucuaaagaau

SEQ ID NO: 416662 - RNA, 19 nt, Homo sapiens
  misc_RNA (1)...(19): siRNA sense strand
ucugugaaguagcuaauaa

SEQ ID NO: 416663 - RNA, 19 nt, Homo sapiens
  misc_RNA (1)...(19): siRNA sense strand
ggaaauagagaggagcaaa

SEQ ID NO: 416664 - RNA, 19 nt, Homo sapiens
  misc_RNA (1)...(19): siRNA sense strand
gaaaaugaaagccaaguuu

SEQ ID NO: 416665 - RNA, 19 nt, Homo sapiens
  misc_RNA (1)...(19): siRNA sense strand
ucagaagacgguugcauuu

SEQ ID NO: 416666 - RNA, 19 nt, Homo sapiens
  misc_RNA (1)...(19): siRNA sense strand
cagaagacgguugcauuua

SEQ ID NO: 416667 - RNA, 19 nt, Homo sapiens
  misc_RNA (1)...(19): siRNA sense strand
gcacaggccagagcgauga

SEQ ID NO: 416668 - RNA, 19 nt, Homo sapiens
  misc_RNA (1)...(19): siRNA sense strand
gcugaugcuuugggaagua

SEQ ID NO: 416669 - RNA, 19 nt, Homo sapiens
  misc_RNA (1)...(19): siRNA sense strand
ccaaaucugcuccauggaa

SEQ ID NO: 416670 - RNA, 19 nt, Homo sapiens
  misc_RNA (1)...(19): siRNA sense strand
ggaugauacagcacugaua

SEQ ID NO: 416671 - RNA, 19 nt, Homo sapiens
  misc_RNA (1)...(19): siRNA sense strand
gauaacaucaagcccaaau

SEQ ID NO: 416672 - RNA, 19 nt, Homo sapiens
  misc_RNA (1)...(19): siRNA sense strand
gcgaugauucugacauuug

SEQ ID NO: 416673 - RNA, 19 nt, Homo sapiens
  misc_RNA (1)...(19): siRNA sense strand
agaagacgguugcauuuac

SEQ ID NO: 416674 - RNA, 19 nt, Homo sapiens
  misc_RNA (1)...(19): siRNA sense strand
gguuuacacuggauaugga

SEQ ID NO: 416675 - RNA, 19 nt, Homo sapiens
  misc_RNA (1)...(19): siRNA sense strand
gcagcuuccuuacaacagu

SEQ ID NO: 416676 - RNA, 19 nt, Homo sapiens
  misc_RNA (1)...(19): siRNA sense strand
ugaugaugcugaugcuuug

SEQ ID NO: 416677 - RNA, 19 nt, Homo sapiens
  misc_RNA (1)...(19): siRNA sense strand
gaaaaccugcuaagaagaa

SEQ ID NO: 416678 - RNA, 19 nt, Homo sapiens
  misc_RNA (1)...(19): siRNA sense strand
aaacuucggguaaaccaaa

SEQ ID NO: 416679 - RNA, 19 nt, Homo sapiens
  misc_RNA (1)...(19): siRNA sense strand
aaagccaaguuucaacaga

SEQ ID NO: 416680 - RNA, 19 nt, Homo sapiens
  misc_RNA (1)...(19): siRNA sense strand
aaagaaaaccugcuaagaa

SEQ ID NO: 416681 - RNA, 19 nt, Homo sapiens
  misc_RNA (1)...(19): siRNA sense strand
ugggaaguauguuaauuuc

SEQ ID NO: 416682 - RNA, 19 nt, Homo sapiens
  misc_RNA (1)...(19): siRNA sense strand
uaacaucaagcccaaaucu

SEQ ID NO: 416683 - RNA, 19 nt, Homo sapiens
  misc_RNA (1)...(19): siRNA sense strand
uaagagagaaaccuguguu

SEQ ID NO: 416684 - RNA, 19 nt, Homo sapiens
  misc_RNA (1)...(19): siRNA sense strand
caacagaugaaagugagaa

SEQ ID NO: 416685 - RNA, 19 nt, Homo sapiens
  misc_RNA (1)...(19): siRNA sense strand
gaagacgguugcauuuacc

SEQ ID NO: 416686 - RNA, 19 nt, Homo sapiens
  misc_RNA (1)...(19): siRNA sense strand
uacacuggauauggaaaua

SEQ ID NO: 416687 - RNA, 19 nt, Homo sapiens
  misc_RNA (1)...(19): siRNA sense strand
uuaagcaugcucuaaagaa

SEQ ID NO: 416688 - RNA, 19 nt, Homo sapiens
  misc_RNA (1)...(19): siRNA sense strand
ggugacauuugugaaacuu

SEQ ID NO: 416689 - RNA, 19 nt, Homo sapiens
  misc_RNA (1)...(19): siRNA sense strand
uacugcagcuuccuuacaa

SEQ ID NO: 416690 - RNA, 19 nt, Homo sapiens
  misc_RNA (1)...(19): siRNA sense strand
ccucccauauguccagauu

SEQ ID NO: 416691 - RNA, 19 nt, Homo sapiens
  misc_RNA (1)...(19): siRNA sense strand
gaaauagagaggagcaaaa

SEQ ID NO: 416692 - RNA, 19 nt, Homo sapiens
  misc_RNA (1)...(19): siRNA sense strand
cacuggauauggaaauaga

SEQ ID NO: 416693 - RNA, 19 nt, Homo sapiens
  misc_RNA (1)...(19): siRNA sense strand
guccagauucucuugauga

SEQ ID NO: 416694 - RNA, 19 nt, Homo sapiens
  misc_RNA (1)...(19): siRNA sense strand
gucagaagacgguugcauu

SEQ ID NO: 416695 - RNA, 19 nt, Homo sapiens
  misc_RNA (1)...(19): siRNA sense strand
ucugacauuugggaugaua

SEQ ID NO: 416696 - RNA, 19 nt, Homo sapiens
  misc_RNA (1)...(19): siRNA sense strand
cgaugauucugacauuugg

SEQ ID NO: 416697 - RNA, 19 nt, Homo sapiens
  misc_RNA (1)...(19): siRNA sense strand
gaauaaaagccaaaagaag

SEQ ID NO: 416698 - RNA, 19 nt, Homo sapiens
  misc_RNA (1)...(19): siRNA sense strand
gcuuugggaaguauguuaa

SEQ ID NO: 416699 - RNA, 19 nt, Homo sapiens
  misc_RNA (1)...(19): siRNA sense strand
ucccauauguccagauucu

SEQ ID NO: 416700 - RNA, 19 nt, Homo sapiens
  misc_RNA (1)...(19): siRNA sense strand
aagccaaguuucaacagau

SEQ ID NO: 416701 - RNA, 19 nt, Homo sapiens
  misc_RNA (1)...(19): siRNA sense strand
aagaaaaccugcuaagaag

SEQ ID NO: 416702 - RNA, 19 nt, Homo sapiens
  misc_RNA (1)...(19): siRNA sense strand
gcauuuacccagcuaccau

SEQ ID NO: 416703 - RNA, 19 nt, Homo sapiens
  misc_RNA (1)...(19): siRNA sense strand
gaaacuucggguaaaccaa

SEQ ID NO: 416704 - RNA, 19 nt, Homo sapiens
  misc_RNA (1)...(19): siRNA sense strand
cuaucauacuggcuauuau

SEQ ID NO: 416705 - RNA, 19 nt, Homo sapiens
  misc_RNA (1)...(19): siRNA sense strand
cccaccaccucccauaugu

SEQ ID NO: 416706 - RNA, 19 nt, Homo sapiens
  misc_RNA (1)...(19): siRNA sense strand
gaaaguuggggacaaaugu

SEQ ID NO: 416707 - RNA, 19 nt, Homo sapiens
  misc_RNA (1)...(19): siRNA sense strand
aaccugcuaagaagaauaa

SEQ ID NO: 416708 - RNA, 19 nt, Homo sapiens
  misc_RNA (1)...(19): siRNA sense strand
uugaugaugcugaugcuuu

SEQ ID NO: 416709 - RNA, 19 nt, Homo sapiens
  misc_RNA (1)...(19): siRNA sense strand
auucugacauuugggauga

SEQ ID NO: 416710 - RNA, 19 nt, Homo sapiens
  misc_RNA (1)...(19): siRNA sense strand
ggaggauuccgugcuguuc

SEQ ID NO: 416711 - RNA, 19 nt, Homo sapiens
  misc_RNA (1)...(19): siRNA sense strand
ucauuuaagcaugcucuaa

SEQ ID NO: 416712 - RNA, 19 nt, Homo sapiens
  misc_RNA (1)...(19): siRNA sense strand
caaaaucuguccgaucuac

SEQ ID NO: 416713 - RNA, 19 nt, Homo sapiens
  misc_RNA (1)...(19): siRNA sense strand
aaaccugcuaagaagaaua

SEQ ID NO: 416714 - RNA, 19 nt, Homo sapiens
  misc_RNA (1)...(19): siRNA sense strand
gggaaguauguuaauuuca

SEQ ID NO: 416715 - RNA, 19 nt, Homo sapiens
  misc_RNA (1)...(19): siRNA sense strand
aaaucuguccgaucuacuu

SEQ ID NO: 416716 - RNA, 19 nt, Homo sapiens
  misc_RNA (1)...(19): siRNA sense strand
gguugcauuuacccagcua

SEQ ID NO: 416717 - RNA, 19 nt, Homo sapiens
  misc_RNA (1)...(19): siRNA sense strand
gagcgaugauucugacauu

SEQ ID NO: 416718 - RNA, 19 nt, Homo sapiens
  misc_RNA (1)...(19): siRNA sense strand
gaugauacagcacugauaa

SEQ ID NO: 416719 - RNA, 19 nt, Homo sapiens
  misc_RNA (1)...(19): siRNA sense strand
gaauacugcagcuuccuua

SEQ ID NO: 416720 - RNA, 19 nt, Homo sapiens
  misc_RNA (1)...(19): siRNA sense strand
gagagaaaccuguguugug

SEQ ID NO: 416721 - RNA, 19 nt, Homo sapiens
  misc_RNA (1)...(19): siRNA sense strand
gcuaucauacuggcuauua

SEQ ID NO: 416722 - RNA, 19 nt, Homo sapiens
  misc_RNA (1)...(19): siRNA sense strand
uaagcaugcucuaaagaau

SEQ ID NO: 416723 - RNA, 19 nt, Homo sapiens
  misc_RNA (1)...(19): siRNA sense strand
ucugugaaguagcuaauaa

SEQ ID NO: 416724 - RNA, 19 nt, Homo sapiens
  misc_RNA (1)...(19): siRNA sense strand
ggaaauagagaggagcaaa

SEQ ID NO: 416725 - RNA, 19 nt, Homo sapiens
  misc_RNA (1)...(19): siRNA sense strand
gaaaaugaaagccaaguuu

SEQ ID NO: 416726 - RNA, 19 nt, Homo sapiens
  misc_RNA (1)...(19): siRNA sense strand
ucagaagacgguugcauuu

SEQ ID NO: 416727 - RNA, 19 nt, Homo sapiens
  misc_RNA (1)...(19): siRNA sense strand
cagaagacgguugcauuua

SEQ ID NO: 416728 - RNA, 19 nt, Homo sapiens
  misc_RNA (1)...(19): siRNA sense strand
gcacaggccagagcgauga

SEQ ID NO: 416729 - RNA, 19 nt, Homo sapiens
  misc_RNA (1)...(19): siRNA sense strand
gcugaugcuuugggaagua

SEQ ID NO: 416730 - RNA, 19 nt, Homo sapiens
  misc_RNA (1)...(19): siRNA sense strand
ccaaaucugcuccauggaa

SEQ ID NO: 416731 - RNA, 19 nt, Homo sapiens
  misc_RNA (1)...(19): siRNA sense strand
ggaugauacagcacugaua

SEQ ID NO: 416732 - RNA, 19 nt, Homo sapiens
  misc_RNA (1)...(19): siRNA sense strand
gauaacaucaagcccaaau

SEQ ID NO: 416733 - RNA, 19 nt, Homo sapiens
  misc_RNA (1)...(19): siRNA sense strand
gcgaugauucugacauuug

SEQ ID NO: 416734 - RNA, 19 nt, Homo sapiens
  misc_RNA (1)...(19): siRNA sense strand
agaagacgguugcauuuac

SEQ ID NO: 416735 - RNA, 19 nt, Homo sapiens
  misc_RNA (1)...(19): siRNA sense strand
gguuuacacuggauaugga

SEQ ID NO: 416736 - RNA, 19 nt, Homo sapiens
  misc_RNA (1)...(19): siRNA sense strand
gcagcuuccuuacaacagu

SEQ ID NO: 416737 - RNA, 19 nt, Homo sapiens
  misc_RNA (1)...(19): siRNA sense strand
ugaugaugcugaugcuuug

SEQ ID NO: 416738 - RNA, 19 nt, Homo sapiens
  misc_RNA (1)...(19): siRNA sense strand
gaaaaccugcuaagaagaa

SEQ ID NO: 416739 - RNA, 19 nt, Homo sapiens
  misc_RNA (1)...(19): siRNA sense strand
aaacuucggguaaaccaaa

SEQ ID NO: 416740 - RNA, 19 nt, Homo sapiens
  misc_RNA (1)...(19): siRNA sense strand
aaagccaaguuucaacaga

SEQ ID NO: 416741 - RNA, 19 nt, Homo sapiens
  misc_RNA (1)...(19): siRNA sense strand
aaagaaaaccugcuaagaa

SEQ ID NO: 416742 - RNA, 19 nt, Homo sapiens
  misc_RNA (1)...(19): siRNA sense strand
ugggaaguauguuaauuuc

SEQ ID NO: 416743 - RNA, 19 nt, Homo sapiens
  misc_RNA (1)...(19): siRNA sense strand
uaacaucaagcccaaaucu

SEQ ID NO: 416744 - RNA, 19 nt, Homo sapiens
  misc_RNA (1)...(19): siRNA sense strand
uaagagagaaaccuguguu

SEQ ID NO: 416745 - RNA, 19 nt, Homo sapiens
  misc_RNA (1)...(19): siRNA sense strand
caacagaugaaagugagaa

SEQ ID NO: 416746 - RNA, 19 nt, Homo sapiens
  misc_RNA (1)...(19): siRNA sense strand
gaagacgguugcauuuacc

SEQ ID NO: 416747 - RNA, 19 nt, Homo sapiens
  misc_RNA (1)...(19): siRNA sense strand
uacacuggauauggaaaua

SEQ ID NO: 416748 - RNA, 19 nt, Homo sapiens
  misc_RNA (1)...(19): siRNA sense strand
uuaagcaugcucuaaagaa

SEQ ID NO: 416749 - RNA, 19 nt, Homo sapiens
  misc_RNA (1)...(19): siRNA sense strand
ggugacauuugugaaacuu

SEQ ID NO: 416750 - RNA, 19 nt, Homo sapiens
  misc_RNA (1)...(19): siRNA sense strand
uacugcagcuuccuuacaa

SEQ ID NO: 416751 - RNA, 19 nt, Homo sapiens
  misc_RNA (1)...(19): siRNA sense strand
ccucccauauguccagauu

SEQ ID NO: 416752 - RNA, 19 nt, Homo sapiens
  misc_RNA (1)...(19): siRNA sense strand
gaaauagagaggagcaaaa

SEQ ID NO: 416753 - RNA, 19 nt, Homo sapiens
  misc_RNA (1)...(19): siRNA sense strand
cacuggauauggaaauaga

SEQ ID NO: 416754 - RNA, 19 nt, Homo sapiens
  misc_RNA (1)...(19): siRNA sense strand
guccagauucucuugauga

SEQ ID NO: 416755 - RNA, 19 nt, Homo sapiens
  misc_RNA (1)...(19): siRNA sense strand
gucagaagacgguugcauu

SEQ ID NO: 416756 - RNA, 19 nt, Homo sapiens
  misc_RNA (1)...(19): siRNA sense strand
ucugacauuugggaugaua

SEQ ID NO: 416757 - RNA, 19 nt, Homo sapiens
  misc_RNA (1)...(19): siRNA sense strand
cgaugauucugacauuugg

SEQ ID NO: 416758 - RNA, 19 nt, Homo sapiens
  misc_RNA (1)...(19): siRNA sense strand
gaauaaaagccaaaagaag

SEQ ID NO: 416759 - RNA, 19 nt, Homo sapiens
  misc_RNA (1)...(19): siRNA sense strand
gcuuugggaaguauguuaa

SEQ ID NO: 416760 - RNA, 19 nt, Homo sapiens
  misc_RNA (1)...(19): siRNA sense strand
ucccauauguccagauucu

SEQ ID NO: 416761 - RNA, 19 nt, Homo sapiens
  misc_RNA (1)...(19): siRNA sense strand
aagccaaguuucaacagau

SEQ ID NO: 416762 - RNA, 19 nt, Homo sapiens
  misc_RNA (1)...(19): siRNA sense strand
aagaaaaccugcuaagaag

SEQ ID NO: 416763 - RNA, 19 nt, Homo sapiens
  misc_RNA (1)...(19): siRNA sense strand
gcauuuacccagcuaccau

SEQ ID NO: 416764 - RNA, 19 nt, Homo sapiens
  misc_RNA (1)...(19): siRNA sense strand
gaaacuucggguaaaccaa

SEQ ID NO: 416765 - RNA, 19 nt, Homo sapiens
  misc_RNA (1)...(19): siRNA sense strand
cuaucauacuggcuauuau

SEQ ID NO: 416766 - RNA, 19 nt, Homo sapiens
  misc_RNA (1)...(19): siRNA sense strand
cccaccaccucccauaugu

SEQ ID NO: 416767 - RNA, 19 nt, Homo sapiens
  misc_RNA (1)...(19): siRNA sense strand
gaaaguuggggacaaaugu

SEQ ID NO: 416768 - RNA, 19 nt, Homo sapiens
  misc_RNA (1)...(19): siRNA sense strand
aaccugcuaagaagaauaa

SEQ ID NO: 416769 - RNA, 19 nt, Homo sapiens
  misc_RNA (1)...(19): siRNA sense strand
uugaugaugcugaugcuuu

SEQ ID NO: 416770 - RNA, 19 nt, Homo sapiens
  misc_RNA (1)...(19): siRNA sense strand
auucugacauuugggauga

SEQ ID NO: 416771 - RNA, 19 nt, Homo sapiens
  misc_RNA (1)...(19): siRNA sense strand
ggaggauuccgugcuguuc

SEQ ID NO: 416772 - RNA, 19 nt, Homo sapiens
  misc_RNA (1)...(19): siRNA sense strand
ucauuuaagcaugcucuaa

SEQ ID NO: 416773 - RNA, 19 nt, Homo sapiens
  misc_RNA (1)...(19): siRNA sense strand
caaaaucuguccgaucuac

SEQ ID NO: 416774 - RNA, 19 nt, Homo sapiens
  misc_RNA (1)...(19): siRNA sense strand
aaaccugcuaagaagaaua

SEQ ID NO: 416775 - RNA, 19 nt, Homo sapiens
  misc_RNA (1)...(19): siRNA sense strand
gggaaguauguuaauuuca

SEQ ID NO: 416776 - RNA, 19 nt, Homo sapiens
  misc_RNA (1)...(19): siRNA sense strand
aaaucuguccgaucuacuu

SEQ ID NO: 416777 - RNA, 19 nt, Homo sapiens
  misc_RNA (1)...(19): siRNA sense strand
gguugcauuuacccagcua

SEQ ID NO: 416778 - RNA, 19 nt, Homo sapiens
  misc_RNA (1)...(19): siRNA sense strand
gagcgaugauucugacauu

SEQ ID NO: 416779 - RNA, 19 nt, Homo sapiens
  misc_RNA (1)...(19): siRNA sense strand
gaugauacagcacugauaa

SEQ ID NO: 416780 - RNA, 19 nt, Homo sapiens
  misc_RNA (1)...(19): siRNA sense strand
gaauacugcagcuuccuua

SEQ ID NO: 416781 - RNA, 19 nt, Homo sapiens
  misc_RNA (1)...(19): siRNA sense strand
gagagaaaccuguguugug

SEQ ID NO: 416782 - RNA, 19 nt, Homo sapiens
  misc_RNA (1)...(19): siRNA sense strand
gcuaucauacuggcuauua

SEQ ID NO: 416783 - RNA, 19 nt, Homo sapiens
  misc_RNA (1)...(19): siRNA sense strand
uaagcaugcucuaaagaau

SEQ ID NO: 416784 - RNA, 19 nt, Homo sapiens
  misc_RNA (1)...(19): siRNA sense strand
ucugugaaguagcuaauaa

SEQ ID NO: 416785 - RNA, 19 nt, Homo sapiens
  misc_RNA (1)...(19): siRNA sense strand
ggaaauagagaggagcaaa

SEQ ID NO: 416786 - RNA, 19 nt, Homo sapiens
  misc_RNA (1)...(19): siRNA sense strand
gaaaaugaaagccaaguuu

SEQ ID NO: 416787 - RNA, 19 nt, Homo sapiens
  misc_RNA (1)...(19): siRNA sense strand
ucagaagacgguugcauuu

SEQ ID NO: 416788 - RNA, 19 nt, Homo sapiens
  misc_RNA (1)...(19): siRNA sense strand
cagaagacgguugcauuua

SEQ ID NO: 416789 - RNA, 19 nt, Homo sapiens
  misc_RNA (1)...(19): siRNA sense strand
gcacaggccagagcgauga

SEQ ID NO: 416790 - RNA, 19 nt, Homo sapiens
  misc_RNA (1)...(19): siRNA sense strand
gcugaugcuuugggaagua

SEQ ID NO: 416791 - RNA, 19 nt, Homo sapiens
  misc_RNA (1)...(19): siRNA sense strand
ccaaaucugcuccauggaa

SEQ ID NO: 416792 - RNA, 19 nt, Homo sapiens
  misc_RNA (1)...(19): siRNA sense strand
ggaugauacagcacugaua

SEQ ID NO: 416793 - RNA, 19 nt, Homo sapiens
  misc_RNA (1)...(19): siRNA sense strand
gauaacaucaagcccaaau

SEQ ID NO: 416794 - RNA, 19 nt, Homo sapiens
  misc_RNA (1)...(19): siRNA sense strand
gcgaugauucugacauuug

SEQ ID NO: 416795 - RNA, 19 nt, Homo sapiens
  misc_RNA (1)...(19): siRNA sense strand
agaagacgguugcauuuac

SEQ ID NO: 416796 - RNA, 19 nt, Homo sapiens
  misc_RNA (1)...(19): siRNA sense strand
gguuuacacuggauaugga

SEQ ID NO: 416797 - RNA, 19 nt, Homo sapiens
  misc_RNA (1)...(19): siRNA sense strand
gcagcuuccuuacaacagu

SEQ ID NO: 416798 - RNA, 19 nt, Homo sapiens
  misc_RNA (1)...(19): siRNA sense strand
ugaugaugcugaugcuuug

SEQ ID NO: 416799 - RNA, 19 nt, Homo sapiens
  misc_RNA (1)...(19): siRNA sense strand
gaaaaccugcuaagaagaa

SEQ ID NO: 416800 - RNA, 19 nt, Homo sapiens
  misc_RNA (1)...(19): siRNA sense strand
aaacuucggguaaaccaaa

SEQ ID NO: 416801 - RNA, 19 nt, Homo sapiens
  misc_RNA (1)...(19): siRNA sense strand
aaagccaaguuucaacaga

SEQ ID NO: 416802 - RNA, 19 nt, Homo sapiens
  misc_RNA (1)...(19): siRNA sense strand
aaagaaaaccugcuaagaa

SEQ ID NO: 416803 - RNA, 19 nt, Homo sapiens
  misc_RNA (1)...(19): siRNA sense strand
ugggaaguauguuaauuuc

SEQ ID NO: 416804 - RNA, 19 nt, Homo sapiens
  misc_RNA (1)...(19): siRNA sense strand
uaacaucaagcccaaaucu

SEQ ID NO: 416805 - RNA, 19 nt, Homo sapiens
  misc_RNA (1)...(19): siRNA sense strand
uaagagagaaaccuguguu

SEQ ID NO: 416806 - RNA, 19 nt, Homo sapiens
  misc_RNA (1)...(19): siRNA sense strand
caacagaugaaagugagaa

SEQ ID NO: 416807 - RNA, 19 nt, Homo sapiens
  misc_RNA (1)...(19): siRNA sense strand
gaagacgguugcauuuacc

SEQ ID NO: 416808 - RNA, 19 nt, Homo sapiens
  misc_RNA (1)...(19): siRNA sense strand
uacacuggauauggaaaua

SEQ ID NO: 416809 - RNA, 19 nt, Homo sapiens
  misc_RNA (1)...(19): siRNA sense strand
uuaagcaugcucuaaagaa

SEQ ID NO: 416810 - RNA, 19 nt, Homo sapiens
  misc_RNA (1)...(19): siRNA sense strand
ggugacauuugugaaacuu

SEQ ID NO: 416811 - RNA, 19 nt, Homo sapiens
  misc_RNA (1)...(19): siRNA sense strand
uacugcagcuuccuuacaa

SEQ ID NO: 416812 - RNA, 19 nt, Homo sapiens
  misc_RNA (1)...(19): siRNA sense strand
ccucccauauguccagauu

SEQ ID NO: 416813 - RNA, 19 nt, Homo sapiens
  misc_RNA (1)...(19): siRNA sense strand
gaaauagagaggagcaaaa

SEQ ID NO: 416814 - RNA, 19 nt, Homo sapiens
  misc_RNA (1)...(19): siRNA sense strand
cacuggauauggaaauaga

SEQ ID NO: 416815 - RNA, 19 nt, Homo sapiens
  misc_RNA (1)...(19): siRNA sense strand
guccagauucucuugauga

SEQ ID NO: 416816 - RNA, 19 nt, Homo sapiens
  misc_RNA (1)...(19): siRNA sense strand
gucagaagacgguugcauu

SEQ ID NO: 416817 - RNA, 19 nt, Homo sapiens
  misc_RNA (1)...(19): siRNA sense strand
ucugacauuugggaugaua

SEQ ID NO: 416818 - RNA, 19 nt, Homo sapiens
  misc_RNA (1)...(19): siRNA sense strand
cgaugauucugacauuugg

SEQ ID NO: 416819 - RNA, 19 nt, Homo sapiens
  misc_RNA (1)...(19): siRNA sense strand
gaauaaaagccaaaagaag

SEQ ID NO: 416820 - RNA, 19 nt, Homo sapiens
  misc_RNA (1)...(19): siRNA sense strand
gcuuugggaaguauguuaa

SEQ ID NO: 416821 - RNA, 19 nt, Homo sapiens
  misc_RNA (1)...(19): siRNA sense strand
ucccauauguccagauucu

SEQ ID NO: 416822 - RNA, 19 nt, Homo sapiens
  misc_RNA (1)...(19): siRNA sense strand
aagccaaguuucaacagau

SEQ ID NO: 416823 - RNA, 19 nt, Homo sapiens
  misc_RNA (1)...(19): siRNA sense strand
aagaaaaccugcuaagaag

SEQ ID NO: 416824 - RNA, 19 nt, Homo sapiens
  misc_RNA (1)...(19): siRNA sense strand
gcauuuacccagcuaccau

SEQ ID NO: 416825 - RNA, 19 nt, Homo sapiens
  misc_RNA (1)...(19): siRNA sense strand
gaaacuucggguaaaccaa

SEQ ID NO: 416826 - RNA, 19 nt, Homo sapiens
  misc_RNA (1)...(19): siRNA sense strand
cuaucauacuggcuauuau

SEQ ID NO: 416827 - RNA, 19 nt, Homo sapiens
  misc_RNA (1)...(19): siRNA sense strand
cccaccaccucccauaugu

SEQ ID NO: 416828 - RNA, 19 nt, Homo sapiens
  misc_RNA (1)...(19): siRNA sense strand
gaaaguuggggacaaaugu

SEQ ID NO: 416829 - RNA, 19 nt, Homo sapiens
  misc_RNA (1)...(19): siRNA sense strand
aaccugcuaagaagaauaa

SEQ ID NO: 416830 - RNA, 19 nt, Homo sapiens
  misc_RNA (1)...(19): siRNA sense strand
uugaugaugcugaugcuuu

SEQ ID NO: 416831 - RNA, 19 nt, Homo sapiens
  misc_RNA (1)...(19): siRNA sense strand
auucugacauuugggauga

SEQ ID NO: 416832 - RNA, 19 nt, Homo sapiens
  misc_RNA (1)...(19): siRNA sense strand
ggaggauuccgugcuguuc

SEQ ID NO: 416833 - RNA, 19 nt, Homo sapiens
  misc_RNA (1)...(19): siRNA sense strand
ucauuuaagcaugcucuaa

SEQ ID NO: 416834 - RNA, 19 nt, Homo sapiens
  misc_RNA (1)...(19): siRNA sense strand
caaaaucuguccgaucuac

SEQ ID NO: 416835 - RNA, 19 nt, Homo sapiens
  misc_RNA (1)...(19): siRNA sense strand
aaaccugcuaagaagaaua

SEQ ID NO: 416836 - RNA, 19 nt, Homo sapiens
  misc_RNA (1)...(19): siRNA sense strand
gggaaguauguuaauuuca

SEQ ID NO: 416837 - RNA, 19 nt, Homo sapiens
  misc_RNA (1)...(19): siRNA sense strand
aaaucuguccgaucuacuu

SEQ ID NO: 416838 - RNA, 19 nt, Homo sapiens
  misc_RNA (1)...(19): siRNA sense strand
gguugcauuuacccagcua

SEQ ID NO: 416839 - RNA, 19 nt, Homo sapiens
  misc_RNA (1)...(19): siRNA sense strand
gagcgaugauucugacauu

SEQ ID NO: 416840 - RNA, 19 nt, Homo sapiens
  misc_RNA (1)...(19): siRNA sense strand
gaugauacagcacugauaa

SEQ ID NO: 416841 - RNA, 19 nt, Homo sapiens
  misc_RNA (1)...(19): siRNA sense strand
gaauacugcagcuuccuua

SEQ ID NO: 416842 - RNA, 19 nt, Homo sapiens
  misc_RNA (1)...(19): siRNA sense strand
gagagaaaccuguguugug

SEQ ID NO: 416843 - RNA, 19 nt, Homo sapiens
  misc_RNA (1)...(19): siRNA sense strand
gcuaucauacuggcuauua

SEQ ID NO: 416844 - RNA, 19 nt, Homo sapiens
  misc_RNA (1)...(19): siRNA sense strand
uaagcaugcucuaaagaau

SEQ ID NO: 416845 - RNA, 19 nt, Homo sapiens
  misc_RNA (1)...(19): siRNA sense strand
ucugugaaguagcuaauaa

SEQ ID NO: 416846 - RNA, 19 nt, Homo sapiens
  misc_RNA (1)...(19): siRNA sense strand
ggaaauagagaggagcaaa

SEQ ID NO: 416847 - RNA, 19 nt, Homo sapiens
  misc_RNA (1)...(19): siRNA sense strand
gaaaaugaaagccaaguuu

SEQ ID NO: 416848 - RNA, 19 nt, Homo sapiens
  misc_RNA (1)...(19): siRNA sense strand
ucagaagacgguugcauuu

SEQ ID NO: 416849 - RNA, 19 nt, Homo sapiens
  misc_RNA (1)...(19): siRNA sense strand
cagaagacgguugcauuua

SEQ ID NO: 416850 - RNA, 19 nt, Homo sapiens
  misc_RNA (1)...(19): siRNA sense strand
gcacaggccagagcgauga

SEQ ID NO: 416851 - RNA, 19 nt, Homo sapiens
  misc_RNA (1)...(19): siRNA sense strand
gcugaugcuuugggaagua

SEQ ID NO: 416852 - RNA, 19 nt, Homo sapiens
  misc_RNA (1)...(19): siRNA sense strand
ccaaaucugcuccauggaa

SEQ ID NO: 416853 - RNA, 19 nt, Homo sapiens
  misc_RNA (1)...(19): siRNA sense strand
ggaugauacagcacugaua

SEQ ID NO: 416854 - RNA, 19 nt, Homo sapiens
  misc_RNA (1)...(19): siRNA sense strand
gauaacaucaagcccaaau

SEQ ID NO: 416855 - RNA, 19 nt, Homo sapiens
  misc_RNA (1)...(19): siRNA sense strand
gcgaugauucugacauuug

SEQ ID NO: 416856 - RNA, 19 nt, Homo sapiens
  misc_RNA (1)...(19): siRNA sense strand
agaagacgguugcauuuac

SEQ ID NO: 416857 - RNA, 19 nt, Homo sapiens
  misc_RNA (1)...(19): siRNA sense strand
gguuuacacuggauaugga

SEQ ID NO: 416858 - RNA, 19 nt, Homo sapiens
  misc_RNA (1)...(19): siRNA sense strand
gcagcuuccuuacaacagu

SEQ ID NO: 416859 - RNA, 19 nt, Homo sapiens
  misc_RNA (1)...(19): siRNA sense strand
ugaugaugcugaugcuuug

SEQ ID NO: 416860 - RNA, 19 nt, Homo sapiens
  misc_RNA (1)...(19): siRNA sense strand
gaaaaccugcuaagaagaa

SEQ ID NO: 416861 - RNA, 19 nt, Homo sapiens
  misc_RNA (1)...(19): siRNA sense strand
aaacuucggguaaaccaaa

SEQ ID NO: 416862 - RNA, 19 nt, Homo sapiens
  misc_RNA (1)...(19): siRNA sense strand
aaagccaaguuucaacaga

SEQ ID NO: 416863 - RNA, 19 nt, Homo sapiens
  misc_RNA (1)...(19): siRNA sense strand
aaagaaaaccugcuaagaa

SEQ ID NO: 416864 - RNA, 19 nt, Homo sapiens
  misc_RNA (1)...(19): siRNA sense strand
ugggaaguauguuaauuuc

SEQ ID NO: 416865 - RNA, 19 nt, Homo sapiens
  misc_RNA (1)...(19): siRNA sense strand
uaacaucaagcccaaaucu

SEQ ID NO: 416866 - RNA, 19 nt, Homo sapiens
  misc_RNA (1)...(19): siRNA sense strand
uaagagagaaaccuguguu

SEQ ID NO: 416867 - RNA, 19 nt, Homo sapiens
  misc_RNA (1)...(19): siRNA sense strand
caacagaugaaagugagaa

SEQ ID NO: 416868 - RNA, 19 nt, Homo sapiens
  misc_RNA (1)...(19): siRNA sense strand
gaagacgguugcauuuacc

SEQ ID NO: 416869 - RNA, 19 nt, Homo sapiens
  misc_RNA (1)...(19): siRNA sense strand
uacacuggauauggaaaua

SEQ ID NO: 416870 - RNA, 19 nt, Homo sapiens
  misc_RNA (1)...(19): siRNA sense strand
uuaagcaugcucuaaagaa

SEQ ID NO: 416871 - RNA, 19 nt, Homo sapiens
  misc_RNA (1)...(19): siRNA sense strand
ggugacauuugugaaacuu

SEQ ID NO: 416872 - RNA, 19 nt, Homo sapiens
  misc_RNA (1)...(19): siRNA sense strand
uacugcagcuuccuuacaa

SEQ ID NO: 416873 - RNA, 19 nt, Homo sapiens
  misc_RNA (1)...(19): siRNA sense strand
ccucccauauguccagauu

SEQ ID NO: 416874 - RNA, 19 nt, Homo sapiens
  misc_RNA (1)...(19): siRNA sense strand
gaaauagagaggagcaaaa

SEQ ID NO: 416875 - RNA, 19 nt, Homo sapiens
  misc_RNA (1)...(19): siRNA sense strand
cacuggauauggaaauaga

SEQ ID NO: 416876 - RNA, 19 nt, Homo sapiens
  misc_RNA (1)...(19): siRNA sense strand
guccagauucucuugauga

SEQ ID NO: 416877 - RNA, 19 nt, Homo sapiens
  misc_RNA (1)...(19): siRNA sense strand
gucagaagacgguugcauu

SEQ ID NO: 416878 - RNA, 19 nt, Homo sapiens
  misc_RNA (1)...(19): siRNA sense strand
ucugacauuugggaugaua

SEQ ID NO: 416879 - RNA, 19 nt, Homo sapiens
  misc_RNA (1)...(19): siRNA sense strand
cgaugauucugacauuugg

SEQ ID NO: 416880 - RNA, 19 nt, Homo sapiens
  misc_RNA (1)...(19): siRNA sense strand
gaauaaaagccaaaagaag

SEQ ID NO: 416881 - RNA, 19 nt, Homo sapiens
  misc_RNA (1)...(19): siRNA sense strand
gcuuugggaaguauguuaa

SEQ ID NO: 416882 - RNA, 19 nt, Homo sapiens
  misc_RNA (1)...(19): siRNA sense strand
ucccauauguccagauucu

SEQ ID NO: 416883 - RNA, 19 nt, Homo sapiens
  misc_RNA (1)...(19): siRNA sense strand
aagccaaguuucaacagau

SEQ ID NO: 416884 - RNA, 19 nt, Homo sapiens
  misc_RNA (1)...(19): siRNA sense strand
aagaaaaccugcuaagaag

SEQ ID NO: 416885 - RNA, 19 nt, Homo sapiens
  misc_RNA (1)...(19): siRNA sense strand
gcauuuacccagcuaccau

SEQ ID NO: 416886 - RNA, 19 nt, Homo sapiens
  misc_RNA (1)...(19): siRNA sense strand
gaaacuucggguaaaccaa

SEQ ID NO: 416887 - RNA, 19 nt, Homo sapiens
  misc_RNA (1)...(19): siRNA sense strand
cuaucauacuggcuauuau

SEQ ID NO: 416888 - RNA, 19 nt, Homo sapiens
  misc_RNA (1)...(19): siRNA sense strand
cccaccaccucccauaugu

SEQ ID NO: 416889 - RNA, 19 nt, Homo sapiens
  misc_RNA (1)...(19): siRNA sense strand
gaaaguuggggacaaaugu

SEQ ID NO: 416890 - RNA, 19 nt, Homo sapiens
  misc_RNA (1)...(19): siRNA sense strand
aaccugcuaagaagaauaa

SEQ ID NO: 416891 - RNA, 19 nt, Homo sapiens
  misc_RNA (1)...(19): siRNA sense strand
uugaugaugcugaugcuuu

SEQ ID NO: 416892 - RNA, 19 nt, Homo sapiens
  misc_RNA (1)...(19): siRNA sense strand
auucugacauuugggauga

SEQ ID NO: 416893 - RNA, 19 nt, Homo sapiens
  misc_RNA (1)...(19): siRNA sense strand
ggaggauuccgugcuguuc

SEQ ID NO: 416894 - RNA, 19 nt, Homo sapiens
  misc_RNA (1)...(19): siRNA sense strand
ucauuuaagcaugcucuaa

SEQ ID NO: 416895 - RNA, 19 nt, Homo sapiens
  misc_RNA (1)...(19): siRNA sense strand
caaaaucuguccgaucuac

SEQ ID NO: 416896 - RNA, 19 nt, Homo sapiens
  misc_RNA (1)...(19): siRNA sense strand
aaaccugcuaagaagaaua

SEQ ID NO: 416897 - RNA, 19 nt, Homo sapiens
  misc_RNA (1)...(19): siRNA sense strand
gggaaguauguuaauuuca

SEQ ID NO: 416898 - RNA, 19 nt, Homo sapiens
  misc_RNA (1)...(19): siRNA sense strand
aaaucuguccgaucuacuu

SEQ ID NO: 416899 - RNA, 19 nt, Homo sapiens
  misc_RNA (1)...(19): siRNA sense strand
gguugcauuuacccagcua

SEQ ID NO: 416900 - RNA, 19 nt, Homo sapiens
  misc_RNA (1)...(19): siRNA sense strand
gagcgaugauucugacauu

SEQ ID NO: 416901 - RNA, 19 nt, Homo sapiens
  misc_RNA (1)...(19): siRNA sense strand
gaugauacagcacugauaa

SEQ ID NO: 416902 - RNA, 19 nt, Homo sapiens
  misc_RNA (1)...(19): siRNA sense strand
gaauacugcagcuuccuua

SEQ ID NO: 416903 - RNA, 19 nt, Homo sapiens
  misc_RNA (1)...(19): siRNA sense strand
gagagaaaccuguguugug

SEQ ID NO: 416904 - RNA, 19 nt, Homo sapiens
  misc_RNA (1)...(19): siRNA sense strand
gcuaucauacuggcuauua

SEQ ID NO: 416905 - RNA, 19 nt, Homo sapiens
  misc_RNA (1)...(19): siRNA sense strand
uaagcaugcucuaaagaau

SEQ ID NO: 416906 - RNA, 19 nt, Homo sapiens
  misc_RNA (1)...(19): siRNA sense strand
ucugugaaguagcuaauaa

SEQ ID NO: 416907 - RNA, 19 nt, Homo sapiens
  misc_RNA (1)...(19): siRNA sense strand
ggaaauagagaggagcaaa

SEQ ID NO: 416908 - RNA, 19 nt, Homo sapiens
  misc_RNA (1)...(19): siRNA sense strand
gaaaaugaaagccaaguuu

SEQ ID NO: 416909 - RNA, 19 nt, Homo sapiens
  misc_RNA (1)...(19): siRNA sense strand
ucagaagacgguugcauuu

SEQ ID NO: 416910 - RNA, 19 nt, Homo sapiens
  misc_RNA (1)...(19): siRNA sense strand
cagaagacgguugcauuua

SEQ ID NO: 416911 - RNA, 19 nt, Homo sapiens
  misc_RNA (1)...(19): siRNA sense strand
gcacaggccagagcgauga

SEQ ID NO: 416912 - RNA, 19 nt, Homo sapiens
  misc_RNA (1)...(19): siRNA sense strand
gcugaugcuuugggaagua

SEQ ID NO: 416913 - RNA, 19 nt, Homo sapiens
  misc_RNA (1)...(19): siRNA sense strand
ccaaaucugcuccauggaa

SEQ ID NO: 416914 - RNA, 19 nt, Homo sapiens
  misc_RNA (1)...(19): siRNA sense strand
ggaugauacagcacugaua

SEQ ID NO: 416915 - RNA, 19 nt, Homo sapiens
  misc_RNA (1)...(19): siRNA sense strand
gauaacaucaagcccaaau

SEQ ID NO: 416916 - RNA, 19 nt, Homo sapiens
  misc_RNA (1)...(19): siRNA sense strand
gcgaugauucugacauuug

SEQ ID NO: 416917 - RNA, 19 nt, Homo sapiens
  misc_RNA (1)...(19): siRNA sense strand
agaagacgguugcauuuac

SEQ ID NO: 416918 - RNA, 19 nt, Homo sapiens
  misc_RNA (1)...(19): siRNA sense strand
gguuuacacuggauaugga

SEQ ID NO: 416919 - RNA, 19 nt, Homo sapiens
  misc_RNA (1)...(19): siRNA sense strand
gcagcuuccuuacaacagu

SEQ ID NO: 416920 - RNA, 19 nt, Homo sapiens
  misc_RNA (1)...(19): siRNA sense strand
ugaugaugcugaugcuuug

SEQ ID NO: 416921 - RNA, 19 nt, Homo sapiens
  misc_RNA (1)...(19): siRNA sense strand
gaaaaccugcuaagaagaa

SEQ ID NO: 416922 - RNA, 19 nt, Homo sapiens
  misc_RNA (1)...(19): siRNA sense strand
aaacuucggguaaaccaaa

SEQ ID NO: 416923 - RNA, 19 nt, Homo sapiens
  misc_RNA (1)...(19): siRNA sense strand
aaagccaaguuucaacaga

SEQ ID NO: 416924 - RNA, 19 nt, Homo sapiens
  misc_RNA (1)...(19): siRNA sense strand
aaagaaaaccugcuaagaa

SEQ ID NO: 416925 - RNA, 19 nt, Homo sapiens
  misc_RNA (1)...(19): siRNA sense strand
ugggaaguauguuaauuuc

SEQ ID NO: 416926 - RNA, 19 nt, Homo sapiens
  misc_RNA (1)...(19): siRNA sense strand
uaacaucaagcccaaaucu

SEQ ID NO: 416927 - RNA, 19 nt, Homo sapiens
  misc_RNA (1)...(19): siRNA sense strand
uaagagagaaaccuguguu

SEQ ID NO: 416928 - RNA, 19 nt, Homo sapiens
  misc_RNA (1)...(19): siRNA sense strand
caacagaugaaagugagaa

SEQ ID NO: 416929 - RNA, 19 nt, Homo sapiens
  misc_RNA (1)...(19): siRNA sense strand
gaagacgguugcauuuacc

SEQ ID NO: 416930 - RNA, 19 nt, Homo sapiens
  misc_RNA (1)...(19): siRNA sense strand
uacacuggauauggaaaua

SEQ ID NO: 416931 - RNA, 19 nt, Homo sapiens
  misc_RNA (1)...(19): siRNA sense strand
uuaagcaugcucuaaagaa

SEQ ID NO: 416932 - RNA, 19 nt, Homo sapiens
  misc_RNA (1)...(19): siRNA sense strand
ggugacauuugugaaacuu

SEQ ID NO: 416933 - RNA, 19 nt, Homo sapiens
  misc_RNA (1)...(19): siRNA sense strand
uacugcagcuuccuuacaa

SEQ ID NO: 416934 - RNA, 19 nt, Homo sapiens
  misc_RNA (1)...(19): siRNA sense strand
ccucccauauguccagauu

SEQ ID NO: 416935 - RNA, 19 nt, Homo sapiens
  misc_RNA (1)...(19): siRNA sense strand
gaaauagagaggagcaaaa

SEQ ID NO: 416936 - RNA, 19 nt, Homo sapiens
  misc_RNA (1)...(19): siRNA sense strand
cacuggauauggaaauaga

SEQ ID NO: 416937 - RNA, 19 nt, Homo sapiens
  misc_RNA (1)...(19): siRNA sense strand
guccagauucucuugauga

SEQ ID NO: 416938 - RNA, 19 nt, Homo sapiens
  misc_RNA (1)...(19): siRNA sense strand
gucagaagacgguugcauu

SEQ ID NO: 416939 - RNA, 19 nt, Homo sapiens
  misc_RNA (1)...(19): siRNA sense strand
ucugacauuugggaugaua

SEQ ID NO: 416940 - RNA, 19 nt, Homo sapiens
  misc_RNA (1)...(19): siRNA sense strand
cgaugauucugacauuugg

SEQ ID NO: 416941 - RNA, 19 nt, Homo sapiens
  misc_RNA (1)...(19): siRNA sense strand
gaauaaaagccaaaagaag

SEQ ID NO: 416942 - RNA, 19 nt, Homo sapiens
  misc_RNA (1)...(19): siRNA sense strand
gcuuugggaaguauguuaa

SEQ ID NO: 416943 - RNA, 19 nt, Homo sapiens
  misc_RNA (1)...(19): siRNA sense strand
ucccauauguccagauucu

SEQ ID NO: 416944 - RNA, 19 nt, Homo sapiens
  misc_RNA (1)...(19): siRNA sense strand
aagccaaguuucaacagau

SEQ ID NO: 416945 - RNA, 19 nt, Homo sapiens
  misc_RNA (1)...(19): siRNA sense strand
aagaaaaccugcuaagaag

SEQ ID NO: 416946 - RNA, 19 nt, Homo sapiens
  misc_RNA (1)...(19): siRNA sense strand
gcauuuacccagcuaccau

SEQ ID NO: 416947 - RNA, 19 nt, Homo sapiens
  misc_RNA (1)...(19): siRNA sense strand
gaaacuucggguaaaccaa

SEQ ID NO: 416948 - RNA, 19 nt, Homo sapiens
  misc_RNA (1)...(19): siRNA sense strand
cuaucauacuggcuauuau

SEQ ID NO: 416949 - RNA, 19 nt, Homo sapiens
  misc_RNA (1)...(19): siRNA sense strand
cccaccaccucccauaugu

SEQ ID NO: 416950 - RNA, 19 nt, Homo sapiens
  misc_RNA (1)...(19): siRNA sense strand
gaaaguuggggacaaaugu

SEQ ID NO: 416951 - RNA, 19 nt, Homo sapiens
  misc_RNA (1)...(19): siRNA sense strand
aaccugcuaagaagaauaa

SEQ ID NO: 416952 - RNA, 19 nt, Homo sapiens
  misc_RNA (1)...(19): siRNA sense strand
uugaugaugcugaugcuuu

SEQ ID NO: 416953 - RNA, 19 nt, Homo sapiens
  misc_RNA (1)...(19): siRNA sense strand
auucugacauuugggauga

SEQ ID NO: 416954 - RNA, 19 nt, Homo sapiens
  misc_RNA (1)...(19): siRNA sense strand
ggaggauuccgugcuguuc

SEQ ID NO: 416955 - RNA, 19 nt, Homo sapiens
  misc_RNA (1)...(19): siRNA sense strand
ucauuuaagcaugcucuaa

SEQ ID NO: 416956 - RNA, 19 nt, Homo sapiens
  misc_RNA (1)...(19): siRNA sense strand
caaaaucuguccgaucuac

SEQ ID NO: 416957 - RNA, 19 nt, Homo sapiens
  misc_RNA (1)...(19): siRNA sense strand
aaaccugcuaagaagaaua

SEQ ID NO: 416958 - RNA, 19 nt, Homo sapiens
  misc_RNA (1)...(19): siRNA sense strand
gggaaguauguuaauuuca

SEQ ID NO: 416959 - RNA, 19 nt, Homo sapiens
  misc_RNA (1)...(19): siRNA sense strand
aaaucuguccgaucuacuu

SEQ ID NO: 416960 - RNA, 19 nt, Homo sapiens
  misc_RNA (1)...(19): siRNA sense strand
gguugcauuuacccagcua

SEQ ID NO: 416961 - RNA, 19 nt, Homo sapiens
  misc_RNA (1)...(19): siRNA sense strand
gagcgaugauucugacauu

SEQ ID NO: 416962 - RNA, 19 nt, Homo sapiens
  misc_RNA (1)...(19): siRNA sense strand
gaugauacagcacugauaa

SEQ ID NO: 416963 - RNA, 19 nt, Homo sapiens
  misc_RNA (1)...(19): siRNA sense strand
gaauacugcagcuuccuua

SEQ ID NO: 416964 - RNA, 19 nt, Homo sapiens
  misc_RNA (1)...(19): siRNA sense strand
gagagaaaccuguguugug

SEQ ID NO: 416965 - RNA, 19 nt, Homo sapiens
  misc_RNA (1)...(19): siRNA sense strand
gcuaucauacuggcuauua

SEQ ID NO: 416966 - RNA, 19 nt, Homo sapiens
  misc_RNA (1)...(19): siRNA sense strand
uaagcaugcucuaaagaau

SEQ ID NO: 416967 - RNA, 19 nt, Homo sapiens
  misc_RNA (1)...(19): siRNA sense strand
ucugugaaguagcuaauaa

SEQ ID NO: 416968 - RNA, 19 nt, Homo sapiens
  misc_RNA (1)...(19): siRNA sense strand
ggaaauagagaggagcaaa

SEQ ID NO: 416969 - RNA, 19 nt, Homo sapiens
  misc_RNA (1)...(19): siRNA sense strand
gaaaaugaaagccaaguuu

SEQ ID NO: 416970 - RNA, 19 nt, Homo sapiens
  misc_RNA (1)...(19): siRNA sense strand
ucagaagacgguugcauuu

SEQ ID NO: 416971 - RNA, 19 nt, Homo sapiens
  misc_RNA (1)...(19): siRNA sense strand
cagaagacgguugcauuua

SEQ ID NO: 416972 - RNA, 19 nt, Homo sapiens
  misc_RNA (1)...(19): siRNA sense strand
gcacaggccagagcgauga

SEQ ID NO: 416973 - RNA, 19 nt, Homo sapiens
  misc_RNA (1)...(19): siRNA sense strand
gcugaugcuuugggaagua

SEQ ID NO: 416974 - RNA, 19 nt, Homo sapiens
  misc_RNA (1)...(19): siRNA sense strand
ccaaaucugcuccauggaa

SEQ ID NO: 416975 - RNA, 19 nt, Homo sapiens
  misc_RNA (1)...(19): siRNA sense strand
ggaugauacagcacugaua

SEQ ID NO: 416976 - RNA, 19 nt, Homo sapiens
  misc_RNA (1)...(19): siRNA sense strand
gauaacaucaagcccaaau

SEQ ID NO: 416977 - RNA, 19 nt, Homo sapiens
  misc_RNA (1)...(19): siRNA sense strand
gcgaugauucugacauuug

SEQ ID NO: 416978 - RNA, 19 nt, Homo sapiens
  misc_RNA (1)...(19): siRNA sense strand
agaagacgguugcauuuac

SEQ ID NO: 416979 - RNA, 19 nt, Homo sapiens
  misc_RNA (1)...(19): siRNA sense strand
gguuuacacuggauaugga

SEQ ID NO: 416980 - RNA, 19 nt, Homo sapiens
  misc_RNA (1)...(19): siRNA sense strand
gcagcuuccuuacaacagu

SEQ ID NO: 416981 - RNA, 19 nt, Homo sapiens
  misc_RNA (1)...(19): siRNA sense strand
ugaugaugcugaugcuuug

SEQ ID NO: 416982 - RNA, 19 nt, Homo sapiens
  misc_RNA (1)...(19): siRNA sense strand
gaaaaccugcuaagaagaa

SEQ ID NO: 416983 - RNA, 19 nt, Homo sapiens
  misc_RNA (1)...(19): siRNA sense strand
aaacuucggguaaaccaaa

SEQ ID NO: 416984 - RNA, 19 nt, Homo sapiens
  misc_RNA (1)...(19): siRNA sense strand
aaagccaaguuucaacaga

SEQ ID NO: 416985 - RNA, 19 nt, Homo sapiens
  misc_RNA (1)...(19): siRNA sense strand
aaagaaaaccugcuaagaa

SEQ ID NO: 416986 - RNA, 19 nt, Homo sapiens
  misc_RNA (1)...(19): siRNA sense strand
ugggaaguauguuaauuuc

SEQ ID NO: 416987 - RNA, 19 nt, Homo sapiens
  misc_RNA (1)...(19): siRNA sense strand
uaacaucaagcccaaaucu

SEQ ID NO: 416988 - RNA, 19 nt, Homo sapiens
  misc_RNA (1)...(19): siRNA sense strand
uaagagagaaaccuguguu

SEQ ID NO: 416989 - RNA, 19 nt, Homo sapiens
  misc_RNA (1)...(19): siRNA sense strand
caacagaugaaagugagaa

SEQ ID NO: 416990 - RNA, 19 nt, Homo sapiens
  misc_RNA (1)...(19): siRNA sense strand
gaagacgguugcauuuacc

SEQ ID NO: 416991 - RNA, 19 nt, Homo sapiens
  misc_RNA (1)...(19): siRNA sense strand
uacacuggauauggaaaua

SEQ ID NO: 416992 - RNA, 19 nt, Homo sapiens
  misc_RNA (1)...(19): siRNA sense strand
uuaagcaugcucuaaagaa

SEQ ID NO: 416993 - RNA, 19 nt, Homo sapiens
  misc_RNA (1)...(19): siRNA sense strand
ggugacauuugugaaacuu

SEQ ID NO: 416994 - RNA, 19 nt, Homo sapiens
  misc_RNA (1)...(19): siRNA sense strand
uacugcagcuuccuuacaa

SEQ ID NO: 416995 - RNA, 19 nt, Homo sapiens
  misc_RNA (1)...(19): siRNA sense strand
ccucccauauguccagauu

SEQ ID NO: 416996 - RNA, 19 nt, Homo sapiens
  misc_RNA (1)...(19): siRNA sense strand
gaaauagagaggagcaaaa

SEQ ID NO: 416997 - RNA, 19 nt, Homo sapiens
  misc_RNA (1)...(19): siRNA sense strand
cacuggauauggaaauaga

SEQ ID NO: 416998 - RNA, 19 nt, Homo sapiens
  misc_RNA (1)...(19): siRNA sense strand
guccagauucucuugauga

SEQ ID NO: 416999 - RNA, 19 nt, Homo sapiens
  misc_RNA (1)...(19): siRNA sense strand
gucagaagacgguugcauu

SEQ ID NO: 417000 - RNA, 19 nt, Homo sapiens
  misc_RNA (1)...(19): siRNA sense strand
ucugacauuugggaugaua

SEQ ID NO: 417001 - RNA, 19 nt, Homo sapiens
  misc_RNA (1)...(19): siRNA sense strand
cgaugauucugacauuugg

SEQ ID NO: 417002 - RNA, 19 nt, Homo sapiens
  misc_RNA (1)...(19): siRNA sense strand
gaauaaaagccaaaagaag

SEQ ID NO: 417003 - RNA, 19 nt, Homo sapiens
  misc_RNA (1)...(19): siRNA sense strand
gcuuugggaaguauguuaa

SEQ ID NO: 417004 - RNA, 19 nt, Homo sapiens
  misc_RNA (1)...(19): siRNA sense strand
ucccauauguccagauucu

SEQ ID NO: 417005 - RNA, 19 nt, Homo sapiens
  misc_RNA (1)...(19): siRNA sense strand
aagccaaguuucaacagau

SEQ ID NO: 417006 - RNA, 19 nt, Homo sapiens
  misc_RNA (1)...(19): siRNA sense strand
aagaaaaccugcuaagaag

SEQ ID NO: 417007 - RNA, 19 nt, Homo sapiens
  misc_RNA (1)...(19): siRNA sense strand
gcauuuacccagcuaccau

SEQ ID NO: 417008 - RNA, 19 nt, Homo sapiens
  misc_RNA (1)...(19): siRNA sense strand
gaaacuucggguaaaccaa

SEQ ID NO: 417009 - RNA, 19 nt, Homo sapiens
  misc_RNA (1)...(19): siRNA sense strand
cuaucauacuggcuauuau

SEQ ID NO: 417010 - RNA, 19 nt, Homo sapiens
  misc_RNA (1)...(19): siRNA sense strand
cccaccaccucccauaugu

SEQ ID NO: 417011 - RNA, 19 nt, Homo sapiens
  misc_RNA (1)...(19): siRNA sense strand
gaaaguuggggacaaaugu

SEQ ID NO: 417012 - RNA, 19 nt, Homo sapiens
  misc_RNA (1)...(19): siRNA sense strand
aaccugcuaagaagaauaa

SEQ ID NO: 417013 - RNA, 19 nt, Homo sapiens
  misc_RNA (1)...(19): siRNA sense strand
uugaugaugcugaugcuuu

SEQ ID NO: 417014 - RNA, 19 nt, Homo sapiens
  misc_RNA (1)...(19): siRNA sense strand
auucugacauuugggauga

SEQ ID NO: 417015 - RNA, 19 nt, Homo sapiens
  misc_RNA (1)...(19): siRNA sense strand
ggaggauuccgugcuguuc

SEQ ID NO: 417016 - RNA, 19 nt, Homo sapiens
  misc_RNA (1)...(19): siRNA sense strand
ucauuuaagcaugcucuaa

SEQ ID NO: 417017 - RNA, 19 nt, Homo sapiens
  misc_RNA (1)...(19): siRNA sense strand
caaaaucuguccgaucuac

SEQ ID NO: 417018 - RNA, 19 nt, Homo sapiens
  misc_RNA (1)...(19): siRNA sense strand
aaaccugcuaagaagaaua

SEQ ID NO: 417019 - RNA, 19 nt, Homo sapiens
  misc_RNA (1)...(19): siRNA sense strand
gggaaguauguuaauuuca

SEQ ID NO: 417020 - RNA, 19 nt, Homo sapiens
  misc_RNA (1)...(19): siRNA sense strand
aaaucuguccgaucuacuu

SEQ ID NO: 417021 - RNA, 19 nt, Homo sapiens
  misc_RNA (1)...(19): siRNA sense strand
gguugcauuuacccagcua

SEQ ID NO: 417022 - RNA, 19 nt, Homo sapiens
  misc_RNA (1)...(19): siRNA sense strand
gagcgaugauucugacauu

SEQ ID NO: 417023 - RNA, 19 nt, Homo sapiens
  misc_RNA (1)...(19): siRNA sense strand
gaugauacagcacugauaa

SEQ ID NO: 417024 - RNA, 19 nt, Homo sapiens
  misc_RNA (1)...(19): siRNA sense strand
gaauacugcagcuuccuua

SEQ ID NO: 417025 - RNA, 19 nt, Homo sapiens
  misc_RNA (1)...(19): siRNA sense strand
gagagaaaccuguguugug

SEQ ID NO: 417026 - RNA, 19 nt, Homo sapiens
  misc_RNA (1)...(19): siRNA sense strand
gcuaucauacuggcuauua

SEQ ID NO: 417027 - RNA, 19 nt, Homo sapiens
  misc_RNA (1)...(19): siRNA sense strand
uaagcaugcucuaaagaau

SEQ ID NO: 417028 - RNA, 19 nt, Homo sapiens
  misc_RNA (1)...(19): siRNA sense strand
ucugugaaguagcuaauaa

SEQ ID NO: 417029 - RNA, 19 nt, Homo sapiens
  misc_RNA (1)...(19): siRNA sense strand
ggaaauagagaggagcaaa

SEQ ID NO: 417030 - RNA, 19 nt, Homo sapiens
  misc_RNA (1)...(19): siRNA sense strand
gaaaaugaaagccaaguuu

SEQ ID NO: 417031 - RNA, 19 nt, Homo sapiens
  misc_RNA (1)...(19): siRNA sense strand
ucagaagacgguugcauuu

SEQ ID NO: 417032 - RNA, 19 nt, Homo sapiens
  misc_RNA (1)...(19): siRNA sense strand
cagaagacgguugcauuua

SEQ ID NO: 417033 - RNA, 19 nt, Homo sapiens
  misc_RNA (1)...(19): siRNA sense strand
gcacaggccagagcgauga

SEQ ID NO: 417034 - RNA, 19 nt, Homo sapiens
  misc_RNA (1)...(19): siRNA sense strand
gcugaugcuuugggaagua

SEQ ID NO: 417035 - RNA, 19 nt, Homo sapiens
  misc_RNA (1)...(19): siRNA sense strand
ccaaaucugcuccauggaa

SEQ ID NO: 417036 - RNA, 19 nt, Homo sapiens
  misc_RNA (1)...(19): siRNA sense strand
ggaugauacagcacugaua

SEQ ID NO: 417037 - RNA, 19 nt, Homo sapiens
  misc_RNA (1)...(19): siRNA sense strand
gauaacaucaagcccaaau

SEQ ID NO: 417038 - RNA, 19 nt, Homo sapiens
  misc_RNA (1)...(19): siRNA sense strand
gcgaugauucugacauuug

SEQ ID NO: 417039 - RNA, 19 nt, Homo sapiens
  misc_RNA (1)...(19): siRNA sense strand
agaagacgguugcauuuac

SEQ ID NO: 417040 - RNA, 19 nt, Homo sapiens
  misc_RNA (1)...(19): siRNA sense strand
gguuuacacuggauaugga

SEQ ID NO: 417041 - RNA, 19 nt, Homo sapiens
  misc_RNA (1)...(19): siRNA sense strand
gcagcuuccuuacaacagu

SEQ ID NO: 417042 - RNA, 19 nt, Homo sapiens
  misc_RNA (1)...(19): siRNA sense strand
ugaugaugcugaugcuuug

SEQ ID NO: 417043 - RNA, 19 nt, Homo sapiens
  misc_RNA (1)...(19): siRNA sense strand
gaaaaccugcuaagaagaa

SEQ ID NO: 417044 - RNA, 19 nt, Homo sapiens
  misc_RNA (1)...(19): siRNA sense strand
aaacuucggguaaaccaaa

SEQ ID NO: 417045 - RNA, 19 nt, Homo sapiens
  misc_RNA (1)...(19): siRNA sense strand
aaagccaaguuucaacaga

SEQ ID NO: 417046 - RNA, 19 nt, Homo sapiens
  misc_RNA (1)...(19): siRNA sense strand
aaagaaaaccugcuaagaa

SEQ ID NO: 417047 - RNA, 19 nt, Homo sapiens
  misc_RNA (1)...(19): siRNA sense strand
ugggaaguauguuaauuuc

SEQ ID NO: 417048 - RNA, 19 nt, Homo sapiens
  misc_RNA (1)...(19): siRNA sense strand
uaacaucaagcccaaaucu

SEQ ID NO: 417049 - RNA, 19 nt, Homo sapiens
  misc_RNA (1)...(19): siRNA sense strand
uaagagagaaaccuguguu

SEQ ID NO: 417050 - RNA, 19 nt, Homo sapiens
  misc_RNA (1)...(19): siRNA sense strand
caacagaugaaagugagaa

SEQ ID NO: 417051 - RNA, 19 nt, Homo sapiens
  misc_RNA (1)...(19): siRNA sense strand
gaagacgguugcauuuacc

SEQ ID NO: 417052 - RNA, 19 nt, Homo sapiens
  misc_RNA (1)...(19): siRNA sense strand
uacacuggauauggaaaua

SEQ ID NO: 417053 - RNA, 19 nt, Homo sapiens
  misc_RNA (1)...(19): siRNA sense strand
uuaagcaugcucuaaagaa

SEQ ID NO: 417054 - RNA, 19 nt, Homo sapiens
  misc_RNA (1)...(19): siRNA sense strand
ggugacauuugugaaacuu

SEQ ID NO: 417055 - RNA, 19 nt, Homo sapiens
  misc_RNA (1)...(19): siRNA sense strand
uacugcagcuuccuuacaa

SEQ ID NO: 417056 - RNA, 19 nt, Homo sapiens
  misc_RNA (1)...(19): siRNA sense strand
ccucccauauguccagauu

SEQ ID NO: 417057 - RNA, 19 nt, Homo sapiens
  misc_RNA (1)...(19): siRNA sense strand
gaaauagagaggagcaaaa

SEQ ID NO: 417058 - RNA, 19 nt, Homo sapiens
  misc_RNA (1)...(19): siRNA sense strand
cacuggauauggaaauaga

SEQ ID NO: 417059 - RNA, 19 nt, Homo sapiens
  misc_RNA (1)...(19): siRNA sense strand
guccagauucucuugauga

SEQ ID NO: 417060 - RNA, 19 nt, Homo sapiens
  misc_RNA (1)...(19): siRNA sense strand
gucagaagacgguugcauu

SEQ ID NO: 417061 - RNA, 19 nt, Homo sapiens
  misc_RNA (1)...(19): siRNA sense strand
ucugacauuugggaugaua

SEQ ID NO: 417062 - RNA, 19 nt, Homo sapiens
  misc_RNA (1)...(19): siRNA sense strand
cgaugauucugacauuugg

SEQ ID NO: 417063 - RNA, 19 nt, Homo sapiens
  misc_RNA (1)...(19): siRNA sense strand
gaauaaaagccaaaagaag

SEQ ID NO: 417064 - RNA, 19 nt, Homo sapiens
  misc_RNA (1)...(19): siRNA sense strand
gcuuugggaaguauguuaa

SEQ ID NO: 417065 - RNA, 19 nt, Homo sapiens
  misc_RNA (1)...(19): siRNA sense strand
ucccauauguccagauucu

SEQ ID NO: 417066 - RNA, 19 nt, Homo sapiens
  misc_RNA (1)...(19): siRNA sense strand
aagccaaguuucaacagau

SEQ ID NO: 417067 - RNA, 19 nt, Homo sapiens
  misc_RNA (1)...(19): siRNA sense strand
aagaaaaccugcuaagaag

SEQ ID NO: 417068 - RNA, 19 nt, Homo sapiens
  misc_RNA (1)...(19): siRNA sense strand
gcauuuacccagcuaccau

SEQ ID NO: 417069 - RNA, 19 nt, Homo sapiens
  misc_RNA (1)...(19): siRNA sense strand
gaaacuucggguaaaccaa

SEQ ID NO: 417070 - RNA, 19 nt, Homo sapiens
  misc_RNA (1)...(19): siRNA sense strand
cuaucauacuggcuauuau

SEQ ID NO: 417071 - RNA, 19 nt, Homo sapiens
  misc_RNA (1)...(19): siRNA sense strand
cccaccaccucccauaugu

SEQ ID NO: 417072 - RNA, 19 nt, Homo sapiens
  misc_RNA (1)...(19): siRNA sense strand
gaaaguuggggacaaaugu

SEQ ID NO: 417073 - RNA, 19 nt, Homo sapiens
  misc_RNA (1)...(19): siRNA sense strand
aaccugcuaagaagaauaa

SEQ ID NO: 417074 - RNA, 19 nt, Homo sapiens
  misc_RNA (1)...(19): siRNA sense strand
uugaugaugcugaugcuuu

SEQ ID NO: 417075 - RNA, 19 nt, Homo sapiens
  misc_RNA (1)...(19): siRNA sense strand
auucugacauuugggauga

SEQ ID NO: 417076 - RNA, 19 nt, Homo sapiens
  misc_RNA (1)...(19): siRNA sense strand
ggaggauuccgugcuguuc

SEQ ID NO: 417077 - RNA, 19 nt, Homo sapiens
  misc_RNA (1)...(19): siRNA sense strand
ucauuuaagcaugcucuaa

SEQ ID NO: 417078 - RNA, 19 nt, Homo sapiens
  misc_RNA (1)...(19): siRNA sense strand
caaaaucuguccgaucuac

SEQ ID NO: 417079 - RNA, 19 nt, Homo sapiens
  misc_RNA (1)...(19): siRNA sense strand
aaaccugcuaagaagaaua

SEQ ID NO: 417080 - RNA, 19 nt, Homo sapiens
  misc_RNA (1)...(19): siRNA sense strand
gggaaguauguuaauuuca

SEQ ID NO: 417081 - RNA, 19 nt, Homo sapiens
  misc_RNA (1)...(19): siRNA sense strand
aaaucuguccgaucuacuu

SEQ ID NO: 417082 - RNA, 19 nt, Homo sapiens
  misc_RNA (1)...(19): siRNA sense strand
gguugcauuuacccagcua

SEQ ID NO: 417083 - RNA, 19 nt, Homo sapiens
  misc_RNA (1)...(19): siRNA sense strand
acagaacacucauggauua

SEQ ID NO: 417084 - RNA, 19 nt, Homo sapiens
  misc_RNA (1)...(19): siRNA sense strand
gaacacucauggauuaaga

SEQ ID NO: 417085 - RNA, 19 nt, Homo sapiens
  misc_RNA (1)...(19): siRNA sense strand
ggaugacgauuguuuauca

SEQ ID NO: 417086 - RNA, 19 nt, Homo sapiens
  misc_RNA (1)...(19): siRNA sense strand
gcacagaacacucauggau

SEQ ID NO: 417087 - RNA, 19 nt, Homo sapiens
  misc_RNA (1)...(19): siRNA sense strand
acacauagcagauaaacuu

SEQ ID NO: 417088 - RNA, 19 nt, Homo sapiens
  misc_RNA (1)...(19): siRNA sense strand
cagaugaacuucccauugg

SEQ ID NO: 417089 - RNA, 19 nt, Homo sapiens
  misc_RNA (1)...(19): siRNA sense strand
gagcacaaacggaaacaau

SEQ ID NO: 417090 - RNA, 19 nt, Homo sapiens
  misc_RNA (1)...(19): siRNA sense strand
gccagaggaugacgauugu

SEQ ID NO: 417091 - RNA, 19 nt, Homo sapiens
  misc_RNA (1)...(19): siRNA sense strand
caggguauuuguaaagaug

SEQ ID NO: 417092 - RNA, 19 nt, Homo sapiens
  misc_RNA (1)...(19): siRNA sense strand
ccagaugaacuucccauug

SEQ ID NO: 417093 - RNA, 19 nt, Homo sapiens
  misc_RNA (1)...(19): siRNA sense strand
gcaggguauuuguaaagau

SEQ ID NO: 417094 - RNA, 19 nt, Homo sapiens
  misc_RNA (1)...(19): siRNA sense strand
gaugacgauuguuuaucaa

SEQ ID NO: 417095 - RNA, 19 nt, Homo sapiens
  misc_RNA (1)...(19): siRNA sense strand
cagaggaugacgauuguuu

SEQ ID NO: 417096 - RNA, 19 nt, Homo sapiens
  misc_RNA (1)...(19): siRNA sense strand
gaggaugacgauuguuuau

SEQ ID NO: 417097 - RNA, 19 nt, Homo sapiens
  misc_RNA (1)...(19): siRNA sense strand
ugggaugagugcagaauau

SEQ ID NO: 417098 - RNA, 19 nt, Homo sapiens
  misc_RNA (1)...(19): siRNA sense strand
aggaacacauagcagauaa

SEQ ID NO: 417099 - RNA, 19 nt, Homo sapiens
  misc_RNA (1)...(19): siRNA sense strand
gcacaaacggaaacaaugc

SEQ ID NO: 417100 - RNA, 19 nt, Homo sapiens
  misc_RNA (1)...(19): siRNA sense strand
gaacacauagcagauaaac

SEQ ID NO: 417101 - RNA, 19 nt, Homo sapiens
  misc_RNA (1)...(19): siRNA sense strand
gcacauggagcucuaaucc

SEQ ID NO: 417102 - RNA, 19 nt, Homo sapiens
  misc_RNA (1)...(19): siRNA sense strand
ccucuugaagccauucuua

SEQ ID NO: 417103 - RNA, 19 nt, Homo sapiens
  misc_RNA (1)...(19): siRNA sense strand
aaacggaaacaaugcaaug

SEQ ID NO: 417104 - RNA, 19 nt, Homo sapiens
  misc_RNA (1)...(19): siRNA sense strand
gaagccauucuuacagaug

SEQ ID NO: 417105 - RNA, 19 nt, Homo sapiens
  misc_RNA (1)...(19): siRNA sense strand
ggaacacauagcagauaaa

SEQ ID NO: 417106 - RNA, 19 nt, Homo sapiens
  misc_RNA (1)...(19): siRNA sense strand
agaggaugacgauuguuua

SEQ ID NO: 417107 - RNA, 19 nt, Homo sapiens
  misc_RNA (1)...(19): siRNA sense strand
aagccauucuuacagauga

SEQ ID NO: 417108 - RNA, 19 nt, Homo sapiens
  misc_RNA (1)...(19): siRNA sense strand
uugaagccauucuuacaga

SEQ ID NO: 417109 - RNA, 19 nt, Homo sapiens
  misc_RNA (1)...(19): siRNA sense strand
caggaacacauagcagaua

SEQ ID NO: 417110 - RNA, 19 nt, Homo sapiens
  misc_RNA (1)...(19): siRNA sense strand
caugguuucucuugcaaca

SEQ ID NO: 417111 - RNA, 19 nt, Homo sapiens
  misc_RNA (1)...(19): siRNA sense strand
ucaacgucaucuagaggaa

SEQ ID NO: 417112 - RNA, 19 nt, Homo sapiens
  misc_RNA (1)...(19): siRNA sense strand
aagaugagcccagcagcua

SEQ ID NO: 417113 - RNA, 19 nt, Homo sapiens
  misc_RNA (1)...(19): siRNA sense strand
caaacaggaacacauagca

SEQ ID NO: 417114 - RNA, 19 nt, Homo sapiens
  misc_RNA (1)...(19): siRNA sense strand
cacagaacacucauggauu

SEQ ID NO: 417115 - RNA, 19 nt, Homo sapiens
  misc_RNA (1)...(19): siRNA sense strand
caacuugcaaacagccauu

SEQ ID NO: 417116 - RNA, 19 nt, Homo sapiens
  misc_RNA (1)...(19): siRNA sense strand
cgccagaggaugacgauug

SEQ ID NO: 417117 - RNA, 19 nt, Homo sapiens
  misc_RNA (1)...(19): siRNA sense strand
aacgucaucuagaggaauu

SEQ ID NO: 417118 - RNA, 19 nt, Homo sapiens
  misc_RNA (1)...(19): siRNA sense strand
gacgauuguuuaucaacgu

SEQ ID NO: 417119 - RNA, 19 nt, Homo sapiens
  misc_RNA (1)...(19): siRNA sense strand
ugaagccauucuuacagau

SEQ ID NO: 417120 - RNA, 19 nt, Homo sapiens
  misc_RNA (1)...(19): siRNA sense strand
cgcaggguauuuguaaaga

SEQ ID NO: 417121 - RNA, 19 nt, Homo sapiens
  misc_RNA (1)...(19): siRNA sense strand
gaugagcccagcagcuaca

SEQ ID NO: 417122 - RNA, 19 nt, Homo sapiens
  misc_RNA (1)...(19): siRNA sense strand
gcccagcagcuacacaugu

SEQ ID NO: 417123 - RNA, 19 nt, Homo sapiens
  misc_RNA (1)...(19): siRNA sense strand
caaacggaaacaaugcaau

SEQ ID NO: 417124 - RNA, 19 nt, Homo sapiens
  misc_RNA (1)...(19): siRNA sense strand
agaaagcgaacacggaagu

SEQ ID NO: 417125 - RNA, 19 nt, Homo sapiens
  misc_RNA (1)...(19): siRNA sense strand
acacauguacaacuugcaa

SEQ ID NO: 417126 - RNA, 19 nt, Homo sapiens
  misc_RNA (1)...(19): siRNA sense strand
gggaugagugcagaauaug

SEQ ID NO: 417127 - RNA, 19 nt, Homo sapiens
  misc_RNA (1)...(19): siRNA sense strand
cagaacacucauggauuaa

SEQ ID NO: 417128 - RNA, 19 nt, Homo sapiens
  misc_RNA (1)...(19): siRNA sense strand
ucuuacagaugaugaacca

SEQ ID NO: 417129 - RNA, 19 nt, Homo sapiens
  misc_RNA (1)...(19): siRNA sense strand
gagcccagcagcuacacau

SEQ ID NO: 417130 - RNA, 19 nt, Homo sapiens
  misc_RNA (1)...(19): siRNA sense strand
acagaacacucauggauua

SEQ ID NO: 417131 - RNA, 19 nt, Homo sapiens
  misc_RNA (1)...(19): siRNA sense strand
gaacacucauggauuaaga

SEQ ID NO: 417132 - RNA, 19 nt, Homo sapiens
  misc_RNA (1)...(19): siRNA sense strand
ggaugacgauuguuuauca

SEQ ID NO: 417133 - RNA, 19 nt, Homo sapiens
  misc_RNA (1)...(19): siRNA sense strand
gcacagaacacucauggau

SEQ ID NO: 417134 - RNA, 19 nt, Homo sapiens
  misc_RNA (1)...(19): siRNA sense strand
acacauagcagauaaacuu

SEQ ID NO: 417135 - RNA, 19 nt, Homo sapiens
  misc_RNA (1)...(19): siRNA sense strand
cagaugaacuucccauugg

SEQ ID NO: 417136 - RNA, 19 nt, Homo sapiens
  misc_RNA (1)...(19): siRNA sense strand
gagcacaaacggaaacaau

SEQ ID NO: 417137 - RNA, 19 nt, Homo sapiens
  misc_RNA (1)...(19): siRNA sense strand
gccagaggaugacgauugu

SEQ ID NO: 417138 - RNA, 19 nt, Homo sapiens
  misc_RNA (1)...(19): siRNA sense strand
caggguauuuguaaagaug

SEQ ID NO: 417139 - RNA, 19 nt, Homo sapiens
  misc_RNA (1)...(19): siRNA sense strand
ccagaugaacuucccauug

SEQ ID NO: 417140 - RNA, 19 nt, Homo sapiens
  misc_RNA (1)...(19): siRNA sense strand
gcaggguauuuguaaagau

SEQ ID NO: 417141 - RNA, 19 nt, Homo sapiens
  misc_RNA (1)...(19): siRNA sense strand
gaugacgauuguuuaucaa

SEQ ID NO: 417142 - RNA, 19 nt, Homo sapiens
  misc_RNA (1)...(19): siRNA sense strand
cagaggaugacgauuguuu

SEQ ID NO: 417143 - RNA, 19 nt, Homo sapiens
  misc_RNA (1)...(19): siRNA sense strand
gaggaugacgauuguuuau

SEQ ID NO: 417144 - RNA, 19 nt, Homo sapiens
  misc_RNA (1)...(19): siRNA sense strand
ugggaugagugcagaauau

SEQ ID NO: 417145 - RNA, 19 nt, Homo sapiens
  misc_RNA (1)...(19): siRNA sense strand
aggaacacauagcagauaa

SEQ ID NO: 417146 - RNA, 19 nt, Homo sapiens
  misc_RNA (1)...(19): siRNA sense strand
gcacaaacggaaacaaugc

SEQ ID NO: 417147 - RNA, 19 nt, Homo sapiens
  misc_RNA (1)...(19): siRNA sense strand
gaacacauagcagauaaac

SEQ ID NO: 417148 - RNA, 19 nt, Homo sapiens
  misc_RNA (1)...(19): siRNA sense strand
gcacauggagcucuaaucc

SEQ ID NO: 417149 - RNA, 19 nt, Homo sapiens
  misc_RNA (1)...(19): siRNA sense strand
ccucuugaagccauucuua

SEQ ID NO: 417150 - RNA, 19 nt, Homo sapiens
  misc_RNA (1)...(19): siRNA sense strand
aaacggaaacaaugcaaug

SEQ ID NO: 417151 - RNA, 19 nt, Homo sapiens
  misc_RNA (1)...(19): siRNA sense strand
gaagccauucuuacagaug

SEQ ID NO: 417152 - RNA, 19 nt, Homo sapiens
  misc_RNA (1)...(19): siRNA sense strand
ggaacacauagcagauaaa

SEQ ID NO: 417153 - RNA, 19 nt, Homo sapiens
  misc_RNA (1)...(19): siRNA sense strand
agaggaugacgauuguuua

SEQ ID NO: 417154 - RNA, 19 nt, Homo sapiens
  misc_RNA (1)...(19): siRNA sense strand
aagccauucuuacagauga

SEQ ID NO: 417155 - RNA, 19 nt, Homo sapiens
  misc_RNA (1)...(19): siRNA sense strand
uugaagccauucuuacaga

SEQ ID NO: 417156 - RNA, 19 nt, Homo sapiens
  misc_RNA (1)...(19): siRNA sense strand
caggaacacauagcagaua

SEQ ID NO: 417157 - RNA, 19 nt, Homo sapiens
  misc_RNA (1)...(19): siRNA sense strand
caugguuucucuugcaaca

SEQ ID NO: 417158 - RNA, 19 nt, Homo sapiens
  misc_RNA (1)...(19): siRNA sense strand
ucaacgucaucuagaggaa

SEQ ID NO: 417159 - RNA, 19 nt, Homo sapiens
  misc_RNA (1)...(19): siRNA sense strand
aagaugagcccagcagcua

SEQ ID NO: 417160 - RNA, 19 nt, Homo sapiens
  misc_RNA (1)...(19): siRNA sense strand
caaacaggaacacauagca

SEQ ID NO: 417161 - RNA, 19 nt, Homo sapiens
  misc_RNA (1)...(19): siRNA sense strand
cacagaacacucauggauu

SEQ ID NO: 417162 - RNA, 19 nt, Homo sapiens
  misc_RNA (1)...(19): siRNA sense strand
caacuugcaaacagccauu

SEQ ID NO: 417163 - RNA, 19 nt, Homo sapiens
  misc_RNA (1)...(19): siRNA sense strand
cgccagaggaugacgauug

SEQ ID NO: 417164 - RNA, 19 nt, Homo sapiens
  misc_RNA (1)...(19): siRNA sense strand
aacgucaucuagaggaauu

SEQ ID NO: 417165 - RNA, 19 nt, Homo sapiens
  misc_RNA (1)...(19): siRNA sense strand
gacgauuguuuaucaacgu

SEQ ID NO: 417166 - RNA, 19 nt, Homo sapiens
  misc_RNA (1)...(19): siRNA sense strand
ugaagccauucuuacagau

SEQ ID NO: 417167 - RNA, 19 nt, Homo sapiens
  misc_RNA (1)...(19): siRNA sense strand
cgcaggguauuuguaaaga

SEQ ID NO: 417168 - RNA, 19 nt, Homo sapiens
  misc_RNA (1)...(19): siRNA sense strand
gaugagcccagcagcuaca

SEQ ID NO: 417169 - RNA, 19 nt, Homo sapiens
  misc_RNA (1)...(19): siRNA sense strand
gcccagcagcuacacaugu

SEQ ID NO: 417170 - RNA, 19 nt, Homo sapiens
  misc_RNA (1)...(19): siRNA sense strand
caaacggaaacaaugcaau

SEQ ID NO: 417171 - RNA, 19 nt, Homo sapiens
  misc_RNA (1)...(19): siRNA sense strand
agaaagcgaacacggaagu

SEQ ID NO: 417172 - RNA, 19 nt, Homo sapiens
  misc_RNA (1)...(19): siRNA sense strand
acacauguacaacuugcaa

SEQ ID NO: 417173 - RNA, 19 nt, Homo sapiens
  misc_RNA (1)...(19): siRNA sense strand
gggaugagugcagaauaug

SEQ ID NO: 417174 - RNA, 19 nt, Homo sapiens
  misc_RNA (1)...(19): siRNA sense strand
cagaacacucauggauuaa

SEQ ID NO: 417175 - RNA, 19 nt, Homo sapiens
  misc_RNA (1)...(19): siRNA sense strand
ucuuacagaugaugaacca

SEQ ID NO: 417176 - RNA, 19 nt, Homo sapiens
  misc_RNA (1)...(19): siRNA sense strand
gagcccagcagcuacacau

SEQ ID NO: 417177 - RNA, 19 nt, Homo sapiens
  misc_RNA (1)...(19): siRNA sense strand
acagaacacucauggauua

SEQ ID NO: 417178 - RNA, 19 nt, Homo sapiens
  misc_RNA (1)...(19): siRNA sense strand
gaacacucauggauuaaga

SEQ ID NO: 417179 - RNA, 19 nt, Homo sapiens
  misc_RNA (1)...(19): siRNA sense strand
ggaugacgauuguuuauca

SEQ ID NO: 417180 - RNA, 19 nt, Homo sapiens
  misc_RNA (1)...(19): siRNA sense strand
gcacagaacacucauggau

SEQ ID NO: 417181 - RNA, 19 nt, Homo sapiens
  misc_RNA (1)...(19): siRNA sense strand
acacauagcagauaaacuu

SEQ ID NO: 417182 - RNA, 19 nt, Homo sapiens
  misc_RNA (1)...(19): siRNA sense strand
cagaugaacuucccauugg

SEQ ID NO: 417183 - RNA, 19 nt, Homo sapiens
  misc_RNA (1)...(19): siRNA sense strand
gagcacaaacggaaacaau

SEQ ID NO: 417184 - RNA, 19 nt, Homo sapiens
  misc_RNA (1)...(19): siRNA sense strand
gccagaggaugacgauugu

SEQ ID NO: 417185 - RNA, 19 nt, Homo sapiens
  misc_RNA (1)...(19): siRNA sense strand
caggguauuuguaaagaug

SEQ ID NO: 417186 - RNA, 19 nt, Homo sapiens
  misc_RNA (1)...(19): siRNA sense strand
ccagaugaacuucccauug

SEQ ID NO: 417187 - RNA, 19 nt, Homo sapiens
  misc_RNA (1)...(19): siRNA sense strand
gcaggguauuuguaaagau

SEQ ID NO: 417188 - RNA, 19 nt, Homo sapiens
  misc_RNA (1)...(19): siRNA sense strand
gaugacgauuguuuaucaa

SEQ ID NO: 417189 - RNA, 19 nt, Homo sapiens
  misc_RNA (1)...(19): siRNA sense strand
cagaggaugacgauuguuu

SEQ ID NO: 417190 - RNA, 19 nt, Homo sapiens
  misc_RNA (1)...(19): siRNA sense strand
gaggaugacgauuguuuau

SEQ ID NO: 417191 - RNA, 19 nt, Homo sapiens
  misc_RNA (1)...(19): siRNA sense strand
ugggaugagugcagaauau

SEQ ID NO: 417192 - RNA, 19 nt, Homo sapiens
  misc_RNA (1)...(19): siRNA sense strand
aggaacacauagcagauaa

SEQ ID NO: 417193 - RNA, 19 nt, Homo sapiens
  misc_RNA (1)...(19): siRNA sense strand
gcacaaacggaaacaaugc

SEQ ID NO: 417194 - RNA, 19 nt, Homo sapiens
  misc_RNA (1)...(19): siRNA sense strand
gaacacauagcagauaaac

SEQ ID NO: 417195 - RNA, 19 nt, Homo sapiens
  misc_RNA (1)...(19): siRNA sense strand
gcacauggagcucuaaucc

SEQ ID NO: 417196 - RNA, 19 nt, Homo sapiens
  misc_RNA (1)...(19): siRNA sense strand
ccucuugaagccauucuua

SEQ ID NO: 417197 - RNA, 19 nt, Homo sapiens
  misc_RNA (1)...(19): siRNA sense strand
aaacggaaacaaugcaaug

SEQ ID NO: 417198 - RNA, 19 nt, Homo sapiens
  misc_RNA (1)...(19): siRNA sense strand
gaagccauucuuacagaug

SEQ ID NO: 417199 - RNA, 19 nt, Homo sapiens
  misc_RNA (1)...(19): siRNA sense strand
ggaacacauagcagauaaa

SEQ ID NO: 417200 - RNA, 19 nt, Homo sapiens
  misc_RNA (1)...(19): siRNA sense strand
agaggaugacgauuguuua

SEQ ID NO: 417201 - RNA, 19 nt, Homo sapiens
  misc_RNA (1)...(19): siRNA sense strand
aagccauucuuacagauga

SEQ ID NO: 417202 - RNA, 19 nt, Homo sapiens
  misc_RNA (1)...(19): siRNA sense strand
uugaagccauucuuacaga

SEQ ID NO: 417203 - RNA, 19 nt, Homo sapiens
  misc_RNA (1)...(19): siRNA sense strand
caggaacacauagcagaua

SEQ ID NO: 417204 - RNA, 19 nt, Homo sapiens
  misc_RNA (1)...(19): siRNA sense strand
caugguuucucuugcaaca

SEQ ID NO: 417205 - RNA, 19 nt, Homo sapiens
  misc_RNA (1)...(19): siRNA sense strand
ucaacgucaucuagaggaa

SEQ ID NO: 417206 - RNA, 19 nt, Homo sapiens
  misc_RNA (1)...(19): siRNA sense strand
aagaugagcccagcagcua

SEQ ID NO: 417207 - RNA, 19 nt, Homo sapiens
  misc_RNA (1)...(19): siRNA sense strand
caaacaggaacacauagca

SEQ ID NO: 417208 - RNA, 19 nt, Homo sapiens
  misc_RNA (1)...(19): siRNA sense strand
cacagaacacucauggauu

SEQ ID NO: 417209 - RNA, 19 nt, Homo sapiens
  misc_RNA (1)...(19): siRNA sense strand
caacuugcaaacagccauu

SEQ ID NO: 417210 - RNA, 19 nt, Homo sapiens
  misc_RNA (1)...(19): siRNA sense strand
cgccagaggaugacgauug

SEQ ID NO: 417211 - RNA, 19 nt, Homo sapiens
  misc_RNA (1)...(19): siRNA sense strand
aacgucaucuagaggaauu

SEQ ID NO: 417212 - RNA, 19 nt, Homo sapiens
  misc_RNA (1)...(19): siRNA sense strand
gacgauuguuuaucaacgu

SEQ ID NO: 417213 - RNA, 19 nt, Homo sapiens
  misc_RNA (1)...(19): siRNA sense strand
ugaagccauucuuacagau

SEQ ID NO: 417214 - RNA, 19 nt, Homo sapiens
  misc_RNA (1)...(19): siRNA sense strand
cgcaggguauuuguaaaga

SEQ ID NO: 417215 - RNA, 19 nt, Homo sapiens
  misc_RNA (1)...(19): siRNA sense strand
gaugagcccagcagcuaca

SEQ ID NO: 417216 - RNA, 19 nt, Homo sapiens
  misc_RNA (1)...(19): siRNA sense strand
gcccagcagcuacacaugu

SEQ ID NO: 417217 - RNA, 19 nt, Homo sapiens
  misc_RNA (1)...(19): siRNA sense strand
caaacggaaacaaugcaau

SEQ ID NO: 417218 - RNA, 19 nt, Homo sapiens
  misc_RNA (1)...(19): siRNA sense strand
agaaagcgaacacggaagu

SEQ ID NO: 417219 - RNA, 19 nt, Homo sapiens
  misc_RNA (1)...(19): siRNA sense strand
acacauguacaacuugcaa

SEQ ID NO: 417220 - RNA, 19 nt, Homo sapiens
  misc_RNA (1)...(19): siRNA sense strand
gggaugagugcagaauaug

SEQ ID NO: 417221 - RNA, 19 nt, Homo sapiens
  misc_RNA (1)...(19): siRNA sense strand
cagaacacucauggauuaa

SEQ ID NO: 417222 - RNA, 19 nt, Homo sapiens
  misc_RNA (1)...(19): siRNA sense strand
ucuuacagaugaugaacca

SEQ ID NO: 417223 - RNA, 19 nt, Homo sapiens
  misc_RNA (1)...(19): siRNA sense strand
gagcccagcagcuacacau

SEQ ID NO: 417224 - RNA, 19 nt, Homo sapiens
  misc_RNA (1)...(19): siRNA sense strand
acagaacacucauggauua

SEQ ID NO: 417225 - RNA, 19 nt, Homo sapiens
  misc_RNA (1)...(19): siRNA sense strand
gaacacucauggauuaaga

SEQ ID NO: 417226 - RNA, 19 nt, Homo sapiens
  misc_RNA (1)...(19): siRNA sense strand
ggaugacgauuguuuauca

SEQ ID NO: 417227 - RNA, 19 nt, Homo sapiens
  misc_RNA (1)...(19): siRNA sense strand
gcacagaacacucauggau

SEQ ID NO: 417228 - RNA, 19 nt, Homo sapiens
  misc_RNA (1)...(19): siRNA sense strand
acacauagcagauaaacuu

SEQ ID NO: 417229 - RNA, 19 nt, Homo sapiens
  misc_RNA (1)...(19): siRNA sense strand
cagaugaacuucccauugg

SEQ ID NO: 417230 - RNA, 19 nt, Homo sapiens
  misc_RNA (1)...(19): siRNA sense strand
gagcacaaacggaaacaau

SEQ ID NO: 417231 - RNA, 19 nt, Homo sapiens
  misc_RNA (1)...(19): siRNA sense strand
gccagaggaugacgauugu

SEQ ID NO: 417232 - RNA, 19 nt, Homo sapiens
  misc_RNA (1)...(19): siRNA sense strand
caggguauuuguaaagaug

SEQ ID NO: 417233 - RNA, 19 nt, Homo sapiens
  misc_RNA (1)...(19): siRNA sense strand
ccagaugaacuucccauug

SEQ ID NO: 417234 - RNA, 19 nt, Homo sapiens
  misc_RNA (1)...(19): siRNA sense strand
gcaggguauuuguaaagau

SEQ ID NO: 417235 - RNA, 19 nt, Homo sapiens
  misc_RNA (1)...(19): siRNA sense strand
gaugacgauuguuuaucaa

SEQ ID NO: 417236 - RNA, 19 nt, Homo sapiens
  misc_RNA (1)...(19): siRNA sense strand
cagaggaugacgauuguuu

SEQ ID NO: 417237 - RNA, 19 nt, Homo sapiens
  misc_RNA (1)...(19): siRNA sense strand
gaggaugacgauuguuuau

SEQ ID NO: 417238 - RNA, 19 nt, Homo sapiens
  misc_RNA (1)...(19): siRNA sense strand
ugggaugagugcagaauau

SEQ ID NO: 417239 - RNA, 19 nt, Homo sapiens
  misc_RNA (1)...(19): siRNA sense strand
aggaacacauagcagauaa

SEQ ID NO: 417240 - RNA, 19 nt, Homo sapiens
  misc_RNA (1)...(19): siRNA sense strand
gcacaaacggaaacaaugc

SEQ ID NO: 417241 - RNA, 19 nt, Homo sapiens
  misc_RNA (1)...(19): siRNA sense strand
gaacacauagcagauaaac

SEQ ID NO: 417242 - RNA, 19 nt, Homo sapiens
  misc_RNA (1)...(19): siRNA sense strand
gcacauggagcucuaaucc

SEQ ID NO: 417243 - RNA, 19 nt, Homo sapiens
  misc_RNA (1)...(19): siRNA sense strand
ccucuugaagccauucuua

SEQ ID NO: 417244 - RNA, 19 nt, Homo sapiens
  misc_RNA (1)...(19): siRNA sense strand
aaacggaaacaaugcaaug

SEQ ID NO: 417245 - RNA, 19 nt, Homo sapiens
  misc_RNA (1)...(19): siRNA sense strand
gaagccauucuuacagaug

SEQ ID NO: 417246 - RNA, 19 nt, Homo sapiens
  misc_RNA (1)...(19): siRNA sense strand
ggaacacauagcagauaaa

SEQ ID NO: 417247 - RNA, 19 nt, Homo sapiens
  misc_RNA (1)...(19): siRNA sense strand
agaggaugacgauuguuua

SEQ ID NO: 417248 - RNA, 19 nt, Homo sapiens
  misc_RNA (1)...(19): siRNA sense strand
aagccauucuuacagauga

SEQ ID NO: 417249 - RNA, 19 nt, Homo sapiens
  misc_RNA (1)...(19): siRNA sense strand
uugaagccauucuuacaga

SEQ ID NO: 417250 - RNA, 19 nt, Homo sapiens
  misc_RNA (1)...(19): siRNA sense strand
caggaacacauagcagaua

SEQ ID NO: 417251 - RNA, 19 nt, Homo sapiens
  misc_RNA (1)...(19): siRNA sense strand
caugguuucucuugcaaca

SEQ ID NO: 417252 - RNA, 19 nt, Homo sapiens
  misc_RNA (1)...(19): siRNA sense strand
ucaacgucaucuagaggaa

SEQ ID NO: 417253 - RNA, 19 nt, Homo sapiens
  misc_RNA (1)...(19): siRNA sense strand
aagaugagcccagcagcua

SEQ ID NO: 417254 - RNA, 19 nt, Homo sapiens
  misc_RNA (1)...(19): siRNA sense strand
caaacaggaacacauagca

SEQ ID NO: 417255 - RNA, 19 nt, Homo sapiens
  misc_RNA (1)...(19): siRNA sense strand
cacagaacacucauggauu

SEQ ID NO: 417256 - RNA, 19 nt, Homo sapiens
  misc_RNA (1)...(19): siRNA sense strand
caacuugcaaacagccauu

SEQ ID NO: 417257 - RNA, 19 nt, Homo sapiens
  misc_RNA (1)...(19): siRNA sense strand
cgccagaggaugacgauug

SEQ ID NO: 417258 - RNA, 19 nt, Homo sapiens
  misc_RNA (1)...(19): siRNA sense strand
aacgucaucuagaggaauu

SEQ ID NO: 417259 - RNA, 19 nt, Homo sapiens
  misc_RNA (1)...(19): siRNA sense strand
gacgauuguuuaucaacgu

SEQ ID NO: 417260 - RNA, 19 nt, Homo sapiens
  misc_RNA (1)...(19): siRNA sense strand
ugaagccauucuuacagau

SEQ ID NO: 417261 - RNA, 19 nt, Homo sapiens
  misc_RNA (1)...(19): siRNA sense strand
cgcaggguauuuguaaaga

SEQ ID NO: 417262 - RNA, 19 nt, Homo sapiens
  misc_RNA (1)...(19): siRNA sense strand
gaugagcccagcagcuaca

SEQ ID NO: 417263 - RNA, 19 nt, Homo sapiens
  misc_RNA (1)...(19): siRNA sense strand
gcccagcagcuacacaugu

SEQ ID NO: 417264 - RNA, 19 nt, Homo sapiens
  misc_RNA (1)...(19): siRNA sense strand
caaacggaaacaaugcaau

SEQ ID NO: 417265 - RNA, 19 nt, Homo sapiens
  misc_RNA (1)...(19): siRNA sense strand
agaaagcgaacacggaagu

SEQ ID NO: 417266 - RNA, 19 nt, Homo sapiens
  misc_RNA (1)...(19): siRNA sense strand
acacauguacaacuugcaa

SEQ ID NO: 417267 - RNA, 19 nt, Homo sapiens
  misc_RNA (1)...(19): siRNA sense strand
gggaugagugcagaauaug

SEQ ID NO: 417268 - RNA, 19 nt, Homo sapiens
  misc_RNA (1)...(19): siRNA sense strand
cagaacacucauggauuaa

SEQ ID NO: 417269 - RNA, 19 nt, Homo sapiens
  misc_RNA (1)...(19): siRNA sense strand
ucuuacagaugaugaacca

SEQ ID NO: 417270 - RNA, 19 nt, Homo sapiens
  misc_RNA (1)...(19): siRNA sense strand
gagcccagcagcuacacau

SEQ ID NO: 417271 - RNA, 19 nt, Homo sapiens
  misc_RNA (1)...(19): siRNA sense strand
ccuaagagcugucaaauua

SEQ ID NO: 417272 - RNA, 19 nt, Homo sapiens
  misc_RNA (1)...(19): siRNA sense strand
caacagaauucuacguaua

SEQ ID NO: 417273 - RNA, 19 nt, Homo sapiens
  misc_RNA (1)...(19): siRNA sense strand
caaaggagcugacauugau

SEQ ID NO: 417274 - RNA, 19 nt, Homo sapiens
  misc_RNA (1)...(19): siRNA sense strand
guaaagaacuaccagauuc

SEQ ID NO: 417275 - RNA, 19 nt, Homo sapiens
  misc_RNA (1)...(19): siRNA sense strand
gaacaguaaugguagaaga

SEQ ID NO: 417276 - RNA, 19 nt, Homo sapiens
  misc_RNA (1)...(19): siRNA sense strand
caacauccgugucaucaaa

SEQ ID NO: 417277 - RNA, 19 nt, Homo sapiens
  misc_RNA (1)...(19): siRNA sense strand
aaaguugacucuacaguaa

SEQ ID NO: 417278 - RNA, 19 nt, Homo sapiens
  misc_RNA (1)...(19): siRNA sense strand
ggaacggaaugaauuuauu

SEQ ID NO: 417279 - RNA, 19 nt, Homo sapiens
  misc_RNA (1)...(19): siRNA sense strand
gauagcaguugucuggaua

SEQ ID NO: 417280 - RNA, 19 nt, Homo sapiens
  misc_RNA (1)...(19): siRNA sense strand
ggaauaaggaacaucauaa

SEQ ID NO: 417281 - RNA, 19 nt, Homo sapiens
  misc_RNA (1)...(19): siRNA sense strand
gaucauauuuacacacaga

SEQ ID NO: 417282 - RNA, 19 nt, Homo sapiens
  misc_RNA (1)...(19): siRNA sense strand
caacauagacuugacauau

SEQ ID NO: 417283 - RNA, 19 nt, Homo sapiens
  misc_RNA (1)...(19): siRNA sense strand
cuuaagagcuguagaagau

SEQ ID NO: 417284 - RNA, 19 nt, Homo sapiens
  misc_RNA (1)...(19): siRNA sense strand
ggagaaacagaaaggaaua

SEQ ID NO: 417285 - RNA, 19 nt, Homo sapiens
  misc_RNA (1)...(19): siRNA sense strand
uguagaagaugccuuugua

SEQ ID NO: 417286 - RNA, 19 nt, Homo sapiens
  misc_RNA (1)...(19): siRNA sense strand
uaagagcugucaaauuaug

SEQ ID NO: 417287 - RNA, 19 nt, Homo sapiens
  misc_RNA (1)...(19): siRNA sense strand
agacaacaauuacguauca

SEQ ID NO: 417288 - RNA, 19 nt, Homo sapiens
  misc_RNA (1)...(19): siRNA sense strand
caaagucucucugauguca

SEQ ID NO: 417289 - RNA, 19 nt, Homo sapiens
  misc_RNA (1)...(19): siRNA sense strand
ugaagcaacucauguaaag

SEQ ID NO: 417290 - RNA, 19 nt, Homo sapiens
  misc_RNA (1)...(19): siRNA sense strand
cacaucaacucgaacagua

SEQ ID NO: 417291 - RNA, 19 nt, Homo sapiens
  misc_RNA (1)...(19): siRNA sense strand
gcaaacaacauccguguca

SEQ ID NO: 417292 - RNA, 19 nt, Homo sapiens
  misc_RNA (1)...(19): siRNA sense strand
caagacauguggaaagauc

SEQ ID NO: 417293 - RNA, 19 nt, Homo sapiens
  misc_RNA (1)...(19): siRNA sense strand
cagaaagugucaacauaga

SEQ ID NO: 417294 - RNA, 19 nt, Homo sapiens
  misc_RNA (1)...(19): siRNA sense strand
ccaccgaauuucuuucaaa

SEQ ID NO: 417295 - RNA, 19 nt, Homo sapiens
  misc_RNA (1)...(19): siRNA sense strand
cuaagacuguuacaccuaa

SEQ ID NO: 417296 - RNA, 19 nt, Homo sapiens
  misc_RNA (1)...(19): siRNA sense strand
gggaauaaggaacaucaua

SEQ ID NO: 417297 - RNA, 19 nt, Homo sapiens
  misc_RNA (1)...(19): siRNA sense strand
ugacauugaugcacuuugu

SEQ ID NO: 417298 - RNA, 19 nt, Homo sapiens
  misc_RNA (1)...(19): siRNA sense strand
gcaucuacuuuaguucaua

SEQ ID NO: 417299 - RNA, 19 nt, Homo sapiens
  misc_RNA (1)...(19): siRNA sense strand
cagcuuaaaugguuguaga

SEQ ID NO: 417300 - RNA, 19 nt, Homo sapiens
  misc_RNA (1)...(19): siRNA sense strand
ugagaagccuugauauaag

SEQ ID NO: 417301 - RNA, 19 nt, Homo sapiens
  misc_RNA (1)...(19): siRNA sense strand
agaguggguuggauuagua

SEQ ID NO: 417302 - RNA, 19 nt, Homo sapiens
  misc_RNA (1)...(19): siRNA sense strand
gcaagacuggcaauacaaa

SEQ ID NO: 417303 - RNA, 19 nt, Homo sapiens
  misc_RNA (1)...(19): siRNA sense strand
cagagacacugauaaugga

SEQ ID NO: 417304 - RNA, 19 nt, Homo sapiens
  misc_RNA (1)...(19): siRNA sense strand
gcagaaagugucaacauag

SEQ ID NO: 417305 - RNA, 19 nt, Homo sapiens
  misc_RNA (1)...(19): siRNA sense strand
ugcagaaagugucaacaua

SEQ ID NO: 417306 - RNA, 19 nt, Homo sapiens
  misc_RNA (1)...(19): siRNA sense strand
gaauggauuucugauguca

SEQ ID NO: 417307 - RNA, 19 nt, Homo sapiens
  misc_RNA (1)...(19): siRNA sense strand
gagacuacccaguaaagaa

SEQ ID NO: 417308 - RNA, 19 nt, Homo sapiens
  misc_RNA (1)...(19): siRNA sense strand
gcuaaaggagggaaugaaa

SEQ ID NO: 417309 - RNA, 19 nt, Homo sapiens
  misc_RNA (1)...(19): siRNA sense strand
ccaaaggagcugacauuga

SEQ ID NO: 417310 - RNA, 19 nt, Homo sapiens
  misc_RNA (1)...(19): siRNA sense strand
gauaauggaacaccuuuua

SEQ ID NO: 417311 - RNA, 19 nt, Homo sapiens
  misc_RNA (1)...(19): siRNA sense strand
gggcggacuucaauccaaa

SEQ ID NO: 417312 - RNA, 19 nt, Homo sapiens
  misc_RNA (1)...(19): siRNA sense strand
aaagagaugucugcaaaca

SEQ ID NO: 417313 - RNA, 19 nt, Homo sapiens
  misc_RNA (1)...(19): siRNA sense strand
ugauagcccuucuguagga

SEQ ID NO: 417314 - RNA, 19 nt, Homo sapiens
  misc_RNA (1)...(19): siRNA sense strand
ggauagcaguugucuggau

SEQ ID NO: 417315 - RNA, 19 nt, Homo sapiens
  misc_RNA (1)...(19): siRNA sense strand
uaaggaacaucauaaagac

SEQ ID NO: 417316 - RNA, 19 nt, Homo sapiens
  misc_RNA (1)...(19): siRNA sense strand
cugagaagccuugauauaa

SEQ ID NO: 417317 - RNA, 19 nt, Homo sapiens
  misc_RNA (1)...(19): siRNA sense strand
ggacuuuccauuccaguga

SEQ ID NO: 417318 - RNA, 19 nt, Homo sapiens
  misc_RNA (1)...(19): siRNA sense strand
guacagacaggcaaacaau

SEQ ID NO: 417319 - RNA, 19 nt, Homo sapiens
  misc_RNA (1)...(19): siRNA sense strand
caacaauuacguaucaaug

SEQ ID NO: 417320 - RNA, 19 nt, Homo sapiens
  misc_RNA (1)...(19): siRNA sense strand
uaucaucucaugcccauaa

SEQ ID NO: 417321 - RNA, 19 nt, Homo sapiens
  misc_RNA (1)...(19): siRNA sense strand
guaaauccaucagauaggu

SEQ ID NO: 417322 - RNA, 19 nt, Homo sapiens
  misc_RNA (1)...(19): siRNA sense strand
caagauggcauuagaaacu

SEQ ID NO: 417323 - RNA, 19 nt, Homo sapiens
  misc_RNA (1)...(19): siRNA sense strand
cuaccuuccugcagaaauu

SEQ ID NO: 417324 - RNA, 19 nt, Homo sapiens
  misc_RNA (1)...(19): siRNA sense strand
gcagcagcaucuacuuuag

SEQ ID NO: 417325 - RNA, 19 nt, Homo sapiens
  misc_RNA (1)...(19): siRNA sense strand
aaacuuaagagcuguagaa

SEQ ID NO: 417326 - RNA, 19 nt, Homo sapiens
  misc_RNA (1)...(19): siRNA sense strand
ccugagaagccuugauaua

SEQ ID NO: 417327 - RNA, 19 nt, Homo sapiens
  misc_RNA (1)...(19): siRNA sense strand
ccgcacugcugaagaaaga

SEQ ID NO: 417328 - RNA, 19 nt, Homo sapiens
  misc_RNA (1)...(19): siRNA sense strand
cugaauggaaugucaaaua

SEQ ID NO: 417329 - RNA, 19 nt, Homo sapiens
  misc_RNA (1)...(19): siRNA sense strand
caaauccugugcugcugaa

SEQ ID NO: 417330 - RNA, 19 nt, Homo sapiens
  misc_RNA (1)...(19): siRNA sense strand
guuguagaguuacugauga

SEQ ID NO: 417331 - RNA, 19 nt, Homo sapiens
  misc_RNA (1)...(19): siRNA sense strand
gcaaaacgacgugguauuu

SEQ ID NO: 417332 - RNA, 19 nt, Homo sapiens
  misc_RNA (1)...(19): siRNA sense strand
ggacaaccgcaucugaaug

SEQ ID NO: 417333 - RNA, 19 nt, Homo sapiens
  misc_RNA (1)...(19): siRNA sense strand
gaaacagaaaggaauagug

SEQ ID NO: 417334 - RNA, 19 nt, Homo sapiens
  misc_RNA (1)...(19): siRNA sense strand
ccaauuguauccaaaugca

SEQ ID NO: 417335 - RNA, 19 nt, Homo sapiens
  misc_RNA (1)...(19): siRNA sense strand
gaaauugaucuagucuuug

SEQ ID NO: 417336 - RNA, 19 nt, Homo sapiens
  misc_RNA (1)...(19): siRNA sense strand
ccauucgacugacccuuaa

SEQ ID NO: 417337 - RNA, 19 nt, Homo sapiens
  misc_RNA (1)...(19): siRNA sense strand
ggacagccagcgucaacaa

SEQ ID NO: 417338 - RNA, 19 nt, Homo sapiens
  misc_RNA (1)...(19): siRNA sense strand
cagaagaaagcaauuugaa

SEQ ID NO: 417339 - RNA, 19 nt, Homo sapiens
  misc_RNA (1)...(19): siRNA sense strand
gcuggugguucuugguaaa

SEQ ID NO: 417340 - RNA, 19 nt, Homo sapiens
  misc_RNA (1)...(19): siRNA sense strand
gcaucugaauggaauguca

SEQ ID NO: 417341 - RNA, 19 nt, Homo sapiens
  misc_RNA (1)...(19): siRNA sense strand
ccacuaccuuccugcagaa

SEQ ID NO: 417342 - RNA, 19 nt, Homo sapiens
  misc_RNA (1)...(19): siRNA sense strand
acaauuacguaucaaugug

SEQ ID NO: 417343 - RNA, 19 nt, Homo sapiens
  misc_RNA (1)...(19): siRNA sense strand
caauacaaaccauaucaga

SEQ ID NO: 417344 - RNA, 19 nt, Homo sapiens
  misc_RNA (1)...(19): siRNA sense strand
ccagagacacugauaaugg

SEQ ID NO: 417345 - RNA, 19 nt, Homo sapiens
  misc_RNA (1)...(19): siRNA sense strand
guaguaggacgaaauguca

SEQ ID NO: 417346 - RNA, 19 nt, Homo sapiens
  misc_RNA (1)...(19): siRNA sense strand
gaugucagcgagaguaaga

SEQ ID NO: 417347 - RNA, 19 nt, Homo sapiens
  misc_RNA (1)...(19): siRNA sense strand
gaggagaaucuaugccuau

SEQ ID NO: 417348 - RNA, 19 nt, Homo sapiens
  misc_RNA (1)...(19): siRNA sense strand
gcacugcugaagaaagaaa

SEQ ID NO: 417349 - RNA, 19 nt, Homo sapiens
  misc_RNA (1)...(19): siRNA sense strand
gaaagacguagaaaaguuu

SEQ ID NO: 417350 - RNA, 19 nt, Homo sapiens
  misc_RNA (1)...(19): siRNA sense strand
ggacuucaauccaaaagau

SEQ ID NO: 417351 - RNA, 19 nt, Homo sapiens
  misc_RNA (1)...(19): siRNA sense strand
uaaaauccguguacuuguu

SEQ ID NO: 417352 - RNA, 19 nt, Homo sapiens
  misc_RNA (1)...(19): siRNA sense strand
agucacagaugaaauucuu

SEQ ID NO: 417353 - RNA, 19 nt, Homo sapiens
  misc_RNA (1)...(19): siRNA sense strand
gacgugguauuuauuccaa

SEQ ID NO: 417354 - RNA, 19 nt, Homo sapiens
  misc_RNA (1)...(19): siRNA sense strand
gaaccucccaccuucuguu

SEQ ID NO: 417355 - RNA, 19 nt, Homo sapiens
  misc_RNA (1)...(19): siRNA sense strand
aaaagagacuacccaguaa

SEQ ID NO: 417356 - RNA, 19 nt, Homo sapiens
  misc_RNA (1)...(19): siRNA sense strand
ugaaagacguagaaaaguu

SEQ ID NO: 417357 - RNA, 19 nt, Homo sapiens
  misc_RNA (1)...(19): siRNA sense strand
agacaggcaaacaauauaa

SEQ ID NO: 417358 - RNA, 19 nt, Homo sapiens
  misc_RNA (1)...(19): siRNA sense strand
cacaacagaauucuacgua

SEQ ID NO: 417359 - RNA, 19 nt, Homo sapiens
  misc_RNA (1)...(19): siRNA sense strand
guuugaagaugaggaagaa

SEQ ID NO: 417360 - RNA, 19 nt, Homo sapiens
  misc_RNA (1)...(19): siRNA sense strand
caccaaaggagcugacauu

SEQ ID NO: 417361 - RNA, 19 nt, Homo sapiens
  misc_RNA (1)...(19): siRNA sense strand
ugagccugcugcuguaauu

SEQ ID NO: 417362 - RNA, 19 nt, Homo sapiens
  misc_RNA (1)...(19): siRNA sense strand
cggaaugaauuuauuacuc

SEQ ID NO: 417363 - RNA, 19 nt, Homo sapiens
  misc_RNA (1)...(19): siRNA sense strand
gaagaugaggaagaauuga

SEQ ID NO: 417364 - RNA, 19 nt, Homo sapiens
  misc_RNA (1)...(19): siRNA sense strand
ccagaagaaagcaauuuga

SEQ ID NO: 417365 - RNA, 19 nt, Homo sapiens
  misc_RNA (1)...(19): siRNA sense strand
cuuaaaugguuguagaguu

SEQ ID NO: 417366 - RNA, 19 nt, Homo sapiens
  misc_RNA (1)...(19): siRNA sense strand
auucgcagcuuaaaugguu

SEQ ID NO: 417367 - RNA, 19 nt, Homo sapiens
  misc_RNA (1)...(19): siRNA sense strand
ggugguucuugguaaauug

SEQ ID NO: 417368 - RNA, 19 nt, Homo sapiens
  misc_RNA (1)...(19): siRNA sense strand
ggcaucuccuaaagaaauu

SEQ ID NO: 417369 - RNA, 19 nt, Homo sapiens
  misc_RNA (1)...(19): siRNA sense strand
aagcaacucauguaaagaa

SEQ ID NO: 417370 - RNA, 19 nt, Homo sapiens
  misc_RNA (1)...(19): siRNA sense strand
cagacaggcaaacaauaua

SEQ ID NO: 417371 - RNA, 19 nt, Homo sapiens
  misc_RNA (1)...(19): siRNA sense strand
gcaucaagguggagaagga

SEQ ID NO: 417372 - RNA, 19 nt, Homo sapiens
  misc_RNA (1)...(19): siRNA sense strand
gcgagaagcccuacaagug

SEQ ID NO: 417373 - RNA, 19 nt, Homo sapiens
  misc_RNA (1)...(19): siRNA sense strand
gcggcaagguguucaagaa

SEQ ID NO: 417374 - RNA, 19 nt, Homo sapiens
  misc_RNA (1)...(19): siRNA sense strand
acaaggcccuggacaagga

SEQ ID NO: 417375 - RNA, 19 nt, Homo sapiens
  misc_RNA (1)...(19): siRNA sense strand
gcaagcagcccuucaacag

SEQ ID NO: 417376 - RNA, 19 nt, Homo sapiens
  misc_RNA (1)...(19): siRNA sense strand
aagaugagccuuccagcua

SEQ ID NO: 417377 - RNA, 19 nt, Homo sapiens
  misc_RNA (1)...(19): siRNA sense strand
gagcaagucgugcgaguuc

SEQ ID NO: 417378 - RNA, 19 nt, Homo sapiens
  misc_RNA (1)...(19): siRNA sense strand
cagcuugggugccugcuau

SEQ ID NO: 417379 - RNA, 19 nt, Homo sapiens
  misc_RNA (1)...(19): siRNA sense strand
gcaagaccuucaaguucca

SEQ ID NO: 417380 - RNA, 19 nt, Homo sapiens
  misc_RNA (1)...(19): siRNA sense strand
gcucaccuguggccagugu

SEQ ID NO: 417381 - RNA, 19 nt, Homo sapiens
  misc_RNA (1)...(19): siRNA sense strand
gcaaggucauggagaacgu

SEQ ID NO: 417382 - RNA, 19 nt, Homo sapiens
  misc_RNA (1)...(19): siRNA sense strand
gcggcaagaccuucaaguu

SEQ ID NO: 417383 - RNA, 19 nt, Homo sapiens
  misc_RNA (1)...(19): siRNA sense strand
ggagauagaggagccaagu

SEQ ID NO: 417384 - RNA, 19 nt, Homo sapiens
  misc_RNA (1)...(19): siRNA sense strand
gagccuuccagcuacauuu

SEQ ID NO: 417385 - RNA, 19 nt, Homo sapiens
  misc_RNA (1)...(19): siRNA sense strand
cuacagcacccuggagaaa

SEQ ID NO: 417386 - RNA, 19 nt, Homo sapiens
  misc_RNA (1)...(19): siRNA sense strand
gcgagcggccuuacaagug

SEQ ID NO: 417387 - RNA, 19 nt, Homo sapiens
  misc_RNA (1)...(19): siRNA sense strand
ugaagacgcacaugcacaa

SEQ ID NO: 417388 - RNA, 19 nt, Homo sapiens
  misc_RNA (1)...(19): siRNA sense strand
cggcaagaccuucaaguuc

SEQ ID NO: 417389 - RNA, 19 nt, Homo sapiens
  misc_RNA (1)...(19): siRNA sense strand
gaugagccuuccagcuaca

SEQ ID NO: 417390 - RNA, 19 nt, Homo sapiens
  misc_RNA (1)...(19): siRNA sense strand
acgagggucuggagauaga

SEQ ID NO: 417391 - RNA, 19 nt, Homo sapiens
  misc_RNA (1)...(19): siRNA sense strand
cagcuacauuugcacaaca

SEQ ID NO: 417392 - RNA, 19 nt, Homo sapiens
  misc_RNA (1)...(19): siRNA sense strand
gcagcgacacgugcgagua

SEQ ID NO: 417393 - RNA, 19 nt, Homo sapiens
  misc_RNA (1)...(19): siRNA sense strand
cccagaggcugaccaugug

SEQ ID NO: 417394 - RNA, 19 nt, Homo sapiens
  misc_RNA (1)...(19): siRNA sense strand
acagcacccuggagaaaca

SEQ ID NO: 417395 - RNA, 19 nt, Homo sapiens
  misc_RNA (1)...(19): siRNA sense strand
ugggcaaggucauggagaa

SEQ ID NO: 417396 - RNA, 19 nt, Homo sapiens
  misc_RNA (1)...(19): siRNA sense strand
agugcgagcugugcaacua

SEQ ID NO: 417397 - RNA, 19 nt, Homo sapiens
  misc_RNA (1)...(19): siRNA sense strand
ugacaaggcccuggacaag

SEQ ID NO: 417398 - RNA, 19 nt, Homo sapiens
  misc_RNA (1)...(19): siRNA sense strand
uguggccagugucaaauga

SEQ ID NO: 417399 - RNA, 19 nt, Homo sapiens
  misc_RNA (1)...(19): siRNA sense strand
gcucaagcgccacaugaag

SEQ ID NO: 417400 - RNA, 19 nt, Homo sapiens
  misc_RNA (1)...(19): siRNA sense strand
ggaggaggaggagcugcua

SEQ ID NO: 417401 - RNA, 19 nt, Homo sapiens
  misc_RNA (1)...(19): siRNA sense strand
gcacggcuuccgcaucuac

SEQ ID NO: 417402 - RNA, 19 nt, Homo sapiens
  misc_RNA (1)...(19): siRNA sense strand
gcaagucgugcgaguucug

SEQ ID NO: 417403 - RNA, 19 nt, Homo sapiens
  misc_RNA (1)...(19): siRNA sense strand
uucaagaacugcagcaacu

SEQ ID NO: 417404 - RNA, 19 nt, Homo sapiens
  misc_RNA (1)...(19): siRNA sense strand
acgcacggcuuccgcaucu

SEQ ID NO: 417405 - RNA, 19 nt, Homo sapiens
  misc_RNA (1)...(19): siRNA sense strand
gcagucacacgggcgagaa

SEQ ID NO: 417406 - RNA, 19 nt, Homo sapiens
  misc_RNA (1)...(19): siRNA sense strand
ccgccauccucgaagaaga

SEQ ID NO: 417407 - RNA, 19 nt, Homo sapiens
  misc_RNA (1)...(19): siRNA sense strand
gagauagaggagccaagug

SEQ ID NO: 417408 - RNA, 19 nt, Homo sapiens
  misc_RNA (1)...(19): siRNA sense strand
caagcucacgcgccacaug

SEQ ID NO: 417409 - RNA, 19 nt, Homo sapiens
  misc_RNA (1)...(19): siRNA sense strand
caugcaagcagcccuucaa

SEQ ID NO: 417410 - RNA, 19 nt, Homo sapiens
  misc_RNA (1)...(19): siRNA sense strand
gaagacgcacgggcagauc

SEQ ID NO: 417411 - RNA, 19 nt, Homo sapiens
  misc_RNA (1)...(19): siRNA sense strand
guacugcggcaagguguuc

SEQ ID NO: 417412 - RNA, 19 nt, Homo sapiens
  misc_RNA (1)...(19): siRNA sense strand
gcaacccgcagcacuuguc

SEQ ID NO: 417413 - RNA, 19 nt, Homo sapiens
  misc_RNA (1)...(19): siRNA sense strand
gcaucaagguggagaagga

SEQ ID NO: 417414 - RNA, 19 nt, Homo sapiens
  misc_RNA (1)...(19): siRNA sense strand
gcgagaagcccuacaagug

SEQ ID NO: 417415 - RNA, 19 nt, Homo sapiens
  misc_RNA (1)...(19): siRNA sense strand
gcggcaagguguucaagaa

SEQ ID NO: 417416 - RNA, 19 nt, Homo sapiens
  misc_RNA (1)...(19): siRNA sense strand
acaaggcccuggacaagga

SEQ ID NO: 417417 - RNA, 19 nt, Homo sapiens
  misc_RNA (1)...(19): siRNA sense strand
gcaagcagcccuucaacag

SEQ ID NO: 417418 - RNA, 19 nt, Homo sapiens
  misc_RNA (1)...(19): siRNA sense strand
aagaugagccuuccagcua

SEQ ID NO: 417419 - RNA, 19 nt, Homo sapiens
  misc_RNA (1)...(19): siRNA sense strand
gagcaagucgugcgaguuc

SEQ ID NO: 417420 - RNA, 19 nt, Homo sapiens
  misc_RNA (1)...(19): siRNA sense strand
cagcuugggugccugcuau

SEQ ID NO: 417421 - RNA, 19 nt, Homo sapiens
  misc_RNA (1)...(19): siRNA sense strand
gcaagaccuucaaguucca

SEQ ID NO: 417422 - RNA, 19 nt, Homo sapiens
  misc_RNA (1)...(19): siRNA sense strand
gcucaccuguggccagugu

SEQ ID NO: 417423 - RNA, 19 nt, Homo sapiens
  misc_RNA (1)...(19): siRNA sense strand
gcaaggucauggagaacgu

SEQ ID NO: 417424 - RNA, 19 nt, Homo sapiens
  misc_RNA (1)...(19): siRNA sense strand
gcggcaagaccuucaaguu

SEQ ID NO: 417425 - RNA, 19 nt, Homo sapiens
  misc_RNA (1)...(19): siRNA sense strand
ggagauagaggagccaagu

SEQ ID NO: 417426 - RNA, 19 nt, Homo sapiens
  misc_RNA (1)...(19): siRNA sense strand
gagccuuccagcuacauuu

SEQ ID NO: 417427 - RNA, 19 nt, Homo sapiens
  misc_RNA (1)...(19): siRNA sense strand
cuacagcacccuggagaaa

SEQ ID NO: 417428 - RNA, 19 nt, Homo sapiens
  misc_RNA (1)...(19): siRNA sense strand
gcgagcggccuuacaagug

SEQ ID NO: 417429 - RNA, 19 nt, Homo sapiens
  misc_RNA (1)...(19): siRNA sense strand
ugaagacgcacaugcacaa

SEQ ID NO: 417430 - RNA, 19 nt, Homo sapiens
  misc_RNA (1)...(19): siRNA sense strand
cggcaagaccuucaaguuc

SEQ ID NO: 417431 - RNA, 19 nt, Homo sapiens
  misc_RNA (1)...(19): siRNA sense strand
gaugagccuuccagcuaca

SEQ ID NO: 417432 - RNA, 19 nt, Homo sapiens
  misc_RNA (1)...(19): siRNA sense strand
acgagggucuggagauaga

SEQ ID NO: 417433 - RNA, 19 nt, Homo sapiens
  misc_RNA (1)...(19): siRNA sense strand
cagcuacauuugcacaaca

SEQ ID NO: 417434 - RNA, 19 nt, Homo sapiens
  misc_RNA (1)...(19): siRNA sense strand
gcagcgacacgugcgagua

SEQ ID NO: 417435 - RNA, 19 nt, Homo sapiens
  misc_RNA (1)...(19): siRNA sense strand
cccagaggcugaccaugug

SEQ ID NO: 417436 - RNA, 19 nt, Homo sapiens
  misc_RNA (1)...(19): siRNA sense strand
acagcacccuggagaaaca

SEQ ID NO: 417437 - RNA, 19 nt, Homo sapiens
  misc_RNA (1)...(19): siRNA sense strand
ugggcaaggucauggagaa

SEQ ID NO: 417438 - RNA, 19 nt, Homo sapiens
  misc_RNA (1)...(19): siRNA sense strand
agugcgagcugugcaacua

SEQ ID NO: 417439 - RNA, 19 nt, Homo sapiens
  misc_RNA (1)...(19): siRNA sense strand
ugacaaggcccuggacaag

SEQ ID NO: 417440 - RNA, 19 nt, Homo sapiens
  misc_RNA (1)...(19): siRNA sense strand
uguggccagugucaaauga

SEQ ID NO: 417441 - RNA, 19 nt, Homo sapiens
  misc_RNA (1)...(19): siRNA sense strand
gcucaagcgccacaugaag

SEQ ID NO: 417442 - RNA, 19 nt, Homo sapiens
  misc_RNA (1)...(19): siRNA sense strand
ggaggaggaggagcugcua

SEQ ID NO: 417443 - RNA, 19 nt, Homo sapiens
  misc_RNA (1)...(19): siRNA sense strand
gcacggcuuccgcaucuac

SEQ ID NO: 417444 - RNA, 19 nt, Homo sapiens
  misc_RNA (1)...(19): siRNA sense strand
gcaagucgugcgaguucug

SEQ ID NO: 417445 - RNA, 19 nt, Homo sapiens
  misc_RNA (1)...(19): siRNA sense strand
uucaagaacugcagcaacu

SEQ ID NO: 417446 - RNA, 19 nt, Homo sapiens
  misc_RNA (1)...(19): siRNA sense strand
acgcacggcuuccgcaucu

SEQ ID NO: 417447 - RNA, 19 nt, Homo sapiens
  misc_RNA (1)...(19): siRNA sense strand
gcagucacacgggcgagaa

SEQ ID NO: 417448 - RNA, 19 nt, Homo sapiens
  misc_RNA (1)...(19): siRNA sense strand
ccgccauccucgaagaaga

SEQ ID NO: 417449 - RNA, 19 nt, Homo sapiens
  misc_RNA (1)...(19): siRNA sense strand
gagauagaggagccaagug

SEQ ID NO: 417450 - RNA, 19 nt, Homo sapiens
  misc_RNA (1)...(19): siRNA sense strand
caagcucacgcgccacaug

SEQ ID NO: 417451 - RNA, 19 nt, Homo sapiens
  misc_RNA (1)...(19): siRNA sense strand
caugcaagcagcccuucaa

SEQ ID NO: 417452 - RNA, 19 nt, Homo sapiens
  misc_RNA (1)...(19): siRNA sense strand
gaagacgcacgggcagauc

SEQ ID NO: 417453 - RNA, 19 nt, Homo sapiens
  misc_RNA (1)...(19): siRNA sense strand
guacugcggcaagguguuc

SEQ ID NO: 417454 - RNA, 19 nt, Homo sapiens
  misc_RNA (1)...(19): siRNA sense strand
gcaacccgcagcacuuguc

SEQ ID NO: 417455 - RNA, 19 nt, Homo sapiens
  misc_RNA (1)...(19): siRNA sense strand
ggaggaggcugaaaucaaa

SEQ ID NO: 417456 - RNA, 19 nt, Homo sapiens
  misc_RNA (1)...(19): siRNA sense strand
gagcaguucucuuccuuua

SEQ ID NO: 417457 - RNA, 19 nt, Homo sapiens
  misc_RNA (1)...(19): siRNA sense strand
ccaaggcucucguuucuaa

SEQ ID NO: 417458 - RNA, 19 nt, Homo sapiens
  misc_RNA (1)...(19): siRNA sense strand
gcaaggcagucccaaguuu

SEQ ID NO: 417459 - RNA, 19 nt, Homo sapiens
  misc_RNA (1)...(19): siRNA sense strand
gaggaaagcugccuacuac

SEQ ID NO: 417460 - RNA, 19 nt, Homo sapiens
  misc_RNA (1)...(19): siRNA sense strand
gaaaggaacuggccaagcu

SEQ ID NO: 417461 - RNA, 19 nt, Homo sapiens
  misc_RNA (1)...(19): siRNA sense strand
ggauacagccucugacuuu

SEQ ID NO: 417462 - RNA, 19 nt, Homo sapiens
  misc_RNA (1)...(19): siRNA sense strand
gaucgucaguccuuucgua

SEQ ID NO: 417463 - RNA, 19 nt, Homo sapiens
  misc_RNA (1)...(19): siRNA sense strand
ggagagggguuguuuuaua

SEQ ID NO: 417464 - RNA, 19 nt, Homo sapiens
  misc_RNA (1)...(19): siRNA sense strand
gaacagagcauuugaugac

SEQ ID NO: 417465 - RNA, 19 nt, Homo sapiens
  misc_RNA (1)...(19): siRNA sense strand
gaucuucgguggacaagga

SEQ ID NO: 417466 - RNA, 19 nt, Homo sapiens
  misc_RNA (1)...(19): siRNA sense strand
ggauucaacuuucacguau

SEQ ID NO: 417467 - RNA, 19 nt, Homo sapiens
  misc_RNA (1)...(19): siRNA sense strand
ggaaguccgugcuauguca

SEQ ID NO: 417468 - RNA, 19 nt, Homo sapiens
  misc_RNA (1)...(19): siRNA sense strand
agugggagaugauacauua

SEQ ID NO: 417469 - RNA, 19 nt, Homo sapiens
  misc_RNA (1)...(19): siRNA sense strand
gcaguucucuuccuuuagu

SEQ ID NO: 417470 - RNA, 19 nt, Homo sapiens
  misc_RNA (1)...(19): siRNA sense strand
ggaaagugauacuagacaa

SEQ ID NO: 417471 - RNA, 19 nt, Homo sapiens
  misc_RNA (1)...(19): siRNA sense strand
gaaggauccuguaaaugug

SEQ ID NO: 417472 - RNA, 19 nt, Homo sapiens
  misc_RNA (1)...(19): siRNA sense strand
gcagaaggacuaaaggaaa

SEQ ID NO: 417473 - RNA, 19 nt, Homo sapiens
  misc_RNA (1)...(19): siRNA sense strand
gcugagaucccuccaguuu

SEQ ID NO: 417474 - RNA, 19 nt, Homo sapiens
  misc_RNA (1)...(19): siRNA sense strand
cgauguaucucuugaugaa

SEQ ID NO: 417475 - RNA, 19 nt, Homo sapiens
  misc_RNA (1)...(19): siRNA sense strand
ccucaaagcucuguguauu

SEQ ID NO: 417476 - RNA, 19 nt, Homo sapiens
  misc_RNA (1)...(19): siRNA sense strand
ggaaagagcccaggagauc

SEQ ID NO: 417477 - RNA, 19 nt, Homo sapiens
  misc_RNA (1)...(19): siRNA sense strand
gacaggaaauggagaagga

SEQ ID NO: 417478 - RNA, 19 nt, Homo sapiens
  misc_RNA (1)...(19): siRNA sense strand
gcagugcacuaaauaacga

SEQ ID NO: 417479 - RNA, 19 nt, Homo sapiens
  misc_RNA (1)...(19): siRNA sense strand
ggacuugcccuucuggaaa

SEQ ID NO: 417480 - RNA, 19 nt, Homo sapiens
  misc_RNA (1)...(19): siRNA sense strand
uagagaagcugcagugaca

SEQ ID NO: 417481 - RNA, 19 nt, Homo sapiens
  misc_RNA (1)...(19): siRNA sense strand
ggaggaaagcugccuacua

SEQ ID NO: 417482 - RNA, 19 nt, Homo sapiens
  misc_RNA (1)...(19): siRNA sense strand
caacagaggggaagaaaua

SEQ ID NO: 417483 - RNA, 19 nt, Homo sapiens
  misc_RNA (1)...(19): siRNA sense strand
cuaggaaacuggaagaaau

SEQ ID NO: 417484 - RNA, 19 nt, Homo sapiens
  misc_RNA (1)...(19): siRNA sense strand
gagggaaagugauacuaga

SEQ ID NO: 417485 - RNA, 19 nt, Homo sapiens
  misc_RNA (1)...(19): siRNA sense strand
ugaaggauccuguaaaugu

SEQ ID NO: 417486 - RNA, 19 nt, Homo sapiens
  misc_RNA (1)...(19): siRNA sense strand
ggacagaagcuggguuuga

SEQ ID NO: 417487 - RNA, 19 nt, Homo sapiens
  misc_RNA (1)...(19): siRNA sense strand
gauggugaauuuacucaug

SEQ ID NO: 417488 - RNA, 19 nt, Homo sapiens
  misc_RNA (1)...(19): siRNA sense strand
gagaacacauaccaucugu

SEQ ID NO: 417489 - RNA, 19 nt, Homo sapiens
  misc_RNA (1)...(19): siRNA sense strand
uaugaaggauccuguaaau

SEQ ID NO: 417490 - RNA, 19 nt, Homo sapiens
  misc_RNA (1)...(19): siRNA sense strand
gaaagcugccuacuacaga

SEQ ID NO: 417491 - RNA, 19 nt, Homo sapiens
  misc_RNA (1)...(19): siRNA sense strand
ugacaaaucccauuacauc

SEQ ID NO: 417492 - RNA, 19 nt, Homo sapiens
  misc_RNA (1)...(19): siRNA sense strand
cagaaggacuaaaggaaau

SEQ ID NO: 417493 - RNA, 19 nt, Homo sapiens
  misc_RNA (1)...(19): siRNA sense strand
ucacuuuccuugcaaaugu

SEQ ID NO: 417494 - RNA, 19 nt, Homo sapiens
  misc_RNA (1)...(19): siRNA sense strand
ugaauuuacucaugagaug

SEQ ID NO: 417495 - RNA, 19 nt, Homo sapiens
  misc_RNA (1)...(19): siRNA sense strand
gagagggguuguuuuauaa

SEQ ID NO: 417496 - RNA, 19 nt, Homo sapiens
  misc_RNA (1)...(19): siRNA sense strand
cagcagcagugcacuaaau

SEQ ID NO: 417497 - RNA, 19 nt, Homo sapiens
  misc_RNA (1)...(19): siRNA sense strand
ucaaagcucuguguauugu

SEQ ID NO: 417498 - RNA, 19 nt, Homo sapiens
  misc_RNA (1)...(19): siRNA sense strand
caaggugaauggugacaug

SEQ ID NO: 417499 - RNA, 19 nt, Homo sapiens
  misc_RNA (1)...(19): siRNA sense strand
gaugauacauuagagaaag

SEQ ID NO: 417500 - RNA, 19 nt, Homo sapiens
  misc_RNA (1)...(19): siRNA sense strand
uuaaaggucagcccacuua

SEQ ID NO: 417501 - RNA, 19 nt, Homo sapiens
  misc_RNA (1)...(19): siRNA sense strand
gaagguggaacaauggaaa

SEQ ID NO: 417502 - RNA, 19 nt, Homo sapiens
  misc_RNA (1)...(19): siRNA sense strand
guggaacaauggaaagaaa

SEQ ID NO: 417503 - RNA, 19 nt, Homo sapiens
  misc_RNA (1)...(19): siRNA sense strand
gaacaccucguuucucauc

SEQ ID NO: 417504 - RNA, 19 nt, Homo sapiens
  misc_RNA (1)...(19): siRNA sense strand
ugacuccucugaagguaaa

SEQ ID NO: 417505 - RNA, 19 nt, Homo sapiens
  misc_RNA (1)...(19): siRNA sense strand
ucaagaaugagaagacuuu

SEQ ID NO: 417506 - RNA, 19 nt, Homo sapiens
  misc_RNA (1)...(19): siRNA sense strand
caacggagacucugaagca

SEQ ID NO: 417507 - RNA, 19 nt, Homo sapiens
  misc_RNA (1)...(19): siRNA sense strand
gagaugauacauuagagaa

SEQ ID NO: 417508 - RNA, 19 nt, Homo sapiens
  misc_RNA (1)...(19): siRNA sense strand
ggugaucagagcaauguua

SEQ ID NO: 417509 - RNA, 19 nt, Homo sapiens
  misc_RNA (1)...(19): siRNA sense strand
gaaggaaguccgugcuaug

SEQ ID NO: 417510 - RNA, 19 nt, Homo sapiens
  misc_RNA (1)...(19): siRNA sense strand
gaaacagcccaaaccagaa

SEQ ID NO: 417511 - RNA, 19 nt, Homo sapiens
  misc_RNA (1)...(19): siRNA sense strand
ggacuaaaggaaaugagaa

SEQ ID NO: 417512 - RNA, 19 nt, Homo sapiens
  misc_RNA (1)...(19): siRNA sense strand
ggucauagaggcagaagga

SEQ ID NO: 417513 - RNA, 19 nt, Homo sapiens
  misc_RNA (1)...(19): siRNA sense strand
gaaacaggcacuggucuug

SEQ ID NO: 417514 - RNA, 19 nt, Homo sapiens
  misc_RNA (1)...(19): siRNA sense strand
agcauuugaugacgaauua

SEQ ID NO: 417515 - RNA, 19 nt, Homo sapiens
  misc_RNA (1)...(19): siRNA sense strand
gaaaguguacgucagaucu

SEQ ID NO: 417516 - RNA, 19 nt, Homo sapiens
  misc_RNA (1)...(19): siRNA sense strand
gaaacgcucucggccagau

SEQ ID NO: 417517 - RNA, 19 nt, Homo sapiens
  misc_RNA (1)...(19): siRNA sense strand
gaucccagauucccuacug

SEQ ID NO: 417518 - RNA, 19 nt, Homo sapiens
  misc_RNA (1)...(19): siRNA sense strand
ccaaggaucagaagaggaa

SEQ ID NO: 417519 - RNA, 19 nt, Homo sapiens
  misc_RNA (1)...(19): siRNA sense strand
guggagagcugugggucua

SEQ ID NO: 417520 - RNA, 19 nt, Homo sapiens
  misc_RNA (1)...(19): siRNA sense strand
ccaccagcuuuaauuauuc

SEQ ID NO: 417521 - RNA, 19 nt, Homo sapiens
  misc_RNA (1)...(19): siRNA sense strand
ggugacaugcgucugguua

SEQ ID NO: 417522 - RNA, 19 nt, Homo sapiens
  misc_RNA (1)...(19): siRNA sense strand
gaugagaaacccaauugga

SEQ ID NO: 417523 - RNA, 19 nt, Homo sapiens
  misc_RNA (1)...(19): siRNA sense strand
cuacagagggcuacaguug

SEQ ID NO: 417524 - RNA, 19 nt, Homo sapiens
  misc_RNA (1)...(19): siRNA sense strand
ucagcccacuuaccagaua

SEQ ID NO: 417525 - RNA, 19 nt, Homo sapiens
  misc_RNA (1)...(19): siRNA sense strand
gagaaucagugcguauaca

SEQ ID NO: 417526 - RNA, 19 nt, Homo sapiens
  misc_RNA (1)...(19): siRNA sense strand
uaaacugccuggccgaauc

SEQ ID NO: 417527 - RNA, 19 nt, Homo sapiens
  misc_RNA (1)...(19): siRNA sense strand
gauacagccucugacuuug

SEQ ID NO: 417528 - RNA, 19 nt, Homo sapiens
  misc_RNA (1)...(19): siRNA sense strand
ucuaacaguucuuugcauu

SEQ ID NO: 417529 - RNA, 19 nt, Homo sapiens
  misc_RNA (1)...(19): siRNA sense strand
acaaacagaagaagaagaa

SEQ ID NO: 417530 - RNA, 19 nt, Homo sapiens
  misc_RNA (1)...(19): siRNA sense strand
cacaacuacugccgccuua

SEQ ID NO: 417531 - RNA, 19 nt, Homo sapiens
  misc_RNA (1)...(19): siRNA sense strand
gaagacuacuauggacaga

SEQ ID NO: 417532 - RNA, 19 nt, Homo sapiens
  misc_RNA (1)...(19): siRNA sense strand
gcgccuggcugauggugaa

SEQ ID NO: 417533 - RNA, 19 nt, Homo sapiens
  misc_RNA (1)...(19): siRNA sense strand
gcagcagugcacuaaauaa

SEQ ID NO: 417534 - RNA, 19 nt, Homo sapiens
  misc_RNA (1)...(19): siRNA sense strand
ccagugacaaaucccauua

SEQ ID NO: 417535 - RNA, 19 nt, Homo sapiens
  misc_RNA (1)...(19): siRNA sense strand
gagaagcugcagugacaaa

SEQ ID NO: 417536 - RNA, 19 nt, Homo sapiens
  misc_RNA (1)...(19): siRNA sense strand
acaccuggguccauucuug

SEQ ID NO: 417537 - RNA, 19 nt, Homo sapiens
  misc_RNA (1)...(19): siRNA sense strand
caaaugcugcuccaggaaa

SEQ ID NO: 417538 - RNA, 19 nt, Homo sapiens
  misc_RNA (1)...(19): siRNA sense strand
gaaacuggaagaaauggau

SEQ ID NO: 417539 - RNA, 19 nt, Homo sapiens
  misc_RNA (1)...(19): siRNA sense strand
uaacaguucuuugcauugg

SEQ ID NO: 417540 - RNA, 19 nt, Homo sapiens
  misc_RNA (1)...(19): siRNA sense strand
ggucaccacugccauagag

SEQ ID NO: 417541 - RNA, 19 nt, Homo sapiens
  misc_RNA (1)...(19): siRNA sense strand
gaccaaagaagagucauug

SEQ ID NO: 417542 - RNA, 19 nt, Homo sapiens
  misc_RNA (1)...(19): siRNA sense strand
gaggagagggguuguuuua

SEQ ID NO: 417543 - RNA, 19 nt, Homo sapiens
  misc_RNA (1)...(19): siRNA sense strand
aaaagaagguggaacaaug

SEQ ID NO: 417544 - RNA, 19 nt, Homo sapiens
  misc_RNA (1)...(19): siRNA sense strand
caacagguggacauugaaa

SEQ ID NO: 417545 - RNA, 19 nt, Homo sapiens
  misc_RNA (1)...(19): siRNA sense strand
uccaccagcuuuaauuauu

SEQ ID NO: 417546 - RNA, 19 nt, Homo sapiens
  misc_RNA (1)...(19): siRNA sense strand
gagucgaccucuuuccaau

SEQ ID NO: 417547 - RNA, 19 nt, Homo sapiens
  misc_RNA (1)...(19): siRNA sense strand
gaaugaugagguagugaaa

SEQ ID NO: 417548 - RNA, 19 nt, Homo sapiens
  misc_RNA (1)...(19): siRNA sense strand
acagagggcuacaguugga

SEQ ID NO: 417549 - RNA, 19 nt, Homo sapiens
  misc_RNA (1)...(19): siRNA sense strand
ggagagcugugggucuaau

SEQ ID NO: 417550 - RNA, 19 nt, Homo sapiens
  misc_RNA (1)...(19): siRNA sense strand
gaaagcuacugggcauagu

SEQ ID NO: 417551 - RNA, 19 nt, Homo sapiens
  misc_RNA (1)...(19): siRNA sense strand
cgucaguccuuucguaaca

SEQ ID NO: 417552 - RNA, 19 nt, Homo sapiens
  misc_RNA (1)...(19): siRNA sense strand
gaagaucgucaguccuuuc

SEQ ID NO: 417553 - RNA, 19 nt, Homo sapiens
  misc_RNA (1)...(19): siRNA sense strand
gcaguggucucgccaucca

SEQ ID NO: 417554 - RNA, 19 nt, Homo sapiens
  misc_RNA (1)...(19): siRNA sense strand
ugagacaccuggguccauu

SEQ ID NO: 417555 - RNA, 19 nt, Homo sapiens
  misc_RNA (1)...(19): siRNA sense strand
gcaaaugccucuacuguaa

SEQ ID NO: 417556 - RNA, 19 nt, Homo sapiens
  misc_RNA (1)...(19): siRNA sense strand
gaacaacuauggagucaaa

SEQ ID NO: 417557 - RNA, 19 nt, Homo sapiens
  misc_RNA (1)...(19): siRNA sense strand
caacaugacugauggagua

SEQ ID NO: 417558 - RNA, 19 nt, Homo sapiens
  misc_RNA (1)...(19): siRNA sense strand
gaagaagaauccaaugaaa

SEQ ID NO: 417559 - RNA, 19 nt, Homo sapiens
  misc_RNA (1)...(19): siRNA sense strand
gcacaucacuuacgagaga

SEQ ID NO: 417560 - RNA, 19 nt, Homo sapiens
  misc_RNA (1)...(19): siRNA sense strand
gacaauaccugcgaaauga

SEQ ID NO: 417561 - RNA, 19 nt, Homo sapiens
  misc_RNA (1)...(19): siRNA sense strand
gcacacaaauguagugguu

SEQ ID NO: 417562 - RNA, 19 nt, Homo sapiens
  misc_RNA (1)...(19): siRNA sense strand
gaacauguacugaagguaa

SEQ ID NO: 417563 - RNA, 19 nt, Homo sapiens
  misc_RNA (1)...(19): siRNA sense strand
gaagcuagcagccaguuua

SEQ ID NO: 417564 - RNA, 19 nt, Homo sapiens
  misc_RNA (1)...(19): siRNA sense strand
guacaagccuggcguguug

SEQ ID NO: 417565 - RNA, 19 nt, Homo sapiens
  misc_RNA (1)...(19): siRNA sense strand
uaacauccaucuccuggua

SEQ ID NO: 417566 - RNA, 19 nt, Homo sapiens
  misc_RNA (1)...(19): siRNA sense strand
caacaaucuuggcaguuua

SEQ ID NO: 417567 - RNA, 19 nt, Homo sapiens
  misc_RNA (1)...(19): siRNA sense strand
cgaagaccaugaacguaua

SEQ ID NO: 417568 - RNA, 19 nt, Homo sapiens
  misc_RNA (1)...(19): siRNA sense strand
ggaagaagaauccaaugaa

SEQ ID NO: 417569 - RNA, 19 nt, Homo sapiens
  misc_RNA (1)...(19): siRNA sense strand
gagauccucuuuaugaaau

SEQ ID NO: 417570 - RNA, 19 nt, Homo sapiens
  misc_RNA (1)...(19): siRNA sense strand
cgagagaggcaccaaguua

SEQ ID NO: 417571 - RNA, 19 nt, Homo sapiens
  misc_RNA (1)...(19): siRNA sense strand
guaacuacauacaaucuga

SEQ ID NO: 417572 - RNA, 19 nt, Homo sapiens
  misc_RNA (1)...(19): siRNA sense strand
gaagaugauuccuaugaag

SEQ ID NO: 417573 - RNA, 19 nt, Homo sapiens
  misc_RNA (1)...(19): siRNA sense strand
cagauugaguggcagaaua

SEQ ID NO: 417574 - RNA, 19 nt, Homo sapiens
  misc_RNA (1)...(19): siRNA sense strand
cugcagcgcuuguccauuu

SEQ ID NO: 417575 - RNA, 19 nt, Homo sapiens
  misc_RNA (1)...(19): siRNA sense strand
gagagcaguugaaauggaa

SEQ ID NO: 417576 - RNA, 19 nt, Homo sapiens
  misc_RNA (1)...(19): siRNA sense strand
ggacaauaccugcgaaaug

SEQ ID NO: 417577 - RNA, 19 nt, Homo sapiens
  misc_RNA (1)...(19): siRNA sense strand
caaccaaacuaaugcacaa

SEQ ID NO: 417578 - RNA, 19 nt, Homo sapiens
  misc_RNA (1)...(19): siRNA sense strand
ucaacaaucuuggcaguuu

SEQ ID NO: 417579 - RNA, 19 nt, Homo sapiens
  misc_RNA (1)...(19): siRNA sense strand
ggagagaaauugagaagcu

SEQ ID NO: 417580 - RNA, 19 nt, Homo sapiens
  misc_RNA (1)...(19): siRNA sense strand
cuacuguaaucgcuauuua

SEQ ID NO: 417581 - RNA, 19 nt, Homo sapiens
  misc_RNA (1)...(19): siRNA sense strand
caguugaaauggaagaaua

SEQ ID NO: 417582 - RNA, 19 nt, Homo sapiens
  misc_RNA (1)...(19): siRNA sense strand
uaagcaggcugacagugua

SEQ ID NO: 417583 - RNA, 19 nt, Homo sapiens
  misc_RNA (1)...(19): siRNA sense strand
cagcuuagccggaguuaaa

SEQ ID NO: 417584 - RNA, 19 nt, Homo sapiens
  misc_RNA (1)...(19): siRNA sense strand
gaagcgcacuuacgagcaa

SEQ ID NO: 417585 - RNA, 19 nt, Homo sapiens
  misc_RNA (1)...(19): siRNA sense strand
uaccaaagccuaacuuaaa

SEQ ID NO: 417586 - RNA, 19 nt, Homo sapiens
  misc_RNA (1)...(19): siRNA sense strand
ugacaucgcuucccauuuu

SEQ ID NO: 417587 - RNA, 19 nt, Homo sapiens
  misc_RNA (1)...(19): siRNA sense strand
gaagaugcaaggagcagua

SEQ ID NO: 417588 - RNA, 19 nt, Homo sapiens
  misc_RNA (1)...(19): siRNA sense strand
gaagaaguguguccgugau

SEQ ID NO: 417589 - RNA, 19 nt, Homo sapiens
  misc_RNA (1)...(19): siRNA sense strand
gaagaaugcaucugagaau

SEQ ID NO: 417590 - RNA, 19 nt, Homo sapiens
  misc_RNA (1)...(19): siRNA sense strand
ggaaauguccggucuuuac

SEQ ID NO: 417591 - RNA, 19 nt, Homo sapiens
  misc_RNA (1)...(19): siRNA sense strand
ucacauugaugaagagaug

SEQ ID NO: 417592 - RNA, 19 nt, Homo sapiens
  misc_RNA (1)...(19): siRNA sense strand
gcuaaugccucuucucucu

SEQ ID NO: 417593 - RNA, 19 nt, Homo sapiens
  misc_RNA (1)...(19): siRNA sense strand
ggaauacuguaaagaacau

SEQ ID NO: 417594 - RNA, 19 nt, Homo sapiens
  misc_RNA (1)...(19): siRNA sense strand
ugaagagccuguuguuuua

SEQ ID NO: 417595 - RNA, 19 nt, Homo sapiens
  misc_RNA (1)...(19): siRNA sense strand
uagagcaagcuguuuauua

SEQ ID NO: 417596 - RNA, 19 nt, Homo sapiens
  misc_RNA (1)...(19): siRNA sense strand
ucaggucacugccaugauu

SEQ ID NO: 417597 - RNA, 19 nt, Homo sapiens
  misc_RNA (1)...(19): siRNA sense strand
gagagaaauugagaagcua

SEQ ID NO: 417598 - RNA, 19 nt, Homo sapiens
  misc_RNA (1)...(19): siRNA sense strand
gcucaaccauauguuaauu

SEQ ID NO: 417599 - RNA, 19 nt, Homo sapiens
  misc_RNA (1)...(19): siRNA sense strand
ccuaaaaucucuaacgaua

SEQ ID NO: 417600 - RNA, 19 nt, Homo sapiens
  misc_RNA (1)...(19): siRNA sense strand
ucaacaaucucagucugua

SEQ ID NO: 417601 - RNA, 19 nt, Homo sapiens
  misc_RNA (1)...(19): siRNA sense strand
ggaagaaugcaucugagaa

SEQ ID NO: 417602 - RNA, 19 nt, Homo sapiens
  misc_RNA (1)...(19): siRNA sense strand
aaacgaaaguuagaugaug

SEQ ID NO: 417603 - RNA, 19 nt, Homo sapiens
  misc_RNA (1)...(19): siRNA sense strand
uuaccgagauccucuuuau

SEQ ID NO: 417604 - RNA, 19 nt, Homo sapiens
  misc_RNA (1)...(19): siRNA sense strand
ggaacaguuugacaacaug

SEQ ID NO: 417605 - RNA, 19 nt, Homo sapiens
  misc_RNA (1)...(19): siRNA sense strand
gaugagcgcuuaucuaacc

SEQ ID NO: 417606 - RNA, 19 nt, Homo sapiens
  misc_RNA (1)...(19): siRNA sense strand
ugaagaugauuccuaugaa

SEQ ID NO: 417607 - RNA, 19 nt, Homo sapiens
  misc_RNA (1)...(19): siRNA sense strand
acagagagcaguugaaaug

SEQ ID NO: 417608 - RNA, 19 nt, Homo sapiens
  misc_RNA (1)...(19): siRNA sense strand
cagaauagcacaauugaca

SEQ ID NO: 417609 - RNA, 19 nt, Homo sapiens
  misc_RNA (1)...(19): siRNA sense strand
aagcugcagugcccuauaa

SEQ ID NO: 417610 - RNA, 19 nt, Homo sapiens
  misc_RNA (1)...(19): siRNA sense strand
gggaacaguuugacaacau

SEQ ID NO: 417611 - RNA, 19 nt, Homo sapiens
  misc_RNA (1)...(19): siRNA sense strand
ugagaaugaugagcgcuua

SEQ ID NO: 417612 - RNA, 19 nt, Homo sapiens
  misc_RNA (1)...(19): siRNA sense strand
gaaugcaucugagaaugau

SEQ ID NO: 417613 - RNA, 19 nt, Homo sapiens
  misc_RNA (1)...(19): siRNA sense strand
gaugacaguuccucagaca

SEQ ID NO: 417614 - RNA, 19 nt, Homo sapiens
  misc_RNA (1)...(19): siRNA sense strand
ggaaggaagaugacaguuc

SEQ ID NO: 417615 - RNA, 19 nt, Homo sapiens
  misc_RNA (1)...(19): siRNA sense strand
uaguaagacugcugacaaa

SEQ ID NO: 417616 - RNA, 19 nt, Homo sapiens
  misc_RNA (1)...(19): siRNA sense strand
gcaagcuguuuauuacugu

SEQ ID NO: 417617 - RNA, 19 nt, Homo sapiens
  misc_RNA (1)...(19): siRNA sense strand
ggaaccaaccaaacuaaug

SEQ ID NO: 417618 - RNA, 19 nt, Homo sapiens
  misc_RNA (1)...(19): siRNA sense strand
gcagccaguuuaugguuau

SEQ ID NO: 417619 - RNA, 19 nt, Homo sapiens
  misc_RNA (1)...(19): siRNA sense strand
gaacauaaagcugagaaag

SEQ ID NO: 417620 - RNA, 19 nt, Homo sapiens
  misc_RNA (1)...(19): siRNA sense strand
gauggugaaucgacucuca

SEQ ID NO: 417621 - RNA, 19 nt, Homo sapiens
  misc_RNA (1)...(19): siRNA sense strand
gagaagagaguaguauuca

SEQ ID NO: 417622 - RNA, 19 nt, Homo sapiens
  misc_RNA (1)...(19): siRNA sense strand
gcacaaugcaucugauagu

SEQ ID NO: 417623 - RNA, 19 nt, Homo sapiens
  misc_RNA (1)...(19): siRNA sense strand
ugagaaagucccagcagua

SEQ ID NO: 417624 - RNA, 19 nt, Homo sapiens
  misc_RNA (1)...(19): siRNA sense strand
ucacaggcauccagagugu

SEQ ID NO: 417625 - RNA, 19 nt, Homo sapiens
  misc_RNA (1)...(19): siRNA sense strand
uccaaacccuugaugcuaa

SEQ ID NO: 417626 - RNA, 19 nt, Homo sapiens
  misc_RNA (1)...(19): siRNA sense strand
agagcaagcuguuuauuac

SEQ ID NO: 417627 - RNA, 19 nt, Homo sapiens
  misc_RNA (1)...(19): siRNA sense strand
gaggaaccaaccaaacuaa

SEQ ID NO: 417628 - RNA, 19 nt, Homo sapiens
  misc_RNA (1)...(19): siRNA sense strand
guagcagccucagcacuuu

SEQ ID NO: 417629 - RNA, 19 nt, Homo sapiens
  misc_RNA (1)...(19): siRNA sense strand
gaugcugaguggcuauuug

SEQ ID NO: 417630 - RNA, 19 nt, Homo sapiens
  misc_RNA (1)...(19): siRNA sense strand
gagagaggcaccaaguuau

SEQ ID NO: 417631 - RNA, 19 nt, Homo sapiens
  misc_RNA (1)...(19): siRNA sense strand
aaaggcagauaucccugua

SEQ ID NO: 417632 - RNA, 19 nt, Homo sapiens
  misc_RNA (1)...(19): siRNA sense strand
cagcugaaucuguugcuua

SEQ ID NO: 417633 - RNA, 19 nt, Homo sapiens
  misc_RNA (1)...(19): siRNA sense strand
cagauucuacuuugaguuu

SEQ ID NO: 417634 - RNA, 19 nt, Homo sapiens
  misc_RNA (1)...(19): siRNA sense strand
aaagauggccgcacacaug

SEQ ID NO: 417635 - RNA, 19 nt, Homo sapiens
  misc_RNA (1)...(19): siRNA sense strand
cauauugccguucaacuuu

SEQ ID NO: 417636 - RNA, 19 nt, Homo sapiens
  misc_RNA (1)...(19): siRNA sense strand
ggaaacggaaggucuuaug

SEQ ID NO: 417637 - RNA, 19 nt, Homo sapiens
  misc_RNA (1)...(19): siRNA sense strand
gaagagaguaguauucacu

SEQ ID NO: 417638 - RNA, 19 nt, Homo sapiens
  misc_RNA (1)...(19): siRNA sense strand
ccaagacgauguuguugag

SEQ ID NO: 417639 - RNA, 19 nt, Homo sapiens
  misc_RNA (1)...(19): siRNA sense strand
gaagagaugggaccuaaaa

SEQ ID NO: 417640 - RNA, 19 nt, Homo sapiens
  misc_RNA (1)...(19): siRNA sense strand
acauaaagcugagaaaguc

SEQ ID NO: 417641 - RNA, 19 nt, Homo sapiens
  misc_RNA (1)...(19): siRNA sense strand
gaugcuaauugcucccaaa

SEQ ID NO: 417642 - RNA, 19 nt, Homo sapiens
  misc_RNA (1)...(19): siRNA sense strand
caacgcaccaguuuccauu

SEQ ID NO: 417643 - RNA, 19 nt, Homo sapiens
  misc_RNA (1)...(19): siRNA sense strand
ugaaauggaagaauaguuc

SEQ ID NO: 417644 - RNA, 19 nt, Homo sapiens
  misc_RNA (1)...(19): siRNA sense strand
auagugagguugaccaaga

SEQ ID NO: 417645 - RNA, 19 nt, Homo sapiens
  misc_RNA (1)...(19): siRNA sense strand
gcacuuacgagcaaaugga

SEQ ID NO: 417646 - RNA, 19 nt, Homo sapiens
  misc_RNA (1)...(19): siRNA sense strand
guucaacuuucaaugaugu

SEQ ID NO: 417647 - RNA, 19 nt, Homo sapiens
  misc_RNA (1)...(19): siRNA sense strand
gauacucugcucaaccaua

SEQ ID NO: 417648 - RNA, 19 nt, Homo sapiens
  misc_RNA (1)...(19): siRNA sense strand
aaaagaggaugguucaaaa

SEQ ID NO: 417649 - RNA, 19 nt, Homo sapiens
  misc_RNA (1)...(19): siRNA sense strand
ugaggaugcuucagaaucu

SEQ ID NO: 417650 - RNA, 19 nt, Homo sapiens
  misc_RNA (1)...(19): siRNA sense strand
aggcagauaucccuguaaa

SEQ ID NO: 417651 - RNA, 19 nt, Homo sapiens
  misc_RNA (1)...(19): siRNA sense strand
gaaaguuagaugaugauag

SEQ ID NO: 417652 - RNA, 19 nt, Homo sapiens
  misc_RNA (1)...(19): siRNA sense strand
ggacccaucacuuacgaaa

SEQ ID NO: 417653 - RNA, 19 nt, Homo sapiens
  misc_RNA (1)...(19): siRNA sense strand
ugacagagagcaguugaaa

SEQ ID NO: 417654 - RNA, 19 nt, Homo sapiens
  misc_RNA (1)...(19): siRNA sense strand
gaaccaaccaaacuaaugc

SEQ ID NO: 417655 - RNA, 19 nt, Homo sapiens
  misc_RNA (1)...(19): siRNA sense strand
gcaaaugccucuacuguaa

SEQ ID NO: 417656 - RNA, 19 nt, Homo sapiens
  misc_RNA (1)...(19): siRNA sense strand
gaacaacuauggagucaaa

SEQ ID NO: 417657 - RNA, 19 nt, Homo sapiens
  misc_RNA (1)...(19): siRNA sense strand
caacaugacugauggagua

SEQ ID NO: 417658 - RNA, 19 nt, Homo sapiens
  misc_RNA (1)...(19): siRNA sense strand
gaagaagaauccaaugaaa

SEQ ID NO: 417659 - RNA, 19 nt, Homo sapiens
  misc_RNA (1)...(19): siRNA sense strand
gcacaucacuuacgagaga

SEQ ID NO: 417660 - RNA, 19 nt, Homo sapiens
  misc_RNA (1)...(19): siRNA sense strand
gacaauaccugcgaaauga

SEQ ID NO: 417661 - RNA, 19 nt, Homo sapiens
  misc_RNA (1)...(19): siRNA sense strand
gcacacaaauguagugguu

SEQ ID NO: 417662 - RNA, 19 nt, Homo sapiens
  misc_RNA (1)...(19): siRNA sense strand
gaacauguacugaagguaa

SEQ ID NO: 417663 - RNA, 19 nt, Homo sapiens
  misc_RNA (1)...(19): siRNA sense strand
gaagcuagcagccaguuua

SEQ ID NO: 417664 - RNA, 19 nt, Homo sapiens
  misc_RNA (1)...(19): siRNA sense strand
guacaagccuggcguguug

SEQ ID NO: 417665 - RNA, 19 nt, Homo sapiens
  misc_RNA (1)...(19): siRNA sense strand
uaacauccaucuccuggua

SEQ ID NO: 417666 - RNA, 19 nt, Homo sapiens
  misc_RNA (1)...(19): siRNA sense strand
caacaaucuuggcaguuua

SEQ ID NO: 417667 - RNA, 19 nt, Homo sapiens
  misc_RNA (1)...(19): siRNA sense strand
cgaagaccaugaacguaua

SEQ ID NO: 417668 - RNA, 19 nt, Homo sapiens
  misc_RNA (1)...(19): siRNA sense strand
ggaagaagaauccaaugaa

SEQ ID NO: 417669 - RNA, 19 nt, Homo sapiens
  misc_RNA (1)...(19): siRNA sense strand
gagauccucuuuaugaaau

SEQ ID NO: 417670 - RNA, 19 nt, Homo sapiens
  misc_RNA (1)...(19): siRNA sense strand
cgagagaggcaccaaguua

SEQ ID NO: 417671 - RNA, 19 nt, Homo sapiens
  misc_RNA (1)...(19): siRNA sense strand
guaacuacauacaaucuga

SEQ ID NO: 417672 - RNA, 19 nt, Homo sapiens
  misc_RNA (1)...(19): siRNA sense strand
gaagaugauuccuaugaag

SEQ ID NO: 417673 - RNA, 19 nt, Homo sapiens
  misc_RNA (1)...(19): siRNA sense strand
cagauugaguggcagaaua

SEQ ID NO: 417674 - RNA, 19 nt, Homo sapiens
  misc_RNA (1)...(19): siRNA sense strand
cugcagcgcuuguccauuu

SEQ ID NO: 417675 - RNA, 19 nt, Homo sapiens
  misc_RNA (1)...(19): siRNA sense strand
gagagcaguugaaauggaa

SEQ ID NO: 417676 - RNA, 19 nt, Homo sapiens
  misc_RNA (1)...(19): siRNA sense strand
ggacaauaccugcgaaaug

SEQ ID NO: 417677 - RNA, 19 nt, Homo sapiens
  misc_RNA (1)...(19): siRNA sense strand
caaccaaacuaaugcacaa

SEQ ID NO: 417678 - RNA, 19 nt, Homo sapiens
  misc_RNA (1)...(19): siRNA sense strand
ucaacaaucuuggcaguuu

SEQ ID NO: 417679 - RNA, 19 nt, Homo sapiens
  misc_RNA (1)...(19): siRNA sense strand
ggagagaaauugagaagcu

SEQ ID NO: 417680 - RNA, 19 nt, Homo sapiens
  misc_RNA (1)...(19): siRNA sense strand
cuacuguaaucgcuauuua

SEQ ID NO: 417681 - RNA, 19 nt, Homo sapiens
  misc_RNA (1)...(19): siRNA sense strand
caguugaaauggaagaaua

SEQ ID NO: 417682 - RNA, 19 nt, Homo sapiens
  misc_RNA (1)...(19): siRNA sense strand
uaagcaggcugacagugua

SEQ ID NO: 417683 - RNA, 19 nt, Homo sapiens
  misc_RNA (1)...(19): siRNA sense strand
cagcuuagccggaguuaaa

SEQ ID NO: 417684 - RNA, 19 nt, Homo sapiens
  misc_RNA (1)...(19): siRNA sense strand
gaagcgcacuuacgagcaa

SEQ ID NO: 417685 - RNA, 19 nt, Homo sapiens
  misc_RNA (1)...(19): siRNA sense strand
uaccaaagccuaacuuaaa

SEQ ID NO: 417686 - RNA, 19 nt, Homo sapiens
  misc_RNA (1)...(19): siRNA sense strand
ugacaucgcuucccauuuu

SEQ ID NO: 417687 - RNA, 19 nt, Homo sapiens
  misc_RNA (1)...(19): siRNA sense strand
gaagaugcaaggagcagua

SEQ ID NO: 417688 - RNA, 19 nt, Homo sapiens
  misc_RNA (1)...(19): siRNA sense strand
gaagaaguguguccgugau

SEQ ID NO: 417689 - RNA, 19 nt, Homo sapiens
  misc_RNA (1)...(19): siRNA sense strand
gaagaaugcaucugagaau

SEQ ID NO: 417690 - RNA, 19 nt, Homo sapiens
  misc_RNA (1)...(19): siRNA sense strand
ggaaauguccggucuuuac

SEQ ID NO: 417691 - RNA, 19 nt, Homo sapiens
  misc_RNA (1)...(19): siRNA sense strand
ucacauugaugaagagaug

SEQ ID NO: 417692 - RNA, 19 nt, Homo sapiens
  misc_RNA (1)...(19): siRNA sense strand
gcuaaugccucuucucucu

SEQ ID NO: 417693 - RNA, 19 nt, Homo sapiens
  misc_RNA (1)...(19): siRNA sense strand
ggaauacuguaaagaacau

SEQ ID NO: 417694 - RNA, 19 nt, Homo sapiens
  misc_RNA (1)...(19): siRNA sense strand
ugaagagccuguuguuuua

SEQ ID NO: 417695 - RNA, 19 nt, Homo sapiens
  misc_RNA (1)...(19): siRNA sense strand
uagagcaagcuguuuauua

SEQ ID NO: 417696 - RNA, 19 nt, Homo sapiens
  misc_RNA (1)...(19): siRNA sense strand
ucaggucacugccaugauu

SEQ ID NO: 417697 - RNA, 19 nt, Homo sapiens
  misc_RNA (1)...(19): siRNA sense strand
gagagaaauugagaagcua

SEQ ID NO: 417698 - RNA, 19 nt, Homo sapiens
  misc_RNA (1)...(19): siRNA sense strand
gcucaaccauauguuaauu

SEQ ID NO: 417699 - RNA, 19 nt, Homo sapiens
  misc_RNA (1)...(19): siRNA sense strand
ccuaaaaucucuaacgaua

SEQ ID NO: 417700 - RNA, 19 nt, Homo sapiens
  misc_RNA (1)...(19): siRNA sense strand
ucaacaaucucagucugua

SEQ ID NO: 417701 - RNA, 19 nt, Homo sapiens
  misc_RNA (1)...(19): siRNA sense strand
ggaagaaugcaucugagaa

SEQ ID NO: 417702 - RNA, 19 nt, Homo sapiens
  misc_RNA (1)...(19): siRNA sense strand
aaacgaaaguuagaugaug

SEQ ID NO: 417703 - RNA, 19 nt, Homo sapiens
  misc_RNA (1)...(19): siRNA sense strand
uuaccgagauccucuuuau

SEQ ID NO: 417704 - RNA, 19 nt, Homo sapiens
  misc_RNA (1)...(19): siRNA sense strand
ggaacaguuugacaacaug

SEQ ID NO: 417705 - RNA, 19 nt, Homo sapiens
  misc_RNA (1)...(19): siRNA sense strand
gaugagcgcuuaucuaacc

SEQ ID NO: 417706 - RNA, 19 nt, Homo sapiens
  misc_RNA (1)...(19): siRNA sense strand
ugaagaugauuccuaugaa

SEQ ID NO: 417707 - RNA, 19 nt, Homo sapiens
  misc_RNA (1)...(19): siRNA sense strand
acagagagcaguugaaaug

SEQ ID NO: 417708 - RNA, 19 nt, Homo sapiens
  misc_RNA (1)...(19): siRNA sense strand
cagaauagcacaauugaca

SEQ ID NO: 417709 - RNA, 19 nt, Homo sapiens
  misc_RNA (1)...(19): siRNA sense strand
aagcugcagugcccuauaa

SEQ ID NO: 417710 - RNA, 19 nt, Homo sapiens
  misc_RNA (1)...(19): siRNA sense strand
gggaacaguuugacaacau

SEQ ID NO: 417711 - RNA, 19 nt, Homo sapiens
  misc_RNA (1)...(19): siRNA sense strand
ugagaaugaugagcgcuua

SEQ ID NO: 417712 - RNA, 19 nt, Homo sapiens
  misc_RNA (1)...(19): siRNA sense strand
gaaugcaucugagaaugau

SEQ ID NO: 417713 - RNA, 19 nt, Homo sapiens
  misc_RNA (1)...(19): siRNA sense strand
gaugacaguuccucagaca

SEQ ID NO: 417714 - RNA, 19 nt, Homo sapiens
  misc_RNA (1)...(19): siRNA sense strand
ggaaggaagaugacaguuc

SEQ ID NO: 417715 - RNA, 19 nt, Homo sapiens
  misc_RNA (1)...(19): siRNA sense strand
uaguaagacugcugacaaa

SEQ ID NO: 417716 - RNA, 19 nt, Homo sapiens
  misc_RNA (1)...(19): siRNA sense strand
gcaagcuguuuauuacugu

SEQ ID NO: 417717 - RNA, 19 nt, Homo sapiens
  misc_RNA (1)...(19): siRNA sense strand
ggaaccaaccaaacuaaug

SEQ ID NO: 417718 - RNA, 19 nt, Homo sapiens
  misc_RNA (1)...(19): siRNA sense strand
gcagccaguuuaugguuau

SEQ ID NO: 417719 - RNA, 19 nt, Homo sapiens
  misc_RNA (1)...(19): siRNA sense strand
gaacauaaagcugagaaag

SEQ ID NO: 417720 - RNA, 19 nt, Homo sapiens
  misc_RNA (1)...(19): siRNA sense strand
gauggugaaucgacucuca

SEQ ID NO: 417721 - RNA, 19 nt, Homo sapiens
  misc_RNA (1)...(19): siRNA sense strand
gagaagagaguaguauuca

SEQ ID NO: 417722 - RNA, 19 nt, Homo sapiens
  misc_RNA (1)...(19): siRNA sense strand
gcacaaugcaucugauagu

SEQ ID NO: 417723 - RNA, 19 nt, Homo sapiens
  misc_RNA (1)...(19): siRNA sense strand
ugagaaagucccagcagua

SEQ ID NO: 417724 - RNA, 19 nt, Homo sapiens
  misc_RNA (1)...(19): siRNA sense strand
ucacaggcauccagagugu

SEQ ID NO: 417725 - RNA, 19 nt, Homo sapiens
  misc_RNA (1)...(19): siRNA sense strand
uccaaacccuugaugcuaa

SEQ ID NO: 417726 - RNA, 19 nt, Homo sapiens
  misc_RNA (1)...(19): siRNA sense strand
agagcaagcuguuuauuac

SEQ ID NO: 417727 - RNA, 19 nt, Homo sapiens
  misc_RNA (1)...(19): siRNA sense strand
gaggaaccaaccaaacuaa

SEQ ID NO: 417728 - RNA, 19 nt, Homo sapiens
  misc_RNA (1)...(19): siRNA sense strand
guagcagccucagcacuuu

SEQ ID NO: 417729 - RNA, 19 nt, Homo sapiens
  misc_RNA (1)...(19): siRNA sense strand
gaugcugaguggcuauuug

SEQ ID NO: 417730 - RNA, 19 nt, Homo sapiens
  misc_RNA (1)...(19): siRNA sense strand
gagagaggcaccaaguuau

SEQ ID NO: 417731 - RNA, 19 nt, Homo sapiens
  misc_RNA (1)...(19): siRNA sense strand
aaaggcagauaucccugua

SEQ ID NO: 417732 - RNA, 19 nt, Homo sapiens
  misc_RNA (1)...(19): siRNA sense strand
cagcugaaucuguugcuua

SEQ ID NO: 417733 - RNA, 19 nt, Homo sapiens
  misc_RNA (1)...(19): siRNA sense strand
cagauucuacuuugaguuu

SEQ ID NO: 417734 - RNA, 19 nt, Homo sapiens
  misc_RNA (1)...(19): siRNA sense strand
aaagauggccgcacacaug

SEQ ID NO: 417735 - RNA, 19 nt, Homo sapiens
  misc_RNA (1)...(19): siRNA sense strand
cauauugccguucaacuuu

SEQ ID NO: 417736 - RNA, 19 nt, Homo sapiens
  misc_RNA (1)...(19): siRNA sense strand
ggaaacggaaggucuuaug

SEQ ID NO: 417737 - RNA, 19 nt, Homo sapiens
  misc_RNA (1)...(19): siRNA sense strand
gaagagaguaguauucacu

SEQ ID NO: 417738 - RNA, 19 nt, Homo sapiens
  misc_RNA (1)...(19): siRNA sense strand
ccaagacgauguuguugag

SEQ ID NO: 417739 - RNA, 19 nt, Homo sapiens
  misc_RNA (1)...(19): siRNA sense strand
gaagagaugggaccuaaaa

SEQ ID NO: 417740 - RNA, 19 nt, Homo sapiens
  misc_RNA (1)...(19): siRNA sense strand
acauaaagcugagaaaguc

SEQ ID NO: 417741 - RNA, 19 nt, Homo sapiens
  misc_RNA (1)...(19): siRNA sense strand
gaugcuaauugcucccaaa

SEQ ID NO: 417742 - RNA, 19 nt, Homo sapiens
  misc_RNA (1)...(19): siRNA sense strand
caacgcaccaguuuccauu

SEQ ID NO: 417743 - RNA, 19 nt, Homo sapiens
  misc_RNA (1)...(19): siRNA sense strand
ugaaauggaagaauaguuc

SEQ ID NO: 417744 - RNA, 19 nt, Homo sapiens
  misc_RNA (1)...(19): siRNA sense strand
auagugagguugaccaaga

SEQ ID NO: 417745 - RNA, 19 nt, Homo sapiens
  misc_RNA (1)...(19): siRNA sense strand
gcacuuacgagcaaaugga

SEQ ID NO: 417746 - RNA, 19 nt, Homo sapiens
  misc_RNA (1)...(19): siRNA sense strand
guucaacuuucaaugaugu

SEQ ID NO: 417747 - RNA, 19 nt, Homo sapiens
  misc_RNA (1)...(19): siRNA sense strand
gauacucugcucaaccaua

SEQ ID NO: 417748 - RNA, 19 nt, Homo sapiens
  misc_RNA (1)...(19): siRNA sense strand
aaaagaggaugguucaaaa

SEQ ID NO: 417749 - RNA, 19 nt, Homo sapiens
  misc_RNA (1)...(19): siRNA sense strand
ugaggaugcuucagaaucu

SEQ ID NO: 417750 - RNA, 19 nt, Homo sapiens
  misc_RNA (1)...(19): siRNA sense strand
aggcagauaucccuguaaa

SEQ ID NO: 417751 - RNA, 19 nt, Homo sapiens
  misc_RNA (1)...(19): siRNA sense strand
gaaaguuagaugaugauag

SEQ ID NO: 417752 - RNA, 19 nt, Homo sapiens
  misc_RNA (1)...(19): siRNA sense strand
ggacccaucacuuacgaaa

SEQ ID NO: 417753 - RNA, 19 nt, Homo sapiens
  misc_RNA (1)...(19): siRNA sense strand
ugacagagagcaguugaaa

SEQ ID NO: 417754 - RNA, 19 nt, Homo sapiens
  misc_RNA (1)...(19): siRNA sense strand
gaaccaaccaaacuaaugc

SEQ ID NO: 417755 - RNA, 19 nt, Homo sapiens
  misc_RNA (1)...(19): siRNA sense strand
agaagaaacugcucaagaa

SEQ ID NO: 417756 - RNA, 19 nt, Homo sapiens
  misc_RNA (1)...(19): siRNA sense strand
ucaagagccugaagaauau

SEQ ID NO: 417757 - RNA, 19 nt, Homo sapiens
  misc_RNA (1)...(19): siRNA sense strand
gcuccugggugaccuguua

SEQ ID NO: 417758 - RNA, 19 nt, Homo sapiens
  misc_RNA (1)...(19): siRNA sense strand
ugaagcaacugcagaaaga

SEQ ID NO: 417759 - RNA, 19 nt, Homo sapiens
  misc_RNA (1)...(19): siRNA sense strand
ggagccaucucuucccuuu

SEQ ID NO: 417760 - RNA, 19 nt, Homo sapiens
  misc_RNA (1)...(19): siRNA sense strand
ccagauggguccacacuga

SEQ ID NO: 417761 - RNA, 19 nt, Homo sapiens
  misc_RNA (1)...(19): siRNA sense strand
ucucacagcucaaguaugu

SEQ ID NO: 417762 - RNA, 19 nt, Homo sapiens
  misc_RNA (1)...(19): siRNA sense strand
gcacagauuugagguagau

SEQ ID NO: 417763 - RNA, 19 nt, Homo sapiens
  misc_RNA (1)...(19): siRNA sense strand
acagagauguggcagagua

SEQ ID NO: 417764 - RNA, 19 nt, Homo sapiens
  misc_RNA (1)...(19): siRNA sense strand
uggugaagcuguugaauga

SEQ ID NO: 417765 - RNA, 19 nt, Homo sapiens
  misc_RNA (1)...(19): siRNA sense strand
acacggauauuuacagaga

SEQ ID NO: 417766 - RNA, 19 nt, Homo sapiens
  misc_RNA (1)...(19): siRNA sense strand
acacccagcuguucucaaa

SEQ ID NO: 417767 - RNA, 19 nt, Homo sapiens
  misc_RNA (1)...(19): siRNA sense strand
ggacacagaugccccacua

SEQ ID NO: 417768 - RNA, 19 nt, Homo sapiens
  misc_RNA (1)...(19): siRNA sense strand
cucaagagccugaagaaua

SEQ ID NO: 417769 - RNA, 19 nt, Homo sapiens
  misc_RNA (1)...(19): siRNA sense strand
ccacaggcaucuccuaugg

SEQ ID NO: 417770 - RNA, 19 nt, Homo sapiens
  misc_RNA (1)...(19): siRNA sense strand
gcagaggugugguguggau

SEQ ID NO: 417771 - RNA, 19 nt, Homo sapiens
  misc_RNA (1)...(19): siRNA sense strand
gggcggaucugcuuaucug

SEQ ID NO: 417772 - RNA, 19 nt, Homo sapiens
  misc_RNA (1)...(19): siRNA sense strand
ccaugaugcugucaccuuu

SEQ ID NO: 417773 - RNA, 19 nt, Homo sapiens
  misc_RNA (1)...(19): siRNA sense strand
agauugagguggaggugua

SEQ ID NO: 417774 - RNA, 19 nt, Homo sapiens
  misc_RNA (1)...(19): siRNA sense strand
gaccuuugcugucaugucu

SEQ ID NO: 417775 - RNA, 19 nt, Homo sapiens
  misc_RNA (1)...(19): siRNA sense strand
agacacggauauuuacaga

SEQ ID NO: 417776 - RNA, 19 nt, Homo sapiens
  misc_RNA (1)...(19): siRNA sense strand
gaacgacuccaugaucaau

SEQ ID NO: 417777 - RNA, 19 nt, Homo sapiens
  misc_RNA (1)...(19): siRNA sense strand
gaagaaacugcucaagaag

SEQ ID NO: 417778 - RNA, 19 nt, Homo sapiens
  misc_RNA (1)...(19): siRNA sense strand
ugccagacacggauauuua

SEQ ID NO: 417779 - RNA, 19 nt, Homo sapiens
  misc_RNA (1)...(19): siRNA sense strand
ccacugucccucaucuaua

SEQ ID NO: 417780 - RNA, 19 nt, Homo sapiens
  misc_RNA (1)...(19): siRNA sense strand
gugaagcuguugaaugaca

SEQ ID NO: 417781 - RNA, 19 nt, Homo sapiens
  misc_RNA (1)...(19): siRNA sense strand
gcagccaucaucauuguga

SEQ ID NO: 417782 - RNA, 19 nt, Homo sapiens
  misc_RNA (1)...(19): siRNA sense strand
ggucuaaagcacagauuug

SEQ ID NO: 417783 - RNA, 19 nt, Homo sapiens
  misc_RNA (1)...(19): siRNA sense strand
ccucaucauugucaaacuu

SEQ ID NO: 417784 - RNA, 19 nt, Homo sapiens
  misc_RNA (1)...(19): siRNA sense strand
ggagauaagauggaagaug

SEQ ID NO: 417785 - RNA, 19 nt, Homo sapiens
  misc_RNA (1)...(19): siRNA sense strand
gagcucaggagauaagaug

SEQ ID NO: 417786 - RNA, 19 nt, Homo sapiens
  misc_RNA (1)...(19): siRNA sense strand
gcagaaagaggagaagcuu

SEQ ID NO: 417787 - RNA, 19 nt, Homo sapiens
  misc_RNA (1)...(19): siRNA sense strand
gcugaguucuacagugaug

SEQ ID NO: 417788 - RNA, 19 nt, Homo sapiens
  misc_RNA (1)...(19): siRNA sense strand
ucaaugagacagccagaga

SEQ ID NO: 417789 - RNA, 19 nt, Homo sapiens
  misc_RNA (1)...(19): siRNA sense strand
guacucagaggccaaggaa

SEQ ID NO: 417790 - RNA, 19 nt, Homo sapiens
  misc_RNA (1)...(19): siRNA sense strand
aagaagaaacugcucaaga

SEQ ID NO: 417791 - RNA, 19 nt, Homo sapiens
  misc_RNA (1)...(19): siRNA sense strand
aggagaagcuucggaaaca

SEQ ID NO: 417792 - RNA, 19 nt, Homo sapiens
  misc_RNA (1)...(19): siRNA sense strand
gaggcgagacuaccacaug

SEQ ID NO: 417793 - RNA, 19 nt, Homo sapiens
  misc_RNA (1)...(19): siRNA sense strand
gaagaugcaacagccaaug

SEQ ID NO: 417794 - RNA, 19 nt, Homo sapiens
  misc_RNA (1)...(19): siRNA sense strand
uaagauggaagaugcaaca

SEQ ID NO: 417795 - RNA, 19 nt, Homo sapiens
  misc_RNA (1)...(19): siRNA sense strand
cuucaucuacuuccuguuu

SEQ ID NO: 417796 - RNA, 19 nt, Homo sapiens
  misc_RNA (1)...(19): siRNA sense strand
augcugaguucuacaguga

SEQ ID NO: 417797 - RNA, 19 nt, Homo sapiens
  misc_RNA (1)...(19): siRNA sense strand
gugguuggguuugccauug

SEQ ID NO: 417798 - RNA, 19 nt, Homo sapiens
  misc_RNA (1)...(19): siRNA sense strand
acgacuccaugaucaauga

SEQ ID NO: 417799 - RNA, 19 nt, Homo sapiens
  misc_RNA (1)...(19): siRNA sense strand
augcauccaucaccaagaa

SEQ ID NO: 417800 - RNA, 19 nt, Homo sapiens
  misc_RNA (1)...(19): siRNA sense strand
gcuugaggcugggcacuuc

SEQ ID NO: 417801 - RNA, 19 nt, Homo sapiens
  misc_RNA (1)...(19): siRNA sense strand
gcgagacuaccacauggaa

SEQ ID NO: 417802 - RNA, 19 nt, Homo sapiens
  misc_RNA (1)...(19): siRNA sense strand
caggagauaagauggaaga

SEQ ID NO: 417803 - RNA, 19 nt, Homo sapiens
  misc_RNA (1)...(19): siRNA sense strand
gaggagaagcuucggaaac

SEQ ID NO: 417804 - RNA, 19 nt, Homo sapiens
  misc_RNA (1)...(19): siRNA sense strand
uugaacgacuccaugauca

SEQ ID NO: 417805 - RNA, 19 nt, Homo sapiens
  misc_RNA (1)...(19): siRNA sense strand
caacagccaauggucaaga

SEQ ID NO: 417806 - RNA, 19 nt, Homo sapiens
  misc_RNA (1)...(19): siRNA sense strand
ggaagaugcaacagccaau

SEQ ID NO: 417807 - RNA, 19 nt, Homo sapiens
  misc_RNA (1)...(19): siRNA sense strand
cuucuacccugucuucauc

SEQ ID NO: 417808 - RNA, 19 nt, Homo sapiens
  misc_RNA (1)...(19): siRNA sense strand
guguuuggccuccaucuga

SEQ ID NO: 417809 - RNA, 19 nt, Homo sapiens
  misc_RNA (1)...(19): siRNA sense strand
gaagaagaaacugcucaag

SEQ ID NO: 417810 - RNA, 19 nt, Homo sapiens
  misc_RNA (1)...(19): siRNA sense strand
cccgugaguugcucuaugu

SEQ ID NO: 417811 - RNA, 19 nt, Homo sapiens
  misc_RNA (1)...(19): siRNA sense strand
ggagaagcuucggaaacag

SEQ ID NO: 417812 - RNA, 19 nt, Homo sapiens
  misc_RNA (1)...(19): siRNA sense strand
gauaagauggaagaugcaa

SEQ ID NO: 417813 - RNA, 19 nt, Homo sapiens
  misc_RNA (1)...(19): siRNA sense strand
ugaagcuguugaaugacaa

SEQ ID NO: 417814 - RNA, 19 nt, Homo sapiens
  misc_RNA (1)...(19): siRNA sense strand
gcucaggagauaagaugga

SEQ ID NO: 417815 - RNA, 19 nt, Homo sapiens
  misc_RNA (1)...(19): siRNA sense strand
gcuaccggguggacagcaa

SEQ ID NO: 417816 - RNA, 19 nt, Homo sapiens
  misc_RNA (1)...(19): siRNA sense strand
ggugggcagugugacagaa

SEQ ID NO: 417817 - RNA, 19 nt, Homo sapiens
  misc_RNA (1)...(19): siRNA sense strand
cagcucaaguauguguuug

SEQ ID NO: 417818 - RNA, 19 nt, Homo sapiens
  misc_RNA (1)...(19): siRNA sense strand
guggugaagcuguugaaug

SEQ ID NO: 417819 - RNA, 19 nt, Homo sapiens
  misc_RNA (1)...(19): siRNA sense strand
cacugucccucaucuauac

SEQ ID NO: 417820 - RNA, 19 nt, Homo sapiens
  misc_RNA (1)...(19): siRNA sense strand
gccacugucccucaucuau

SEQ ID NO: 417821 - RNA, 19 nt, Homo sapiens
  misc_RNA (1)...(19): siRNA sense strand
gcacuucccggcacaucuc

SEQ ID NO: 417822 - RNA, 19 nt, Homo sapiens
  misc_RNA (1)...(19): siRNA sense strand
ccuauggcaugggucuaaa

SEQ ID NO: 417823 - RNA, 19 nt, Homo sapiens
  misc_RNA (1)...(19): siRNA sense strand
ugggugcccucuccuuugu

SEQ ID NO: 417824 - RNA, 19 nt, Homo sapiens
  misc_RNA (1)...(19): siRNA sense strand
gggucuaaagcacagauuu

SEQ ID NO: 417825 - RNA, 19 nt, Homo sapiens
  misc_RNA (1)...(19): siRNA sense strand
gcagcugcccaugccgaua

SEQ ID NO: 417826 - RNA, 19 nt, Homo sapiens
  misc_RNA (1)...(19): siRNA sense strand
aacagccaauggucaagaa

SEQ ID NO: 417827 - RNA, 19 nt, Homo sapiens
  misc_RNA (1)...(19): siRNA sense strand
cuacagugaugcgcugaag

SEQ ID NO: 417828 - RNA, 19 nt, Homo sapiens
  misc_RNA (1)...(19): siRNA sense strand
uuaucuggcuggugaccuu

SEQ ID NO: 417829 - RNA, 19 nt, Homo sapiens
  misc_RNA (1)...(19): siRNA sense strand
gucuaaagcacagauuuga

SEQ ID NO: 417830 - RNA, 19 nt, Homo sapiens
  misc_RNA (1)...(19): siRNA sense strand
gggccacugucccucaucu

SEQ ID NO: 417831 - RNA, 19 nt, Homo sapiens
  misc_RNA (1)...(19): siRNA sense strand
ggugagcucaggagauaag

SEQ ID NO: 417832 - RNA, 19 nt, Homo sapiens
  misc_RNA (1)...(19): siRNA sense strand
uuccucaucucccagaaga

SEQ ID NO: 417833 - RNA, 19 nt, Homo sapiens
  misc_RNA (1)...(19): siRNA sense strand
acggauauuuacagagaug

SEQ ID NO: 417834 - RNA, 19 nt, Homo sapiens
  misc_RNA (1)...(19): siRNA sense strand
gggccucaguaaccuuauc

SEQ ID NO: 417835 - RNA, 19 nt, Homo sapiens
  misc_RNA (1)...(19): siRNA sense strand
aaagcacagauuugaggua

SEQ ID NO: 417836 - RNA, 19 nt, Homo sapiens
  misc_RNA (1)...(19): siRNA sense strand
ggccacaggcaucuccuau

SEQ ID NO: 417837 - RNA, 19 nt, Homo sapiens
  misc_RNA (1)...(19): siRNA sense strand
cagccaucaucauugugaa

SEQ ID NO: 417838 - RNA, 19 nt, Homo sapiens
  misc_RNA (1)...(19): siRNA sense strand
ggcugggccugauccacuu

SEQ ID NO: 417839 - RNA, 19 nt, Homo sapiens
  misc_RNA (1)...(19): siRNA sense strand
cagccaauggucaagaaga

SEQ ID NO: 417840 - RNA, 19 nt, Homo sapiens
  misc_RNA (1)...(19): siRNA sense strand
acucagaggccaaggaagu

SEQ ID NO: 417841 - RNA, 19 nt, Homo sapiens
  misc_RNA (1)...(19): siRNA sense strand
gugccagacacggauauuu

SEQ ID NO: 417842 - RNA, 19 nt, Homo sapiens
  misc_RNA (1)...(19): siRNA sense strand
ggugguugcggucaucuuc

SEQ ID NO: 417843 - RNA, 19 nt, Homo sapiens
  misc_RNA (1)...(19): siRNA sense strand
agaagaaacugcucaagaa

SEQ ID NO: 417844 - RNA, 19 nt, Homo sapiens
  misc_RNA (1)...(19): siRNA sense strand
ucaagagccugaagaauau

SEQ ID NO: 417845 - RNA, 19 nt, Homo sapiens
  misc_RNA (1)...(19): siRNA sense strand
gcuccugggugaccuguua

SEQ ID NO: 417846 - RNA, 19 nt, Homo sapiens
  misc_RNA (1)...(19): siRNA sense strand
ugaagcaacugcagaaaga

SEQ ID NO: 417847 - RNA, 19 nt, Homo sapiens
  misc_RNA (1)...(19): siRNA sense strand
ggagccaucucuucccuuu

SEQ ID NO: 417848 - RNA, 19 nt, Homo sapiens
  misc_RNA (1)...(19): siRNA sense strand
ccagauggguccacacuga

SEQ ID NO: 417849 - RNA, 19 nt, Homo sapiens
  misc_RNA (1)...(19): siRNA sense strand
ucucacagcucaaguaugu

SEQ ID NO: 417850 - RNA, 19 nt, Homo sapiens
  misc_RNA (1)...(19): siRNA sense strand
gcacagauuugagguagau

SEQ ID NO: 417851 - RNA, 19 nt, Homo sapiens
  misc_RNA (1)...(19): siRNA sense strand
acagagauguggcagagua

SEQ ID NO: 417852 - RNA, 19 nt, Homo sapiens
  misc_RNA (1)...(19): siRNA sense strand
uggugaagcuguugaauga

SEQ ID NO: 417853 - RNA, 19 nt, Homo sapiens
  misc_RNA (1)...(19): siRNA sense strand
acacggauauuuacagaga

SEQ ID NO: 417854 - RNA, 19 nt, Homo sapiens
  misc_RNA (1)...(19): siRNA sense strand
acacccagcuguucucaaa

SEQ ID NO: 417855 - RNA, 19 nt, Homo sapiens
  misc_RNA (1)...(19): siRNA sense strand
ggacacagaugccccacua

SEQ ID NO: 417856 - RNA, 19 nt, Homo sapiens
  misc_RNA (1)...(19): siRNA sense strand
cucaagagccugaagaaua

SEQ ID NO: 417857 - RNA, 19 nt, Homo sapiens
  misc_RNA (1)...(19): siRNA sense strand
ccacaggcaucuccuaugg

SEQ ID NO: 417858 - RNA, 19 nt, Homo sapiens
  misc_RNA (1)...(19): siRNA sense strand
gcagaggugugguguggau

SEQ ID NO: 417859 - RNA, 19 nt, Homo sapiens
  misc_RNA (1)...(19): siRNA sense strand
gggcggaucugcuuaucug

SEQ ID NO: 417860 - RNA, 19 nt, Homo sapiens
  misc_RNA (1)...(19): siRNA sense strand
ccaugaugcugucaccuuu

SEQ ID NO: 417861 - RNA, 19 nt, Homo sapiens
  misc_RNA (1)...(19): siRNA sense strand
agauugagguggaggugua

SEQ ID NO: 417862 - RNA, 19 nt, Homo sapiens
  misc_RNA (1)...(19): siRNA sense strand
gaccuuugcugucaugucu

SEQ ID NO: 417863 - RNA, 19 nt, Homo sapiens
  misc_RNA (1)...(19): siRNA sense strand
agacacggauauuuacaga

SEQ ID NO: 417864 - RNA, 19 nt, Homo sapiens
  misc_RNA (1)...(19): siRNA sense strand
gaacgacuccaugaucaau

SEQ ID NO: 417865 - RNA, 19 nt, Homo sapiens
  misc_RNA (1)...(19): siRNA sense strand
gaagaaacugcucaagaag

SEQ ID NO: 417866 - RNA, 19 nt, Homo sapiens
  misc_RNA (1)...(19): siRNA sense strand
ugccagacacggauauuua

SEQ ID NO: 417867 - RNA, 19 nt, Homo sapiens
  misc_RNA (1)...(19): siRNA sense strand
ccacugucccucaucuaua

SEQ ID NO: 417868 - RNA, 19 nt, Homo sapiens
  misc_RNA (1)...(19): siRNA sense strand
gugaagcuguugaaugaca

SEQ ID NO: 417869 - RNA, 19 nt, Homo sapiens
  misc_RNA (1)...(19): siRNA sense strand
gcagccaucaucauuguga

SEQ ID NO: 417870 - RNA, 19 nt, Homo sapiens
  misc_RNA (1)...(19): siRNA sense strand
ggucuaaagcacagauuug

SEQ ID NO: 417871 - RNA, 19 nt, Homo sapiens
  misc_RNA (1)...(19): siRNA sense strand
ccucaucauugucaaacuu

SEQ ID NO: 417872 - RNA, 19 nt, Homo sapiens
  misc_RNA (1)...(19): siRNA sense strand
ggagauaagauggaagaug

SEQ ID NO: 417873 - RNA, 19 nt, Homo sapiens
  misc_RNA (1)...(19): siRNA sense strand
gagcucaggagauaagaug

SEQ ID NO: 417874 - RNA, 19 nt, Homo sapiens
  misc_RNA (1)...(19): siRNA sense strand
gcagaaagaggagaagcuu

SEQ ID NO: 417875 - RNA, 19 nt, Homo sapiens
  misc_RNA (1)...(19): siRNA sense strand
gcugaguucuacagugaug

SEQ ID NO: 417876 - RNA, 19 nt, Homo sapiens
  misc_RNA (1)...(19): siRNA sense strand
ucaaugagacagccagaga

SEQ ID NO: 417877 - RNA, 19 nt, Homo sapiens
  misc_RNA (1)...(19): siRNA sense strand
guacucagaggccaaggaa

SEQ ID NO: 417878 - RNA, 19 nt, Homo sapiens
  misc_RNA (1)...(19): siRNA sense strand
aagaagaaacugcucaaga

SEQ ID NO: 417879 - RNA, 19 nt, Homo sapiens
  misc_RNA (1)...(19): siRNA sense strand
aggagaagcuucggaaaca

SEQ ID NO: 417880 - RNA, 19 nt, Homo sapiens
  misc_RNA (1)...(19): siRNA sense strand
gaggcgagacuaccacaug

SEQ ID NO: 417881 - RNA, 19 nt, Homo sapiens
  misc_RNA (1)...(19): siRNA sense strand
gaagaugcaacagccaaug

SEQ ID NO: 417882 - RNA, 19 nt, Homo sapiens
  misc_RNA (1)...(19): siRNA sense strand
uaagauggaagaugcaaca

SEQ ID NO: 417883 - RNA, 19 nt, Homo sapiens
  misc_RNA (1)...(19): siRNA sense strand
cuucaucuacuuccuguuu

SEQ ID NO: 417884 - RNA, 19 nt, Homo sapiens
  misc_RNA (1)...(19): siRNA sense strand
augcugaguucuacaguga

SEQ ID NO: 417885 - RNA, 19 nt, Homo sapiens
  misc_RNA (1)...(19): siRNA sense strand
gugguuggguuugccauug

SEQ ID NO: 417886 - RNA, 19 nt, Homo sapiens
  misc_RNA (1)...(19): siRNA sense strand
acgacuccaugaucaauga

SEQ ID NO: 417887 - RNA, 19 nt, Homo sapiens
  misc_RNA (1)...(19): siRNA sense strand
augcauccaucaccaagaa

SEQ ID NO: 417888 - RNA, 19 nt, Homo sapiens
  misc_RNA (1)...(19): siRNA sense strand
gcuugaggcugggcacuuc

SEQ ID NO: 417889 - RNA, 19 nt, Homo sapiens
  misc_RNA (1)...(19): siRNA sense strand
gcgagacuaccacauggaa

SEQ ID NO: 417890 - RNA, 19 nt, Homo sapiens
  misc_RNA (1)...(19): siRNA sense strand
caggagauaagauggaaga

SEQ ID NO: 417891 - RNA, 19 nt, Homo sapiens
  misc_RNA (1)...(19): siRNA sense strand
gaggagaagcuucggaaac

SEQ ID NO: 417892 - RNA, 19 nt, Homo sapiens
  misc_RNA (1)...(19): siRNA sense strand
uugaacgacuccaugauca

SEQ ID NO: 417893 - RNA, 19 nt, Homo sapiens
  misc_RNA (1)...(19): siRNA sense strand
caacagccaauggucaaga

SEQ ID NO: 417894 - RNA, 19 nt, Homo sapiens
  misc_RNA (1)...(19): siRNA sense strand
ggaagaugcaacagccaau

SEQ ID NO: 417895 - RNA, 19 nt, Homo sapiens
  misc_RNA (1)...(19): siRNA sense strand
cuucuacccugucuucauc

SEQ ID NO: 417896 - RNA, 19 nt, Homo sapiens
  misc_RNA (1)...(19): siRNA sense strand
guguuuggccuccaucuga

SEQ ID NO: 417897 - RNA, 19 nt, Homo sapiens
  misc_RNA (1)...(19): siRNA sense strand
gaagaagaaacugcucaag

SEQ ID NO: 417898 - RNA, 19 nt, Homo sapiens
  misc_RNA (1)...(19): siRNA sense strand
cccgugaguugcucuaugu

SEQ ID NO: 417899 - RNA, 19 nt, Homo sapiens
  misc_RNA (1)...(19): siRNA sense strand
ggagaagcuucggaaacag

SEQ ID NO: 417900 - RNA, 19 nt, Homo sapiens
  misc_RNA (1)...(19): siRNA sense strand
gauaagauggaagaugcaa

SEQ ID NO: 417901 - RNA, 19 nt, Homo sapiens
  misc_RNA (1)...(19): siRNA sense strand
ugaagcuguugaaugacaa

SEQ ID NO: 417902 - RNA, 19 nt, Homo sapiens
  misc_RNA (1)...(19): siRNA sense strand
gcucaggagauaagaugga

SEQ ID NO: 417903 - RNA, 19 nt, Homo sapiens
  misc_RNA (1)...(19): siRNA sense strand
gcuaccggguggacagcaa

SEQ ID NO: 417904 - RNA, 19 nt, Homo sapiens
  misc_RNA (1)...(19): siRNA sense strand
ggugggcagugugacagaa

SEQ ID NO: 417905 - RNA, 19 nt, Homo sapiens
  misc_RNA (1)...(19): siRNA sense strand
cagcucaaguauguguuug

SEQ ID NO: 417906 - RNA, 19 nt, Homo sapiens
  misc_RNA (1)...(19): siRNA sense strand
guggugaagcuguugaaug

SEQ ID NO: 417907 - RNA, 19 nt, Homo sapiens
  misc_RNA (1)...(19): siRNA sense strand
cacugucccucaucuauac

SEQ ID NO: 417908 - RNA, 19 nt, Homo sapiens
  misc_RNA (1)...(19): siRNA sense strand
gccacugucccucaucuau

SEQ ID NO: 417909 - RNA, 19 nt, Homo sapiens
  misc_RNA (1)...(19): siRNA sense strand
gcacuucccggcacaucuc

SEQ ID NO: 417910 - RNA, 19 nt, Homo sapiens
  misc_RNA (1)...(19): siRNA sense strand
ccuauggcaugggucuaaa

SEQ ID NO: 417911 - RNA, 19 nt, Homo sapiens
  misc_RNA (1)...(19): siRNA sense strand
ugggugcccucuccuuugu

SEQ ID NO: 417912 - RNA, 19 nt, Homo sapiens
  misc_RNA (1)...(19): siRNA sense strand
gggucuaaagcacagauuu

SEQ ID NO: 417913 - RNA, 19 nt, Homo sapiens
  misc_RNA (1)...(19): siRNA sense strand
gcagcugcccaugccgaua

SEQ ID NO: 417914 - RNA, 19 nt, Homo sapiens
  misc_RNA (1)...(19): siRNA sense strand
aacagccaauggucaagaa

SEQ ID NO: 417915 - RNA, 19 nt, Homo sapiens
  misc_RNA (1)...(19): siRNA sense strand
cuacagugaugcgcugaag

SEQ ID NO: 417916 - RNA, 19 nt, Homo sapiens
  misc_RNA (1)...(19): siRNA sense strand
uuaucuggcuggugaccuu

SEQ ID NO: 417917 - RNA, 19 nt, Homo sapiens
  misc_RNA (1)...(19): siRNA sense strand
gucuaaagcacagauuuga

SEQ ID NO: 417918 - RNA, 19 nt, Homo sapiens
  misc_RNA (1)...(19): siRNA sense strand
gggccacugucccucaucu

SEQ ID NO: 417919 - RNA, 19 nt, Homo sapiens
  misc_RNA (1)...(19): siRNA sense strand
ggugagcucaggagauaag

SEQ ID NO: 417920 - RNA, 19 nt, Homo sapiens
  misc_RNA (1)...(19): siRNA sense strand
uuccucaucucccagaaga

SEQ ID NO: 417921 - RNA, 19 nt, Homo sapiens
  misc_RNA (1)...(19): siRNA sense strand
acggauauuuacagagaug

SEQ ID NO: 417922 - RNA, 19 nt, Homo sapiens
  misc_RNA (1)...(19): siRNA sense strand
gggccucaguaaccuuauc

SEQ ID NO: 417923 - RNA, 19 nt, Homo sapiens
  misc_RNA (1)...(19): siRNA sense strand
aaagcacagauuugaggua

SEQ ID NO: 417924 - RNA, 19 nt, Homo sapiens
  misc_RNA (1)...(19): siRNA sense strand
ggccacaggcaucuccuau

SEQ ID NO: 417925 - RNA, 19 nt, Homo sapiens
  misc_RNA (1)...(19): siRNA sense strand
cagccaucaucauugugaa

SEQ ID NO: 417926 - RNA, 19 nt, Homo sapiens
  misc_RNA (1)...(19): siRNA sense strand
ggcugggccugauccacuu

SEQ ID NO: 417927 - RNA, 19 nt, Homo sapiens
  misc_RNA (1)...(19): siRNA sense strand
cagccaauggucaagaaga

SEQ ID NO: 417928 - RNA, 19 nt, Homo sapiens
  misc_RNA (1)...(19): siRNA sense strand
acucagaggccaaggaagu

SEQ ID NO: 417929 - RNA, 19 nt, Homo sapiens
  misc_RNA (1)...(19): siRNA sense strand
gugccagacacggauauuu

SEQ ID NO: 417930 - RNA, 19 nt, Homo sapiens
  misc_RNA (1)...(19): siRNA sense strand
ggugguugcggucaucuuc

SEQ ID NO: 417931 - RNA, 19 nt, Homo sapiens
  misc_RNA (1)...(19): siRNA sense strand
agaagaaacugcucaagaa

SEQ ID NO: 417932 - RNA, 19 nt, Homo sapiens
  misc_RNA (1)...(19): siRNA sense strand
ucaagagccugaagaauau

SEQ ID NO: 417933 - RNA, 19 nt, Homo sapiens
  misc_RNA (1)...(19): siRNA sense strand
gcuccugggugaccuguua

SEQ ID NO: 417934 - RNA, 19 nt, Homo sapiens
  misc_RNA (1)...(19): siRNA sense strand
ugaagcaacugcagaaaga

SEQ ID NO: 417935 - RNA, 19 nt, Homo sapiens
  misc_RNA (1)...(19): siRNA sense strand
ggagccaucucuucccuuu

SEQ ID NO: 417936 - RNA, 19 nt, Homo sapiens
  misc_RNA (1)...(19): siRNA sense strand
ccagauggguccacacuga

SEQ ID NO: 417937 - RNA, 19 nt, Homo sapiens
  misc_RNA (1)...(19): siRNA sense strand
ucucacagcucaaguaugu

SEQ ID NO: 417938 - RNA, 19 nt, Homo sapiens
  misc_RNA (1)...(19): siRNA sense strand
gcacagauuugagguagau

SEQ ID NO: 417939 - RNA, 19 nt, Homo sapiens
  misc_RNA (1)...(19): siRNA sense strand
acagagauguggcagagua

SEQ ID NO: 417940 - RNA, 19 nt, Homo sapiens
  misc_RNA (1)...(19): siRNA sense strand
uggugaagcuguugaauga

SEQ ID NO: 417941 - RNA, 19 nt, Homo sapiens
  misc_RNA (1)...(19): siRNA sense strand
acacggauauuuacagaga

SEQ ID NO: 417942 - RNA, 19 nt, Homo sapiens
  misc_RNA (1)...(19): siRNA sense strand
acacccagcuguucucaaa

SEQ ID NO: 417943 - RNA, 19 nt, Homo sapiens
  misc_RNA (1)...(19): siRNA sense strand
ggacacagaugccccacua

SEQ ID NO: 417944 - RNA, 19 nt, Homo sapiens
  misc_RNA (1)...(19): siRNA sense strand
cucaagagccugaagaaua

SEQ ID NO: 417945 - RNA, 19 nt, Homo sapiens
  misc_RNA (1)...(19): siRNA sense strand
ccacaggcaucuccuaugg

SEQ ID NO: 417946 - RNA, 19 nt, Homo sapiens
  misc_RNA (1)...(19): siRNA sense strand
gcagaggugugguguggau

SEQ ID NO: 417947 - RNA, 19 nt, Homo sapiens
  misc_RNA (1)...(19): siRNA sense strand
gggcggaucugcuuaucug

SEQ ID NO: 417948 - RNA, 19 nt, Homo sapiens
  misc_RNA (1)...(19): siRNA sense strand
ccaugaugcugucaccuuu

SEQ ID NO: 417949 - RNA, 19 nt, Homo sapiens
  misc_RNA (1)...(19): siRNA sense strand
agauugagguggaggugua

SEQ ID NO: 417950 - RNA, 19 nt, Homo sapiens
  misc_RNA (1)...(19): siRNA sense strand
gaccuuugcugucaugucu

SEQ ID NO: 417951 - RNA, 19 nt, Homo sapiens
  misc_RNA (1)...(19): siRNA sense strand
agacacggauauuuacaga

SEQ ID NO: 417952 - RNA, 19 nt, Homo sapiens
  misc_RNA (1)...(19): siRNA sense strand
gaacgacuccaugaucaau

SEQ ID NO: 417953 - RNA, 19 nt, Homo sapiens
  misc_RNA (1)...(19): siRNA sense strand
gaagaaacugcucaagaag

SEQ ID NO: 417954 - RNA, 19 nt, Homo sapiens
  misc_RNA (1)...(19): siRNA sense strand
ugccagacacggauauuua

SEQ ID NO: 417955 - RNA, 19 nt, Homo sapiens
  misc_RNA (1)...(19): siRNA sense strand
ccacugucccucaucuaua

SEQ ID NO: 417956 - RNA, 19 nt, Homo sapiens
  misc_RNA (1)...(19): siRNA sense strand
gugaagcuguugaaugaca

SEQ ID NO: 417957 - RNA, 19 nt, Homo sapiens
  misc_RNA (1)...(19): siRNA sense strand
gcagccaucaucauuguga

SEQ ID NO: 417958 - RNA, 19 nt, Homo sapiens
  misc_RNA (1)...(19): siRNA sense strand
ggucuaaagcacagauuug

SEQ ID NO: 417959 - RNA, 19 nt, Homo sapiens
  misc_RNA (1)...(19): siRNA sense strand
ccucaucauugucaaacuu

SEQ ID NO: 417960 - RNA, 19 nt, Homo sapiens
  misc_RNA (1)...(19): siRNA sense strand
ggagauaagauggaagaug

SEQ ID NO: 417961 - RNA, 19 nt, Homo sapiens
  misc_RNA (1)...(19): siRNA sense strand
gagcucaggagauaagaug

SEQ ID NO: 417962 - RNA, 19 nt, Homo sapiens
  misc_RNA (1)...(19): siRNA sense strand
gcagaaagaggagaagcuu

SEQ ID NO: 417963 - RNA, 19 nt, Homo sapiens
  misc_RNA (1)...(19): siRNA sense strand
gcugaguucuacagugaug

SEQ ID NO: 417964 - RNA, 19 nt, Homo sapiens
  misc_RNA (1)...(19): siRNA sense strand
ucaaugagacagccagaga

SEQ ID NO: 417965 - RNA, 19 nt, Homo sapiens
  misc_RNA (1)...(19): siRNA sense strand
guacucagaggccaaggaa

SEQ ID NO: 417966 - RNA, 19 nt, Homo sapiens
  misc_RNA (1)...(19): siRNA sense strand
aagaagaaacugcucaaga

SEQ ID NO: 417967 - RNA, 19 nt, Homo sapiens
  misc_RNA (1)...(19): siRNA sense strand
aggagaagcuucggaaaca

SEQ ID NO: 417968 - RNA, 19 nt, Homo sapiens
  misc_RNA (1)...(19): siRNA sense strand
gaggcgagacuaccacaug

SEQ ID NO: 417969 - RNA, 19 nt, Homo sapiens
  misc_RNA (1)...(19): siRNA sense strand
gaagaugcaacagccaaug

SEQ ID NO: 417970 - RNA, 19 nt, Homo sapiens
  misc_RNA (1)...(19): siRNA sense strand
uaagauggaagaugcaaca

SEQ ID NO: 417971 - RNA, 19 nt, Homo sapiens
  misc_RNA (1)...(19): siRNA sense strand
cuucaucuacuuccuguuu

SEQ ID NO: 417972 - RNA, 19 nt, Homo sapiens
  misc_RNA (1)...(19): siRNA sense strand
augcugaguucuacaguga

SEQ ID NO: 417973 - RNA, 19 nt, Homo sapiens
  misc_RNA (1)...(19): siRNA sense strand
gugguuggguuugccauug

SEQ ID NO: 417974 - RNA, 19 nt, Homo sapiens
  misc_RNA (1)...(19): siRNA sense strand
acgacuccaugaucaauga

SEQ ID NO: 417975 - RNA, 19 nt, Homo sapiens
  misc_RNA (1)...(19): siRNA sense strand
augcauccaucaccaagaa

SEQ ID NO: 417976 - RNA, 19 nt, Homo sapiens
  misc_RNA (1)...(19): siRNA sense strand
gcuugaggcugggcacuuc

SEQ ID NO: 417977 - RNA, 19 nt, Homo sapiens
  misc_RNA (1)...(19): siRNA sense strand
gcgagacuaccacauggaa

SEQ ID NO: 417978 - RNA, 19 nt, Homo sapiens
  misc_RNA (1)...(19): siRNA sense strand
caggagauaagauggaaga

SEQ ID NO: 417979 - RNA, 19 nt, Homo sapiens
  misc_RNA (1)...(19): siRNA sense strand
gaggagaagcuucggaaac

SEQ ID NO: 417980 - RNA, 19 nt, Homo sapiens
  misc_RNA (1)...(19): siRNA sense strand
uugaacgacuccaugauca

SEQ ID NO: 417981 - RNA, 19 nt, Homo sapiens
  misc_RNA (1)...(19): siRNA sense strand
caacagccaauggucaaga

SEQ ID NO: 417982 - RNA, 19 nt, Homo sapiens
  misc_RNA (1)...(19): siRNA sense strand
ggaagaugcaacagccaau

SEQ ID NO: 417983 - RNA, 19 nt, Homo sapiens
  misc_RNA (1)...(19): siRNA sense strand
cuucuacccugucuucauc

SEQ ID NO: 417984 - RNA, 19 nt, Homo sapiens
  misc_RNA (1)...(19): siRNA sense strand
guguuuggccuccaucuga

SEQ ID NO: 417985 - RNA, 19 nt, Homo sapiens
  misc_RNA (1)...(19): siRNA sense strand
gaagaagaaacugcucaag

SEQ ID NO: 417986 - RNA, 19 nt, Homo sapiens
  misc_RNA (1)...(19): siRNA sense strand
cccgugaguugcucuaugu

SEQ ID NO: 417987 - RNA, 19 nt, Homo sapiens
  misc_RNA (1)...(19): siRNA sense strand
ggagaagcuucggaaacag

SEQ ID NO: 417988 - RNA, 19 nt, Homo sapiens
  misc_RNA (1)...(19): siRNA sense strand
gauaagauggaagaugcaa

SEQ ID NO: 417989 - RNA, 19 nt, Homo sapiens
  misc_RNA (1)...(19): siRNA sense strand
ugaagcuguugaaugacaa

SEQ ID NO: 417990 - RNA, 19 nt, Homo sapiens
  misc_RNA (1)...(19): siRNA sense strand
gcucaggagauaagaugga

SEQ ID NO: 417991 - RNA, 19 nt, Homo sapiens
  misc_RNA (1)...(19): siRNA sense strand
gcuaccggguggacagcaa

SEQ ID NO: 417992 - RNA, 19 nt, Homo sapiens
  misc_RNA (1)...(19): siRNA sense strand
ggugggcagugugacagaa

SEQ ID NO: 417993 - RNA, 19 nt, Homo sapiens
  misc_RNA (1)...(19): siRNA sense strand
cagcucaaguauguguuug

SEQ ID NO: 417994 - RNA, 19 nt, Homo sapiens
  misc_RNA (1)...(19): siRNA sense strand
guggugaagcuguugaaug

SEQ ID NO: 417995 - RNA, 19 nt, Homo sapiens
  misc_RNA (1)...(19): siRNA sense strand
cacugucccucaucuauac

SEQ ID NO: 417996 - RNA, 19 nt, Homo sapiens
  misc_RNA (1)...(19): siRNA sense strand
gccacugucccucaucuau

SEQ ID NO: 417997 - RNA, 19 nt, Homo sapiens
  misc_RNA (1)...(19): siRNA sense strand
gcacuucccggcacaucuc

SEQ ID NO: 417998 - RNA, 19 nt, Homo sapiens
  misc_RNA (1)...(19): siRNA sense strand
ccuauggcaugggucuaaa

SEQ ID NO: 417999 - RNA, 19 nt, Homo sapiens
  misc_RNA (1)...(19): siRNA sense strand
ugggugcccucuccuuugu

SEQ ID NO: 418000 - RNA, 19 nt, Homo sapiens
  misc_RNA (1)...(19): siRNA sense strand
gggucuaaagcacagauuu

SEQ ID NO: 418001 - RNA, 19 nt, Homo sapiens
  misc_RNA (1)...(19): siRNA sense strand
gcagcugcccaugccgaua

SEQ ID NO: 418002 - RNA, 19 nt, Homo sapiens
  misc_RNA (1)...(19): siRNA sense strand
aacagccaauggucaagaa

SEQ ID NO: 418003 - RNA, 19 nt, Homo sapiens
  misc_RNA (1)...(19): siRNA sense strand
cuacagugaugcgcugaag

SEQ ID NO: 418004 - RNA, 19 nt, Homo sapiens
  misc_RNA (1)...(19): siRNA sense strand
uuaucuggcuggugaccuu

SEQ ID NO: 418005 - RNA, 19 nt, Homo sapiens
  misc_RNA (1)...(19): siRNA sense strand
gucuaaagcacagauuuga

SEQ ID NO: 418006 - RNA, 19 nt, Homo sapiens
  misc_RNA (1)...(19): siRNA sense strand
gggccacugucccucaucu

SEQ ID NO: 418007 - RNA, 19 nt, Homo sapiens
  misc_RNA (1)...(19): siRNA sense strand
ggugagcucaggagauaag

SEQ ID NO: 418008 - RNA, 19 nt, Homo sapiens
  misc_RNA (1)...(19): siRNA sense strand
uuccucaucucccagaaga

SEQ ID NO: 418009 - RNA, 19 nt, Homo sapiens
  misc_RNA (1)...(19): siRNA sense strand
acggauauuuacagagaug

SEQ ID NO: 418010 - RNA, 19 nt, Homo sapiens
  misc_RNA (1)...(19): siRNA sense strand
gggccucaguaaccuuauc

SEQ ID NO: 418011 - RNA, 19 nt, Homo sapiens
  misc_RNA (1)...(19): siRNA sense strand
aaagcacagauuugaggua

SEQ ID NO: 418012 - RNA, 19 nt, Homo sapiens
  misc_RNA (1)...(19): siRNA sense strand
ggccacaggcaucuccuau

SEQ ID NO: 418013 - RNA, 19 nt, Homo sapiens
  misc_RNA (1)...(19): siRNA sense strand
cagccaucaucauugugaa

SEQ ID NO: 418014 - RNA, 19 nt, Homo sapiens
  misc_RNA (1)...(19): siRNA sense strand
ggcugggccugauccacuu

SEQ ID NO: 418015 - RNA, 19 nt, Homo sapiens
  misc_RNA (1)...(19): siRNA sense strand
cagccaauggucaagaaga

SEQ ID NO: 418016 - RNA, 19 nt, Homo sapiens
  misc_RNA (1)...(19): siRNA sense strand
acucagaggccaaggaagu

SEQ ID NO: 418017 - RNA, 19 nt, Homo sapiens
  misc_RNA (1)...(19): siRNA sense strand
gugccagacacggauauuu

SEQ ID NO: 418018 - RNA, 19 nt, Homo sapiens
  misc_RNA (1)...(19): siRNA sense strand
ggugguugcggucaucuuc

SEQ ID NO: 418019 - RNA, 19 nt, Homo sapiens
  misc_RNA (1)...(19): siRNA sense strand
ggacaucgguuacaggaaa

SEQ ID NO: 418020 - RNA, 19 nt, Homo sapiens
  misc_RNA (1)...(19): siRNA sense strand
ggauuaccaugcagaaaua

SEQ ID NO: 418021 - RNA, 19 nt, Homo sapiens
  misc_RNA (1)...(19): siRNA sense strand
gaacugggauuaccaugca

SEQ ID NO: 418022 - RNA, 19 nt, Homo sapiens
  misc_RNA (1)...(19): siRNA sense strand
gcuccugaaucaagacuua

SEQ ID NO: 418023 - RNA, 19 nt, Homo sapiens
  misc_RNA (1)...(19): siRNA sense strand
ucacguggcuagaaacuug

SEQ ID NO: 418024 - RNA, 19 nt, Homo sapiens
  misc_RNA (1)...(19): siRNA sense strand
ccacagcuuugccuuugua

SEQ ID NO: 418025 - RNA, 19 nt, Homo sapiens
  misc_RNA (1)...(19): siRNA sense strand
caucagggacuucuuaauu

SEQ ID NO: 418026 - RNA, 19 nt, Homo sapiens
  misc_RNA (1)...(19): siRNA sense strand
cagcuuugccuuuguauuu

SEQ ID NO: 418027 - RNA, 19 nt, Homo sapiens
  misc_RNA (1)...(19): siRNA sense strand
agacuugccuuacacaguu

SEQ ID NO: 418028 - RNA, 19 nt, Homo sapiens
  misc_RNA (1)...(19): siRNA sense strand
aucagggacuucuuaauua

SEQ ID NO: 418029 - RNA, 19 nt, Homo sapiens
  misc_RNA (1)...(19): siRNA sense strand
uuugagauguggaagauaa

SEQ ID NO: 418030 - RNA, 19 nt, Homo sapiens
  misc_RNA (1)...(19): siRNA sense strand
cagacuuucuuugcaguua

SEQ ID NO: 418031 - RNA, 19 nt, Homo sapiens
  misc_RNA (1)...(19): siRNA sense strand
gagauguggaagauaauaa

SEQ ID NO: 418032 - RNA, 19 nt, Homo sapiens
  misc_RNA (1)...(19): siRNA sense strand
cguccgggcugguaagauu

SEQ ID NO: 418033 - RNA, 19 nt, Homo sapiens
  misc_RNA (1)...(19): siRNA sense strand
uuacucaaaugacuggaaa

SEQ ID NO: 418034 - RNA, 19 nt, Homo sapiens
  misc_RNA (1)...(19): siRNA sense strand
gugaggaagucguguguca

SEQ ID NO: 418035 - RNA, 19 nt, Homo sapiens
  misc_RNA (1)...(19): siRNA sense strand
gaagacgaguacccagaca

SEQ ID NO: 418036 - RNA, 19 nt, Homo sapiens
  misc_RNA (1)...(19): siRNA sense strand
gcuguucuucugaaucuua

SEQ ID NO: 418037 - RNA, 19 nt, Homo sapiens
  misc_RNA (1)...(19): siRNA sense strand
caccacagcuuugccuuug

SEQ ID NO: 418038 - RNA, 19 nt, Homo sapiens
  misc_RNA (1)...(19): siRNA sense strand
gccaaacgccaacaacuug

SEQ ID NO: 418039 - RNA, 19 nt, Homo sapiens
  misc_RNA (1)...(19): siRNA sense strand
gcaccacagcuuugccuuu

SEQ ID NO: 418040 - RNA, 19 nt, Homo sapiens
  misc_RNA (1)...(19): siRNA sense strand
gggauuaccaugcagaaau

SEQ ID NO: 418041 - RNA, 19 nt, Homo sapiens
  misc_RNA (1)...(19): siRNA sense strand
uuccuuagaucuucucaaa

SEQ ID NO: 418042 - RNA, 19 nt, Homo sapiens
  misc_RNA (1)...(19): siRNA sense strand
caagaacuauccgaacaag

SEQ ID NO: 418043 - RNA, 19 nt, Homo sapiens
  misc_RNA (1)...(19): siRNA sense strand
uagaagaacugaagaaaag

SEQ ID NO: 418044 - RNA, 19 nt, Homo sapiens
  misc_RNA (1)...(19): siRNA sense strand
gguagaagaacugaagaaa

SEQ ID NO: 418045 - RNA, 19 nt, Homo sapiens
  misc_RNA (1)...(19): siRNA sense strand
cuuuauggauucacagaaa

SEQ ID NO: 418046 - RNA, 19 nt, Homo sapiens
  misc_RNA (1)...(19): siRNA sense strand
aaaguugauugcagaagga

SEQ ID NO: 418047 - RNA, 19 nt, Homo sapiens
  misc_RNA (1)...(19): siRNA sense strand
caacaacuugggauagaga

SEQ ID NO: 418048 - RNA, 19 nt, Homo sapiens
  misc_RNA (1)...(19): siRNA sense strand
agacggccguggaacuauu

SEQ ID NO: 418049 - RNA, 19 nt, Homo sapiens
  misc_RNA (1)...(19): siRNA sense strand
gaacuauuccaagcccaaa

SEQ ID NO: 418050 - RNA, 19 nt, Homo sapiens
  misc_RNA (1)...(19): siRNA sense strand
augcagaaauacaagcuuu

SEQ ID NO: 418051 - RNA, 19 nt, Homo sapiens
  misc_RNA (1)...(19): siRNA sense strand
aguauugguugcagaagaa

SEQ ID NO: 418052 - RNA, 19 nt, Homo sapiens
  misc_RNA (1)...(19): siRNA sense strand
gacuuucuuugcaguuauu

SEQ ID NO: 418053 - RNA, 19 nt, Homo sapiens
  misc_RNA (1)...(19): siRNA sense strand
ggccaaacgccaacaacuu

SEQ ID NO: 418054 - RNA, 19 nt, Homo sapiens
  misc_RNA (1)...(19): siRNA sense strand
ucagggacuucuuaauuac

SEQ ID NO: 418055 - RNA, 19 nt, Homo sapiens
  misc_RNA (1)...(19): siRNA sense strand
caguauugguugcagaaga

SEQ ID NO: 418056 - RNA, 19 nt, Homo sapiens
  misc_RNA (1)...(19): siRNA sense strand
acccagacaugcccacuga

SEQ ID NO: 418057 - RNA, 19 nt, Homo sapiens
  misc_RNA (1)...(19): siRNA sense strand
ucacagacuugccuuacac

SEQ ID NO: 418058 - RNA, 19 nt, Homo sapiens
  misc_RNA (1)...(19): siRNA sense strand
ucaaaugacuggaaaagag

SEQ ID NO: 418059 - RNA, 19 nt, Homo sapiens
  misc_RNA (1)...(19): siRNA sense strand
gcccaaagaaaccuugaga

SEQ ID NO: 418060 - RNA, 19 nt, Homo sapiens
  misc_RNA (1)...(19): siRNA sense strand
gcugcuauauuaaaaguga

SEQ ID NO: 418061 - RNA, 19 nt, Homo sapiens
  misc_RNA (1)...(19): siRNA sense strand
ccgaacaagggacaucuuu

SEQ ID NO: 418062 - RNA, 19 nt, Homo sapiens
  misc_RNA (1)...(19): siRNA sense strand
aagcuguucuucugaaucu

SEQ ID NO: 418063 - RNA, 19 nt, Homo sapiens
  misc_RNA (1)...(19): siRNA sense strand
gauagagaaagaagcuguu

SEQ ID NO: 418064 - RNA, 19 nt, Homo sapiens
  misc_RNA (1)...(19): siRNA sense strand
uuucaucagggacuucuua

SEQ ID NO: 418065 - RNA, 19 nt, Homo sapiens
  misc_RNA (1)...(19): siRNA sense strand
gacuugccuuacacaguuu

SEQ ID NO: 418066 - RNA, 19 nt, Homo sapiens
  misc_RNA (1)...(19): siRNA sense strand
ugagauguggaagauaaua

SEQ ID NO: 418067 - RNA, 19 nt, Homo sapiens
  misc_RNA (1)...(19): siRNA sense strand
ugugucacguggcuagaaa

SEQ ID NO: 418068 - RNA, 19 nt, Homo sapiens
  misc_RNA (1)...(19): siRNA sense strand
ugagaggacugcacuuuuc

SEQ ID NO: 418069 - RNA, 19 nt, Homo sapiens
  misc_RNA (1)...(19): siRNA sense strand
ucaagaacuauccgaacaa

SEQ ID NO: 418070 - RNA, 19 nt, Homo sapiens
  misc_RNA (1)...(19): siRNA sense strand
gagaagccgaacugggauu

SEQ ID NO: 418071 - RNA, 19 nt, Homo sapiens
  misc_RNA (1)...(19): siRNA sense strand
ggacugcacuuuucaucag

SEQ ID NO: 418072 - RNA, 19 nt, Homo sapiens
  misc_RNA (1)...(19): siRNA sense strand
agacuuucuuugcaguuau

SEQ ID NO: 418073 - RNA, 19 nt, Homo sapiens
  misc_RNA (1)...(19): siRNA sense strand
gcucgaguggcccuuagaa

SEQ ID NO: 418074 - RNA, 19 nt, Homo sapiens
  misc_RNA (1)...(19): siRNA sense strand
gaacugaagaaaaggaaug

SEQ ID NO: 418075 - RNA, 19 nt, Homo sapiens
  misc_RNA (1)...(19): siRNA sense strand
guagaagaacugaagaaaa

SEQ ID NO: 418076 - RNA, 19 nt, Homo sapiens
  misc_RNA (1)...(19): siRNA sense strand
ccugagaggacugcacuuu

SEQ ID NO: 418077 - RNA, 19 nt, Homo sapiens
  misc_RNA (1)...(19): siRNA sense strand
ggaaacaguauugguugca

SEQ ID NO: 418078 - RNA, 19 nt, Homo sapiens
  misc_RNA (1)...(19): siRNA sense strand
guuggcuuauacugugaua

SEQ ID NO: 418079 - RNA, 19 nt, Homo sapiens
  misc_RNA (1)...(19): siRNA sense strand
caacuugggauagagaaag

SEQ ID NO: 418080 - RNA, 19 nt, Homo sapiens
  misc_RNA (1)...(19): siRNA sense strand
agaagccgaacugggauua

SEQ ID NO: 418081 - RNA, 19 nt, Homo sapiens
  misc_RNA (1)...(19): siRNA sense strand
gcagacuuucuuugcaguu

SEQ ID NO: 418082 - RNA, 19 nt, Homo sapiens
  misc_RNA (1)...(19): siRNA sense strand
acagcagacuuucuuugca

SEQ ID NO: 418083 - RNA, 19 nt, Homo sapiens
  misc_RNA (1)...(19): siRNA sense strand
uuacagcagacuuucuuug

SEQ ID NO: 418084 - RNA, 19 nt, Homo sapiens
  misc_RNA (1)...(19): siRNA sense strand
uguggaagauaauaaaucc

SEQ ID NO: 418085 - RNA, 19 nt, Homo sapiens
  misc_RNA (1)...(19): siRNA sense strand
aucaagaacuauccgaaca

SEQ ID NO: 418086 - RNA, 19 nt, Homo sapiens
  misc_RNA (1)...(19): siRNA sense strand
gcuauugguagaagaacug

SEQ ID NO: 418087 - RNA, 19 nt, Homo sapiens
  misc_RNA (1)...(19): siRNA sense strand
ccagacaugcccacugaag

SEQ ID NO: 418088 - RNA, 19 nt, Homo sapiens
  misc_RNA (1)...(19): siRNA sense strand
agacgaguacccagacaug

SEQ ID NO: 418089 - RNA, 19 nt, Homo sapiens
  misc_RNA (1)...(19): siRNA sense strand
ggacuucuuaauuacucaa

SEQ ID NO: 418090 - RNA, 19 nt, Homo sapiens
  misc_RNA (1)...(19): siRNA sense strand
gcagaaauacaagcuuuug

SEQ ID NO: 418091 - RNA, 19 nt, Homo sapiens
  misc_RNA (1)...(19): siRNA sense strand
cgacauggcuuucaucuua

SEQ ID NO: 418092 - RNA, 19 nt, Homo sapiens
  misc_RNA (1)...(19): siRNA sense strand
caaagaaccuugugaaguu

SEQ ID NO: 418093 - RNA, 19 nt, Homo sapiens
  misc_RNA (1)...(19): siRNA sense strand
ggacuuggauuaugaacua

SEQ ID NO: 418094 - RNA, 19 nt, Homo sapiens
  misc_RNA (1)...(19): siRNA sense strand
ucaaugagaugaagaagua

SEQ ID NO: 418095 - RNA, 19 nt, Homo sapiens
  misc_RNA (1)...(19): siRNA sense strand
caacaaagccugugacuau

SEQ ID NO: 418096 - RNA, 19 nt, Homo sapiens
  misc_RNA (1)...(19): siRNA sense strand
ggagagaccucacagacuu

SEQ ID NO: 418097 - RNA, 19 nt, Homo sapiens
  misc_RNA (1)...(19): siRNA sense strand
ggacacaguuuaugaagau

SEQ ID NO: 418098 - RNA, 19 nt, Homo sapiens
  misc_RNA (1)...(19): siRNA sense strand
ggaggagguuggaaagaua

SEQ ID NO: 418099 - RNA, 19 nt, Homo sapiens
  misc_RNA (1)...(19): siRNA sense strand
gauguggucuugaguauug

SEQ ID NO: 418100 - RNA, 19 nt, Homo sapiens
  misc_RNA (1)...(19): siRNA sense strand
gaaagggaauccuggaaga

SEQ ID NO: 418101 - RNA, 19 nt, Homo sapiens
  misc_RNA (1)...(19): siRNA sense strand
gaacggcacucaagguuuc

SEQ ID NO: 418102 - RNA, 19 nt, Homo sapiens
  misc_RNA (1)...(19): siRNA sense strand
gcagggauuucauauuaaa

SEQ ID NO: 418103 - RNA, 19 nt, Homo sapiens
  misc_RNA (1)...(19): siRNA sense strand
gaauugcgguggcucagua

SEQ ID NO: 418104 - RNA, 19 nt, Homo sapiens
  misc_RNA (1)...(19): siRNA sense strand
gaagaaagcagacauugug

SEQ ID NO: 418105 - RNA, 19 nt, Homo sapiens
  misc_RNA (1)...(19): siRNA sense strand
uugcagggauuucauauua

SEQ ID NO: 418106 - RNA, 19 nt, Homo sapiens
  misc_RNA (1)...(19): siRNA sense strand
gaacuagccuuugcuuuag

SEQ ID NO: 418107 - RNA, 19 nt, Homo sapiens
  misc_RNA (1)...(19): siRNA sense strand
gcaggaaggugaacaucaa

SEQ ID NO: 418108 - RNA, 19 nt, Homo sapiens
  misc_RNA (1)...(19): siRNA sense strand
gaaagaguuuguccagaga

SEQ ID NO: 418109 - RNA, 19 nt, Homo sapiens
  misc_RNA (1)...(19): siRNA sense strand
gaagacacgccaacacuaa

SEQ ID NO: 418110 - RNA, 19 nt, Homo sapiens
  misc_RNA (1)...(19): siRNA sense strand
gaaggaacuugcagggauu

SEQ ID NO: 418111 - RNA, 19 nt, Homo sapiens
  misc_RNA (1)...(19): siRNA sense strand
gaagagaagcagcauaaug

SEQ ID NO: 418112 - RNA, 19 nt, Homo sapiens
  misc_RNA (1)...(19): siRNA sense strand
ucagagagcuucccaacau

SEQ ID NO: 418113 - RNA, 19 nt, Homo sapiens
  misc_RNA (1)...(19): siRNA sense strand
gaaagaaugugaaaagguu

SEQ ID NO: 418114 - RNA, 19 nt, Homo sapiens
  misc_RNA (1)...(19): siRNA sense strand
caacaaaguggucuacaaa

SEQ ID NO: 418115 - RNA, 19 nt, Homo sapiens
  misc_RNA (1)...(19): siRNA sense strand
gacuuucucuacaagauua

SEQ ID NO: 418116 - RNA, 19 nt, Homo sapiens
  misc_RNA (1)...(19): siRNA sense strand
agaacuagccuuugcuuua

SEQ ID NO: 418117 - RNA, 19 nt, Homo sapiens
  misc_RNA (1)...(19): siRNA sense strand
guacagcgaugaugucaag

SEQ ID NO: 418118 - RNA, 19 nt, Homo sapiens
  misc_RNA (1)...(19): siRNA sense strand
gaacaagggugccgaucag

SEQ ID NO: 418119 - RNA, 19 nt, Homo sapiens
  misc_RNA (1)...(19): siRNA sense strand
caacagaacuagccuuugc

SEQ ID NO: 418120 - RNA, 19 nt, Homo sapiens
  misc_RNA (1)...(19): siRNA sense strand
caacauagaagaaagaauc

SEQ ID NO: 418121 - RNA, 19 nt, Homo sapiens
  misc_RNA (1)...(19): siRNA sense strand
gcucuagacuuuguucgua

SEQ ID NO: 418122 - RNA, 19 nt, Homo sapiens
  misc_RNA (1)...(19): siRNA sense strand
cgacgucuucuucaaauua

SEQ ID NO: 418123 - RNA, 19 nt, Homo sapiens
  misc_RNA (1)...(19): siRNA sense strand
gagauguggucuugaguau

SEQ ID NO: 418124 - RNA, 19 nt, Homo sapiens
  misc_RNA (1)...(19): siRNA sense strand
guaagucccuagaugaaau

SEQ ID NO: 418125 - RNA, 19 nt, Homo sapiens
  misc_RNA (1)...(19): siRNA sense strand
gcuaaugcaucuggaguuu

SEQ ID NO: 418126 - RNA, 19 nt, Homo sapiens
  misc_RNA (1)...(19): siRNA sense strand
gaagaagaaagcagacauu

SEQ ID NO: 418127 - RNA, 19 nt, Homo sapiens
  misc_RNA (1)...(19): siRNA sense strand
uagagaggcugguugacua

SEQ ID NO: 418128 - RNA, 19 nt, Homo sapiens
  misc_RNA (1)...(19): siRNA sense strand
gaaaucggacaggaucuua

SEQ ID NO: 418129 - RNA, 19 nt, Homo sapiens
  misc_RNA (1)...(19): siRNA sense strand
caaagccugugacuauuau

SEQ ID NO: 418130 - RNA, 19 nt, Homo sapiens
  misc_RNA (1)...(19): siRNA sense strand
cgaauaacguuacuucaag

SEQ ID NO: 418131 - RNA, 19 nt, Homo sapiens
  misc_RNA (1)...(19): siRNA sense strand
gaaagcagacauuguguuc

SEQ ID NO: 418132 - RNA, 19 nt, Homo sapiens
  misc_RNA (1)...(19): siRNA sense strand
gggcucugcucuagacuuu

SEQ ID NO: 418133 - RNA, 19 nt, Homo sapiens
  misc_RNA (1)...(19): siRNA sense strand
gaggaaacaucggcacuug

SEQ ID NO: 418134 - RNA, 19 nt, Homo sapiens
  misc_RNA (1)...(19): siRNA sense strand
gaaauaguggacacaguuu

SEQ ID NO: 418135 - RNA, 19 nt, Homo sapiens
  misc_RNA (1)...(19): siRNA sense strand
gaucgaggauggagugcuu

SEQ ID NO: 418136 - RNA, 19 nt, Homo sapiens
  misc_RNA (1)...(19): siRNA sense strand
caaacgacgucuucuucaa

SEQ ID NO: 418137 - RNA, 19 nt, Homo sapiens
  misc_RNA (1)...(19): siRNA sense strand
gaaccugggcuaaauggaa

SEQ ID NO: 418138 - RNA, 19 nt, Homo sapiens
  misc_RNA (1)...(19): siRNA sense strand
cagagaugcucgagaaguu

SEQ ID NO: 418139 - RNA, 19 nt, Homo sapiens
  misc_RNA (1)...(19): siRNA sense strand
gaagaaagaaucaugaacu

SEQ ID NO: 418140 - RNA, 19 nt, Homo sapiens
  misc_RNA (1)...(19): siRNA sense strand
cagagucgcuucccaagau

SEQ ID NO: 418141 - RNA, 19 nt, Homo sapiens
  misc_RNA (1)...(19): siRNA sense strand
caacgaagccggugacuac

SEQ ID NO: 418142 - RNA, 19 nt, Homo sapiens
  misc_RNA (1)...(19): siRNA sense strand
ucacagacuuccuggagaa

SEQ ID NO: 418143 - RNA, 19 nt, Homo sapiens
  misc_RNA (1)...(19): siRNA sense strand
acggagaucuggcugauuu

SEQ ID NO: 418144 - RNA, 19 nt, Homo sapiens
  misc_RNA (1)...(19): siRNA sense strand
gaacagaaucagccagaug

SEQ ID NO: 418145 - RNA, 19 nt, Homo sapiens
  misc_RNA (1)...(19): siRNA sense strand
gcaaugcccuggaguacgu

SEQ ID NO: 418146 - RNA, 19 nt, Homo sapiens
  misc_RNA (1)...(19): siRNA sense strand
ucacagagaugcagaccau

SEQ ID NO: 418147 - RNA, 19 nt, Homo sapiens
  misc_RNA (1)...(19): siRNA sense strand
ucgaugagcucaaugugaa

SEQ ID NO: 418148 - RNA, 19 nt, Homo sapiens
  misc_RNA (1)...(19): siRNA sense strand
acaaagacggccacuguua

SEQ ID NO: 418149 - RNA, 19 nt, Homo sapiens
  misc_RNA (1)...(19): siRNA sense strand
ugacaacauugccgagaaa

SEQ ID NO: 418150 - RNA, 19 nt, Homo sapiens
  misc_RNA (1)...(19): siRNA sense strand
ccaagaggcagauuauuga

SEQ ID NO: 418151 - RNA, 19 nt, Homo sapiens
  misc_RNA (1)...(19): siRNA sense strand
ucuacaagauuaucgauga

SEQ ID NO: 418152 - RNA, 19 nt, Homo sapiens
  misc_RNA (1)...(19): siRNA sense strand
ggagagaggacccaaagga

SEQ ID NO: 418153 - RNA, 19 nt, Homo sapiens
  misc_RNA (1)...(19): siRNA sense strand
ggcgaggguuuauguauga

SEQ ID NO: 418154 - RNA, 19 nt, Homo sapiens
  misc_RNA (1)...(19): siRNA sense strand
ggaccaggcccgaguucua

SEQ ID NO: 418155 - RNA, 19 nt, Homo sapiens
  misc_RNA (1)...(19): siRNA sense strand
caaguaaauguuccgaaua

SEQ ID NO: 418156 - RNA, 19 nt, Homo sapiens
  misc_RNA (1)...(19): siRNA sense strand
cagagaggcugugcucaaa

SEQ ID NO: 418157 - RNA, 19 nt, Homo sapiens
  misc_RNA (1)...(19): siRNA sense strand
ggagaaagaggagauguug

SEQ ID NO: 418158 - RNA, 19 nt, Homo sapiens
  misc_RNA (1)...(19): siRNA sense strand
gguggaggccuuugacuuu

SEQ ID NO: 418159 - RNA, 19 nt, Homo sapiens
  misc_RNA (1)...(19): siRNA sense strand
ggaagacacgccaacacua

SEQ ID NO: 418160 - RNA, 19 nt, Homo sapiens
  misc_RNA (1)...(19): siRNA sense strand
ucaacaaaguggucuacaa

SEQ ID NO: 418161 - RNA, 19 nt, Homo sapiens
  misc_RNA (1)...(19): siRNA sense strand
ggaaguuucaguacaaaga

SEQ ID NO: 418162 - RNA, 19 nt, Homo sapiens
  misc_RNA (1)...(19): siRNA sense strand
ccacaaagacggccacugu

SEQ ID NO: 418163 - RNA, 19 nt, Homo sapiens
  misc_RNA (1)...(19): siRNA sense strand
ggaaacagugugauugguu

SEQ ID NO: 418164 - RNA, 19 nt, Homo sapiens
  misc_RNA (1)...(19): siRNA sense strand
cauagagaaugucuuugaa

SEQ ID NO: 418165 - RNA, 19 nt, Homo sapiens
  misc_RNA (1)...(19): siRNA sense strand
gauaggagaacaaggcauu

SEQ ID NO: 418166 - RNA, 19 nt, Homo sapiens
  misc_RNA (1)...(19): siRNA sense strand
aagaggagauguugggauu

SEQ ID NO: 418167 - RNA, 19 nt, Homo sapiens
  misc_RNA (1)...(19): siRNA sense strand
gacauucuguuccucuuug

SEQ ID NO: 418168 - RNA, 19 nt, Homo sapiens
  misc_RNA (1)...(19): siRNA sense strand
uaaaugcccuugcuguuac

SEQ ID NO: 418169 - RNA, 19 nt, Homo sapiens
  misc_RNA (1)...(19): siRNA sense strand
gauaaaugcccuugcuguu

SEQ ID NO: 418170 - RNA, 19 nt, Homo sapiens
  misc_RNA (1)...(19): siRNA sense strand
ggaaagauagcguccaaca

SEQ ID NO: 418171 - RNA, 19 nt, Homo sapiens
  misc_RNA (1)...(19): siRNA sense strand
cagagagcuucccaacaua

SEQ ID NO: 418172 - RNA, 19 nt, Homo sapiens
  misc_RNA (1)...(19): siRNA sense strand
gaagagggcgucccacagu

SEQ ID NO: 418173 - RNA, 19 nt, Homo sapiens
  misc_RNA (1)...(19): siRNA sense strand
caucaacgcuuugcagauc

SEQ ID NO: 418174 - RNA, 19 nt, Homo sapiens
  misc_RNA (1)...(19): siRNA sense strand
gaaaggagaaagaggagau

SEQ ID NO: 418175 - RNA, 19 nt, Homo sapiens
  misc_RNA (1)...(19): siRNA sense strand
ggugguaagucccuagaug

SEQ ID NO: 418176 - RNA, 19 nt, Homo sapiens
  misc_RNA (1)...(19): siRNA sense strand
acaaguaaauguuccgaau

SEQ ID NO: 418177 - RNA, 19 nt, Homo sapiens
  misc_RNA (1)...(19): siRNA sense strand
gaugcgagauguggucuug

SEQ ID NO: 418178 - RNA, 19 nt, Homo sapiens
  misc_RNA (1)...(19): siRNA sense strand
uccaaagcaucaaagauaa

SEQ ID NO: 418179 - RNA, 19 nt, Homo sapiens
  misc_RNA (1)...(19): siRNA sense strand
gggcgaggguuuauguaug

SEQ ID NO: 418180 - RNA, 19 nt, Homo sapiens
  misc_RNA (1)...(19): siRNA sense strand
ugaagagaaugaagaucaa

SEQ ID NO: 418181 - RNA, 19 nt, Homo sapiens
  misc_RNA (1)...(19): siRNA sense strand
ccacggaaguuucaguaca

SEQ ID NO: 418182 - RNA, 19 nt, Homo sapiens
  misc_RNA (1)...(19): siRNA sense strand
acaaagccugugacuauua

SEQ ID NO: 418183 - RNA, 19 nt, Homo sapiens
  misc_RNA (1)...(19): siRNA sense strand
ccaccacccuguuccaguu

SEQ ID NO: 418184 - RNA, 19 nt, Homo sapiens
  misc_RNA (1)...(19): siRNA sense strand
gagaggacccaaaggagaa

SEQ ID NO: 418185 - RNA, 19 nt, Homo sapiens
  misc_RNA (1)...(19): siRNA sense strand
gguggaagaugcacaggau

SEQ ID NO: 418186 - RNA, 19 nt, Homo sapiens
  misc_RNA (1)...(19): siRNA sense strand
gaagggcgaaguaggagaa

SEQ ID NO: 418187 - RNA, 19 nt, Homo sapiens
  misc_RNA (1)...(19): siRNA sense strand
aaagaaccuugugaaguuu

SEQ ID NO: 418188 - RNA, 19 nt, Homo sapiens
  misc_RNA (1)...(19): siRNA sense strand
gcucugcucuagacuuugu

SEQ ID NO: 418189 - RNA, 19 nt, Homo sapiens
  misc_RNA (1)...(19): siRNA sense strand
ccauagagaaugucuuuga

SEQ ID NO: 418190 - RNA, 19 nt, Homo sapiens
  misc_RNA (1)...(19): siRNA sense strand
gcagggaaccagggccuua

SEQ ID NO: 418191 - RNA, 19 nt, Homo sapiens
  misc_RNA (1)...(19): siRNA sense strand
cgacauggcuuucaucuua

SEQ ID NO: 418192 - RNA, 19 nt, Homo sapiens
  misc_RNA (1)...(19): siRNA sense strand
caaagaaccuugugaaguu

SEQ ID NO: 418193 - RNA, 19 nt, Homo sapiens
  misc_RNA (1)...(19): siRNA sense strand
ggacuuggauuaugaacua

SEQ ID NO: 418194 - RNA, 19 nt, Homo sapiens
  misc_RNA (1)...(19): siRNA sense strand
ucaaugagaugaagaagua

SEQ ID NO: 418195 - RNA, 19 nt, Homo sapiens
  misc_RNA (1)...(19): siRNA sense strand
caacaaagccugugacuau

SEQ ID NO: 418196 - RNA, 19 nt, Homo sapiens
  misc_RNA (1)...(19): siRNA sense strand
ggagagaccucacagacuu

SEQ ID NO: 418197 - RNA, 19 nt, Homo sapiens
  misc_RNA (1)...(19): siRNA sense strand
ggacacaguuuaugaagau

SEQ ID NO: 418198 - RNA, 19 nt, Homo sapiens
  misc_RNA (1)...(19): siRNA sense strand
ggaggagguuggaaagaua

SEQ ID NO: 418199 - RNA, 19 nt, Homo sapiens
  misc_RNA (1)...(19): siRNA sense strand
gauguggucuugaguauug

SEQ ID NO: 418200 - RNA, 19 nt, Homo sapiens
  misc_RNA (1)...(19): siRNA sense strand
gaaagggaauccuggaaga

SEQ ID NO: 418201 - RNA, 19 nt, Homo sapiens
  misc_RNA (1)...(19): siRNA sense strand
gaacggcacucaagguuuc

SEQ ID NO: 418202 - RNA, 19 nt, Homo sapiens
  misc_RNA (1)...(19): siRNA sense strand
gcagggauuucauauuaaa

SEQ ID NO: 418203 - RNA, 19 nt, Homo sapiens
  misc_RNA (1)...(19): siRNA sense strand
gaauugcgguggcucagua

SEQ ID NO: 418204 - RNA, 19 nt, Homo sapiens
  misc_RNA (1)...(19): siRNA sense strand
gaagaaagcagacauugug

SEQ ID NO: 418205 - RNA, 19 nt, Homo sapiens
  misc_RNA (1)...(19): siRNA sense strand
uugcagggauuucauauua

SEQ ID NO: 418206 - RNA, 19 nt, Homo sapiens
  misc_RNA (1)...(19): siRNA sense strand
gaacuagccuuugcuuuag

SEQ ID NO: 418207 - RNA, 19 nt, Homo sapiens
  misc_RNA (1)...(19): siRNA sense strand
gcaggaaggugaacaucaa

SEQ ID NO: 418208 - RNA, 19 nt, Homo sapiens
  misc_RNA (1)...(19): siRNA sense strand
gaaagaguuuguccagaga

SEQ ID NO: 418209 - RNA, 19 nt, Homo sapiens
  misc_RNA (1)...(19): siRNA sense strand
gaagacacgccaacacuaa

SEQ ID NO: 418210 - RNA, 19 nt, Homo sapiens
  misc_RNA (1)...(19): siRNA sense strand
gaaggaacuugcagggauu

SEQ ID NO: 418211 - RNA, 19 nt, Homo sapiens
  misc_RNA (1)...(19): siRNA sense strand
gaagagaagcagcauaaug

SEQ ID NO: 418212 - RNA, 19 nt, Homo sapiens
  misc_RNA (1)...(19): siRNA sense strand
ucagagagcuucccaacau

SEQ ID NO: 418213 - RNA, 19 nt, Homo sapiens
  misc_RNA (1)...(19): siRNA sense strand
gaaagaaugugaaaagguu

SEQ ID NO: 418214 - RNA, 19 nt, Homo sapiens
  misc_RNA (1)...(19): siRNA sense strand
caacaaaguggucuacaaa

SEQ ID NO: 418215 - RNA, 19 nt, Homo sapiens
  misc_RNA (1)...(19): siRNA sense strand
gacuuucucuacaagauua

SEQ ID NO: 418216 - RNA, 19 nt, Homo sapiens
  misc_RNA (1)...(19): siRNA sense strand
agaacuagccuuugcuuua

SEQ ID NO: 418217 - RNA, 19 nt, Homo sapiens
  misc_RNA (1)...(19): siRNA sense strand
guacagcgaugaugucaag

SEQ ID NO: 418218 - RNA, 19 nt, Homo sapiens
  misc_RNA (1)...(19): siRNA sense strand
gaacaagggugccgaucag

SEQ ID NO: 418219 - RNA, 19 nt, Homo sapiens
  misc_RNA (1)...(19): siRNA sense strand
caacagaacuagccuuugc

SEQ ID NO: 418220 - RNA, 19 nt, Homo sapiens
  misc_RNA (1)...(19): siRNA sense strand
caacauagaagaaagaauc

SEQ ID NO: 418221 - RNA, 19 nt, Homo sapiens
  misc_RNA (1)...(19): siRNA sense strand
gcucuagacuuuguucgua

SEQ ID NO: 418222 - RNA, 19 nt, Homo sapiens
  misc_RNA (1)...(19): siRNA sense strand
cgacgucuucuucaaauua

SEQ ID NO: 418223 - RNA, 19 nt, Homo sapiens
  misc_RNA (1)...(19): siRNA sense strand
gagauguggucuugaguau

SEQ ID NO: 418224 - RNA, 19 nt, Homo sapiens
  misc_RNA (1)...(19): siRNA sense strand
guaagucccuagaugaaau

SEQ ID NO: 418225 - RNA, 19 nt, Homo sapiens
  misc_RNA (1)...(19): siRNA sense strand
gcuaaugcaucuggaguuu

SEQ ID NO: 418226 - RNA, 19 nt, Homo sapiens
  misc_RNA (1)...(19): siRNA sense strand
gaagaagaaagcagacauu

SEQ ID NO: 418227 - RNA, 19 nt, Homo sapiens
  misc_RNA (1)...(19): siRNA sense strand
uagagaggcugguugacua

SEQ ID NO: 418228 - RNA, 19 nt, Homo sapiens
  misc_RNA (1)...(19): siRNA sense strand
gaaaucggacaggaucuua

SEQ ID NO: 418229 - RNA, 19 nt, Homo sapiens
  misc_RNA (1)...(19): siRNA sense strand
caaagccugugacuauuau

SEQ ID NO: 418230 - RNA, 19 nt, Homo sapiens
  misc_RNA (1)...(19): siRNA sense strand
cgaauaacguuacuucaag

SEQ ID NO: 418231 - RNA, 19 nt, Homo sapiens
  misc_RNA (1)...(19): siRNA sense strand
gaaagcagacauuguguuc

SEQ ID NO: 418232 - RNA, 19 nt, Homo sapiens
  misc_RNA (1)...(19): siRNA sense strand
gggcucugcucuagacuuu

SEQ ID NO: 418233 - RNA, 19 nt, Homo sapiens
  misc_RNA (1)...(19): siRNA sense strand
gaggaaacaucggcacuug

SEQ ID NO: 418234 - RNA, 19 nt, Homo sapiens
  misc_RNA (1)...(19): siRNA sense strand
gaaauaguggacacaguuu

SEQ ID NO: 418235 - RNA, 19 nt, Homo sapiens
  misc_RNA (1)...(19): siRNA sense strand
gaucgaggauggagugcuu

SEQ ID NO: 418236 - RNA, 19 nt, Homo sapiens
  misc_RNA (1)...(19): siRNA sense strand
caaacgacgucuucuucaa

SEQ ID NO: 418237 - RNA, 19 nt, Homo sapiens
  misc_RNA (1)...(19): siRNA sense strand
gaaccugggcuaaauggaa

SEQ ID NO: 418238 - RNA, 19 nt, Homo sapiens
  misc_RNA (1)...(19): siRNA sense strand
cagagaugcucgagaaguu

SEQ ID NO: 418239 - RNA, 19 nt, Homo sapiens
  misc_RNA (1)...(19): siRNA sense strand
gaagaaagaaucaugaacu

SEQ ID NO: 418240 - RNA, 19 nt, Homo sapiens
  misc_RNA (1)...(19): siRNA sense strand
cagagucgcuucccaagau

SEQ ID NO: 418241 - RNA, 19 nt, Homo sapiens
  misc_RNA (1)...(19): siRNA sense strand
caacgaagccggugacuac

SEQ ID NO: 418242 - RNA, 19 nt, Homo sapiens
  misc_RNA (1)...(19): siRNA sense strand
ucacagacuuccuggagaa

SEQ ID NO: 418243 - RNA, 19 nt, Homo sapiens
  misc_RNA (1)...(19): siRNA sense strand
acggagaucuggcugauuu

SEQ ID NO: 418244 - RNA, 19 nt, Homo sapiens
  misc_RNA (1)...(19): siRNA sense strand
gaacagaaucagccagaug

SEQ ID NO: 418245 - RNA, 19 nt, Homo sapiens
  misc_RNA (1)...(19): siRNA sense strand
gcaaugcccuggaguacgu

SEQ ID NO: 418246 - RNA, 19 nt, Homo sapiens
  misc_RNA (1)...(19): siRNA sense strand
ucacagagaugcagaccau

SEQ ID NO: 418247 - RNA, 19 nt, Homo sapiens
  misc_RNA (1)...(19): siRNA sense strand
ucgaugagcucaaugugaa

SEQ ID NO: 418248 - RNA, 19 nt, Homo sapiens
  misc_RNA (1)...(19): siRNA sense strand
acaaagacggccacuguua

SEQ ID NO: 418249 - RNA, 19 nt, Homo sapiens
  misc_RNA (1)...(19): siRNA sense strand
ugacaacauugccgagaaa

SEQ ID NO: 418250 - RNA, 19 nt, Homo sapiens
  misc_RNA (1)...(19): siRNA sense strand
ccaagaggcagauuauuga

SEQ ID NO: 418251 - RNA, 19 nt, Homo sapiens
  misc_RNA (1)...(19): siRNA sense strand
ucuacaagauuaucgauga

SEQ ID NO: 418252 - RNA, 19 nt, Homo sapiens
  misc_RNA (1)...(19): siRNA sense strand
ggagagaggacccaaagga

SEQ ID NO: 418253 - RNA, 19 nt, Homo sapiens
  misc_RNA (1)...(19): siRNA sense strand
ggcgaggguuuauguauga

SEQ ID NO: 418254 - RNA, 19 nt, Homo sapiens
  misc_RNA (1)...(19): siRNA sense strand
ggaccaggcccgaguucua

SEQ ID NO: 418255 - RNA, 19 nt, Homo sapiens
  misc_RNA (1)...(19): siRNA sense strand
caaguaaauguuccgaaua

SEQ ID NO: 418256 - RNA, 19 nt, Homo sapiens
  misc_RNA (1)...(19): siRNA sense strand
cagagaggcugugcucaaa

SEQ ID NO: 418257 - RNA, 19 nt, Homo sapiens
  misc_RNA (1)...(19): siRNA sense strand
ggagaaagaggagauguug

SEQ ID NO: 418258 - RNA, 19 nt, Homo sapiens
  misc_RNA (1)...(19): siRNA sense strand
gguggaggccuuugacuuu

SEQ ID NO: 418259 - RNA, 19 nt, Homo sapiens
  misc_RNA (1)...(19): siRNA sense strand
ggaagacacgccaacacua

SEQ ID NO: 418260 - RNA, 19 nt, Homo sapiens
  misc_RNA (1)...(19): siRNA sense strand
ucaacaaaguggucuacaa

SEQ ID NO: 418261 - RNA, 19 nt, Homo sapiens
  misc_RNA (1)...(19): siRNA sense strand
ggaaguuucaguacaaaga

SEQ ID NO: 418262 - RNA, 19 nt, Homo sapiens
  misc_RNA (1)...(19): siRNA sense strand
ccacaaagacggccacugu

SEQ ID NO: 418263 - RNA, 19 nt, Homo sapiens
  misc_RNA (1)...(19): siRNA sense strand
ggaaacagugugauugguu

SEQ ID NO: 418264 - RNA, 19 nt, Homo sapiens
  misc_RNA (1)...(19): siRNA sense strand
cauagagaaugucuuugaa

SEQ ID NO: 418265 - RNA, 19 nt, Homo sapiens
  misc_RNA (1)...(19): siRNA sense strand
gauaggagaacaaggcauu

SEQ ID NO: 418266 - RNA, 19 nt, Homo sapiens
  misc_RNA (1)...(19): siRNA sense strand
aagaggagauguugggauu

SEQ ID NO: 418267 - RNA, 19 nt, Homo sapiens
  misc_RNA (1)...(19): siRNA sense strand
gacauucuguuccucuuug

SEQ ID NO: 418268 - RNA, 19 nt, Homo sapiens
  misc_RNA (1)...(19): siRNA sense strand
uaaaugcccuugcuguuac

SEQ ID NO: 418269 - RNA, 19 nt, Homo sapiens
  misc_RNA (1)...(19): siRNA sense strand
gauaaaugcccuugcuguu

SEQ ID NO: 418270 - RNA, 19 nt, Homo sapiens
  misc_RNA (1)...(19): siRNA sense strand
ggaaagauagcguccaaca

SEQ ID NO: 418271 - RNA, 19 nt, Homo sapiens
  misc_RNA (1)...(19): siRNA sense strand
cagagagcuucccaacaua

SEQ ID NO: 418272 - RNA, 19 nt, Homo sapiens
  misc_RNA (1)...(19): siRNA sense strand
gaagagggcgucccacagu

SEQ ID NO: 418273 - RNA, 19 nt, Homo sapiens
  misc_RNA (1)...(19): siRNA sense strand
caucaacgcuuugcagauc

SEQ ID NO: 418274 - RNA, 19 nt, Homo sapiens
  misc_RNA (1)...(19): siRNA sense strand
gaaaggagaaagaggagau

SEQ ID NO: 418275 - RNA, 19 nt, Homo sapiens
  misc_RNA (1)...(19): siRNA sense strand
ggugguaagucccuagaug

SEQ ID NO: 418276 - RNA, 19 nt, Homo sapiens
  misc_RNA (1)...(19): siRNA sense strand
acaaguaaauguuccgaau

SEQ ID NO: 418277 - RNA, 19 nt, Homo sapiens
  misc_RNA (1)...(19): siRNA sense strand
gaugcgagauguggucuug

SEQ ID NO: 418278 - RNA, 19 nt, Homo sapiens
  misc_RNA (1)...(19): siRNA sense strand
uccaaagcaucaaagauaa

SEQ ID NO: 418279 - RNA, 19 nt, Homo sapiens
  misc_RNA (1)...(19): siRNA sense strand
gggcgaggguuuauguaug

SEQ ID NO: 418280 - RNA, 19 nt, Homo sapiens
  misc_RNA (1)...(19): siRNA sense strand
ugaagagaaugaagaucaa

SEQ ID NO: 418281 - RNA, 19 nt, Homo sapiens
  misc_RNA (1)...(19): siRNA sense strand
ccacggaaguuucaguaca

SEQ ID NO: 418282 - RNA, 19 nt, Homo sapiens
  misc_RNA (1)...(19): siRNA sense strand
acaaagccugugacuauua

SEQ ID NO: 418283 - RNA, 19 nt, Homo sapiens
  misc_RNA (1)...(19): siRNA sense strand
ccaccacccuguuccaguu

SEQ ID NO: 418284 - RNA, 19 nt, Homo sapiens
  misc_RNA (1)...(19): siRNA sense strand
gagaggacccaaaggagaa

SEQ ID NO: 418285 - RNA, 19 nt, Homo sapiens
  misc_RNA (1)...(19): siRNA sense strand
gguggaagaugcacaggau

SEQ ID NO: 418286 - RNA, 19 nt, Homo sapiens
  misc_RNA (1)...(19): siRNA sense strand
gaagggcgaaguaggagaa

SEQ ID NO: 418287 - RNA, 19 nt, Homo sapiens
  misc_RNA (1)...(19): siRNA sense strand
aaagaaccuugugaaguuu

SEQ ID NO: 418288 - RNA, 19 nt, Homo sapiens
  misc_RNA (1)...(19): siRNA sense strand
gcucugcucuagacuuugu

SEQ ID NO: 418289 - RNA, 19 nt, Homo sapiens
  misc_RNA (1)...(19): siRNA sense strand
ccauagagaaugucuuuga

SEQ ID NO: 418290 - RNA, 19 nt, Homo sapiens
  misc_RNA (1)...(19): siRNA sense strand
gcagggaaccagggccuua

SEQ ID NO: 418291 - RNA, 19 nt, Homo sapiens
  misc_RNA (1)...(19): siRNA sense strand
cgacauggcuuucaucuua

SEQ ID NO: 418292 - RNA, 19 nt, Homo sapiens
  misc_RNA (1)...(19): siRNA sense strand
caaagaaccuugugaaguu

SEQ ID NO: 418293 - RNA, 19 nt, Homo sapiens
  misc_RNA (1)...(19): siRNA sense strand
ggacuuggauuaugaacua

SEQ ID NO: 418294 - RNA, 19 nt, Homo sapiens
  misc_RNA (1)...(19): siRNA sense strand
ucaaugagaugaagaagua

SEQ ID NO: 418295 - RNA, 19 nt, Homo sapiens
  misc_RNA (1)...(19): siRNA sense strand
caacaaagccugugacuau

SEQ ID NO: 418296 - RNA, 19 nt, Homo sapiens
  misc_RNA (1)...(19): siRNA sense strand
ggagagaccucacagacuu

SEQ ID NO: 418297 - RNA, 19 nt, Homo sapiens
  misc_RNA (1)...(19): siRNA sense strand
ggacacaguuuaugaagau

SEQ ID NO: 418298 - RNA, 19 nt, Homo sapiens
  misc_RNA (1)...(19): siRNA sense strand
ggaggagguuggaaagaua

SEQ ID NO: 418299 - RNA, 19 nt, Homo sapiens
  misc_RNA (1)...(19): siRNA sense strand
gauguggucuugaguauug

SEQ ID NO: 418300 - RNA, 19 nt, Homo sapiens
  misc_RNA (1)...(19): siRNA sense strand
gaaagggaauccuggaaga

SEQ ID NO: 418301 - RNA, 19 nt, Homo sapiens
  misc_RNA (1)...(19): siRNA sense strand
gaacggcacucaagguuuc

SEQ ID NO: 418302 - RNA, 19 nt, Homo sapiens
  misc_RNA (1)...(19): siRNA sense strand
gcagggauuucauauuaaa

SEQ ID NO: 418303 - RNA, 19 nt, Homo sapiens
  misc_RNA (1)...(19): siRNA sense strand
gaauugcgguggcucagua

SEQ ID NO: 418304 - RNA, 19 nt, Homo sapiens
  misc_RNA (1)...(19): siRNA sense strand
gaagaaagcagacauugug

SEQ ID NO: 418305 - RNA, 19 nt, Homo sapiens
  misc_RNA (1)...(19): siRNA sense strand
uugcagggauuucauauua

SEQ ID NO: 418306 - RNA, 19 nt, Homo sapiens
  misc_RNA (1)...(19): siRNA sense strand
gaacuagccuuugcuuuag

SEQ ID NO: 418307 - RNA, 19 nt, Homo sapiens
  misc_RNA (1)...(19): siRNA sense strand
gcaggaaggugaacaucaa

SEQ ID NO: 418308 - RNA, 19 nt, Homo sapiens
  misc_RNA (1)...(19): siRNA sense strand
gaaagaguuuguccagaga

SEQ ID NO: 418309 - RNA, 19 nt, Homo sapiens
  misc_RNA (1)...(19): siRNA sense strand
gaagacacgccaacacuaa

SEQ ID NO: 418310 - RNA, 19 nt, Homo sapiens
  misc_RNA (1)...(19): siRNA sense strand
gaaggaacuugcagggauu

SEQ ID NO: 418311 - RNA, 19 nt, Homo sapiens
  misc_RNA (1)...(19): siRNA sense strand
gaagagaagcagcauaaug

SEQ ID NO: 418312 - RNA, 19 nt, Homo sapiens
  misc_RNA (1)...(19): siRNA sense strand
ucagagagcuucccaacau

SEQ ID NO: 418313 - RNA, 19 nt, Homo sapiens
  misc_RNA (1)...(19): siRNA sense strand
gaaagaaugugaaaagguu

SEQ ID NO: 418314 - RNA, 19 nt, Homo sapiens
  misc_RNA (1)...(19): siRNA sense strand
caacaaaguggucuacaaa

SEQ ID NO: 418315 - RNA, 19 nt, Homo sapiens
  misc_RNA (1)...(19): siRNA sense strand
gacuuucucuacaagauua

SEQ ID NO: 418316 - RNA, 19 nt, Homo sapiens
  misc_RNA (1)...(19): siRNA sense strand
agaacuagccuuugcuuua

SEQ ID NO: 418317 - RNA, 19 nt, Homo sapiens
  misc_RNA (1)...(19): siRNA sense strand
guacagcgaugaugucaag

SEQ ID NO: 418318 - RNA, 19 nt, Homo sapiens
  misc_RNA (1)...(19): siRNA sense strand
gaacaagggugccgaucag

SEQ ID NO: 418319 - RNA, 19 nt, Homo sapiens
  misc_RNA (1)...(19): siRNA sense strand
caacagaacuagccuuugc

SEQ ID NO: 418320 - RNA, 19 nt, Homo sapiens
  misc_RNA (1)...(19): siRNA sense strand
caacauagaagaaagaauc

SEQ ID NO: 418321 - RNA, 19 nt, Homo sapiens
  misc_RNA (1)...(19): siRNA sense strand
gcucuagacuuuguucgua

SEQ ID NO: 418322 - RNA, 19 nt, Homo sapiens
  misc_RNA (1)...(19): siRNA sense strand
cgacgucuucuucaaauua

SEQ ID NO: 418323 - RNA, 19 nt, Homo sapiens
  misc_RNA (1)...(19): siRNA sense strand
gagauguggucuugaguau

SEQ ID NO: 418324 - RNA, 19 nt, Homo sapiens
  misc_RNA (1)...(19): siRNA sense strand
guaagucccuagaugaaau

SEQ ID NO: 418325 - RNA, 19 nt, Homo sapiens
  misc_RNA (1)...(19): siRNA sense strand
gcuaaugcaucuggaguuu

SEQ ID NO: 418326 - RNA, 19 nt, Homo sapiens
  misc_RNA (1)...(19): siRNA sense strand
gaagaagaaagcagacauu

SEQ ID NO: 418327 - RNA, 19 nt, Homo sapiens
  misc_RNA (1)...(19): siRNA sense strand
uagagaggcugguugacua

SEQ ID NO: 418328 - RNA, 19 nt, Homo sapiens
  misc_RNA (1)...(19): siRNA sense strand
gaaaucggacaggaucuua

SEQ ID NO: 418329 - RNA, 19 nt, Homo sapiens
  misc_RNA (1)...(19): siRNA sense strand
caaagccugugacuauuau

SEQ ID NO: 418330 - RNA, 19 nt, Homo sapiens
  misc_RNA (1)...(19): siRNA sense strand
cgaauaacguuacuucaag

SEQ ID NO: 418331 - RNA, 19 nt, Homo sapiens
  misc_RNA (1)...(19): siRNA sense strand
gaaagcagacauuguguuc

SEQ ID NO: 418332 - RNA, 19 nt, Homo sapiens
  misc_RNA (1)...(19): siRNA sense strand
gggcucugcucuagacuuu

SEQ ID NO: 418333 - RNA, 19 nt, Homo sapiens
  misc_RNA (1)...(19): siRNA sense strand
gaggaaacaucggcacuug

SEQ ID NO: 418334 - RNA, 19 nt, Homo sapiens
  misc_RNA (1)...(19): siRNA sense strand
gaaauaguggacacaguuu

SEQ ID NO: 418335 - RNA, 19 nt, Homo sapiens
  misc_RNA (1)...(19): siRNA sense strand
gaucgaggauggagugcuu

SEQ ID NO: 418336 - RNA, 19 nt, Homo sapiens
  misc_RNA (1)...(19): siRNA sense strand
caaacgacgucuucuucaa

SEQ ID NO: 418337 - RNA, 19 nt, Homo sapiens
  misc_RNA (1)...(19): siRNA sense strand
gaaccugggcuaaauggaa

SEQ ID NO: 418338 - RNA, 19 nt, Homo sapiens
  misc_RNA (1)...(19): siRNA sense strand
cagagaugcucgagaaguu

SEQ ID NO: 418339 - RNA, 19 nt, Homo sapiens
  misc_RNA (1)...(19): siRNA sense strand
gaagaaagaaucaugaacu

SEQ ID NO: 418340 - RNA, 19 nt, Homo sapiens
  misc_RNA (1)...(19): siRNA sense strand
cagagucgcuucccaagau

SEQ ID NO: 418341 - RNA, 19 nt, Homo sapiens
  misc_RNA (1)...(19): siRNA sense strand
caacgaagccggugacuac

SEQ ID NO: 418342 - RNA, 19 nt, Homo sapiens
  misc_RNA (1)...(19): siRNA sense strand
ucacagacuuccuggagaa

SEQ ID NO: 418343 - RNA, 19 nt, Homo sapiens
  misc_RNA (1)...(19): siRNA sense strand
acggagaucuggcugauuu

SEQ ID NO: 418344 - RNA, 19 nt, Homo sapiens
  misc_RNA (1)...(19): siRNA sense strand
gaacagaaucagccagaug

SEQ ID NO: 418345 - RNA, 19 nt, Homo sapiens
  misc_RNA (1)...(19): siRNA sense strand
gcaaugcccuggaguacgu

SEQ ID NO: 418346 - RNA, 19 nt, Homo sapiens
  misc_RNA (1)...(19): siRNA sense strand
ucacagagaugcagaccau

SEQ ID NO: 418347 - RNA, 19 nt, Homo sapiens
  misc_RNA (1)...(19): siRNA sense strand
ucgaugagcucaaugugaa

SEQ ID NO: 418348 - RNA, 19 nt, Homo sapiens
  misc_RNA (1)...(19): siRNA sense strand
acaaagacggccacuguua

SEQ ID NO: 418349 - RNA, 19 nt, Homo sapiens
  misc_RNA (1)...(19): siRNA sense strand
ugacaacauugccgagaaa

SEQ ID NO: 418350 - RNA, 19 nt, Homo sapiens
  misc_RNA (1)...(19): siRNA sense strand
ccaagaggcagauuauuga

SEQ ID NO: 418351 - RNA, 19 nt, Homo sapiens
  misc_RNA (1)...(19): siRNA sense strand
ucuacaagauuaucgauga

SEQ ID NO: 418352 - RNA, 19 nt, Homo sapiens
  misc_RNA (1)...(19): siRNA sense strand
ggagagaggacccaaagga

SEQ ID NO: 418353 - RNA, 19 nt, Homo sapiens
  misc_RNA (1)...(19): siRNA sense strand
ggcgaggguuuauguauga

SEQ ID NO: 418354 - RNA, 19 nt, Homo sapiens
  misc_RNA (1)...(19): siRNA sense strand
ggaccaggcccgaguucua

SEQ ID NO: 418355 - RNA, 19 nt, Homo sapiens
  misc_RNA (1)...(19): siRNA sense strand
caaguaaauguuccgaaua

SEQ ID NO: 418356 - RNA, 19 nt, Homo sapiens
  misc_RNA (1)...(19): siRNA sense strand
cagagaggcugugcucaaa

SEQ ID NO: 418357 - RNA, 19 nt, Homo sapiens
  misc_RNA (1)...(19): siRNA sense strand
ggagaaagaggagauguug

SEQ ID NO: 418358 - RNA, 19 nt, Homo sapiens
  misc_RNA (1)...(19): siRNA sense strand
gguggaggccuuugacuuu

SEQ ID NO: 418359 - RNA, 19 nt, Homo sapiens
  misc_RNA (1)...(19): siRNA sense strand
ggaagacacgccaacacua

SEQ ID NO: 418360 - RNA, 19 nt, Homo sapiens
  misc_RNA (1)...(19): siRNA sense strand
ucaacaaaguggucuacaa

SEQ ID NO: 418361 - RNA, 19 nt, Homo sapiens
  misc_RNA (1)...(19): siRNA sense strand
ggaaguuucaguacaaaga

SEQ ID NO: 418362 - RNA, 19 nt, Homo sapiens
  misc_RNA (1)...(19): siRNA sense strand
ccacaaagacggccacugu

SEQ ID NO: 418363 - RNA, 19 nt, Homo sapiens
  misc_RNA (1)...(19): siRNA sense strand
ggaaacagugugauugguu

SEQ ID NO: 418364 - RNA, 19 nt, Homo sapiens
  misc_RNA (1)...(19): siRNA sense strand
cauagagaaugucuuugaa

SEQ ID NO: 418365 - RNA, 19 nt, Homo sapiens
  misc_RNA (1)...(19): siRNA sense strand
gauaggagaacaaggcauu

SEQ ID NO: 418366 - RNA, 19 nt, Homo sapiens
  misc_RNA (1)...(19): siRNA sense strand
aagaggagauguugggauu

SEQ ID NO: 418367 - RNA, 19 nt, Homo sapiens
  misc_RNA (1)...(19): siRNA sense strand
gacauucuguuccucuuug

SEQ ID NO: 418368 - RNA, 19 nt, Homo sapiens
  misc_RNA (1)...(19): siRNA sense strand
uaaaugcccuugcuguuac

SEQ ID NO: 418369 - RNA, 19 nt, Homo sapiens
  misc_RNA (1)...(19): siRNA sense strand
gauaaaugcccuugcuguu

SEQ ID NO: 418370 - RNA, 19 nt, Homo sapiens
  misc_RNA (1)...(19): siRNA sense strand
ggaaagauagcguccaaca

SEQ ID NO: 418371 - RNA, 19 nt, Homo sapiens
  misc_RNA (1)...(19): siRNA sense strand
cagagagcuucccaacaua

SEQ ID NO: 418372 - RNA, 19 nt, Homo sapiens
  misc_RNA (1)...(19): siRNA sense strand
gaagagggcgucccacagu

SEQ ID NO: 418373 - RNA, 19 nt, Homo sapiens
  misc_RNA (1)...(19): siRNA sense strand
caucaacgcuuugcagauc

SEQ ID NO: 418374 - RNA, 19 nt, Homo sapiens
  misc_RNA (1)...(19): siRNA sense strand
gaaaggagaaagaggagau

SEQ ID NO: 418375 - RNA, 19 nt, Homo sapiens
  misc_RNA (1)...(19): siRNA sense strand
ggugguaagucccuagaug

SEQ ID NO: 418376 - RNA, 19 nt, Homo sapiens
  misc_RNA (1)...(19): siRNA sense strand
acaaguaaauguuccgaau

SEQ ID NO: 418377 - RNA, 19 nt, Homo sapiens
  misc_RNA (1)...(19): siRNA sense strand
gaugcgagauguggucuug

SEQ ID NO: 418378 - RNA, 19 nt, Homo sapiens
  misc_RNA (1)...(19): siRNA sense strand
uccaaagcaucaaagauaa

SEQ ID NO: 418379 - RNA, 19 nt, Homo sapiens
  misc_RNA (1)...(19): siRNA sense strand
gggcgaggguuuauguaug

SEQ ID NO: 418380 - RNA, 19 nt, Homo sapiens
  misc_RNA (1)...(19): siRNA sense strand
ugaagagaaugaagaucaa

SEQ ID NO: 418381 - RNA, 19 nt, Homo sapiens
  misc_RNA (1)...(19): siRNA sense strand
ccacggaaguuucaguaca

SEQ ID NO: 418382 - RNA, 19 nt, Homo sapiens
  misc_RNA (1)...(19): siRNA sense strand
acaaagccugugacuauua

SEQ ID NO: 418383 - RNA, 19 nt, Homo sapiens
  misc_RNA (1)...(19): siRNA sense strand
ccaccacccuguuccaguu

SEQ ID NO: 418384 - RNA, 19 nt, Homo sapiens
  misc_RNA (1)...(19): siRNA sense strand
gagaggacccaaaggagaa

SEQ ID NO: 418385 - RNA, 19 nt, Homo sapiens
  misc_RNA (1)...(19): siRNA sense strand
gguggaagaugcacaggau

SEQ ID NO: 418386 - RNA, 19 nt, Homo sapiens
  misc_RNA (1)...(19): siRNA sense strand
gaagggcgaaguaggagaa

SEQ ID NO: 418387 - RNA, 19 nt, Homo sapiens
  misc_RNA (1)...(19): siRNA sense strand
aaagaaccuugugaaguuu

SEQ ID NO: 418388 - RNA, 19 nt, Homo sapiens
  misc_RNA (1)...(19): siRNA sense strand
gcucugcucuagacuuugu

SEQ ID NO: 418389 - RNA, 19 nt, Homo sapiens
  misc_RNA (1)...(19): siRNA sense strand
ccauagagaaugucuuuga

SEQ ID NO: 418390 - RNA, 19 nt, Homo sapiens
  misc_RNA (1)...(19): siRNA sense strand
gcagggaaccagggccuua

SEQ ID NO: 418391 - RNA, 19 nt, Homo sapiens
  misc_RNA (1)...(19): siRNA sense strand
cgacauggcuuucaucuua

SEQ ID NO: 418392 - RNA, 19 nt, Homo sapiens
  misc_RNA (1)...(19): siRNA sense strand
caaagaaccuugugaaguu

SEQ ID NO: 418393 - RNA, 19 nt, Homo sapiens
  misc_RNA (1)...(19): siRNA sense strand
ggacuuggauuaugaacua

SEQ ID NO: 418394 - RNA, 19 nt, Homo sapiens
  misc_RNA (1)...(19): siRNA sense strand
ucaaugagaugaagaagua

SEQ ID NO: 418395 - RNA, 19 nt, Homo sapiens
  misc_RNA (1)...(19): siRNA sense strand
caacaaagccugugacuau

SEQ ID NO: 418396 - RNA, 19 nt, Homo sapiens
  misc_RNA (1)...(19): siRNA sense strand
ggagagaccucacagacuu

SEQ ID NO: 418397 - RNA, 19 nt, Homo sapiens
  misc_RNA (1)...(19): siRNA sense strand
ggacacaguuuaugaagau

SEQ ID NO: 418398 - RNA, 19 nt, Homo sapiens
  misc_RNA (1)...(19): siRNA sense strand
ggaggagguuggaaagaua

SEQ ID NO: 418399 - RNA, 19 nt, Homo sapiens
  misc_RNA (1)...(19): siRNA sense strand
gauguggucuugaguauug

SEQ ID NO: 418400 - RNA, 19 nt, Homo sapiens
  misc_RNA (1)...(19): siRNA sense strand
gaaagggaauccuggaaga

SEQ ID NO: 418401 - RNA, 19 nt, Homo sapiens
  misc_RNA (1)...(19): siRNA sense strand
gaacggcacucaagguuuc

SEQ ID NO: 418402 - RNA, 19 nt, Homo sapiens
  misc_RNA (1)...(19): siRNA sense strand
gcagggauuucauauuaaa

SEQ ID NO: 418403 - RNA, 19 nt, Homo sapiens
  misc_RNA (1)...(19): siRNA sense strand
gaauugcgguggcucagua

SEQ ID NO: 418404 - RNA, 19 nt, Homo sapiens
  misc_RNA (1)...(19): siRNA sense strand
gaagaaagcagacauugug

SEQ ID NO: 418405 - RNA, 19 nt, Homo sapiens
  misc_RNA (1)...(19): siRNA sense strand
uugcagggauuucauauua

SEQ ID NO: 418406 - RNA, 19 nt, Homo sapiens
  misc_RNA (1)...(19): siRNA sense strand
gaacuagccuuugcuuuag

SEQ ID NO: 418407 - RNA, 19 nt, Homo sapiens
  misc_RNA (1)...(19): siRNA sense strand
gcaggaaggugaacaucaa

SEQ ID NO: 418408 - RNA, 19 nt, Homo sapiens
  misc_RNA (1)...(19): siRNA sense strand
gaaagaguuuguccagaga

SEQ ID NO: 418409 - RNA, 19 nt, Homo sapiens
  misc_RNA (1)...(19): siRNA sense strand
gaagacacgccaacacuaa

SEQ ID NO: 418410 - RNA, 19 nt, Homo sapiens
  misc_RNA (1)...(19): siRNA sense strand
gaaggaacuugcagggauu

SEQ ID NO: 418411 - RNA, 19 nt, Homo sapiens
  misc_RNA (1)...(19): siRNA sense strand
gaagagaagcagcauaaug

SEQ ID NO: 418412 - RNA, 19 nt, Homo sapiens
  misc_RNA (1)...(19): siRNA sense strand
ucagagagcuucccaacau

SEQ ID NO: 418413 - RNA, 19 nt, Homo sapiens
  misc_RNA (1)...(19): siRNA sense strand
gaaagaaugugaaaagguu

SEQ ID NO: 418414 - RNA, 19 nt, Homo sapiens
  misc_RNA (1)...(19): siRNA sense strand
caacaaaguggucuacaaa

SEQ ID NO: 418415 - RNA, 19 nt, Homo sapiens
  misc_RNA (1)...(19): siRNA sense strand
gacuuucucuacaagauua

SEQ ID NO: 418416 - RNA, 19 nt, Homo sapiens
  misc_RNA (1)...(19): siRNA sense strand
agaacuagccuuugcuuua

SEQ ID NO: 418417 - RNA, 19 nt, Homo sapiens
  misc_RNA (1)...(19): siRNA sense strand
guacagcgaugaugucaag

SEQ ID NO: 418418 - RNA, 19 nt, Homo sapiens
  misc_RNA (1)...(19): siRNA sense strand
gaacaagggugccgaucag

SEQ ID NO: 418419 - RNA, 19 nt, Homo sapiens
  misc_RNA (1)...(19): siRNA sense strand
caacagaacuagccuuugc

SEQ ID NO: 418420 - RNA, 19 nt, Homo sapiens
  misc_RNA (1)...(19): siRNA sense strand
caacauagaagaaagaauc

SEQ ID NO: 418421 - RNA, 19 nt, Homo sapiens
  misc_RNA (1)...(19): siRNA sense strand
gcucuagacuuuguucgua

SEQ ID NO: 418422 - RNA, 19 nt, Homo sapiens
  misc_RNA (1)...(19): siRNA sense strand
cgacgucuucuucaaauua

SEQ ID NO: 418423 - RNA, 19 nt, Homo sapiens
  misc_RNA (1)...(19): siRNA sense strand
gagauguggucuugaguau

SEQ ID NO: 418424 - RNA, 19 nt, Homo sapiens
  misc_RNA (1)...(19): siRNA sense strand
guaagucccuagaugaaau

SEQ ID NO: 418425 - RNA, 19 nt, Homo sapiens
  misc_RNA (1)...(19): siRNA sense strand
gcuaaugcaucuggaguuu

SEQ ID NO: 418426 - RNA, 19 nt, Homo sapiens
  misc_RNA (1)...(19): siRNA sense strand
gaagaagaaagcagacauu

SEQ ID NO: 418427 - RNA, 19 nt, Homo sapiens
  misc_RNA (1)...(19): siRNA sense strand
uagagaggcugguugacua

SEQ ID NO: 418428 - RNA, 19 nt, Homo sapiens
  misc_RNA (1)...(19): siRNA sense strand
gaaaucggacaggaucuua

SEQ ID NO: 418429 - RNA, 19 nt, Homo sapiens
  misc_RNA (1)...(19): siRNA sense strand
caaagccugugacuauuau

SEQ ID NO: 418430 - RNA, 19 nt, Homo sapiens
  misc_RNA (1)...(19): siRNA sense strand
cgaauaacguuacuucaag

SEQ ID NO: 418431 - RNA, 19 nt, Homo sapiens
  misc_RNA (1)...(19): siRNA sense strand
gaaagcagacauuguguuc

SEQ ID NO: 418432 - RNA, 19 nt, Homo sapiens
  misc_RNA (1)...(19): siRNA sense strand
gggcucugcucuagacuuu

SEQ ID NO: 418433 - RNA, 19 nt, Homo sapiens
  misc_RNA (1)...(19): siRNA sense strand
gaggaaacaucggcacuug

SEQ ID NO: 418434 - RNA, 19 nt, Homo sapiens
  misc_RNA (1)...(19): siRNA sense strand
gaaauaguggacacaguuu

SEQ ID NO: 418435 - RNA, 19 nt, Homo sapiens
  misc_RNA (1)...(19): siRNA sense strand
gaucgaggauggagugcuu

SEQ ID NO: 418436 - RNA, 19 nt, Homo sapiens
  misc_RNA (1)...(19): siRNA sense strand
caaacgacgucuucuucaa

SEQ ID NO: 418437 - RNA, 19 nt, Homo sapiens
  misc_RNA (1)...(19): siRNA sense strand
gaaccugggcuaaauggaa

SEQ ID NO: 418438 - RNA, 19 nt, Homo sapiens
  misc_RNA (1)...(19): siRNA sense strand
cagagaugcucgagaaguu

SEQ ID NO: 418439 - RNA, 19 nt, Homo sapiens
  misc_RNA (1)...(19): siRNA sense strand
gaagaaagaaucaugaacu

SEQ ID NO: 418440 - RNA, 19 nt, Homo sapiens
  misc_RNA (1)...(19): siRNA sense strand
cagagucgcuucccaagau

SEQ ID NO: 418441 - RNA, 19 nt, Homo sapiens
  misc_RNA (1)...(19): siRNA sense strand
caacgaagccggugacuac

SEQ ID NO: 418442 - RNA, 19 nt, Homo sapiens
  misc_RNA (1)...(19): siRNA sense strand
ucacagacuuccuggagaa

SEQ ID NO: 418443 - RNA, 19 nt, Homo sapiens
  misc_RNA (1)...(19): siRNA sense strand
acggagaucuggcugauuu

SEQ ID NO: 418444 - RNA, 19 nt, Homo sapiens
  misc_RNA (1)...(19): siRNA sense strand
gaacagaaucagccagaug

SEQ ID NO: 418445 - RNA, 19 nt, Homo sapiens
  misc_RNA (1)...(19): siRNA sense strand
gcaaugcccuggaguacgu

SEQ ID NO: 418446 - RNA, 19 nt, Homo sapiens
  misc_RNA (1)...(19): siRNA sense strand
ucacagagaugcagaccau

SEQ ID NO: 418447 - RNA, 19 nt, Homo sapiens
  misc_RNA (1)...(19): siRNA sense strand
ucgaugagcucaaugugaa

SEQ ID NO: 418448 - RNA, 19 nt, Homo sapiens
  misc_RNA (1)...(19): siRNA sense strand
acaaagacggccacuguua

SEQ ID NO: 418449 - RNA, 19 nt, Homo sapiens
  misc_RNA (1)...(19): siRNA sense strand
ugacaacauugccgagaaa

SEQ ID NO: 418450 - RNA, 19 nt, Homo sapiens
  misc_RNA (1)...(19): siRNA sense strand
ccaagaggcagauuauuga

SEQ ID NO: 418451 - RNA, 19 nt, Homo sapiens
  misc_RNA (1)...(19): siRNA sense strand
ucuacaagauuaucgauga

SEQ ID NO: 418452 - RNA, 19 nt, Homo sapiens
  misc_RNA (1)...(19): siRNA sense strand
ggagagaggacccaaagga

SEQ ID NO: 418453 - RNA, 19 nt, Homo sapiens
  misc_RNA (1)...(19): siRNA sense strand
ggcgaggguuuauguauga

SEQ ID NO: 418454 - RNA, 19 nt, Homo sapiens
  misc_RNA (1)...(19): siRNA sense strand
ggaccaggcccgaguucua

SEQ ID NO: 418455 - RNA, 19 nt, Homo sapiens
  misc_RNA (1)...(19): siRNA sense strand
caaguaaauguuccgaaua

SEQ ID NO: 418456 - RNA, 19 nt, Homo sapiens
  misc_RNA (1)...(19): siRNA sense strand
cagagaggcugugcucaaa

SEQ ID NO: 418457 - RNA, 19 nt, Homo sapiens
  misc_RNA (1)...(19): siRNA sense strand
ggagaaagaggagauguug

SEQ ID NO: 418458 - RNA, 19 nt, Homo sapiens
  misc_RNA (1)...(19): siRNA sense strand
gguggaggccuuugacuuu

SEQ ID NO: 418459 - RNA, 19 nt, Homo sapiens
  misc_RNA (1)...(19): siRNA sense strand
ggaagacacgccaacacua

SEQ ID NO: 418460 - RNA, 19 nt, Homo sapiens
  misc_RNA (1)...(19): siRNA sense strand
ucaacaaaguggucuacaa

SEQ ID NO: 418461 - RNA, 19 nt, Homo sapiens
  misc_RNA (1)...(19): siRNA sense strand
ggaaguuucaguacaaaga

SEQ ID NO: 418462 - RNA, 19 nt, Homo sapiens
  misc_RNA (1)...(19): siRNA sense strand
ccacaaagacggccacugu

SEQ ID NO: 418463 - RNA, 19 nt, Homo sapiens
  misc_RNA (1)...(19): siRNA sense strand
ggaaacagugugauugguu

SEQ ID NO: 418464 - RNA, 19 nt, Homo sapiens
  misc_RNA (1)...(19): siRNA sense strand
cauagagaaugucuuugaa

SEQ ID NO: 418465 - RNA, 19 nt, Homo sapiens
  misc_RNA (1)...(19): siRNA sense strand
gauaggagaacaaggcauu

SEQ ID NO: 418466 - RNA, 19 nt, Homo sapiens
  misc_RNA (1)...(19): siRNA sense strand
aagaggagauguugggauu

SEQ ID NO: 418467 - RNA, 19 nt, Homo sapiens
  misc_RNA (1)...(19): siRNA sense strand
gacauucuguuccucuuug

SEQ ID NO: 418468 - RNA, 19 nt, Homo sapiens
  misc_RNA (1)...(19): siRNA sense strand
uaaaugcccuugcuguuac

SEQ ID NO: 418469 - RNA, 19 nt, Homo sapiens
  misc_RNA (1)...(19): siRNA sense strand
gauaaaugcccuugcuguu

SEQ ID NO: 418470 - RNA, 19 nt, Homo sapiens
  misc_RNA (1)...(19): siRNA sense strand
ggaaagauagcguccaaca

SEQ ID NO: 418471 - RNA, 19 nt, Homo sapiens
  misc_RNA (1)...(19): siRNA sense strand
cagagagcuucccaacaua

SEQ ID NO: 418472 - RNA, 19 nt, Homo sapiens
  misc_RNA (1)...(19): siRNA sense strand
gaagagggcgucccacagu

SEQ ID NO: 418473 - RNA, 19 nt, Homo sapiens
  misc_RNA (1)...(19): siRNA sense strand
caucaacgcuuugcagauc

SEQ ID NO: 418474 - RNA, 19 nt, Homo sapiens
  misc_RNA (1)...(19): siRNA sense strand
gaaaggagaaagaggagau

SEQ ID NO: 418475 - RNA, 19 nt, Homo sapiens
  misc_RNA (1)...(19): siRNA sense strand
ggugguaagucccuagaug

SEQ ID NO: 418476 - RNA, 19 nt, Homo sapiens
  misc_RNA (1)...(19): siRNA sense strand
acaaguaaauguuccgaau

SEQ ID NO: 418477 - RNA, 19 nt, Homo sapiens
  misc_RNA (1)...(19): siRNA sense strand
gaugcgagauguggucuug

SEQ ID NO: 418478 - RNA, 19 nt, Homo sapiens
  misc_RNA (1)...(19): siRNA sense strand
uccaaagcaucaaagauaa

SEQ ID NO: 418479 - RNA, 19 nt, Homo sapiens
  misc_RNA (1)...(19): siRNA sense strand
gggcgaggguuuauguaug

SEQ ID NO: 418480 - RNA, 19 nt, Homo sapiens
  misc_RNA (1)...(19): siRNA sense strand
ugaagagaaugaagaucaa

SEQ ID NO: 418481 - RNA, 19 nt, Homo sapiens
  misc_RNA (1)...(19): siRNA sense strand
ccacggaaguuucaguaca

SEQ ID NO: 418482 - RNA, 19 nt, Homo sapiens
  misc_RNA (1)...(19): siRNA sense strand
acaaagccugugacuauua

SEQ ID NO: 418483 - RNA, 19 nt, Homo sapiens
  misc_RNA (1)...(19): siRNA sense strand
ccaccacccuguuccaguu

SEQ ID NO: 418484 - RNA, 19 nt, Homo sapiens
  misc_RNA (1)...(19): siRNA sense strand
gagaggacccaaaggagaa

SEQ ID NO: 418485 - RNA, 19 nt, Homo sapiens
  misc_RNA (1)...(19): siRNA sense strand
gguggaagaugcacaggau

SEQ ID NO: 418486 - RNA, 19 nt, Homo sapiens
  misc_RNA (1)...(19): siRNA sense strand
gaagggcgaaguaggagaa

SEQ ID NO: 418487 - RNA, 19 nt, Homo sapiens
  misc_RNA (1)...(19): siRNA sense strand
aaagaaccuugugaaguuu

SEQ ID NO: 418488 - RNA, 19 nt, Homo sapiens
  misc_RNA (1)...(19): siRNA sense strand
gcucugcucuagacuuugu

SEQ ID NO: 418489 - RNA, 19 nt, Homo sapiens
  misc_RNA (1)...(19): siRNA sense strand
ccauagagaaugucuuuga

SEQ ID NO: 418490 - RNA, 19 nt, Homo sapiens
  misc_RNA (1)...(19): siRNA sense strand
gcagggaaccagggccuua

SEQ ID NO: 418491 - RNA, 19 nt, Homo sapiens
  misc_RNA (1)...(19): siRNA sense strand
cgacauggcuuucaucuua

SEQ ID NO: 418492 - RNA, 19 nt, Homo sapiens
  misc_RNA (1)...(19): siRNA sense strand
caaagaaccuugugaaguu

SEQ ID NO: 418493 - RNA, 19 nt, Homo sapiens
  misc_RNA (1)...(19): siRNA sense strand
ggacuuggauuaugaacua

SEQ ID NO: 418494 - RNA, 19 nt, Homo sapiens
  misc_RNA (1)...(19): siRNA sense strand
ucaaugagaugaagaagua

SEQ ID NO: 418495 - RNA, 19 nt, Homo sapiens
  misc_RNA (1)...(19): siRNA sense strand
caacaaagccugugacuau

SEQ ID NO: 418496 - RNA, 19 nt, Homo sapiens
  misc_RNA (1)...(19): siRNA sense strand
ggagagaccucacagacuu

SEQ ID NO: 418497 - RNA, 19 nt, Homo sapiens
  misc_RNA (1)...(19): siRNA sense strand
ggacacaguuuaugaagau

SEQ ID NO: 418498 - RNA, 19 nt, Homo sapiens
  misc_RNA (1)...(19): siRNA sense strand
ggaggagguuggaaagaua

SEQ ID NO: 418499 - RNA, 19 nt, Homo sapiens
  misc_RNA (1)...(19): siRNA sense strand
gauguggucuugaguauug

SEQ ID NO: 418500 - RNA, 19 nt, Homo sapiens
  misc_RNA (1)...(19): siRNA sense strand
gaaagggaauccuggaaga

SEQ ID NO: 418501 - RNA, 19 nt, Homo sapiens
  misc_RNA (1)...(19): siRNA sense strand
gaacggcacucaagguuuc

SEQ ID NO: 418502 - RNA, 19 nt, Homo sapiens
  misc_RNA (1)...(19): siRNA sense strand
gcagggauuucauauuaaa

SEQ ID NO: 418503 - RNA, 19 nt, Homo sapiens
  misc_RNA (1)...(19): siRNA sense strand
gaauugcgguggcucagua

SEQ ID NO: 418504 - RNA, 19 nt, Homo sapiens
  misc_RNA (1)...(19): siRNA sense strand
gaagaaagcagacauugug

SEQ ID NO: 418505 - RNA, 19 nt, Homo sapiens
  misc_RNA (1)...(19): siRNA sense strand
uugcagggauuucauauua

SEQ ID NO: 418506 - RNA, 19 nt, Homo sapiens
  misc_RNA (1)...(19): siRNA sense strand
gaacuagccuuugcuuuag

SEQ ID NO: 418507 - RNA, 19 nt, Homo sapiens
  misc_RNA (1)...(19): siRNA sense strand
gcaggaaggugaacaucaa

SEQ ID NO: 418508 - RNA, 19 nt, Homo sapiens
  misc_RNA (1)...(19): siRNA sense strand
gaaagaguuuguccagaga

SEQ ID NO: 418509 - RNA, 19 nt, Homo sapiens
  misc_RNA (1)...(19): siRNA sense strand
gaagacacgccaacacuaa

SEQ ID NO: 418510 - RNA, 19 nt, Homo sapiens
  misc_RNA (1)...(19): siRNA sense strand
gaaggaacuugcagggauu

SEQ ID NO: 418511 - RNA, 19 nt, Homo sapiens
  misc_RNA (1)...(19): siRNA sense strand
gaagagaagcagcauaaug

SEQ ID NO: 418512 - RNA, 19 nt, Homo sapiens
  misc_RNA (1)...(19): siRNA sense strand
ucagagagcuucccaacau

SEQ ID NO: 418513 - RNA, 19 nt, Homo sapiens
  misc_RNA (1)...(19): siRNA sense strand
gaaagaaugugaaaagguu

SEQ ID NO: 418514 - RNA, 19 nt, Homo sapiens
  misc_RNA (1)...(19): siRNA sense strand
caacaaaguggucuacaaa

SEQ ID NO: 418515 - RNA, 19 nt, Homo sapiens
  misc_RNA (1)...(19): siRNA sense strand
gacuuucucuacaagauua

SEQ ID NO: 418516 - RNA, 19 nt, Homo sapiens
  misc_RNA (1)...(19): siRNA sense strand
agaacuagccuuugcuuua

SEQ ID NO: 418517 - RNA, 19 nt, Homo sapiens
  misc_RNA (1)...(19): siRNA sense strand
guacagcgaugaugucaag

SEQ ID NO: 418518 - RNA, 19 nt, Homo sapiens
  misc_RNA (1)...(19): siRNA sense strand
gaacaagggugccgaucag

SEQ ID NO: 418519 - RNA, 19 nt, Homo sapiens
  misc_RNA (1)...(19): siRNA sense strand
caacagaacuagccuuugc

SEQ ID NO: 418520 - RNA, 19 nt, Homo sapiens
  misc_RNA (1)...(19): siRNA sense strand
caacauagaagaaagaauc

SEQ ID NO: 418521 - RNA, 19 nt, Homo sapiens
  misc_RNA (1)...(19): siRNA sense strand
gcucuagacuuuguucgua

SEQ ID NO: 418522 - RNA, 19 nt, Homo sapiens
  misc_RNA (1)...(19): siRNA sense strand
cgacgucuucuucaaauua

SEQ ID NO: 418523 - RNA, 19 nt, Homo sapiens
  misc_RNA (1)...(19): siRNA sense strand
gagauguggucuugaguau

SEQ ID NO: 418524 - RNA, 19 nt, Homo sapiens
  misc_RNA (1)...(19): siRNA sense strand
guaagucccuagaugaaau

SEQ ID NO: 418525 - RNA, 19 nt, Homo sapiens
  misc_RNA (1)...(19): siRNA sense strand
gcuaaugcaucuggaguuu

SEQ ID NO: 418526 - RNA, 19 nt, Homo sapiens
  misc_RNA (1)...(19): siRNA sense strand
gaagaagaaagcagacauu

SEQ ID NO: 418527 - RNA, 19 nt, Homo sapiens
  misc_RNA (1)...(19): siRNA sense strand
uagagaggcugguugacua

SEQ ID NO: 418528 - RNA, 19 nt, Homo sapiens
  misc_RNA (1)...(19): siRNA sense strand
gaaaucggacaggaucuua

SEQ ID NO: 418529 - RNA, 19 nt, Homo sapiens
  misc_RNA (1)...(19): siRNA sense strand
caaagccugugacuauuau

SEQ ID NO: 418530 - RNA, 19 nt, Homo sapiens
  misc_RNA (1)...(19): siRNA sense strand
cgaauaacguuacuucaag

SEQ ID NO: 418531 - RNA, 19 nt, Homo sapiens
  misc_RNA (1)...(19): siRNA sense strand
gaaagcagacauuguguuc

SEQ ID NO: 418532 - RNA, 19 nt, Homo sapiens
  misc_RNA (1)...(19): siRNA sense strand
gggcucugcucuagacuuu

SEQ ID NO: 418533 - RNA, 19 nt, Homo sapiens
  misc_RNA (1)...(19): siRNA sense strand
gaggaaacaucggcacuug

SEQ ID NO: 418534 - RNA, 19 nt, Homo sapiens
  misc_RNA (1)...(19): siRNA sense strand
gaaauaguggacacaguuu

SEQ ID NO: 418535 - RNA, 19 nt, Homo sapiens
  misc_RNA (1)...(19): siRNA sense strand
gaucgaggauggagugcuu

SEQ ID NO: 418536 - RNA, 19 nt, Homo sapiens
  misc_RNA (1)...(19): siRNA sense strand
caaacgacgucuucuucaa

SEQ ID NO: 418537 - RNA, 19 nt, Homo sapiens
  misc_RNA (1)...(19): siRNA sense strand
gaaccugggcuaaauggaa

SEQ ID NO: 418538 - RNA, 19 nt, Homo sapiens
  misc_RNA (1)...(19): siRNA sense strand
cagagaugcucgagaaguu

SEQ ID NO: 418539 - RNA, 19 nt, Homo sapiens
  misc_RNA (1)...(19): siRNA sense strand
gaagaaagaaucaugaacu

SEQ ID NO: 418540 - RNA, 19 nt, Homo sapiens
  misc_RNA (1)...(19): siRNA sense strand
cagagucgcuucccaagau

SEQ ID NO: 418541 - RNA, 19 nt, Homo sapiens
  misc_RNA (1)...(19): siRNA sense strand
caacgaagccggugacuac

SEQ ID NO: 418542 - RNA, 19 nt, Homo sapiens
  misc_RNA (1)...(19): siRNA sense strand
ucacagacuuccuggagaa

SEQ ID NO: 418543 - RNA, 19 nt, Homo sapiens
  misc_RNA (1)...(19): siRNA sense strand
acggagaucuggcugauuu

SEQ ID NO: 418544 - RNA, 19 nt, Homo sapiens
  misc_RNA (1)...(19): siRNA sense strand
gaacagaaucagccagaug

SEQ ID NO: 418545 - RNA, 19 nt, Homo sapiens
  misc_RNA (1)...(19): siRNA sense strand
gcaaugcccuggaguacgu

SEQ ID NO: 418546 - RNA, 19 nt, Homo sapiens
  misc_RNA (1)...(19): siRNA sense strand
ucacagagaugcagaccau

SEQ ID NO: 418547 - RNA, 19 nt, Homo sapiens
  misc_RNA (1)...(19): siRNA sense strand
ucgaugagcucaaugugaa

SEQ ID NO: 418548 - RNA, 19 nt, Homo sapiens
  misc_RNA (1)...(19): siRNA sense strand
acaaagacggccacuguua

SEQ ID NO: 418549 - RNA, 19 nt, Homo sapiens
  misc_RNA (1)...(19): siRNA sense strand
ugacaacauugccgagaaa

SEQ ID NO: 418550 - RNA, 19 nt, Homo sapiens
  misc_RNA (1)...(19): siRNA sense strand
ccaagaggcagauuauuga

SEQ ID NO: 418551 - RNA, 19 nt, Homo sapiens
  misc_RNA (1)...(19): siRNA sense strand
ucuacaagauuaucgauga

SEQ ID NO: 418552 - RNA, 19 nt, Homo sapiens
  misc_RNA (1)...(19): siRNA sense strand
ggagagaggacccaaagga

SEQ ID NO: 418553 - RNA, 19 nt, Homo sapiens
  misc_RNA (1)...(19): siRNA sense strand
ggcgaggguuuauguauga

SEQ ID NO: 418554 - RNA, 19 nt, Homo sapiens
  misc_RNA (1)...(19): siRNA sense strand
ggaccaggcccgaguucua

SEQ ID NO: 418555 - RNA, 19 nt, Homo sapiens
  misc_RNA (1)...(19): siRNA sense strand
caaguaaauguuccgaaua

SEQ ID NO: 418556 - RNA, 19 nt, Homo sapiens
  misc_RNA (1)...(19): siRNA sense strand
cagagaggcugugcucaaa

SEQ ID NO: 418557 - RNA, 19 nt, Homo sapiens
  misc_RNA (1)...(19): siRNA sense strand
ggagaaagaggagauguug

SEQ ID NO: 418558 - RNA, 19 nt, Homo sapiens
  misc_RNA (1)...(19): siRNA sense strand
gguggaggccuuugacuuu

SEQ ID NO: 418559 - RNA, 19 nt, Homo sapiens
  misc_RNA (1)...(19): siRNA sense strand
ggaagacacgccaacacua

SEQ ID NO: 418560 - RNA, 19 nt, Homo sapiens
  misc_RNA (1)...(19): siRNA sense strand
ucaacaaaguggucuacaa

SEQ ID NO: 418561 - RNA, 19 nt, Homo sapiens
  misc_RNA (1)...(19): siRNA sense strand
ggaaguuucaguacaaaga

SEQ ID NO: 418562 - RNA, 19 nt, Homo sapiens
  misc_RNA (1)...(19): siRNA sense strand
ccacaaagacggccacugu

SEQ ID NO: 418563 - RNA, 19 nt, Homo sapiens
  misc_RNA (1)...(19): siRNA sense strand
ggaaacagugugauugguu

SEQ ID NO: 418564 - RNA, 19 nt, Homo sapiens
  misc_RNA (1)...(19): siRNA sense strand
cauagagaaugucuuugaa

SEQ ID NO: 418565 - RNA, 19 nt, Homo sapiens
  misc_RNA (1)...(19): siRNA sense strand
gauaggagaacaaggcauu

SEQ ID NO: 418566 - RNA, 19 nt, Homo sapiens
  misc_RNA (1)...(19): siRNA sense strand
aagaggagauguugggauu

SEQ ID NO: 418567 - RNA, 19 nt, Homo sapiens
  misc_RNA (1)...(19): siRNA sense strand
gacauucuguuccucuuug

SEQ ID NO: 418568 - RNA, 19 nt, Homo sapiens
  misc_RNA (1)...(19): siRNA sense strand
uaaaugcccuugcuguuac

SEQ ID NO: 418569 - RNA, 19 nt, Homo sapiens
  misc_RNA (1)...(19): siRNA sense strand
gauaaaugcccuugcuguu

SEQ ID NO: 418570 - RNA, 19 nt, Homo sapiens
  misc_RNA (1)...(19): siRNA sense strand
ggaaagauagcguccaaca

SEQ ID NO: 418571 - RNA, 19 nt, Homo sapiens
  misc_RNA (1)...(19): siRNA sense strand
cagagagcuucccaacaua

SEQ ID NO: 418572 - RNA, 19 nt, Homo sapiens
  misc_RNA (1)...(19): siRNA sense strand
gaagagggcgucccacagu

SEQ ID NO: 418573 - RNA, 19 nt, Homo sapiens
  misc_RNA (1)...(19): siRNA sense strand
caucaacgcuuugcagauc

SEQ ID NO: 418574 - RNA, 19 nt, Homo sapiens
  misc_RNA (1)...(19): siRNA sense strand
gaaaggagaaagaggagau

SEQ ID NO: 418575 - RNA, 19 nt, Homo sapiens
  misc_RNA (1)...(19): siRNA sense strand
ggugguaagucccuagaug

SEQ ID NO: 418576 - RNA, 19 nt, Homo sapiens
  misc_RNA (1)...(19): siRNA sense strand
acaaguaaauguuccgaau

SEQ ID NO: 418577 - RNA, 19 nt, Homo sapiens
  misc_RNA (1)...(19): siRNA sense strand
gaugcgagauguggucuug

SEQ ID NO: 418578 - RNA, 19 nt, Homo sapiens
  misc_RNA (1)...(19): siRNA sense strand
uccaaagcaucaaagauaa

SEQ ID NO: 418579 - RNA, 19 nt, Homo sapiens
  misc_RNA (1)...(19): siRNA sense strand
gggcgaggguuuauguaug

SEQ ID NO: 418580 - RNA, 19 nt, Homo sapiens
  misc_RNA (1)...(19): siRNA sense strand
ugaagagaaugaagaucaa

SEQ ID NO: 418581 - RNA, 19 nt, Homo sapiens
  misc_RNA (1)...(19): siRNA sense strand
ccacggaaguuucaguaca

SEQ ID NO: 418582 - RNA, 19 nt, Homo sapiens
  misc_RNA (1)...(19): siRNA sense strand
acaaagccugugacuauua

SEQ ID NO: 418583 - RNA, 19 nt, Homo sapiens
  misc_RNA (1)...(19): siRNA sense strand
ccaccacccuguuccaguu

SEQ ID NO: 418584 - RNA, 19 nt, Homo sapiens
  misc_RNA (1)...(19): siRNA sense strand
gagaggacccaaaggagaa

SEQ ID NO: 418585 - RNA, 19 nt, Homo sapiens
  misc_RNA (1)...(19): siRNA sense strand
gguggaagaugcacaggau

SEQ ID NO: 418586 - RNA, 19 nt, Homo sapiens
  misc_RNA (1)...(19): siRNA sense strand
gaagggcgaaguaggagaa

SEQ ID NO: 418587 - RNA, 19 nt, Homo sapiens
  misc_RNA (1)...(19): siRNA sense strand
aaagaaccuugugaaguuu

SEQ ID NO: 418588 - RNA, 19 nt, Homo sapiens
  misc_RNA (1)...(19): siRNA sense strand
gcucugcucuagacuuugu

SEQ ID NO: 418589 - RNA, 19 nt, Homo sapiens
  misc_RNA (1)...(19): siRNA sense strand
ccauagagaaugucuuuga

SEQ ID NO: 418590 - RNA, 19 nt, Homo sapiens
  misc_RNA (1)...(19): siRNA sense strand
gcagggaaccagggccuua

SEQ ID NO: 418591 - RNA, 19 nt, Homo sapiens
  misc_RNA (1)...(19): siRNA sense strand
cgacauggcuuucaucuua

SEQ ID NO: 418592 - RNA, 19 nt, Homo sapiens
  misc_RNA (1)...(19): siRNA sense strand
caaagaaccuugugaaguu

SEQ ID NO: 418593 - RNA, 19 nt, Homo sapiens
  misc_RNA (1)...(19): siRNA sense strand
ggacuuggauuaugaacua

SEQ ID NO: 418594 - RNA, 19 nt, Homo sapiens
  misc_RNA (1)...(19): siRNA sense strand
ucaaugagaugaagaagua

SEQ ID NO: 418595 - RNA, 19 nt, Homo sapiens
  misc_RNA (1)...(19): siRNA sense strand
caacaaagccugugacuau

SEQ ID NO: 418596 - RNA, 19 nt, Homo sapiens
  misc_RNA (1)...(19): siRNA sense strand
ggagagaccucacagacuu

SEQ ID NO: 418597 - RNA, 19 nt, Homo sapiens
  misc_RNA (1)...(19): siRNA sense strand
ggacacaguuuaugaagau

SEQ ID NO: 418598 - RNA, 19 nt, Homo sapiens
  misc_RNA (1)...(19): siRNA sense strand
ggaggagguuggaaagaua

SEQ ID NO: 418599 - RNA, 19 nt, Homo sapiens
  misc_RNA (1)...(19): siRNA sense strand
gauguggucuugaguauug

SEQ ID NO: 418600 - RNA, 19 nt, Homo sapiens
  misc_RNA (1)...(19): siRNA sense strand
gaaagggaauccuggaaga

SEQ ID NO: 418601 - RNA, 19 nt, Homo sapiens
  misc_RNA (1)...(19): siRNA sense strand
gaacggcacucaagguuuc

SEQ ID NO: 418602 - RNA, 19 nt, Homo sapiens
  misc_RNA (1)...(19): siRNA sense strand
gcagggauuucauauuaaa

SEQ ID NO: 418603 - RNA, 19 nt, Homo sapiens
  misc_RNA (1)...(19): siRNA sense strand
gaauugcgguggcucagua

SEQ ID NO: 418604 - RNA, 19 nt, Homo sapiens
  misc_RNA (1)...(19): siRNA sense strand
gaagaaagcagacauugug

SEQ ID NO: 418605 - RNA, 19 nt, Homo sapiens
  misc_RNA (1)...(19): siRNA sense strand
uugcagggauuucauauua

SEQ ID NO: 418606 - RNA, 19 nt, Homo sapiens
  misc_RNA (1)...(19): siRNA sense strand
gaacuagccuuugcuuuag

SEQ ID NO: 418607 - RNA, 19 nt, Homo sapiens
  misc_RNA (1)...(19): siRNA sense strand
gcaggaaggugaacaucaa

SEQ ID NO: 418608 - RNA, 19 nt, Homo sapiens
  misc_RNA (1)...(19): siRNA sense strand
gaaagaguuuguccagaga

SEQ ID NO: 418609 - RNA, 19 nt, Homo sapiens
  misc_RNA (1)...(19): siRNA sense strand
gaagacacgccaacacuaa

SEQ ID NO: 418610 - RNA, 19 nt, Homo sapiens
  misc_RNA (1)...(19): siRNA sense strand
gaaggaacuugcagggauu

SEQ ID NO: 418611 - RNA, 19 nt, Homo sapiens
  misc_RNA (1)...(19): siRNA sense strand
gaagagaagcagcauaaug

SEQ ID NO: 418612 - RNA, 19 nt, Homo sapiens
  misc_RNA (1)...(19): siRNA sense strand
ucagagagcuucccaacau

SEQ ID NO: 418613 - RNA, 19 nt, Homo sapiens
  misc_RNA (1)...(19): siRNA sense strand
gaaagaaugugaaaagguu

SEQ ID NO: 418614 - RNA, 19 nt, Homo sapiens
  misc_RNA (1)...(19): siRNA sense strand
caacaaaguggucuacaaa

SEQ ID NO: 418615 - RNA, 19 nt, Homo sapiens
  misc_RNA (1)...(19): siRNA sense strand
gacuuucucuacaagauua

SEQ ID NO: 418616 - RNA, 19 nt, Homo sapiens
  misc_RNA (1)...(19): siRNA sense strand
agaacuagccuuugcuuua

SEQ ID NO: 418617 - RNA, 19 nt, Homo sapiens
  misc_RNA (1)...(19): siRNA sense strand
guacagcgaugaugucaag

SEQ ID NO: 418618 - RNA, 19 nt, Homo sapiens
  misc_RNA (1)...(19): siRNA sense strand
gaacaagggugccgaucag

SEQ ID NO: 418619 - RNA, 19 nt, Homo sapiens
  misc_RNA (1)...(19): siRNA sense strand
caacagaacuagccuuugc

SEQ ID NO: 418620 - RNA, 19 nt, Homo sapiens
  misc_RNA (1)...(19): siRNA sense strand
caacauagaagaaagaauc

SEQ ID NO: 418621 - RNA, 19 nt, Homo sapiens
  misc_RNA (1)...(19): siRNA sense strand
gcucuagacuuuguucgua

SEQ ID NO: 418622 - RNA, 19 nt, Homo sapiens
  misc_RNA (1)...(19): siRNA sense strand
cgacgucuucuucaaauua

SEQ ID NO: 418623 - RNA, 19 nt, Homo sapiens
  misc_RNA (1)...(19): siRNA sense strand
gagauguggucuugaguau

SEQ ID NO: 418624 - RNA, 19 nt, Homo sapiens
  misc_RNA (1)...(19): siRNA sense strand
guaagucccuagaugaaau

SEQ ID NO: 418625 - RNA, 19 nt, Homo sapiens
  misc_RNA (1)...(19): siRNA sense strand
gcuaaugcaucuggaguuu

SEQ ID NO: 418626 - RNA, 19 nt, Homo sapiens
  misc_RNA (1)...(19): siRNA sense strand
gaagaagaaagcagacauu

SEQ ID NO: 418627 - RNA, 19 nt, Homo sapiens
  misc_RNA (1)...(19): siRNA sense strand
uagagaggcugguugacua

SEQ ID NO: 418628 - RNA, 19 nt, Homo sapiens
  misc_RNA (1)...(19): siRNA sense strand
gaaaucggacaggaucuua

SEQ ID NO: 418629 - RNA, 19 nt, Homo sapiens
  misc_RNA (1)...(19): siRNA sense strand
caaagccugugacuauuau

SEQ ID NO: 418630 - RNA, 19 nt, Homo sapiens
  misc_RNA (1)...(19): siRNA sense strand
cgaauaacguuacuucaag

SEQ ID NO: 418631 - RNA, 19 nt, Homo sapiens
  misc_RNA (1)...(19): siRNA sense strand
gaaagcagacauuguguuc

SEQ ID NO: 418632 - RNA, 19 nt, Homo sapiens
  misc_RNA (1)...(19): siRNA sense strand
gggcucugcucuagacuuu

SEQ ID NO: 418633 - RNA, 19 nt, Homo sapiens
  misc_RNA (1)...(19): siRNA sense strand
gaggaaacaucggcacuug

SEQ ID NO: 418634 - RNA, 19 nt, Homo sapiens
  misc_RNA (1)...(19): siRNA sense strand
gaaauaguggacacaguuu

SEQ ID NO: 418635 - RNA, 19 nt, Homo sapiens
  misc_RNA (1)...(19): siRNA sense strand
gaucgaggauggagugcuu

SEQ ID NO: 418636 - RNA, 19 nt, Homo sapiens
  misc_RNA (1)...(19): siRNA sense strand
caaacgacgucuucuucaa

SEQ ID NO: 418637 - RNA, 19 nt, Homo sapiens
  misc_RNA (1)...(19): siRNA sense strand
gaaccugggcuaaauggaa

SEQ ID NO: 418638 - RNA, 19 nt, Homo sapiens
  misc_RNA (1)...(19): siRNA sense strand
cagagaugcucgagaaguu

SEQ ID NO: 418639 - RNA, 19 nt, Homo sapiens
  misc_RNA (1)...(19): siRNA sense strand
gaagaaagaaucaugaacu

SEQ ID NO: 418640 - RNA, 19 nt, Homo sapiens
  misc_RNA (1)...(19): siRNA sense strand
cagagucgcuucccaagau

SEQ ID NO: 418641 - RNA, 19 nt, Homo sapiens
  misc_RNA (1)...(19): siRNA sense strand
caacgaagccggugacuac

SEQ ID NO: 418642 - RNA, 19 nt, Homo sapiens
  misc_RNA (1)...(19): siRNA sense strand
ucacagacuuccuggagaa

SEQ ID NO: 418643 - RNA, 19 nt, Homo sapiens
  misc_RNA (1)...(19): siRNA sense strand
acggagaucuggcugauuu

SEQ ID NO: 418644 - RNA, 19 nt, Homo sapiens
  misc_RNA (1)...(19): siRNA sense strand
gaacagaaucagccagaug

SEQ ID NO: 418645 - RNA, 19 nt, Homo sapiens
  misc_RNA (1)...(19): siRNA sense strand
gcaaugcccuggaguacgu

SEQ ID NO: 418646 - RNA, 19 nt, Homo sapiens
  misc_RNA (1)...(19): siRNA sense strand
ucacagagaugcagaccau

SEQ ID NO: 418647 - RNA, 19 nt, Homo sapiens
  misc_RNA (1)...(19): siRNA sense strand
ucgaugagcucaaugugaa

SEQ ID NO: 418648 - RNA, 19 nt, Homo sapiens
  misc_RNA (1)...(19): siRNA sense strand
acaaagacggccacuguua

SEQ ID NO: 418649 - RNA, 19 nt, Homo sapiens
  misc_RNA (1)...(19): siRNA sense strand
ugacaacauugccgagaaa

SEQ ID NO: 418650 - RNA, 19 nt, Homo sapiens
  misc_RNA (1)...(19): siRNA sense strand
ccaagaggcagauuauuga

SEQ ID NO: 418651 - RNA, 19 nt, Homo sapiens
  misc_RNA (1)...(19): siRNA sense strand
ucuacaagauuaucgauga

SEQ ID NO: 418652 - RNA, 19 nt, Homo sapiens
  misc_RNA (1)...(19): siRNA sense strand
ggagagaggacccaaagga

SEQ ID NO: 418653 - RNA, 19 nt, Homo sapiens
  misc_RNA (1)...(19): siRNA sense strand
ggcgaggguuuauguauga

SEQ ID NO: 418654 - RNA, 19 nt, Homo sapiens
  misc_RNA (1)...(19): siRNA sense strand
ggaccaggcccgaguucua

SEQ ID NO: 418655 - RNA, 19 nt, Homo sapiens
  misc_RNA (1)...(19): siRNA sense strand
caaguaaauguuccgaaua

SEQ ID NO: 418656 - RNA, 19 nt, Homo sapiens
  misc_RNA (1)...(19): siRNA sense strand
cagagaggcugugcucaaa

SEQ ID NO: 418657 - RNA, 19 nt, Homo sapiens
  misc_RNA (1)...(19): siRNA sense strand
ggagaaagaggagauguug

SEQ ID NO: 418658 - RNA, 19 nt, Homo sapiens
  misc_RNA (1)...(19): siRNA sense strand
gguggaggccuuugacuuu

SEQ ID NO: 418659 - RNA, 19 nt, Homo sapiens
  misc_RNA (1)...(19): siRNA sense strand
ggaagacacgccaacacua

SEQ ID NO: 418660 - RNA, 19 nt, Homo sapiens
  misc_RNA (1)...(19): siRNA sense strand
ucaacaaaguggucuacaa

SEQ ID NO: 418661 - RNA, 19 nt, Homo sapiens
  misc_RNA (1)...(19): siRNA sense strand
ggaaguuucaguacaaaga

SEQ ID NO: 418662 - RNA, 19 nt, Homo sapiens
  misc_RNA (1)...(19): siRNA sense strand
ccacaaagacggccacugu

SEQ ID NO: 418663 - RNA, 19 nt, Homo sapiens
  misc_RNA (1)...(19): siRNA sense strand
ggaaacagugugauugguu

SEQ ID NO: 418664 - RNA, 19 nt, Homo sapiens
  misc_RNA (1)...(19): siRNA sense strand
cauagagaaugucuuugaa

SEQ ID NO: 418665 - RNA, 19 nt, Homo sapiens
  misc_RNA (1)...(19): siRNA sense strand
gauaggagaacaaggcauu

SEQ ID NO: 418666 - RNA, 19 nt, Homo sapiens
  misc_RNA (1)...(19): siRNA sense strand
aagaggagauguugggauu

SEQ ID NO: 418667 - RNA, 19 nt, Homo sapiens
  misc_RNA (1)...(19): siRNA sense strand
gacauucuguuccucuuug

SEQ ID NO: 418668 - RNA, 19 nt, Homo sapiens
  misc_RNA (1)...(19): siRNA sense strand
uaaaugcccuugcuguuac

SEQ ID NO: 418669 - RNA, 19 nt, Homo sapiens
  misc_RNA (1)...(19): siRNA sense strand
gauaaaugcccuugcuguu

SEQ ID NO: 418670 - RNA, 19 nt, Homo sapiens
  misc_RNA (1)...(19): siRNA sense strand
ggaaagauagcguccaaca

SEQ ID NO: 418671 - RNA, 19 nt, Homo sapiens
  misc_RNA (1)...(19): siRNA sense strand
cagagagcuucccaacaua

SEQ ID NO: 418672 - RNA, 19 nt, Homo sapiens
  misc_RNA (1)...(19): siRNA sense strand
gaagagggcgucccacagu

SEQ ID NO: 418673 - RNA, 19 nt, Homo sapiens
  misc_RNA (1)...(19): siRNA sense strand
caucaacgcuuugcagauc

SEQ ID NO: 418674 - RNA, 19 nt, Homo sapiens
  misc_RNA (1)...(19): siRNA sense strand
gaaaggagaaagaggagau

SEQ ID NO: 418675 - RNA, 19 nt, Homo sapiens
  misc_RNA (1)...(19): siRNA sense strand
ggugguaagucccuagaug

SEQ ID NO: 418676 - RNA, 19 nt, Homo sapiens
  misc_RNA (1)...(19): siRNA sense strand
acaaguaaauguuccgaau

SEQ ID NO: 418677 - RNA, 19 nt, Homo sapiens
  misc_RNA (1)...(19): siRNA sense strand
gaugcgagauguggucuug

SEQ ID NO: 418678 - RNA, 19 nt, Homo sapiens
  misc_RNA (1)...(19): siRNA sense strand
uccaaagcaucaaagauaa

SEQ ID NO: 418679 - RNA, 19 nt, Homo sapiens
  misc_RNA (1)...(19): siRNA sense strand
gggcgaggguuuauguaug

SEQ ID NO: 418680 - RNA, 19 nt, Homo sapiens
  misc_RNA (1)...(19): siRNA sense strand
ugaagagaaugaagaucaa

SEQ ID NO: 418681 - RNA, 19 nt, Homo sapiens
  misc_RNA (1)...(19): siRNA sense strand
ccacggaaguuucaguaca

SEQ ID NO: 418682 - RNA, 19 nt, Homo sapiens
  misc_RNA (1)...(19): siRNA sense strand
acaaagccugugacuauua

SEQ ID NO: 418683 - RNA, 19 nt, Homo sapiens
  misc_RNA (1)...(19): siRNA sense strand
ccaccacccuguuccaguu

SEQ ID NO: 418684 - RNA, 19 nt, Homo sapiens
  misc_RNA (1)...(19): siRNA sense strand
gagaggacccaaaggagaa

SEQ ID NO: 418685 - RNA, 19 nt, Homo sapiens
  misc_RNA (1)...(19): siRNA sense strand
gguggaagaugcacaggau

SEQ ID NO: 418686 - RNA, 19 nt, Homo sapiens
  misc_RNA (1)...(19): siRNA sense strand
gaagggcgaaguaggagaa

SEQ ID NO: 418687 - RNA, 19 nt, Homo sapiens
  misc_RNA (1)...(19): siRNA sense strand
aaagaaccuugugaaguuu

SEQ ID NO: 418688 - RNA, 19 nt, Homo sapiens
  misc_RNA (1)...(19): siRNA sense strand
gcucugcucuagacuuugu

SEQ ID NO: 418689 - RNA, 19 nt, Homo sapiens
  misc_RNA (1)...(19): siRNA sense strand
ccauagagaaugucuuuga

SEQ ID NO: 418690 - RNA, 19 nt, Homo sapiens
  misc_RNA (1)...(19): siRNA sense strand
gcagggaaccagggccuua

SEQ ID NO: 418691 - RNA, 19 nt, Homo sapiens
  misc_RNA (1)...(19): siRNA sense strand
cgacauggcuuucaucuua

SEQ ID NO: 418692 - RNA, 19 nt, Homo sapiens
  misc_RNA (1)...(19): siRNA sense strand
caaagaaccuugugaaguu

SEQ ID NO: 418693 - RNA, 19 nt, Homo sapiens
  misc_RNA (1)...(19): siRNA sense strand
ggacuuggauuaugaacua

SEQ ID NO: 418694 - RNA, 19 nt, Homo sapiens
  misc_RNA (1)...(19): siRNA sense strand
ucaaugagaugaagaagua

SEQ ID NO: 418695 - RNA, 19 nt, Homo sapiens
  misc_RNA (1)...(19): siRNA sense strand
caacaaagccugugacuau

SEQ ID NO: 418696 - RNA, 19 nt, Homo sapiens
  misc_RNA (1)...(19): siRNA sense strand
ggagagaccucacagacuu

SEQ ID NO: 418697 - RNA, 19 nt, Homo sapiens
  misc_RNA (1)...(19): siRNA sense strand
ggacacaguuuaugaagau

SEQ ID NO: 418698 - RNA, 19 nt, Homo sapiens
  misc_RNA (1)...(19): siRNA sense strand
ggaggagguuggaaagaua

SEQ ID NO: 418699 - RNA, 19 nt, Homo sapiens
  misc_RNA (1)...(19): siRNA sense strand
gauguggucuugaguauug

SEQ ID NO: 418700 - RNA, 19 nt, Homo sapiens
  misc_RNA (1)...(19): siRNA sense strand
gaaagggaauccuggaaga

SEQ ID NO: 418701 - RNA, 19 nt, Homo sapiens
  misc_RNA (1)...(19): siRNA sense strand
gaacggcacucaagguuuc

SEQ ID NO: 418702 - RNA, 19 nt, Homo sapiens
  misc_RNA (1)...(19): siRNA sense strand
gcagggauuucauauuaaa

SEQ ID NO: 418703 - RNA, 19 nt, Homo sapiens
  misc_RNA (1)...(19): siRNA sense strand
gaauugcgguggcucagua

SEQ ID NO: 418704 - RNA, 19 nt, Homo sapiens
  misc_RNA (1)...(19): siRNA sense strand
gaagaaagcagacauugug

SEQ ID NO: 418705 - RNA, 19 nt, Homo sapiens
  misc_RNA (1)...(19): siRNA sense strand
uugcagggauuucauauua

SEQ ID NO: 418706 - RNA, 19 nt, Homo sapiens
  misc_RNA (1)...(19): siRNA sense strand
gaacuagccuuugcuuuag

SEQ ID NO: 418707 - RNA, 19 nt, Homo sapiens
  misc_RNA (1)...(19): siRNA sense strand
gcaggaaggugaacaucaa

SEQ ID NO: 418708 - RNA, 19 nt, Homo sapiens
  misc_RNA (1)...(19): siRNA sense strand
gaaagaguuuguccagaga

SEQ ID NO: 418709 - RNA, 19 nt, Homo sapiens
  misc_RNA (1)...(19): siRNA sense strand
gaagacacgccaacacuaa

SEQ ID NO: 418710 - RNA, 19 nt, Homo sapiens
  misc_RNA (1)...(19): siRNA sense strand
gaaggaacuugcagggauu

SEQ ID NO: 418711 - RNA, 19 nt, Homo sapiens
  misc_RNA (1)...(19): siRNA sense strand
gaagagaagcagcauaaug

SEQ ID NO: 418712 - RNA, 19 nt, Homo sapiens
  misc_RNA (1)...(19): siRNA sense strand
ucagagagcuucccaacau

SEQ ID NO: 418713 - RNA, 19 nt, Homo sapiens
  misc_RNA (1)...(19): siRNA sense strand
gaaagaaugugaaaagguu

SEQ ID NO: 418714 - RNA, 19 nt, Homo sapiens
  misc_RNA (1)...(19): siRNA sense strand
caacaaaguggucuacaaa

SEQ ID NO: 418715 - RNA, 19 nt, Homo sapiens
  misc_RNA (1)...(19): siRNA sense strand
gacuuucucuacaagauua

SEQ ID NO: 418716 - RNA, 19 nt, Homo sapiens
  misc_RNA (1)...(19): siRNA sense strand
agaacuagccuuugcuuua

SEQ ID NO: 418717 - RNA, 19 nt, Homo sapiens
  misc_RNA (1)...(19): siRNA sense strand
guacagcgaugaugucaag

SEQ ID NO: 418718 - RNA, 19 nt, Homo sapiens
  misc_RNA (1)...(19): siRNA sense strand
gaacaagggugccgaucag

SEQ ID NO: 418719 - RNA, 19 nt, Homo sapiens
  misc_RNA (1)...(19): siRNA sense strand
caacagaacuagccuuugc

SEQ ID NO: 418720 - RNA, 19 nt, Homo sapiens
  misc_RNA (1)...(19): siRNA sense strand
caacauagaagaaagaauc

SEQ ID NO: 418721 - RNA, 19 nt, Homo sapiens
  misc_RNA (1)...(19): siRNA sense strand
gcucuagacuuuguucgua

SEQ ID NO: 418722 - RNA, 19 nt, Homo sapiens
  misc_RNA (1)...(19): siRNA sense strand
cgacgucuucuucaaauua

SEQ ID NO: 418723 - RNA, 19 nt, Homo sapiens
  misc_RNA (1)...(19): siRNA sense strand
gagauguggucuugaguau

SEQ ID NO: 418724 - RNA, 19 nt, Homo sapiens
  misc_RNA (1)...(19): siRNA sense strand
guaagucccuagaugaaau

SEQ ID NO: 418725 - RNA, 19 nt, Homo sapiens
  misc_RNA (1)...(19): siRNA sense strand
gcuaaugcaucuggaguuu

SEQ ID NO: 418726 - RNA, 19 nt, Homo sapiens
  misc_RNA (1)...(19): siRNA sense strand
gaagaagaaagcagacauu

SEQ ID NO: 418727 - RNA, 19 nt, Homo sapiens
  misc_RNA (1)...(19): siRNA sense strand
uagagaggcugguugacua

SEQ ID NO: 418728 - RNA, 19 nt, Homo sapiens
  misc_RNA (1)...(19): siRNA sense strand
gaaaucggacaggaucuua

SEQ ID NO: 418729 - RNA, 19 nt, Homo sapiens
  misc_RNA (1)...(19): siRNA sense strand
caaagccugugacuauuau

SEQ ID NO: 418730 - RNA, 19 nt, Homo sapiens
  misc_RNA (1)...(19): siRNA sense strand
cgaauaacguuacuucaag

SEQ ID NO: 418731 - RNA, 19 nt, Homo sapiens
  misc_RNA (1)...(19): siRNA sense strand
gaaagcagacauuguguuc

SEQ ID NO: 418732 - RNA, 19 nt, Homo sapiens
  misc_RNA (1)...(19): siRNA sense strand
gggcucugcucuagacuuu

SEQ ID NO: 418733 - RNA, 19 nt, Homo sapiens
  misc_RNA (1)...(19): siRNA sense strand
gaggaaacaucggcacuug

SEQ ID NO: 418734 - RNA, 19 nt, Homo sapiens
  misc_RNA (1)...(19): siRNA sense strand
gaaauaguggacacaguuu

SEQ ID NO: 418735 - RNA, 19 nt, Homo sapiens
  misc_RNA (1)...(19): siRNA sense strand
gaucgaggauggagugcuu

SEQ ID NO: 418736 - RNA, 19 nt, Homo sapiens
  misc_RNA (1)...(19): siRNA sense strand
caaacgacgucuucuucaa

SEQ ID NO: 418737 - RNA, 19 nt, Homo sapiens
  misc_RNA (1)...(19): siRNA sense strand
gaaccugggcuaaauggaa

SEQ ID NO: 418738 - RNA, 19 nt, Homo sapiens
  misc_RNA (1)...(19): siRNA sense strand
cagagaugcucgagaaguu

SEQ ID NO: 418739 - RNA, 19 nt, Homo sapiens
  misc_RNA (1)...(19): siRNA sense strand
gaagaaagaaucaugaacu

SEQ ID NO: 418740 - RNA, 19 nt, Homo sapiens
  misc_RNA (1)...(19): siRNA sense strand
cagagucgcuucccaagau

SEQ ID NO: 418741 - RNA, 19 nt, Homo sapiens
  misc_RNA (1)...(19): siRNA sense strand
caacgaagccggugacuac

SEQ ID NO: 418742 - RNA, 19 nt, Homo sapiens
  misc_RNA (1)...(19): siRNA sense strand
ucacagacuuccuggagaa

SEQ ID NO: 418743 - RNA, 19 nt, Homo sapiens
  misc_RNA (1)...(19): siRNA sense strand
acggagaucuggcugauuu

SEQ ID NO: 418744 - RNA, 19 nt, Homo sapiens
  misc_RNA (1)...(19): siRNA sense strand
gaacagaaucagccagaug

SEQ ID NO: 418745 - RNA, 19 nt, Homo sapiens
  misc_RNA (1)...(19): siRNA sense strand
gcaaugcccuggaguacgu

SEQ ID NO: 418746 - RNA, 19 nt, Homo sapiens
  misc_RNA (1)...(19): siRNA sense strand
ucacagagaugcagaccau

SEQ ID NO: 418747 - RNA, 19 nt, Homo sapiens
  misc_RNA (1)...(19): siRNA sense strand
ucgaugagcucaaugugaa

SEQ ID NO: 418748 - RNA, 19 nt, Homo sapiens
  misc_RNA (1)...(19): siRNA sense strand
acaaagacggccacuguua

SEQ ID NO: 418749 - RNA, 19 nt, Homo sapiens
  misc_RNA (1)...(19): siRNA sense strand
ugacaacauugccgagaaa

SEQ ID NO: 418750 - RNA, 19 nt, Homo sapiens
  misc_RNA (1)...(19): siRNA sense strand
ccaagaggcagauuauuga

SEQ ID NO: 418751 - RNA, 19 nt, Homo sapiens
  misc_RNA (1)...(19): siRNA sense strand
ucuacaagauuaucgauga

SEQ ID NO: 418752 - RNA, 19 nt, Homo sapiens
  misc_RNA (1)...(19): siRNA sense strand
ggagagaggacccaaagga

SEQ ID NO: 418753 - RNA, 19 nt, Homo sapiens
  misc_RNA (1)...(19): siRNA sense strand
ggcgaggguuuauguauga

SEQ ID NO: 418754 - RNA, 19 nt, Homo sapiens
  misc_RNA (1)...(19): siRNA sense strand
ggaccaggcccgaguucua

SEQ ID NO: 418755 - RNA, 19 nt, Homo sapiens
  misc_RNA (1)...(19): siRNA sense strand
caaguaaauguuccgaaua

SEQ ID NO: 418756 - RNA, 19 nt, Homo sapiens
  misc_RNA (1)...(19): siRNA sense strand
cagagaggcugugcucaaa

SEQ ID NO: 418757 - RNA, 19 nt, Homo sapiens
  misc_RNA (1)...(19): siRNA sense strand
ggagaaagaggagauguug

SEQ ID NO: 418758 - RNA, 19 nt, Homo sapiens
  misc_RNA (1)...(19): siRNA sense strand
gguggaggccuuugacuuu

SEQ ID NO: 418759 - RNA, 19 nt, Homo sapiens
  misc_RNA (1)...(19): siRNA sense strand
ggaagacacgccaacacua

SEQ ID NO: 418760 - RNA, 19 nt, Homo sapiens
  misc_RNA (1)...(19): siRNA sense strand
ucaacaaaguggucuacaa

SEQ ID NO: 418761 - RNA, 19 nt, Homo sapiens
  misc_RNA (1)...(19): siRNA sense strand
ggaaguuucaguacaaaga

SEQ ID NO: 418762 - RNA, 19 nt, Homo sapiens
  misc_RNA (1)...(19): siRNA sense strand
ccacaaagacggccacugu

SEQ ID NO: 418763 - RNA, 19 nt, Homo sapiens
  misc_RNA (1)...(19): siRNA sense strand
ggaaacagugugauugguu

SEQ ID NO: 418764 - RNA, 19 nt, Homo sapiens
  misc_RNA (1)...(19): siRNA sense strand
cauagagaaugucuuugaa

SEQ ID NO: 418765 - RNA, 19 nt, Homo sapiens
  misc_RNA (1)...(19): siRNA sense strand
gauaggagaacaaggcauu

SEQ ID NO: 418766 - RNA, 19 nt, Homo sapiens
  misc_RNA (1)...(19): siRNA sense strand
aagaggagauguugggauu

SEQ ID NO: 418767 - RNA, 19 nt, Homo sapiens
  misc_RNA (1)...(19): siRNA sense strand
gacauucuguuccucuuug

SEQ ID NO: 418768 - RNA, 19 nt, Homo sapiens
  misc_RNA (1)...(19): siRNA sense strand
uaaaugcccuugcuguuac

SEQ ID NO: 418769 - RNA, 19 nt, Homo sapiens
  misc_RNA (1)...(19): siRNA sense strand
gauaaaugcccuugcuguu

SEQ ID NO: 418770 - RNA, 19 nt, Homo sapiens
  misc_RNA (1)...(19): siRNA sense strand
ggaaagauagcguccaaca

SEQ ID NO: 418771 - RNA, 19 nt, Homo sapiens
  misc_RNA (1)...(19): siRNA sense strand
cagagagcuucccaacaua

SEQ ID NO: 418772 - RNA, 19 nt, Homo sapiens
  misc_RNA (1)...(19): siRNA sense strand
gaagagggcgucccacagu

SEQ ID NO: 418773 - RNA, 19 nt, Homo sapiens
  misc_RNA (1)...(19): siRNA sense strand
caucaacgcuuugcagauc

SEQ ID NO: 418774 - RNA, 19 nt, Homo sapiens
  misc_RNA (1)...(19): siRNA sense strand
gaaaggagaaagaggagau

SEQ ID NO: 418775 - RNA, 19 nt, Homo sapiens
  misc_RNA (1)...(19): siRNA sense strand
ggugguaagucccuagaug

SEQ ID NO: 418776 - RNA, 19 nt, Homo sapiens
  misc_RNA (1)...(19): siRNA sense strand
acaaguaaauguuccgaau

SEQ ID NO: 418777 - RNA, 19 nt, Homo sapiens
  misc_RNA (1)...(19): siRNA sense strand
gaugcgagauguggucuug

SEQ ID NO: 418778 - RNA, 19 nt, Homo sapiens
  misc_RNA (1)...(19): siRNA sense strand
uccaaagcaucaaagauaa

SEQ ID NO: 418779 - RNA, 19 nt, Homo sapiens
  misc_RNA (1)...(19): siRNA sense strand
gggcgaggguuuauguaug

SEQ ID NO: 418780 - RNA, 19 nt, Homo sapiens
  misc_RNA (1)...(19): siRNA sense strand
ugaagagaaugaagaucaa

SEQ ID NO: 418781 - RNA, 19 nt, Homo sapiens
  misc_RNA (1)...(19): siRNA sense strand
ccacggaaguuucaguaca

SEQ ID NO: 418782 - RNA, 19 nt, Homo sapiens
  misc_RNA (1)...(19): siRNA sense strand
acaaagccugugacuauua

SEQ ID NO: 418783 - RNA, 19 nt, Homo sapiens
  misc_RNA (1)...(19): siRNA sense strand
ccaccacccuguuccaguu

SEQ ID NO: 418784 - RNA, 19 nt, Homo sapiens
  misc_RNA (1)...(19): siRNA sense strand
gagaggacccaaaggagaa

SEQ ID NO: 418785 - RNA, 19 nt, Homo sapiens
  misc_RNA (1)...(19): siRNA sense strand
gguggaagaugcacaggau

SEQ ID NO: 418786 - RNA, 19 nt, Homo sapiens
  misc_RNA (1)...(19): siRNA sense strand
gaagggcgaaguaggagaa

SEQ ID NO: 418787 - RNA, 19 nt, Homo sapiens
  misc_RNA (1)...(19): siRNA sense strand
aaagaaccuugugaaguuu

SEQ ID NO: 418788 - RNA, 19 nt, Homo sapiens
  misc_RNA (1)...(19): siRNA sense strand
gcucugcucuagacuuugu

SEQ ID NO: 418789 - RNA, 19 nt, Homo sapiens
  misc_RNA (1)...(19): siRNA sense strand
ccauagagaaugucuuuga

SEQ ID NO: 418790 - RNA, 19 nt, Homo sapiens
  misc_RNA (1)...(19): siRNA sense strand
gcagggaaccagggccuua

SEQ ID NO: 418791 - RNA, 19 nt, Homo sapiens
  misc_RNA (1)...(19): siRNA sense strand
cgacauggcuuucaucuua

SEQ ID NO: 418792 - RNA, 19 nt, Homo sapiens
  misc_RNA (1)...(19): siRNA sense strand
caaagaaccuugugaaguu

SEQ ID NO: 418793 - RNA, 19 nt, Homo sapiens
  misc_RNA (1)...(19): siRNA sense strand
ggacuuggauuaugaacua

SEQ ID NO: 418794 - RNA, 19 nt, Homo sapiens
  misc_RNA (1)...(19): siRNA sense strand
ucaaugagaugaagaagua

SEQ ID NO: 418795 - RNA, 19 nt, Homo sapiens
  misc_RNA (1)...(19): siRNA sense strand
caacaaagccugugacuau

SEQ ID NO: 418796 - RNA, 19 nt, Homo sapiens
  misc_RNA (1)...(19): siRNA sense strand
ggagagaccucacagacuu

SEQ ID NO: 418797 - RNA, 19 nt, Homo sapiens
  misc_RNA (1)...(19): siRNA sense strand
ggacacaguuuaugaagau

SEQ ID NO: 418798 - RNA, 19 nt, Homo sapiens
  misc_RNA (1)...(19): siRNA sense strand
ggaggagguuggaaagaua

SEQ ID NO: 418799 - RNA, 19 nt, Homo sapiens
  misc_RNA (1)...(19): siRNA sense strand
gauguggucuugaguauug

SEQ ID NO: 418800 - RNA, 19 nt, Homo sapiens
  misc_RNA (1)...(19): siRNA sense strand
gaaagggaauccuggaaga

SEQ ID NO: 418801 - RNA, 19 nt, Homo sapiens
  misc_RNA (1)...(19): siRNA sense strand
gaacggcacucaagguuuc

SEQ ID NO: 418802 - RNA, 19 nt, Homo sapiens
  misc_RNA (1)...(19): siRNA sense strand
gcagggauuucauauuaaa

SEQ ID NO: 418803 - RNA, 19 nt, Homo sapiens
  misc_RNA (1)...(19): siRNA sense strand
gaauugcgguggcucagua

SEQ ID NO: 418804 - RNA, 19 nt, Homo sapiens
  misc_RNA (1)...(19): siRNA sense strand
gaagaaagcagacauugug

SEQ ID NO: 418805 - RNA, 19 nt, Homo sapiens
  misc_RNA (1)...(19): siRNA sense strand
uugcagggauuucauauua

SEQ ID NO: 418806 - RNA, 19 nt, Homo sapiens
  misc_RNA (1)...(19): siRNA sense strand
gaacuagccuuugcuuuag

SEQ ID NO: 418807 - RNA, 19 nt, Homo sapiens
  misc_RNA (1)...(19): siRNA sense strand
gcaggaaggugaacaucaa

SEQ ID NO: 418808 - RNA, 19 nt, Homo sapiens
  misc_RNA (1)...(19): siRNA sense strand
gaaagaguuuguccagaga

SEQ ID NO: 418809 - RNA, 19 nt, Homo sapiens
  misc_RNA (1)...(19): siRNA sense strand
gaagacacgccaacacuaa

SEQ ID NO: 418810 - RNA, 19 nt, Homo sapiens
  misc_RNA (1)...(19): siRNA sense strand
gaaggaacuugcagggauu

SEQ ID NO: 418811 - RNA, 19 nt, Homo sapiens
  misc_RNA (1)...(19): siRNA sense strand
gaagagaagcagcauaaug

SEQ ID NO: 418812 - RNA, 19 nt, Homo sapiens
  misc_RNA (1)...(19): siRNA sense strand
ucagagagcuucccaacau

SEQ ID NO: 418813 - RNA, 19 nt, Homo sapiens
  misc_RNA (1)...(19): siRNA sense strand
gaaagaaugugaaaagguu

SEQ ID NO: 418814 - RNA, 19 nt, Homo sapiens
  misc_RNA (1)...(19): siRNA sense strand
caacaaaguggucuacaaa

SEQ ID NO: 418815 - RNA, 19 nt, Homo sapiens
  misc_RNA (1)...(19): siRNA sense strand
gacuuucucuacaagauua

SEQ ID NO: 418816 - RNA, 19 nt, Homo sapiens
  misc_RNA (1)...(19): siRNA sense strand
agaacuagccuuugcuuua

SEQ ID NO: 418817 - RNA, 19 nt, Homo sapiens
  misc_RNA (1)...(19): siRNA sense strand
guacagcgaugaugucaag

SEQ ID NO: 418818 - RNA, 19 nt, Homo sapiens
  misc_RNA (1)...(19): siRNA sense strand
gaacaagggugccgaucag

SEQ ID NO: 418819 - RNA, 19 nt, Homo sapiens
  misc_RNA (1)...(19): siRNA sense strand
caacagaacuagccuuugc

SEQ ID NO: 418820 - RNA, 19 nt, Homo sapiens
  misc_RNA (1)...(19): siRNA sense strand
caacauagaagaaagaauc

SEQ ID NO: 418821 - RNA, 19 nt, Homo sapiens
  misc_RNA (1)...(19): siRNA sense strand
gcucuagacuuuguucgua

SEQ ID NO: 418822 - RNA, 19 nt, Homo sapiens
  misc_RNA (1)...(19): siRNA sense strand
cgacgucuucuucaaauua

SEQ ID NO: 418823 - RNA, 19 nt, Homo sapiens
  misc_RNA (1)...(19): siRNA sense strand
gagauguggucuugaguau

SEQ ID NO: 418824 - RNA, 19 nt, Homo sapiens
  misc_RNA (1)...(19): siRNA sense strand
guaagucccuagaugaaau

SEQ ID NO: 418825 - RNA, 19 nt, Homo sapiens
  misc_RNA (1)...(19): siRNA sense strand
gcuaaugcaucuggaguuu

SEQ ID NO: 418826 - RNA, 19 nt, Homo sapiens
  misc_RNA (1)...(19): siRNA sense strand
gaagaagaaagcagacauu

SEQ ID NO: 418827 - RNA, 19 nt, Homo sapiens
  misc_RNA (1)...(19): siRNA sense strand
uagagaggcugguugacua

SEQ ID NO: 418828 - RNA, 19 nt, Homo sapiens
  misc_RNA (1)...(19): siRNA sense strand
gaaaucggacaggaucuua

SEQ ID NO: 418829 - RNA, 19 nt, Homo sapiens
  misc_RNA (1)...(19): siRNA sense strand
caaagccugugacuauuau

SEQ ID NO: 418830 - RNA, 19 nt, Homo sapiens
  misc_RNA (1)...(19): siRNA sense strand
cgaauaacguuacuucaag

SEQ ID NO: 418831 - RNA, 19 nt, Homo sapiens
  misc_RNA (1)...(19): siRNA sense strand
gaaagcagacauuguguuc

SEQ ID NO: 418832 - RNA, 19 nt, Homo sapiens
  misc_RNA (1)...(19): siRNA sense strand
gggcucugcucuagacuuu

SEQ ID NO: 418833 - RNA, 19 nt, Homo sapiens
  misc_RNA (1)...(19): siRNA sense strand
gaggaaacaucggcacuug

SEQ ID NO: 418834 - RNA, 19 nt, Homo sapiens
  misc_RNA (1)...(19): siRNA sense strand
gaaauaguggacacaguuu

SEQ ID NO: 418835 - RNA, 19 nt, Homo sapiens
  misc_RNA (1)...(19): siRNA sense strand
gaucgaggauggagugcuu

SEQ ID NO: 418836 - RNA, 19 nt, Homo sapiens
  misc_RNA (1)...(19): siRNA sense strand
caaacgacgucuucuucaa

SEQ ID NO: 418837 - RNA, 19 nt, Homo sapiens
  misc_RNA (1)...(19): siRNA sense strand
gaaccugggcuaaauggaa

SEQ ID NO: 418838 - RNA, 19 nt, Homo sapiens
  misc_RNA (1)...(19): siRNA sense strand
cagagaugcucgagaaguu

SEQ ID NO: 418839 - RNA, 19 nt, Homo sapiens
  misc_RNA (1)...(19): siRNA sense strand
gaagaaagaaucaugaacu

SEQ ID NO: 418840 - RNA, 19 nt, Homo sapiens
  misc_RNA (1)...(19): siRNA sense strand
cagagucgcuucccaagau

SEQ ID NO: 418841 - RNA, 19 nt, Homo sapiens
  misc_RNA (1)...(19): siRNA sense strand
caacgaagccggugacuac

SEQ ID NO: 418842 - RNA, 19 nt, Homo sapiens
  misc_RNA (1)...(19): siRNA sense strand
ucacagacuuccuggagaa

SEQ ID NO: 418843 - RNA, 19 nt, Homo sapiens
  misc_RNA (1)...(19): siRNA sense strand
acggagaucuggcugauuu

SEQ ID NO: 418844 - RNA, 19 nt, Homo sapiens
  misc_RNA (1)...(19): siRNA sense strand
gaacagaaucagccagaug

SEQ ID NO: 418845 - RNA, 19 nt, Homo sapiens
  misc_RNA (1)...(19): siRNA sense strand
gcaaugcccuggaguacgu

SEQ ID NO: 418846 - RNA, 19 nt, Homo sapiens
  misc_RNA (1)...(19): siRNA sense strand
ucacagagaugcagaccau

SEQ ID NO: 418847 - RNA, 19 nt, Homo sapiens
  misc_RNA (1)...(19): siRNA sense strand
ucgaugagcucaaugugaa

SEQ ID NO: 418848 - RNA, 19 nt, Homo sapiens
  misc_RNA (1)...(19): siRNA sense strand
acaaagacggccacuguua

SEQ ID NO: 418849 - RNA, 19 nt, Homo sapiens
  misc_RNA (1)...(19): siRNA sense strand
ugacaacauugccgagaaa

SEQ ID NO: 418850 - RNA, 19 nt, Homo sapiens
  misc_RNA (1)...(19): siRNA sense strand
ccaagaggcagauuauuga

SEQ ID NO: 418851 - RNA, 19 nt, Homo sapiens
  misc_RNA (1)...(19): siRNA sense strand
ucuacaagauuaucgauga

SEQ ID NO: 418852 - RNA, 19 nt, Homo sapiens
  misc_RNA (1)...(19): siRNA sense strand
ggagagaggacccaaagga

SEQ ID NO: 418853 - RNA, 19 nt, Homo sapiens
  misc_RNA (1)...(19): siRNA sense strand
ggcgaggguuuauguauga

SEQ ID NO: 418854 - RNA, 19 nt, Homo sapiens
  misc_RNA (1)...(19): siRNA sense strand
ggaccaggcccgaguucua

SEQ ID NO: 418855 - RNA, 19 nt, Homo sapiens
  misc_RNA (1)...(19): siRNA sense strand
caaguaaauguuccgaaua

SEQ ID NO: 418856 - RNA, 19 nt, Homo sapiens
  misc_RNA (1)...(19): siRNA sense strand
cagagaggcugugcucaaa

SEQ ID NO: 418857 - RNA, 19 nt, Homo sapiens
  misc_RNA (1)...(19): siRNA sense strand
ggagaaagaggagauguug

SEQ ID NO: 418858 - RNA, 19 nt, Homo sapiens
  misc_RNA (1)...(19): siRNA sense strand
gguggaggccuuugacuuu

SEQ ID NO: 418859 - RNA, 19 nt, Homo sapiens
  misc_RNA (1)...(19): siRNA sense strand
ggaagacacgccaacacua

SEQ ID NO: 418860 - RNA, 19 nt, Homo sapiens
  misc_RNA (1)...(19): siRNA sense strand
ucaacaaaguggucuacaa

SEQ ID NO: 418861 - RNA, 19 nt, Homo sapiens
  misc_RNA (1)...(19): siRNA sense strand
ggaaguuucaguacaaaga

SEQ ID NO: 418862 - RNA, 19 nt, Homo sapiens
  misc_RNA (1)...(19): siRNA sense strand
ccacaaagacggccacugu

SEQ ID NO: 418863 - RNA, 19 nt, Homo sapiens
  misc_RNA (1)...(19): siRNA sense strand
ggaaacagugugauugguu

SEQ ID NO: 418864 - RNA, 19 nt, Homo sapiens
  misc_RNA (1)...(19): siRNA sense strand
cauagagaaugucuuugaa

SEQ ID NO: 418865 - RNA, 19 nt, Homo sapiens
  misc_RNA (1)...(19): siRNA sense strand
gauaggagaacaaggcauu

SEQ ID NO: 418866 - RNA, 19 nt, Homo sapiens
  misc_RNA (1)...(19): siRNA sense strand
aagaggagauguugggauu

SEQ ID NO: 418867 - RNA, 19 nt, Homo sapiens
  misc_RNA (1)...(19): siRNA sense strand
gacauucuguuccucuuug

SEQ ID NO: 418868 - RNA, 19 nt, Homo sapiens
  misc_RNA (1)...(19): siRNA sense strand
uaaaugcccuugcuguuac

SEQ ID NO: 418869 - RNA, 19 nt, Homo sapiens
  misc_RNA (1)...(19): siRNA sense strand
gauaaaugcccuugcuguu

SEQ ID NO: 418870 - RNA, 19 nt, Homo sapiens
  misc_RNA (1)...(19): siRNA sense strand
ggaaagauagcguccaaca

SEQ ID NO: 418871 - RNA, 19 nt, Homo sapiens
  misc_RNA (1)...(19): siRNA sense strand
cagagagcuucccaacaua

SEQ ID NO: 418872 - RNA, 19 nt, Homo sapiens
  misc_RNA (1)...(19): siRNA sense strand
gaagagggcgucccacagu

SEQ ID NO: 418873 - RNA, 19 nt, Homo sapiens
  misc_RNA (1)...(19): siRNA sense strand
caucaacgcuuugcagauc

SEQ ID NO: 418874 - RNA, 19 nt, Homo sapiens
  misc_RNA (1)...(19): siRNA sense strand
gaaaggagaaagaggagau

SEQ ID NO: 418875 - RNA, 19 nt, Homo sapiens
  misc_RNA (1)...(19): siRNA sense strand
ggugguaagucccuagaug

SEQ ID NO: 418876 - RNA, 19 nt, Homo sapiens
  misc_RNA (1)...(19): siRNA sense strand
acaaguaaauguuccgaau

SEQ ID NO: 418877 - RNA, 19 nt, Homo sapiens
  misc_RNA (1)...(19): siRNA sense strand
gaugcgagauguggucuug

SEQ ID NO: 418878 - RNA, 19 nt, Homo sapiens
  misc_RNA (1)...(19): siRNA sense strand
uccaaagcaucaaagauaa

SEQ ID NO: 418879 - RNA, 19 nt, Homo sapiens
  misc_RNA (1)...(19): siRNA sense strand
gggcgaggguuuauguaug

SEQ ID NO: 418880 - RNA, 19 nt, Homo sapiens
  misc_RNA (1)...(19): siRNA sense strand
ugaagagaaugaagaucaa

SEQ ID NO: 418881 - RNA, 19 nt, Homo sapiens
  misc_RNA (1)...(19): siRNA sense strand
ccacggaaguuucaguaca

SEQ ID NO: 418882 - RNA, 19 nt, Homo sapiens
  misc_RNA (1)...(19): siRNA sense strand
acaaagccugugacuauua

SEQ ID NO: 418883 - RNA, 19 nt, Homo sapiens
  misc_RNA (1)...(19): siRNA sense strand
ccaccacccuguuccaguu

SEQ ID NO: 418884 - RNA, 19 nt, Homo sapiens
  misc_RNA (1)...(19): siRNA sense strand
gagaggacccaaaggagaa

SEQ ID NO: 418885 - RNA, 19 nt, Homo sapiens
  misc_RNA (1)...(19): siRNA sense strand
gguggaagaugcacaggau

SEQ ID NO: 418886 - RNA, 19 nt, Homo sapiens
  misc_RNA (1)...(19): siRNA sense strand
gaagggcgaaguaggagaa

SEQ ID NO: 418887 - RNA, 19 nt, Homo sapiens
  misc_RNA (1)...(19): siRNA sense strand
aaagaaccuugugaaguuu

SEQ ID NO: 418888 - RNA, 19 nt, Homo sapiens
  misc_RNA (1)...(19): siRNA sense strand
gcucugcucuagacuuugu

SEQ ID NO: 418889 - RNA, 19 nt, Homo sapiens
  misc_RNA (1)...(19): siRNA sense strand
ccauagagaaugucuuuga

SEQ ID NO: 418890 - RNA, 19 nt, Homo sapiens
  misc_RNA (1)...(19): siRNA sense strand
gcagggaaccagggccuua

SEQ ID NO: 418891 - RNA, 19 nt, Homo sapiens
  misc_RNA (1)...(19): siRNA sense strand
cgacauggcuuucaucuua

SEQ ID NO: 418892 - RNA, 19 nt, Homo sapiens
  misc_RNA (1)...(19): siRNA sense strand
caaagaaccuugugaaguu

SEQ ID NO: 418893 - RNA, 19 nt, Homo sapiens
  misc_RNA (1)...(19): siRNA sense strand
ggacuuggauuaugaacua

SEQ ID NO: 418894 - RNA, 19 nt, Homo sapiens
  misc_RNA (1)...(19): siRNA sense strand
ucaaugagaugaagaagua

SEQ ID NO: 418895 - RNA, 19 nt, Homo sapiens
  misc_RNA (1)...(19): siRNA sense strand
caacaaagccugugacuau

SEQ ID NO: 418896 - RNA, 19 nt, Homo sapiens
  misc_RNA (1)...(19): siRNA sense strand
ggagagaccucacagacuu

SEQ ID NO: 418897 - RNA, 19 nt, Homo sapiens
  misc_RNA (1)...(19): siRNA sense strand
ggacacaguuuaugaagau

SEQ ID NO: 418898 - RNA, 19 nt, Homo sapiens
  misc_RNA (1)...(19): siRNA sense strand
ggaggagguuggaaagaua

SEQ ID NO: 418899 - RNA, 19 nt, Homo sapiens
  misc_RNA (1)...(19): siRNA sense strand
gauguggucuugaguauug

SEQ ID NO: 418900 - RNA, 19 nt, Homo sapiens
  misc_RNA (1)...(19): siRNA sense strand
gaaagggaauccuggaaga

SEQ ID NO: 418901 - RNA, 19 nt, Homo sapiens
  misc_RNA (1)...(19): siRNA sense strand
gaacggcacucaagguuuc

SEQ ID NO: 418902 - RNA, 19 nt, Homo sapiens
  misc_RNA (1)...(19): siRNA sense strand
gcagggauuucauauuaaa

SEQ ID NO: 418903 - RNA, 19 nt, Homo sapiens
  misc_RNA (1)...(19): siRNA sense strand
gaauugcgguggcucagua

SEQ ID NO: 418904 - RNA, 19 nt, Homo sapiens
  misc_RNA (1)...(19): siRNA sense strand
gaagaaagcagacauugug

SEQ ID NO: 418905 - RNA, 19 nt, Homo sapiens
  misc_RNA (1)...(19): siRNA sense strand
uugcagggauuucauauua

SEQ ID NO: 418906 - RNA, 19 nt, Homo sapiens
  misc_RNA (1)...(19): siRNA sense strand
gaacuagccuuugcuuuag

SEQ ID NO: 418907 - RNA, 19 nt, Homo sapiens
  misc_RNA (1)...(19): siRNA sense strand
gcaggaaggugaacaucaa

SEQ ID NO: 418908 - RNA, 19 nt, Homo sapiens
  misc_RNA (1)...(19): siRNA sense strand
gaaagaguuuguccagaga

SEQ ID NO: 418909 - RNA, 19 nt, Homo sapiens
  misc_RNA (1)...(19): siRNA sense strand
gaagacacgccaacacuaa

SEQ ID NO: 418910 - RNA, 19 nt, Homo sapiens
  misc_RNA (1)...(19): siRNA sense strand
gaaggaacuugcagggauu

SEQ ID NO: 418911 - RNA, 19 nt, Homo sapiens
  misc_RNA (1)...(19): siRNA sense strand
gaagagaagcagcauaaug

SEQ ID NO: 418912 - RNA, 19 nt, Homo sapiens
  misc_RNA (1)...(19): siRNA sense strand
ucagagagcuucccaacau

SEQ ID NO: 418913 - RNA, 19 nt, Homo sapiens
  misc_RNA (1)...(19): siRNA sense strand
gaaagaaugugaaaagguu

SEQ ID NO: 418914 - RNA, 19 nt, Homo sapiens
  misc_RNA (1)...(19): siRNA sense strand
caacaaaguggucuacaaa

SEQ ID NO: 418915 - RNA, 19 nt, Homo sapiens
  misc_RNA (1)...(19): siRNA sense strand
gacuuucucuacaagauua
